United States Patent Application Publication US 2008/0113351 A1 - sequence listing, part 22

SEQ ID NO: 530936 - DNA, 19 bp, Mus musculus
  siRNA target sequence for 2310003F20Rik (NM_019994.3,3984-4002).
cacctcagtttttttcact

SEQ ID NO: 530937 - DNA, 19 bp, Mus musculus
  siRNA target sequence for 2310003F20Rik (NM_019994.3,4013-4031).
ggggccacgatgcttatta

SEQ ID NO: 530938 - DNA, 19 bp, Mus musculus
  siRNA target sequence for 2310003F20Rik (NM_019994.3,4014-4032).
gggccacgatgcttattat

SEQ ID NO: 530939 - DNA, 19 bp, Mus musculus
  siRNA target sequence for 2310003F20Rik (NM_019994.3,4017-4035).
ccacgatgcttattatgga

SEQ ID NO: 530940 - DNA, 19 bp, Mus musculus
  siRNA target sequence for 2310003F20Rik (NM_019994.3,4018-4036).
cacgatgcttattatggat

SEQ ID NO: 530941 - DNA, 19 bp, Mus musculus
  siRNA target sequence for 2310003F20Rik (NM_019994.3,4061-4079).
gcttcttcggcttttctta

SEQ ID NO: 530942 - DNA, 19 bp, Mus musculus
  siRNA target sequence for 2310003F20Rik (NM_019994.3,4062-4080).
cttcttcggcttttcttaa

SEQ ID NO: 530943 - DNA, 19 bp, Mus musculus
  siRNA target sequence for 2310003F20Rik (NM_019994.3,4130-4148).
cccaacttatattgtgaat

SEQ ID NO: 530944 - DNA, 19 bp, Mus musculus
  siRNA target sequence for 2310003F20Rik (NM_019994.3,4175-4193).
gatattgctgtgtctcaat

SEQ ID NO: 530945 - DNA, 19 bp, Mus musculus
  siRNA target sequence for 2310003F20Rik (NM_019994.3,4186-4204).
gtctcaatttacagatgtt

SEQ ID NO: 530946 - DNA, 19 bp, Mus musculus
  siRNA target sequence for 2310003F20Rik (NM_019994.3,4202-4220).
gttaaggaacttataatta

SEQ ID NO: 530947 - DNA, 19 bp, Mus musculus
  siRNA target sequence for 2310003F20Rik (NM_019994.3,4274-4292).
gcactttgcagtttaggta

SEQ ID NO: 530948 - DNA, 19 bp, Mus musculus
  siRNA target sequence for 2310003F20Rik (NM_019994.3,4275-4293).
cactttgcagtttaggtat

SEQ ID NO: 530949 - DNA, 19 bp, Mus musculus
  siRNA target sequence for 2310003F20Rik (NM_019994.3,4282-4300).
cagtttaggtatttggatt

SEQ ID NO: 530950 - DNA, 19 bp, Mus musculus
  siRNA target sequence for 2310003F20Rik (NM_019994.3,4296-4314).
ggatttgtgaagaattagt

SEQ ID NO: 530951 - DNA, 19 bp, Mus musculus
  siRNA target sequence for 2310003F20Rik (NM_019994.3,4323-4341).
ctcatcatcctcaaattaa

SEQ ID NO: 530952 - DNA, 19 bp, Mus musculus
  siRNA target sequence for 2310003F20Rik (NM_019994.3,4343-4361).
gaagcactgaatgtaattt

SEQ ID NO: 530953 - DNA, 19 bp, Mus musculus
  siRNA target sequence for 2310003F20Rik (NM_019994.3,4404-4422).
cctgtaacatgcttcacat

SEQ ID NO: 530954 - DNA, 19 bp, Mus musculus
  siRNA target sequence for 2310003F20Rik (NM_019994.3,4465-4483).
gtctcccctgaaaattatt

SEQ ID NO: 530955 - DNA, 19 bp, Mus musculus
  siRNA target sequence for 2310003F20Rik (NM_019994.3,4467-4485).
ctcccctgaaaattattca

SEQ ID NO: 530956 - DNA, 19 bp, Mus musculus
  siRNA target sequence for 2310003F20Rik (NM_019994.3,4497-4515).
caactatcacccacctttt

SEQ ID NO: 530957 - DNA, 19 bp, Mus musculus
  siRNA target sequence for 2310003F20Rik (NM_019994.3,4507-4525).
ccaccttttgccaagtaca

SEQ ID NO: 530958 - DNA, 19 bp, Mus musculus
  siRNA target sequence for 2310003F20Rik (NM_019994.3,4510-4528).
ccttttgccaagtacagaa

SEQ ID NO: 530959 - DNA, 19 bp, Mus musculus
  siRNA target sequence for 2310003F20Rik (NM_019994.3,4552-4570).
gaggttggttgtctcatta

SEQ ID NO: 530960 - DNA, 19 bp, Mus musculus
  siRNA target sequence for 2310003F20Rik (NM_019994.3,4554-4572).
ggttggttgtctcattact

SEQ ID NO: 530961 - DNA, 19 bp, Mus musculus
  siRNA target sequence for 2310003F20Rik (NM_019994.3,4555-4573).
gttggttgtctcattactt

SEQ ID NO: 530962 - DNA, 19 bp, Mus musculus
  siRNA target sequence for 2310003F20Rik (NM_019994.3,4558-4576).
ggttgtctcattacttctt

SEQ ID NO: 530963 - DNA, 19 bp, Mus musculus
  siRNA target sequence for 2310003F20Rik (NM_019994.3,4590-4608).
ggatcatggccttaccttt

SEQ ID NO: 530964 - DNA, 19 bp, Mus musculus
  siRNA target sequence for 2310003F20Rik (NM_019994.3,4659-4677).
ccgaaaagtctgttctcaa

SEQ ID NO: 530965 - DNA, 19 bp, Mus musculus
  siRNA target sequence for 2310003F20Rik (NM_019994.3,4668-4686).
ctgttctcaactgcattta

SEQ ID NO: 530966 - DNA, 19 bp, Mus musculus
  siRNA target sequence for 2310003F20Rik (NM_019994.3,4670-4688).
gttctcaactgcatttata

SEQ ID NO: 530967 - DNA, 19 bp, Mus musculus
  siRNA target sequence for 2310003F20Rik (NM_019994.3,4678-4696).
ctgcatttataaggtatta

SEQ ID NO: 530968 - DNA, 19 bp, Mus musculus
  siRNA target sequence for 2310003F20Rik (NM_019994.3,4706-4724).
gtctatggagcgcaaagtt

SEQ ID NO: 530969 - DNA, 19 bp, Mus musculus
  siRNA target sequence for 2310003F20Rik (NM_019994.3,4708-4726).
ctatggagcgcaaagtttt

SEQ ID NO: 530970 - DNA, 19 bp, Mus musculus
  siRNA target sequence for 2310003F20Rik (NM_019994.3,4712-4730).
ggagcgcaaagttttagca

SEQ ID NO: 530971 - DNA, 19 bp, Mus musculus
  siRNA target sequence for 2310003F20Rik (NM_019994.3,4713-4731).
gagcgcaaagttttagcaa

SEQ ID NO: 530972 - DNA, 19 bp, Mus musculus
  siRNA target sequence for 2310003F20Rik (NM_019994.3,4784-4802).
ccgtttatgcatttggaaa

SEQ ID NO: 530973 - DNA, 19 bp, Mus musculus
  siRNA target sequence for 2310003F20Rik (NM_019994.3,4835-4853).
gattcagagcggtcttcta

SEQ ID NO: 530974 - DNA, 19 bp, Mus musculus
  siRNA target sequence for 2310003F20Rik (NM_019994.3,4910-4928).
gcagcccgtactgttatta

SEQ ID NO: 530975 - DNA, 19 bp, Mus musculus
  siRNA target sequence for 2310003F20Rik (NM_019994.3,4929-4947).
cccatctggtgaatcactt

SEQ ID NO: 530976 - DNA, 19 bp, Mus musculus
  siRNA target sequence for 2310003F20Rik (NM_019994.3,4943-4961).
cacttgggccattatccaa

SEQ ID NO: 530977 - DNA, 19 bp, Mus musculus
  siRNA target sequence for 2310003F20Rik (NM_019994.3,4970-4988).
ggtcctgctatgctaacaa

SEQ ID NO: 530978 - DNA, 19 bp, Mus musculus
  siRNA target sequence for 2310003F20Rik (NM_019994.3,4986-5004).
caagtcaggtgtgtgaaaa

SEQ ID NO: 530979 - DNA, 19 bp, Mus musculus
  siRNA target sequence for 2310003F20Rik (NM_019994.3,5058-5076).
gtccaaacatccagttctt

SEQ ID NO: 530980 - DNA, 19 bp, Mus musculus
  siRNA target sequence for 2310003F20Rik (NM_019994.3,5080-5098).
gctgaataatacaacctta

SEQ ID NO: 530981 - DNA, 19 bp, Mus musculus
  siRNA target sequence for 2310003F20Rik (NM_019994.3,5101-5119).
gtcctgtatccagataaga

SEQ ID NO: 530982 - DNA, 19 bp, Mus musculus
  siRNA target sequence for 2310003F20Rik (NM_019994.3,5168-5186).
gccaactcaaatgttagaa

SEQ ID NO: 530983 - DNA, 19 bp, Mus musculus
  siRNA target sequence for 2310003F20Rik (NM_019994.3,5220-5238).
gggattctgccatactgta

SEQ ID NO: 530984 - DNA, 19 bp, Mus musculus
  siRNA target sequence for 2310003F20Rik (NM_019994.3,5236-5254).
gtatggaccacccattgta

SEQ ID NO: 530985 - DNA, 19 bp, Mus musculus
  siRNA target sequence for 2310003F20Rik (NM_019994.3,5265-5283).
ctgaacctacatctttcat

SEQ ID NO: 530986 - DNA, 19 bp, Mus musculus
  siRNA target sequence for 2310003F20Rik (NM_019994.3,5317-5335).
gcctcctacatctaacgaa

SEQ ID NO: 530987 - DNA, 19 bp, Mus musculus
  siRNA target sequence for 2310003F20Rik (NM_019994.3,5318-5336).
cctcctacatctaacgaat

SEQ ID NO: 530988 - DNA, 19 bp, Mus musculus
  siRNA target sequence for 2310003F20Rik (NM_019994.3,5322-5340).
ctacatctaacgaatgctt

SEQ ID NO: 530989 - DNA, 19 bp, Mus musculus
  siRNA target sequence for 2310003F20Rik (NM_019994.3,5328-5346).
ctaacgaatgcttagaaga

SEQ ID NO: 530990 - DNA, 19 bp, Mus musculus
  siRNA target sequence for 2310003F20Rik (NM_019994.3,5443-5461).
cgagctcctgcagtattta

SEQ ID NO: 530991 - DNA, 19 bp, Mus musculus
  siRNA target sequence for 2310003F20Rik (NM_019994.3,5453-5471).
cagtatttaggcactacaa

SEQ ID NO: 530992 - DNA, 19 bp, Mus musculus
  siRNA target sequence for 2310003F20Rik (NM_019994.3,5455-5473).
gtatttaggcactacaagt

SEQ ID NO: 530993 - DNA, 19 bp, Mus musculus
  siRNA target sequence for 2310003F20Rik (NM_019994.3,5567-5585).
gctatccttaagcaataca

SEQ ID NO: 530994 - DNA, 19 bp, Mus musculus
  siRNA target sequence for 2310003F20Rik (NM_019994.3,5665-5683).
gaaacctcagtcagctttt

SEQ ID NO: 530995 - DNA, 19 bp, Mus musculus
  siRNA target sequence for 2310003F20Rik (NM_019994.3,5692-5710).
cagattgcttcttagtata

SEQ ID NO: 530996 - DNA, 19 bp, Mus musculus
  siRNA target sequence for 2310003F20Rik (NM_019994.3,5765-5783).
gaacttaggaacttggatt

SEQ ID NO: 530997 - DNA, 19 bp, Mus musculus
  siRNA target sequence for 2310003F20Rik (NM_019994.3,5793-5811).
gccgagagacacacaagat

SEQ ID NO: 530998 - DNA, 19 bp, Mus musculus
  siRNA target sequence for 2310003F20Rik (NM_019994.3,5794-5812).
ccgagagacacacaagatt

SEQ ID NO: 530999 - DNA, 19 bp, Mus musculus
  siRNA target sequence for 2310003F20Rik (NM_019994.3,5909-5927).
ggttgggaggtaaacctta

SEQ ID NO: 531000 - DNA, 19 bp, Mus musculus
  siRNA target sequence for 2310003F20Rik (NM_019994.3,6001-6019).
ctcgacagtagaagtaata

SEQ ID NO: 531001 - DNA, 19 bp, Mus musculus
  siRNA target sequence for 2310003F20Rik (NM_019994.3,6003-6021).
cgacagtagaagtaatatt

SEQ ID NO: 531002 - DNA, 19 bp, Mus musculus
  siRNA target sequence for 2310003F20Rik (NM_019994.3,6006-6024).
cagtagaagtaatatttca

SEQ ID NO: 531003 - DNA, 19 bp, Mus musculus
  siRNA target sequence for 2310003F20Rik (NM_019994.3,6011-6029).
gaagtaatatttcatgtat

SEQ ID NO: 531004 - DNA, 19 bp, Mus musculus
  siRNA target sequence for 2310003F20Rik (NM_019994.3,6014-6032).
gtaatatttcatgtatcta

SEQ ID NO: 531005 - DNA, 19 bp, Mus musculus
  siRNA target sequence for 2310003F20Rik (NM_019994.3,6103-6121).
cattgtttggtcagaacat

SEQ ID NO: 531006 - DNA, 19 bp, Mus musculus
  siRNA target sequence for 2310003F20Rik (NM_019994.3,6107-6125).
gtttggtcagaacatacta

SEQ ID NO: 531007 - DNA, 19 bp, Mus musculus
  siRNA target sequence for 2310003F20Rik (NM_019994.3,6130-6148).
ctacaggagaggaattatt

SEQ ID NO: 531008 - DNA, 19 bp, Mus musculus
  siRNA target sequence for 2310003F20Rik (NM_019994.3,6161-6179).
ggtgatgtcctcattgtaa

SEQ ID NO: 531009 - DNA, 19 bp, Mus musculus
  siRNA target sequence for 2310003F20Rik (NM_019994.3,6162-6180).
gtgatgtcctcattgtaat

SEQ ID NO: 531010 - DNA, 19 bp, Mus musculus
  siRNA target sequence for 2310003F20Rik (NM_019994.3,6164-6182).
gatgtcctcattgtaatat

SEQ ID NO: 531011 - DNA, 19 bp, Mus musculus
  siRNA target sequence for 2310003F20Rik (NM_019994.3,6211-6229).
ccagatcatgaaaaaacca

SEQ ID NO: 531012 - DNA, 19 bp, Mus musculus
  siRNA target sequence for 2310003F20Rik (NM_019994.3,6260-6278).
ggtgctattgtgaatggaa

SEQ ID NO: 531013 - DNA, 19 bp, Mus musculus
  siRNA target sequence for 2310003F20Rik (NM_019994.3,6261-6279).
gtgctattgtgaatggaaa

SEQ ID NO: 531014 - DNA, 19 bp, Mus musculus
  siRNA target sequence for 2310003F20Rik (NM_019994.3,6296-6314).
gttcgatccacagcaataa

SEQ ID NO: 531015 - DNA, 19 bp, Mus musculus
  siRNA target sequence for 2310003F20Rik (NM_019994.3,6317-6335).
gctagccgtgctctgaaat

SEQ ID NO: 531016 - DNA, 19 bp, Mus musculus
  siRNA target sequence for 2310003F20Rik (NM_019994.3,6375-6393).
cacggtacctgcagacaat

SEQ ID NO: 531017 - DNA, 19 bp, Mus musculus
  siRNA target sequence for 2310003F20Rik (NM_019994.3,6378-6396).
ggtacctgcagacaattgt

SEQ ID NO: 531018 - DNA, 19 bp, Mus musculus
  siRNA target sequence for 2310003F20Rik (NM_019994.3,6404-6422).
catttagagccaacaacat

SEQ ID NO: 531019 - DNA, 19 bp, Mus musculus
  siRNA target sequence for 2310003F20Rik (NM_019994.3,6452-6470).
ccagctccctaccatcatt

SEQ ID NO: 531020 - DNA, 19 bp, Mus musculus
  siRNA target sequence for 2310003F20Rik (NM_019994.3,6453-6471).
cagctccctaccatcattt

SEQ ID NO: 531021 - DNA, 19 bp, Mus musculus
  siRNA target sequence for 2310008J22Rik (NM_027982.1,345-363).
gctatgccgaggtcatcaa

SEQ ID NO: 531022 - DNA, 19 bp, Mus musculus
  siRNA target sequence for 2310008J22Rik (NM_027982.1,346-364).
ctatgccgaggtcatcaat

SEQ ID NO: 531023 - DNA, 19 bp, Mus musculus
  siRNA target sequence for 2310008J22Rik (NM_027982.1,396-414).
cttgctgcgaggttgtgta

SEQ ID NO: 531024 - DNA, 19 bp, Mus musculus
  siRNA target sequence for 2310008J22Rik (NM_027982.1,399-417).
gctgcgaggttgtgtatgt

SEQ ID NO: 531025 - DNA, 19 bp, Mus musculus
  siRNA target sequence for 2310008J22Rik (NM_027982.1,456-474).
gggagcctagccataacca

SEQ ID NO: 531026 - DNA, 19 bp, Mus musculus
  siRNA target sequence for 2310008J22Rik (NM_027982.1,580-598).
ggatctagtagaaatactt

SEQ ID NO: 531027 - DNA, 19 bp, Mus musculus
  siRNA target sequence for 2310008J22Rik (NM_027982.1,581-599).
gatctagtagaaatactta

SEQ ID NO: 531028 - DNA, 19 bp, Mus musculus
  siRNA target sequence for 2310008J22Rik (NM_027982.1,1072-1090).
gactggctgggcctacaaa

SEQ ID NO: 531029 - DNA, 19 bp, Mus musculus
  siRNA target sequence for 2310008J22Rik (NM_027982.1,1076-1094).
ggctgggcctacaaaaaga

SEQ ID NO: 531030 - DNA, 19 bp, Mus musculus
  siRNA target sequence for 2310008J22Rik (NM_027982.1,1077-1095).
gctgggcctacaaaaagat

SEQ ID NO: 531031 - DNA, 19 bp, Mus musculus
  siRNA target sequence for 2310008J22Rik (NM_027982.1,1185-1203).
gagaccacaaccttaaggt

SEQ ID NO: 531032 - DNA, 19 bp, Mus musculus
  siRNA target sequence for 2310008J22Rik (NM_027982.1,1464-1482).
gctggcgtctcccaaacaa

SEQ ID NO: 531033 - DNA, 19 bp, Mus musculus
  siRNA target sequence for 2410004N11Rik (NM_025888.2,200-218).
gagccacgagcccttcatt

SEQ ID NO: 531034 - DNA, 19 bp, Mus musculus
  siRNA target sequence for 2410004N11Rik (NM_025888.2,202-220).
gccacgagcccttcattgt

SEQ ID NO: 531035 - DNA, 19 bp, Mus musculus
  siRNA target sequence for 2410004N11Rik (NM_025888.2,215-233).
cattgtgccagagagattt

SEQ ID NO: 531036 - DNA, 19 bp, Mus musculus
  siRNA target sequence for 2410004N11Rik (NM_025888.2,219-237).
gtgccagagagatttggaa

SEQ ID NO: 531037 - DNA, 19 bp, Mus musculus
  siRNA target sequence for 2410004N11Rik (NM_025888.2,234-252).
ggaaacagcggcttaggtt

SEQ ID NO: 531038 - DNA, 19 bp, Mus musculus
  siRNA target sequence for 2410004N11Rik (NM_025888.2,235-253).
gaaacagcggcttaggttt

SEQ ID NO: 531039 - DNA, 19 bp, Mus musculus
  siRNA target sequence for 2410004N11Rik (NM_025888.2,239-257).
cagcggcttaggttttgga

SEQ ID NO: 531040 - DNA, 19 bp, Mus musculus
  siRNA target sequence for 2410004N11Rik (NM_025888.2,459-477).
cgcacagtcctggattatt

SEQ ID NO: 531041 - DNA, 19 bp, Mus musculus
  siRNA target sequence for 2410004N11Rik (NM_025888.2,531-549).
gacacgtgtgactatctct

SEQ ID NO: 531042 - DNA, 19 bp, Mus musculus
  siRNA target sequence for 2410004N11Rik (NM_025888.2,695-713).
cgagcgagagtgtcacatt

SEQ ID NO: 531043 - DNA, 19 bp, Mus musculus
  siRNA target sequence for 2410004N11Rik (NM_025888.2,763-781).
cacccatgggggaagagta

SEQ ID NO: 531044 - DNA, 19 bp, Mus musculus
  siRNA target sequence for 2410004N11Rik (NM_025888.2,806-824).
gctctacagattcttcaaa

SEQ ID NO: 531045 - DNA, 19 bp, Mus musculus
  siRNA target sequence for 2410004N11Rik (NM_025888.2,807-825).
ctctacagattcttcaaat

SEQ ID NO: 531046 - DNA, 19 bp, Mus musculus
  siRNA target sequence for 2410004N11Rik (NM_025888.2,809-827).
ctacagattcttcaaatat

SEQ ID NO: 531047 - DNA, 19 bp, Mus musculus
  siRNA target sequence for 2410004N11Rik (NM_025888.2,821-839).
caaatatatcgagaataga

SEQ ID NO: 531048 - DNA, 19 bp, Mus musculus
  siRNA target sequence for 2410004N11Rik (NM_025888.2,878-896).
gaacatccgcattggaatt

SEQ ID NO: 531049 - DNA, 19 bp, Mus musculus
  siRNA target sequence for 2410004N11Rik (NM_025888.2,881-899).
catccgcattggaattgaa

SEQ ID NO: 531050 - DNA, 19 bp, Mus musculus
  siRNA target sequence for 2410004N11Rik (NM_025888.2,945-963).
cggtctgaagtcatctaca

SEQ ID NO: 531051 - DNA, 19 bp, Mus musculus
  siRNA target sequence for 2410004N11Rik (NM_025888.2,1035-1053).
cagtgcgttcgcagcaaat

SEQ ID NO: 531052 - DNA, 19 bp, Mus musculus
  siRNA target sequence for 2410004N11Rik (NM_025888.2,1092-1110).
gaagaccaggagataataa

SEQ ID NO: 531053 - DNA, 19 bp, Mus musculus
  siRNA target sequence for 2410004N11Rik (NM_025888.2,1164-1182).
cagatggctccgaatgact

SEQ ID NO: 531054 - DNA, 19 bp, Mus musculus
  siRNA target sequence for 2410004N11Rik (NM_025888.2,1166-1184).
gatggctccgaatgacttt

SEQ ID NO: 531055 - DNA, 19 bp, Mus musculus
  siRNA target sequence for 2410004N11Rik (NM_025888.2,1171-1189).
ctccgaatgactttcaaga

SEQ ID NO: 531056 - DNA, 19 bp, Mus musculus
  siRNA target sequence for 2410081M15Rik (NM_028603.1,434-452).
gcgcaggcaagatgtgttt

SEQ ID NO: 531057 - DNA, 19 bp, Mus musculus
  siRNA target sequence for 2410081M15Rik (NM_028603.1,493-511).
cgcatcggaatgtcttgtt

SEQ ID NO: 531058 - DNA, 19 bp, Mus musculus
  siRNA target sequence for 2410081M15Rik (NM_028603.1,494-512).
gcatcggaatgtcttgttt

SEQ ID NO: 531059 - DNA, 19 bp, Mus musculus
  siRNA target sequence for 2410081M15Rik (NM_028603.1,498-516).
cggaatgtcttgtttgcaa

SEQ ID NO: 531060 - DNA, 19 bp, Mus musculus
  siRNA target sequence for 2410081M15Rik (NM_028603.1,513-531).
gcaagcagcggctacttta

SEQ ID NO: 531061 - DNA, 19 bp, Mus musculus
  siRNA target sequence for 2410081M15Rik (NM_028603.1,514-532).
caagcagcggctactttaa

SEQ ID NO: 531062 - DNA, 19 bp, Mus musculus
  siRNA target sequence for 2410081M15Rik (NM_028603.1,520-538).
gcggctactttaaaatgct

SEQ ID NO: 531063 - DNA, 19 bp, Mus musculus
  siRNA target sequence for 2410081M15Rik (NM_028603.1,592-610).
ccttctcccccgatacctt

SEQ ID NO: 531064 - DNA, 19 bp, Mus musculus
  siRNA target sequence for 2410081M15Rik (NM_028603.1,630-648).
gtatactccggcaaactct

SEQ ID NO: 531065 - DNA, 19 bp, Mus musculus
  siRNA target sequence for 2410081M15Rik (NM_028603.1,647-665).
ctctcttacgggacagaat

SEQ ID NO: 531066 - DNA, 19 bp, Mus musculus
  siRNA target sequence for 2410081M15Rik (NM_028603.1,651-669).
cttacgggacagaatgtta

SEQ ID NO: 531067 - DNA, 19 bp, Mus musculus
  siRNA target sequence for 2410081M15Rik (NM_028603.1,655-673).
cgggacagaatgttataga

SEQ ID NO: 531068 - DNA, 19 bp, Mus musculus
  siRNA target sequence for 2410081M15Rik (NM_028603.1,701-719).
gatgactgacgtcattagt

SEQ ID NO: 531069 - DNA, 19 bp, Mus musculus
  siRNA target sequence for 2410081M15Rik (NM_028603.1,713-731).
cattagtgtgtgtaagact

SEQ ID NO: 531070 - DNA, 19 bp, Mus musculus
  siRNA target sequence for 2410081M15Rik (NM_028603.1,765-783).
gagaaagatcgctacttca

SEQ ID NO: 531071 - DNA, 19 bp, Mus musculus
  siRNA target sequence for 2410081M15Rik (NM_028603.1,816-834).
gtagagcgtcccccttttt

SEQ ID NO: 531072 - DNA, 19 bp, Mus musculus
  siRNA target sequence for 2410081M15Rik (NM_028603.1,822-840).
cgtccccctttttatagta

SEQ ID NO: 531073 - DNA, 19 bp, Mus musculus
  siRNA target sequence for 2410081M15Rik (NM_028603.1,894-912).
ggaaagccgtggaacaagt

SEQ ID NO: 531074 - DNA, 19 bp, Mus musculus
  siRNA target sequence for 2410081M15Rik (NM_028603.1,895-913).
gaaagccgtggaacaagta

SEQ ID NO: 531075 - DNA, 19 bp, Mus musculus
  siRNA target sequence for 2410081M15Rik (NM_028603.1,1065-1083).
gactccggcaaccatgttt

SEQ ID NO: 531076 - DNA, 19 bp, Mus musculus
  siRNA target sequence for 2410081M15Rik (NM_028603.1,1193-1211).
gaccaggcttcggttcaaa

SEQ ID NO: 531077 - DNA, 19 bp, Mus musculus
  siRNA target sequence for 2410081M15Rik (NM_028603.1,1339-1357).
gtagccatttccgaactat

SEQ ID NO: 531078 - DNA, 19 bp, Mus musculus
  siRNA target sequence for 2410081M15Rik (NM_028603.1,1571-1589).
ggaagagaatagatcctat

SEQ ID NO: 531079 - DNA, 19 bp, Mus musculus
  siRNA target sequence for 2410081M15Rik (NM_028603.1,1612-1630).
ctgccgatctggtcataca

SEQ ID NO: 531080 - DNA, 19 bp, Mus musculus
  siRNA target sequence for 2610318I18Rik (NM_145479.2,823-841).
ctagctgcatcgtgtgatt

SEQ ID NO: 531081 - DNA, 19 bp, Mus musculus
  siRNA target sequence for 2610318I18Rik (NM_145479.2,826-844).
gctgcatcgtgtgattatt

SEQ ID NO: 531082 - DNA, 19 bp, Mus musculus
  siRNA target sequence for 2610318I18Rik (NM_145479.2,827-845).
ctgcatcgtgtgattattt

SEQ ID NO: 531083 - DNA, 19 bp, Mus musculus
  siRNA target sequence for 2610318I18Rik (NM_145479.2,900-918).
ccacggtgtgtcttacaat

SEQ ID NO: 531084 - DNA, 19 bp, Mus musculus
  siRNA target sequence for 2610318I18Rik (NM_145479.2,928-946).
caaatcctgcacttcatat

SEQ ID NO: 531085 - DNA, 19 bp, Mus musculus
  siRNA target sequence for 2610318I18Rik (NM_145479.2,933-951).
cctgcacttcatatacact

SEQ ID NO: 531086 - DNA, 19 bp, Mus musculus
  siRNA target sequence for 2610318I18Rik (NM_145479.2,934-952).
ctgcacttcatatacactt

SEQ ID NO: 531087 - DNA, 19 bp, Mus musculus
  siRNA target sequence for 2610318I18Rik (NM_145479.2,1058-1076).
gggtagatgaggagaatat

SEQ ID NO: 531088 - DNA, 19 bp, Mus musculus
  siRNA target sequence for 2610318I18Rik (NM_145479.2,1097-1115).
cagacctctttgacttgaa

SEQ ID NO: 531089 - DNA, 19 bp, Mus musculus
  siRNA target sequence for 2610318I18Rik (NM_145479.2,1120-1138).
ctgacccaacagctagata

SEQ ID NO: 531090 - DNA, 19 bp, Mus musculus
  siRNA target sequence for 2610318I18Rik (NM_145479.2,1124-1142).
cccaacagctagataccta

SEQ ID NO: 531091 - DNA, 19 bp, Mus musculus
  siRNA target sequence for 2610318I18Rik (NM_145479.2,1525-1543).
ggctttgggggtattcact

SEQ ID NO: 531092 - DNA, 19 bp, Mus musculus
  siRNA target sequence for 2610318I18Rik (NM_145479.2,1540-1558).
cactccacaccgtctacaa

SEQ ID NO: 531093 - DNA, 19 bp, Mus musculus
  siRNA target sequence for 2610318I18Rik (NM_145479.2,1649-1667).
gcattgcagtgctcaacaa

SEQ ID NO: 531094 - DNA, 19 bp, Mus musculus
  siRNA target sequence for 2610318I18Rik (NM_145479.2,1662-1680).
caacaacttcgtgtactta

SEQ ID NO: 531095 - DNA, 19 bp, Mus musculus
  siRNA target sequence for 2610318I18Rik (NM_145479.2,1665-1683).
caacttcgtgtacttaatt

SEQ ID NO: 531096 - DNA, 19 bp, Mus musculus
  siRNA target sequence for 2610318I18Rik (NM_145479.2,1770-1788).
gtccttgcagcaagaacat

SEQ ID NO: 531097 - DNA, 19 bp, Mus musculus
  siRNA target sequence for 2610318I18Rik (NM_145479.2,1807-1825).
gtagtgggcaagtacatct

SEQ ID NO: 531098 - DNA, 19 bp, Mus musculus
  siRNA target sequence for 2610318I18Rik (NM_145479.2,1838-1856).
gccgtgactaccacaatga

SEQ ID NO: 531099 - DNA, 19 bp, Mus musculus
  siRNA target sequence for 2610318I18Rik (NM_145479.2,2030-2048).
gcaacacgtggcatactct

SEQ ID NO: 531100 - DNA, 19 bp, Mus musculus
  siRNA target sequence for 2610318I18Rik (NM_145479.2,2242-2260).
gtgctagacagcaggatat

SEQ ID NO: 531101 - DNA, 19 bp, Mus musculus
  siRNA target sequence for 2610318I18Rik (NM_145479.2,2244-2262).
gctagacagcaggatatat

SEQ ID NO: 531102 - DNA, 19 bp, Mus musculus
  siRNA target sequence for 2610318I18Rik (NM_145479.2,2497-2515).
gaagagtttgacaactcta

SEQ ID NO: 531103 - DNA, 19 bp, Mus musculus
  siRNA target sequence for 4122402F11Rik (NM_025707.1,146-164).
cgacctacatgcttgctaa

SEQ ID NO: 531104 - DNA, 19 bp, Mus musculus
  siRNA target sequence for 4122402F11Rik (NM_025707.1,161-179).
ctaacttaacccacttaca

SEQ ID NO: 531105 - DNA, 19 bp, Mus musculus
  siRNA target sequence for 4122402F11Rik (NM_025707.1,165-183).
cttaacccacttacattct

SEQ ID NO: 531106 - DNA, 19 bp, Mus musculus
  siRNA target sequence for 4122402F11Rik (NM_025707.1,195-213).
gcagggattgaatcttctt

SEQ ID NO: 531107 - DNA, 19 bp, Mus musculus
  siRNA target sequence for 4122402F11Rik (NM_025707.1,244-262).
cttcgagtaggtgatgtta

SEQ ID NO: 531108 - DNA, 19 bp, Mus musculus
  siRNA target sequence for 4122402F11Rik (NM_025707.1,247-265).
cgagtaggtgatgttaaaa

SEQ ID NO: 531109 - DNA, 19 bp, Mus musculus
  siRNA target sequence for 4122402F11Rik (NM_025707.1,290-308).
ccagcatcagcccatactt

SEQ ID NO: 531110 - DNA, 19 bp, Mus musculus
  siRNA target sequence for 4122402F11Rik (NM_025707.1,293-311).
gcatcagcccatacttcaa

SEQ ID NO: 531111 - DNA, 19 bp, Mus musculus
  siRNA target sequence for 4122402F11Rik (NM_025707.1,299-317).
gcccatacttcaaagctat

SEQ ID NO: 531112 - DNA, 19 bp, Mus musculus
  siRNA target sequence for 4122402F11Rik (NM_025707.1,406-424).
gcctatacgggcacagttt

SEQ ID NO: 531113 - DNA, 19 bp, Mus musculus
  siRNA target sequence for 4122402F11Rik (NM_025707.1,407-425).
cctatacgggcacagtttt

SEQ ID NO: 531114 - DNA, 19 bp, Mus musculus
  siRNA target sequence for 4122402F11Rik (NM_025707.1,453-471).
cctgccagcagcaaactta

SEQ ID NO: 531115 - DNA, 19 bp, Mus musculus
  siRNA target sequence for 4122402F11Rik (NM_025707.1,463-481).
gcaaacttactccagataa

SEQ ID NO: 531116 - DNA, 19 bp, Mus musculus
  siRNA target sequence for 4122402F11Rik (NM_025707.1,475-493).
cagataaaactcgttctta

SEQ ID NO: 531117 - DNA, 19 bp, Mus musculus
  siRNA target sequence for 4122402F11Rik (NM_025707.1,477-495).
gataaaactcgttcttaaa

SEQ ID NO: 531118 - DNA, 19 bp, Mus musculus
  siRNA target sequence for 4122402F11Rik (NM_025707.1,551-569).
ctcgttttgcggagactta

SEQ ID NO: 531119 - DNA, 19 bp, Mus musculus
  siRNA target sequence for 4122402F11Rik (NM_025707.1,561-579).
ggagacttacggttgtcat

SEQ ID NO: 531120 - DNA, 19 bp, Mus musculus
  siRNA target sequence for 4122402F11Rik (NM_025707.1,570-588).
cggttgtcatgacctttat

SEQ ID NO: 531121 - DNA, 19 bp, Mus musculus
  siRNA target sequence for 4122402F11Rik (NM_025707.1,591-609).
ggcggctactaaattcata

SEQ ID NO: 531122 - DNA, 19 bp, Mus musculus
  siRNA target sequence for 4122402F11Rik (NM_025707.1,592-610).
gcggctactaaattcatat

SEQ ID NO: 531123 - DNA, 19 bp, Mus musculus
  siRNA target sequence for 4122402F11Rik (NM_025707.1,611-629).
gccagaattttgaatctgt

SEQ ID NO: 531124 - DNA, 19 bp, Mus musculus
  siRNA target sequence for 4122402F11Rik (NM_025707.1,667-685).
gatttggacgaaattgtct

SEQ ID NO: 531125 - DNA, 19 bp, Mus musculus
  siRNA target sequence for 4122402F11Rik (NM_025707.1,715-733).
gagacagttttttatgcat

SEQ ID NO: 531126 - DNA, 19 bp, Mus musculus
  siRNA target sequence for 4122402F11Rik (NM_025707.1,743-761).
ggatcaagtacgatgtaca

SEQ ID NO: 531127 - DNA, 19 bp, Mus musculus
  siRNA target sequence for 4122402F11Rik (NM_025707.1,744-762).
gatcaagtacgatgtacaa

SEQ ID NO: 531128 - DNA, 19 bp, Mus musculus
  siRNA target sequence for 4122402F11Rik (NM_025707.1,760-778).
caagaacggcagaagtact

SEQ ID NO: 531129 - DNA, 19 bp, Mus musculus
  siRNA target sequence for 4122402F11Rik (NM_025707.1,808-826).
ccattgctgagcgttaagt

SEQ ID NO: 531130 - DNA, 19 bp, Mus musculus
  siRNA target sequence for 4122402F11Rik (NM_025707.1,828-846).
cctcactaggctctatgaa

SEQ ID NO: 531131 - DNA, 19 bp, Mus musculus
  siRNA target sequence for 4122402F11Rik (NM_025707.1,837-855).
gctctatgaagcgaatcat

SEQ ID NO: 531132 - DNA, 19 bp, Mus musculus
  siRNA target sequence for 4122402F11Rik (NM_025707.1,872-890).
gcacctgtaaacatctctt

SEQ ID NO: 531133 - DNA, 19 bp, Mus musculus
  siRNA target sequence for 4122402F11Rik (NM_025707.1,875-893).
cctgtaaacatctcttgaa

SEQ ID NO: 531134 - DNA, 19 bp, Mus musculus
  siRNA target sequence for 4122402F11Rik (NM_025707.1,876-894).
ctgtaaacatctcttgaat

SEQ ID NO: 531135 - DNA, 19 bp, Mus musculus
  siRNA target sequence for 4122402F11Rik (NM_025707.1,899-917).
ccctaaagtaccacttcat

SEQ ID NO: 531136 - DNA, 19 bp, Mus musculus
  siRNA target sequence for 4122402F11Rik (NM_025707.1,912-930).
cttcatgcctgaacataga

SEQ ID NO: 531137 - DNA, 19 bp, Mus musculus
  siRNA target sequence for 4122402F11Rik (NM_025707.1,1024-1042).
gatagtgtggagatgtact

SEQ ID NO: 531138 - DNA, 19 bp, Mus musculus
  siRNA target sequence for 4122402F11Rik (NM_025707.1,1090-1108).
cgctatgaattcggaatat

SEQ ID NO: 531139 - DNA, 19 bp, Mus musculus
  siRNA target sequence for 4122402F11Rik (NM_025707.1,1092-1110).
ctatgaattcggaatatgt

SEQ ID NO: 531140 - DNA, 19 bp, Mus musculus
  siRNA target sequence for 4122402F11Rik (NM_025707.1,1117-1135).
gaccaaaaagtctttgtta

SEQ ID NO: 531141 - DNA, 19 bp, Mus musculus
  siRNA target sequence for 4122402F11Rik (NM_025707.1,1128-1146).
ctttgttataggtggtatt

SEQ ID NO: 531142 - DNA, 19 bp, Mus musculus
  siRNA target sequence for 4122402F11Rik (NM_025707.1,1132-1150).
gttataggtggtattgaaa

SEQ ID NO: 531143 - DNA, 19 bp, Mus musculus
  siRNA target sequence for 4122402F11Rik (NM_025707.1,1202-1220).
gttggaatcctgatacaaa

SEQ ID NO: 531144 - DNA, 19 bp, Mus musculus
  siRNA target sequence for 4122402F11Rik (NM_025707.1,1226-1244).
ggacttctctcgagagaat

SEQ ID NO: 531145 - DNA, 19 bp, Mus musculus
  siRNA target sequence for 4122402F11Rik (NM_025707.1,1276-1294).
gtgctcgcgggagaagttt

SEQ ID NO: 531146 - DNA, 19 bp, Mus musculus
  siRNA target sequence for 4122402F11Rik (NM_025707.1,1278-1296).
gctcgcgggagaagttttt

SEQ ID NO: 531147 - DNA, 19 bp, Mus musculus
  siRNA target sequence for 4122402F11Rik (NM_025707.1,1307-1325).
gatatgacgggcagtctta

SEQ ID NO: 531148 - DNA, 19 bp, Mus musculus
  siRNA target sequence for 4122402F11Rik (NM_025707.1,1315-1333).
gggcagtcttacttgcaat

SEQ ID NO: 531149 - DNA, 19 bp, Mus musculus
  siRNA target sequence for 4122402F11Rik (NM_025707.1,1320-1338).
gtcttacttgcaatctgta

SEQ ID NO: 531150 - DNA, 19 bp, Mus musculus
  siRNA target sequence for 4122402F11Rik (NM_025707.1,1330-1348).
caatctgtagaaaaataca

SEQ ID NO: 531151 - DNA, 19 bp, Mus musculus
  siRNA target sequence for 4122402F11Rik (NM_025707.1,1386-1404).
gacaaccacaagaagttgt

SEQ ID NO: 531152 - DNA, 19 bp, Mus musculus
  siRNA target sequence for 4122402F11Rik (NM_025707.1,1525-1543).
gctgataagaggattcact

SEQ ID NO: 531153 - DNA, 19 bp, Mus musculus
  siRNA target sequence for 4122402F11Rik (NM_025707.1,1526-1544).
ctgataagaggattcactt

SEQ ID NO: 531154 - DNA, 19 bp, Mus musculus
  siRNA target sequence for 4122402F11Rik (NM_025707.1,1588-1606).
cataacggtgtctcacatt

SEQ ID NO: 531155 - DNA, 19 bp, Mus musculus
  siRNA target sequence for 4122402F11Rik (NM_025707.1,1593-1611).
cggtgtctcacatttgtca

SEQ ID NO: 531156 - DNA, 19 bp, Mus musculus
  siRNA target sequence for 4122402F11Rik (NM_025707.1,1594-1612).
ggtgtctcacatttgtcaa

SEQ ID NO: 531157 - DNA, 19 bp, Mus musculus
  siRNA target sequence for 4122402F11Rik (NM_025707.1,1649-1667).
ctgtgtgtagaccaatgaa

SEQ ID NO: 531158 - DNA, 19 bp, Mus musculus
  siRNA target sequence for 4122402F11Rik (NM_025707.1,1687-1705).
ggtgctgcagtaatcgata

SEQ ID NO: 531159 - DNA, 19 bp, Mus musculus
  siRNA target sequence for 4122402F11Rik (NM_025707.1,1688-1706).
gtgctgcagtaatcgataa

SEQ ID NO: 531160 - DNA, 19 bp, Mus musculus
  siRNA target sequence for 4122402F11Rik (NM_025707.1,1690-1708).
gctgcagtaatcgataact

SEQ ID NO: 531161 - DNA, 19 bp, Mus musculus
  siRNA target sequence for 4122402F11Rik (NM_025707.1,1691-1709).
ctgcagtaatcgataacta

SEQ ID NO: 531162 - DNA, 19 bp, Mus musculus
  siRNA target sequence for 4122402F11Rik (NM_025707.1,1701-1719).
cgataactacctgtatgta

SEQ ID NO: 531163 - DNA, 19 bp, Mus musculus
  siRNA target sequence for 4122402F11Rik (NM_025707.1,1733-1751).
cagggtcttcctatctgaa

SEQ ID NO: 531164 - DNA, 19 bp, Mus musculus
  siRNA target sequence for 4122402F11Rik (NM_025707.1,1761-1779).
gaaatacgaccctatctca

SEQ ID NO: 531165 - DNA, 19 bp, Mus musculus
  siRNA target sequence for 4122402F11Rik (NM_025707.1,1792-1810).
gattcagcaggcatgatat

SEQ ID NO: 531166 - DNA, 19 bp, Mus musculus
  siRNA target sequence for 4122402F11Rik (NM_025707.1,1812-1830).
ctgtcgctgcaattttgga

SEQ ID NO: 531167 - DNA, 19 bp, Mus musculus
  siRNA target sequence for 4833415F11Rik (NM_029013.1,200-218).
gaacttactagataaaatt

SEQ ID NO: 531168 - DNA, 19 bp, Mus musculus
  siRNA target sequence for 4833415F11Rik (NM_029013.1,221-239).
gaatatgaaagagttagaa

SEQ ID NO: 531169 - DNA, 19 bp, Mus musculus
  siRNA target sequence for 4833415F11Rik (NM_029013.1,302-320).
cgctgcctttagtccttat

SEQ ID NO: 531170 - DNA, 19 bp, Mus musculus
  siRNA target sequence for 4833415F11Rik (NM_029013.1,358-376).
ctcagagagaggtcatact

SEQ ID NO: 531171 - DNA, 19 bp, Mus musculus
  siRNA target sequence for 4833415F11Rik (NM_029013.1,366-384).
gaggtcatactctatgaca

SEQ ID NO: 531172 - DNA, 19 bp, Mus musculus
  siRNA target sequence for 4833415F11Rik (NM_029013.1,468-486).
gccatggctgcctatttta

SEQ ID NO: 531173 - DNA, 19 bp, Mus musculus
  siRNA target sequence for 4833415F11Rik (NM_029013.1,469-487).
ccatggctgcctattttat

SEQ ID NO: 531174 - DNA, 19 bp, Mus musculus
  siRNA target sequence for 4833415F11Rik (NM_029013.1,543-561).
gcctccaactgcataggaa

SEQ ID NO: 531175 - DNA, 19 bp, Mus musculus
  siRNA target sequence for 4833415F11Rik (NM_029013.1,545-563).
ctccaactgcataggaatt

SEQ ID NO: 531176 - DNA, 19 bp, Mus musculus
  siRNA target sequence for 4833415F11Rik (NM_029013.1,548-566).
caactgcataggaatttat

SEQ ID NO: 531177 - DNA, 19 bp, Mus musculus
  siRNA target sequence for 4833415F11Rik (NM_029013.1,553-571).
gcataggaatttattactt

SEQ ID NO: 531178 - DNA, 19 bp, Mus musculus
  siRNA target sequence for 4833415F11Rik (NM_029013.1,558-576).
ggaatttattactttgcaa

SEQ ID NO: 531179 - DNA, 19 bp, Mus musculus
  siRNA target sequence for 4833415F11Rik (NM_029013.1,559-577).
gaatttattactttgcaaa

SEQ ID NO: 531180 - DNA, 19 bp, Mus musculus
  siRNA target sequence for 4833415F11Rik (NM_029013.1,601-619).
cggatcagtcgaagaagta

SEQ ID NO: 531181 - DNA, 19 bp, Mus musculus
  siRNA target sequence for 4833415F11Rik (NM_029013.1,602-620).
ggatcagtcgaagaagtat

SEQ ID NO: 531182 - DNA, 19 bp, Mus musculus
  siRNA target sequence for 4833415F11Rik (NM_029013.1,603-621).
gatcagtcgaagaagtatt

SEQ ID NO: 531183 - DNA, 19 bp, Mus musculus
  siRNA target sequence for 4833415F11Rik (NM_029013.1,606-624).
cagtcgaagaagtatttat

SEQ ID NO: 531184 - DNA, 19 bp, Mus musculus
  siRNA target sequence for 4833415F11Rik (NM_029013.1,610-628).
cgaagaagtatttatacca

SEQ ID NO: 531185 - DNA, 19 bp, Mus musculus
  siRNA target sequence for 4833415F11Rik (NM_029013.1,705-723).
gatgatctgaatatatcca

SEQ ID NO: 531186 - DNA, 19 bp, Mus musculus
  siRNA target sequence for 4833415F11Rik (NM_029013.1,750-768).
ctgagatgggtaaaccata

SEQ ID NO: 531187 - DNA, 19 bp, Mus musculus
  siRNA target sequence for 4833415F11Rik (NM_029013.1,813-831).
gtcagactggaacttataa

SEQ ID NO: 531188 - DNA, 19 bp, Mus musculus
  siRNA target sequence for 4833415F11Rik (NM_029013.1,866-884).
cacgatgctcctttgtgat

SEQ ID NO: 531189 - DNA, 19 bp, Mus musculus
  siRNA target sequence for 4833415F11Rik (NM_029013.1,885-903).
ggcagttgcattgatataa

SEQ ID NO: 531190 - DNA, 19 bp, Mus musculus
  siRNA target sequence for 4833415F11Rik (NM_029013.1,886-904).
gcagttgcattgatataat

SEQ ID NO: 531191 - DNA, 19 bp, Mus musculus
  siRNA target sequence for 4833415F11Rik (NM_029013.1,889-907).
gttgcattgatataatcca

SEQ ID NO: 531192 - DNA, 19 bp, Mus musculus
  siRNA target sequence for 4833415F11Rik (NM_029013.1,976-994).
ccagccttctgctttgcat

SEQ ID NO: 531193 - DNA, 19 bp, Mus musculus
  siRNA target sequence for 4833415F11Rik (NM_029013.1,1038-1056).
ggggatgccagtttttgtt

SEQ ID NO: 531194 - DNA, 19 bp, Mus musculus
  siRNA target sequence for 4833415F11Rik (NM_029013.1,1039-1057).
gggatgccagtttttgtta

SEQ ID NO: 531195 - DNA, 19 bp, Mus musculus
  siRNA target sequence for 4833415F11Rik (NM_029013.1,1069-1087).
cacacaagacctattttat

SEQ ID NO: 531196 - DNA, 19 bp, Mus musculus
  siRNA target sequence for 4833415F11Rik (NM_029013.1,1071-1089).
cacaagacctattttatct

SEQ ID NO: 531197 - DNA, 19 bp, Mus musculus
  siRNA target sequence for 4833415F11Rik (NM_029013.1,1133-1151).
ggtagtcatggaaaacaat

SEQ ID NO: 531198 - DNA, 19 bp, Mus musculus
  siRNA target sequence for 4833415F11Rik (NM_029013.1,1220-1238).
ctataggtgtgtatctcat

SEQ ID NO: 531199 - DNA, 19 bp, Mus musculus
  siRNA target sequence for 4833415F11Rik (NM_029013.1,1234-1252).
ctcatagcaggtttggtat

SEQ ID NO: 531200 - DNA, 19 bp, Mus musculus
  siRNA target sequence for 4930429H24Rik (NM_029436.2,264-282).
gtgattccccagcaactaa

SEQ ID NO: 531201 - DNA, 19 bp, Mus musculus
  siRNA target sequence for 4930429H24Rik (NM_029436.2,273-291).
cagcaactaagcgtaaagt

SEQ ID NO: 531202 - DNA, 19 bp, Mus musculus
  siRNA target sequence for 4930429H24Rik (NM_029436.2,275-293).
gcaactaagcgtaaagttt

SEQ ID NO: 531203 - DNA, 19 bp, Mus musculus
  siRNA target sequence for 4930429H24Rik (NM_029436.2,276-294).
caactaagcgtaaagtttt

SEQ ID NO: 531204 - DNA, 19 bp, Mus musculus
  siRNA target sequence for 4930429H24Rik (NM_029436.2,314-332).
ctgacaggtcatgagtatt

SEQ ID NO: 531205 - DNA, 19 bp, Mus musculus
  siRNA target sequence for 4930429H24Rik (NM_029436.2,348-366).
gatcatcccatgctgaaaa

SEQ ID NO: 531206 - DNA, 19 bp, Mus musculus
  siRNA target sequence for 4930429H24Rik (NM_029436.2,367-385).
catcctccagatatttaat

SEQ ID NO: 531207 - DNA, 19 bp, Mus musculus
  siRNA target sequence for 4930429H24Rik (NM_029436.2,371-389).
ctccagatatttaatgagt

SEQ ID NO: 531208 - DNA, 19 bp, Mus musculus
  siRNA target sequence for 4930429H24Rik (NM_029436.2,392-410).
cgagacagccgcttattca

SEQ ID NO: 531209 - DNA, 19 bp, Mus musculus
  siRNA target sequence for 4930429H24Rik (NM_029436.2,403-421).
cttattcacagatgtcatt

SEQ ID NO: 531210 - DNA, 19 bp, Mus musculus
  siRNA target sequence for 4930429H24Rik (NM_029436.2,513-531).
gggagagccgagaaatgct

SEQ ID NO: 531211 - DNA, 19 bp, Mus musculus
  siRNA target sequence for 4930429H24Rik (NM_029436.2,570-588).
gctttctgcagtatgtgta

SEQ ID NO: 531212 - DNA, 19 bp, Mus musculus
  siRNA target sequence for 4930429H24Rik (NM_029436.2,620-638).
gtccagtacctcttcgaaa

SEQ ID NO: 531213 - DNA, 19 bp, Mus musculus
  siRNA target sequence for 4930429H24Rik (NM_029436.2,698-716).
cagcttgatccttgcaatt

SEQ ID NO: 531214 - DNA, 19 bp, Mus musculus
  siRNA target sequence for 4930429H24Rik (NM_029436.2,708-726).
cttgcaattgcctaggaat

SEQ ID NO: 531215 - DNA, 19 bp, Mus musculus
  siRNA target sequence for 4930429H24Rik (NM_029436.2,752-770).
ctcaaaacactcttcacaa

SEQ ID NO: 531216 - DNA, 19 bp, Mus musculus
  siRNA target sequence for 4930429H24Rik (NM_029436.2,774-792).
gcaagacctttgcattaca

SEQ ID NO: 531217 - DNA, 19 bp, Mus musculus
  siRNA target sequence for 4930429H24Rik (NM_029436.2,829-847).
cgagcttgacaaagatgaa

SEQ ID NO: 531218 - DNA, 19 bp, Mus musculus
  siRNA target sequence for 4930429H24Rik (NM_029436.2,862-880).
ctgcagtgatgaacttgtt

SEQ ID NO: 531219 - DNA, 19 bp, Mus musculus
  siRNA target sequence for 4930429H24Rik (NM_029436.2,864-882).
gcagtgatgaacttgttat

SEQ ID NO: 531220 - DNA, 19 bp, Mus musculus
  siRNA target sequence for 4930429H24Rik (NM_029436.2,869-887).
gatgaacttgttattggta

SEQ ID NO: 531221 - DNA, 19 bp, Mus musculus
  siRNA target sequence for 4930429H24Rik (NM_029436.2,945-963).
gaagaccactgttacatga

SEQ ID NO: 531222 - DNA, 19 bp, Mus musculus
  siRNA target sequence for 4930429H24Rik (NM_029436.2,991-1009).
cttgcatcccaactacttt

SEQ ID NO: 531223 - DNA, 19 bp, Mus musculus
  siRNA target sequence for 4930429H24Rik (NM_029436.2,1028-1046).
gaccagttgatccagaatt

SEQ ID NO: 531224 - DNA, 19 bp, Mus musculus
  siRNA target sequence for 4930429H24Rik (NM_029436.2,1047-1065).
cccccgagtgttatcagtt

SEQ ID NO: 531225 - DNA, 19 bp, Mus musculus
  siRNA target sequence for 4930429H24Rik (NM_029436.2,1077-1095).
caaggcggtaccacatact

SEQ ID NO: 531226 - DNA, 19 bp, Mus musculus
  siRNA target sequence for 4930429H24Rik (NM_029436.2,1134-1152).
ggtctactggctattcaga

SEQ ID NO: 531227 - DNA, 19 bp, Mus musculus
  siRNA target sequence for 4930429H24Rik (NM_029436.2,1143-1161).
gctattcagaggtgatagt

SEQ ID NO: 531228 - DNA, 19 bp, Mus musculus
  siRNA target sequence for 4930429H24Rik (NM_029436.2,1249-1267).
ggccaagcttccagaattt

SEQ ID NO: 531229 - DNA, 19 bp, Mus musculus
  siRNA target sequence for 4930429H24Rik (NM_029436.2,1290-1308).
gtgcactgaggaatgatat

SEQ ID NO: 531230 - DNA, 19 bp, Mus musculus
  siRNA target sequence for 4930429H24Rik (NM_029436.2,1336-1354).
ccgtgatgtctggatttat

SEQ ID NO: 531231 - DNA, 19 bp, Mus musculus
  siRNA target sequence for 4930429H24Rik (NM_029436.2,1337-1355).
cgtgatgtctggatttata

SEQ ID NO: 531232 - DNA, 19 bp, Mus musculus
  siRNA target sequence for 4930429H24Rik (NM_029436.2,1400-1418).
ggcagatggcgtcacaaaa

SEQ ID NO: 531233 - DNA, 19 bp, Mus musculus
  siRNA target sequence for 4930429H24Rik (NM_029436.2,1401-1419).
gcagatggcgtcacaaaat

SEQ ID NO: 531234 - DNA, 19 bp, Mus musculus
  siRNA target sequence for 4930429H24Rik (NM_029436.2,1486-1504).
ggagtgttacgattccttt

SEQ ID NO: 531235 - DNA, 19 bp, Mus musculus
  siRNA target sequence for 4930429H24Rik (NM_029436.2,1489-1507).
gtgttacgattccttttca

SEQ ID NO: 531236 - DNA, 19 bp, Mus musculus
  siRNA target sequence for 4930429H24Rik (NM_029436.2,1491-1509).
gttacgattccttttcaaa

SEQ ID NO: 531237 - DNA, 19 bp, Mus musculus
  siRNA target sequence for 4930429H24Rik (NM_029436.2,1495-1513).
cgattccttttcaaatcgt

SEQ ID NO: 531238 - DNA, 19 bp, Mus musculus
  siRNA target sequence for 4930429H24Rik (NM_029436.2,1496-1514).
gattccttttcaaatcgtt

SEQ ID NO: 531239 - DNA, 19 bp, Mus musculus
  siRNA target sequence for 4930429H24Rik (NM_029436.2,1598-1616).
ggacctgatgataatactt

SEQ ID NO: 531240 - DNA, 19 bp, Mus musculus
  siRNA target sequence for 4930429H24Rik (NM_029436.2,1607-1625).
gataatacttgttctgata

SEQ ID NO: 531241 - DNA, 19 bp, Mus musculus
  siRNA target sequence for 4930429H24Rik (NM_029436.2,1620-1638).
ctgataaggtccaatctta

SEQ ID NO: 531242 - DNA, 19 bp, Mus musculus
  siRNA target sequence for 4930429H24Rik (NM_029436.2,1640-1658).
gacccagaaaccaattctt

SEQ ID NO: 531243 - DNA, 19 bp, Mus musculus
  siRNA target sequence for 4930429H24Rik (NM_029436.2,1710-1728).
ctttaaacaacctgatcta

SEQ ID NO: 531244 - DNA, 19 bp, Mus musculus
  siRNA target sequence for 4930429H24Rik (NM_029436.2,1746-1764).
ccaaggcagtgtattgtta

SEQ ID NO: 531245 - DNA, 19 bp, Mus musculus
  siRNA target sequence for 4930429H24Rik (NM_029436.2,1750-1768).
ggcagtgtattgttacgat

SEQ ID NO: 531246 - DNA, 19 bp, Mus musculus
  siRNA target sequence for 4930429H24Rik (NM_029436.2,1807-1825).
cagccggcaggaaaactgt

SEQ ID NO: 531247 - DNA, 19 bp, Mus musculus
  siRNA target sequence for 4930429H24Rik (NM_029436.2,1824-1842).
gtggtatgtctgtttgtaa

SEQ ID NO: 531248 - DNA, 19 bp, Mus musculus
  siRNA target sequence for 4930429H24Rik (NM_029436.2,1881-1899).
gagaagccacagatactat

SEQ ID NO: 531249 - DNA, 19 bp, Mus musculus
  siRNA target sequence for 4930429H24Rik (NM_029436.2,1886-1904).
gccacagatactattctct

SEQ ID NO: 531250 - DNA, 19 bp, Mus musculus
  siRNA target sequence for 4930429H24Rik (NM_029436.2,1910-1928).
gatcctgcgacaagtatca

SEQ ID NO: 531251 - DNA, 19 bp, Mus musculus
  siRNA target sequence for 4930429H24Rik (NM_029436.2,1963-1981).
ctaccacggctgtgtaact

SEQ ID NO: 531252 - DNA, 19 bp, Mus musculus
  siRNA target sequence for 4930429H24Rik (NM_029436.2,1969-1987).
cggctgtgtaactattcat

SEQ ID NO: 531253 - DNA, 19 bp, Mus musculus
  siRNA target sequence for 4930429H24Rik (NM_029436.2,1970-1988).
ggctgtgtaactattcata

SEQ ID NO: 531254 - DNA, 19 bp, Mus musculus
  siRNA target sequence for 4930429H24Rik (NM_029436.2,1972-1990).
ctgtgtaactattcataga

SEQ ID NO: 531255 - DNA, 19 bp, Mus musculus
  siRNA target sequence for 4930538C18Rik (NM_029457.2,277-295).
caaaaggccaagattagat

SEQ ID NO: 531256 - DNA, 19 bp, Mus musculus
  siRNA target sequence for 4930538C18Rik (NM_029457.2,284-302).
ccaagattagattgcttta

SEQ ID NO: 531257 - DNA, 19 bp, Mus musculus
  siRNA target sequence for 4930538C18Rik (NM_029457.2,313-331).
gaagaacagtctctacaat

SEQ ID NO: 531258 - DNA, 19 bp, Mus musculus
  siRNA target sequence for 4930538C18Rik (NM_029457.2,325-343).
ctacaatgctgccagttta

SEQ ID NO: 531259 - DNA, 19 bp, Mus musculus
  siRNA target sequence for 4930538C18Rik (NM_029457.2,333-351).
ctgccagtttatttggatt

SEQ ID NO: 531260 - DNA, 19 bp, Mus musculus
  siRNA target sequence for 4930538C18Rik (NM_029457.2,382-400).
gtcttctgcttgtaatgga

SEQ ID NO: 531261 - DNA, 19 bp, Mus musculus
  siRNA target sequence for 4930538C18Rik (NM_029457.2,425-443).
gaggtcttttcgaactctt

SEQ ID NO: 531262 - DNA, 19 bp, Mus musculus
  siRNA target sequence for 4930538C18Rik (NM_029457.2,428-446).
gtcttttcgaactcttcat

SEQ ID NO: 531263 - DNA, 19 bp, Mus musculus
  siRNA target sequence for 4930538C18Rik (NM_029457.2,474-492).
gcagcagcatgctgaaact

SEQ ID NO: 531264 - DNA, 19 bp, Mus musculus
  siRNA target sequence for 4930538C18Rik (NM_029457.2,484-502).
gctgaaactgggtaataaa

SEQ ID NO: 531265 - DNA, 19 bp, Mus musculus
  siRNA target sequence for 4930538C18Rik (NM_029457.2,485-503).
ctgaaactgggtaataaat

SEQ ID NO: 531266 - DNA, 19 bp, Mus musculus
  siRNA target sequence for 4930538C18Rik (NM_029457.2,487-505).
gaaactgggtaataaatct

SEQ ID NO: 531267 - DNA, 19 bp, Mus musculus
  siRNA target sequence for 4930538C18Rik (NM_029457.2,512-530).
ggaataagcgactatccaa

SEQ ID NO: 531268 - DNA, 19 bp, Mus musculus
  siRNA target sequence for 4930538C18Rik (NM_029457.2,513-531).
gaataagcgactatccaaa

SEQ ID NO: 531269 - DNA, 19 bp, Mus musculus
  siRNA target sequence for 4930538C18Rik (NM_029457.2,595-613).
gaaatcggaaggctataat

SEQ ID NO: 531270 - DNA, 19 bp, Mus musculus
  siRNA target sequence for 4930538C18Rik (NM_029457.2,626-644).
ggtcgtcgccatagcaaaa

SEQ ID NO: 531271 - DNA, 19 bp, Mus musculus
  siRNA target sequence for 4930538C18Rik (NM_029457.2,650-668).
ccagagagttccttaacat

SEQ ID NO: 531272 - DNA, 19 bp, Mus musculus
  siRNA target sequence for 4930538C18Rik (NM_029457.2,686-704).
ggtgtgacagagatgattt

SEQ ID NO: 531273 - DNA, 19 bp, Mus musculus
  siRNA target sequence for 4930538C18Rik (NM_029457.2,770-788).
gaaagagaaaagtatcgaa

SEQ ID NO: 531274 - DNA, 19 bp, Mus musculus
  siRNA target sequence for 4930538C18Rik (NM_029457.2,790-808).
gttattggagcgacttaaa

SEQ ID NO: 531275 - DNA, 19 bp, Mus musculus
  siRNA target sequence for 4930538C18Rik (NM_029457.2,919-937).
cgtcagaacaacccatttt

SEQ ID NO: 531276 - DNA, 19 bp, Mus musculus
  siRNA target sequence for 4930538C18Rik (NM_029457.2,930-948).
cccattttgttccaaaaca

SEQ ID NO: 531277 - DNA, 19 bp, Mus musculus
  siRNA target sequence for 4930538C18Rik (NM_029457.2,971-989).
ggacctctctgttcaatga

SEQ ID NO: 531278 - DNA, 19 bp, Mus musculus
  siRNA target sequence for 4930538C18Rik (NM_029457.2,1036-1054).
ggtgggactccgatttgaa

SEQ ID NO: 531279 - DNA, 19 bp, Mus musculus
  siRNA target sequence for 4930538C18Rik (NM_029457.2,1037-1055).
gtgggactccgatttgaaa

SEQ ID NO: 531280 - DNA, 19 bp, Mus musculus
  siRNA target sequence for 4930538C18Rik (NM_029457.2,1041-1059).
gactccgatttgaaaagga

SEQ ID NO: 531281 - DNA, 19 bp, Mus musculus
  siRNA target sequence for 4930538C18Rik (NM_029457.2,1065-1083).
caagaggacaccaaatgga

SEQ ID NO: 531282 - DNA, 19 bp, Mus musculus
  siRNA target sequence for 4930538C18Rik (NM_029457.2,1212-1230).
gaacggaagacctctttga

SEQ ID NO: 531283 - DNA, 19 bp, Mus musculus
  siRNA target sequence for 4930538C18Rik (NM_029457.2,1215-1233).
cggaagacctctttgaatt

SEQ ID NO: 531284 - DNA, 19 bp, Mus musculus
  siRNA target sequence for 4930538C18Rik (NM_029457.2,1276-1294).
cggcccaccagatgagatt

SEQ ID NO: 531285 - DNA, 19 bp, Mus musculus
  siRNA target sequence for 4930538C18Rik (NM_029457.2,1277-1295).
ggcccaccagatgagattt

SEQ ID NO: 531286 - DNA, 19 bp, Mus musculus
  siRNA target sequence for 4930538C18Rik (NM_029457.2,1278-1296).
gcccaccagatgagatttt

SEQ ID NO: 531287 - DNA, 19 bp, Mus musculus
  siRNA target sequence for 4930538C18Rik (NM_029457.2,1329-1347).
gagacatccagaccttaaa

SEQ ID NO: 531288 - DNA, 19 bp, Mus musculus
  siRNA target sequence for 4930538C18Rik (NM_029457.2,1331-1349).
gacatccagaccttaaaga

SEQ ID NO: 531289 - DNA, 19 bp, Mus musculus
  siRNA target sequence for 4930538C18Rik (NM_029457.2,1339-1357).
gaccttaaagaactatcat

SEQ ID NO: 531290 - DNA, 19 bp, Mus musculus
  siRNA target sequence for 4930538C18Rik (NM_029457.2,1366-1384).
cgatgaggtcattaatttt

SEQ ID NO: 531291 - DNA, 19 bp, Mus musculus
  siRNA target sequence for 4930538C18Rik (NM_029457.2,1370-1388).
gaggtcattaatttttata

SEQ ID NO: 531292 - DNA, 19 bp, Mus musculus
  siRNA target sequence for 4930538C18Rik (NM_029457.2,1408-1426).
gagtaaaaagcaaggttat

SEQ ID NO: 531293 - DNA, 19 bp, Mus musculus
  siRNA target sequence for 4930538C18Rik (NM_029457.2,1430-1448).
gcacttcatgcattcagta

SEQ ID NO: 531294 - DNA, 19 bp, Mus musculus
  siRNA target sequence for 4930538C18Rik (NM_029457.2,1436-1454).
catgcattcagtacattct

SEQ ID NO: 531295 - DNA, 19 bp, Mus musculus
  siRNA target sequence for 4930538C18Rik (NM_029457.2,1446-1464).
gtacattcttctatcctaa

SEQ ID NO: 531296 - DNA, 19 bp, Mus musculus
  siRNA target sequence for 4930538C18Rik (NM_029457.2,1456-1474).
ctatcctaagctaaagtct

SEQ ID NO: 531297 - DNA, 19 bp, Mus musculus
  siRNA target sequence for 4930538C18Rik (NM_029457.2,1478-1496).
ggttaccaagcagtgaaaa

SEQ ID NO: 531298 - DNA, 19 bp, Mus musculus
  siRNA target sequence for 4930538C18Rik (NM_029457.2,1519-1537).
cttcgaacaagaacttgtt

SEQ ID NO: 531299 - DNA, 19 bp, Mus musculus
  siRNA target sequence for 4930538C18Rik (NM_029457.2,1576-1594).
ggtgatggacctaagaaaa

SEQ ID NO: 531300 - DNA, 19 bp, Mus musculus
  siRNA target sequence for 4930538C18Rik (NM_029457.2,1612-1630).
ggattctatgggacaaaaa

SEQ ID NO: 531301 - DNA, 19 bp, Mus musculus
  siRNA target sequence for 4930538C18Rik (NM_029457.2,1639-1657).
gatctgtgagattcttctt

SEQ ID NO: 531302 - DNA, 19 bp, Mus musculus
  siRNA target sequence for 4930538C18Rik (NM_029457.2,1814-1832).
gacaaacctatcacattca

SEQ ID NO: 531303 - DNA, 19 bp, Mus musculus
  siRNA target sequence for 4930563M09Rik (NM_133759.1,125-143).
cggtcccagggtttccttt

SEQ ID NO: 531304 - DNA, 19 bp, Mus musculus
  siRNA target sequence for 4930563M09Rik (NM_133759.1,255-273).
gggacctggtgtgtattca

SEQ ID NO: 531305 - DNA, 19 bp, Mus musculus
  siRNA target sequence for 4930563M09Rik (NM_133759.1,259-277).
cctggtgtgtattcacaat

SEQ ID NO: 531306 - DNA, 19 bp, Mus musculus
  siRNA target sequence for 4930563M09Rik (NM_133759.1,265-283).
gtgtattcacaatgagatt

SEQ ID NO: 531307 - DNA, 19 bp, Mus musculus
  siRNA target sequence for 4930563M09Rik (NM_133759.1,337-355).
ggcccttaggggagatact

SEQ ID NO: 531308 - DNA, 19 bp, Mus musculus
  siRNA target sequence for 4930563M09Rik (NM_133759.1,346-364).
gggagatactcctctagaa

SEQ ID NO: 531309 - DNA, 19 bp, Mus musculus
  siRNA target sequence for 4930563M09Rik (NM_133759.1,348-366).
gagatactcctctagaaga

SEQ ID NO: 531310 - DNA, 19 bp, Mus musculus
  siRNA target sequence for 4930563M09Rik (NM_133759.1,391-409).
gcacatgaatgacattgtt

SEQ ID NO: 531311 - DNA, 19 bp, Mus musculus
  siRNA target sequence for 4930563M09Rik (NM_133759.1,485-503).
cctgctagtctggagtttt

SEQ ID NO: 531312 - DNA, 19 bp, Mus musculus
  siRNA target sequence for 4930563M09Rik (NM_133759.1,486-504).
ctgctagtctggagttttt

SEQ ID NO: 531313 - DNA, 19 bp, Mus musculus
  siRNA target sequence for 4930563M09Rik (NM_133759.1,519-537).
gaggcccacagcctttact

SEQ ID NO: 531314 - DNA, 19 bp, Mus musculus
  siRNA target sequence for 4930563M09Rik (NM_133759.1,553-571).
gtcagcccgctggaacaaa

SEQ ID NO: 531315 - DNA, 19 bp, Mus musculus
  siRNA target sequence for 4930563M09Rik (NM_133759.1,667-685).
ggaagttgactcatcacat

SEQ ID NO: 531316 - DNA, 19 bp, Mus musculus
  siRNA target sequence for 4930563M09Rik (NM_133759.1,805-823).
gcccttgactcctcttgat

SEQ ID NO: 531317 - DNA, 19 bp, Mus musculus
  siRNA target sequence for 4930563M09Rik (NM_133759.1,957-975).
ctgaactggtccaggtaaa

SEQ ID NO: 531318 - DNA, 19 bp, Mus musculus
  siRNA target sequence for 4930563M09Rik (NM_133759.1,1153-1171).
cctgcctccggaatctcat

SEQ ID NO: 531319 - DNA, 19 bp, Mus musculus
  siRNA target sequence for 4930563M09Rik (NM_133759.1,1156-1174).
gcctccggaatctcatcta

SEQ ID NO: 531320 - DNA, 19 bp, Mus musculus
  siRNA target sequence for 4930563M09Rik (NM_133759.1,1161-1179).
cggaatctcatctaccata

SEQ ID NO: 531321 - DNA, 19 bp, Mus musculus
  siRNA target sequence for 4930563M09Rik (NM_133759.1,1292-1310).
caagggagctttggaaatt

SEQ ID NO: 531322 - DNA, 19 bp, Mus musculus
  siRNA target sequence for 4930563M09Rik (NM_133759.1,1297-1315).
gagctttggaaattttaca

SEQ ID NO: 531323 - DNA, 19 bp, Mus musculus
  siRNA target sequence for 4930563M09Rik (NM_133759.1,1322-1340).
gttcccacctgcaagactt

SEQ ID NO: 531324 - DNA, 19 bp, Mus musculus
  siRNA target sequence for 4930563M09Rik (NM_133759.1,1343-1361).
ggaaagaccttctcatgtt

SEQ ID NO: 531325 - DNA, 19 bp, Mus musculus
  siRNA target sequence for 4930563M09Rik (NM_133759.1,1348-1366).
gaccttctcatgttcttat

SEQ ID NO: 531326 - DNA, 19 bp, Mus musculus
  siRNA target sequence for 4930563M09Rik (NM_133759.1,1465-1483).
catccgcaaggctcacaat

SEQ ID NO: 531327 - DNA, 19 bp, Mus musculus
  siRNA target sequence for 4930563M09Rik (NM_133759.1,1559-1577).
caaacgacagagagacata

SEQ ID NO: 531328 - DNA, 19 bp, Mus musculus
  siRNA target sequence for 4930563M09Rik (NM_133759.1,1610-1628).
gcacttggtcctaaaaatt

SEQ ID NO: 531329 - DNA, 19 bp, Mus musculus
  siRNA target sequence for 5031409G22Rik (NM_030229.2,367-385).
cagtttgagcggaaactca

SEQ ID NO: 531330 - DNA, 19 bp, Mus musculus
  siRNA target sequence for 5031409G22Rik (NM_030229.2,373-391).
gagcggaaactcaacgatt

SEQ ID NO: 531331 - DNA, 19 bp, Mus musculus
  siRNA target sequence for 5031409G22Rik (NM_030229.2,377-395).
ggaaactcaacgattccat

SEQ ID NO: 531332 - DNA, 19 bp, Mus musculus
  siRNA target sequence for 5031409G22Rik (NM_030229.2,421-439).
gccaacaaggtcgtataca

SEQ ID NO: 531333 - DNA, 19 bp, Mus musculus
  siRNA target sequence for 5031409G22Rik (NM_030229.2,422-440).
ccaacaaggtcgtatacaa

SEQ ID NO: 531334 - DNA, 19 bp, Mus musculus
  siRNA target sequence for 5031409G22Rik (NM_030229.2,603-621).
gggtgtgcacgtctcttta

SEQ ID NO: 531335 - DNA, 19 bp, Mus musculus
  siRNA target sequence for 5031409G22Rik (NM_030229.2,725-743).
gagcgcatgacctgtacat

SEQ ID NO: 531336 - DNA, 19 bp, Mus musculus
  siRNA target sequence for 5031409G22Rik (NM_030229.2,820-838).
gccgaggctgcctcttcaa

SEQ ID NO: 531337 - DNA, 19 bp, Mus musculus
  siRNA target sequence for 5031409G22Rik (NM_030229.2,852-870).
caagaaggaagcaccatat

SEQ ID NO: 531338 - DNA, 19 bp, Mus musculus
  siRNA target sequence for 5031409G22Rik (NM_030229.2,858-876).
ggaagcaccatatacactt

SEQ ID NO: 531339 - DNA, 19 bp, Mus musculus
  siRNA target sequence for 5730402K07Rik (NM_019688.1,45-63).
gatcgcctgcctggataaa

SEQ ID NO: 531340 - DNA, 19 bp, Mus musculus
  siRNA target sequence for 5730402K07Rik (NM_019688.1,66-84).
gccgttggagcgatctagt

SEQ ID NO: 531341 - DNA, 19 bp, Mus musculus
  siRNA target sequence for 5730402K07Rik (NM_019688.1,69-87).
gttggagcgatctagtgaa

SEQ ID NO: 531342 - DNA, 19 bp, Mus musculus
  siRNA target sequence for 5730402K07Rik (NM_019688.1,88-106).
gatgtggacataattttca

SEQ ID NO: 531343 - DNA, 19 bp, Mus musculus
  siRNA target sequence for 5730402K07Rik (NM_019688.1,107-125).
cgcggctgaaaggagttaa

SEQ ID NO: 531344 - DNA, 19 bp, Mus musculus
  siRNA target sequence for 5730402K07Rik (NM_019688.1,108-126).
gcggctgaaaggagttaaa

SEQ ID NO: 531345 - DNA, 19 bp, Mus musculus
  siRNA target sequence for 5730402K07Rik (NM_019688.1,114-132).
gaaaggagttaaagctttt

SEQ ID NO: 531346 - DNA, 19 bp, Mus musculus
  siRNA target sequence for 5730402K07Rik (NM_019688.1,119-137).
gagttaaagcttttgagaa

SEQ ID NO: 531347 - DNA, 19 bp, Mus musculus
  siRNA target sequence for 5730402K07Rik (NM_019688.1,150-168).
cctccttcgtcagatttgt

SEQ ID NO: 531348 - DNA, 19 bp, Mus musculus
  siRNA target sequence for 5730402K07Rik (NM_019688.1,151-169).
ctccttcgtcagatttgtt

SEQ ID NO: 531349 - DNA, 19 bp, Mus musculus
  siRNA target sequence for 5730402K07Rik (NM_019688.1,154-172).
cttcgtcagatttgtttat

SEQ ID NO: 531350 - DNA, 19 bp, Mus musculus
  siRNA target sequence for 5730402K07Rik (NM_019688.1,210-228).
gtttcgccaaggggatatt

SEQ ID NO: 531351 - DNA, 19 bp, Mus musculus
  siRNA target sequence for 5730402K07Rik (NM_019688.1,214-232).
cgccaaggggatattggaa

SEQ ID NO: 531352 - DNA, 19 bp, Mus musculus
  siRNA target sequence for 5730402K07Rik (NM_019688.1,253-271).
gctgggtctttggatgtta

SEQ ID NO: 531353 - DNA, 19 bp, Mus musculus
  siRNA target sequence for 5730402K07Rik (NM_019688.1,254-272).
ctgggtctttggatgttaa

SEQ ID NO: 531354 - DNA, 19 bp, Mus musculus
  siRNA target sequence for 5730402K07Rik (NM_019688.1,257-275).
ggtctttggatgttaaagt

SEQ ID NO: 531355 - DNA, 19 bp, Mus musculus
  siRNA target sequence for 5730402K07Rik (NM_019688.1,367-385).
cgccatgcaaccatcgtta

SEQ ID NO: 531356 - DNA, 19 bp, Mus musculus
  siRNA target sequence for 5730402K07Rik (NM_019688.1,389-407).
gggagagcagcgaacttct

SEQ ID NO: 531357 - DNA, 19 bp, Mus musculus
  siRNA target sequence for 5730402K07Rik (NM_019688.1,441-459).
ggagaaataccgacagtat

SEQ ID NO: 531358 - DNA, 19 bp, Mus musculus
  siRNA target sequence for 5730402K07Rik (NM_019688.1,481-499).
ccctatggtgttatggaaa

SEQ ID NO: 531359 - DNA, 19 bp, Mus musculus
  siRNA target sequence for 5730402K07Rik (NM_019688.1,495-513).
ggaaacgggctctaacaat

SEQ ID NO: 531360 - DNA, 19 bp, Mus musculus
  siRNA target sequence for 5730402K07Rik (NM_019688.1,562-580).
gctggaaaaattttacgaa

SEQ ID NO: 531361 - DNA, 19 bp, Mus musculus
  siRNA target sequence for 5730402K07Rik (NM_019688.1,599-617).
ctccccacatgataagaga

SEQ ID NO: 531362 - DNA, 19 bp, Mus musculus
  siRNA target sequence for 5730402K07Rik (NM_019688.1,917-935).
ctgacgcccacatgagaat

SEQ ID NO: 531363 - DNA, 19 bp, Mus musculus
  siRNA target sequence for 5730402K07Rik (NM_019688.1,919-937).
gacgcccacatgagaatga

SEQ ID NO: 531364 - DNA, 19 bp, Mus musculus
  siRNA target sequence for 5730402K07Rik (NM_019688.1,990-1008).
cgacgagctccttcatatt

SEQ ID NO: 531365 - DNA, 19 bp, Mus musculus
  siRNA target sequence for 5730402K07Rik (NM_019688.1,991-1009).
gacgagctccttcatatta

SEQ ID NO: 531366 - DNA, 19 bp, Mus musculus
  siRNA target sequence for 5730402K07Rik (NM_019688.1,1047-1065).
gttagcaggtgttctcatt

SEQ ID NO: 531367 - DNA, 19 bp, Mus musculus
  siRNA target sequence for 5730402K07Rik (NM_019688.1,1054-1072).
ggtgttctcatttttgagt

SEQ ID NO: 531368 - DNA, 19 bp, Mus musculus
  siRNA target sequence for 5730402K07Rik (NM_019688.1,1140-1158).
gaaaggatccgtgaatgta

SEQ ID NO: 531369 - DNA, 19 bp, Mus musculus
  siRNA target sequence for 5730402K07Rik (NM_019688.1,1145-1163).
gatccgtgaatgtagtcat

SEQ ID NO: 531370 - DNA, 19 bp, Mus musculus
  siRNA target sequence for 5730402K07Rik (NM_019688.1,1148-1166).
ccgtgaatgtagtcattta

SEQ ID NO: 531371 - DNA, 19 bp, Mus musculus
  siRNA target sequence for 5730402K07Rik (NM_019688.1,1149-1167).
cgtgaatgtagtcatttat

SEQ ID NO: 531372 - DNA, 19 bp, Mus musculus
  siRNA target sequence for 5730402K07Rik (NM_019688.1,1211-1229).
gcaagttagctctagtgaa

SEQ ID NO: 531373 - DNA, 19 bp, Mus musculus
  siRNA target sequence for 5730402K07Rik (NM_019688.1,1241-1259).
gagctgcctccattgttct

SEQ ID NO: 531374 - DNA, 19 bp, Mus musculus
  siRNA target sequence for 5730402K07Rik (NM_019688.1,1267-1285).
gataattgtcacttcctaa

SEQ ID NO: 531375 - DNA, 19 bp, Mus musculus
  siRNA target sequence for 5730402K07Rik (NM_019688.1,1320-1338).
ggacgttgaggcgaataca

SEQ ID NO: 531376 - DNA, 19 bp, Mus musculus
  siRNA target sequence for 5730402K07Rik (NM_019688.1,1331-1349).
cgaatacagtcagacttaa

SEQ ID NO: 531377 - DNA, 19 bp, Mus musculus
  siRNA target sequence for 5730402K07Rik (NM_019688.1,1332-1350).
gaatacagtcagacttaaa

SEQ ID NO: 531378 - DNA, 19 bp, Mus musculus
  siRNA target sequence for 5730402K07Rik (NM_019688.1,1423-1441).
cagcctcagcaaaagtata

SEQ ID NO: 531379 - DNA, 19 bp, Mus musculus
  siRNA target sequence for 5730402K07Rik (NM_019688.1,1425-1443).
gcctcagcaaaagtatact

SEQ ID NO: 531380 - DNA, 19 bp, Mus musculus
  siRNA target sequence for 5730402K07Rik (NM_019688.1,1497-1515).
ccttgagccatcgttgaat

SEQ ID NO: 531381 - DNA, 19 bp, Mus musculus
  siRNA target sequence for 5730402K07Rik (NM_019688.1,1519-1537).
gcaacagattcggttttaa

SEQ ID NO: 531382 - DNA, 19 bp, Mus musculus
  siRNA target sequence for 5730402K07Rik (NM_019688.1,1546-1564).
gttatgatgcactgtgttt

SEQ ID NO: 531383 - DNA, 19 bp, Mus musculus
  siRNA target sequence for 5730402K07Rik (NM_019688.1,1592-1610).
cccttgtggcccattacca

SEQ ID NO: 531384 - DNA, 19 bp, Mus musculus
  siRNA target sequence for 5730402K07Rik (NM_019688.1,1628-1646).
gtaccgagcaggagagaat

SEQ ID NO: 531385 - DNA, 19 bp, Mus musculus
  siRNA target sequence for 5730402K07Rik (NM_019688.1,1648-1666).
gattatgccctcaacaaca

SEQ ID NO: 531386 - DNA, 19 bp, Mus musculus
  siRNA target sequence for 5730402K07Rik (NM_019688.1,1830-1848).
gattgtcaagcaaatctca

SEQ ID NO: 531387 - DNA, 19 bp, Mus musculus
  siRNA target sequence for 5730402K07Rik (NM_019688.1,1885-1903).
cttttgcaacagttcaaca

SEQ ID NO: 531388 - DNA, 19 bp, Mus musculus
  siRNA target sequence for 5730402K07Rik (NM_019688.1,1923-1941).
gaagcgtcagcctattcgt

SEQ ID NO: 531389 - DNA, 19 bp, Mus musculus
  siRNA target sequence for 5730402K07Rik (NM_019688.1,1974-1992).
catcgaccacacctatact

SEQ ID NO: 531390 - DNA, 19 bp, Mus musculus
  siRNA target sequence for 5730402K07Rik (NM_019688.1,1980-1998).
ccacacctatactaccatt

SEQ ID NO: 531391 - DNA, 19 bp, Mus musculus
  siRNA target sequence for 5730402K07Rik (NM_019688.1,2036-2054).
gtgcagtagctgacaaact

SEQ ID NO: 531392 - DNA, 19 bp, Mus musculus
  siRNA target sequence for 5730402K07Rik (NM_019688.1,2069-2087).
gcctgatcatcgtcaagat

SEQ ID NO: 531393 - DNA, 19 bp, Mus musculus
  siRNA target sequence for 5730402K07Rik (NM_019688.1,2071-2089).
ctgatcatcgtcaagatga

SEQ ID NO: 531394 - DNA, 19 bp, Mus musculus
  siRNA target sequence for 5730402K07Rik (NM_019688.1,2109-2127).
ggtgctgaaatctaatgat

SEQ ID NO: 531395 - DNA, 19 bp, Mus musculus
  siRNA target sequence for 5730402K07Rik (NM_019688.1,2120-2138).
ctaatgatgtttcagtatt

SEQ ID NO: 531396 - DNA, 19 bp, Mus musculus
  siRNA target sequence for 5730402K07Rik (NM_019688.1,2125-2143).
gatgtttcagtatttacga

SEQ ID NO: 531397 - DNA, 19 bp, Mus musculus
  siRNA target sequence for 5730402K07Rik (NM_019688.1,2142-2160).
gacgctcaccattaatgga

SEQ ID NO: 531398 - DNA, 19 bp, Mus musculus
  siRNA target sequence for 5730402K07Rik (NM_019688.1,2171-2189).
cctgcccgagagagcaatt

SEQ ID NO: 531399 - DNA, 19 bp, Mus musculus
  siRNA target sequence for 5730402K07Rik (NM_019688.1,2174-2192).
gcccgagagagcaattcga

SEQ ID NO: 531400 - DNA, 19 bp, Mus musculus
  siRNA target sequence for 5730402K07Rik (NM_019688.1,2291-2309).
cctacgattgggaactctt

SEQ ID NO: 531401 - DNA, 19 bp, Mus musculus
  siRNA target sequence for 5730402K07Rik (NM_019688.1,2296-2314).
gattgggaactcttcaact

SEQ ID NO: 531402 - DNA, 19 bp, Mus musculus
  siRNA target sequence for 5730402K07Rik (NM_019688.1,2343-2361).
cacatttggaaggcataat

SEQ ID NO: 531403 - DNA, 19 bp, Mus musculus
  siRNA target sequence for 5730402K07Rik (NM_019688.1,2345-2363).
catttggaaggcataattt

SEQ ID NO: 531404 - DNA, 19 bp, Mus musculus
  siRNA target sequence for 5730402K07Rik (NM_019688.1,2372-2390).
ccacggcaaacttggattt

SEQ ID NO: 531405 - DNA, 19 bp, Mus musculus
  siRNA target sequence for 5730402K07Rik (NM_019688.1,2375-2393).
cggcaaacttggatttgtt

SEQ ID NO: 531406 - DNA, 19 bp, Mus musculus
  siRNA target sequence for 5730402K07Rik (NM_019688.1,2391-2409).
gttcctgaggaggtttaat

SEQ ID NO: 531407 - DNA, 19 bp, Mus musculus
  siRNA target sequence for 5730402K07Rik (NM_019688.1,2397-2415).
gaggaggtttaatgaaatt

SEQ ID NO: 531408 - DNA, 19 bp, Mus musculus
  siRNA target sequence for 5730402K07Rik (NM_019688.1,2459-2477).
gcaaacgtgttcagctttt

SEQ ID NO: 531409 - DNA, 19 bp, Mus musculus
  siRNA target sequence for 5730402K07Rik (NM_019688.1,2582-2600).
cactaacgtgggagaaact

SEQ ID NO: 531410 - DNA, 19 bp, Mus musculus
  siRNA target sequence for 5730402K07Rik (NM_019688.1,2599-2617).
ctgccgagcaagtttaaga

SEQ ID NO: 531411 - DNA, 19 bp, Mus musculus
  siRNA target sequence for 5730402K07Rik (NM_019688.1,2602-2620).
ccgagcaagtttaagaagt

SEQ ID NO: 531412 - DNA, 19 bp, Mus musculus
  siRNA target sequence for 5730402K07Rik (NM_019688.1,2606-2624).
gcaagtttaagaagttcta

SEQ ID NO: 531413 - DNA, 19 bp, Mus musculus
  siRNA target sequence for 5730402K07Rik (NM_019688.1,2715-2733).
catgcccttgcttattaaa

SEQ ID NO: 531414 - DNA, 19 bp, Mus musculus
  siRNA target sequence for 5730402K07Rik (NM_019688.1,2724-2742).
gcttattaaagatatgaca

SEQ ID NO: 531415 - DNA, 19 bp, Mus musculus
  siRNA target sequence for 5730402K07Rik (NM_019688.1,2725-2743).
cttattaaagatatgacat

SEQ ID NO: 531416 - DNA, 19 bp, Mus musculus
  siRNA target sequence for 5730402K07Rik (NM_019688.1,2754-2772).
ggggaacaagacgttcatt

SEQ ID NO: 531417 - DNA, 19 bp, Mus musculus
  siRNA target sequence for 5730402K07Rik (NM_019688.1,2760-2778).
caagacgttcattgacaat

SEQ ID NO: 531418 - DNA, 19 bp, Mus musculus
  siRNA target sequence for 5730402K07Rik (NM_019688.1,2858-2876).
cggatgccgctcaagctaa

SEQ ID NO: 531419 - DNA, 19 bp, Mus musculus
  siRNA target sequence for 5730402K07Rik (NM_019688.1,2859-2877).
ggatgccgctcaagctaat

SEQ ID NO: 531420 - DNA, 19 bp, Mus musculus
  siRNA target sequence for 5730402K07Rik (NM_019688.1,2860-2878).
gatgccgctcaagctaata

SEQ ID NO: 531421 - DNA, 19 bp, Mus musculus
  siRNA target sequence for 5730402K07Rik (NM_019688.1,2863-2881).
gccgctcaagctaataaga

SEQ ID NO: 531422 - DNA, 19 bp, Mus musculus
  siRNA target sequence for 5730402K07Rik (NM_019688.1,2889-2907).
ggatgtccggagttatgta

SEQ ID NO: 531423 - DNA, 19 bp, Mus musculus
  siRNA target sequence for 5730402K07Rik (NM_019688.1,2898-2916).
gagttatgtacggcaatta

SEQ ID NO: 531424 - DNA, 19 bp, Mus musculus
  siRNA target sequence for 5730402K07Rik (NM_019688.1,2900-2918).
gttatgtacggcaattaaa

SEQ ID NO: 531425 - DNA, 19 bp, Mus musculus
  siRNA target sequence for 5730402K07Rik (NM_019688.1,2926-2944).
gacaaccagagaactttat

SEQ ID NO: 531426 - DNA, 19 bp, Mus musculus
  siRNA target sequence for 5730402K07Rik (NM_019688.1,2928-2946).
caaccagagaactttatca

SEQ ID NO: 531427 - DNA, 19 bp, Mus musculus
  siRNA target sequence for 6030404E16Rik (NM_172765.1,374-392).
gggtgtgaaaacatttact

SEQ ID NO: 531428 - DNA, 19 bp, Mus musculus
  siRNA target sequence for 6030404E16Rik (NM_172765.1,477-495).
cgtgtccaggacaaaatct

SEQ ID NO: 531429 - DNA, 19 bp, Mus musculus
  siRNA target sequence for 6030404E16Rik (NM_172765.1,536-554).
ctttcgaaccaaacttgtt

SEQ ID NO: 531430 - DNA, 19 bp, Mus musculus
  siRNA target sequence for 6030404E16Rik (NM_172765.1,610-628).
ctggctttatacctctttt

SEQ ID NO: 531431 - DNA, 19 bp, Mus musculus
  siRNA target sequence for 6030404E16Rik (NM_172765.1,613-631).
gctttatacctcttttaga

SEQ ID NO: 531432 - DNA, 19 bp, Mus musculus
  siRNA target sequence for 6030404E16Rik (NM_172765.1,641-659).
cacagccactctgtcaatt

SEQ ID NO: 531433 - DNA, 19 bp, Mus musculus
  siRNA target sequence for 6030404E16Rik (NM_172765.1,643-661).
cagccactctgtcaattaa

SEQ ID NO: 531434 - DNA, 19 bp, Mus musculus
  siRNA target sequence for 6030404E16Rik (NM_172765.1,653-671).
gtcaattaacacggaaaat

SEQ ID NO: 531435 - DNA, 19 bp, Mus musculus
  siRNA target sequence for 6030404E16Rik (NM_172765.1,655-673).
caattaacacggaaaatat

SEQ ID NO: 531436 - DNA, 19 bp, Mus musculus
  siRNA target sequence for 6030404E16Rik (NM_172765.1,684-702).
ctagcggcagccagctata

SEQ ID NO: 531437 - DNA, 19 bp, Mus musculus
  siRNA target sequence for 6030404E16Rik (NM_172765.1,689-707).
ggcagccagctatatgcaa

SEQ ID NO: 531438 - DNA, 19 bp, Mus musculus
  siRNA target sequence for 6030404E16Rik (NM_172765.1,693-711).
gccagctatatgcaaatgt

SEQ ID NO: 531439 - DNA, 19 bp, Mus musculus
  siRNA target sequence for 6030404E16Rik (NM_172765.1,695-713).
cagctatatgcaaatgttt

SEQ ID NO: 531440 - DNA, 19 bp, Mus musculus
  siRNA target sequence for 6030404E16Rik (NM_172765.1,710-728).
gtttagtgttgctagtaca

SEQ ID NO: 531441 - DNA, 19 bp, Mus musculus
  siRNA target sequence for 6030404E16Rik (NM_172765.1,735-753).
gagttcatgaagtcaagta

SEQ ID NO: 531442 - DNA, 19 bp, Mus musculus
  siRNA target sequence for 6030404E16Rik (NM_172765.1,912-930).
cggaggaagcgcaaaagct

SEQ ID NO: 531443 - DNA, 19 bp, Mus musculus
  siRNA target sequence for 6030404E16Rik (NM_172765.1,913-931).
ggaggaagcgcaaaagcta

SEQ ID NO: 531444 - DNA, 19 bp, Mus musculus
  siRNA target sequence for 6030404E16Rik (NM_172765.1,947-965).
cgagagtcccgtgaaatgt

SEQ ID NO: 531445 - DNA, 19 bp, Mus musculus
  siRNA target sequence for 6030404E16Rik (NM_172765.1,979-997).
gttccccccaggtactgaa

SEQ ID NO: 531446 - DNA, 19 bp, Mus musculus
  siRNA target sequence for 6030404E16Rik (NM_172765.1,1029-1047).
cagccagttgactcttctt

SEQ ID NO: 531447 - DNA, 19 bp, Mus musculus
  siRNA target sequence for 6030404E16Rik (NM_172765.1,1230-1248).
gtccgggtcaaagtagaaa

SEQ ID NO: 531448 - DNA, 19 bp, Mus musculus
  siRNA target sequence for 6030404E16Rik (NM_172765.1,1232-1250).
ccgggtcaaagtagaaaga

SEQ ID NO: 531449 - DNA, 19 bp, Mus musculus
  siRNA target sequence for 6030404E16Rik (NM_172765.1,1233-1251).
cgggtcaaagtagaaagat

SEQ ID NO: 531450 - DNA, 19 bp, Mus musculus
  siRNA target sequence for 6030404E16Rik (NM_172765.1,1234-1252).
gggtcaaagtagaaagatt

SEQ ID NO: 531451 - DNA, 19 bp, Mus musculus
  siRNA target sequence for 6330500C13Rik (NM_153165.1,401-419).
gacgtggaaggattctgtt

SEQ ID NO: 531452 - DNA, 19 bp, Mus musculus
  siRNA target sequence for 6330500C13Rik (NM_153165.1,463-481).
gtatgaggagggattgctt

SEQ ID NO: 531453 - DNA, 19 bp, Mus musculus
  siRNA target sequence for 6330500C13Rik (NM_153165.1,539-557).
gccacccagagtgattact

SEQ ID NO: 531454 - DNA, 19 bp, Mus musculus
  siRNA target sequence for 6330500C13Rik (NM_153165.1,540-558).
ccacccagagtgattactt

SEQ ID NO: 531455 - DNA, 19 bp, Mus musculus
  siRNA target sequence for 6330500C13Rik (NM_153165.1,591-609).
gagatcaggacaaaattca

SEQ ID NO: 531456 - DNA, 19 bp, Mus musculus
  siRNA target sequence for 6330500C13Rik (NM_153165.1,633-651).
gtttcagccacgttcttca

SEQ ID NO: 531457 - DNA, 19 bp, Mus musculus
  siRNA target sequence for 6330500C13Rik (NM_153165.1,639-657).
gccacgttcttcagtttat

SEQ ID NO: 531458 - DNA, 19 bp, Mus musculus
  siRNA target sequence for 6330500C13Rik (NM_153165.1,641-659).
cacgttcttcagtttatgt

SEQ ID NO: 531459 - DNA, 19 bp, Mus musculus
  siRNA target sequence for 6330500C13Rik (NM_153165.1,658-676).
gtattatggaactatagaa

SEQ ID NO: 531460 - DNA, 19 bp, Mus musculus
  siRNA target sequence for 6330500C13Rik (NM_153165.1,688-706).
cactgtacatgaaatcctt

SEQ ID NO: 531461 - DNA, 19 bp, Mus musculus
  siRNA target sequence for 6330500C13Rik (NM_153165.1,718-736).
gtatgttcagcttatagaa

SEQ ID NO: 531462 - DNA, 19 bp, Mus musculus
  siRNA target sequence for 6330500C13Rik (NM_153165.1,767-785).
gccaaaatctgcttagaaa

SEQ ID NO: 531463 - DNA, 19 bp, Mus musculus
  siRNA target sequence for 6330500C13Rik (NM_153165.1,812-830).
gatgatttcggtgttaaca

SEQ ID NO: 531464 - DNA, 19 bp, Mus musculus
  siRNA target sequence for 6330500C13Rik (NM_153165.1,923-941).
gagaagctcatgtcttatt

SEQ ID NO: 531465 - DNA, 19 bp, Mus musculus
  siRNA target sequence for 6330500C13Rik (NM_153165.1,928-946).
gctcatgtcttatttggat

SEQ ID NO: 531466 - DNA, 19 bp, Mus musculus
  siRNA target sequence for 6330500C13Rik (NM_153165.1,960-978).
gcaggtttccagaaattga

SEQ ID NO: 531467 - DNA, 19 bp, Mus musculus
  siRNA target sequence for 6330500C13Rik (NM_153165.1,1035-1053).
cagataccatcattcagaa

SEQ ID NO: 531468 - DNA, 19 bp, Mus musculus
  siRNA target sequence for 6330500C13Rik (NM_153165.1,1076-1094).
ccatccagcgtctttgaga

SEQ ID NO: 531469 - DNA, 19 bp, Mus musculus
  siRNA target sequence for 8230402K04 (NM_177755.2,230-248).
cagatggggttgtcttcaa

SEQ ID NO: 531470 - DNA, 19 bp, Mus musculus
  siRNA target sequence for 8230402K04 (NM_177755.2,429-447).
ggccaaagtgcagatgaaa

SEQ ID NO: 531471 - DNA, 19 bp, Mus musculus
  siRNA target sequence for 8230402K04 (NM_177755.2,466-484).
ctggagcaggtcattacgt

SEQ ID NO: 531472 - DNA, 19 bp, Mus musculus
  siRNA target sequence for 8230402K04 (NM_177755.2,468-486).
ggagcaggtcattacgtat

SEQ ID NO: 531473 - DNA, 19 bp, Mus musculus
  siRNA target sequence for 8230402K04 (NM_177755.2,472-490).
caggtcattacgtatgtgt

SEQ ID NO: 531474 - DNA, 19 bp, Mus musculus
  siRNA target sequence for 8230402K04 (NM_177755.2,474-492).
ggtcattacgtatgtgtat

SEQ ID NO: 531475 - DNA, 19 bp, Mus musculus
  siRNA target sequence for 8230402K04 (NM_177755.2,633-651).
cagactcgcagaaatctta

SEQ ID NO: 531476 - DNA, 19 bp, Mus musculus
  siRNA target sequence for 8230402K04 (NM_177755.2,637-655).
ctcgcagaaatcttaagct

SEQ ID NO: 531477 - DNA, 19 bp, Mus musculus
  siRNA target sequence for 8230402K04 (NM_177755.2,1010-1028).
gtgcccaggattgtaaact

SEQ ID NO: 531478 - DNA, 19 bp, Mus musculus
  siRNA target sequence for 8230402K04 (NM_177755.2,1268-1286).
gtgtgtatatcttttctct

SEQ ID NO: 531479 - DNA, 19 bp, Mus musculus
  siRNA target sequence for 8230402K04 (NM_177755.2,1497-1515).
gaaggaccaaagactctat

SEQ ID NO: 531480 - DNA, 19 bp, Mus musculus
  siRNA target sequence for 8230402K04 (NM_177755.2,1503-1521).
ccaaagactctatcttttt

SEQ ID NO: 531481 - DNA, 19 bp, Mus musculus
  siRNA target sequence for 8230402K04 (NM_177755.2,1553-1571).
gccttatccaggtttacca

SEQ ID NO: 531482 - DNA, 19 bp, Mus musculus
  siRNA target sequence for 8230402K04 (NM_177755.2,1561-1579).
caggtttaccacatttcca

SEQ ID NO: 531483 - DNA, 19 bp, Mus musculus
  siRNA target sequence for 8230402K04 (NM_177755.2,1646-1664).
gggaacagatcgtcattgt

SEQ ID NO: 531484 - DNA, 19 bp, Mus musculus
  siRNA target sequence for 8230402K04 (NM_177755.2,1647-1665).
ggaacagatcgtcattgta

SEQ ID NO: 531485 - DNA, 19 bp, Mus musculus
  siRNA target sequence for 8230402K04 (NM_177755.2,1659-1677).
cattgtaggaggttacaca

SEQ ID NO: 531486 - DNA, 19 bp, Mus musculus
  siRNA target sequence for 8230402K04 (NM_177755.2,1695-1713).
cgatcctcagtccaacaaa

SEQ ID NO: 531487 - DNA, 19 bp, Mus musculus
  siRNA target sequence for 8230402K04 (NM_177755.2,1696-1714).
gatcctcagtccaacaaat

SEQ ID NO: 531488 - DNA, 19 bp, Mus musculus
  siRNA target sequence for 8230402K04 (NM_177755.2,1719-1737).
caagtgtgcggacatgaaa

SEQ ID NO: 531489 - DNA, 19 bp, Mus musculus
  siRNA target sequence for 8230402K04 (NM_177755.2,1885-1903).
cagctacctcacaaactct

SEQ ID NO: 531490 - DNA, 19 bp, Mus musculus
  siRNA target sequence for A830092L04Rik (NM_146253.2,669-687).
ggctgctgagtctgatgtt

SEQ ID NO: 531491 - DNA, 19 bp, Mus musculus
  siRNA target sequence for A830092L04Rik (NM_146253.2,713-731).
gagatgtggtcctacagaa

SEQ ID NO: 531492 - DNA, 19 bp, Mus musculus
  siRNA target sequence for A830092L04Rik (NM_146253.2,715-733).
gatgtggtcctacagaaaa

SEQ ID NO: 531493 - DNA, 19 bp, Mus musculus
  siRNA target sequence for A830092L04Rik (NM_146253.2,718-736).
gtggtcctacagaaaatga

SEQ ID NO: 531494 - DNA, 19 bp, Mus musculus
  siRNA target sequence for A830092L04Rik (NM_146253.2,720-738).
ggtcctacagaaaatgaat

SEQ ID NO: 531495 - DNA, 19 bp, Mus musculus
  siRNA target sequence for A830092L04Rik (NM_146253.2,741-759).
cttgagacagcagaattta

SEQ ID NO: 531496 - DNA, 19 bp, Mus musculus
  siRNA target sequence for A830092L04Rik (NM_146253.2,820-838).
gctgcttgctccactttca

SEQ ID NO: 531497 - DNA, 19 bp, Mus musculus
  siRNA target sequence for A830092L04Rik (NM_146253.2,821-839).
ctgcttgctccactttcat

SEQ ID NO: 531498 - DNA, 19 bp, Mus musculus
  siRNA target sequence for A830092L04Rik (NM_146253.2,1048-1066).
gaaattgacctttctatga

SEQ ID NO: 531499 - DNA, 19 bp, Mus musculus
  siRNA target sequence for A830092L04Rik (NM_146253.2,1141-1159).
gactgtgagatcattgaaa

SEQ ID NO: 531500 - DNA, 19 bp, Mus musculus
  siRNA target sequence for A830092L04Rik (NM_146253.2,1143-1161).
ctgtgagatcattgaaatt

SEQ ID NO: 531501 - DNA, 19 bp, Mus musculus
  siRNA target sequence for A830092L04Rik (NM_146253.2,1172-1190).
gtcctgtaaacctagattt

SEQ ID NO: 531502 - DNA, 19 bp, Mus musculus
  siRNA target sequence for A830092L04Rik (NM_146253.2,1175-1193).
ctgtaaacctagatttcca

SEQ ID NO: 531503 - DNA, 19 bp, Mus musculus
  siRNA target sequence for A830092L04Rik (NM_146253.2,1283-1301).
cagtagatggtggctttaa

SEQ ID NO: 531504 - DNA, 19 bp, Mus musculus
  siRNA target sequence for A830092L04Rik (NM_146253.2,1288-1306).
gatggtggctttaaagaga

SEQ ID NO: 531505 - DNA, 19 bp, Mus musculus
  siRNA target sequence for A830092L04Rik (NM_146253.2,1320-1338).
cctccatgtagaatccatt

SEQ ID NO: 531506 - DNA, 19 bp, Mus musculus
  siRNA target sequence for A830092L04Rik (NM_146253.2,1321-1339).
ctccatgtagaatccatta

SEQ ID NO: 531507 - DNA, 19 bp, Mus musculus
  siRNA target sequence for A830092L04Rik (NM_146253.2,1324-1342).
catgtagaatccattagta

SEQ ID NO: 531508 - DNA, 19 bp, Mus musculus
  siRNA target sequence for A830092L04Rik (NM_146253.2,1335-1353).
cattagtacagatgatgta

SEQ ID NO: 531509 - DNA, 19 bp, Mus musculus
  siRNA target sequence for A830092L04Rik (NM_146253.2,1374-1392).
gccttgtacctcatccaaa

SEQ ID NO: 531510 - DNA, 19 bp, Mus musculus
  siRNA target sequence for A830092L04Rik (NM_146253.2,1385-1403).
catccaaagcaggcatata

SEQ ID NO: 531511 - DNA, 19 bp, Mus musculus
  siRNA target sequence for A830092L04Rik (NM_146253.2,1388-1406).
ccaaagcaggcatatattt

SEQ ID NO: 531512 - DNA, 19 bp, Mus musculus
  siRNA target sequence for A830092L04Rik (NM_146253.2,1417-1435).
cagcattcattgatcaatt

SEQ ID NO: 531513 - DNA, 19 bp, Mus musculus
  siRNA target sequence for A830092L04Rik (NM_146253.2,1420-1438).
cattcattgatcaattcta

SEQ ID NO: 531514 - DNA, 19 bp, Mus musculus
  siRNA target sequence for A830092L04Rik (NM_146253.2,1482-1500).
ggggttattttctgagaat

SEQ ID NO: 531515 - DNA, 19 bp, Mus musculus
  siRNA target sequence for A830092L04Rik (NM_146253.2,1483-1501).
gggttattttctgagaatt

SEQ ID NO: 531516 - DNA, 19 bp, Mus musculus
  siRNA target sequence for A830092L04Rik (NM_146253.2,1497-1515).
gaattctgatggaagtcat

SEQ ID NO: 531517 - DNA, 19 bp, Mus musculus
  siRNA target sequence for A830092L04Rik (NM_146253.2,1511-1529).
gtcatggtacggtaaatga

SEQ ID NO: 531518 - DNA, 19 bp, Mus musculus
  siRNA target sequence for A830092L04Rik (NM_146253.2,1540-1558).
ctggatgagaatttttcct

SEQ ID NO: 531519 - DNA, 19 bp, Mus musculus
  siRNA target sequence for A830092L04Rik (NM_146253.2,1577-1595).
ggtgtccaaggggatttct

SEQ ID NO: 531520 - DNA, 19 bp, Mus musculus
  siRNA target sequence for A830092L04Rik (NM_146253.2,1578-1596).
gtgtccaaggggatttctt

SEQ ID NO: 531521 - DNA, 19 bp, Mus musculus
  siRNA target sequence for A830092L04Rik (NM_146253.2,1580-1598).
gtccaaggggatttcttca

SEQ ID NO: 531522 - DNA, 19 bp, Mus musculus
  siRNA target sequence for A830092L04Rik (NM_146253.2,1583-1601).
caaggggatttcttcatgt

SEQ ID NO: 531523 - DNA, 19 bp, Mus musculus
  siRNA target sequence for A830092L04Rik (NM_146253.2,1586-1604).
ggggatttcttcatgtaga

SEQ ID NO: 531524 - DNA, 19 bp, Mus musculus
  siRNA target sequence for A830092L04Rik (NM_146253.2,1615-1633).
cgacaccttaagatgcata

SEQ ID NO: 531525 - DNA, 19 bp, Mus musculus
  siRNA target sequence for A830092L04Rik (NM_146253.2,1616-1634).
gacaccttaagatgcataa

SEQ ID NO: 531526 - DNA, 19 bp, Mus musculus
  siRNA target sequence for A830092L04Rik (NM_146253.2,1699-1717).
cgaggacacatgggtataa

SEQ ID NO: 531527 - DNA, 19 bp, Mus musculus
  siRNA target sequence for A830092L04Rik (NM_146253.2,1711-1729).
ggtataaggccctttcagt

SEQ ID NO: 531528 - DNA, 19 bp, Mus musculus
  siRNA target sequence for A830092L04Rik (NM_146253.2,1793-1811).
gtggggatcggccatataa

SEQ ID NO: 531529 - DNA, 19 bp, Mus musculus
  siRNA target sequence for A830092L04Rik (NM_146253.2,1804-1822).
ccatataaatgccattgtt

SEQ ID NO: 531530 - DNA, 19 bp, Mus musculus
  siRNA target sequence for A830092L04Rik (NM_146253.2,1814-1832).
gccattgttgtgatatgga

SEQ ID NO: 531531 - DNA, 19 bp, Mus musculus
  siRNA target sequence for A830092L04Rik (NM_146253.2,1880-1898).
gcaggagcagtggtgaaaa

SEQ ID NO: 531532 - DNA, 19 bp, Mus musculus
  siRNA target sequence for A930014K01Rik (NM_175537.2,539-557).
cagtactctccatcttaaa

SEQ ID NO: 531533 - DNA, 19 bp, Mus musculus
  siRNA target sequence for A930014K01Rik (NM_175537.2,564-582).
gcgcattcggggcatctta

SEQ ID NO: 531534 - DNA, 19 bp, Mus musculus
  siRNA target sequence for A930014K01Rik (NM_175537.2,565-583).
cgcattcggggcatcttat

SEQ ID NO: 531535 - DNA, 19 bp, Mus musculus
  siRNA target sequence for A930014K01Rik (NM_175537.2,721-739).
ctgaaagccgaagtgttta

SEQ ID NO: 531536 - DNA, 19 bp, Mus musculus
  siRNA target sequence for A930014K01Rik (NM_175537.2,727-745).
gccgaagtgtttacagaaa

SEQ ID NO: 531537 - DNA, 19 bp, Mus musculus
  siRNA target sequence for A930014K01Rik (NM_175537.2,728-746).
ccgaagtgtttacagaaat

SEQ ID NO: 531538 - DNA, 19 bp, Mus musculus
  siRNA target sequence for A930014K01Rik (NM_175537.2,789-807).
ggaaaccgtcactgatctt

SEQ ID NO: 531539 - DNA, 19 bp, Mus musculus
  siRNA target sequence for A930014K01Rik (NM_175537.2,828-846).
gggaatatcattcttagaa

SEQ ID NO: 531540 - DNA, 19 bp, Mus musculus
  siRNA target sequence for A930014K01Rik (NM_175537.2,830-848).
gaatatcattcttagaaga

SEQ ID NO: 531541 - DNA, 19 bp, Mus musculus
  siRNA target sequence for A930014K01Rik (NM_175537.2,856-874).
gaccgcaacttctcaaatt

SEQ ID NO: 531542 - DNA, 19 bp, Mus musculus
  siRNA target sequence for A930014K01Rik (NM_175537.2,889-907).
gtagtctgcattactgaaa

SEQ ID NO: 531543 - DNA, 19 bp, Mus musculus
  siRNA target sequence for A930014K01Rik (NM_175537.2,902-920).
ctgaaaagggagtggttaa

SEQ ID NO: 531544 - DNA, 19 bp, Mus musculus
  siRNA target sequence for A930014K01Rik (NM_175537.2,993-1011).
catcattgagacggaaaat

SEQ ID NO: 531545 - DNA, 19 bp, Mus musculus
  siRNA target sequence for A930014K01Rik (NM_175537.2,1004-1022).
cggaaaatagtaataacat

SEQ ID NO: 531546 - DNA, 19 bp, Mus musculus
  siRNA target sequence for A930014K01Rik (NM_175537.2,1289-1307).
cccaaacccaggattctga

SEQ ID NO: 531547 - DNA, 19 bp, Mus musculus
  siRNA target sequence for A930014K01Rik (NM_175537.2,1343-1361).
cctgcccagaggtgaatca

SEQ ID NO: 531548 - DNA, 19 bp, Mus musculus
  siRNA target sequence for A930014K01Rik (NM_175537.2,1412-1430).
gcaatgaaggggatatcca

SEQ ID NO: 531549 - DNA, 19 bp, Mus musculus
  siRNA target sequence for A930014K01Rik (NM_175537.2,1696-1714).
ccaccgttcttggaaaact

SEQ ID NO: 531550 - DNA, 19 bp, Mus musculus
  siRNA target sequence for A930014K01Rik (NM_175537.2,1697-1715).
caccgttcttggaaaacta

SEQ ID NO: 531551 - DNA, 19 bp, Mus musculus
  siRNA target sequence for A930014K01Rik (NM_175537.2,1707-1725).
ggaaaactaccccactatt

SEQ ID NO: 531552 - DNA, 19 bp, Mus musculus
  siRNA target sequence for A930014K01Rik (NM_175537.2,1716-1734).
ccccactattggtcaagat

SEQ ID NO: 531553 - DNA, 19 bp, Mus musculus
  siRNA target sequence for A930014K01Rik (NM_175537.2,1746-1764).
cagaagcccggaatcatta

SEQ ID NO: 531554 - DNA, 19 bp, Mus musculus
  siRNA target sequence for A930014K01Rik (NM_175537.2,1819-1837).
gcggaccacatggtgaaat

SEQ ID NO: 531555 - DNA, 19 bp, Mus musculus
  siRNA target sequence for A930014K01Rik (NM_175537.2,1820-1838).
cggaccacatggtgaaatt

SEQ ID NO: 531556 - DNA, 19 bp, Mus musculus
  siRNA target sequence for A930014K01Rik (NM_175537.2,1825-1843).
cacatggtgaaatttgtga

SEQ ID NO: 531557 - DNA, 19 bp, Mus musculus
  siRNA target sequence for A930014K01Rik (NM_175537.2,1869-1887).
cgtgtgcaaacgtagttat

SEQ ID NO: 531558 - DNA, 19 bp, Mus musculus
  siRNA target sequence for A930014K01Rik (NM_175537.2,1983-2001).
gtacaggacgcgacatgaa

SEQ ID NO: 531559 - DNA, 19 bp, Mus musculus
  siRNA target sequence for A930014K01Rik (NM_175537.2,2021-2039).
ggcggtaccagtgcatttt

SEQ ID NO: 531560 - DNA, 19 bp, Mus musculus
  siRNA target sequence for A930014K01Rik (NM_175537.2,2031-2049).
gtgcattttctgtcttgaa

SEQ ID NO: 531561 - DNA, 19 bp, Mus musculus
  siRNA target sequence for A930014K01Rik (NM_175537.2,2058-2076).
gacctactacatactaaaa

SEQ ID NO: 531562 - DNA, 19 bp, Mus musculus
  siRNA target sequence for A930014K01Rik (NM_175537.2,2089-2107).
gtcctttcatgccatagat

SEQ ID NO: 531563 - DNA, 19 bp, Mus musculus
  siRNA target sequence for A930014K01Rik (NM_175537.2,2091-2109).
cctttcatgccatagatca

SEQ ID NO: 531564 - DNA, 19 bp, Mus musculus
  siRNA target sequence for AA408656 (NM_030702.2,248-266).
cccggcaccacttactcaa

SEQ ID NO: 531565 - DNA, 19 bp, Mus musculus
  siRNA target sequence for AA408656 (NM_030702.2,249-267).
ccggcaccacttactcaaa

SEQ ID NO: 531566 - DNA, 19 bp, Mus musculus
  siRNA target sequence for AA408656 (NM_030702.2,250-268).
cggcaccacttactcaaat

SEQ ID NO: 531567 - DNA, 19 bp, Mus musculus
  siRNA target sequence for AA408656 (NM_030702.2,316-334).
caagtccggtggtggtttt

SEQ ID NO: 531568 - DNA, 19 bp, Mus musculus
  siRNA target sequence for AA408656 (NM_030702.2,515-533).
gctctccgaccctctcata

SEQ ID NO: 531569 - DNA, 19 bp, Mus musculus
  siRNA target sequence for AA408656 (NM_030702.2,518-536).
ctccgaccctctcatagaa

SEQ ID NO: 531570 - DNA, 19 bp, Mus musculus
  siRNA target sequence for AA408656 (NM_030702.2,520-538).
ccgaccctctcatagaaaa

SEQ ID NO: 531571 - DNA, 19 bp, Mus musculus
  siRNA target sequence for AA408656 (NM_030702.2,584-602).
ctgctctactcaaaaagca

SEQ ID NO: 531572 - DNA, 19 bp, Mus musculus
  siRNA target sequence for AA408656 (NM_030702.2,1853-1871).
ctccgtcgtcagatctaca

SEQ ID NO: 531573 - DNA, 19 bp, Mus musculus
  siRNA target sequence for Abtb1 (NM_030251.1,58-76).
ggataccagcgacttgttt

SEQ ID NO: 531574 - DNA, 19 bp, Mus musculus
  siRNA target sequence for Abtb1 (NM_030251.1,161-179).
gacagcacccctttgtact

SEQ ID NO: 531575 - DNA, 19 bp, Mus musculus
  siRNA target sequence for Abtb1 (NM_030251.1,340-358).
caggaggcgggattactat

SEQ ID NO: 531576 - DNA, 19 bp, Mus musculus
  siRNA target sequence for Abtb1 (NM_030251.1,342-360).
ggaggcgggattactatga

SEQ ID NO: 531577 - DNA, 19 bp, Mus musculus
  siRNA target sequence for Abtb1 (NM_030251.1,348-366).
gggattactatgacgattt

SEQ ID NO: 531578 - DNA, 19 bp, Mus musculus
  siRNA target sequence for Abtb1 (NM_030251.1,586-604).
cttggacatcggtgtagaa

SEQ ID NO: 531579 - DNA, 19 bp, Mus musculus
  siRNA target sequence for Abtb1 (NM_030251.1,720-738).
gtgtgaaggtgctgactat

SEQ ID NO: 531580 - DNA, 19 bp, Mus musculus
  siRNA target sequence for Abtb1 (NM_030251.1,759-777).
cccggttacgggcagatat

SEQ ID NO: 531581 - DNA, 19 bp, Mus musculus
  siRNA target sequence for Abtb1 (NM_030251.1,1030-1048).
ctccccggacatcttcatt

SEQ ID NO: 531582 - DNA, 19 bp, Mus musculus
  siRNA target sequence for Abtb1 (NM_030251.1,1032-1050).
ccccggacatcttcattca

SEQ ID NO: 531583 - DNA, 19 bp, Mus musculus
  siRNA target sequence for Abtb1 (NM_030251.1,1049-1067).
cacgtgttgtactacgtat

SEQ ID NO: 531584 - DNA, 19 bp, Mus musculus
  siRNA target sequence for Abtb1 (NM_030251.1,1051-1069).
cgtgttgtactacgtatat

SEQ ID NO: 531585 - DNA, 19 bp, Mus musculus
  siRNA target sequence for Abtb1 (NM_030251.1,1052-1070).
gtgttgtactacgtatata

SEQ ID NO: 531586 - DNA, 19 bp, Mus musculus
  siRNA target sequence for Abtb1 (NM_030251.1,1054-1072).
gttgtactacgtatatagt

SEQ ID NO: 531587 - DNA, 19 bp, Mus musculus
  siRNA target sequence for Abtb1 (NM_030251.1,1209-1227).
ggcgcatagccaagatgtt

SEQ ID NO: 531588 - DNA, 19 bp, Mus musculus
  siRNA target sequence for Abtb1 (NM_030251.1,1398-1416).
ccagcacggtccagacata

SEQ ID NO: 531589 - DNA, 19 bp, Mus musculus
  siRNA target sequence for Abtb1 (NM_030251.1,1402-1420).
cacggtccagacatacagt

SEQ ID NO: 531590 - DNA, 19 bp, Mus musculus
  siRNA target sequence for Abtb1 (NM_030251.1,1411-1429).
gacatacagtgccattgaa

SEQ ID NO: 531591 - DNA, 19 bp, Mus musculus
  siRNA target sequence for Acrp30 (NM_009605.3,520-538).
ggactctactacttctctt

SEQ ID NO: 531592 - DNA, 19 bp, Mus musculus
  siRNA target sequence for Acrp30 (NM_009605.3,722-740).
gactctatgcagataacgt

SEQ ID NO: 531593 - DNA, 19 bp, Mus musculus
  siRNA target sequence for Acrp30 (NM_009605.3,738-756).
cgtcaacgactctacattt

SEQ ID NO: 531594 - DNA, 19 bp, Mus musculus
  siRNA target sequence for Acrp30 (NM_009605.3,741-759).
caacgactctacatttact

SEQ ID NO: 531595 - DNA, 19 bp, Mus musculus
  siRNA target sequence for Actl6 (NM_031404.3,323-341).
catgtcgcccctcaagaat

SEQ ID NO: 531596 - DNA, 19 bp, Mus musculus
  siRNA target sequence for Actl6 (NM_031404.3,491-509).
gttcgagcagtacaacatt

SEQ ID NO: 531597 - DNA, 19 bp, Mus musculus
  siRNA target sequence for Actl6 (NM_031404.3,510-528).
cctgccttcttcttatgca

SEQ ID NO: 531598 - DNA, 19 bp, Mus musculus
  siRNA target sequence for Actl6 (NM_031404.3,511-529).
ctgccttcttcttatgcaa

SEQ ID NO: 531599 - DNA, 19 bp, Mus musculus
  siRNA target sequence for Actl6 (NM_031404.3,701-719).
ccaggaaatggctattgat

SEQ ID NO: 531600 - DNA, 19 bp, Mus musculus
  siRNA target sequence for Actl6 (NM_031404.3,702-720).
caggaaatggctattgata

SEQ ID NO: 531601 - DNA, 19 bp, Mus musculus
  siRNA target sequence for Actl6 (NM_031404.3,811-829).
ccaagtcctggcataacta

SEQ ID NO: 531602 - DNA, 19 bp, Mus musculus
  siRNA target sequence for Actl6 (NM_031404.3,820-838).
ggcataactacatgtgtaa

SEQ ID NO: 531603 - DNA, 19 bp, Mus musculus
  siRNA target sequence for Actl6 (NM_031404.3,878-896).
gtctgattccccttacgat

SEQ ID NO: 531604 - DNA, 19 bp, Mus musculus
  siRNA target sequence for Actl6 (NM_031404.3,918-936).
cccactgtgcattatgaaa

SEQ ID NO: 531605 - DNA, 19 bp, Mus musculus
  siRNA target sequence for Actl6 (NM_031404.3,964-982).
gcgctgagcgacttcgaat

SEQ ID NO: 531606 - DNA, 19 bp, Mus musculus
  siRNA target sequence for Actl6 (NM_031404.3,992-1010).
cctgtttgatccctctaat

SEQ ID NO: 531607 - DNA, 19 bp, Mus musculus
  siRNA target sequence for Actl6 (NM_031404.3,1017-1035).
ggcctgtccgggaatacca

SEQ ID NO: 531608 - DNA, 19 bp, Mus musculus
  siRNA target sequence for Actl6 (NM_031404.3,1018-1036).
gcctgtccgggaataccat

SEQ ID NO: 531609 - DNA, 19 bp, Mus musculus
  siRNA target sequence for Actl6 (NM_031404.3,1146-1164).
gggttcacagacagactta

SEQ ID NO: 531610 - DNA, 19 bp, Mus musculus
  siRNA target sequence for Actl6 (NM_031404.3,1148-1166).
gttcacagacagacttaat

SEQ ID NO: 531611 - DNA, 19 bp, Mus musculus
  siRNA target sequence for Actl6 (NM_031404.3,1189-1207).
caccgagcatgcgtcttaa

SEQ ID NO: 531612 - DNA, 19 bp, Mus musculus
  siRNA target sequence for Actl6 (NM_031404.3,1192-1210).
cgagcatgcgtcttaagct

SEQ ID NO: 531613 - DNA, 19 bp, Mus musculus
  siRNA target sequence for Actr10 (NM_019785.1,163-181).
ctggtccacgatgtataat

SEQ ID NO: 531614 - DNA, 19 bp, Mus musculus
  siRNA target sequence for Actr10 (NM_019785.1,168-186).
ccacgatgtataattccta

SEQ ID NO: 531615 - DNA, 19 bp, Mus musculus
  siRNA target sequence for Actr10 (NM_019785.1,217-235).
caatcaaagttgttcagta

SEQ ID NO: 531616 - DNA, 19 bp, Mus musculus
  siRNA target sequence for Actr10 (NM_019785.1,247-265).
cagaagaattatattccta

SEQ ID NO: 531617 - DNA, 19 bp, Mus musculus
  siRNA target sequence for Actr10 (NM_019785.1,252-270).
gaattatattcctacctaa

SEQ ID NO: 531618 - DNA, 19 bp, Mus musculus
  siRNA target sequence for Actr10 (NM_019785.1,262-280).
cctacctaaaggaattcat

SEQ ID NO: 531619 - DNA, 19 bp, Mus musculus
  siRNA target sequence for Actr10 (NM_019785.1,273-291).
gaattcatccacatactgt

SEQ ID NO: 531620 - DNA, 19 bp, Mus musculus
  siRNA target sequence for Actr10 (NM_019785.1,336-354).
gttatcgagtcggtgttat

SEQ ID NO: 531621 - DNA, 19 bp, Mus musculus
  siRNA target sequence for Actr10 (NM_019785.1,374-392).
gactctgactcgtgttctt

SEQ ID NO: 531622 - DNA, 19 bp, Mus musculus
  siRNA target sequence for Actr10 (NM_019785.1,380-398).
gactcgtgttctttttaaa

SEQ ID NO: 531623 - DNA, 19 bp, Mus musculus
  siRNA target sequence for Actr10 (NM_019785.1,419-437).
cctacttgctccaagtcat

SEQ ID NO: 531624 - DNA, 19 bp, Mus musculus
  siRNA target sequence for Actr10 (NM_019785.1,447-465).
ctgctgacgcttggaatta

SEQ ID NO: 531625 - DNA, 19 bp, Mus musculus
  siRNA target sequence for Actr10 (NM_019785.1,449-467).
gctgacgcttggaattaat

SEQ ID NO: 531626 - DNA, 19 bp, Mus musculus
  siRNA target sequence for Actr10 (NM_019785.1,450-468).
ctgacgcttggaattaatt

SEQ ID NO: 531627 - DNA, 19 bp, Mus musculus
  siRNA target sequence for Actr10 (NM_019785.1,502-520).
gcctggtgttgcctatcta

SEQ ID NO: 531628 - DNA, 19 bp, Mus musculus
  siRNA target sequence for Actr10 (NM_019785.1,522-540).
gaaggcatcccaatactga

SEQ ID NO: 531629 - DNA, 19 bp, Mus musculus
  siRNA target sequence for Actr10 (NM_019785.1,557-575).
gccgttaggaggaaaagct

SEQ ID NO: 531630 - DNA, 19 bp, Mus musculus
  siRNA target sequence for Actr10 (NM_019785.1,602-620).
gttggaacaatgtactgtt

SEQ ID NO: 531631 - DNA, 19 bp, Mus musculus
  siRNA target sequence for Actr10 (NM_019785.1,678-696).
ggtgtgctagaagatatta

SEQ ID NO: 531632 - DNA, 19 bp, Mus musculus
  siRNA target sequence for Actr10 (NM_019785.1,679-697).
gtgtgctagaagatattaa

SEQ ID NO: 531633 - DNA, 19 bp, Mus musculus
  siRNA target sequence for Actr10 (NM_019785.1,699-717).
gtgcgcacgtgctttgtca

SEQ ID NO: 531634 - DNA, 19 bp, Mus musculus
  siRNA target sequence for Actr10 (NM_019785.1,795-813).
ccaaatgttgactatccat

SEQ ID NO: 531635 - DNA, 19 bp, Mus musculus
  siRNA target sequence for Actr10 (NM_019785.1,796-814).
caaatgttgactatccatt

SEQ ID NO: 531636 - DNA, 19 bp, Mus musculus
  siRNA target sequence for Actr10 (NM_019785.1,810-828).
ccattggatggagagaaaa

SEQ ID NO: 531637 - DNA, 19 bp, Mus musculus
  siRNA target sequence for Actr10 (NM_019785.1,844-862).
gatcaatcagagattcagt

SEQ ID NO: 531638 - DNA, 19 bp, Mus musculus
  siRNA target sequence for Actr10 (NM_019785.1,896-914).
gaagtcagttgccacttta

SEQ ID NO: 531639 - DNA, 19 bp, Mus musculus
  siRNA target sequence for Actr10 (NM_019785.1,1027-1045).
cagaaatacggtatttggt

SEQ ID NO: 531640 - DNA, 19 bp, Mus musculus
  siRNA target sequence for Actr10 (NM_019785.1,1052-1070).
gccaaagtacaaaaagaca

SEQ ID NO: 531641 - DNA, 19 bp, Mus musculus
  siRNA target sequence for Actr10 (NM_019785.1,1078-1096).
ccaagaacttccgaattca

SEQ ID NO: 531642 - DNA, 19 bp, Mus musculus
  siRNA target sequence for Actr10 (NM_019785.1,1079-1097).
caagaacttccgaattcat

SEQ ID NO: 531643 - DNA, 19 bp, Mus musculus
  siRNA target sequence for Actr10 (NM_019785.1,1082-1100).
gaacttccgaattcatact

SEQ ID NO: 531644 - DNA, 19 bp, Mus musculus
  siRNA target sequence for Actr10 (NM_019785.1,1129-1147).
ggttgggaggggctgtttt

SEQ ID NO: 531645 - DNA, 19 bp, Mus musculus
  siRNA target sequence for Actr10 (NM_019785.1,1133-1151).
gggaggggctgtttttgga

SEQ ID NO: 531646 - DNA, 19 bp, Mus musculus
  siRNA target sequence for Actr10 (NM_019785.1,1167-1185).
cttgggagccgctccattt

SEQ ID NO: 531647 - DNA, 19 bp, Mus musculus
  siRNA target sequence for Actr10 (NM_019785.1,1170-1188).
gggagccgctccatttcaa

SEQ ID NO: 531648 - DNA, 19 bp, Mus musculus
  siRNA target sequence for Actr10 (NM_019785.1,1276-1294).
cgcaaccaccgctgatgaa

SEQ ID NO: 531649 - DNA, 19 bp, Mus musculus
  siRNA target sequence for Actr10 (NM_019785.1,1277-1295).
gcaaccaccgctgatgaaa

SEQ ID NO: 531650 - DNA, 19 bp, Mus musculus
  siRNA target sequence for Actr10 (NM_019785.1,1278-1296).
caaccaccgctgatgaaaa

SEQ ID NO: 531651 - DNA, 19 bp, Mus musculus
  siRNA target sequence for Adcy3 (NM_138305.2,338-356).
ctctaccagacctacttca

SEQ ID NO: 531652 - DNA, 19 bp, Mus musculus
  siRNA target sequence for Adcy3 (NM_138305.2,486-504).
gtctggtgttggacatcat

SEQ ID NO: 531653 - DNA, 19 bp, Mus musculus
  siRNA target sequence for Adcy3 (NM_138305.2,1051-1069).
ggaccagcagcagttcaat

SEQ ID NO: 531654 - DNA, 19 bp, Mus musculus
  siRNA target sequence for Adcy3 (NM_138305.2,1061-1079).
cagttcaataccatgtaca

SEQ ID NO: 531655 - DNA, 19 bp, Mus musculus
  siRNA target sequence for Adcy3 (NM_138305.2,1296-1314).
ccgtgtgctccatccttat

SEQ ID NO: 531656 - DNA, 19 bp, Mus musculus
  siRNA target sequence for Adcy3 (NM_138305.2,1429-1447).
gcgctggcagtatgatgta

SEQ ID NO: 531657 - DNA, 19 bp, Mus musculus
  siRNA target sequence for Adcy3 (NM_138305.2,1430-1448).
cgctggcagtatgatgtat

SEQ ID NO: 531658 - DNA, 19 bp, Mus musculus
  siRNA target sequence for Adcy3 (NM_138305.2,1460-1478).
gtcaccgtggcaaacaaga

SEQ ID NO: 531659 - DNA, 19 bp, Mus musculus
  siRNA target sequence for Adcy3 (NM_138305.2,1533-1551).
gcctgaagggggagtttga

SEQ ID NO: 531660 - DNA, 19 bp, Mus musculus
  siRNA target sequence for Adcy3 (NM_138305.2,1578-1596).
gctgcgactacctagatga

SEQ ID NO: 531661 - DNA, 19 bp, Mus musculus
  siRNA target sequence for Adcy3 (NM_138305.2,1581-1599).
gcgactacctagatgagaa

SEQ ID NO: 531662 - DNA, 19 bp, Mus musculus
  siRNA target sequence for Adcy3 (NM_138305.2,1606-1624).
cgaaacctacctcatcatt

SEQ ID NO: 531663 - DNA, 19 bp, Mus musculus
  siRNA target sequence for Adcy3 (NM_138305.2,1938-1956).
ccgcccaggtggtaaagaa

SEQ ID NO: 531664 - DNA, 19 bp, Mus musculus
  siRNA target sequence for Adcy3 (NM_138305.2,2079-2097).
cggccatggtggagatact

SEQ ID NO: 531665 - DNA, 19 bp, Mus musculus
  siRNA target sequence for Adcy3 (NM_138305.2,2083-2101).
catggtggagatactcatt

SEQ ID NO: 531666 - DNA, 19 bp, Mus musculus
  siRNA target sequence for Adcy3 (NM_138305.2,2106-2124).
cctggctgatgacaaacta

SEQ ID NO: 531667 - DNA, 19 bp, Mus musculus
  siRNA target sequence for Adcy3 (NM_138305.2,2107-2125).
ctggctgatgacaaactat

SEQ ID NO: 531668 - DNA, 19 bp, Mus musculus
  siRNA target sequence for Adcy3 (NM_138305.2,2109-2127).
ggctgatgacaaactatgt

SEQ ID NO: 531669 - DNA, 19 bp, Mus musculus
  siRNA target sequence for Adcy3 (NM_138305.2,2185-2203).
catctttcccaggtcattt

SEQ ID NO: 531670 - DNA, 19 bp, Mus musculus
  siRNA target sequence for Adcy3 (NM_138305.2,2269-2287).
catgttagccatcttcatt

SEQ ID NO: 531671 - DNA, 19 bp, Mus musculus
  siRNA target sequence for Adcy3 (NM_138305.2,2532-2550).
ctgtctttgatgaatacga

SEQ ID NO: 531672 - DNA, 19 bp, Mus musculus
  siRNA target sequence for Adcy3 (NM_138305.2,2580-2598).
ctatggtggccttagagaa

SEQ ID NO: 531673 - DNA, 19 bp, Mus musculus
  siRNA target sequence for Adcy3 (NM_138305.2,2690-2708).
gtcatgatgctgagctttt

SEQ ID NO: 531674 - DNA, 19 bp, Mus musculus
  siRNA target sequence for Adcy3 (NM_138305.2,2716-2734).
ctcgcgccacgtggaaaaa

SEQ ID NO: 531675 - DNA, 19 bp, Mus musculus
  siRNA target sequence for Adcy3 (NM_138305.2,2718-2736).
cgcgccacgtggaaaaact

SEQ ID NO: 531676 - DNA, 19 bp, Mus musculus
  siRNA target sequence for Adcy3 (NM_138305.2,2842-2860).
gcatgttgcacgccatttt

SEQ ID NO: 531677 - DNA, 19 bp, Mus musculus
  siRNA target sequence for Adcy3 (NM_138305.2,2908-2926).
cgagattggagtcatgttt

SEQ ID NO: 531678 - DNA, 19 bp, Mus musculus
  siRNA target sequence for Adcy3 (NM_138305.2,2937-2955).
ccaactttgctgacttcta

SEQ ID NO: 531679 - DNA, 19 bp, Mus musculus
  siRNA target sequence for Adcy3 (NM_138305.2,2991-3009).
gtctacgcttcctcaatga

SEQ ID NO: 531680 - DNA, 19 bp, Mus musculus
  siRNA target sequence for Adcy3 (NM_138305.2,2993-3011).
ctacgcttcctcaatgaga

SEQ ID NO: 531681 - DNA, 19 bp, Mus musculus
  siRNA target sequence for Adcy3 (NM_138305.2,3061-3079).
caccaagatcaaaactatt

SEQ ID NO: 531682 - DNA, 19 bp, Mus musculus
  siRNA target sequence for Adcy3 (NM_138305.2,3105-3123).
gagtcacaccagatgtcaa

SEQ ID NO: 531683 - DNA, 19 bp, Mus musculus
  siRNA target sequence for Adcy3 (NM_138305.2,3191-3209).
gacctggctgactttgcat

SEQ ID NO: 531684 - DNA, 19 bp, Mus musculus
  siRNA target sequence for Adcy3 (NM_138305.2,3193-3211).
cctggctgactttgcatta

SEQ ID NO: 531685 - DNA, 19 bp, Mus musculus
  siRNA target sequence for Adcy3 (NM_138305.2,3225-3243).
cgctcacaaacatcaacaa

SEQ ID NO: 531686 - DNA, 19 bp, Mus musculus
  siRNA target sequence for Adcy3 (NM_138305.2,3245-3263).
cagtcattcaacaacttca

SEQ ID NO: 531687 - DNA, 19 bp, Mus musculus
  siRNA target sequence for Adcy3 (NM_138305.2,3268-3286).
gcgcataggcatgaacaaa

SEQ ID NO: 531688 - DNA, 19 bp, Mus musculus
  siRNA target sequence for Adcy3 (NM_138305.2,3317-3335).
cggaaaccacactatgaca

SEQ ID NO: 531689 - DNA, 19 bp, Mus musculus
  siRNA target sequence for Adcy3 (NM_138305.2,3356-3374).
gtggccagcaggatggaat

SEQ ID NO: 531690 - DNA, 19 bp, Mus musculus
  siRNA target sequence for Adcy3 (NM_138305.2,3451-3469).
gaggcgaggtcccatcttt

SEQ ID NO: 531691 - DNA, 19 bp, Mus musculus
  siRNA target sequence for Adcy3 (NM_138305.2,3453-3471).
ggcgaggtcccatctttgt

SEQ ID NO: 531692 - DNA, 19 bp, Mus musculus
  siRNA target sequence for Adcy3 (NM_138305.2,3455-3473).
cgaggtcccatctttgtga

SEQ ID NO: 531693 - DNA, 19 bp, Mus musculus
  siRNA target sequence for Adcy3 (NM_138305.2,3482-3500).
ggggagcttctgacctttt

SEQ ID NO: 531694 - DNA, 19 bp, Mus musculus
  siRNA target sequence for Adcy3 (NM_138305.2,3535-3553).
caatggctcctctgttaca

SEQ ID NO: 531695 - DNA, 19 bp, Mus musculus
  siRNA target sequence for AI450713 (NM_013739.1,139-157).
ggggtagctcggctagaaa

SEQ ID NO: 531696 - DNA, 19 bp, Mus musculus
  siRNA target sequence for AI450713 (NM_013739.1,241-259).
cgcttggctgactgtgtat

SEQ ID NO: 531697 - DNA, 19 bp, Mus musculus
  siRNA target sequence for AI450713 (NM_013739.1,301-319).
ggtgccttcctgattacca

SEQ ID NO: 531698 - DNA, 19 bp, Mus musculus
  siRNA target sequence for AI450713 (NM_013739.1,393-411).
cccgggtaccggagaatgt

SEQ ID NO: 531699 - DNA, 19 bp, Mus musculus
  siRNA target sequence for AI450713 (NM_013739.1,394-412).
ccgggtaccggagaatgtt

SEQ ID NO: 531700 - DNA, 19 bp, Mus musculus
  siRNA target sequence for AI450713 (NM_013739.1,454-472).
gttcccatggaggaaaact

SEQ ID NO: 531701 - DNA, 19 bp, Mus musculus
  siRNA target sequence for AI450713 (NM_013739.1,609-627).
caagccccaggcctgtttt

SEQ ID NO: 531702 - DNA, 19 bp, Mus musculus
  siRNA target sequence for AI450713 (NM_013739.1,705-723).
ctcaggtgagggccttttt

SEQ ID NO: 531703 - DNA, 19 bp, Mus musculus
  siRNA target sequence for AI450713 (NM_013739.1,715-733).
ggcctttttgccttcagta

SEQ ID NO: 531704 - DNA, 19 bp, Mus musculus
  siRNA target sequence for AI450713 (NM_013739.1,738-756).
gcgtgccccagacatatgt

SEQ ID NO: 531705 - DNA, 19 bp, Mus musculus
  siRNA target sequence for AI450713 (NM_013739.1,1034-1052).
gcacggcggagcatctcta

SEQ ID NO: 531706 - DNA, 19 bp, Mus musculus
  siRNA target sequence for AI450713 (NM_013739.1,1035-1053).
cacggcggagcatctctat

SEQ ID NO: 531707 - DNA, 19 bp, Mus musculus
  siRNA target sequence for AI450713 (NM_013739.1,1144-1162).
ggcagccctatctaccata

SEQ ID NO: 531708 - DNA, 19 bp, Mus musculus
  siRNA target sequence for AI586015 (NM_019992.2,87-105).
ctgtactttgaaggatttt

SEQ ID NO: 531709 - DNA, 19 bp, Mus musculus
  siRNA target sequence for AI586015 (NM_019992.2,89-107).
gtactttgaaggattttta

SEQ ID NO: 531710 - DNA, 19 bp, Mus musculus
  siRNA target sequence for AI586015 (NM_019992.2,128-146).
ccaggagtacaaacactat

SEQ ID NO: 531711 - DNA, 19 bp, Mus musculus
  siRNA target sequence for AI586015 (NM_019992.2,160-178).
gagggaccacgctgttctt

SEQ ID NO: 531712 - DNA, 19 bp, Mus musculus
  siRNA target sequence for AI586015 (NM_019992.2,186-204).
gacaaaaaaagcacaatct

SEQ ID NO: 531713 - DNA, 19 bp, Mus musculus
  siRNA target sequence for AI586015 (NM_019992.2,188-206).
caaaaaaagcacaatctat

SEQ ID NO: 531714 - DNA, 19 bp, Mus musculus
  siRNA target sequence for AI586015 (NM_019992.2,203-221).
ctatgttggcaagttagat

SEQ ID NO: 531715 - DNA, 19 bp, Mus musculus
  siRNA target sequence for AI586015 (NM_019992.2,207-225).
gttggcaagttagatataa

SEQ ID NO: 531716 - DNA, 19 bp, Mus musculus
  siRNA target sequence for AI586015 (NM_019992.2,211-229).
gcaagttagatataataga

SEQ ID NO: 531717 - DNA, 19 bp, Mus musculus
  siRNA target sequence for AI586015 (NM_019992.2,246-264).
ggccaacattcaactgaaa

SEQ ID NO: 531718 - DNA, 19 bp, Mus musculus
  siRNA target sequence for AI586015 (NM_019992.2,347-365).
gaggggcttcattcttaca

SEQ ID NO: 531719 - DNA, 19 bp, Mus musculus
  siRNA target sequence for AI586015 (NM_019992.2,349-367).
ggggcttcattcttacagt

SEQ ID NO: 531720 - DNA, 19 bp, Mus musculus
  siRNA target sequence for AI586015 (NM_019992.2,350-368).
gggcttcattcttacagta

SEQ ID NO: 531721 - DNA, 19 bp, Mus musculus
  siRNA target sequence for AI586015 (NM_019992.2,402-420).
ctacctgggcaagtgatta

SEQ ID NO: 531722 - DNA, 19 bp, Mus musculus
  siRNA target sequence for AI586015 (NM_019992.2,421-439).
gactgcacgaagtcttaga

SEQ ID NO: 531723 - DNA, 19 bp, Mus musculus
  siRNA target sequence for AI586015 (NM_019992.2,423-441).
ctgcacgaagtcttagaga

SEQ ID NO: 531724 - DNA, 19 bp, Mus musculus
  siRNA target sequence for AI586015 (NM_019992.2,503-521).
ggagccagtacaagactat

SEQ ID NO: 531725 - DNA, 19 bp, Mus musculus
  siRNA target sequence for AI586015 (NM_019992.2,601-619).
cttcttggggaaatatgat

SEQ ID NO: 531726 - DNA, 19 bp, Mus musculus
  siRNA target sequence for AI586015 (NM_019992.2,627-645).
cctggtagtgacagcaaaa

SEQ ID NO: 531727 - DNA, 19 bp, Mus musculus
  siRNA target sequence for AI586015 (NM_019992.2,628-646).
ctggtagtgacagcaaaaa

SEQ ID NO: 531728 - DNA, 19 bp, Mus musculus
  siRNA target sequence for AI586015 (NM_019992.2,658-676).
ctatccggcaggagataga

SEQ ID NO: 531729 - DNA, 19 bp, Mus musculus
  siRNA target sequence for AI586015 (NM_019992.2,706-724).
cgcgcactggaaacaacta

SEQ ID NO: 531730 - DNA, 19 bp, Mus musculus
  siRNA target sequence for AI586015 (NM_019992.2,728-746).
catcgagctggaaaaacct

SEQ ID NO: 531731 - DNA, 19 bp, Mus musculus
  siRNA target sequence for AI586015 (NM_019992.2,761-779).
ccttttcagtgtcattgat

SEQ ID NO: 531732 - DNA, 19 bp, Mus musculus
  siRNA target sequence for AI586015 (NM_019992.2,794-812).
gactcgagggaatttgaga

SEQ ID NO: 531733 - DNA, 19 bp, Mus musculus
  siRNA target sequence for AI586015 (NM_019992.2,864-882).
gacaggagtgagaagttta

SEQ ID NO: 531734 - DNA, 19 bp, Mus musculus
  siRNA target sequence for Akap10 (NM_019921.2,276-294).
gtccactaaagcttcagta

SEQ ID NO: 531735 - DNA, 19 bp, Mus musculus
  siRNA target sequence for Akap10 (NM_019921.2,286-304).
gcttcagtagccgtacatt

SEQ ID NO: 531736 - DNA, 19 bp, Mus musculus
  siRNA target sequence for Akap10 (NM_019921.2,296-314).
ccgtacattccccacaaaa

SEQ ID NO: 531737 - DNA, 19 bp, Mus musculus
  siRNA target sequence for Akap10 (NM_019921.2,297-315).
cgtacattccccacaaaaa

SEQ ID NO: 531738 - DNA, 19 bp, Mus musculus
  siRNA target sequence for Akap10 (NM_019921.2,298-316).
gtacattccccacaaaaaa

SEQ ID NO: 531739 - DNA, 19 bp, Mus musculus
  siRNA target sequence for Akap10 (NM_019921.2,342-360).
ggctgcaggaccaagtcat

SEQ ID NO: 531740 - DNA, 19 bp, Mus musculus
  siRNA target sequence for Akap10 (NM_019921.2,410-428).
ggacagcaacgcttaagaa

SEQ ID NO: 531741 - DNA, 19 bp, Mus musculus
  siRNA target sequence for Akap10 (NM_019921.2,499-517).
gagaccaaatccagtcttt

SEQ ID NO: 531742 - DNA, 19 bp, Mus musculus
  siRNA target sequence for Akap10 (NM_019921.2,501-519).
gaccaaatccagtctttca

SEQ ID NO: 531743 - DNA, 19 bp, Mus musculus
  siRNA target sequence for Akap10 (NM_019921.2,503-521).
ccaaatccagtctttcaaa

SEQ ID NO: 531744 - DNA, 19 bp, Mus musculus
  siRNA target sequence for Akap10 (NM_019921.2,598-616).
cacctggtgaaattttggt

SEQ ID NO: 531745 - DNA, 19 bp, Mus musculus
  siRNA target sequence for Akap10 (NM_019921.2,668-686).
gtctaaacacagtgaaaca

SEQ ID NO: 531746 - DNA, 19 bp, Mus musculus
  siRNA target sequence for Akap10 (NM_019921.2,790-808).
ccactgcttgtgactcaat

SEQ ID NO: 531747 - DNA, 19 bp, Mus musculus
  siRNA target sequence for Akap10 (NM_019921.2,814-832).
ggaactgacctgagtagta

SEQ ID NO: 531748 - DNA, 19 bp, Mus musculus
  siRNA target sequence for Akap10 (NM_019921.2,967-985).
gtaggcagtagaaacagtt

SEQ ID NO: 531749 - DNA, 19 bp, Mus musculus
  siRNA target sequence for Akap10 (NM_019921.2,1006-1024).
ctgtcagaaaaactaatga

SEQ ID NO: 531750 - DNA, 19 bp, Mus musculus
  siRNA target sequence for Akap10 (NM_019921.2,1036-1054).
caagatgcagtgaatactt

SEQ ID NO: 531751 - DNA, 19 bp, Mus musculus
  siRNA target sequence for Akap10 (NM_019921.2,1039-1057).
gatgcagtgaatactttta

SEQ ID NO: 531752 - DNA, 19 bp, Mus musculus
  siRNA target sequence for Akap10 (NM_019921.2,1043-1061).
cagtgaatacttttaccaa

SEQ ID NO: 531753 - DNA, 19 bp, Mus musculus
  siRNA target sequence for Akap10 (NM_019921.2,1045-1063).
gtgaatacttttaccaaat

SEQ ID NO: 531754 - DNA, 19 bp, Mus musculus
  siRNA target sequence for Akap10 (NM_019921.2,1081-1099).
gctaagccaataccaatta

SEQ ID NO: 531755 - DNA, 19 bp, Mus musculus
  siRNA target sequence for Akap10 (NM_019921.2,1106-1124).
ccatgagaaacgacatcat

SEQ ID NO: 531756 - DNA, 19 bp, Mus musculus
  siRNA target sequence for Akap10 (NM_019921.2,1117-1135).
gacatcatcgcaaagattt

SEQ ID NO: 531757 - DNA, 19 bp, Mus musculus
  siRNA target sequence for Akap10 (NM_019921.2,1119-1137).
catcatcgcaaagatttgt

SEQ ID NO: 531758 - DNA, 19 bp, Mus musculus
  siRNA target sequence for Akap10 (NM_019921.2,1176-1194).
ggcacaggctgtagtcttt

SEQ ID NO: 531759 - DNA, 19 bp, Mus musculus
  siRNA target sequence for Akap10 (NM_019921.2,1177-1195).
gcacaggctgtagtcttta

SEQ ID NO: 531760 - DNA, 19 bp, Mus musculus
  siRNA target sequence for Akap10 (NM_019921.2,1230-1248).
gcgaagtcaccatttctgt

SEQ ID NO: 531761 - DNA, 19 bp, Mus musculus
  siRNA target sequence for Akap10 (NM_019921.2,1231-1249).
cgaagtcaccatttctgta

SEQ ID NO: 531762 - DNA, 19 bp, Mus musculus
  siRNA target sequence for Akap10 (NM_019921.2,1232-1250).
gaagtcaccatttctgtaa

SEQ ID NO: 531763 - DNA, 19 bp, Mus musculus
  siRNA target sequence for Akap10 (NM_019921.2,1309-1327).
gagtcagccctcttttatt

SEQ ID NO: 531764 - DNA, 19 bp, Mus musculus
  siRNA target sequence for Akap10 (NM_019921.2,1311-1329).
gtcagccctcttttatttt

SEQ ID NO: 531765 - DNA, 19 bp, Mus musculus
  siRNA target sequence for Akap10 (NM_019921.2,1374-1392).
ctggttagcagcggataat

SEQ ID NO: 531766 - DNA, 19 bp, Mus musculus
  siRNA target sequence for Akap10 (NM_019921.2,1376-1394).
ggttagcagcggataattt

SEQ ID NO: 531767 - DNA, 19 bp, Mus musculus
  siRNA target sequence for Akap10 (NM_019921.2,1412-1430).
ccaaaaagggccagtatga

SEQ ID NO: 531768 - DNA, 19 bp, Mus musculus
  siRNA target sequence for Akap10 (NM_019921.2,1446-1464).
gaatgatgccatgatttta

SEQ ID NO: 531769 - DNA, 19 bp, Mus musculus
  siRNA target sequence for Akap10 (NM_019921.2,1454-1472).
ccatgattttatatgacaa

SEQ ID NO: 531770 - DNA, 19 bp, Mus musculus
  siRNA target sequence for Akap10 (NM_019921.2,1513-1531).
gatgttgtacgattagaaa

SEQ ID NO: 531771 - DNA, 19 bp, Mus musculus
  siRNA target sequence for Akap10 (NM_019921.2,1522-1540).
cgattagaaattgaatcta

SEQ ID NO: 531772 - DNA, 19 bp, Mus musculus
  siRNA target sequence for Akap10 (NM_019921.2,1555-1573).
ggtggaccacttcctaatt

SEQ ID NO: 531773 - DNA, 19 bp, Mus musculus
  siRNA target sequence for Akap10 (NM_019921.2,1558-1576).
ggaccacttcctaattgtt

SEQ ID NO: 531774 - DNA, 19 bp, Mus musculus
  siRNA target sequence for Akap10 (NM_019921.2,1559-1577).
gaccacttcctaattgttt

SEQ ID NO: 531775 - DNA, 19 bp, Mus musculus
  siRNA target sequence for Akap10 (NM_019921.2,1640-1658).
ccagcaatctttattacaa

SEQ ID NO: 531776 - DNA, 19 bp, Mus musculus
  siRNA target sequence for Akap10 (NM_019921.2,1641-1659).
cagcaatctttattacaaa

SEQ ID NO: 531777 - DNA, 19 bp, Mus musculus
  siRNA target sequence for Akap10 (NM_019921.2,1644-1662).
caatctttattacaaatat

SEQ ID NO: 531778 - DNA, 19 bp, Mus musculus
  siRNA target sequence for Akap10 (NM_019921.2,1787-1805).
ctcagtctagtgtgaaaaa

SEQ ID NO: 531779 - DNA, 19 bp, Mus musculus
  siRNA target sequence for Akap10 (NM_019921.2,1798-1816).
gtgaaaaaagccagtatta

SEQ ID NO: 531780 - DNA, 19 bp, Mus musculus
  siRNA target sequence for Akap10 (NM_019921.2,1908-1926).
gtcctttgggagagttagt

SEQ ID NO: 531781 - DNA, 19 bp, Mus musculus
  siRNA target sequence for Akap10 (NM_019921.2,1925-1943).
gtgatttggggcagttcat

SEQ ID NO: 531782 - DNA, 19 bp, Mus musculus
  siRNA target sequence for Akap10 (NM_019921.2,1960-1978).
gaacctgatgtgaagaaat

SEQ ID NO: 531783 - DNA, 19 bp, Mus musculus
  siRNA target sequence for Akap10 (NM_019921.2,1963-1981).
cctgatgtgaagaaatcaa

SEQ ID NO: 531784 - DNA, 19 bp, Mus musculus
  siRNA target sequence for Akap10 (NM_019921.2,1969-1987).
gtgaagaaatcaaaaggat

SEQ ID NO: 531785 - DNA, 19 bp, Mus musculus
  siRNA target sequence for Akap10 (NM_019921.2,2013-2031).
gtgggtgcaaggaaatact

SEQ ID NO: 531786 - DNA, 19 bp, Mus musculus
  siRNA target sequence for Akap10 (NM_019921.2,2015-2033).
gggtgcaaggaaatactga

SEQ ID NO: 531787 - DNA, 19 bp, Mus musculus
  siRNA target sequence for Akap10 (NM_019921.2,2030-2048).
ctgacgaggcccaagaaga

SEQ ID NO: 531788 - DNA, 19 bp, Mus musculus
  siRNA target sequence for Akap10 (NM_019921.2,2053-2071).
gcttggaagattgcaaaaa

SEQ ID NO: 531789 - DNA, 19 bp, Mus musculus
  siRNA target sequence for Akap10 (NM_019921.2,2094-2112).
gcaggcacaccatgatcaa

SEQ ID NO: 531790 - DNA, 19 bp, Mus musculus
  siRNA target sequence for Akap3 (NM_009650.1,303-321).
ggttgactggttacaaagt

SEQ ID NO: 531791 - DNA, 19 bp, Mus musculus
  siRNA target sequence for Akap3 (NM_009650.1,307-325).
gactggttacaaagtcaaa

SEQ ID NO: 531792 - DNA, 19 bp, Mus musculus
  siRNA target sequence for Akap3 (NM_009650.1,336-354).
caaagttggtgtctattca

SEQ ID NO: 531793 - DNA, 19 bp, Mus musculus
  siRNA target sequence for Akap3 (NM_009650.1,477-495).
gcctggagagtcatcgttt

SEQ ID NO: 531794 - DNA, 19 bp, Mus musculus
  siRNA target sequence for Akap3 (NM_009650.1,517-535).
gtggaccaacgaaaaggtt

SEQ ID NO: 531795 - DNA, 19 bp, Mus musculus
  siRNA target sequence for Akap3 (NM_009650.1,578-596).
gaagattgcattttgagat

SEQ ID NO: 531796 - DNA, 19 bp, Mus musculus
  siRNA target sequence for Akap3 (NM_009650.1,627-645).
catttcccatgttggtaat

SEQ ID NO: 531797 - DNA, 19 bp, Mus musculus
  siRNA target sequence for Akap3 (NM_009650.1,678-696).
caaccgcctcacaaaccta

SEQ ID NO: 531798 - DNA, 19 bp, Mus musculus
  siRNA target sequence for Akap3 (NM_009650.1,683-701).
gcctcacaaacctagtgat

SEQ ID NO: 531799 - DNA, 19 bp, Mus musculus
  siRNA target sequence for Akap3 (NM_009650.1,735-753).
ccacggcgctgaaaacaaa

SEQ ID NO: 531800 - DNA, 19 bp, Mus musculus
  siRNA target sequence for Akap3 (NM_009650.1,736-754).
cacggcgctgaaaacaaat

SEQ ID NO: 531801 - DNA, 19 bp, Mus musculus
  siRNA target sequence for Akap3 (NM_009650.1,738-756).
cggcgctgaaaacaaatgt

SEQ ID NO: 531802 - DNA, 19 bp, Mus musculus
  siRNA target sequence for Akap3 (NM_009650.1,755-773).
gtgtccatcagtcattgta

SEQ ID NO: 531803 - DNA, 19 bp, Mus musculus
  siRNA target sequence for Akap3 (NM_009650.1,757-775).
gtccatcagtcattgtata

SEQ ID NO: 531804 - DNA, 19 bp, Mus musculus
  siRNA target sequence for Akap3 (NM_009650.1,793-811).
ccccacaaaagcttgagta

SEQ ID NO: 531805 - DNA, 19 bp, Mus musculus
  siRNA target sequence for Akap3 (NM_009650.1,845-863).
ccgcatgttccaagaacat

SEQ ID NO: 531806 - DNA, 19 bp, Mus musculus
  siRNA target sequence for Akap3 (NM_009650.1,846-864).
cgcatgttccaagaacatt

SEQ ID NO: 531807 - DNA, 19 bp, Mus musculus
  siRNA target sequence for Akap3 (NM_009650.1,913-931).
caggcccctggtctaagat

SEQ ID NO: 531808 - DNA, 19 bp, Mus musculus
  siRNA target sequence for Akap3 (NM_009650.1,916-934).
gcccctggtctaagataca

SEQ ID NO: 531809 - DNA, 19 bp, Mus musculus
  siRNA target sequence for Akap3 (NM_009650.1,1115-1133).
ggcctgatgacttttcaaa

SEQ ID NO: 531810 - DNA, 19 bp, Mus musculus
  siRNA target sequence for Akap3 (NM_009650.1,1117-1135).
cctgatgacttttcaaact

SEQ ID NO: 531811 - DNA, 19 bp, Mus musculus
  siRNA target sequence for Akap3 (NM_009650.1,1123-1141).
gacttttcaaactctatca

SEQ ID NO: 531812 - DNA, 19 bp, Mus musculus
  siRNA target sequence for Akap3 (NM_009650.1,1125-1143).
cttttcaaactctatcagt

SEQ ID NO: 531813 - DNA, 19 bp, Mus musculus
  siRNA target sequence for Akap3 (NM_009650.1,1360-1378).
gtctcggccgtgaaacgaa

SEQ ID NO: 531814 - DNA, 19 bp, Mus musculus
  siRNA target sequence for Akap3 (NM_009650.1,1364-1382).
cggccgtgaaacgaagttt

SEQ ID NO: 531815 - DNA, 19 bp, Mus musculus
  siRNA target sequence for Akap3 (NM_009650.1,1365-1383).
ggccgtgaaacgaagtttt

SEQ ID NO: 531816 - DNA, 19 bp, Mus musculus
  siRNA target sequence for Akap3 (NM_009650.1,1366-1384).
gccgtgaaacgaagttttt

SEQ ID NO: 531817 - DNA, 19 bp, Mus musculus
  siRNA target sequence for Akap3 (NM_009650.1,1367-1385).
ccgtgaaacgaagtttttt

SEQ ID NO: 531818 - DNA, 19 bp, Mus musculus
  siRNA target sequence for Akap3 (NM_009650.1,1368-1386).
cgtgaaacgaagttttttt

SEQ ID NO: 531819 - DNA, 19 bp, Mus musculus
  siRNA target sequence for Akap3 (NM_009650.1,1428-1446).
gctgggcaagctatacaat

SEQ ID NO: 531820 - DNA, 19 bp, Mus musculus
  siRNA target sequence for Akap3 (NM_009650.1,1433-1451).
gcaagctatacaatgtgat

SEQ ID NO: 531821 - DNA, 19 bp, Mus musculus
  siRNA target sequence for Akap3 (NM_009650.1,1490-1508).
gggacaagtcggagagtta

SEQ ID NO: 531822 - DNA, 19 bp, Mus musculus
  siRNA target sequence for Akap3 (NM_009650.1,1492-1510).
gacaagtcggagagttact

SEQ ID NO: 531823 - DNA, 19 bp, Mus musculus
  siRNA target sequence for Akap3 (NM_009650.1,1501-1519).
gagagttactcccttatct

SEQ ID NO: 531824 - DNA, 19 bp, Mus musculus
  siRNA target sequence for Akap3 (NM_009650.1,1540-1558).
gacccaaagctctcaaatt

SEQ ID NO: 531825 - DNA, 19 bp, Mus musculus
  siRNA target sequence for Akap3 (NM_009650.1,1544-1562).
caaagctctcaaatttgaa

SEQ ID NO: 531826 - DNA, 19 bp, Mus musculus
  siRNA target sequence for Akap3 (NM_009650.1,1548-1566).
gctctcaaatttgaacttt

SEQ ID NO: 531827 - DNA, 19 bp, Mus musculus
  siRNA target sequence for Akap3 (NM_009650.1,1607-1625).
ctacatgcaaactagagaa

SEQ ID NO: 531828 - DNA, 19 bp, Mus musculus
  siRNA target sequence for Akap3 (NM_009650.1,1646-1664).
ctctgggtgagcatattat

SEQ ID NO: 531829 - DNA, 19 bp, Mus musculus
  siRNA target sequence for Akap3 (NM_009650.1,1810-1828).
ccagagaattttgcaaatt

SEQ ID NO: 531830 - DNA, 19 bp, Mus musculus
  siRNA target sequence for Akap3 (NM_009650.1,1999-2017).
gatgagtgcaaacttaagt

SEQ ID NO: 531831 - DNA, 19 bp, Mus musculus
  siRNA target sequence for Akap3 (NM_009650.1,2021-2039).
ctccccacaagatatgtga

SEQ ID NO: 531832 - DNA, 19 bp, Mus musculus
  siRNA target sequence for Akap3 (NM_009650.1,2031-2049).
gatatgtgaccaagaacaa

SEQ ID NO: 531833 - DNA, 19 bp, Mus musculus
  siRNA target sequence for Akap3 (NM_009650.1,2051-2069).
cagaaaagaaagatctgat

SEQ ID NO: 531834 - DNA, 19 bp, Mus musculus
  siRNA target sequence for Akap3 (NM_009650.1,2070-2088).
gagtgtcatcttcaatttt

SEQ ID NO: 531835 - DNA, 19 bp, Mus musculus
  siRNA target sequence for Akap3 (NM_009650.1,2072-2090).
gtgtcatcttcaattttat

SEQ ID NO: 531836 - DNA, 19 bp, Mus musculus
  siRNA target sequence for Akap3 (NM_009650.1,2082-2100).
caattttatccggaactta

SEQ ID NO: 531837 - DNA, 19 bp, Mus musculus
  siRNA target sequence for Akap3 (NM_009650.1,2118-2136).
caagagtagccgtaactgt

SEQ ID NO: 531838 - DNA, 19 bp, Mus musculus
  siRNA target sequence for Akap3 (NM_009650.1,2126-2144).
gccgtaactgtgaatccaa

SEQ ID NO: 531839 - DNA, 19 bp, Mus musculus
  siRNA target sequence for Akap3 (NM_009650.1,2127-2145).
ccgtaactgtgaatccaat

SEQ ID NO: 531840 - DNA, 19 bp, Mus musculus
  siRNA target sequence for Akap3 (NM_009650.1,2173-2191).
gagatacacccgtgtgaaa

SEQ ID NO: 531841 - DNA, 19 bp, Mus musculus
  siRNA target sequence for Akap3 (NM_009650.1,2184-2202).
gtgtgaaaggcctaagact

SEQ ID NO: 531842 - DNA, 19 bp, Mus musculus
  siRNA target sequence for Akap3 (NM_009650.1,2193-2211).
gcctaagactccatgtgaa

SEQ ID NO: 531843 - DNA, 19 bp, Mus musculus
  siRNA target sequence for Akap3 (NM_009650.1,2203-2221).
ccatgtgaaaggcctatta

SEQ ID NO: 531844 - DNA, 19 bp, Mus musculus
  siRNA target sequence for Akap3 (NM_009650.1,2226-2244).
gcctgccccgaaattctgt

SEQ ID NO: 531845 - DNA, 19 bp, Mus musculus
  siRNA target sequence for Akap3 (NM_009650.1,2347-2365).
gactcggtgatgaagttat

SEQ ID NO: 531846 - DNA, 19 bp, Mus musculus
  siRNA target sequence for Akap3 (NM_009650.1,2521-2539).
gcctacctcaccatccata

SEQ ID NO: 531847 - DNA, 19 bp, Mus musculus
  siRNA target sequence for Akap3 (NM_009650.1,2618-2636).
ctgacaccgttcagaacaa

SEQ ID NO: 531848 - DNA, 19 bp, Mus musculus
  siRNA target sequence for Akap3 (NM_009650.1,2674-2692).
gagctcaatgtccctattt

SEQ ID NO: 531849 - DNA, 19 bp, Mus musculus
  siRNA target sequence for Akap4 (NM_009651.1,154-172).
cgtgtgcaaggtagatctt

SEQ ID NO: 531850 - DNA, 19 bp, Mus musculus
  siRNA target sequence for Akap4 (NM_009651.1,155-173).
gtgtgcaaggtagatcttt

SEQ ID NO: 531851 - DNA, 19 bp, Mus musculus
  siRNA target sequence for Akap4 (NM_009651.1,194-212).
gatcaggaccgaaaagtga

SEQ ID NO: 531852 - DNA, 19 bp, Mus musculus
  siRNA target sequence for Akap4 (NM_009651.1,197-215).
caggaccgaaaagtgatat

SEQ ID NO: 531853 - DNA, 19 bp, Mus musculus
  siRNA target sequence for Akap4 (NM_009651.1,200-218).
gaccgaaaagtgatatgct

SEQ ID NO: 531854 - DNA, 19 bp, Mus musculus
  siRNA target sequence for Akap4 (NM_009651.1,202-220).
ccgaaaagtgatatgcttt

SEQ ID NO: 531855 - DNA, 19 bp, Mus musculus
  siRNA target sequence for Akap4 (NM_009651.1,486-504).
cctctagctgtaaacataa

SEQ ID NO: 531856 - DNA, 19 bp, Mus musculus
  siRNA target sequence for Akap4 (NM_009651.1,487-505).
ctctagctgtaaacataaa

SEQ ID NO: 531857 - DNA, 19 bp, Mus musculus
  siRNA target sequence for Akap4 (NM_009651.1,489-507).
ctagctgtaaacataaagt

SEQ ID NO: 531858 - DNA, 19 bp, Mus musculus
  siRNA target sequence for Akap4 (NM_009651.1,595-613).
caaaggacctcaaaacctt

SEQ ID NO: 531859 - DNA, 19 bp, Mus musculus
  siRNA target sequence for Akap4 (NM_009651.1,605-623).
caaaaccttcgcctagaaa

SEQ ID NO: 531860 - DNA, 19 bp, Mus musculus
  siRNA target sequence for Akap4 (NM_009651.1,652-670).
ccaaagtccctcaaatcct

SEQ ID NO: 531861 - DNA, 19 bp, Mus musculus
  siRNA target sequence for Akap4 (NM_009651.1,745-763).
ctatgtcaaccgattgtca

SEQ ID NO: 531862 - DNA, 19 bp, Mus musculus
  siRNA target sequence for Akap4 (NM_009651.1,829-847).
ccatcattccatgtataca

SEQ ID NO: 531863 - DNA, 19 bp, Mus musculus
  siRNA target sequence for Akap4 (NM_009651.1,875-893).
cggagtgctgtcagcaaaa

SEQ ID NO: 531864 - DNA, 19 bp, Mus musculus
  siRNA target sequence for Akap4 (NM_009651.1,877-895).
gagtgctgtcagcaaaatt

SEQ ID NO: 531865 - DNA, 19 bp, Mus musculus
  siRNA target sequence for Akap4 (NM_009651.1,974-992).
cggaaaacctttttgtata

SEQ ID NO: 531866 - DNA, 19 bp, Mus musculus
  siRNA target sequence for Akap4 (NM_009651.1,1074-1092).
gcaaggggcttatggttta

SEQ ID NO: 531867 - DNA, 19 bp, Mus musculus
  siRNA target sequence for Akap4 (NM_009651.1,1078-1096).
ggggcttatggtttatgca

SEQ ID NO: 531868 - DNA, 19 bp, Mus musculus
  siRNA target sequence for Akap4 (NM_009651.1,1081-1099).
gcttatggtttatgcaaat

SEQ ID NO: 531869 - DNA, 19 bp, Mus musculus
  siRNA target sequence for Akap4 (NM_009651.1,1117-1135).
gatggtctctgttatgaaa

SEQ ID NO: 531870 - DNA, 19 bp, Mus musculus
  siRNA target sequence for Akap4 (NM_009651.1,1181-1199).
gtcctgaagagggtactat

SEQ ID NO: 531871 - DNA, 19 bp, Mus musculus
  siRNA target sequence for Akap4 (NM_009651.1,1210-1228).
caaggaaattgtatctgat

SEQ ID NO: 531872 - DNA, 19 bp, Mus musculus
  siRNA target sequence for Akap4 (NM_009651.1,1589-1607).
ctcaaagagagccttacta

SEQ ID NO: 531873 - DNA, 19 bp, Mus musculus
  siRNA target sequence for Akap4 (NM_009651.1,1707-1725).
cactggccaaggatctaat

SEQ ID NO: 531874 - DNA, 19 bp, Mus musculus
  siRNA target sequence for Akap4 (NM_009651.1,1712-1730).
gccaaggatctaattgtct

SEQ ID NO: 531875 - DNA, 19 bp, Mus musculus
  siRNA target sequence for Akap4 (NM_009651.1,1731-1749).
ctgcccttatgctcattca

SEQ ID NO: 531876 - DNA, 19 bp, Mus musculus
  siRNA target sequence for Akap4 (NM_009651.1,1733-1751).
gcccttatgctcattcaat

SEQ ID NO: 531877 - DNA, 19 bp, Mus musculus
  siRNA target sequence for Akap4 (NM_009651.1,1774-1792).
gggcaaagatccatgtgaa

SEQ ID NO: 531878 - DNA, 19 bp, Mus musculus
  siRNA target sequence for Akap4 (NM_009651.1,1854-1872).
gaggtggccaaagttctaa

SEQ ID NO: 531879 - DNA, 19 bp, Mus musculus
  siRNA target sequence for Akap4 (NM_009651.1,1860-1878).
gccaaagttctaaatcact

SEQ ID NO: 531880 - DNA, 19 bp, Mus musculus
  siRNA target sequence for Akap4 (NM_009651.1,2395-2413).
ggctgtcctgcaatggatt

SEQ ID NO: 531881 - DNA, 19 bp, Mus musculus
  siRNA target sequence for Akap4 (NM_009651.1,2476-2494).
gaagctccctgaagtttca

SEQ ID NO: 531882 - DNA, 19 bp, Mus musculus
  siRNA target sequence for Amfr (NM_011787.1,627-645).
gtgggttctggtgaatact

SEQ ID NO: 531883 - DNA, 19 bp, Mus musculus
  siRNA target sequence for Amfr (NM_011787.1,671-689).
ctaagcttatccagtgtat

SEQ ID NO: 531884 - DNA, 19 bp, Mus musculus
  siRNA target sequence for Amfr (NM_011787.1,1034-1052).
ctgcagagtctcttcttgt

SEQ ID NO: 531885 - DNA, 19 bp, Mus musculus
  siRNA target sequence for Amfr (NM_011787.1,1067-1085).
ctcatgtgattttaagata

SEQ ID NO: 531886 - DNA, 19 bp, Mus musculus
  siRNA target sequence for Amfr (NM_011787.1,1129-1147).
ggaaagggaacctatgtgt

SEQ ID NO: 531887 - DNA, 19 bp, Mus musculus
  siRNA target sequence for Amfr (NM_011787.1,1135-1153).
ggaacctatgtgtattaca

SEQ ID NO: 531888 - DNA, 19 bp, Mus musculus
  siRNA target sequence for Amfr (NM_011787.1,1201-1219).
cacatccacatgctgttat

SEQ ID NO: 531889 - DNA, 19 bp, Mus musculus
  siRNA target sequence for Amfr (NM_011787.1,1244-1262).
ctagcttggtcatctttat

SEQ ID NO: 531890 - DNA, 19 bp, Mus musculus
  siRNA target sequence for Amfr (NM_011787.1,1298-1316).
gaatccgtcgacacaagaa

SEQ ID NO: 531891 - DNA, 19 bp, Mus musculus
  siRNA target sequence for Amfr (NM_011787.1,1303-1321).
cgtcgacacaagaattatt

SEQ ID NO: 531892 - DNA, 19 bp, Mus musculus
  siRNA target sequence for Amfr (NM_011787.1,1648-1666).
gatgggtcccggattgcaa

SEQ ID NO: 531893 - DNA, 19 bp, Mus musculus
  siRNA target sequence for Amfr (NM_011787.1,1671-1689).
gctgccaagtttttcagtt

SEQ ID NO: 531894 - DNA, 19 bp, Mus musculus
  siRNA target sequence for Amfr (NM_011787.1,1730-1748).
caagcaactctcagctaaa

SEQ ID NO: 531895 - DNA, 19 bp, Mus musculus
  siRNA target sequence for Amfr (NM_011787.1,1825-1843).
cgctccgtggagataacaa

SEQ ID NO: 531896 - DNA, 19 bp, Mus musculus
  siRNA target sequence for Amfr (NM_011787.1,1827-1845).
ctccgtggagataacaaca

SEQ ID NO: 531897 - DNA, 19 bp, Mus musculus
  siRNA target sequence for Amfr (NM_011787.1,1854-1872).
cttagaaggacggattcaa

SEQ ID NO: 531898 - DNA, 19 bp, Mus musculus
  siRNA target sequence for Amfr (NM_011787.1,2025-2043).
cttcagtgaggtagaacta

SEQ ID NO: 531899 - DNA, 19 bp, Mus musculus
  siRNA target sequence for Amfr (NM_011787.1,2106-2124).
gagacagcgcatgttagtt

SEQ ID NO: 531900 - DNA, 19 bp, Mus musculus
  siRNA target sequence for Amfr (NM_011787.1,2108-2126).
gacagcgcatgttagttca

SEQ ID NO: 531901 - DNA, 19 bp, Mus musculus
  siRNA target sequence for Amfr (NM_011787.1,2151-2169).
ggctcgaaagcggttctta

SEQ ID NO: 531902 - DNA, 19 bp, Mus musculus
  siRNA target sequence for Amfr (NM_011787.1,2152-2170).
gctcgaaagcggttcttaa

SEQ ID NO: 531903 - DNA, 19 bp, Mus musculus
  siRNA target sequence for Amfr (NM_011787.1,2153-2171).
ctcgaaagcggttcttaaa

SEQ ID NO: 531904 - DNA, 19 bp, Mus musculus
  siRNA target sequence for Amfr (NM_011787.1,2155-2173).
cgaaagcggttcttaaaca

SEQ ID NO: 531905 - DNA, 19 bp, Mus musculus
  siRNA target sequence for Amfr (NM_011787.1,2160-2178).
gcggttcttaaacaaaagt

SEQ ID NO: 531906 - DNA, 19 bp, Mus musculus
  siRNA target sequence for Amfr (NM_011787.1,2161-2179).
cggttcttaaacaaaagtt

SEQ ID NO: 531907 - DNA, 19 bp, Mus musculus
  siRNA target sequence for Ankfy1 (NM_009671.2,189-207).
catagtggcaggtctctat

SEQ ID NO: 531908 - DNA, 19 bp, Mus musculus
  siRNA target sequence for Ankfy1 (NM_009671.2,296-314).
gctggagtctggccaattt

SEQ ID NO: 531909 - DNA, 19 bp, Mus musculus
  siRNA target sequence for Ankfy1 (NM_009671.2,300-318).
gagtctggccaatttgtct

SEQ ID NO: 531910 - DNA, 19 bp, Mus musculus
  siRNA target sequence for Ankfy1 (NM_009671.2,347-365).
cgaatcctgaggtgacaat

SEQ ID NO: 531911 - DNA, 19 bp, Mus musculus
  siRNA target sequence for Ankfy1 (NM_009671.2,380-398).
ggatctatacggatgagtt

SEQ ID NO: 531912 - DNA, 19 bp, Mus musculus
  siRNA target sequence for Ankfy1 (NM_009671.2,381-399).
gatctatacggatgagtta

SEQ ID NO: 531913 - DNA, 19 bp, Mus musculus
  siRNA target sequence for Ankfy1 (NM_009671.2,418-436).
gtgttcctgactgaattga

SEQ ID NO: 531914 - DNA, 19 bp, Mus musculus
  siRNA target sequence for Ankfy1 (NM_009671.2,507-525).
gaatgttaggaactgtatt

SEQ ID NO: 531915 - DNA, 19 bp, Mus musculus
  siRNA target sequence for Ankfy1 (NM_009671.2,516-534).
gaactgtattcgcttctat

SEQ ID NO: 531916 - DNA, 19 bp, Mus musculus
  siRNA target sequence for Ankfy1 (NM_009671.2,557-575).
ccagtacgctgatgaacta

SEQ ID NO: 531917 - DNA, 19 bp, Mus musculus
  siRNA target sequence for Ankfy1 (NM_009671.2,558-576).
cagtacgctgatgaactat

SEQ ID NO: 531918 - DNA, 19 bp, Mus musculus
  siRNA target sequence for Ankfy1 (NM_009671.2,638-656).
gtgctcagttgttatacaa

SEQ ID NO: 531919 - DNA, 19 bp, Mus musculus
  siRNA target sequence for Ankfy1 (NM_009671.2,640-658).
gctcagttgttatacaaaa

SEQ ID NO: 531920 - DNA, 19 bp, Mus musculus
  siRNA target sequence for Ankfy1 (NM_009671.2,641-659).
ctcagttgttatacaaaat

SEQ ID NO: 531921 - DNA, 19 bp, Mus musculus
  siRNA target sequence for Ankfy1 (NM_009671.2,674-692).
cagagtacccattacataa

SEQ ID NO: 531922 - DNA, 19 bp, Mus musculus
  siRNA target sequence for Ankfy1 (NM_009671.2,729-747).
ctatctgattgaaatggat

SEQ ID NO: 531923 - DNA, 19 bp, Mus musculus
  siRNA target sequence for Ankfy1 (NM_009671.2,757-775).
cctgggaagcttaacgaaa

SEQ ID NO: 531924 - DNA, 19 bp, Mus musculus
  siRNA target sequence for Ankfy1 (NM_009671.2,765-783).
gcttaacgaaacagatcat

SEQ ID NO: 531925 - DNA, 19 bp, Mus musculus
  siRNA target sequence for Ankfy1 (NM_009671.2,766-784).
cttaacgaaacagatcata

SEQ ID NO: 531926 - DNA, 19 bp, Mus musculus
  siRNA target sequence for Ankfy1 (NM_009671.2,771-789).
cgaaacagatcataatgga

SEQ ID NO: 531927 - DNA, 19 bp, Mus musculus
  siRNA target sequence for Ankfy1 (NM_009671.2,788-806).
gagatcttgcgttagatct

SEQ ID NO: 531928 - DNA, 19 bp, Mus musculus
  siRNA target sequence for Ankfy1 (NM_009671.2,815-833).
ctcggcgactagagagtat

SEQ ID NO: 531929 - DNA, 19 bp, Mus musculus
  siRNA target sequence for Ankfy1 (NM_009671.2,839-857).
ccactctggttagtcataa

SEQ ID NO: 531930 - DNA, 19 bp, Mus musculus
  siRNA target sequence for Ankfy1 (NM_009671.2,867-885).
ggatatggtagacaaaaat

SEQ ID NO: 531931 - DNA, 19 bp, Mus musculus
  siRNA target sequence for Ankfy1 (NM_009671.2,887-905).
gctggagcttattacataa

SEQ ID NO: 531932 - DNA, 19 bp, Mus musculus
  siRNA target sequence for Ankfy1 (NM_009671.2,932-950).
cttctacattcctcattaa

SEQ ID NO: 531933 - DNA, 19 bp, Mus musculus
  siRNA target sequence for Ankfy1 (NM_009671.2,935-953).
ctacattcctcattaagaa

SEQ ID NO: 531934 - DNA, 19 bp, Mus musculus
  siRNA target sequence for Ankfy1 (NM_009671.2,998-1016).
cattacaccttgtagcatt

SEQ ID NO: 531935 - DNA, 19 bp, Mus musculus
  siRNA target sequence for Ankfy1 (NM_009671.2,1003-1021).
caccttgtagcattgtaca

SEQ ID NO: 531936 - DNA, 19 bp, Mus musculus
  siRNA target sequence for Ankfy1 (NM_009671.2,1020-1038).
cagtccaaagaaatactca

SEQ ID NO: 531937 - DNA, 19 bp, Mus musculus
  siRNA target sequence for Ankfy1 (NM_009671.2,1100-1118).
ccaacatgcaggatagcaa

SEQ ID NO: 531938 - DNA, 19 bp, Mus musculus
  siRNA target sequence for Ankfy1 (NM_009671.2,1120-1138).
ggcaggactcctttacact

SEQ ID NO: 531939 - DNA, 19 bp, Mus musculus
  siRNA target sequence for Ankfy1 (NM_009671.2,1226-1244).
gttgtgagggtgggattat

SEQ ID NO: 531940 - DNA, 19 bp, Mus musculus
  siRNA target sequence for Ankfy1 (NM_009671.2,1231-1249).
gagggtgggattattagat

SEQ ID NO: 531941 - DNA, 19 bp, Mus musculus
  siRNA target sequence for Ankfy1 (NM_009671.2,1234-1252).
ggtgggattattagattta

SEQ ID NO: 531942 - DNA, 19 bp, Mus musculus
  siRNA target sequence for Ankfy1 (NM_009671.2,1287-1305).
ggctggccgtccagtacat

SEQ ID NO: 531943 - DNA, 19 bp, Mus musculus
  siRNA target sequence for Ankfy1 (NM_009671.2,1289-1307).
ctggccgtccagtacatca

SEQ ID NO: 531944 - DNA, 19 bp, Mus musculus
  siRNA target sequence for Ankra2 (NM_023472.1,380-398).
gagtgtcccagcagctata

SEQ ID NO: 531945 - DNA, 19 bp, Mus musculus
  siRNA target sequence for Ankra2 (NM_023472.1,475-493).
catggggatgaaattcata

SEQ ID NO: 531946 - DNA, 19 bp, Mus musculus
  siRNA target sequence for Ankra2 (NM_023472.1,497-515).
ccaaaccgatttgatatga

SEQ ID NO: 531947 - DNA, 19 bp, Mus musculus
  siRNA target sequence for Ankra2 (NM_023472.1,527-545).
cgattcgtgaagtccttaa

SEQ ID NO: 531948 - DNA, 19 bp, Mus musculus
  siRNA target sequence for Ankra2 (NM_023472.1,528-546).
gattcgtgaagtccttaaa

SEQ ID NO: 531949 - DNA, 19 bp, Mus musculus
  siRNA target sequence for Ankra2 (NM_023472.1,532-550).
cgtgaagtccttaaatgaa

SEQ ID NO: 531950 - DNA, 19 bp, Mus musculus
  siRNA target sequence for Ankra2 (NM_023472.1,593-611).
gaggtggcatctgtcttat

SEQ ID NO: 531951 - DNA, 19 bp, Mus musculus
  siRNA target sequence for Ankra2 (NM_023472.1,596-614).
gtggcatctgtcttattta

SEQ ID NO: 531952 - DNA, 19 bp, Mus musculus
  siRNA target sequence for Ankra2 (NM_023472.1,617-635).
gctgagtgcaatatccata

SEQ ID NO: 531953 - DNA, 19 bp, Mus musculus
  siRNA target sequence for Ankra2 (NM_023472.1,620-638).
gagtgcaatatccatacat

SEQ ID NO: 531954 - DNA, 19 bp, Mus musculus
  siRNA target sequence for Ankra2 (NM_023472.1,622-640).
gtgcaatatccatacatct

SEQ ID NO: 531955 - DNA, 19 bp, Mus musculus
  siRNA target sequence for Ankra2 (NM_023472.1,668-686).
gtctacacaccatctacaa

SEQ ID NO: 531956 - DNA, 19 bp, Mus musculus
  siRNA target sequence for Ankra2 (NM_023472.1,757-775).
cacacctctgttagcaaat

SEQ ID NO: 531957 - DNA, 19 bp, Mus musculus
  siRNA target sequence for Ankra2 (NM_023472.1,820-838).
cctggctactcgtattgaa

SEQ ID NO: 531958 - DNA, 19 bp, Mus musculus
  siRNA target sequence for Ankra2 (NM_023472.1,823-841).
ggctactcgtattgaacaa

SEQ ID NO: 531959 - DNA, 19 bp, Mus musculus
  siRNA target sequence for Ankra2 (NM_023472.1,898-916).
ggcacatgggcaaatagct

SEQ ID NO: 531960 - DNA, 19 bp, Mus musculus
  siRNA target sequence for Ankra2 (NM_023472.1,1006-1024).
ctacacagacattgtcaaa

SEQ ID NO: 531961 - DNA, 19 bp, Mus musculus
  siRNA target sequence for Ankra2 (NM_023472.1,1040-1058).
ggagttgacgtcaatgaat

SEQ ID NO: 531962 - DNA, 19 bp, Mus musculus
  siRNA target sequence for Ankra2 (NM_023472.1,1041-1059).
gagttgacgtcaatgaata

SEQ ID NO: 531963 - DNA, 19 bp, Mus musculus
  siRNA target sequence for Ankra2 (NM_023472.1,1140-1158).
gagctgacccaacaattga

SEQ ID NO: 531964 - DNA, 19 bp, Mus musculus
  siRNA target sequence for Anp32a (NM_009672.2,79-97).
gatggacaaacggatttat

SEQ ID NO: 531965 - DNA, 19 bp, Mus musculus
  siRNA target sequence for Anp32a (NM_009672.2,114-132).
ggacgccctctgatgtgaa

SEQ ID NO: 531966 - DNA, 19 bp, Mus musculus
  siRNA target sequence for Anp32a (NM_009672.2,115-133).
gacgccctctgatgtgaaa

SEQ ID NO: 531967 - DNA, 19 bp, Mus musculus
  siRNA target sequence for Anp32a (NM_009672.2,117-135).
cgccctctgatgtgaaaga

SEQ ID NO: 531968 - DNA, 19 bp, Mus musculus
  siRNA target sequence for Anp32a (NM_009672.2,137-155).
ctggtcctggataactgta

SEQ ID NO: 531969 - DNA, 19 bp, Mus musculus
  siRNA target sequence for Anp32a (NM_009672.2,140-158).
gtcctggataactgtaagt

SEQ ID NO: 531970 - DNA, 19 bp, Mus musculus
  siRNA target sequence for Anp32a (NM_009672.2,159-177).
caattgaaggcaaaatcga

SEQ ID NO: 531971 - DNA, 19 bp, Mus musculus
  siRNA target sequence for Anp32a (NM_009672.2,200-218).
gaactggaattcctaagta

SEQ ID NO: 531972 - DNA, 19 bp, Mus musculus
  siRNA target sequence for Anp32a (NM_009672.2,206-224).
gaattcctaagtacaatca

SEQ ID NO: 531973 - DNA, 19 bp, Mus musculus
  siRNA target sequence for Anp32a (NM_009672.2,281-299).
gaattaagcgaaaacagaa

SEQ ID NO: 531974 - DNA, 19 bp, Mus musculus
  siRNA target sequence for Anp32a (NM_009672.2,335-353).
ccgaaccttaagcatctaa

SEQ ID NO: 531975 - DNA, 19 bp, Mus musculus
  siRNA target sequence for Anp32a (NM_009672.2,336-354).
cgaaccttaagcatctaaa

SEQ ID NO: 531976 - DNA, 19 bp, Mus musculus
  siRNA target sequence for Anp32a (NM_009672.2,337-355).
gaaccttaagcatctaaat

SEQ ID NO: 531977 - DNA, 19 bp, Mus musculus
  siRNA target sequence for Anp32a (NM_009672.2,387-405).
caatagagccgctgaagaa

SEQ ID NO: 531978 - DNA, 19 bp, Mus musculus
  siRNA target sequence for Anxa11 (NM_013469.1,235-253).
cccctatcgggctggataa

SEQ ID NO: 531979 - DNA, 19 bp, Mus musculus
  siRNA target sequence for Anxa11 (NM_013469.1,238-256).
ctatcgggctggataacgt

SEQ ID NO: 531980 - DNA, 19 bp, Mus musculus
  siRNA target sequence for Anxa11 (NM_013469.1,248-266).
ggataacgtagccaactat

SEQ ID NO: 531981 - DNA, 19 bp, Mus musculus
  siRNA target sequence for Anxa11 (NM_013469.1,426-444).
cctgtccctccttatggaa

SEQ ID NO: 531982 - DNA, 19 bp, Mus musculus
  siRNA target sequence for Anxa11 (NM_013469.1,642-660).
ggatactcgggatctagta

SEQ ID NO: 531983 - DNA, 19 bp, Mus musculus
  siRNA target sequence for Anxa11 (NM_013469.1,946-964).
cggtcctgtttgatgtcta

SEQ ID NO: 531984 - DNA, 19 bp, Mus musculus
  siRNA target sequence for Anxa11 (NM_013469.1,951-969).
ctgtttgatgtctatgaga

SEQ ID NO: 531985 - DNA, 19 bp, Mus musculus
  siRNA target sequence for Anxa11 (NM_013469.1,983-1001).
caagggggctggtactgat

SEQ ID NO: 531986 - DNA, 19 bp, Mus musculus
  siRNA target sequence for Anxa11 (NM_013469.1,1025-1043).
cgcttccagaagtaacgaa

SEQ ID NO: 531987 - DNA, 19 bp, Mus musculus
  siRNA target sequence for Anxa11 (NM_013469.1,1055-1073).
gctaagcagggcctacaaa

SEQ ID NO: 531988 - DNA, 19 bp, Mus musculus
  siRNA target sequence for Anxa11 (NM_013469.1,1056-1074).
ctaagcagggcctacaaaa

SEQ ID NO: 531989 - DNA, 19 bp, Mus musculus
  siRNA target sequence for Anxa11 (NM_013469.1,1060-1078).
gcagggcctacaaaacaga

SEQ ID NO: 531990 - DNA, 19 bp, Mus musculus
  siRNA target sequence for Anxa11 (NM_013469.1,1163-1181).
ccgtgatgagagcacaaat

SEQ ID NO: 531991 - DNA, 19 bp, Mus musculus
  siRNA target sequence for Anxa11 (NM_013469.1,1306-1324).
cagttttcaacgagtatca

SEQ ID NO: 531992 - DNA, 19 bp, Mus musculus
  siRNA target sequence for Anxa11 (NM_013469.1,1308-1326).
gttttcaacgagtatcaga

SEQ ID NO: 531993 - DNA, 19 bp, Mus musculus
  siRNA target sequence for Anxa11 (NM_013469.1,1529-1547).
ggatatccgagcagagtat

SEQ ID NO: 531994 - DNA, 19 bp, Mus musculus
  siRNA target sequence for Anxa11 (NM_013469.1,1530-1548).
gatatccgagcagagtata

SEQ ID NO: 531995 - DNA, 19 bp, Mus musculus
  siRNA target sequence for Anxa11 (NM_013469.1,1577-1595).
cgatatcacgggagatact

SEQ ID NO: 531996 - DNA, 19 bp, Mus musculus
  siRNA target sequence for Anxa11 (NM_013469.1,1578-1596).
gatatcacgggagatactt

SEQ ID NO: 531997 - DNA, 19 bp, Mus musculus
  siRNA target sequence for Anxa11 (NM_013469.1,1594-1612).
cttctggagactatcgaaa

SEQ ID NO: 531998 - DNA, 19 bp, Mus musculus
  siRNA target sequence for Anxa11 (NM_013469.1,1600-1618).
gagactatcgaaagattct

SEQ ID NO: 531999 - DNA, 19 bp, Mus musculus
  siRNA target sequence for Apba2bp (NM_021546.1,222-240).
ccagtttgtcacacgattt

SEQ ID NO: 532000 - DNA, 19 bp, Mus musculus
  siRNA target sequence for Apba2bp (NM_021546.1,326-344).
gccagcggttggatgaaga

SEQ ID NO: 532001 - DNA, 19 bp, Mus musculus
  siRNA target sequence for Apba2bp (NM_021546.1,649-667).
gctttgtgctgctacatga

SEQ ID NO: 532002 - DNA, 19 bp, Mus musculus
  siRNA target sequence for Apba2bp (NM_021546.1,730-748).
gctttcaccctgtatgagt

SEQ ID NO: 532003 - DNA, 19 bp, Mus musculus
  siRNA target sequence for Apba2bp (NM_021546.1,872-890).
cctggtggattatgaataa

SEQ ID NO: 532004 - DNA, 19 bp, Mus musculus
  siRNA target sequence for Apba2bp (NM_021546.1,873-891).
ctggtggattatgaataat

SEQ ID NO: 532005 - DNA, 19 bp, Mus musculus
  siRNA target sequence for Apg10l (NM_025770.2,143-161).
gctacatgtgcaaaacaca

SEQ ID NO: 532006 - DNA, 19 bp, Mus musculus
  siRNA target sequence for Apg10l (NM_025770.2,147-165).
catgtgcaaaacacagttt

SEQ ID NO: 532007 - DNA, 19 bp, Mus musculus
  siRNA target sequence for Apg10l (NM_025770.2,158-176).
cacagtttcgaataaagaa

SEQ ID NO: 532008 - DNA, 19 bp, Mus musculus
  siRNA target sequence for Apg10l (NM_025770.2,293-311).
cagaagtgattaaacatga

SEQ ID NO: 532009 - DNA, 19 bp, Mus musculus
  siRNA target sequence for Apg10l (NM_025770.2,300-318).
gattaaacatgagtatcat

SEQ ID NO: 532010 - DNA, 19 bp, Mus musculus
  siRNA target sequence for Apg10l (NM_025770.2,307-325).
catgagtatcatgtcttat

SEQ ID NO: 532011 - DNA, 19 bp, Mus musculus
  siRNA target sequence for Apg10l (NM_025770.2,310-328).
gagtatcatgtcttatact

SEQ ID NO: 532012 - DNA, 19 bp, Mus musculus
  siRNA target sequence for Apg10l (NM_025770.2,312-330).
gtatcatgtcttatactct

SEQ ID NO: 532013 - DNA, 19 bp, Mus musculus
  siRNA target sequence for Apg10l (NM_025770.2,343-361).
gtgccggttctttacttta

SEQ ID NO: 532014 - DNA, 19 bp, Mus musculus
  siRNA target sequence for Apg10l (NM_025770.2,386-404).
cgttagctctggaggatat

SEQ ID NO: 532015 - DNA, 19 bp, Mus musculus
  siRNA target sequence for Apg10l (NM_025770.2,387-405).
gttagctctggaggatata

SEQ ID NO: 532016 - DNA, 19 bp, Mus musculus
  siRNA target sequence for Apg10l (NM_025770.2,413-431).
gtgttcatgagtgctataa

SEQ ID NO: 532017 - DNA, 19 bp, Mus musculus
  siRNA target sequence for Apg10l (NM_025770.2,482-500).
caatacttgggcaaccatt

SEQ ID NO: 532018 - DNA, 19 bp, Mus musculus
  siRNA target sequence for Apg10l (NM_025770.2,514-532).
ccctgcaagacaaatgaat

SEQ ID NO: 532019 - DNA, 19 bp, Mus musculus
  siRNA target sequence for Apg10l (NM_025770.2,518-536).
gcaagacaaatgaattcat

SEQ ID NO: 532020 - DNA, 19 bp, Mus musculus
  siRNA target sequence for Apg10l (NM_025770.2,567-585).
caatagaaatgtcaactat

SEQ ID NO: 532021 - DNA, 19 bp, Mus musculus
  siRNA target sequence for Apg10l (NM_025770.2,577-595).
gtcaactatatcacatcat

SEQ ID NO: 532022 - DNA, 19 bp, Mus musculus
  siRNA target sequence for Apg10l (NM_025770.2,612-630).
gccagtggttggtctgaat

SEQ ID NO: 532023 - DNA, 19 bp, Mus musculus
  siRNA target sequence for Apg10l (NM_025770.2,613-631).
ccagtggttggtctgaatt

SEQ ID NO: 532024 - DNA, 19 bp, Mus musculus
  siRNA target sequence for Apg10l (NM_025770.2,614-632).
cagtggttggtctgaattt

SEQ ID NO: 532025 - DNA, 19 bp, Mus musculus
  siRNA target sequence for Apg10l (NM_025770.2,618-636).
ggttggtctgaatttacct

SEQ ID NO: 532026 - DNA, 19 bp, Mus musculus
  siRNA target sequence for Apg10l (NM_025770.2,637-655).
ctgagctatgctaaagcaa

SEQ ID NO: 532027 - DNA, 19 bp, Mus musculus
  siRNA target sequence for Apg10l (NM_025770.2,646-664).
gctaaagcaacatcacaat

SEQ ID NO: 532028 - DNA, 19 bp, Mus musculus
  siRNA target sequence for Apg12l (NM_026217.1,196-214).
gtaggagacactcctataa

SEQ ID NO: 532029 - DNA, 19 bp, Mus musculus
  siRNA target sequence for Apg12l (NM_026217.1,199-217).
ggagacactcctataatga

SEQ ID NO: 532030 - DNA, 19 bp, Mus musculus
  siRNA target sequence for Apg12l (NM_026217.1,200-218).
gagacactcctataatgaa

SEQ ID NO: 532031 - DNA, 19 bp, Mus musculus
  siRNA target sequence for Apg12l (NM_026217.1,202-220).
gacactcctataatgaaaa

SEQ ID NO: 532032 - DNA, 19 bp, Mus musculus
  siRNA target sequence for Apg12l (NM_026217.1,297-315).
ggcctcggaacagttgttt

SEQ ID NO: 532033 - DNA, 19 bp, Mus musculus
  siRNA target sequence for Apg12l (NM_026217.1,298-316).
gcctcggaacagttgttta

SEQ ID NO: 532034 - DNA, 19 bp, Mus musculus
  siRNA target sequence for Apg12l (NM_026217.1,302-320).
cggaacagttgtttattta

SEQ ID NO: 532035 - DNA, 19 bp, Mus musculus
  siRNA target sequence for Apg12l (NM_026217.1,341-359).
cttccccagaccaagaagt

SEQ ID NO: 532036 - DNA, 19 bp, Mus musculus
  siRNA target sequence for Apg12l (NM_026217.1,362-380).
gaactctatatgagtgttt

SEQ ID NO: 532037 - DNA, 19 bp, Mus musculus
  siRNA target sequence for Apg12l (NM_026217.1,392-410).
gtaaactggtcctgcatta

SEQ ID NO: 532038 - DNA, 19 bp, Mus musculus
  siRNA target sequence for Apg12l (NM_026217.1,400-418).
gtcctgcattactgcaaat

SEQ ID NO: 532039 - DNA, 19 bp, Mus musculus
  siRNA target sequence for Apg16l (NM_029846.2,222-240).
cgttcgaggagatcattct

SEQ ID NO: 532040 - DNA, 19 bp, Mus musculus
  siRNA target sequence for Apg16l (NM_029846.2,259-277).
ggaaaagtcagatcttcat

SEQ ID NO: 532041 - DNA, 19 bp, Mus musculus
  siRNA target sequence for Apg16l (NM_029846.2,267-285).
cagatcttcattcagtatt

SEQ ID NO: 532042 - DNA, 19 bp, Mus musculus
  siRNA target sequence for Apg16l (NM_029846.2,354-372).
gtgcgtggaatgatagtca

SEQ ID NO: 532043 - DNA, 19 bp, Mus musculus
  siRNA target sequence for Apg16l (NM_029846.2,358-376).
gtggaatgatagtcaacta

SEQ ID NO: 532044 - DNA, 19 bp, Mus musculus
  siRNA target sequence for Apg16l (NM_029846.2,365-383).
gatagtcaactacaagaaa

SEQ ID NO: 532045 - DNA, 19 bp, Mus musculus
  siRNA target sequence for Apg16l (NM_029846.2,629-647).
gacgccctgcagattactt

SEQ ID NO: 532046 - DNA, 19 bp, Mus musculus
  siRNA target sequence for Apg16l (NM_029846.2,631-649).
cgccctgcagattactttt

SEQ ID NO: 532047 - DNA, 19 bp, Mus musculus
  siRNA target sequence for Apg16l (NM_029846.2,632-650).
gccctgcagattactttta

SEQ ID NO: 532048 - DNA, 19 bp, Mus musculus
  siRNA target sequence for Apg16l (NM_029846.2,817-835).
ggaacctctacctgttgaa

SEQ ID NO: 532049 - DNA, 19 bp, Mus musculus
  siRNA target sequence for Apg16l (NM_029846.2,948-966).
gaggccttctggattctat

SEQ ID NO: 532050 - DNA, 19 bp, Mus musculus
  siRNA target sequence for Apg16l (NM_029846.2,952-970).
ccttctggattctatcact

SEQ ID NO: 532051 - DNA, 19 bp, Mus musculus
  siRNA target sequence for Apg16l (NM_029846.2,959-977).
gattctatcactaatatct

SEQ ID NO: 532052 - DNA, 19 bp, Mus musculus
  siRNA target sequence for Apg16l (NM_029846.2,1065-1083).
ctactgcctcgtatgtctt

SEQ ID NO: 532053 - DNA, 19 bp, Mus musculus
  siRNA target sequence for Apg16l (NM_029846.2,1156-1174).
ggaccgcagggtgaaactt

SEQ ID NO: 532054 - DNA, 19 bp, Mus musculus
  siRNA target sequence for Apg16l (NM_029846.2,1157-1175).
gaccgcagggtgaaacttt

SEQ ID NO: 532055 - DNA, 19 bp, Mus musculus
  siRNA target sequence for Apg16l (NM_029846.2,1177-1195).
ggaagcattcggagataaa

SEQ ID NO: 532056 - DNA, 19 bp, Mus musculus
  siRNA target sequence for Apg16l (NM_029846.2,1257-1275).
gtgctggagcttacctatt

SEQ ID NO: 532057 - DNA, 19 bp, Mus musculus
  siRNA target sequence for Apg16l (NM_029846.2,1270-1288).
cctattagcagcttcaaat

SEQ ID NO: 532058 - DNA, 19 bp, Mus musculus
  siRNA target sequence for Apg16l (NM_029846.2,1309-1327).
gactgtggatgattatcga

SEQ ID NO: 532059 - DNA, 19 bp, Mus musculus
  siRNA target sequence for Apg16l (NM_029846.2,1415-1433).
gaccggaccctcaaactct

SEQ ID NO: 532060 - DNA, 19 bp, Mus musculus
  siRNA target sequence for Apg16l (NM_029846.2,1442-1460).
cgcagcaaagtctgcataa

SEQ ID NO: 532061 - DNA, 19 bp, Mus musculus
  siRNA target sequence for Apg16l (NM_029846.2,1447-1465).
caaagtctgcataaaaaca

SEQ ID NO: 532062 - DNA, 19 bp, Mus musculus
  siRNA target sequence for Apg16l (NM_029846.2,1480-1498).
cagctgcaatgacattgtt

SEQ ID NO: 532063 - DNA, 19 bp, Mus musculus
  siRNA target sequence for Apg16l (NM_029846.2,1512-1530).
gtgtaatgagtggacattt

SEQ ID NO: 532064 - DNA, 19 bp, Mus musculus
  siRNA target sequence for Apg16l (NM_029846.2,1576-1594).
ccgagagatggaactgtta

SEQ ID NO: 532065 - DNA, 19 bp, Mus musculus
  siRNA target sequence for Apg16l (NM_029846.2,1586-1604).
gaactgttagggaagatca

SEQ ID NO: 532066 - DNA, 19 bp, Mus musculus
  siRNA target sequence for Apg16l (NM_029846.2,1651-1669).
ccgtgatgacctgctaaaa

SEQ ID NO: 532067 - DNA, 19 bp, Mus musculus
  siRNA target sequence for Apg16l (NM_029846.2,1653-1671).
gtgatgacctgctaaaagt

SEQ ID NO: 532068 - DNA, 19 bp, Mus musculus
  siRNA target sequence for Apg16l (NM_029846.2,1672-1690).
catcgacctccggacaaat

SEQ ID NO: 532069 - DNA, 19 bp, Mus musculus
  siRNA target sequence for Apg16l (NM_029846.2,1675-1693).
cgacctccggacaaatgca

SEQ ID NO: 532070 - DNA, 19 bp, Mus musculus
  siRNA target sequence for Apg16l (NM_029846.2,1681-1699).
ccggacaaatgcagtcaaa

SEQ ID NO: 532071 - DNA, 19 bp, Mus musculus
  siRNA target sequence for Apg16l (NM_029846.2,1683-1701).
ggacaaatgcagtcaaaca

SEQ ID NO: 532072 - DNA, 19 bp, Mus musculus
  siRNA target sequence for Apg16l (NM_029846.2,1691-1709).
gcagtcaaacagacattca

SEQ ID NO: 532073 - DNA, 19 bp, Mus musculus
  siRNA target sequence for Apg16l (NM_029846.2,1786-1804).
ctcagccgagggttctctt

SEQ ID NO: 532074 - DNA, 19 bp, Mus musculus
  siRNA target sequence for Apg16l (NM_029846.2,1788-1806).
cagccgagggttctcttta

SEQ ID NO: 532075 - DNA, 19 bp, Mus musculus
  siRNA target sequence for Apg16l (NM_029846.2,1791-1809).
ccgagggttctctttatgt

SEQ ID NO: 532076 - DNA, 19 bp, Mus musculus
  siRNA target sequence for Apg16l (NM_029846.2,1890-1908).
cctcgggcttacatgttgt

SEQ ID NO: 532077 - DNA, 19 bp, Mus musculus
  siRNA target sequence for Apg7l (NM_028835.1,374-392).
ctgggaagccataaagtca

SEQ ID NO: 532078 - DNA, 19 bp, Mus musculus
  siRNA target sequence for Apg7l (NM_028835.1,391-409).
caggtgctgctctcgaaaa

SEQ ID NO: 532079 - DNA, 19 bp, Mus musculus
  siRNA target sequence for Apg7l (NM_028835.1,505-523).
ctgagagcatccctctaat

SEQ ID NO: 532080 - DNA, 19 bp, Mus musculus
  siRNA target sequence for Apg7l (NM_028835.1,578-596).
ggagcatgcctatgatgat

SEQ ID NO: 532081 - DNA, 19 bp, Mus musculus
  siRNA target sequence for Apg7l (NM_028835.1,624-642).
ctgccctacttcttattca

SEQ ID NO: 532082 - DNA, 19 bp, Mus musculus
  siRNA target sequence for Apg7l (NM_028835.1,627-645).
ccctacttcttattcaagt

SEQ ID NO: 532083 - DNA, 19 bp, Mus musculus
  siRNA target sequence for Apg7l (NM_028835.1,628-646).
cctacttcttattcaagta

SEQ ID NO: 532084 - DNA, 19 bp, Mus musculus
  siRNA target sequence for Apg7l (NM_028835.1,675-693).
ctcaaacactacagtgatt

SEQ ID NO: 532085 - DNA, 19 bp, Mus musculus
  siRNA target sequence for Apg7l (NM_028835.1,731-749).
gtacgatccctgtaaccta

SEQ ID NO: 532086 - DNA, 19 bp, Mus musculus
  siRNA target sequence for Apg7l (NM_028835.1,864-882).
gctagagacgtgacacata

SEQ ID NO: 532087 - DNA, 19 bp, Mus musculus
  siRNA target sequence for Apg7l (NM_028835.1,868-886).
gagacgtgacacatagcat

SEQ ID NO: 532088 - DNA, 19 bp, Mus musculus
  siRNA target sequence for Apg7l (NM_028835.1,877-895).
cacatagcatcatctttga

SEQ ID NO: 532089 - DNA, 19 bp, Mus musculus
  siRNA target sequence for Apg7l (NM_028835.1,914-932).
ggcatttagcccagattgt

SEQ ID NO: 532090 - DNA, 19 bp, Mus musculus
  siRNA target sequence for Apg7l (NM_028835.1,1030-1048).
catctgtggatctgaatct

SEQ ID NO: 532091 - DNA, 19 bp, Mus musculus
  siRNA target sequence for Apg7l (NM_028835.1,1129-1147).
gtaccttggggtgtaatgt

SEQ ID NO: 532092 - DNA, 19 bp, Mus musculus
  siRNA target sequence for Apg7l (NM_028835.1,1232-1250).
gcctctgtatgaatttgaa

SEQ ID NO: 532093 - DNA, 19 bp, Mus musculus
  siRNA target sequence for Apg7l (NM_028835.1,1293-1311).
gagcggctacagaaaatat

SEQ ID NO: 532094 - DNA, 19 bp, Mus musculus
  siRNA target sequence for Apg7l (NM_028835.1,1326-1344).
gccagagggttcaacatga

SEQ ID NO: 532095 - DNA, 19 bp, Mus musculus
  siRNA target sequence for Apg7l (NM_028835.1,1480-1498).
ggtggcttcctactgttat

SEQ ID NO: 532096 - DNA, 19 bp, Mus musculus
  siRNA target sequence for Apg7l (NM_028835.1,1481-1499).
gtggcttcctactgttatt

SEQ ID NO: 532097 - DNA, 19 bp, Mus musculus
  siRNA target sequence for Apg7l (NM_028835.1,1529-1547).
cgctgccttggggtttgat

SEQ ID NO: 532098 - DNA, 19 bp, Mus musculus
  siRNA target sequence for Apg7l (NM_028835.1,1534-1552).
ccttggggtttgatacctt

SEQ ID NO: 532099 - DNA, 19 bp, Mus musculus
  siRNA target sequence for Apg7l (NM_028835.1,1538-1556).
ggggtttgatacctttgtt

SEQ ID NO: 532100 - DNA, 19 bp, Mus musculus
  siRNA target sequence for Apg7l (NM_028835.1,1703-1721).
ggtggctccaggagattca

SEQ ID NO: 532101 - DNA, 19 bp, Mus musculus
  siRNA target sequence for Apg7l (NM_028835.1,1908-1926).
cagatccggggttttctgt

SEQ ID NO: 532102 - DNA, 19 bp, Mus musculus
  siRNA target sequence for Apg7l (NM_028835.1,1925-1943).
gtcacggttcgataatgtt

SEQ ID NO: 532103 - DNA, 19 bp, Mus musculus
  siRNA target sequence for Apg7l (NM_028835.1,1950-1968).
gtcagcctggcatttgata

SEQ ID NO: 532104 - DNA, 19 bp, Mus musculus
  siRNA target sequence for Apg7l (NM_028835.1,1952-1970).
cagcctggcatttgataaa

SEQ ID NO: 532105 - DNA, 19 bp, Mus musculus
  siRNA target sequence for Apg7l (NM_028835.1,1955-1973).
cctggcatttgataaatgt

SEQ ID NO: 532106 - DNA, 19 bp, Mus musculus
  siRNA target sequence for Apg7l (NM_028835.1,1958-1976).
ggcatttgataaatgtaca

SEQ ID NO: 532107 - DNA, 19 bp, Mus musculus
  siRNA target sequence for Apg7l (NM_028835.1,1979-1997).
ctgttcacccaaagttctt

SEQ ID NO: 532108 - DNA, 19 bp, Mus musculus
  siRNA target sequence for Apg7l (NM_028835.1,1981-1999).
gttcacccaaagttcttga

SEQ ID NO: 532109 - DNA, 19 bp, Mus musculus
  siRNA target sequence for Apg7l (NM_028835.1,1987-2005).
ccaaagttcttgatcagta

SEQ ID NO: 532110 - DNA, 19 bp, Mus musculus
  siRNA target sequence for Apg7l (NM_028835.1,2023-2041).
ccttcctagcgaaggtttt

SEQ ID NO: 532111 - DNA, 19 bp, Mus musculus
  siRNA target sequence for Apg7l (NM_028835.1,2024-2042).
cttcctagcgaaggttttt

SEQ ID NO: 532112 - DNA, 19 bp, Mus musculus
  siRNA target sequence for App (NM_007471.1,232-250).
ccccagatcgccatgttct

SEQ ID NO: 532113 - DNA, 19 bp, Mus musculus
  siRNA target sequence for App (NM_007471.1,301-319).
gacccgtcagggaccaaaa

SEQ ID NO: 532114 - DNA, 19 bp, Mus musculus
  siRNA target sequence for App (NM_007471.1,304-322).
ccgtcagggaccaaaacct

SEQ ID NO: 532115 - DNA, 19 bp, Mus musculus
  siRNA target sequence for App (NM_007471.1,552-570).
ggagcggatggatgtttgt

SEQ ID NO: 532116 - DNA, 19 bp, Mus musculus
  siRNA target sequence for App (NM_007471.1,656-674).
cctgcggcatcgacaagtt

SEQ ID NO: 532117 - DNA, 19 bp, Mus musculus
  siRNA target sequence for App (NM_007471.1,672-690).
gttccgaggggtagagttt

SEQ ID NO: 532118 - DNA, 19 bp, Mus musculus
  siRNA target sequence for App (NM_007471.1,675-693).
ccgaggggtagagtttgta

SEQ ID NO: 532119 - DNA, 19 bp, Mus musculus
  siRNA target sequence for App (NM_007471.1,676-694).
cgaggggtagagtttgtat

SEQ ID NO: 532120 - DNA, 19 bp, Mus musculus
  siRNA target sequence for App (NM_007471.1,797-815).
gcggtgaagacaaagtagt

SEQ ID NO: 532121 - DNA, 19 bp, Mus musculus
  siRNA target sequence for App (NM_007471.1,798-816).
cggtgaagacaaagtagta

SEQ ID NO: 532122 - DNA, 19 bp, Mus musculus
  siRNA target sequence for App (NM_007471.1,928-946).
gaggccaccgagagaacaa

SEQ ID NO: 532123 - DNA, 19 bp, Mus musculus
  siRNA target sequence for App (NM_007471.1,1028-1046).
ccgacgccgtcgacaagta

SEQ ID NO: 532124 - DNA, 19 bp, Mus musculus
  siRNA target sequence for App (NM_007471.1,1162-1180).
gagcgtcaagccaagaact

SEQ ID NO: 532125 - DNA, 19 bp, Mus musculus
  siRNA target sequence for App (NM_007471.1,1321-1339).
cgcctggacctcgagaatt

SEQ ID NO: 532126 - DNA, 19 bp, Mus musculus
  siRNA target sequence for App (NM_007471.1,1324-1342).
ctggacctcgagaattaca

SEQ ID NO: 532127 - DNA, 19 bp, Mus musculus
  siRNA target sequence for App (NM_007471.1,1327-1345).
gacctcgagaattacatca

SEQ ID NO: 532128 - DNA, 19 bp, Mus musculus
  siRNA target sequence for App (NM_007471.1,1364-1382).
ccccaaggcctcatcatgt

SEQ ID NO: 532129 - DNA, 19 bp, Mus musculus
  siRNA target sequence for App (NM_007471.1,1370-1388).
ggcctcatcatgtgttcaa

SEQ ID NO: 532130 - DNA, 19 bp, Mus musculus
  siRNA target sequence for App (NM_007471.1,1491-1509).
ccggtcccaggttatgaca

SEQ ID NO: 532131 - DNA, 19 bp, Mus musculus
  siRNA target sequence for App (NM_007471.1,1508-1526).
cacacctccgtgtgatcta

SEQ ID NO: 532132 - DNA, 19 bp, Mus musculus
  siRNA target sequence for App (NM_007471.1,1571-1589).
cggtggctgaggagattca

SEQ ID NO: 532133 - DNA, 19 bp, Mus musculus
  siRNA target sequence for App (NM_007471.1,1572-1590).
ggtggctgaggagattcaa

SEQ ID NO: 532134 - DNA, 19 bp, Mus musculus
  siRNA target sequence for App (NM_007471.1,1636-1654).
gatgtcttggccaacatga

SEQ ID NO: 532135 - DNA, 19 bp, Mus musculus
  siRNA target sequence for App (NM_007471.1,1697-1715).
cttcgctgacggaaaccaa

SEQ ID NO: 532136 - DNA, 19 bp, Mus musculus
  siRNA target sequence for App (NM_007471.1,1802-1820).
cagccaataccgaaaatga

SEQ ID NO: 532137 - DNA, 19 bp, Mus musculus
  siRNA target sequence for App (NM_007471.1,1805-1823).
ccaataccgaaaatgaagt

SEQ ID NO: 532138 - DNA, 19 bp, Mus musculus
  siRNA target sequence for App (NM_007471.1,1876-1894).
ggttctgggctgacaaaca

SEQ ID NO: 532139 - DNA, 19 bp, Mus musculus
  siRNA target sequence for App (NM_007471.1,1938-1956).
cggacatgattcaggattt

SEQ ID NO: 532140 - DNA, 19 bp, Mus musculus
  siRNA target sequence for App (NM_007471.1,2170-2188).
cagcagaacggatatgaga

SEQ ID NO: 532141 - DNA, 19 bp, Mus musculus
  siRNA target sequence for App (NM_007471.1,2172-2190).
gcagaacggatatgagaat

SEQ ID NO: 532142 - DNA, 19 bp, Mus musculus
  siRNA target sequence for App (NM_007471.1,2180-2198).
gatatgagaatccaactta

SEQ ID NO: 532143 - DNA, 19 bp, Mus musculus
  siRNA target sequence for App (NM_007471.1,2185-2203).
gagaatccaacttacaagt

SEQ ID NO: 532144 - DNA, 19 bp, Mus musculus
  siRNA target sequence for App (NM_007471.1,2192-2210).
caacttacaagttctttga

SEQ ID NO: 532145 - DNA, 19 bp, Mus musculus
  siRNA target sequence for Aps (NM_018825.2,347-365).
cccgactggcggcaattct

SEQ ID NO: 532146 - DNA, 19 bp, Mus musculus
  siRNA target sequence for Aps (NM_018825.2,452-470).
gacgctgggacctcattct

SEQ ID NO: 532147 - DNA, 19 bp, Mus musculus
  siRNA target sequence for Aps (NM_018825.2,669-687).
gattctcgctgcgtaacat

SEQ ID NO: 532148 - DNA, 19 bp, Mus musculus
  siRNA target sequence for Aps (NM_018825.2,784-802).
gtcggagcctcgtgacaaa

SEQ ID NO: 532149 - DNA, 19 bp, Mus musculus
  siRNA target sequence for Aps (NM_018825.2,788-806).
gagcctcgtgacaaatgga

SEQ ID NO: 532150 - DNA, 19 bp, Mus musculus
  siRNA target sequence for Aps (NM_018825.2,837-855).
cagccaaagtggagttagt

SEQ ID NO: 532151 - DNA, 19 bp, Mus musculus
  siRNA target sequence for Aps (NM_018825.2,1115-1133).
gagaacggagcagaataca

SEQ ID NO: 532152 - DNA, 19 bp, Mus musculus
  siRNA target sequence for Aps (NM_018825.2,1638-1656).
gtgtgctgaccttcaactt

SEQ ID NO: 532153 - DNA, 19 bp, Mus musculus
  siRNA target sequence for Aps (NM_018825.2,1725-1743).
ggttccagtccgtgtttga

SEQ ID NO: 532154 - DNA, 19 bp, Mus musculus
  siRNA target sequence for Aps (NM_018825.2,1726-1744).
gttccagtccgtgtttgat

SEQ ID NO: 532155 - DNA, 19 bp, Mus musculus
  siRNA target sequence for Aps (NM_018825.2,1785-1803).
caggaggatcggctgatat

SEQ ID NO: 532156 - DNA, 19 bp, Mus musculus
  siRNA target sequence for Aps (NM_018825.2,1787-1805).
ggaggatcggctgatatca

SEQ ID NO: 532157 - DNA, 19 bp, Mus musculus
  siRNA target sequence for Aps (NM_018825.2,1796-1814).
gctgatatcaccctaagaa

SEQ ID NO: 532158 - DNA, 19 bp, Mus musculus
  siRNA target sequence for Aps (NM_018825.2,1967-1985).
gctggagcttcgtcttcat

SEQ ID NO: 532159 - DNA, 19 bp, Mus musculus
  siRNA target sequence for Aps (NM_018825.2,2133-2151).
ctcgtgctgtggagaatca

SEQ ID NO: 532160 - DNA, 19 bp, Mus musculus
  siRNA target sequence for Aps (NM_018825.2,2135-2153).
cgtgctgtggagaatcagt

SEQ ID NO: 532161 - DNA, 19 bp, Mus musculus
  siRNA target sequence for Arhgap10 (NM_030113.1,283-301).
gacttcgagttcgagttta

SEQ ID NO: 532162 - DNA, 19 bp, Mus musculus
  siRNA target sequence for Arhgap10 (NM_030113.1,321-339).
cgatgaacggtgcatagat

SEQ ID NO: 532163 - DNA, 19 bp, Mus musculus
  siRNA target sequence for Arhgap10 (NM_030113.1,340-358).
gcctccttacgggaatttt

SEQ ID NO: 532164 - DNA, 19 bp, Mus musculus
  siRNA target sequence for Arhgap10 (NM_030113.1,342-360).
ctccttacgggaattttct

SEQ ID NO: 532165 - DNA, 19 bp, Mus musculus
  siRNA target sequence for Arhgap10 (NM_030113.1,344-362).
ccttacgggaattttctaa

SEQ ID NO: 532166 - DNA, 19 bp, Mus musculus
  siRNA target sequence for Arhgap10 (NM_030113.1,400-418).
gcattaagtgtgactgaaa

SEQ ID NO: 532167 - DNA, 19 bp, Mus musculus
  siRNA target sequence for Arhgap10 (NM_030113.1,409-427).
gtgactgaaaccctgatta

SEQ ID NO: 532168 - DNA, 19 bp, Mus musculus
  siRNA target sequence for Arhgap10 (NM_030113.1,498-516).
gacggaaaagaattacagt

SEQ ID NO: 532169 - DNA, 19 bp, Mus musculus
  siRNA target sequence for Arhgap10 (NM_030113.1,612-630).
cgagctctcgcttgaatat

SEQ ID NO: 532170 - DNA, 19 bp, Mus musculus
  siRNA target sequence for Arhgap10 (NM_030113.1,616-634).
ctctcgcttgaatatgtgt

SEQ ID NO: 532171 - DNA, 19 bp, Mus musculus
  siRNA target sequence for Arhgap10 (NM_030113.1,659-677).
gaaagaagttcgagtttgt

SEQ ID NO: 532172 - DNA, 19 bp, Mus musculus
  siRNA target sequence for Arhgap10 (NM_030113.1,681-699).
gcctatgctgtccttcttt

SEQ ID NO: 532173 - DNA, 19 bp, Mus musculus
  siRNA target sequence for Arhgap10 (NM_030113.1,735-753).
gctttccaaagacttcaat

SEQ ID NO: 532174 - DNA, 19 bp, Mus musculus
  siRNA target sequence for Arhgap10 (NM_030113.1,740-758).
ccaaagacttcaatcacta

SEQ ID NO: 532175 - DNA, 19 bp, Mus musculus
  siRNA target sequence for Arhgap10 (NM_030113.1,765-783).
ggaactacaaatcaacatt

SEQ ID NO: 532176 - DNA, 19 bp, Mus musculus
  siRNA target sequence for Arhgap10 (NM_030113.1,784-802).
cagaatacacggaatcgat

SEQ ID NO: 532177 - DNA, 19 bp, Mus musculus
  siRNA target sequence for Arhgap10 (NM_030113.1,786-804).
gaatacacggaatcgattt

SEQ ID NO: 532178 - DNA, 19 bp, Mus musculus
  siRNA target sequence for Arhgap10 (NM_030113.1,935-953).
ggtccagttgggtcaaaca

SEQ ID NO: 532179 - DNA, 19 bp, Mus musculus
  siRNA target sequence for Arhgap10 (NM_030113.1,938-956).
ccagttgggtcaaacacta

SEQ ID NO: 532180 - DNA, 19 bp, Mus musculus
  siRNA target sequence for Arhgap10 (NM_030113.1,978-996).
caagaaattcaacatgatt

SEQ ID NO: 532181 - DNA, 19 bp, Mus musculus
  siRNA target sequence for Arhgap10 (NM_030113.1,1028-1046).
gggatggcgaggctttctt

SEQ ID NO: 532182 - DNA, 19 bp, Mus musculus
  siRNA target sequence for Arhgap10 (NM_030113.1,1029-1047).
ggatggcgaggctttcttt

SEQ ID NO: 532183 - DNA, 19 bp, Mus musculus
  siRNA target sequence for Arhgap10 (NM_030113.1,1030-1048).
gatggcgaggctttctttt

SEQ ID NO: 532184 - DNA, 19 bp, Mus musculus
  siRNA target sequence for Arhgap10 (NM_030113.1,1082-1100).
cggacagaaggttttgctt

SEQ ID NO: 532185 - DNA, 19 bp, Mus musculus
  siRNA target sequence for Arhgap10 (NM_030113.1,1137-1155).
gaccgtgcaggcgttttca

SEQ ID NO: 532186 - DNA, 19 bp, Mus musculus
  siRNA target sequence for Arhgap10 (NM_030113.1,1139-1157).
ccgtgcaggcgttttcaga

SEQ ID NO: 532187 - DNA, 19 bp, Mus musculus
  siRNA target sequence for Arhgap10 (NM_030113.1,1140-1158).
cgtgcaggcgttttcagaa

SEQ ID NO: 532188 - DNA, 19 bp, Mus musculus
  siRNA target sequence for Arhgap10 (NM_030113.1,1202-1220).
gctctgttcacacgtttaa

SEQ ID NO: 532189 - DNA, 19 bp, Mus musculus
  siRNA target sequence for Arhgap10 (NM_030113.1,1379-1397).
gtatgttgatggatgtaaa

SEQ ID NO: 532190 - DNA, 19 bp, Mus musculus
  siRNA target sequence for Arhgap10 (NM_030113.1,1437-1455).
ggaagtgaagacagtaaca

SEQ ID NO: 532191 - DNA, 19 bp, Mus musculus
  siRNA target sequence for Arhgap10 (NM_030113.1,1492-1510).
cctctcatgacctatgagt

SEQ ID NO: 532192 - DNA, 19 bp, Mus musculus
  siRNA target sequence for Arhgap10 (NM_030113.1,1493-1511).
ctctcatgacctatgagtt

SEQ ID NO: 532193 - DNA, 19 bp, Mus musculus
  siRNA target sequence for Arhgap10 (NM_030113.1,1547-1565).
gcccggaatcccgagttaa

SEQ ID NO: 532194 - DNA, 19 bp, Mus musculus
  siRNA target sequence for Arhgap10 (NM_030113.1,1548-1566).
cccggaatcccgagttaat

SEQ ID NO: 532195 - DNA, 19 bp, Mus musculus
  siRNA target sequence for Arhgap10 (NM_030113.1,1572-1590).
ccacttcttggtacacaaa

SEQ ID NO: 532196 - DNA, 19 bp, Mus musculus
  siRNA target sequence for Arhgap10 (NM_030113.1,1587-1605).
caaactgccagagaagaat

SEQ ID NO: 532197 - DNA, 19 bp, Mus musculus
  siRNA target sequence for Arhgap10 (NM_030113.1,1654-1672).
cactcgaagcagaatctaa

SEQ ID NO: 532198 - DNA, 19 bp, Mus musculus
  siRNA target sequence for Arhgap10 (NM_030113.1,1735-1753).
gttgccgccatcatggatt

SEQ ID NO: 532199 - DNA, 19 bp, Mus musculus
  siRNA target sequence for Arhgap10 (NM_030113.1,1738-1756).
gccgccatcatggatttga

SEQ ID NO: 532200 - DNA, 19 bp, Mus musculus
  siRNA target sequence for Arhgap10 (NM_030113.1,1739-1757).
ccgccatcatggatttgaa

SEQ ID NO: 532201 - DNA, 19 bp, Mus musculus
  siRNA target sequence for Arhgap10 (NM_030113.1,1742-1760).
ccatcatggatttgaagtt

SEQ ID NO: 532202 - DNA, 19 bp, Mus musculus
  siRNA target sequence for Arhgap10 (NM_030113.1,1770-1788).
cgttgtagaaatcttaatt

SEQ ID NO: 532203 - DNA, 19 bp, Mus musculus
  siRNA target sequence for Arhgap10 (NM_030113.1,1794-1812).
ccatgaaaagatttttcga

SEQ ID NO: 532204 - DNA, 19 bp, Mus musculus
  siRNA target sequence for Arhgap10 (NM_030113.1,1795-1813).
catgaaaagatttttcgaa

SEQ ID NO: 532205 - DNA, 19 bp, Mus musculus
  siRNA target sequence for Arhgap10 (NM_030113.1,1815-1833).
ctcgcctgataccacattt

SEQ ID NO: 532206 - DNA, 19 bp, Mus musculus
  siRNA target sequence for Arhgap10 (NM_030113.1,1818-1836).
gcctgataccacatttgct

SEQ ID NO: 532207 - DNA, 19 bp, Mus musculus
  siRNA target sequence for Arhgap10 (NM_030113.1,1913-1931).
gaccagtggccgtgtacaa

SEQ ID NO: 532208 - DNA, 19 bp, Mus musculus
  siRNA target sequence for Arhgap10 (NM_030113.1,2136-2154).
catggtgcagtggctaaat

SEQ ID NO: 532209 - DNA, 19 bp, Mus musculus
  siRNA target sequence for Arhgap10 (NM_030113.1,2234-2252).
ctgctgcctccattgtaga

SEQ ID NO: 532210 - DNA, 19 bp, Mus musculus
  siRNA target sequence for Arhgap10 (NM_030113.1,2237-2255).
ctgcctccattgtagacaa

SEQ ID NO: 532211 - DNA, 19 bp, Mus musculus
  siRNA target sequence for Arhgap10 (NM_030113.1,2257-2275).
ctgcctgagtgcgttatca

SEQ ID NO: 532212 - DNA, 19 bp, Mus musculus
  siRNA target sequence for Arhgap10 (NM_030113.1,2259-2277).
gcctgagtgcgttatcaat

SEQ ID NO: 532213 - DNA, 19 bp, Mus musculus
  siRNA target sequence for Arhgap10 (NM_030113.1,2263-2281).
gagtgcgttatcaatcgaa

SEQ ID NO: 532214 - DNA, 19 bp, Mus musculus
  siRNA target sequence for Arhgap10 (NM_030113.1,2311-2329).
gaacacagctcggaattgt

SEQ ID NO: 532215 - DNA, 19 bp, Mus musculus
  siRNA target sequence for Arhgap10 (NM_030113.1,2314-2332).
cacagctcggaattgtcat

SEQ ID NO: 532216 - DNA, 19 bp, Mus musculus
  siRNA target sequence for Arhgap10 (NM_030113.1,2318-2336).
gctcggaattgtcatttga

SEQ ID NO: 532217 - DNA, 19 bp, Mus musculus
  siRNA target sequence for Arhgap10 (NM_030113.1,2321-2339).
cggaattgtcatttgaaat

SEQ ID NO: 532218 - DNA, 19 bp, Mus musculus
  siRNA target sequence for Arhgap10 (NM_030113.1,2345-2363).
ccatttttgaggatgttca

SEQ ID NO: 532219 - DNA, 19 bp, Mus musculus
  siRNA target sequence for Arhgap10 (NM_030113.1,2414-2432).
ggctgattccacagaatta

SEQ ID NO: 532220 - DNA, 19 bp, Mus musculus
  siRNA target sequence for Arhgap10 (NM_030113.1,2415-2433).
gctgattccacagaattat

SEQ ID NO: 532221 - DNA, 19 bp, Mus musculus
  siRNA target sequence for Arl6ip4 (NM_144509.1,393-411).
ggtcggcgagggtcagaaa

SEQ ID NO: 532222 - DNA, 19 bp, Mus musculus
  siRNA target sequence for Arl6ip4 (NM_144509.1,394-412).
gtcggcgagggtcagaaaa

SEQ ID NO: 532223 - DNA, 19 bp, Mus musculus
  siRNA target sequence for Arl6ip4 (NM_144509.1,403-421).
ggtcagaaaagcgaagtaa

SEQ ID NO: 532224 - DNA, 19 bp, Mus musculus
  siRNA target sequence for Arl6ip4 (NM_144509.1,435-453).
gatgcctcgaggaactgtt

SEQ ID NO: 532225 - DNA, 19 bp, Mus musculus
  siRNA target sequence for Arl6ip4 (NM_144509.1,816-834).
gccatgaaacccatgacaa

SEQ ID NO: 532226 - DNA, 19 bp, Mus musculus
  siRNA target sequence for Arl6ip4 (NM_144509.1,817-835).
ccatgaaacccatgacaaa

SEQ ID NO: 532227 - DNA, 19 bp, Mus musculus
  siRNA target sequence for Arl6ip4 (NM_144509.1,851-869).
ccgacagagcgttattcga

SEQ ID NO: 532228 - DNA, 19 bp, Mus musculus
  siRNA target sequence for Arl6ip4 (NM_144509.1,852-870).
cgacagagcgttattcgaa

SEQ ID NO: 532229 - DNA, 19 bp, Mus musculus
  siRNA target sequence for Arl6ip4 (NM_144509.1,853-871).
gacagagcgttattcgaaa

SEQ ID NO: 532230 - DNA, 19 bp, Mus musculus
  siRNA target sequence for Arl6ip4 (NM_144509.1,892-910).
gacgcacaaggctcatcaa

SEQ ID NO: 532231 - DNA, 19 bp, Mus musculus
  siRNA target sequence for Arl6ip4 (NM_144509.1,911-929).
gggagacggcgaggtttta

SEQ ID NO: 532232 - DNA, 19 bp, Mus musculus
  siRNA target sequence for Arl6ip4 (NM_144509.1,913-931).
gagacggcgaggttttaga

SEQ ID NO: 532233 - DNA, 19 bp, Mus musculus
  siRNA target sequence for Arl6ip4 (NM_144509.1,923-941).
ggttttagaggaaatcgta

SEQ ID NO: 532234 - DNA, 19 bp, Mus musculus
  siRNA target sequence for Arl6ip4 (NM_144509.1,924-942).
gttttagaggaaatcgtaa

SEQ ID NO: 532235 - DNA, 19 bp, Mus musculus
  siRNA target sequence for Arl6ip5 (NM_022992.1,54-72).
cgtgcctgggacgatttct

SEQ ID NO: 532236 - DNA, 19 bp, Mus musculus
  siRNA target sequence for Arl6ip5 (NM_022992.1,55-73).
gtgcctgggacgatttctt

SEQ ID NO: 532237 - DNA, 19 bp, Mus musculus
  siRNA target sequence for Arl6ip5 (NM_022992.1,99-117).
ccggacttcagggacattt

SEQ ID NO: 532238 - DNA, 19 bp, Mus musculus
  siRNA target sequence for Arl6ip5 (NM_022992.1,138-156).
gtgagcaatctgctctatt

SEQ ID NO: 532239 - DNA, 19 bp, Mus musculus
  siRNA target sequence for Arl6ip5 (NM_022992.1,142-160).
gcaatctgctctattacca

SEQ ID NO: 532240 - DNA, 19 bp, Mus musculus
  siRNA target sequence for Arl6ip5 (NM_022992.1,270-288).
gtgtgggcagcgcacaata

SEQ ID NO: 532241 - DNA, 19 bp, Mus musculus
  siRNA target sequence for Arl6ip5 (NM_022992.1,272-290).
gtgggcagcgcacaataaa

SEQ ID NO: 532242 - DNA, 19 bp, Mus musculus
  siRNA target sequence for Arl6ip5 (NM_022992.1,351-369).
gccagctacttcctcatat

SEQ ID NO: 532243 - DNA, 19 bp, Mus musculus
  siRNA target sequence for Arl6ip5 (NM_022992.1,355-373).
gctacttcctcatatccat

SEQ ID NO: 532244 - DNA, 19 bp, Mus musculus
  siRNA target sequence for Arl6ip5 (NM_022992.1,489-507).
ggaatcggcctgaagaaaa

SEQ ID NO: 532245 - DNA, 19 bp, Mus musculus
  siRNA target sequence for Arl6ip6 (NM_022989.2,386-404).
ctcgccatcgcctacatga

SEQ ID NO: 532246 - DNA, 19 bp, Mus musculus
  siRNA target sequence for Arl6ip6 (NM_022989.2,394-412).
cgcctacatgatcgttaaa

SEQ ID NO: 532247 - DNA, 19 bp, Mus musculus
  siRNA target sequence for Arl6ip6 (NM_022989.2,403-421).
gatcgttaaagaattgcat

SEQ ID NO: 532248 - DNA, 19 bp, Mus musculus
  siRNA target sequence for Arl6ip6 (NM_022989.2,472-490).
ctggtctctgctgataata

SEQ ID NO: 532249 - DNA, 19 bp, Mus musculus
  siRNA target sequence for Arl6ip6 (NM_022989.2,630-648).
gctacagcatggcaatttt

SEQ ID NO: 532250 - DNA, 19 bp, Mus musculus
  siRNA target sequence for Arrb1 (NM_177231.1,487-505).
ctgtggtgtggattatgaa

SEQ ID NO: 532251 - DNA, 19 bp, Mus musculus
  siRNA target sequence for Arrb1 (NM_177231.1,631-649).
cagacagttccttatgtca

SEQ ID NO: 532252 - DNA, 19 bp, Mus musculus
  siRNA target sequence for Arrb1 (NM_177231.1,722-740).
gtccacgtcaccaacaaca

SEQ ID NO: 532253 - DNA, 19 bp, Mus musculus
  siRNA target sequence for Arrb1 (NM_177231.1,741-759).
ccaacaagactgtgaagaa

SEQ ID NO: 532254 - DNA, 19 bp, Mus musculus
  siRNA target sequence for Arrb1 (NM_177231.1,996-1014).
gtgccaaccgtgaaatcct

SEQ ID NO: 532255 - DNA, 19 bp, Mus musculus
  siRNA target sequence for Arrb1 (NM_177231.1,1213-1231).
caatgatgacgacattgta

SEQ ID NO: 532256 - DNA, 19 bp, Mus musculus
  siRNA target sequence for Arrb1 (NM_177231.1,1302-1320).
gctctccgcacctcaacaa

SEQ ID NO: 532257 - DNA, 19 bp, Mus musculus
  siRNA target sequence for Arvcf (NM_033474.2,331-349).
gacacgggcactagaacaa

SEQ ID NO: 532258 - DNA, 19 bp, Mus musculus
  siRNA target sequence for Arvcf (NM_033474.2,580-598).
catcgtcacatcagaagat

SEQ ID NO: 532259 - DNA, 19 bp, Mus musculus
  siRNA target sequence for Arvcf (NM_033474.2,615-633).
ctgagactaaggtcactaa

SEQ ID NO: 532260 - DNA, 19 bp, Mus musculus
  siRNA target sequence for Arvcf (NM_033474.2,617-635).
gagactaaggtcactaaga

SEQ ID NO: 532261 - DNA, 19 bp, Mus musculus
  siRNA target sequence for Arvcf (NM_033474.2,712-730).
ccctccacttggctctttt

SEQ ID NO: 532262 - DNA, 19 bp, Mus musculus
  siRNA target sequence for Arvcf (NM_033474.2,838-856).
cgagtcccgtgatattcca

SEQ ID NO: 532263 - DNA, 19 bp, Mus musculus
  siRNA target sequence for Arvcf (NM_033474.2,839-857).
gagtcccgtgatattccaa

SEQ ID NO: 532264 - DNA, 19 bp, Mus musculus
  siRNA target sequence for Arvcf (NM_033474.2,844-862).
ccgtgatattccaagctat

SEQ ID NO: 532265 - DNA, 19 bp, Mus musculus
  siRNA target sequence for Arvcf (NM_033474.2,1088-1106).
gacctggagcctgactata

SEQ ID NO: 532266 - DNA, 19 bp, Mus musculus
  siRNA target sequence for Arvcf (NM_033474.2,1468-1486).
cctgcttgtggcattacta

SEQ ID NO: 532267 - DNA, 19 bp, Mus musculus
  siRNA target sequence for Arvcf (NM_033474.2,1471-1489).
gcttgtggcattactagat

SEQ ID NO: 532268 - DNA, 19 bp, Mus musculus
  siRNA target sequence for Arvcf (NM_033474.2,1759-1777).
ggagcgagagcctaacgaa

SEQ ID NO: 532269 - DNA, 19 bp, Mus musculus
  siRNA target sequence for Arvcf (NM_033474.2,1995-2013).
cctaccacgtgcacaaaga

SEQ ID NO: 532270 - DNA, 19 bp, Mus musculus
  siRNA target sequence for Arvcf (NM_033474.2,1996-2014).
ctaccacgtgcacaaagaa

SEQ ID NO: 532271 - DNA, 19 bp, Mus musculus
  siRNA target sequence for Arvcf (NM_033474.2,2183-2201).
ctggacctgcctaaacgaa

SEQ ID NO: 532272 - DNA, 19 bp, Mus musculus
  siRNA target sequence for Arvcf (NM_033474.2,2271-2289).
cggagagccggaacttcaa

SEQ ID NO: 532273 - DNA, 19 bp, Mus musculus
  siRNA target sequence for Arvcf (NM_033474.2,2273-2291).
gagagccggaacttcaaca

SEQ ID NO: 532274 - DNA, 19 bp, Mus musculus
  siRNA target sequence for Arvcf (NM_033474.2,2304-2322).
cagccggtgccctgcaaaa

SEQ ID NO: 532275 - DNA, 19 bp, Mus musculus
  siRNA target sequence for Arvcf (NM_033474.2,2726-2744).
cacgtgctacagactgtat

SEQ ID NO: 532276 - DNA, 19 bp, Mus musculus
  siRNA target sequence for Arvcf (NM_033474.2,2937-2955).
cccttggtccagatggtta

SEQ ID NO: 532277 - DNA, 19 bp, Mus musculus
  siRNA target sequence for Atp6v1g1 (NM_024173.1,414-432).
ccggaaatccatgaaaact

SEQ ID NO: 532278 - DNA, 19 bp, Mus musculus
  siRNA target sequence for Atp6v1g1 (NM_024173.1,415-433).
cggaaatccatgaaaacta

SEQ ID NO: 532279 - DNA, 19 bp, Mus musculus
  siRNA target sequence for Aven (NM_028844.1,343-361).
ctgggatcgctatcaagat

SEQ ID NO: 532280 - DNA, 19 bp, Mus musculus
  siRNA target sequence for Aven (NM_028844.1,346-364).
ggatcgctatcaagatact

SEQ ID NO: 532281 - DNA, 19 bp, Mus musculus
  siRNA target sequence for Aven (NM_028844.1,370-388).
ggaggtcaatggtgaaagt

SEQ ID NO: 532282 - DNA, 19 bp, Mus musculus
  siRNA target sequence for Aven (NM_028844.1,578-596).
cttaatgttgcttcagaat

SEQ ID NO: 532283 - DNA, 19 bp, Mus musculus
  siRNA target sequence for Aven (NM_028844.1,601-619).
ccagaccacaattccttta

SEQ ID NO: 532284 - DNA, 19 bp, Mus musculus
  siRNA target sequence for Aven (NM_028844.1,662-680).
gagctgggcatgcatttaa

SEQ ID NO: 532285 - DNA, 19 bp, Mus musculus
  siRNA target sequence for Aven (NM_028844.1,934-952).
ggaaacaggtcctgaaaaa

SEQ ID NO: 532286 - DNA, 19 bp, Mus musculus
  siRNA target sequence for AW049765 (NM_145934.1,138-156).
gaccctgtgaccaggatta

SEQ ID NO: 532287 - DNA, 19 bp, Mus musculus
  siRNA target sequence for AW049765 (NM_145934.1,140-158).
ccctgtgaccaggattaca

SEQ ID NO: 532288 - DNA, 19 bp, Mus musculus
  siRNA target sequence for AW049765 (NM_145934.1,182-200).
ggtttagccatctgtttct

SEQ ID NO: 532289 - DNA, 19 bp, Mus musculus
  siRNA target sequence for AW049765 (NM_145934.1,290-308).
cgggacactgcctatcact

SEQ ID NO: 532290 - DNA, 19 bp, Mus musculus
  siRNA target sequence for AW049765 (NM_145934.1,323-341).
cgggaccaggaggtgaaat

SEQ ID NO: 532291 - DNA, 19 bp, Mus musculus
  siRNA target sequence for AW049765 (NM_145934.1,366-384).
gtgagatgtggaaaggatt

SEQ ID NO: 532292 - DNA, 19 bp, Mus musculus
  siRNA target sequence for AW049765 (NM_145934.1,434-452).
cccggacacctgtacatga

SEQ ID NO: 532293 - DNA, 19 bp, Mus musculus
  siRNA target sequence for AW049765 (NM_145934.1,435-453).
ccggacacctgtacatgat

SEQ ID NO: 532294 - DNA, 19 bp, Mus musculus
  siRNA target sequence for AW049765 (NM_145934.1,618-636).
ccacccggcagattctcaa

SEQ ID NO: 532295 - DNA, 19 bp, Mus musculus
  siRNA target sequence for AW049765 (NM_145934.1,639-657).
ggtctcccgtggtcaaaca

SEQ ID NO: 532296 - DNA, 19 bp, Mus musculus
  siRNA target sequence for AW049765 (NM_145934.1,642-660).
ctcccgtggtcaaacacta

SEQ ID NO: 532297 - DNA, 19 bp, Mus musculus
  siRNA target sequence for AW049765 (NM_145934.1,672-690).
gggcaggttctaagtatgt

SEQ ID NO: 532298 - DNA, 19 bp, Mus musculus
  siRNA target sequence for AW049765 (NM_145934.1,674-692).
gcaggttctaagtatgtga

SEQ ID NO: 532299 - DNA, 19 bp, Mus musculus
  siRNA target sequence for AW049765 (NM_145934.1,675-693).
caggttctaagtatgtgat

SEQ ID NO: 532300 - DNA, 19 bp, Mus musculus
  siRNA target sequence for AW049765 (NM_145934.1,698-716).
gtggaagacccgttttcct

SEQ ID NO: 532301 - DNA, 19 bp, Mus musculus
  siRNA target sequence for AW049765 (NM_145934.1,727-745).
ggaagctgtagtcaactat

SEQ ID NO: 532302 - DNA, 19 bp, Mus musculus
  siRNA target sequence for AW049765 (NM_145934.1,728-746).
gaagctgtagtcaactatt

SEQ ID NO: 532303 - DNA, 19 bp, Mus musculus
  siRNA target sequence for AW049765 (NM_145934.1,732-750).
ctgtagtcaactattttgt

SEQ ID NO: 532304 - DNA, 19 bp, Mus musculus
  siRNA target sequence for AW049765 (NM_145934.1,734-752).
gtagtcaactattttgtga

SEQ ID NO: 532305 - DNA, 19 bp, Mus musculus
  siRNA target sequence for AW049765 (NM_145934.1,1000-1018).
ctacgtgactcccattgaa

SEQ ID NO: 532306 - DNA, 19 bp, Mus musculus
  siRNA target sequence for AW049765 (NM_145934.1,1025-1043).
ccagcagccgaatacatga

SEQ ID NO: 532307 - DNA, 19 bp, Mus musculus
  siRNA target sequence for AW049765 (NM_145934.1,1026-1044).
cagcagccgaatacatgaa

SEQ ID NO: 532308 - DNA, 19 bp, Mus musculus
  siRNA target sequence for AW049765 (NM_145934.1,1029-1047).
cagccgaatacatgaatca

SEQ ID NO: 532309 - DNA, 19 bp, Mus musculus
  siRNA target sequence for AW049765 (NM_145934.1,1096-1114).
ggcaaggctcccagcaaaa

SEQ ID NO: 532310 - DNA, 19 bp, Mus musculus
  siRNA target sequence for AW049765 (NM_145934.1,1135-1153).
gcctaagccagatctcaaa

SEQ ID NO: 532311 - DNA, 19 bp, Mus musculus
  siRNA target sequence for AW049765 (NM_145934.1,1145-1163).
gatctcaaagccattacca

SEQ ID NO: 532312 - DNA, 19 bp, Mus musculus
  siRNA target sequence for AW545966 (NM_177771.2,662-680).
cccgggatgagctgaatgt

SEQ ID NO: 532313 - DNA, 19 bp, Mus musculus
  siRNA target sequence for AW545966 (NM_177771.2,684-702).
gtcagaggagcaggttttt

SEQ ID NO: 532314 - DNA, 19 bp, Mus musculus
  siRNA target sequence for AW545966 (NM_177771.2,835-853).
gtacggtgctgtcacaaat

SEQ ID NO: 532315 - DNA, 19 bp, Mus musculus
  siRNA target sequence for AW545966 (NM_177771.2,838-856).
cggtgctgtcacaaatgca

SEQ ID NO: 532316 - DNA, 19 bp, Mus musculus
  siRNA target sequence for AW545966 (NM_177771.2,982-1000).
ctcaactcagcagcaaatt

SEQ ID NO: 532317 - DNA, 19 bp, Mus musculus
  siRNA target sequence for AW545966 (NM_177771.2,1164-1182).
caccgtggaggcctacaat

SEQ ID NO: 532318 - DNA, 19 bp, Mus musculus
  siRNA target sequence for AW545966 (NM_177771.2,1204-1222).
cgagtggggagcatgaata

SEQ ID NO: 532319 - DNA, 19 bp, Mus musculus
  siRNA target sequence for AW545966 (NM_177771.2,1207-1225).
gtggggagcatgaatagca

SEQ ID NO: 532320 - DNA, 19 bp, Mus musculus
  siRNA target sequence for AW545966 (NM_177771.2,1390-1408).
gtctttgagggcaggatat

SEQ ID NO: 532321 - DNA, 19 bp, Mus musculus
  siRNA target sequence for AW545966 (NM_177771.2,1392-1410).
ctttgagggcaggatatat

SEQ ID NO: 532322 - DNA, 19 bp, Mus musculus
  siRNA target sequence for AW545966 (NM_177771.2,1532-1550).
ccctgggaagcaagatgtt

SEQ ID NO: 532323 - DNA, 19 bp, Mus musculus
  siRNA target sequence for AW545966 (NM_177771.2,1537-1555).
ggaagcaagatgtttgtct

SEQ ID NO: 532324 - DNA, 19 bp, Mus musculus
  siRNA target sequence for AW545966 (NM_177771.2,1617-1635).
ccagtggtgtctcatagta

SEQ ID NO: 532325 - DNA, 19 bp, Mus musculus
  siRNA target sequence for AW545966 (NM_177771.2,1707-1725).
cgatggacagtcaaaccta

SEQ ID NO: 532326 - DNA, 19 bp, Mus musculus
  siRNA target sequence for AW545966 (NM_177771.2,1752-1770).
gacggaccgctggacattt

SEQ ID NO: 532327 - DNA, 19 bp, Mus musculus
  siRNA target sequence for AW545966 (NM_177771.2,1754-1772).
cggaccgctggacatttat

SEQ ID NO: 532328 - DNA, 19 bp, Mus musculus
  siRNA target sequence for AW742319 (NM_021345.1,267-285).
gacaatgtgctgcatttca

SEQ ID NO: 532329 - DNA, 19 bp, Mus musculus
  siRNA target sequence for AW742319 (NM_021345.1,269-287).
caatgtgctgcatttcaaa

SEQ ID NO: 532330 - DNA, 19 bp, Mus musculus
  siRNA target sequence for AW742319 (NM_021345.1,310-328).
gagacaatgtctatgaatt

SEQ ID NO: 532331 - DNA, 19 bp, Mus musculus
  siRNA target sequence for AW742319 (NM_021345.1,447-465).
gagaagcgcccattgtttt

SEQ ID NO: 532332 - DNA, 19 bp, Mus musculus
  siRNA target sequence for AW742319 (NM_021345.1,484-502).
gctggctggatgaatctga

SEQ ID NO: 532333 - DNA, 19 bp, Mus musculus
  siRNA target sequence for AW742319 (NM_021345.1,530-548).
ggaagaacgcctaaataaa

SEQ ID NO: 532334 - DNA, 19 bp, Mus musculus
  siRNA target sequence for AW742319 (NM_021345.1,534-552).
gaacgcctaaataaactca

SEQ ID NO: 532335 - DNA, 19 bp, Mus musculus
  siRNA target sequence for AW742319 (NM_021345.1,635-653).
ggggttctcctggatcttt

SEQ ID NO: 532336 - DNA, 19 bp, Mus musculus
  siRNA target sequence for AW742319 (NM_021345.1,668-686).
gcggttctttattttagga

SEQ ID NO: 532337 - DNA, 19 bp, Mus musculus
  siRNA target sequence for AW742319 (NM_021345.1,669-687).
cggttctttattttaggaa

SEQ ID NO: 532338 - DNA, 19 bp, Mus musculus
  siRNA target sequence for AW742319 (NM_021345.1,670-688).
ggttctttattttaggaaa

SEQ ID NO: 532339 - DNA, 19 bp, Mus musculus
  siRNA target sequence for AW742319 (NM_021345.1,774-792).
gcgattggggtcacaagta

SEQ ID NO: 532340 - DNA, 19 bp, Mus musculus
  siRNA target sequence for AW742319 (NM_021345.1,907-925).
cctggagcgcaattgaaat

SEQ ID NO: 532341 - DNA, 19 bp, Mus musculus
  siRNA target sequence for AW742319 (NM_021345.1,910-928).
ggagcgcaattgaaatctt

SEQ ID NO: 532342 - DNA, 19 bp, Mus musculus
  siRNA target sequence for AW742319 (NM_021345.1,980-998).
cacgtggctccgttacact

SEQ ID NO: 532343 - DNA, 19 bp, Mus musculus
  siRNA target sequence for AW742319 (NM_021345.1,982-1000).
cgtggctccgttacactat

SEQ ID NO: 532344 - DNA, 19 bp, Mus musculus
  siRNA target sequence for AW742319 (NM_021345.1,1053-1071).
cagtccattccagtattca

SEQ ID NO: 532345 - DNA, 19 bp, Mus musculus
  siRNA target sequence for AW742319 (NM_021345.1,1143-1161).
caagtttatctcgtaatgt

SEQ ID NO: 532346 - DNA, 19 bp, Mus musculus
  siRNA target sequence for AW742319 (NM_021345.1,1215-1233).
cggtatggacaaaagaaga

SEQ ID NO: 532347 - DNA, 19 bp, Mus musculus
  siRNA target sequence for Axin2 (NM_015732.3,459-477).
gtccagtccaccaaaccta

SEQ ID NO: 532348 - DNA, 19 bp, Mus musculus
  siRNA target sequence for Axin2 (NM_015732.3,479-497).
gcccgtttcctctaatgct

SEQ ID NO: 532349 - DNA, 19 bp, Mus musculus
  siRNA target sequence for Axin2 (NM_015732.3,480-498).
cccgtttcctctaatgcta

SEQ ID NO: 532350 - DNA, 19 bp, Mus musculus
  siRNA target sequence for Axin2 (NM_015732.3,559-577).
ccaggtggaccaagtcttt

SEQ ID NO: 532351 - DNA, 19 bp, Mus musculus
  siRNA target sequence for Axin2 (NM_015732.3,560-578).
caggtggaccaagtcttta

SEQ ID NO: 532352 - DNA, 19 bp, Mus musculus
  siRNA target sequence for Axin2 (NM_015732.3,659-677).
cttctggtttgcttgtaat

SEQ ID NO: 532353 - DNA, 19 bp, Mus musculus
  siRNA target sequence for Axin2 (NM_015732.3,723-741).
gccaaagcaatctataaga

SEQ ID NO: 532354 - DNA, 19 bp, Mus musculus
  siRNA target sequence for Axin2 (NM_015732.3,910-928).
ctgacatttacctggaata

SEQ ID NO: 532355 - DNA, 19 bp, Mus musculus
  siRNA target sequence for Axin2 (NM_015732.3,973-991).
gactggggagcctaaaggt

SEQ ID NO: 532356 - DNA, 19 bp, Mus musculus
  siRNA target sequence for Axin2 (NM_015732.3,978-996).
gggagcctaaaggtcttat

SEQ ID NO: 532357 - DNA, 19 bp, Mus musculus
  siRNA target sequence for Axin2 (NM_015732.3,980-998).
gagcctaaaggtcttatgt

SEQ ID NO: 532358 - DNA, 19 bp, Mus musculus
  siRNA target sequence for Axin2 (NM_015732.3,1001-1019).
ctacctccccaccttgaat

SEQ ID NO: 532359 - DNA, 19 bp, Mus musculus
  siRNA target sequence for Axin2 (NM_015732.3,1157-1175).
gagaagcgacccagtcaat

SEQ ID NO: 532360 - DNA, 19 bp, Mus musculus
  siRNA target sequence for Axin2 (NM_015732.3,1162-1180).
gcgacccagtcaatcctta

SEQ ID NO: 532361 - DNA, 19 bp, Mus musculus
  siRNA target sequence for Axin2 (NM_015732.3,1163-1181).
cgacccagtcaatccttat

SEQ ID NO: 532362 - DNA, 19 bp, Mus musculus
  siRNA target sequence for Axin2 (NM_015732.3,1185-1203).
gtaggttccggctatgtct

SEQ ID NO: 532363 - DNA, 19 bp, Mus musculus
  siRNA target sequence for Axin2 (NM_015732.3,1221-1239).
gccaacgacagcgagttat

SEQ ID NO: 532364 - DNA, 19 bp, Mus musculus
  siRNA target sequence for Axin2 (NM_015732.3,1249-1267).
cactgaccgacgattccat

SEQ ID NO: 532365 - DNA, 19 bp, Mus musculus
  siRNA target sequence for Axin2 (NM_015732.3,1307-1325).
ccgcatggggagtaagaaa

SEQ ID NO: 532366 - DNA, 19 bp, Mus musculus
  siRNA target sequence for Axin2 (NM_015732.3,1460-1478).
caggctggagaaactgaaa

SEQ ID NO: 532367 - DNA, 19 bp, Mus musculus
  siRNA target sequence for Axin2 (NM_015732.3,1959-1977).
gggggaacagattattatt

SEQ ID NO: 532368 - DNA, 19 bp, Mus musculus
  siRNA target sequence for Axin2 (NM_015732.3,2227-2245).
cccatagtgcccaaagcat

SEQ ID NO: 532369 - DNA, 19 bp, Mus musculus
  siRNA target sequence for Axin2 (NM_015732.3,2545-2563).
gcctggctccagaagatca

SEQ ID NO: 532370 - DNA, 19 bp, Mus musculus
  siRNA target sequence for Axin2 (NM_015732.3,2549-2567).
ggctccagaagatcacaaa

SEQ ID NO: 532371 - DNA, 19 bp, Mus musculus
  siRNA target sequence for Axin2 (NM_015732.3,2551-2569).
ctccagaagatcacaaaga

SEQ ID NO: 532372 - DNA, 19 bp, Mus musculus
  siRNA target sequence for Axin2 (NM_015732.3,2741-2759).
gaaggcgagtgacgaattt

SEQ ID NO: 532373 - DNA, 19 bp, Mus musculus
  siRNA target sequence for B230208J24Rik (NM_145356.2,653-671).
gccagccctacgtgtatga

SEQ ID NO: 532374 - DNA, 19 bp, Mus musculus
  siRNA target sequence for B230208J24Rik (NM_145356.2,655-673).
cagccctacgtgtatgaga

SEQ ID NO: 532375 - DNA, 19 bp, Mus musculus
  siRNA target sequence for B230208J24Rik (NM_145356.2,1274-1292).
gtgggccactggatttagt

SEQ ID NO: 532376 - DNA, 19 bp, Mus musculus
  siRNA target sequence for B230208J24Rik (NM_145356.2,1280-1298).
cactggatttagtcatcaa

SEQ ID NO: 532377 - DNA, 19 bp, Mus musculus
  siRNA target sequence for B230208J24Rik (NM_145356.2,1355-1373).
ccttctctagcgacttctt

SEQ ID NO: 532378 - DNA, 19 bp, Mus musculus
  siRNA target sequence for B230208J24Rik (NM_145356.2,1413-1431).
ccccatcaaggcagagaat

SEQ ID NO: 532379 - DNA, 19 bp, Mus musculus
  siRNA target sequence for B230208J24Rik (NM_145356.2,1432-1450).
gactatggtgcctatctca

SEQ ID NO: 532380 - DNA, 19 bp, Mus musculus
  siRNA target sequence for B230208J24Rik (NM_145356.2,1699-1717).
ccctacttgtgcattcact

SEQ ID NO: 532381 - DNA, 19 bp, Mus musculus
  siRNA target sequence for B230208J24Rik (NM_145356.2,1724-1742).
ccaagttcgtgcacaacta

SEQ ID NO: 532382 - DNA, 19 bp, Mus musculus
  siRNA target sequence for B230208J24Rik (NM_145356.2,1830-1848).
cctgcaccgccacatcaaa

SEQ ID NO: 532383 - DNA, 19 bp, Mus musculus
  siRNA target sequence for Bag1 (NM_009736.1,393-411).
ccaaaccgaggaagtaact

SEQ ID NO: 532384 - DNA, 19 bp, Mus musculus
  siRNA target sequence for Bag1 (NM_009736.1,522-540).
gaggtatgaccttcttgtt

SEQ ID NO: 532385 - DNA, 19 bp, Mus musculus
  siRNA target sequence for Bag1 (NM_009736.1,605-623).
caggagttccactaccttt

SEQ ID NO: 532386 - DNA, 19 bp, Mus musculus
  siRNA target sequence for Bag1 (NM_009736.1,631-649).
ctcatatttaagggaaaat

SEQ ID NO: 532387 - DNA, 19 bp, Mus musculus
  siRNA target sequence for Bag1 (NM_009736.1,697-715).
ggttgccgagtcatgttaa

SEQ ID NO: 532388 - DNA, 19 bp, Mus musculus
  siRNA target sequence for Bag1 (NM_009736.1,698-716).
gttgccgagtcatgttaat

SEQ ID NO: 532389 - DNA, 19 bp, Mus musculus
  siRNA target sequence for Bag1 (NM_009736.1,702-720).
ccgagtcatgttaattggt

SEQ ID NO: 532390 - DNA, 19 bp, Mus musculus
  siRNA target sequence for Bag1 (NM_009736.1,793-811).
gctaaccacctgcaagaat

SEQ ID NO: 532391 - DNA, 19 bp, Mus musculus
  siRNA target sequence for Bag1 (NM_009736.1,794-812).
ctaaccacctgcaagaatt

SEQ ID NO: 532392 - DNA, 19 bp, Mus musculus
  siRNA target sequence for Bag1 (NM_009736.1,798-816).
ccacctgcaagaattgaat

SEQ ID NO: 532393 - DNA, 19 bp, Mus musculus
  siRNA target sequence for Bag1 (NM_009736.1,799-817).
cacctgcaagaattgaata

SEQ ID NO: 532394 - DNA, 19 bp, Mus musculus
  siRNA target sequence for Bag1 (NM_009736.1,801-819).
cctgcaagaattgaataaa

SEQ ID NO: 532395 - DNA, 19 bp, Mus musculus
  siRNA target sequence for Bag1 (NM_009736.1,840-858).
gggttttctggctaaggaa

SEQ ID NO: 532396 - DNA, 19 bp, Mus musculus
  siRNA target sequence for Bag1 (NM_009736.1,842-860).
gttttctggctaaggaatt

SEQ ID NO: 532397 - DNA, 19 bp, Mus musculus
  siRNA target sequence for Bag1 (NM_009736.1,867-885).
ggaggctctctgcaaactt

SEQ ID NO: 532398 - DNA, 19 bp, Mus musculus
  siRNA target sequence for Bag1 (NM_009736.1,870-888).
ggctctctgcaaacttgat

SEQ ID NO: 532399 - DNA, 19 bp, Mus musculus
  siRNA target sequence for Bag1 (NM_009736.1,871-889).
gctctctgcaaacttgata

SEQ ID NO: 532400 - DNA, 19 bp, Mus musculus
  siRNA target sequence for Bag1 (NM_009736.1,901-919).
gcaacaattgagcaattca

SEQ ID NO: 532401 - DNA, 19 bp, Mus musculus
  siRNA target sequence for Bag1 (NM_009736.1,902-920).
caacaattgagcaattcat

SEQ ID NO: 532402 - DNA, 19 bp, Mus musculus
  siRNA target sequence for Bag1 (NM_009736.1,905-923).
caattgagcaattcatgaa

SEQ ID NO: 532403 - DNA, 19 bp, Mus musculus
  siRNA target sequence for Bag1 (NM_009736.1,948-966).
ggtcctaccagaacaattt

SEQ ID NO: 532404 - DNA, 19 bp, Mus musculus
  siRNA target sequence for Bag1 (NM_009736.1,949-967).
gtcctaccagaacaattta

SEQ ID NO: 532405 - DNA, 19 bp, Mus musculus
  siRNA target sequence for Bag1 (NM_009736.1,970-988).
gacagcaggctaaaaagga

SEQ ID NO: 532406 - DNA, 19 bp, Mus musculus
  siRNA target sequence for Bag1 (NM_009736.1,975-993).
caggctaaaaaggaagaat

SEQ ID NO: 532407 - DNA, 19 bp, Mus musculus
  siRNA target sequence for Bag1 (NM_009736.1,1028-1046).
gtgacacagtggagcaata

SEQ ID NO: 532408 - DNA, 19 bp, Mus musculus
  siRNA target sequence for Bag1 (NM_009736.1,1063-1081).
gagcggctgcagtctacaa

SEQ ID NO: 532409 - DNA, 19 bp, Mus musculus
  siRNA target sequence for Bag1 (NM_009736.1,1066-1084).
cggctgcagtctacaaact

SEQ ID NO: 532410 - DNA, 19 bp, Mus musculus
  siRNA target sequence for Bag2 (NM_145392.1,253-271).
gatgatccacagtatccaa

SEQ ID NO: 532411 - DNA, 19 bp, Mus musculus
  siRNA target sequence for Bag2 (NM_145392.1,278-296).
caggacatgaggcagatta

SEQ ID NO: 532412 - DNA, 19 bp, Mus musculus
  siRNA target sequence for Bag2 (NM_145392.1,412-430).
gcatgccacgaggattata

SEQ ID NO: 532413 - DNA, 19 bp, Mus musculus
  siRNA target sequence for Bag2 (NM_145392.1,470-488).
gccaagagccacttaatgt

SEQ ID NO: 532414 - DNA, 19 bp, Mus musculus
  siRNA target sequence for Bag2 (NM_145392.1,472-490).
caagagccacttaatgtca

SEQ ID NO: 532415 - DNA, 19 bp, Mus musculus
  siRNA target sequence for Bag2 (NM_145392.1,481-499).
cttaatgtcactttacagt

SEQ ID NO: 532416 - DNA, 19 bp, Mus musculus
  siRNA target sequence for Bag2 (NM_145392.1,530-548).
gtggaccagaagtttcaat

SEQ ID NO: 532417 - DNA, 19 bp, Mus musculus
  siRNA target sequence for Bag2 (NM_145392.1,535-553).
ccagaagtttcaatcgata

SEQ ID NO: 532418 - DNA, 19 bp, Mus musculus
  siRNA target sequence for Bag2 (NM_145392.1,564-582).
gcgctcttgaggatcagaa

SEQ ID NO: 532419 - DNA, 19 bp, Mus musculus
  siRNA target sequence for Bag2 (NM_145392.1,628-646).
ctccgacaaggccattaaa

SEQ ID NO: 532420 - DNA, 19 bp, Mus musculus
  siRNA target sequence for Bag2 (NM_145392.1,688-706).
gaacactgacggcaaattt

SEQ ID NO: 532421 - DNA, 19 bp, Mus musculus
  siRNA target sequence for Bag3 (NM_013863.3,488-506).
gggaaggccaccccatata

SEQ ID NO: 532422 - DNA, 19 bp, Mus musculus
  siRNA target sequence for Bag3 (NM_013863.3,513-531).
gctccgaccaggctacatt

SEQ ID NO: 532423 - DNA, 19 bp, Mus musculus
  siRNA target sequence for Bag3 (NM_013863.3,601-619).
ggggtgcagcgatttcgta

SEQ ID NO: 532424 - DNA, 19 bp, Mus musculus
  siRNA target sequence for Bag3 (NM_013863.3,645-663).
gaggtcccagtctccttta

SEQ ID NO: 532425 - DNA, 19 bp, Mus musculus
  siRNA target sequence for Bag3 (NM_013863.3,648-666).
gtcccagtctcctttacgt

SEQ ID NO: 532426 - DNA, 19 bp, Mus musculus
  siRNA target sequence for Bag3 (NM_013863.3,879-897).
ccccatccccgtgatacat

SEQ ID NO: 532427 - DNA, 19 bp, Mus musculus
  siRNA target sequence for Bag3 (NM_013863.3,881-899).
ccatccccgtgatacatga

SEQ ID NO: 532428 - DNA, 19 bp, Mus musculus
  siRNA target sequence for Bag3 (NM_013863.3,1198-1216).
gttacccaacccgaaaaca

SEQ ID NO: 532429 - DNA, 19 bp, Mus musculus
  siRNA target sequence for Bag3 (NM_013863.3,1717-1735).
gttcagaccatcttggaaa

SEQ ID NO: 532430 - DNA, 19 bp, Mus musculus
  siRNA target sequence for Bag3 (NM_013863.3,1766-1784).
gtcaagtacaagtctatga

SEQ ID NO: 532431 - DNA, 19 bp, Mus musculus
  siRNA target sequence for Bag3 (NM_013863.3,1813-1831).
cagccactccaggaaatca

SEQ ID NO: 532432 - DNA, 19 bp, Mus musculus
  siRNA target sequence for Bag4 (NM_026121.1,61-79).
ccagtgacggcccttctta

SEQ ID NO: 532433 - DNA, 19 bp, Mus musculus
  siRNA target sequence for Bag4 (NM_026121.1,299-317).
ccaggaacagccaccatat

SEQ ID NO: 532434 - DNA, 19 bp, Mus musculus
  siRNA target sequence for Bag4 (NM_026121.1,302-320).
ggaacagccaccatatcct

SEQ ID NO: 532435 - DNA, 19 bp, Mus musculus
  siRNA target sequence for Bag4 (NM_026121.1,321-339).
ggctataactccaactact

SEQ ID NO: 532436 - DNA, 19 bp, Mus musculus
  siRNA target sequence for Bag4 (NM_026121.1,399-417).
caaggccagagcctgaatt

SEQ ID NO: 532437 - DNA, 19 bp, Mus musculus
  siRNA target sequence for Bag4 (NM_026121.1,403-421).
gccagagcctgaattctta

SEQ ID NO: 532438 - DNA, 19 bp, Mus musculus
  siRNA target sequence for Bag4 (NM_026121.1,478-496).
cctactctggggcttacta

SEQ ID NO: 532439 - DNA, 19 bp, Mus musculus
  siRNA target sequence for Bag4 (NM_026121.1,479-497).
ctactctggggcttactat

SEQ ID NO: 532440 - DNA, 19 bp, Mus musculus
  siRNA target sequence for Bag4 (NM_026121.1,494-512).
ctatgtacctggctataca

SEQ ID NO: 532441 - DNA, 19 bp, Mus musculus
  siRNA target sequence for Bag4 (NM_026121.1,505-523).
gctatacacagagcaatta

SEQ ID NO: 532442 - DNA, 19 bp, Mus musculus
  siRNA target sequence for Bag4 (NM_026121.1,632-650).
gggacaggtgccaggatat

SEQ ID NO: 532443 - DNA, 19 bp, Mus musculus
  siRNA target sequence for Bag4 (NM_026121.1,676-694).
ccttgccccattatcctta

SEQ ID NO: 532444 - DNA, 19 bp, Mus musculus
  siRNA target sequence for Bag4 (NM_026121.1,677-695).
cttgccccattatccttat

SEQ ID NO: 532445 - DNA, 19 bp, Mus musculus
  siRNA target sequence for Bag4 (NM_026121.1,680-698).
gccccattatccttatgga

SEQ ID NO: 532446 - DNA, 19 bp, Mus musculus
  siRNA target sequence for Bag4 (NM_026121.1,825-843).
gctgggagcctgtacatga

SEQ ID NO: 532447 - DNA, 19 bp, Mus musculus
  siRNA target sequence for Bag4 (NM_026121.1,980-998).
cgtccatcagtatgaatct

SEQ ID NO: 532448 - DNA, 19 bp, Mus musculus
  siRNA target sequence for Bag4 (NM_026121.1,997-1015).
ctccgggagcagtgaacaa

SEQ ID NO: 532449 - DNA, 19 bp, Mus musculus
  siRNA target sequence for Bag4 (NM_026121.1,1003-1021).
gagcagtgaacaatgacaa

SEQ ID NO: 532450 - DNA, 19 bp, Mus musculus
  siRNA target sequence for Bag4 (NM_026121.1,1019-1037).
caactcagaccttttggat

SEQ ID NO: 532451 - DNA, 19 bp, Mus musculus
  siRNA target sequence for Bag4 (NM_026121.1,1035-1053).
gattctcaagtccagtata

SEQ ID NO: 532452 - DNA, 19 bp, Mus musculus
  siRNA target sequence for Bag4 (NM_026121.1,1054-1072).
gtgctgagcctcagttata

SEQ ID NO: 532453 - DNA, 19 bp, Mus musculus
  siRNA target sequence for Bag4 (NM_026121.1,1059-1077).
gagcctcagttatatggta

SEQ ID NO: 532454 - DNA, 19 bp, Mus musculus
  siRNA target sequence for Bag4 (NM_026121.1,1061-1079).
gcctcagttatatggtaat

SEQ ID NO: 532455 - DNA, 19 bp, Mus musculus
  siRNA target sequence for Bag4 (NM_026121.1,1103-1121).
ccaagttccgagtaataat

SEQ ID NO: 532456 - DNA, 19 bp, Mus musculus
  siRNA target sequence for Bag4 (NM_026121.1,1151-1169).
gggcactcctccaagtatt

SEQ ID NO: 532457 - DNA, 19 bp, Mus musculus
  siRNA target sequence for Bag4 (NM_026121.1,1152-1170).
ggcactcctccaagtatta

SEQ ID NO: 532458 - DNA, 19 bp, Mus musculus
  siRNA target sequence for Bag4 (NM_026121.1,1153-1171).
gcactcctccaagtattaa

SEQ ID NO: 532459 - DNA, 19 bp, Mus musculus
  siRNA target sequence for Bag4 (NM_026121.1,1331-1349).
ccgtcaggccaggaaagaa

SEQ ID NO: 532460 - DNA, 19 bp, Mus musculus
  siRNA target sequence for Bai1 (NM_174991.2,456-474).
ccactcctgctgttactat

SEQ ID NO: 532461 - DNA, 19 bp, Mus musculus
  siRNA target sequence for Bai1 (NM_174991.2,645-663).
cgttacacgctctacatga

SEQ ID NO: 532462 - DNA, 19 bp, Mus musculus
  siRNA target sequence for Bai1 (NM_174991.2,646-664).
gttacacgctctacatgaa

SEQ ID NO: 532463 - DNA, 19 bp, Mus musculus
  siRNA target sequence for Bai1 (NM_174991.2,712-730).
cctaccagttcgactcttt

SEQ ID NO: 532464 - DNA, 19 bp, Mus musculus
  siRNA target sequence for Bai1 (NM_174991.2,816-834).
ctacaggccagcaaacagt

SEQ ID NO: 532465 - DNA, 19 bp, Mus musculus
  siRNA target sequence for Bai1 (NM_174991.2,821-839).
ggccagcaaacagtttcta

SEQ ID NO: 532466 - DNA, 19 bp, Mus musculus
  siRNA target sequence for Bai1 (NM_174991.2,826-844).
gcaaacagtttctacagat

SEQ ID NO: 532467 - DNA, 19 bp, Mus musculus
  siRNA target sequence for Bai1 (NM_174991.2,1554-1572).
gtgtcatcctcgtacagta

SEQ ID NO: 532468 - DNA, 19 bp, Mus musculus
  siRNA target sequence for Bai1 (NM_174991.2,1809-1827).
gatggaaactggaacgaat

SEQ ID NO: 532469 - DNA, 19 bp, Mus musculus
  siRNA target sequence for Bai1 (NM_174991.2,1889-1907).
gtgcaatggtccttcctat

SEQ ID NO: 532470 - DNA, 19 bp, Mus musculus
  siRNA target sequence for Bai1 (NM_174991.2,2328-2346).
cggaacatccagatgatga

SEQ ID NO: 532471 - DNA, 19 bp, Mus musculus
  siRNA target sequence for Bai1 (NM_174991.2,2896-2914).
ctgtgctctaccgaaactt

SEQ ID NO: 532472 - DNA, 19 bp, Mus musculus
  siRNA target sequence for Bai1 (NM_174991.2,2944-2962).
caactgtcctcaactctaa

SEQ ID NO: 532473 - DNA, 19 bp, Mus musculus
  siRNA target sequence for Bai1 (NM_174991.2,3188-3206).
ctccaccttcgccatctta

SEQ ID NO: 532474 - DNA, 19 bp, Mus musculus
  siRNA target sequence for Bai1 (NM_174991.2,3219-3237).
gccgacgcgaccatggata

SEQ ID NO: 532475 - DNA, 19 bp, Mus musculus
  siRNA target sequence for Bai1 (NM_174991.2,3220-3238).
ccgacgcgaccatggataa

SEQ ID NO: 532476 - DNA, 19 bp, Mus musculus
  siRNA target sequence for Bai1 (NM_174991.2,3343-3361).
cagagcggtccgttatcct

SEQ ID NO: 532477 - DNA, 19 bp, Mus musculus
  siRNA target sequence for Bai1 (NM_174991.2,3349-3367).
ggtccgttatcctcatcaa

SEQ ID NO: 532478 - DNA, 19 bp, Mus musculus
  siRNA target sequence for Bai1 (NM_174991.2,3350-3368).
gtccgttatcctcatcaat

SEQ ID NO: 532479 - DNA, 19 bp, Mus musculus
  siRNA target sequence for Bai1 (NM_174991.2,3377-3395).
gtccatcatctcctctaat

SEQ ID NO: 532480 - DNA, 19 bp, Mus musculus
  siRNA target sequence for Bai1 (NM_174991.2,3380-3398).
catcatctcctctaatgct

SEQ ID NO: 532481 - DNA, 19 bp, Mus musculus
  siRNA target sequence for Bai1 (NM_174991.2,3391-3409).
ctaatgctctcatccttat

SEQ ID NO: 532482 - DNA, 19 bp, Mus musculus
  siRNA target sequence for Bai1 (NM_174991.2,3637-3655).
gctacagcaccatgaacta

SEQ ID NO: 532483 - DNA, 19 bp, Mus musculus
  siRNA target sequence for Bai1 (NM_174991.2,3638-3656).
ctacagcaccatgaactat

SEQ ID NO: 532484 - DNA, 19 bp, Mus musculus
  siRNA target sequence for Bai1 (NM_174991.2,3671-3689).
ggaggggggacttctgtat

SEQ ID NO: 532485 - DNA, 19 bp, Mus musculus
  siRNA target sequence for Bai1 (NM_174991.2,3712-3730).
cagttgtgctggtgaacat

SEQ ID NO: 532486 - DNA, 19 bp, Mus musculus
  siRNA target sequence for Bai1 (NM_174991.2,3908-3926).
gatcctcttcgctgtcttt

SEQ ID NO: 532487 - DNA, 19 bp, Mus musculus
  siRNA target sequence for Bai1 (NM_174991.2,4095-4113).
gtggatctggcctgtagat

SEQ ID NO: 532488 - DNA, 19 bp, Mus musculus
  siRNA target sequence for Bai1 (NM_174991.2,4366-4384).
gcgatggggacatctttaa

SEQ ID NO: 532489 - DNA, 19 bp, Mus musculus
  siRNA target sequence for Bai1 (NM_174991.2,4491-4509).
cccaaatacagcatcaaca

SEQ ID NO: 532490 - DNA, 19 bp, Mus musculus
  siRNA target sequence for Bai1 (NM_174991.2,5021-5039).
gacgcctgcctgggtaaaa

SEQ ID NO: 532491 - DNA, 19 bp, Mus musculus
  siRNA target sequence for Bai1 (NM_174991.2,5023-5041).
cgcctgcctgggtaaaaaa

SEQ ID NO: 532492 - DNA, 19 bp, Mus musculus
  siRNA target sequence for Baiap2 (NM_130862.1,121-139).
gcaccggctcacggaaaat

SEQ ID NO: 532493 - DNA, 19 bp, Mus musculus
  siRNA target sequence for Baiap2 (NM_130862.1,126-144).
ggctcacggaaaatgtcta

SEQ ID NO: 532494 - DNA, 19 bp, Mus musculus
  siRNA target sequence for Baiap2 (NM_130862.1,190-208).
cgccatgggcaagaactat

SEQ ID NO: 532495 - DNA, 19 bp, Mus musculus
  siRNA target sequence for Baiap2 (NM_130862.1,237-255).
ctgccaaaggctatttcga

SEQ ID NO: 532496 - DNA, 19 bp, Mus musculus
  siRNA target sequence for Baiap2 (NM_130862.1,427-445).
ggactccaggtatctaagt

SEQ ID NO: 532497 - DNA, 19 bp, Mus musculus
  siRNA target sequence for Baiap2 (NM_130862.1,444-462).
gtgctgcactgaagaaata

SEQ ID NO: 532498 - DNA, 19 bp, Mus musculus
  siRNA target sequence for Baiap2 (NM_130862.1,447-465).
ctgcactgaagaaatacca

SEQ ID NO: 532499 - DNA, 19 bp, Mus musculus
  siRNA target sequence for Baiap2 (NM_130862.1,546-564).
gtaagaaccctcagaagta

SEQ ID NO: 532500 - DNA, 19 bp, Mus musculus
  siRNA target sequence for Baiap2 (NM_130862.1,629-647).
gtgtctgacggctacaaga

SEQ ID NO: 532501 - DNA, 19 bp, Mus musculus
  siRNA target sequence for Baiap2 (NM_130862.1,783-801).
gtgccgaccccaacaagat

SEQ ID NO: 532502 - DNA, 19 bp, Mus musculus
  siRNA target sequence for Baiap2 (NM_130862.1,827-845).
caacagatggccaatagca

SEQ ID NO: 532503 - DNA, 19 bp, Mus musculus
  siRNA target sequence for Baiap2 (NM_130862.1,939-957).
ctgagctggcaccatttgt

SEQ ID NO: 532504 - DNA, 19 bp, Mus musculus
  siRNA target sequence for Baiap2 (NM_130862.1,967-985).
gtctgctcaggagaatgta

SEQ ID NO: 532505 - DNA, 19 bp, Mus musculus
  siRNA target sequence for Baiap2 (NM_130862.1,1407-1425).
gtgacggaagtgacagatt

SEQ ID NO: 532506 - DNA, 19 bp, Mus musculus
  siRNA target sequence for Baiap2 (NM_130862.1,1411-1429).
cggaagtgacagattgcat

SEQ ID NO: 532507 - DNA, 19 bp, Mus musculus
  siRNA target sequence for Baiap2 (NM_130862.1,1412-1430).
ggaagtgacagattgcata

SEQ ID NO: 532508 - DNA, 19 bp, Mus musculus
  siRNA target sequence for Baiap2 (NM_130862.1,1413-1431).
gaagtgacagattgcatat

SEQ ID NO: 532509 - DNA, 19 bp, Mus musculus
  siRNA target sequence for Banp (NM_016812.1,158-176).
ggcggatgtggttcagatt

SEQ ID NO: 532510 - DNA, 19 bp, Mus musculus
  siRNA target sequence for Banp (NM_016812.1,261-279).
cagcgactagagatcaatt

SEQ ID NO: 532511 - DNA, 19 bp, Mus musculus
  siRNA target sequence for Banp (NM_016812.1,280-298).
gccaggacccctctataaa

SEQ ID NO: 532512 - DNA, 19 bp, Mus musculus
  siRNA target sequence for Banp (NM_016812.1,284-302).
ggacccctctataaagtct

SEQ ID NO: 532513 - DNA, 19 bp, Mus musculus
  siRNA target sequence for Banp (NM_016812.1,285-303).
gacccctctataaagtctt

SEQ ID NO: 532514 - DNA, 19 bp, Mus musculus
  siRNA target sequence for Banp (NM_016812.1,331-349).
gtttgcggttggatagcat

SEQ ID NO: 532515 - DNA, 19 bp, Mus musculus
  siRNA target sequence for Banp (NM_016812.1,369-387).
ctcgaggccacttgcaaat

SEQ ID NO: 532516 - DNA, 19 bp, Mus musculus
  siRNA target sequence for Banp (NM_016812.1,778-796).
gtcgcacggccgagaagat

SEQ ID NO: 532517 - DNA, 19 bp, Mus musculus
  siRNA target sequence for Banp (NM_016812.1,1197-1215).
gatggacaggtgcaagtaa

SEQ ID NO: 532518 - DNA, 19 bp, Mus musculus
  siRNA target sequence for Banp (NM_016812.1,1627-1645).
ccgacatgcagcttgaaca

SEQ ID NO: 532519 - DNA, 19 bp, Mus musculus
  siRNA target sequence for Banp (NM_016812.1,1628-1646).
cgacatgcagcttgaacat

SEQ ID NO: 532520 - DNA, 19 bp, Mus musculus
  siRNA target sequence for Bat3 (NM_057171.1,318-336).
ctctcagactcggactttt

SEQ ID NO: 532521 - DNA, 19 bp, Mus musculus
  siRNA target sequence for Bat3 (NM_057171.1,395-413).
gcatcccttccgagaaaca

SEQ ID NO: 532522 - DNA, 19 bp, Mus musculus
  siRNA target sequence for Bat3 (NM_057171.1,468-486).
caacgttgggggaaaggtt

SEQ ID NO: 532523 - DNA, 19 bp, Mus musculus
  siRNA target sequence for Bat3 (NM_057171.1,471-489).
cgttgggggaaaggttatt

SEQ ID NO: 532524 - DNA, 19 bp, Mus musculus
  siRNA target sequence for Bat3 (NM_057171.1,642-660).
catggttggaaccttcaat

SEQ ID NO: 532525 - DNA, 19 bp, Mus musculus
  siRNA target sequence for Bat3 (NM_057171.1,703-721).
gaacaggccccaattcaga

SEQ ID NO: 532526 - DNA, 19 bp, Mus musculus
  siRNA target sequence for Bat3 (NM_057171.1,753-771).
gcacatgattagggatata

SEQ ID NO: 532527 - DNA, 19 bp, Mus musculus
  siRNA target sequence for Bat3 (NM_057171.1,890-908).
cagaaccagtcgaaagtga

SEQ ID NO: 532528 - DNA, 19 bp, Mus musculus
  siRNA target sequence for Bat3 (NM_057171.1,1110-1128).
ccgtcttcagcctttccta

SEQ ID NO: 532529 - DNA, 19 bp, Mus musculus
  siRNA target sequence for Bat3 (NM_057171.1,1201-1219).
gaccagaggttgatcaact

SEQ ID NO: 532530 - DNA, 19 bp, Mus musculus
  siRNA target sequence for Bat3 (NM_057171.1,1237-1255).
cggctactgggcaacactt

SEQ ID NO: 532531 - DNA, 19 bp, Mus musculus
  siRNA target sequence for Bat3 (NM_057171.1,1314-1332).
cgtggttcggcctatgtct

SEQ ID NO: 532532 - DNA, 19 bp, Mus musculus
  siRNA target sequence for Bat3 (NM_057171.1,1500-1518).
cactgttgattcatcaact

SEQ ID NO: 532533 - DNA, 19 bp, Mus musculus
  siRNA target sequence for Bat3 (NM_057171.1,1618-1636).
cacatgaacattcaagatt

SEQ ID NO: 532534 - DNA, 19 bp, Mus musculus
  siRNA target sequence for Bat3 (NM_057171.1,1829-1847).
gcgctgggctgggtacaaa

SEQ ID NO: 532535 - DNA, 19 bp, Mus musculus
  siRNA target sequence for Bat3 (NM_057171.1,1831-1849).
gctgggctgggtacaaaca

SEQ ID NO: 532536 - DNA, 19 bp, Mus musculus
  siRNA target sequence for Bat3 (NM_057171.1,1837-1855).
ctgggtacaaacacttcat

SEQ ID NO: 532537 - DNA, 19 bp, Mus musculus
  siRNA target sequence for Bat3 (NM_057171.1,1875-1893).
ccttgtggggcaacttctt

SEQ ID NO: 532538 - DNA, 19 bp, Mus musculus
  siRNA target sequence for Bat3 (NM_057171.1,1876-1894).
cttgtggggcaacttctta

SEQ ID NO: 532539 - DNA, 19 bp, Mus musculus
  siRNA target sequence for Bat3 (NM_057171.1,2106-2124).
gccctctgcagctgatctt

SEQ ID NO: 532540 - DNA, 19 bp, Mus musculus
  siRNA target sequence for Bat3 (NM_057171.1,2108-2126).
cctctgcagctgatcttca

SEQ ID NO: 532541 - DNA, 19 bp, Mus musculus
  siRNA target sequence for Bat3 (NM_057171.1,2238-2256).
ccagggcatgactgatttt

SEQ ID NO: 532542 - DNA, 19 bp, Mus musculus
  siRNA target sequence for Bat3 (NM_057171.1,2393-2411).
gcctgccaccagagttttt

SEQ ID NO: 532543 - DNA, 19 bp, Mus musculus
  siRNA target sequence for Bat3 (NM_057171.1,2657-2675).
cacagctgcgatctttctt

SEQ ID NO: 532544 - DNA, 19 bp, Mus musculus
  siRNA target sequence for Bat3 (NM_057171.1,2749-2767).
gggctggaagagtatgtaa

SEQ ID NO: 532545 - DNA, 19 bp, Mus musculus
  siRNA target sequence for Bat3 (NM_057171.1,2811-2829).
catccggacaaatttagaa

SEQ ID NO: 532546 - DNA, 19 bp, Mus musculus
  siRNA target sequence for Bat3 (NM_057171.1,2814-2832).
ccggacaaatttagaattt

SEQ ID NO: 532547 - DNA, 19 bp, Mus musculus
  siRNA target sequence for Bat3 (NM_057171.1,2900-2918).
ggttgctggagctgtgtaa

SEQ ID NO: 532548 - DNA, 19 bp, Mus musculus
  siRNA target sequence for Bat3 (NM_057171.1,2915-2933).
gtaaccagggcctgtttga

SEQ ID NO: 532549 - DNA, 19 bp, Mus musculus
  siRNA target sequence for Bat3 (NM_057171.1,3107-3125).
ccgacgccatcctcagata

SEQ ID NO: 532550 - DNA, 19 bp, Mus musculus
  siRNA target sequence for Bat3 (NM_057171.1,3108-3126).
cgacgccatcctcagatat

SEQ ID NO: 532551 - DNA, 19 bp, Mus musculus
  siRNA target sequence for Bat3 (NM_057171.1,3290-3308).
gaggttcccgagatgaaca

SEQ ID NO: 532552 - DNA, 19 bp, Mus musculus
  siRNA target sequence for Bat3 (NM_057171.1,3355-3373).
cctgaatgggtccctatta

SEQ ID NO: 532553 - DNA, 19 bp, Mus musculus
  siRNA target sequence for Bat3 (NM_057171.1,3356-3374).
ctgaatgggtccctattat

SEQ ID NO: 532554 - DNA, 19 bp, Mus musculus
  siRNA target sequence for Bat3 (NM_057171.1,3451-3469).
gccaagagacgaaagacaa

SEQ ID NO: 532555 - DNA, 19 bp, Mus musculus
  siRNA target sequence for Bat3 (NM_057171.1,3452-3470).
ccaagagacgaaagacaat

SEQ ID NO: 532556 - DNA, 19 bp, Mus musculus
  siRNA target sequence for Bat3 (NM_057171.1,3607-3625).
cagcagctccggtctgata

SEQ ID NO: 532557 - DNA, 19 bp, Mus musculus
  siRNA target sequence for Bat3 (NM_057171.1,3613-3631).
ctccggtctgatatccaaa

SEQ ID NO: 532558 - DNA, 19 bp, Mus musculus
  siRNA target sequence for Bat3 (NM_057171.1,3615-3633).
ccggtctgatatccaaaaa

SEQ ID NO: 532559 - DNA, 19 bp, Mus musculus
  siRNA target sequence for Bat3 (NM_057171.1,3618-3636).
gtctgatatccaaaaacga

SEQ ID NO: 532560 - DNA, 19 bp, Mus musculus
  siRNA target sequence for Bax (NM_007527.2,109-127).
ccagctctgaacagatcat

SEQ ID NO: 532561 - DNA, 19 bp, Mus musculus
  siRNA target sequence for Bax (NM_007527.2,112-130).
gctctgaacagatcatgaa

SEQ ID NO: 532562 - DNA, 19 bp, Mus musculus
  siRNA target sequence for Bax (NM_007527.2,131-149).
gacaggggcctttttgcta

SEQ ID NO: 532563 - DNA, 19 bp, Mus musculus
  siRNA target sequence for Bax (NM_007527.2,251-269).
gtgtctccggcgaattgga

SEQ ID NO: 532564 - DNA, 19 bp, Mus musculus
  siRNA target sequence for Bax (NM_007527.2,257-275).
ccggcgaattggagatgaa

SEQ ID NO: 532565 - DNA, 19 bp, Mus musculus
  siRNA target sequence for Bax (NM_007527.2,434-452).
caaggccctgtgcactaaa

SEQ ID NO: 532566 - DNA, 19 bp, Mus musculus
  siRNA target sequence for BC011167 (NM_172565.1,516-534).
cggtggaagccgttatcga

SEQ ID NO: 532567 - DNA, 19 bp, Mus musculus
  siRNA target sequence for BC011167 (NM_172565.1,524-542).
gccgttatcgagtacatgt

SEQ ID NO: 532568 - DNA, 19 bp, Mus musculus
  siRNA target sequence for BC011167 (NM_172565.1,525-543).
ccgttatcgagtacatgta

SEQ ID NO: 532569 - DNA, 19 bp, Mus musculus
  siRNA target sequence for BC011167 (NM_172565.1,527-545).
gttatcgagtacatgtaca

SEQ ID NO: 532570 - DNA, 19 bp, Mus musculus
  siRNA target sequence for BC011167 (NM_172565.1,590-608).
gagctggccgacagattct

SEQ ID NO: 532571 - DNA, 19 bp, Mus musculus
  siRNA target sequence for BC011167 (NM_172565.1,592-610).
gctggccgacagattctta

SEQ ID NO: 532572 - DNA, 19 bp, Mus musculus
  siRNA target sequence for BC011167 (NM_172565.1,593-611).
ctggccgacagattcttat

SEQ ID NO: 532573 - DNA, 19 bp, Mus musculus
  siRNA target sequence for BC011167 (NM_172565.1,595-613).
ggccgacagattcttatta

SEQ ID NO: 532574 - DNA, 19 bp, Mus musculus
  siRNA target sequence for BC011167 (NM_172565.1,597-615).
ccgacagattcttattaat

SEQ ID NO: 532575 - DNA, 19 bp, Mus musculus
  siRNA target sequence for BC011167 (NM_172565.1,598-616).
cgacagattcttattaatt

SEQ ID NO: 532576 - DNA, 19 bp, Mus musculus
  siRNA target sequence for BC011167 (NM_172565.1,601-619).
cagattcttattaattcgt

SEQ ID NO: 532577 - DNA, 19 bp, Mus musculus
  siRNA target sequence for BC011167 (NM_172565.1,603-621).
gattcttattaattcgttt

SEQ ID NO: 532578 - DNA, 19 bp, Mus musculus
  siRNA target sequence for BC011167 (NM_172565.1,667-685).
gaattgtgtggccattcat

SEQ ID NO: 532579 - DNA, 19 bp, Mus musculus
  siRNA target sequence for BC011167 (NM_172565.1,672-690).
gtgtggccattcatagctt

SEQ ID NO: 532580 - DNA, 19 bp, Mus musculus
  siRNA target sequence for BC011167 (NM_172565.1,724-742).
gaaagctgcagatatgata

SEQ ID NO: 532581 - DNA, 19 bp, Mus musculus
  siRNA target sequence for BC011167 (NM_172565.1,734-752).
gatatgatacggagaaatt

SEQ ID NO: 532582 - DNA, 19 bp, Mus musculus
  siRNA target sequence for BC011167 (NM_172565.1,739-757).
gatacggagaaatttctat

SEQ ID NO: 532583 - DNA, 19 bp, Mus musculus
  siRNA target sequence for BC011167 (NM_172565.1,767-785).
caggatgaggaattttaca

SEQ ID NO: 532584 - DNA, 19 bp, Mus musculus
  siRNA target sequence for BC011167 (NM_172565.1,815-833).
ctttcggacttggaaatca

SEQ ID NO: 532585 - DNA, 19 bp, Mus musculus
  siRNA target sequence for BC011167 (NM_172565.1,961-979).
ccttacacggcatgtcaaa

SEQ ID NO: 532586 - DNA, 19 bp, Mus musculus
  siRNA target sequence for BC011167 (NM_172565.1,985-1003).
gcggctagtggccaataat

SEQ ID NO: 532587 - DNA, 19 bp, Mus musculus
  siRNA target sequence for BC011167 (NM_172565.1,988-1006).
gctagtggccaataatgaa

SEQ ID NO: 532588 - DNA, 19 bp, Mus musculus
  siRNA target sequence for BC011167 (NM_172565.1,1047-1065).
cgctcagagcagagaatat

SEQ ID NO: 532589 - DNA, 19 bp, Mus musculus
  siRNA target sequence for BC011167 (NM_172565.1,1112-1130).
cctcgctatggacaaaaca

SEQ ID NO: 532590 - DNA, 19 bp, Mus musculus
  siRNA target sequence for BC011167 (NM_172565.1,1122-1140).
gacaaaacatggacgtaat

SEQ ID NO: 532591 - DNA, 19 bp, Mus musculus
  siRNA target sequence for BC011167 (NM_172565.1,1124-1142).
caaaacatggacgtaatca

SEQ ID NO: 532592 - DNA, 19 bp, Mus musculus
  siRNA target sequence for BC011167 (NM_172565.1,1161-1179).
cggaaggaggagactactt

SEQ ID NO: 532593 - DNA, 19 bp, Mus musculus
  siRNA target sequence for BC011167 (NM_172565.1,1163-1181).
gaaggaggagactacttaa

SEQ ID NO: 532594 - DNA, 19 bp, Mus musculus
  siRNA target sequence for BC011167 (NM_172565.1,1167-1185).
gaggagactacttaagtga

SEQ ID NO: 532595 - DNA, 19 bp, Mus musculus
  siRNA target sequence for BC011167 (NM_172565.1,1188-1206).
gtgtgggatattttgttga

SEQ ID NO: 532596 - DNA, 19 bp, Mus musculus
  siRNA target sequence for BC011167 (NM_172565.1,1253-1271).
ggacatgccgtcgcaatta

SEQ ID NO: 532597 - DNA, 19 bp, Mus musculus
  siRNA target sequence for BC011167 (NM_172565.1,1272-1290).
cagagtcctacgtgtatgt

SEQ ID NO: 532598 - DNA, 19 bp, Mus musculus
  siRNA target sequence for BC011167 (NM_172565.1,1303-1321).
ggaaccagggtttgctaaa

SEQ ID NO: 532599 - DNA, 19 bp, Mus musculus
  siRNA target sequence for BC011167 (NM_172565.1,1308-1326).
cagggtttgctaaaactgt

SEQ ID NO: 532600 - DNA, 19 bp, Mus musculus
  siRNA target sequence for BC011167 (NM_172565.1,1336-1354).
caacccaaacctgaataca

SEQ ID NO: 532601 - DNA, 19 bp, Mus musculus
  siRNA target sequence for BC011167 (NM_172565.1,1409-1427).
gtcaaagggaagctgtata

SEQ ID NO: 532602 - DNA, 19 bp, Mus musculus
  siRNA target sequence for BC011167 (NM_172565.1,1433-1451).
ggaggacacggcaatttta

SEQ ID NO: 532603 - DNA, 19 bp, Mus musculus
  siRNA target sequence for BC011167 (NM_172565.1,1525-1543).
gattctgcgagatgtcaaa

SEQ ID NO: 532604 - DNA, 19 bp, Mus musculus
  siRNA target sequence for BC011167 (NM_172565.1,1529-1547).
ctgcgagatgtcaaagcat

SEQ ID NO: 532605 - DNA, 19 bp, Mus musculus
  siRNA target sequence for BC011167 (NM_172565.1,1531-1549).
gcgagatgtcaaagcatta

SEQ ID NO: 532606 - DNA, 19 bp, Mus musculus
  siRNA target sequence for BC011167 (NM_172565.1,1558-1576).
ggaccggtttgtgtacatt

SEQ ID NO: 532607 - DNA, 19 bp, Mus musculus
  siRNA target sequence for BC011167 (NM_172565.1,1613-1631).
ggactgaaggctgtaatta

SEQ ID NO: 532608 - DNA, 19 bp, Mus musculus
  siRNA target sequence for BC011167 (NM_172565.1,1616-1634).
ctgaaggctgtaattactt

SEQ ID NO: 532609 - DNA, 19 bp, Mus musculus
  siRNA target sequence for BC011167 (NM_172565.1,1625-1643).
gtaattacttgctatgata

SEQ ID NO: 532610 - DNA, 19 bp, Mus musculus
  siRNA target sequence for BC011167 (NM_172565.1,1669-1687).
ggaatctttaccgcttatt

SEQ ID NO: 532611 - DNA, 19 bp, Mus musculus
  siRNA target sequence for BC011167 (NM_172565.1,1674-1692).
ctttaccgcttattgacaa

SEQ ID NO: 532612 - DNA, 19 bp, Mus musculus
  siRNA target sequence for BC011167 (NM_172565.1,1679-1697).
ccgcttattgacaattact

SEQ ID NO: 532613 - DNA, 19 bp, Mus musculus
  siRNA target sequence for BC011167 (NM_172565.1,1681-1699).
gcttattgacaattactgt

SEQ ID NO: 532614 - DNA, 19 bp, Mus musculus
  siRNA target sequence for BC011167 (NM_172565.1,1713-1731).
ctgtggtcaattcaaactt

SEQ ID NO: 532615 - DNA, 19 bp, Mus musculus
  siRNA target sequence for BC011167 (NM_172565.1,1715-1733).
gtggtcaattcaaactttt

SEQ ID NO: 532616 - DNA, 19 bp, Mus musculus
  siRNA target sequence for BC011167 (NM_172565.1,1862-1880).
gcagccatttgctattaca

SEQ ID NO: 532617 - DNA, 19 bp, Mus musculus
  siRNA target sequence for BC011167 (NM_172565.1,1908-1926).
ggaaaaacagtgatgatat

SEQ ID NO: 532618 - DNA, 19 bp, Mus musculus
  siRNA target sequence for BC011167 (NM_172565.1,2038-2056).
gatcccttaccggtactta

SEQ ID NO: 532619 - DNA, 19 bp, Mus musculus
  siRNA target sequence for BC011167 (NM_172565.1,2041-2059).
cccttaccggtacttacat

SEQ ID NO: 532620 - DNA, 19 bp, Mus musculus
  siRNA target sequence for BC011167 (NM_172565.1,2074-2092).
ccccatgcctcaaaattta

SEQ ID NO: 532621 - DNA, 19 bp, Mus musculus
  siRNA target sequence for BC011167 (NM_172565.1,2113-2131).
ccgacagatgcaagagata

SEQ ID NO: 532622 - DNA, 19 bp, Mus musculus
  siRNA target sequence for BC011167 (NM_172565.1,2115-2133).
gacagatgcaagagataca

SEQ ID NO: 532623 - DNA, 19 bp, Mus musculus
  siRNA target sequence for BC025816 (NM_146219.1,353-371).
gtgtgcagcgactacttca

SEQ ID NO: 532624 - DNA, 19 bp, Mus musculus
  siRNA target sequence for BC025816 (NM_146219.1,446-464).
ctcaaggccgtggtagatt

SEQ ID NO: 532625 - DNA, 19 bp, Mus musculus
  siRNA target sequence for BC025816 (NM_146219.1,583-601).
ggtgagcgaggacaactat

SEQ ID NO: 532626 - DNA, 19 bp, Mus musculus
  siRNA target sequence for BC025816 (NM_146219.1,588-606).
gcgaggacaactatctcta

SEQ ID NO: 532627 - DNA, 19 bp, Mus musculus
  siRNA target sequence for BC025816 (NM_146219.1,755-773).
ggccaggtacagcacaaat

SEQ ID NO: 532628 - DNA, 19 bp, Mus musculus
  siRNA target sequence for BC025816 (NM_146219.1,1239-1257).
ccgcctccaaccttcttta

SEQ ID NO: 532629 - DNA, 19 bp, Mus musculus
  siRNA target sequence for BC025816 (NM_146219.1,1241-1259).
gcctccaaccttctttata

SEQ ID NO: 532630 - DNA, 19 bp, Mus musculus
  siRNA target sequence for BC025816 (NM_146219.1,1245-1263).
ccaaccttctttataggta

SEQ ID NO: 532631 - DNA, 19 bp, Mus musculus
  siRNA target sequence for BC025816 (NM_146219.1,1246-1264).
caaccttctttataggtat

SEQ ID NO: 532632 - DNA, 19 bp, Mus musculus
  siRNA target sequence for BC025816 (NM_146219.1,1533-1551).
gcaagaacctgctgtgtta

SEQ ID NO: 532633 - DNA, 19 bp, Mus musculus
  siRNA target sequence for BC025816 (NM_146219.1,1534-1552).
caagaacctgctgtgttat

SEQ ID NO: 532634 - DNA, 19 bp, Mus musculus
  siRNA target sequence for BC025816 (NM_146219.1,1625-1643).
ctgggcgacagcatctact

SEQ ID NO: 532635 - DNA, 19 bp, Mus musculus
  siRNA target sequence for BC027373 (NM_182782.1,278-296).
cgcaagcactgcatgttca

SEQ ID NO: 532636 - DNA, 19 bp, Mus musculus
  siRNA target sequence for BC027373 (NM_182782.1,317-335).
ggtgaccgagcctttcctt

SEQ ID NO: 532637 - DNA, 19 bp, Mus musculus
  siRNA target sequence for BC027373 (NM_182782.1,354-372).
ctgcctccagccgatactt

SEQ ID NO: 532638 - DNA, 19 bp, Mus musculus
  siRNA target sequence for BC027373 (NM_182782.1,357-375).
cctccagccgatactttga

SEQ ID NO: 532639 - DNA, 19 bp, Mus musculus
  siRNA target sequence for BC027373 (NM_182782.1,398-416).
cgggaaagccgggatgata

SEQ ID NO: 532640 - DNA, 19 bp, Mus musculus
  siRNA target sequence for BC027373 (NM_182782.1,408-426).
gggatgatacggtcaactt

SEQ ID NO: 532641 - DNA, 19 bp, Mus musculus
  siRNA target sequence for BC027373 (NM_182782.1,480-498).
cttctcgcatcgtcatcaa

SEQ ID NO: 532642 - DNA, 19 bp, Mus musculus
  siRNA target sequence for BC027373 (NM_182782.1,483-501).
ctcgcatcgtcatcaatga

SEQ ID NO: 532643 - DNA, 19 bp, Mus musculus
  siRNA target sequence for BC027373 (NM_182782.1,647-665).
cggctctacgagttctcat

SEQ ID NO: 532644 - DNA, 19 bp, Mus musculus
  siRNA target sequence for BC027373 (NM_182782.1,669-687).
gaatgtccctggtgcattt

SEQ ID NO: 532645 - DNA, 19 bp, Mus musculus
  siRNA target sequence for BC027373 (NM_182782.1,808-826).
gtgggtgaagcatgactta

SEQ ID NO: 532646 - DNA, 19 bp, Mus musculus
  siRNA target sequence for BC027373 (NM_182782.1,810-828).
gggtgaagcatgacttaga

SEQ ID NO: 532647 - DNA, 19 bp, Mus musculus
  siRNA target sequence for BC027373 (NM_182782.1,942-960).
gcaccaagctcatcttaga

SEQ ID NO: 532648 - DNA, 19 bp, Mus musculus
  siRNA target sequence for BC027373 (NM_182782.1,971-989).
cgctgcaagaccaagatct

SEQ ID NO: 532649 - DNA, 19 bp, Mus musculus
  siRNA target sequence for BC027373 (NM_182782.1,1103-1121).
cacaaagccaaggagatta

SEQ ID NO: 532650 - DNA, 19 bp, Mus musculus
  siRNA target sequence for BC027373 (NM_182782.1,1209-1227).
ctgagaatggagtctctaa

SEQ ID NO: 532651 - DNA, 19 bp, Mus musculus
  siRNA target sequence for BC027373 (NM_182782.1,1350-1368).
catccctagcaggtatttt

SEQ ID NO: 532652 - DNA, 19 bp, Mus musculus
  siRNA target sequence for BC027373 (NM_182782.1,1391-1409).
ctgaagcaagtagagaaat

SEQ ID NO: 532653 - DNA, 19 bp, Mus musculus
  siRNA target sequence for BC027373 (NM_182782.1,1482-1500).
gtgccaagctgaaactctt

SEQ ID NO: 532654 - DNA, 19 bp, Mus musculus
  siRNA target sequence for BC027373 (NM_182782.1,1485-1503).
ccaagctgaaactctttgt

SEQ ID NO: 532655 - DNA, 19 bp, Mus musculus
  siRNA target sequence for BC027373 (NM_182782.1,1515-1533).
ccagcatccaccgagatat

SEQ ID NO: 532656 - DNA, 19 bp, Mus musculus
  siRNA target sequence for BC027373 (NM_182782.1,1518-1536).
gcatccaccgagatatggt

SEQ ID NO: 532657 - DNA, 19 bp, Mus musculus
  siRNA target sequence for BC027373 (NM_182782.1,1567-1585).
gaaccggtggacaatcaaa

SEQ ID NO: 532658 - DNA, 19 bp, Mus musculus
  siRNA target sequence for BC027373 (NM_182782.1,1885-1903).
cattcccacggcctttgtt

SEQ ID NO: 532659 - DNA, 19 bp, Mus musculus
  siRNA target sequence for BC032200 (NM_146205.1,573-591).
ctttggtgaccattcttca

SEQ ID NO: 532660 - DNA, 19 bp, Mus musculus
  siRNA target sequence for BC032200 (NM_146205.1,736-754).
gtgcctacagagcatagtt

SEQ ID NO: 532661 - DNA, 19 bp, Mus musculus
  siRNA target sequence for BC032200 (NM_146205.1,921-939).
gtgctgagcagctaagtct

SEQ ID NO: 532662 - DNA, 19 bp, Mus musculus
  siRNA target sequence for BC032200 (NM_146205.1,1286-1304).
gtaggcttcctttatgata

SEQ ID NO: 532663 - DNA, 19 bp, Mus musculus
  siRNA target sequence for BC032200 (NM_146205.1,1469-1487).
ctcaggttgtggctgattt

SEQ ID NO: 532664 - DNA, 19 bp, Mus musculus
  siRNA target sequence for BC032200 (NM_146205.1,1797-1815).
cacgcgcacttcgtatctt

SEQ ID NO: 532665 - DNA, 19 bp, Mus musculus
  siRNA target sequence for BC032200 (NM_146205.1,1849-1867).
ggcctttgtgcgcacttat

SEQ ID NO: 532666 - DNA, 19 bp, Mus musculus
  siRNA target sequence for BC032200 (NM_146205.1,2274-2292).
ccctgcccttggaacttga

SEQ ID NO: 532667 - DNA, 19 bp, Mus musculus
  siRNA target sequence for BC032200 (NM_146205.1,2454-2472).
ctgaagcccagatggattt

SEQ ID NO: 532668 - DNA, 19 bp, Mus musculus
  siRNA target sequence for BC032200 (NM_146205.1,2502-2520).
cagcgtggcctgtcttaca

SEQ ID NO: 532669 - DNA, 19 bp, Mus musculus
  siRNA target sequence for BC032200 (NM_146205.1,2619-2637).
ctgctggccgattcttact

SEQ ID NO: 532670 - DNA, 19 bp, Mus musculus
  siRNA target sequence for Bcl2 (NM_009741.1,12-30).
cgggagaacagggtatgat

SEQ ID NO: 532671 - DNA, 19 bp, Mus musculus
  siRNA target sequence for Bcl2 (NM_009741.1,13-31).
gggagaacagggtatgata

SEQ ID NO: 532672 - DNA, 19 bp, Mus musculus
  siRNA target sequence for Bcl2 (NM_009741.1,14-32).
ggagaacagggtatgataa

SEQ ID NO: 532673 - DNA, 19 bp, Mus musculus
  siRNA target sequence for Bcl2 (NM_009741.1,34-52).
cgggagatcgtgatgaagt

SEQ ID NO: 532674 - DNA, 19 bp, Mus musculus
  siRNA target sequence for Bcl2 (NM_009741.1,39-57).
gatcgtgatgaagtacata

SEQ ID NO: 532675 - DNA, 19 bp, Mus musculus
  siRNA target sequence for Bcl2 (NM_009741.1,42-60).
cgtgatgaagtacatacat

SEQ ID NO: 532676 - DNA, 19 bp, Mus musculus
  siRNA target sequence for Bcl2 (NM_009741.1,426-444).
gaggattgtggccttcttt

SEQ ID NO: 532677 - DNA, 19 bp, Mus musculus
  siRNA target sequence for Bcl2 (NM_009741.1,577-595).
gatgcctttgtggaactat

SEQ ID NO: 532678 - DNA, 19 bp, Mus musculus
  siRNA target sequence for Bcl2 (NM_009741.1,603-621).
cagcatgcgacctctgttt

SEQ ID NO: 532679 - DNA, 19 bp, Mus musculus
  siRNA target sequence for Bcl2 (NM_009741.1,605-623).
gcatgcgacctctgtttga

SEQ ID NO: 532680 - DNA, 19 bp, Mus musculus
  siRNA target sequence for Bcl2 (NM_009741.1,610-628).
cgacctctgtttgatttct

SEQ ID NO: 532681 - DNA, 19 bp, Mus musculus
  siRNA target sequence for Bcl2 (NM_177410.1,1777-1795).
ggtgcatgtctggttgaat

SEQ ID NO: 532682 - DNA, 19 bp, Mus musculus
  siRNA target sequence for Bdnf (NM_007540.3,671-689).
cttttccttactatggtta

SEQ ID NO: 532683 - DNA, 19 bp, Mus musculus
  siRNA target sequence for Bdnf (NM_007540.3,677-695).
cttactatggttatttcat

SEQ ID NO: 532684 - DNA, 19 bp, Mus musculus
  siRNA target sequence for Bdnf (NM_007540.3,837-855).
catcactggctgacacttt

SEQ ID NO: 532685 - DNA, 19 bp, Mus musculus
  siRNA target sequence for Bdnf (NM_007540.3,923-941).
gacgcggacttgtacactt

SEQ ID NO: 532686 - DNA, 19 bp, Mus musculus
  siRNA target sequence for Bdnf (NM_007540.3,1016-1034).
ctggatgccgcaaacatgt

SEQ ID NO: 532687 - DNA, 19 bp, Mus musculus
  siRNA target sequence for Bdnf (NM_007540.3,1022-1040).
gccgcaaacatgtctatga

SEQ ID NO: 532688 - DNA, 19 bp, Mus musculus
  siRNA target sequence for Bdnf (NM_007540.3,1108-1126).
ggtcacagcggcagataaa

SEQ ID NO: 532689 - DNA, 19 bp, Mus musculus
  siRNA target sequence for Bdnf (NM_007540.3,1109-1127).
gtcacagcggcagataaaa

SEQ ID NO: 532690 - DNA, 19 bp, Mus musculus
  siRNA target sequence for Bdnf (NM_007540.3,1171-1189).
gaaagtcccggtatccaaa

SEQ ID NO: 532691 - DNA, 19 bp, Mus musculus
  siRNA target sequence for Bdnf (NM_007540.3,1210-1228).
ctacgagaccaagtgtaat

SEQ ID NO: 532692 - DNA, 19 bp, Mus musculus
  siRNA target sequence for Bdnf (NM_007540.3,1291-1309).
ccgaactacccaatcgtat

SEQ ID NO: 532693 - DNA, 19 bp, Mus musculus
  siRNA target sequence for Bdnf (NM_007540.3,1317-1335).
cccttactatggatagcaa

SEQ ID NO: 532694 - DNA, 19 bp, Mus musculus
  siRNA target sequence for Bdnf (NM_007540.3,1318-1336).
ccttactatggatagcaaa

SEQ ID NO: 532695 - DNA, 19 bp, Mus musculus
  siRNA target sequence for Bdnf (NM_007540.3,1327-1345).
ggatagcaaaaagagaatt

SEQ ID NO: 532696 - DNA, 19 bp, Mus musculus
  siRNA target sequence for Bdnf (NM_007540.3,1347-1365).
gctggcgattcataaggat

SEQ ID NO: 532697 - DNA, 19 bp, Mus musculus
  siRNA target sequence for Bdnf (NM_007540.3,1348-1366).
ctggcgattcataaggata

SEQ ID NO: 532698 - DNA, 19 bp, Mus musculus
  siRNA target sequence for Bdnf (NM_007540.3,1352-1370).
cgattcataaggatagaca

SEQ ID NO: 532699 - DNA, 19 bp, Mus musculus
  siRNA target sequence for Bdnf (NM_007540.3,1379-1397).
gtatgtacactgaccatta

SEQ ID NO: 532700 - DNA, 19 bp, Mus musculus
  siRNA target sequence for Bicd2 (NM_029791.2,404-422).
cctccaaggagcagtacta

SEQ ID NO: 532701 - DNA, 19 bp, Mus musculus
  siRNA target sequence for Bicd2 (NM_029791.2,480-498).
caacacccagtctgagaat

SEQ ID NO: 532702 - DNA, 19 bp, Mus musculus
  siRNA target sequence for Bicd2 (NM_029791.2,518-536).
cccaggagctaaaagagat

SEQ ID NO: 532703 - DNA, 19 bp, Mus musculus
  siRNA target sequence for Bicd2 (NM_029791.2,563-581).
gtcgcctgcgggatgacat

SEQ ID NO: 532704 - DNA, 19 bp, Mus musculus
  siRNA target sequence for Bicd2 (NM_029791.2,566-584).
gcctgcgggatgacatcaa

SEQ ID NO: 532705 - DNA, 19 bp, Mus musculus
  siRNA target sequence for Bicd2 (NM_029791.2,697-715).
gagggcctcaagcatgaaa

SEQ ID NO: 532706 - DNA, 19 bp, Mus musculus
  siRNA target sequence for Bicd2 (NM_029791.2,700-718).
ggcctcaagcatgaaatca

SEQ ID NO: 532707 - DNA, 19 bp, Mus musculus
  siRNA target sequence for Bicd2 (NM_029791.2,859-877).
gagttgtcgcactacatga

SEQ ID NO: 532708 - DNA, 19 bp, Mus musculus
  siRNA target sequence for Bicd2 (NM_029791.2,879-897).
catcaacgattccttctat

SEQ ID NO: 532709 - DNA, 19 bp, Mus musculus
  siRNA target sequence for Bicd2 (NM_029791.2,951-969).
caccgcagagcccaacaat

SEQ ID NO: 532710 - DNA, 19 bp, Mus musculus
  siRNA target sequence for Bicd2 (NM_029791.2,1100-1118).
gtgagctccacatatctga

SEQ ID NO: 532711 - DNA, 19 bp, Mus musculus
  siRNA target sequence for Bicd2 (NM_029791.2,1310-1328).
cctcgttggataatgagaa

SEQ ID NO: 532712 - DNA, 19 bp, Mus musculus
  siRNA target sequence for Bicd2 (NM_029791.2,1344-1362).
cgaagacggtgactactat

SEQ ID NO: 532713 - DNA, 19 bp, Mus musculus
  siRNA target sequence for Bicd2 (NM_029791.2,1738-1756).
cgtgtcatgctcgactatt

SEQ ID NO: 532714 - DNA, 19 bp, Mus musculus
  siRNA target sequence for Bicd2 (NM_029791.2,1739-1757).
gtgtcatgctcgactatta

SEQ ID NO: 532715 - DNA, 19 bp, Mus musculus
  siRNA target sequence for Bicd2 (NM_029791.2,2301-2319).
ctccctgcgtgccatgttt

SEQ ID NO: 532716 - DNA, 19 bp, Mus musculus
  siRNA target sequence for Bicd2 (NM_029791.2,2324-2342).
ccaggtgtgacgaatacat

SEQ ID NO: 532717 - DNA, 19 bp, Mus musculus
  siRNA target sequence for Bklhd2 (NM_026167.1,351-369).
ggaagtacacgcatcttta

SEQ ID NO: 532718 - DNA, 19 bp, Mus musculus
  siRNA target sequence for Bklhd2 (NM_026167.1,452-470).
gccaggtgatacagatgat

SEQ ID NO: 532719 - DNA, 19 bp, Mus musculus
  siRNA target sequence for Bklhd2 (NM_026167.1,499-517).
catctgctagtgactactt

SEQ ID NO: 532720 - DNA, 19 bp, Mus musculus
  siRNA target sequence for Bklhd2 (NM_026167.1,532-550).
caggtggaatgaaagaaca

SEQ ID NO: 532721 - DNA, 19 bp, Mus musculus
  siRNA target sequence for Bklhd2 (NM_026167.1,586-604).
gagtgggtctacggaaaat

SEQ ID NO: 532722 - DNA, 19 bp, Mus musculus
  siRNA target sequence for Bklhd2 (NM_026167.1,588-606).
gtgggtctacggaaaatta

SEQ ID NO: 532723 - DNA, 19 bp, Mus musculus
  siRNA target sequence for Bklhd2 (NM_026167.1,590-608).
gggtctacggaaaattatt

SEQ ID NO: 532724 - DNA, 19 bp, Mus musculus
  siRNA target sequence for Bklhd2 (NM_026167.1,592-610).
gtctacggaaaattattga

SEQ ID NO: 532725 - DNA, 19 bp, Mus musculus
  siRNA target sequence for Bklhd2 (NM_026167.1,594-612).
ctacggaaaattattgatt

SEQ ID NO: 532726 - DNA, 19 bp, Mus musculus
  siRNA target sequence for Bklhd2 (NM_026167.1,597-615).
cggaaaattattgatttca

SEQ ID NO: 532727 - DNA, 19 bp, Mus musculus
  siRNA target sequence for Bklhd2 (NM_026167.1,665-683).
ggaagccgccagctttctt

SEQ ID NO: 532728 - DNA, 19 bp, Mus musculus
  siRNA target sequence for Bklhd2 (NM_026167.1,707-725).
ctgcaaagtgtttctcata

SEQ ID NO: 532729 - DNA, 19 bp, Mus musculus
  siRNA target sequence for Bklhd2 (NM_026167.1,710-728).
caaagtgtttctcatatct

SEQ ID NO: 532730 - DNA, 19 bp, Mus musculus
  siRNA target sequence for Bklhd2 (NM_026167.1,809-827).
cagcttcgtcttaaagaat

SEQ ID NO: 532731 - DNA, 19 bp, Mus musculus
  siRNA target sequence for Bklhd2 (NM_026167.1,811-829).
gcttcgtcttaaagaattt

SEQ ID NO: 532732 - DNA, 19 bp, Mus musculus
  siRNA target sequence for Bklhd2 (NM_026167.1,812-830).
cttcgtcttaaagaatttt

SEQ ID NO: 532733 - DNA, 19 bp, Mus musculus
  siRNA target sequence for Bklhd2 (NM_026167.1,920-938).
cgaacttgacctcttcaaa

SEQ ID NO: 532734 - DNA, 19 bp, Mus musculus
  siRNA target sequence for Bklhd2 (NM_026167.1,924-942).
cttgacctcttcaaagcta

SEQ ID NO: 532735 - DNA, 19 bp, Mus musculus
  siRNA target sequence for Bklhd2 (NM_026167.1,993-1011).
ctaatgaagaatatacgat

SEQ ID NO: 532736 - DNA, 19 bp, Mus musculus
  siRNA target sequence for Bklhd2 (NM_026167.1,1026-1044).
ccacaggagctcattaatt

SEQ ID NO: 532737 - DNA, 19 bp, Mus musculus
  siRNA target sequence for Bklhd2 (NM_026167.1,1027-1045).
cacaggagctcattaatta

SEQ ID NO: 532738 - DNA, 19 bp, Mus musculus
  siRNA target sequence for Bklhd2 (NM_026167.1,1047-1065).
gtgcaaaccgtggatttca

SEQ ID NO: 532739 - DNA, 19 bp, Mus musculus
  siRNA target sequence for Bklhd2 (NM_026167.1,1050-1068).
caaaccgtggatttcatga

SEQ ID NO: 532740 - DNA, 19 bp, Mus musculus
  siRNA target sequence for Bklhd2 (NM_026167.1,1074-1092).
gacaatacttgcgtcaatt

SEQ ID NO: 532741 - DNA, 19 bp, Mus musculus
  siRNA target sequence for Bklhd2 (NM_026167.1,1126-1144).
cgtttatgcagccagttat

SEQ ID NO: 532742 - DNA, 19 bp, Mus musculus
  siRNA target sequence for Bklhd2 (NM_026167.1,1173-1191).
gacaccactcgtttggtta

SEQ ID NO: 532743 - DNA, 19 bp, Mus musculus
  siRNA target sequence for Bklhd2 (NM_026167.1,1177-1195).
ccactcgtttggttacact

SEQ ID NO: 532744 - DNA, 19 bp, Mus musculus
  siRNA target sequence for Bklhd2 (NM_026167.1,1214-1232).
gcagcttgtcgtcagtaaa

SEQ ID NO: 532745 - DNA, 19 bp, Mus musculus
  siRNA target sequence for Bklhd2 (NM_026167.1,1217-1235).
gcttgtcgtcagtaaagaa

SEQ ID NO: 532746 - DNA, 19 bp, Mus musculus
  siRNA target sequence for Bklhd2 (NM_026167.1,1218-1236).
cttgtcgtcagtaaagaat

SEQ ID NO: 532747 - DNA, 19 bp, Mus musculus
  siRNA target sequence for Bklhd2 (NM_026167.1,1256-1274).
gacccacgagtggaaatct

SEQ ID NO: 532748 - DNA, 19 bp, Mus musculus
  siRNA target sequence for Bklhd2 (NM_026167.1,1317-1335).
gtcatcggaaattttctct

SEQ ID NO: 532749 - DNA, 19 bp, Mus musculus
  siRNA target sequence for Bklhd2 (NM_026167.1,1379-1397).
cgccgtcgatacagtgttt

SEQ ID NO: 532750 - DNA, 19 bp, Mus musculus
  siRNA target sequence for Bklhd2 (NM_026167.1,1380-1398).
gccgtcgatacagtgttta

SEQ ID NO: 532751 - DNA, 19 bp, Mus musculus
  siRNA target sequence for Bklhd2 (NM_026167.1,1382-1400).
cgtcgatacagtgtttaga

SEQ ID NO: 532752 - DNA, 19 bp, Mus musculus
  siRNA target sequence for Bklhd2 (NM_026167.1,1404-1422).
gatcctcgatacaacaaat

SEQ ID NO: 532753 - DNA, 19 bp, Mus musculus
  siRNA target sequence for Bklhd2 (NM_026167.1,1407-1425).
cctcgatacaacaaatgga

SEQ ID NO: 532754 - DNA, 19 bp, Mus musculus
  siRNA target sequence for Bklhd2 (NM_026167.1,1408-1426).
ctcgatacaacaaatggat

SEQ ID NO: 532755 - DNA, 19 bp, Mus musculus
  siRNA target sequence for Bklhd2 (NM_026167.1,1424-1442).
gatccaagttgcatcttta

SEQ ID NO: 532756 - DNA, 19 bp, Mus musculus
  siRNA target sequence for Bklhd2 (NM_026167.1,1473-1491).
gccctcaaaggatttctgt

SEQ ID NO: 532757 - DNA, 19 bp, Mus musculus
  siRNA target sequence for Bklhd2 (NM_026167.1,1474-1492).
ccctcaaaggatttctgta

SEQ ID NO: 532758 - DNA, 19 bp, Mus musculus
  siRNA target sequence for Bklhd2 (NM_026167.1,1475-1493).
cctcaaaggatttctgtat

SEQ ID NO: 532759 - DNA, 19 bp, Mus musculus
  siRNA target sequence for Bklhd2 (NM_026167.1,1564-1582).
ggacctatgttgccaaaat

SEQ ID NO: 532760 - DNA, 19 bp, Mus musculus
  siRNA target sequence for Bklhd2 (NM_026167.1,1679-1697).
gtgcttcgaccctgatact

SEQ ID NO: 532761 - DNA, 19 bp, Mus musculus
  siRNA target sequence for Bklhd2 (NM_026167.1,1681-1699).
gcttcgaccctgatactga

SEQ ID NO: 532762 - DNA, 19 bp, Mus musculus
  siRNA target sequence for Bklhd2 (NM_026167.1,1685-1703).
cgaccctgatactgacaaa

SEQ ID NO: 532763 - DNA, 19 bp, Mus musculus
  siRNA target sequence for Bklhd2 (NM_026167.1,1865-1883).
cccaattgcttccatgtta

SEQ ID NO: 532764 - DNA, 19 bp, Mus musculus
  siRNA target sequence for Bklhd2 (NM_026167.1,1902-1920).
ggggtcgctgtctttgaga

SEQ ID NO: 532765 - DNA, 19 bp, Mus musculus
  siRNA target sequence for Bklhd2 (NM_026167.1,1905-1923).
gtcgctgtctttgagaata

SEQ ID NO: 532766 - DNA, 19 bp, Mus musculus
  siRNA target sequence for Bklhd2 (NM_026167.1,1932-1950).
gtggttggtggctattcat

SEQ ID NO: 532767 - DNA, 19 bp, Mus musculus
  siRNA target sequence for Bklhd2 (NM_026167.1,1952-1970).
gaataatcgctgtatggta

SEQ ID NO: 532768 - DNA, 19 bp, Mus musculus
  siRNA target sequence for Bklhd2 (NM_026167.1,1960-1978).
gctgtatggtagagatagt

SEQ ID NO: 532769 - DNA, 19 bp, Mus musculus
  siRNA target sequence for Bklhd2 (NM_026167.1,1973-1991).
gatagtgcagaagtatgat

SEQ ID NO: 532770 - DNA, 19 bp, Mus musculus
  siRNA target sequence for Bklhd2 (NM_026167.1,2053-2071).
cttgtacacttacagttta

SEQ ID NO: 532771 - DNA, 19 bp, Mus musculus
  siRNA target sequence for Bklhd2 (NM_026167.1,2087-2105).
cacaccatcaccttctaga

SEQ ID NO: 532772 - DNA, 19 bp, Mus musculus
  siRNA target sequence for Bmi1 (NM_007552.1,4-22).
catcgaacaaccagaatca

SEQ ID NO: 532773 - DNA, 19 bp, Mus musculus
  siRNA target sequence for Bmp7 (NM_007557.2,392-410).
ggagatcctgtccatctta

SEQ ID NO: 532774 - DNA, 19 bp, Mus musculus
  siRNA target sequence for Bmp7 (NM_007557.2,682-700).
gggagttccggtttgatct

SEQ ID NO: 532775 - DNA, 19 bp, Mus musculus
  siRNA target sequence for Bmp7 (NM_007557.2,683-701).
ggagttccggtttgatctt

SEQ ID NO: 532776 - DNA, 19 bp, Mus musculus
  siRNA target sequence for Bmp7 (NM_007557.2,726-744).
gtgaccgcagccgaattca

SEQ ID NO: 532777 - DNA, 19 bp, Mus musculus
  siRNA target sequence for Bmp7 (NM_007557.2,735-753).
gccgaattcaggatctata

SEQ ID NO: 532778 - DNA, 19 bp, Mus musculus
  siRNA target sequence for Bmp7 (NM_007557.2,745-763).
ggatctataaggactacat

SEQ ID NO: 532779 - DNA, 19 bp, Mus musculus
  siRNA target sequence for Bmp7 (NM_007557.2,884-902).
gggctggttggtgtttgat

SEQ ID NO: 532780 - DNA, 19 bp, Mus musculus
  siRNA target sequence for Bmp7 (NM_007557.2,890-908).
gttggtgtttgatatcaca

SEQ ID NO: 532781 - DNA, 19 bp, Mus musculus
  siRNA target sequence for Bmp7 (NM_007557.2,1199-1217).
gaggcaggcctgcaagaaa

SEQ ID NO: 532782 - DNA, 19 bp, Mus musculus
  siRNA target sequence for Bmp7 (NM_007557.2,1363-1381).
cactggttcacttcatcaa

SEQ ID NO: 532783 - DNA, 19 bp, Mus musculus
  siRNA target sequence for Bmp7 (NM_007557.2,1445-1463).
cttcgacgacagctctaat

SEQ ID NO: 532784 - DNA, 19 bp, Mus musculus
  siRNA target sequence for Btbd14b (NM_025788.2,239-257).
cggctacagggactatact

SEQ ID NO: 532785 - DNA, 19 bp, Mus musculus
  siRNA target sequence for Btbd14b (NM_025788.2,241-259).
gctacagggactatactgt

SEQ ID NO: 532786 - DNA, 19 bp, Mus musculus
  siRNA target sequence for Btbd14b (NM_025788.2,1020-1038).
gtcagatctgcaatatgta

SEQ ID NO: 532787 - DNA, 19 bp, Mus musculus
  siRNA target sequence for Btbd14b (NM_025788.2,1609-1627).
cagcgacacttgcaagata

SEQ ID NO: 532788 - DNA, 19 bp, Mus musculus
  siRNA target sequence for Btbd14b (NM_025788.2,1611-1629).
gcgacacttgcaagataga

SEQ ID NO: 532789 - DNA, 19 bp, Mus musculus
  siRNA target sequence for Btbd14b (NM_025788.2,1612-1630).
cgacacttgcaagatagaa

SEQ ID NO: 532790 - DNA, 19 bp, Mus musculus
  siRNA target sequence for Btbd3 (NM_145534.1,450-468).
gtaaagaacaggtccaaaa

SEQ ID NO: 532791 - DNA, 19 bp, Mus musculus
  siRNA target sequence for Btbd3 (NM_145534.1,455-473).
gaacaggtccaaaaaaggt

SEQ ID NO: 532792 - DNA, 19 bp, Mus musculus
  siRNA target sequence for Btbd7 (NM_172806.2,454-472).
ggtgctaatgcatctaact

SEQ ID NO: 532793 - DNA, 19 bp, Mus musculus
  siRNA target sequence for Btbd7 (NM_172806.2,455-473).
gtgctaatgcatctaacta

SEQ ID NO: 532794 - DNA, 19 bp, Mus musculus
  siRNA target sequence for Btbd7 (NM_172806.2,533-551).
gaacatcttcctattctca

SEQ ID NO: 532795 - DNA, 19 bp, Mus musculus
  siRNA target sequence for Btbd7 (NM_172806.2,634-652).
ggccttgccactctcaaaa

SEQ ID NO: 532796 - DNA, 19 bp, Mus musculus
  siRNA target sequence for Btbd7 (NM_172806.2,640-658).
gccactctcaaaaagaagt

SEQ ID NO: 532797 - DNA, 19 bp, Mus musculus
  siRNA target sequence for Btbd7 (NM_172806.2,667-685).
cgccgaaaatctaatagat

SEQ ID NO: 532798 - DNA, 19 bp, Mus musculus
  siRNA target sequence for Btbd7 (NM_172806.2,728-746).
gggatgttagagatgtcaa

SEQ ID NO: 532799 - DNA, 19 bp, Mus musculus
  siRNA target sequence for Btbd7 (NM_172806.2,729-747).
ggatgttagagatgtcaat

SEQ ID NO: 532800 - DNA, 19 bp, Mus musculus
  siRNA target sequence for Btbd7 (NM_172806.2,848-866).
ccgacctttatgaggataa

SEQ ID NO: 532801 - DNA, 19 bp, Mus musculus
  siRNA target sequence for Btbd7 (NM_172806.2,850-868).
gacctttatgaggataagt

SEQ ID NO: 532802 - DNA, 19 bp, Mus musculus
  siRNA target sequence for Btbd7 (NM_172806.2,853-871).
ctttatgaggataagtact

SEQ ID NO: 532803 - DNA, 19 bp, Mus musculus
  siRNA target sequence for Btbd7 (NM_172806.2,872-890).
gtactgacgtggacttaat

SEQ ID NO: 532804 - DNA, 19 bp, Mus musculus
  siRNA target sequence for Btbd7 (NM_172806.2,875-893).
ctgacgtggacttaatatt

SEQ ID NO: 532805 - DNA, 19 bp, Mus musculus
  siRNA target sequence for Btbd7 (NM_172806.2,911-929).
ctgttcaccgtgccatttt

SEQ ID NO: 532806 - DNA, 19 bp, Mus musculus
  siRNA target sequence for Btbd7 (NM_172806.2,931-949).
gcagcaaggtgtccatttt

SEQ ID NO: 532807 - DNA, 19 bp, Mus musculus
  siRNA target sequence for Btbd7 (NM_172806.2,1002-1020).
catcagtacagctggtatt

SEQ ID NO: 532808 - DNA, 19 bp, Mus musculus
  siRNA target sequence for Btbd7 (NM_172806.2,1005-1023).
cagtacagctggtattgat

SEQ ID NO: 532809 - DNA, 19 bp, Mus musculus
  siRNA target sequence for Btbd7 (NM_172806.2,1007-1025).
gtacagctggtattgatat

SEQ ID NO: 532810 - DNA, 19 bp, Mus musculus
  siRNA target sequence for Btbd7 (NM_172806.2,1029-1047).
catgttttccgccttgtta

SEQ ID NO: 532811 - DNA, 19 bp, Mus musculus
  siRNA target sequence for Btbd7 (NM_172806.2,1039-1057).
gccttgttacactaccttt

SEQ ID NO: 532812 - DNA, 19 bp, Mus musculus
  siRNA target sequence for Btbd7 (NM_172806.2,1040-1058).
ccttgttacactaccttta

SEQ ID NO: 532813 - DNA, 19 bp, Mus musculus
  siRNA target sequence for Btbd7 (NM_172806.2,1041-1059).
cttgttacactacctttat

SEQ ID NO: 532814 - DNA, 19 bp, Mus musculus
  siRNA target sequence for Btbd7 (NM_172806.2,1044-1062).
gttacactacctttataca

SEQ ID NO: 532815 - DNA, 19 bp, Mus musculus
  siRNA target sequence for Btbd7 (NM_172806.2,1080-1098).
ggactcaagatttcagaat

SEQ ID NO: 532816 - DNA, 19 bp, Mus musculus
  siRNA target sequence for Btbd7 (NM_172806.2,1136-1154).
caccaaatccccttgatgt

SEQ ID NO: 532817 - DNA, 19 bp, Mus musculus
  siRNA target sequence for Btbd7 (NM_172806.2,1162-1180).
cgtggactctttgattaca

SEQ ID NO: 532818 - DNA, 19 bp, Mus musculus
  siRNA target sequence for Btbd7 (NM_172806.2,1163-1181).
gtggactctttgattacat

SEQ ID NO: 532819 - DNA, 19 bp, Mus musculus
  siRNA target sequence for Btbd7 (NM_172806.2,1165-1183).
ggactctttgattacatgt

SEQ ID NO: 532820 - DNA, 19 bp, Mus musculus
  siRNA target sequence for Btbd7 (NM_172806.2,1195-1213).
gttgtccttagtttttctt

SEQ ID NO: 532821 - DNA, 19 bp, Mus musculus
  siRNA target sequence for Btbd7 (NM_172806.2,1220-1238).
ctgaactagttgaagcttt

SEQ ID NO: 532822 - DNA, 19 bp, Mus musculus
  siRNA target sequence for Btbd7 (NM_172806.2,1295-1313).
ctgcacggtccccgttttt

SEQ ID NO: 532823 - DNA, 19 bp, Mus musculus
  siRNA target sequence for Btbd7 (NM_172806.2,1304-1322).
ccccgtttttccgaaattt

SEQ ID NO: 532824 - DNA, 19 bp, Mus musculus
  siRNA target sequence for Btbd7 (NM_172806.2,1305-1323).
cccgtttttccgaaattta

SEQ ID NO: 532825 - DNA, 19 bp, Mus musculus
  siRNA target sequence for Btbd7 (NM_172806.2,1306-1324).
ccgtttttccgaaatttat

SEQ ID NO: 532826 - DNA, 19 bp, Mus musculus
  siRNA target sequence for Btbd7 (NM_172806.2,1307-1325).
cgtttttccgaaatttatt

SEQ ID NO: 532827 - DNA, 19 bp, Mus musculus
  siRNA target sequence for Btbd7 (NM_172806.2,1376-1394).
ctcccacaagaattatatt

SEQ ID NO: 532828 - DNA, 19 bp, Mus musculus
  siRNA target sequence for Btbd7 (NM_172806.2,1379-1397).
ccacaagaattatattaga

SEQ ID NO: 532829 - DNA, 19 bp, Mus musculus
  siRNA target sequence for Btbd7 (NM_172806.2,1380-1398).
cacaagaattatattagat

SEQ ID NO: 532830 - DNA, 19 bp, Mus musculus
  siRNA target sequence for Btbd7 (NM_172806.2,1382-1400).
caagaattatattagatga

SEQ ID NO: 532831 - DNA, 19 bp, Mus musculus
  siRNA target sequence for Btbd7 (NM_172806.2,1396-1414).
gatgagtccattataccaa

SEQ ID NO: 532832 - DNA, 19 bp, Mus musculus
  siRNA target sequence for Btbd7 (NM_172806.2,1399-1417).
gagtccattataccaaaaa

SEQ ID NO: 532833 - DNA, 19 bp, Mus musculus
  siRNA target sequence for Btbd7 (NM_172806.2,1423-1441).
gcaaaagtgatattacact

SEQ ID NO: 532834 - DNA, 19 bp, Mus musculus
  siRNA target sequence for Btbd7 (NM_172806.2,1456-1474).
gtggtggacctctctgttt

SEQ ID NO: 532835 - DNA, 19 bp, Mus musculus
  siRNA target sequence for Btbd7 (NM_172806.2,1458-1476).
ggtggacctctctgtttta

SEQ ID NO: 532836 - DNA, 19 bp, Mus musculus
  siRNA target sequence for Btbd7 (NM_172806.2,1494-1512).
ggggagtctcagtgaagtt

SEQ ID NO: 532837 - DNA, 19 bp, Mus musculus
  siRNA target sequence for Btbd7 (NM_172806.2,1525-1543).
gcagggaagccaaacatga

SEQ ID NO: 532838 - DNA, 19 bp, Mus musculus
  siRNA target sequence for Btbd7 (NM_172806.2,1579-1597).
gcactattcttggaattta

SEQ ID NO: 532839 - DNA, 19 bp, Mus musculus
  siRNA target sequence for Btbd7 (NM_172806.2,1580-1598).
cactattcttggaatttaa

SEQ ID NO: 532840 - DNA, 19 bp, Mus musculus
  siRNA target sequence for Btbd7 (NM_172806.2,1738-1756).
ctatcccaggtcatgactt

SEQ ID NO: 532841 - DNA, 19 bp, Mus musculus
  siRNA target sequence for Btbd7 (NM_172806.2,1749-1767).
catgacttcggatgttttt

SEQ ID NO: 532842 - DNA, 19 bp, Mus musculus
  siRNA target sequence for Btbd7 (NM_172806.2,1752-1770).
gacttcggatgttttttat

SEQ ID NO: 532843 - DNA, 19 bp, Mus musculus
  siRNA target sequence for Btbd7 (NM_172806.2,1754-1772).
cttcggatgttttttatga

SEQ ID NO: 532844 - DNA, 19 bp, Mus musculus
  siRNA target sequence for Btbd7 (NM_172806.2,1839-1857).
ccttaaatatctgattaaa

SEQ ID NO: 532845 - DNA, 19 bp, Mus musculus
  siRNA target sequence for Btbd7 (NM_172806.2,1859-1877).
ggggtgagcatcagttgat

SEQ ID NO: 532846 - DNA, 19 bp, Mus musculus
  siRNA target sequence for Btbd7 (NM_172806.2,1952-1970).
gaagagacctggacataga

SEQ ID NO: 532847 - DNA, 19 bp, Mus musculus
  siRNA target sequence for Btbd7 (NM_172806.2,1959-1977).
cctggacatagaagaactt

SEQ ID NO: 532848 - DNA, 19 bp, Mus musculus
  siRNA target sequence for Btbd7 (NM_172806.2,2003-2021).
cttttgtgcggattgaaca

SEQ ID NO: 532849 - DNA, 19 bp, Mus musculus
  siRNA target sequence for Btbd7 (NM_172806.2,2017-2035).
gaacacatcctacctataa

SEQ ID NO: 532850 - DNA, 19 bp, Mus musculus
  siRNA target sequence for Btbd7 (NM_172806.2,2020-2038).
cacatcctacctataaaca

SEQ ID NO: 532851 - DNA, 19 bp, Mus musculus
  siRNA target sequence for Btbd7 (NM_172806.2,2037-2055).
cagtgaggtcttaagtgat

SEQ ID NO: 532852 - DNA, 19 bp, Mus musculus
  siRNA target sequence for Btbd7 (NM_172806.2,2142-2160).
gaagaacgctggcatatat

SEQ ID NO: 532853 - DNA, 19 bp, Mus musculus
  siRNA target sequence for Btbd7 (NM_172806.2,2145-2163).
gaacgctggcatatatgtt

SEQ ID NO: 532854 - DNA, 19 bp, Mus musculus
  siRNA target sequence for Btbd7 (NM_172806.2,2309-2327).
cccagtgctgccacatgat

SEQ ID NO: 532855 - DNA, 19 bp, Mus musculus
  siRNA target sequence for Btbd7 (NM_172806.2,2369-2387).
cagttgtagccaatgagat

SEQ ID NO: 532856 - DNA, 19 bp, Mus musculus
  siRNA target sequence for Btbd7 (NM_172806.2,2392-2410).
gttcctcgtctcctcatta

SEQ ID NO: 532857 - DNA, 19 bp, Mus musculus
  siRNA target sequence for Btbd7 (NM_172806.2,2395-2413).
cctcgtctcctcattatga

SEQ ID NO: 532858 - DNA, 19 bp, Mus musculus
  siRNA target sequence for Btbd7 (NM_172806.2,2396-2414).
ctcgtctcctcattatgaa

SEQ ID NO: 532859 - DNA, 19 bp, Mus musculus
  siRNA target sequence for Btbd7 (NM_172806.2,2401-2419).
ctcctcattatgaaggata

SEQ ID NO: 532860 - DNA, 19 bp, Mus musculus
  siRNA target sequence for Btbd7 (NM_172806.2,2495-2513).
ccaccgtcagctatgaaat

SEQ ID NO: 532861 - DNA, 19 bp, Mus musculus
  siRNA target sequence for Btbd7 (NM_172806.2,2498-2516).
ccgtcagctatgaaatcca

SEQ ID NO: 532862 - DNA, 19 bp, Mus musculus
  siRNA target sequence for Btbd7 (NM_172806.2,2663-2681).
cccctactgcagaaaccat

SEQ ID NO: 532863 - DNA, 19 bp, Mus musculus
  siRNA target sequence for Btbd7 (NM_172806.2,2752-2770).
ccagctactccaatccata

SEQ ID NO: 532864 - DNA, 19 bp, Mus musculus
  siRNA target sequence for Btbd7 (NM_172806.2,2753-2771).
cagctactccaatccataa

SEQ ID NO: 532865 - DNA, 19 bp, Mus musculus
  siRNA target sequence for Btbd7 (NM_172806.2,2862-2880).
cagaacagctcctaaacct

SEQ ID NO: 532866 - DNA, 19 bp, Mus musculus
  siRNA target sequence for Btbd7 (NM_172806.2,2881-2899).
ggccctcccccagtctatt

SEQ ID NO: 532867 - DNA, 19 bp, Mus musculus
  siRNA target sequence for Btbd7 (NM_172806.2,2991-3009).
ctcagcagcaataatacct

SEQ ID NO: 532868 - DNA, 19 bp, Mus musculus
  siRNA target sequence for Btbd7 (NM_172806.2,3112-3130).
gctgcagacacagagttat

SEQ ID NO: 532869 - DNA, 19 bp, Mus musculus
  siRNA target sequence for Btbd7 (NM_172806.2,3164-3182).
cccagcatctgtcatgtat

SEQ ID NO: 532870 - DNA, 19 bp, Mus musculus
  siRNA target sequence for Btbd7 (NM_172806.2,3165-3183).
ccagcatctgtcatgtatt

SEQ ID NO: 532871 - DNA, 19 bp, Mus musculus
  siRNA target sequence for Btbd7 (NM_172806.2,3236-3254).
cagacggtagagaaaatca

SEQ ID NO: 532872 - DNA, 19 bp, Mus musculus
  siRNA target sequence for Btbd7 (NM_172806.2,3258-3276).
ggaatacccagatctctat

SEQ ID NO: 532873 - DNA, 19 bp, Mus musculus
  siRNA target sequence for Btbd7 (NM_172806.2,3268-3286).
gatctctatgacttctcaa

SEQ ID NO: 532874 - DNA, 19 bp, Mus musculus
  siRNA target sequence for Btbd7 (NM_172806.2,3364-3382).
gacttgtacagccacaata

SEQ ID NO: 532875 - DNA, 19 bp, Mus musculus
  siRNA target sequence for Btbd7 (NM_172806.2,3378-3396).
caataaggcatcaccaaat

SEQ ID NO: 532876 - DNA, 19 bp, Mus musculus
  siRNA target sequence for Btbd7 (NM_172806.2,3399-3417).
cttaaagtcagtttaccta

SEQ ID NO: 532877 - DNA, 19 bp, Mus musculus
  siRNA target sequence for Btbd7 (NM_172806.2,3422-3440).
gtcagacctctcctaaaaa

SEQ ID NO: 532878 - DNA, 19 bp, Mus musculus
  siRNA target sequence for Btbd7 (NM_172806.2,3557-3575).
cttccgcagcctcagaaaa

SEQ ID NO: 532879 - DNA, 19 bp, Mus musculus
  siRNA target sequence for Btbd7 (NM_172806.2,3603-3621).
ggcacggactgcagtagaa

SEQ ID NO: 532880 - DNA, 19 bp, Mus musculus
  siRNA target sequence for Btbd7 (NM_172806.2,3604-3622).
gcacggactgcagtagaaa

SEQ ID NO: 532881 - DNA, 19 bp, Mus musculus
  siRNA target sequence for Btbd7 (NM_172806.2,3765-3783).
ggaaaggggtgattccatt

SEQ ID NO: 532882 - DNA, 19 bp, Mus musculus
  siRNA target sequence for Btbd7 (NM_172806.2,3812-3830).
cagacttcctctacaaaaa

SEQ ID NO: 532883 - DNA, 19 bp, Mus musculus
  siRNA target sequence for C130018J01Rik (NM_172781.1,318-336).
gagagcaggaccatgtgtt

SEQ ID NO: 532884 - DNA, 19 bp, Mus musculus
  siRNA target sequence for C130018J01Rik (NM_172781.1,349-367).
caaatgaccaccagttcta

SEQ ID NO: 532885 - DNA, 19 bp, Mus musculus
  siRNA target sequence for C130018J01Rik (NM_172781.1,359-377).
ccagttctaatgatcacta

SEQ ID NO: 532886 - DNA, 19 bp, Mus musculus
  siRNA target sequence for C130018J01Rik (NM_172781.1,383-401).
ctcgaagccatgcagatta

SEQ ID NO: 532887 - DNA, 19 bp, Mus musculus
  siRNA target sequence for C130018J01Rik (NM_172781.1,385-403).
cgaagccatgcagattaca

SEQ ID NO: 532888 - DNA, 19 bp, Mus musculus
  siRNA target sequence for C130018J01Rik (NM_172781.1,397-415).
gattacactctctgtaaaa

SEQ ID NO: 532889 - DNA, 19 bp, Mus musculus
  siRNA target sequence for C130018J01Rik (NM_172781.1,418-436).
gaaagctatttgaaagaga

SEQ ID NO: 532890 - DNA, 19 bp, Mus musculus
  siRNA target sequence for C130018J01Rik (NM_172781.1,444-462).
gtgtgatgtgctacttatt

SEQ ID NO: 532891 - DNA, 19 bp, Mus musculus
  siRNA target sequence for C130018J01Rik (NM_172781.1,480-498).
cccagctcaccgattggtt

SEQ ID NO: 532892 - DNA, 19 bp, Mus musculus
  siRNA target sequence for C130018J01Rik (NM_172781.1,586-604).
gatccaaatgcacttaatt

SEQ ID NO: 532893 - DNA, 19 bp, Mus musculus
  siRNA target sequence for C130018J01Rik (NM_172781.1,589-607).
ccaaatgcacttaattctt

SEQ ID NO: 532894 - DNA, 19 bp, Mus musculus
  siRNA target sequence for C130018J01Rik (NM_172781.1,605-623).
ctttagtgcagtatgctta

SEQ ID NO: 532895 - DNA, 19 bp, Mus musculus
  siRNA target sequence for C130018J01Rik (NM_172781.1,753-771).
cctagggattcgctcattt

SEQ ID NO: 532896 - DNA, 19 bp, Mus musculus
  siRNA target sequence for C130018J01Rik (NM_172781.1,786-804).
ctgtatggagcttcagaat

SEQ ID NO: 532897 - DNA, 19 bp, Mus musculus
  siRNA target sequence for C130018J01Rik (NM_172781.1,825-843).
ggaacacttcattgatgta

SEQ ID NO: 532898 - DNA, 19 bp, Mus musculus
  siRNA target sequence for C130018J01Rik (NM_172781.1,826-844).
gaacacttcattgatgtaa

SEQ ID NO: 532899 - DNA, 19 bp, Mus musculus
  siRNA target sequence for C130018J01Rik (NM_172781.1,865-883).
ctgcttccagctaatgaaa

SEQ ID NO: 532900 - DNA, 19 bp, Mus musculus
  siRNA target sequence for C130018J01Rik (NM_172781.1,871-889).
ccagctaatgaaatatcaa

SEQ ID NO: 532901 - DNA, 19 bp, Mus musculus
  siRNA target sequence for C130018J01Rik (NM_172781.1,872-890).
cagctaatgaaatatcaaa

SEQ ID NO: 532902 - DNA, 19 bp, Mus musculus
  siRNA target sequence for C130018J01Rik (NM_172781.1,899-917).
gtagtgatgacattaatgt

SEQ ID NO: 532903 - DNA, 19 bp, Mus musculus
  siRNA target sequence for C130018J01Rik (NM_172781.1,909-927).
cattaatgtgcctgatgaa

SEQ ID NO: 532904 - DNA, 19 bp, Mus musculus
  siRNA target sequence for C130018J01Rik (NM_172781.1,932-950).
caattttccatgctcttat

SEQ ID NO: 532905 - DNA, 19 bp, Mus musculus
  siRNA target sequence for C130018J01Rik (NM_172781.1,951-969).
gcagtgggtaggtcatgat

SEQ ID NO: 532906 - DNA, 19 bp, Mus musculus
  siRNA target sequence for C130018J01Rik (NM_172781.1,995-1013).
caaagctgctttcttacat

SEQ ID NO: 532907 - DNA, 19 bp, Mus musculus
  siRNA target sequence for C130018J01Rik (NM_172781.1,999-1017).
gctgctttcttacattaga

SEQ ID NO: 532908 - DNA, 19 bp, Mus musculus
  siRNA target sequence for C130018J01Rik (NM_172781.1,1157-1175).
ctcgtacaaagcctagaaa

SEQ ID NO: 532909 - DNA, 19 bp, Mus musculus
  siRNA target sequence for C130018J01Rik (NM_172781.1,1159-1177).
cgtacaaagcctagaaaat

SEQ ID NO: 532910 - DNA, 19 bp, Mus musculus
  siRNA target sequence for C130018J01Rik (NM_172781.1,1219-1237).
gctaaaggcaccactacaa

SEQ ID NO: 532911 - DNA, 19 bp, Mus musculus
  siRNA target sequence for C130018J01Rik (NM_172781.1,1220-1238).
ctaaaggcaccactacaat

SEQ ID NO: 532912 - DNA, 19 bp, Mus musculus
  siRNA target sequence for C130018J01Rik (NM_172781.1,1225-1243).
ggcaccactacaattgaga

SEQ ID NO: 532913 - DNA, 19 bp, Mus musculus
  siRNA target sequence for C130018J01Rik (NM_172781.1,1226-1244).
gcaccactacaattgagaa

SEQ ID NO: 532914 - DNA, 19 bp, Mus musculus
  siRNA target sequence for C130018J01Rik (NM_172781.1,1229-1247).
ccactacaattgagaagta

SEQ ID NO: 532915 - DNA, 19 bp, Mus musculus
  siRNA target sequence for C130018J01Rik (NM_172781.1,1230-1248).
cactacaattgagaagtat

SEQ ID NO: 532916 - DNA, 19 bp, Mus musculus
  siRNA target sequence for C130018J01Rik (NM_172781.1,1249-1267).
gacctccgaaccaacagtt

SEQ ID NO: 532917 - DNA, 19 bp, Mus musculus
  siRNA target sequence for C130018J01Rik (NM_172781.1,1272-1290).
ccacattggcactatgagt

SEQ ID NO: 532918 - DNA, 19 bp, Mus musculus
  siRNA target sequence for C130018J01Rik (NM_172781.1,1287-1305).
gagtggtcgtagacttcaa

SEQ ID NO: 532919 - DNA, 19 bp, Mus musculus
  siRNA target sequence for C130018J01Rik (NM_172781.1,1289-1307).
gtggtcgtagacttcaatt

SEQ ID NO: 532920 - DNA, 19 bp, Mus musculus
  siRNA target sequence for C130018J01Rik (NM_172781.1,1314-1332).
ggcagttgttgataataaa

SEQ ID NO: 532921 - DNA, 19 bp, Mus musculus
  siRNA target sequence for C130018J01Rik (NM_172781.1,1318-1336).
gttgttgataataaacttt

SEQ ID NO: 532922 - DNA, 19 bp, Mus musculus
  siRNA target sequence for C130018J01Rik (NM_172781.1,1385-1403).
gtttcaatccggttactaa

SEQ ID NO: 532923 - DNA, 19 bp, Mus musculus
  siRNA target sequence for C130018J01Rik (NM_172781.1,1400-1418).
ctaaaacctgggttgtaat

SEQ ID NO: 532924 - DNA, 19 bp, Mus musculus
  siRNA target sequence for C130018J01Rik (NM_172781.1,1460-1478).
cacttgaaggaccaatgta

SEQ ID NO: 532925 - DNA, 19 bp, Mus musculus
  siRNA target sequence for C130018J01Rik (NM_172781.1,1494-1512).
cgatggatggagctatcta

SEQ ID NO: 532926 - DNA, 19 bp, Mus musculus
  siRNA target sequence for C130018J01Rik (NM_172781.1,1541-1559).
gccgtcagtggaattatgt

SEQ ID NO: 532927 - DNA, 19 bp, Mus musculus
  siRNA target sequence for C130018J01Rik (NM_172781.1,1591-1609).
ggagttgttgcattaaaca

SEQ ID NO: 532928 - DNA, 19 bp, Mus musculus
  siRNA target sequence for C130018J01Rik (NM_172781.1,1592-1610).
gagttgttgcattaaacaa

SEQ ID NO: 532929 - DNA, 19 bp, Mus musculus
  siRNA target sequence for C130018J01Rik (NM_172781.1,1594-1612).
gttgttgcattaaacaata

SEQ ID NO: 532930 - DNA, 19 bp, Mus musculus
  siRNA target sequence for C130018J01Rik (NM_172781.1,1608-1626).
caataggctgtatgctatt

SEQ ID NO: 532931 - DNA, 19 bp, Mus musculus
  siRNA target sequence for C130018J01Rik (NM_172781.1,1672-1690).
gacccgcatactaacaagt

SEQ ID NO: 532932 - DNA, 19 bp, Mus musculus
  siRNA target sequence for C130018J01Rik (NM_172781.1,1735-1753).
gtagcaacacacaatggat

SEQ ID NO: 532933 - DNA, 19 bp, Mus musculus
  siRNA target sequence for C130018J01Rik (NM_172781.1,1746-1764).
caatggatacttgtatgtt

SEQ ID NO: 532934 - DNA, 19 bp, Mus musculus
  siRNA target sequence for C130018J01Rik (NM_172781.1,1811-1829).
ctgactgcgtggaaagata

SEQ ID NO: 532935 - DNA, 19 bp, Mus musculus
  siRNA target sequence for C130018J01Rik (NM_172781.1,1831-1849).
gacccaaaaggcgattcat

SEQ ID NO: 532936 - DNA, 19 bp, Mus musculus
  siRNA target sequence for C130018J01Rik (NM_172781.1,1896-1914).
gtgcccccttggagacaaa

SEQ ID NO: 532937 - DNA, 19 bp, Mus musculus
  siRNA target sequence for C130018J01Rik (NM_172781.1,1900-1918).
ccccttggagacaaactct

SEQ ID NO: 532938 - DNA, 19 bp, Mus musculus
  siRNA target sequence for C130018J01Rik (NM_172781.1,1920-1938).
cgtggttggcggatatgat

SEQ ID NO: 532939 - DNA, 19 bp, Mus musculus
  siRNA target sequence for C130018J01Rik (NM_172781.1,1929-1947).
cggatatgatggtcatact

SEQ ID NO: 532940 - DNA, 19 bp, Mus musculus
  siRNA target sequence for C130018J01Rik (NM_172781.1,1931-1949).
gatatgatggtcatactta

SEQ ID NO: 532941 - DNA, 19 bp, Mus musculus
  siRNA target sequence for C130018J01Rik (NM_172781.1,1939-1957).
ggtcatacttacttgaata

SEQ ID NO: 532942 - DNA, 19 bp, Mus musculus
  siRNA target sequence for C130018J01Rik (NM_172781.1,1976-1994).
ctcagaaagacgaatggaa

SEQ ID NO: 532943 - DNA, 19 bp, Mus musculus
  siRNA target sequence for C130018J01Rik (NM_172781.1,1998-2016).
ggaagtccctgtgaacatt

SEQ ID NO: 532944 - DNA, 19 bp, Mus musculus
  siRNA target sequence for C130068N17Rik (NM_177784.2,187-205).
gacaagaagattacatttt

SEQ ID NO: 532945 - DNA, 19 bp, Mus musculus
  siRNA target sequence for C130068N17Rik (NM_177784.2,246-264).
gcattcagaacgttttaca

SEQ ID NO: 532946 - DNA, 19 bp, Mus musculus
  siRNA target sequence for C130068N17Rik (NM_177784.2,247-265).
cattcagaacgttttacat

SEQ ID NO: 532947 - DNA, 19 bp, Mus musculus
  siRNA target sequence for C130068N17Rik (NM_177784.2,298-316).
gtccttcaggcataatctt

SEQ ID NO: 532948 - DNA, 19 bp, Mus musculus
  siRNA target sequence for C130068N17Rik (NM_177784.2,307-325).
gcataatcttccattgtca

SEQ ID NO: 532949 - DNA, 19 bp, Mus musculus
  siRNA target sequence for C130068N17Rik (NM_177784.2,339-357).
gctgcctgcagcaattatt

SEQ ID NO: 532950 - DNA, 19 bp, Mus musculus
  siRNA target sequence for C130068N17Rik (NM_177784.2,340-358).
ctgcctgcagcaattattt

SEQ ID NO: 532951 - DNA, 19 bp, Mus musculus
  siRNA target sequence for C130068N17Rik (NM_177784.2,342-360).
gcctgcagcaattatttta

SEQ ID NO: 532952 - DNA, 19 bp, Mus musculus
  siRNA target sequence for C130068N17Rik (NM_177784.2,343-361).
cctgcagcaattattttaa

SEQ ID NO: 532953 - DNA, 19 bp, Mus musculus
  siRNA target sequence for C130068N17Rik (NM_177784.2,375-393).
gctgacatgaaagaaaaat

SEQ ID NO: 532954 - DNA, 19 bp, Mus musculus
  siRNA target sequence for C130068N17Rik (NM_177784.2,416-434).
gggcatccaccatgatatt

SEQ ID NO: 532955 - DNA, 19 bp, Mus musculus
  siRNA target sequence for C130068N17Rik (NM_177784.2,417-435).
ggcatccaccatgatattt

SEQ ID NO: 532956 - DNA, 19 bp, Mus musculus
  siRNA target sequence for C130068N17Rik (NM_177784.2,441-459).
ggccttgtaaattatgcat

SEQ ID NO: 532957 - DNA, 19 bp, Mus musculus
  siRNA target sequence for C130068N17Rik (NM_177784.2,444-462).
cttgtaaattatgcatata

SEQ ID NO: 532958 - DNA, 19 bp, Mus musculus
  siRNA target sequence for C130068N17Rik (NM_177784.2,457-475).
catatacttctcaaattga

SEQ ID NO: 532959 - DNA, 19 bp, Mus musculus
  siRNA target sequence for C130068N17Rik (NM_177784.2,572-590).
cctggacattgataactgt

SEQ ID NO: 532960 - DNA, 19 bp, Mus musculus
  siRNA target sequence for C130068N17Rik (NM_177784.2,589-607).
gtatcgggatgcactcttt

SEQ ID NO: 532961 - DNA, 19 bp, Mus musculus
  siRNA target sequence for C130068N17Rik (NM_177784.2,593-611).
cgggatgcactcttttgca

SEQ ID NO: 532962 - DNA, 19 bp, Mus musculus
  siRNA target sequence for C130068N17Rik (NM_177784.2,793-811).
ggactgctcacgatgtaga

SEQ ID NO: 532963 - DNA, 19 bp, Mus musculus
  siRNA target sequence for C130068N17Rik (NM_177784.2,801-819).
cacgatgtagagaatcgaa

SEQ ID NO: 532964 - DNA, 19 bp, Mus musculus
  siRNA target sequence for C130068N17Rik (NM_177784.2,807-825).
gtagagaatcgaatcgaat

SEQ ID NO: 532965 - DNA, 19 bp, Mus musculus
  siRNA target sequence for C130068N17Rik (NM_177784.2,816-834).
cgaatcgaatgcatctaca

SEQ ID NO: 532966 - DNA, 19 bp, Mus musculus
  siRNA target sequence for C130068N17Rik (NM_177784.2,817-835).
gaatcgaatgcatctacaa

SEQ ID NO: 532967 - DNA, 19 bp, Mus musculus
  siRNA target sequence for C130068N17Rik (NM_177784.2,830-848).
ctacaacctgctaagctat

SEQ ID NO: 532968 - DNA, 19 bp, Mus musculus
  siRNA target sequence for C130068N17Rik (NM_177784.2,839-857).
gctaagctatatcaacata

SEQ ID NO: 532969 - DNA, 19 bp, Mus musculus
  siRNA target sequence for C130068N17Rik (NM_177784.2,844-862).
gctatatcaacatagacat

SEQ ID NO: 532970 - DNA, 19 bp, Mus musculus
  siRNA target sequence for C130068N17Rik (NM_177784.2,884-902).
ggctctaggccttcaaaga

SEQ ID NO: 532971 - DNA, 19 bp, Mus musculus
  siRNA target sequence for C130068N17Rik (NM_177784.2,885-903).
gctctaggccttcaaagaa

SEQ ID NO: 532972 - DNA, 19 bp, Mus musculus
  siRNA target sequence for C130068N17Rik (NM_177784.2,901-919).
gaagctgcctgctaactga

SEQ ID NO: 532973 - DNA, 19 bp, Mus musculus
  siRNA target sequence for C130068N17Rik (NM_177784.2,948-966).
gccttgaatcccatgcata

SEQ ID NO: 532974 - DNA, 19 bp, Mus musculus
  siRNA target sequence for C130068N17Rik (NM_177784.2,957-975).
cccatgcataaagagattt

SEQ ID NO: 532975 - DNA, 19 bp, Mus musculus
  siRNA target sequence for C130068N17Rik (NM_177784.2,1012-1030).
gctactactggcatccttt

SEQ ID NO: 532976 - DNA, 19 bp, Mus musculus
  siRNA target sequence for C130068N17Rik (NM_177784.2,1043-1061).
catatgggaccctttgaca

SEQ ID NO: 532977 - DNA, 19 bp, Mus musculus
  siRNA target sequence for C130068N17Rik (NM_177784.2,1048-1066).
gggaccctttgacaaatgt

SEQ ID NO: 532978 - DNA, 19 bp, Mus musculus
  siRNA target sequence for C130068N17Rik (NM_177784.2,1049-1067).
ggaccctttgacaaatgtt

SEQ ID NO: 532979 - DNA, 19 bp, Mus musculus
  siRNA target sequence for C130068N17Rik (NM_177784.2,1123-1141).
gcttaggacctaacattta

SEQ ID NO: 532980 - DNA, 19 bp, Mus musculus
  siRNA target sequence for C130068N17Rik (NM_177784.2,1124-1142).
cttaggacctaacatttat

SEQ ID NO: 532981 - DNA, 19 bp, Mus musculus
  siRNA target sequence for C130068N17Rik (NM_177784.2,1149-1167).
ggcgggtacaggacagata

SEQ ID NO: 532982 - DNA, 19 bp, Mus musculus
  siRNA target sequence for C130068N17Rik (NM_177784.2,1150-1168).
gcgggtacaggacagataa

SEQ ID NO: 532983 - DNA, 19 bp, Mus musculus
  siRNA target sequence for C130068N17Rik (NM_177784.2,1151-1169).
cgggtacaggacagataat

SEQ ID NO: 532984 - DNA, 19 bp, Mus musculus
  siRNA target sequence for C130068N17Rik (NM_177784.2,1152-1170).
gggtacaggacagataata

SEQ ID NO: 532985 - DNA, 19 bp, Mus musculus
  siRNA target sequence for C130068N17Rik (NM_177784.2,1153-1171).
ggtacaggacagataatat

SEQ ID NO: 532986 - DNA, 19 bp, Mus musculus
  siRNA target sequence for C130068N17Rik (NM_177784.2,1182-1200).
gacacagtgtggatctata

SEQ ID NO: 532987 - DNA, 19 bp, Mus musculus
  siRNA target sequence for C130068N17Rik (NM_177784.2,1322-1340).
cgaagaggccgagttctat

SEQ ID NO: 532988 - DNA, 19 bp, Mus musculus
  siRNA target sequence for C130068N17Rik (NM_177784.2,1334-1352).
gttctatgatcctctgaaa

SEQ ID NO: 532989 - DNA, 19 bp, Mus musculus
  siRNA target sequence for C130068N17Rik (NM_177784.2,1360-1378).
ggcttcctatcgcaaacat

SEQ ID NO: 532990 - DNA, 19 bp, Mus musculus
  siRNA target sequence for C130068N17Rik (NM_177784.2,1366-1384).
ctatcgcaaacatgattaa

SEQ ID NO: 532991 - DNA, 19 bp, Mus musculus
  siRNA target sequence for C130068N17Rik (NM_177784.2,1402-1420).
ctgcctgtgtcctacatga

SEQ ID NO: 532992 - DNA, 19 bp, Mus musculus
  siRNA target sequence for C130068N17Rik (NM_177784.2,1478-1496).
ggtgcagagctacaattca

SEQ ID NO: 532993 - DNA, 19 bp, Mus musculus
  siRNA target sequence for C130068N17Rik (NM_177784.2,1486-1504).
gctacaattcagacatcaa

SEQ ID NO: 532994 - DNA, 19 bp, Mus musculus
  siRNA target sequence for C130068N17Rik (NM_177784.2,1525-1543).
cgagcccacacccagaata

SEQ ID NO: 532995 - DNA, 19 bp, Mus musculus
  siRNA target sequence for C130068N17Rik (NM_177784.2,1526-1544).
gagcccacacccagaatat

SEQ ID NO: 532996 - DNA, 19 bp, Mus musculus
  siRNA target sequence for C130068N17Rik (NM_177784.2,1529-1547).
cccacacccagaatatgga

SEQ ID NO: 532997 - DNA, 19 bp, Mus musculus
  siRNA target sequence for C130068N17Rik (NM_177784.2,1546-1564).
gactgtgctcagttccatt

SEQ ID NO: 532998 - DNA, 19 bp, Mus musculus
  siRNA target sequence for C130068N17Rik (NM_177784.2,1612-1630).
gctatgacccggaacagaa

SEQ ID NO: 532999 - DNA, 19 bp, Mus musculus
  siRNA target sequence for C130068N17Rik (NM_177784.2,1748-1766).
gagtatcgagaaatacgat

SEQ ID NO: 533000 - DNA, 19 bp, Mus musculus
  siRNA target sequence for C130068N17Rik (NM_177784.2,1764-1782).
gatccagatcttaataagt

SEQ ID NO: 533001 - DNA, 19 bp, Mus musculus
  siRNA target sequence for C130068N17Rik (NM_177784.2,1819-1837).
ctcatggatgcgtttgtgt

SEQ ID NO: 533002 - DNA, 19 bp, Mus musculus
  siRNA target sequence for C130068N17Rik (NM_177784.2,1828-1846).
gcgtttgtgtgtataatgt

SEQ ID NO: 533003 - DNA, 19 bp, Mus musculus
  siRNA target sequence for C1ql (NM_153155.1,1394-1412).
gctccataccgggtatcta

SEQ ID NO: 533004 - DNA, 19 bp, Mus musculus
  siRNA target sequence for C1ql (NM_153155.1,1397-1415).
ccataccgggtatctactt

SEQ ID NO: 533005 - DNA, 19 bp, Mus musculus
  siRNA target sequence for C1ql (NM_153155.1,1491-1509).
gcgtgctagtgcaattgct

SEQ ID NO: 533006 - DNA, 19 bp, Mus musculus
  siRNA target sequence for C1ql (NM_153155.1,1510-1528).
caagatgctgatcagaatt

SEQ ID NO: 533007 - DNA, 19 bp, Mus musculus
  siRNA target sequence for C1ql (NM_153155.1,1571-1589).
gagatgaagtctatatcaa

SEQ ID NO: 533008 - DNA, 19 bp, Mus musculus
  siRNA target sequence for C1ql (NM_153155.1,1573-1591).
gatgaagtctatatcaaat

SEQ ID NO: 533009 - DNA, 19 bp, Mus musculus
  siRNA target sequence for C1ql (NM_153155.1,1607-1625).
cccacggaggaaacaacaa

SEQ ID NO: 533010 - DNA, 19 bp, Mus musculus
  siRNA target sequence for C1ql (NM_153155.1,1609-1627).
cacggaggaaacaacaaca

SEQ ID NO: 533011 - DNA, 19 bp, Mus musculus
  siRNA target sequence for C3ip1 (NM_153128.1,163-181).
gcattatggcccctaaaga

SEQ ID NO: 533012 - DNA, 19 bp, Mus musculus
  siRNA target sequence for C3ip1 (NM_153128.1,171-189).
gcccctaaagacataatga

SEQ ID NO: 533013 - DNA, 19 bp, Mus musculus
  siRNA target sequence for C3ip1 (NM_153128.1,364-382).
ggaagccgtatgttgacat

SEQ ID NO: 533014 - DNA, 19 bp, Mus musculus
  siRNA target sequence for C3ip1 (NM_153128.1,365-383).
gaagccgtatgttgacatt

SEQ ID NO: 533015 - DNA, 19 bp, Mus musculus
  siRNA target sequence for C3ip1 (NM_153128.1,368-386).
gccgtatgttgacattcaa

SEQ ID NO: 533016 - DNA, 19 bp, Mus musculus
  siRNA target sequence for C3ip1 (NM_153128.1,420-438).
gacttcgtgtacacagaaa

SEQ ID NO: 533017 - DNA, 19 bp, Mus musculus
  siRNA target sequence for C3ip1 (NM_153128.1,428-446).
gtacacagaaacagtacat

SEQ ID NO: 533018 - DNA, 19 bp, Mus musculus
  siRNA target sequence for C3ip1 (NM_153128.1,563-581).
gggtatcagggattttgct

SEQ ID NO: 533019 - DNA, 19 bp, Mus musculus
  siRNA target sequence for C3ip1 (NM_153128.1,569-587).
cagggattttgctgaaact

SEQ ID NO: 533020 - DNA, 19 bp, Mus musculus
  siRNA target sequence for C3ip1 (NM_153128.1,623-641).
gtttagccagaagcatttt

SEQ ID NO: 533021 - DNA, 19 bp, Mus musculus
  siRNA target sequence for C3ip1 (NM_153128.1,741-759).
gtctttgaggctgttatca

SEQ ID NO: 533022 - DNA, 19 bp, Mus musculus
  siRNA target sequence for C3ip1 (NM_153128.1,782-800).
ggagcgagaagagtcttta

SEQ ID NO: 533023 - DNA, 19 bp, Mus musculus
  siRNA target sequence for C3ip1 (NM_153128.1,785-803).
gcgagaagagtctttacct

SEQ ID NO: 533024 - DNA, 19 bp, Mus musculus
  siRNA target sequence for C3ip1 (NM_153128.1,796-814).
ctttacctgacctcttaca

SEQ ID NO: 533025 - DNA, 19 bp, Mus musculus
  siRNA target sequence for C3ip1 (NM_153128.1,802-820).
ctgacctcttacagtatgt

SEQ ID NO: 533026 - DNA, 19 bp, Mus musculus
  siRNA target sequence for C3ip1 (NM_153128.1,833-851).
gctgacccccaggtacatt

SEQ ID NO: 533027 - DNA, 19 bp, Mus musculus
  siRNA target sequence for C3ip1 (NM_153128.1,834-852).
ctgacccccaggtacatta

SEQ ID NO: 533028 - DNA, 19 bp, Mus musculus
  siRNA target sequence for C3ip1 (NM_153128.1,836-854).
gacccccaggtacattaca

SEQ ID NO: 533029 - DNA, 19 bp, Mus musculus
  siRNA target sequence for C3ip1 (NM_153128.1,839-857).
ccccaggtacattacagat

SEQ ID NO: 533030 - DNA, 19 bp, Mus musculus
  siRNA target sequence for C3ip1 (NM_153128.1,842-860).
caggtacattacagatgta

SEQ ID NO: 533031 - DNA, 19 bp, Mus musculus
  siRNA target sequence for C3ip1 (NM_153128.1,844-862).
ggtacattacagatgtaat

SEQ ID NO: 533032 - DNA, 19 bp, Mus musculus
  siRNA target sequence for C3ip1 (NM_153128.1,873-891).
cctttcatccgctgtagtt

SEQ ID NO: 533033 - DNA, 19 bp, Mus musculus
  siRNA target sequence for C3ip1 (NM_153128.1,874-892).
ctttcatccgctgtagttt

SEQ ID NO: 533034 - DNA, 19 bp, Mus musculus
  siRNA target sequence for C3ip1 (NM_153128.1,878-896).
catccgctgtagtttacaa

SEQ ID NO: 533035 - DNA, 19 bp, Mus musculus
  siRNA target sequence for C3ip1 (NM_153128.1,898-916).
gcagagatctagttgatga

SEQ ID NO: 533036 - DNA, 19 bp, Mus musculus
  siRNA target sequence for C3ip1 (NM_153128.1,899-917).
cagagatctagttgatgaa

SEQ ID NO: 533037 - DNA, 19 bp, Mus musculus
  siRNA target sequence for C3ip1 (NM_153128.1,1072-1090).
cacaggagtggagcttttt

SEQ ID NO: 533038 - DNA, 19 bp, Mus musculus
  siRNA target sequence for C3ip1 (NM_153128.1,1076-1094).
ggagtggagctttttacca

SEQ ID NO: 533039 - DNA, 19 bp, Mus musculus
  siRNA target sequence for C3ip1 (NM_153128.1,1133-1151).
cttacatgatcggatctat

SEQ ID NO: 533040 - DNA, 19 bp, Mus musculus
  siRNA target sequence for C3ip1 (NM_153128.1,1137-1155).
catgatcggatctatgtaa

SEQ ID NO: 533041 - DNA, 19 bp, Mus musculus
  siRNA target sequence for C3ip1 (NM_153128.1,1184-1202).
cagttcggtggaatgtcta

SEQ ID NO: 533042 - DNA, 19 bp, Mus musculus
  siRNA target sequence for C3ip1 (NM_153128.1,1189-1207).
cggtggaatgtctagacta

SEQ ID NO: 533043 - DNA, 19 bp, Mus musculus
  siRNA target sequence for C3ip1 (NM_153128.1,1190-1208).
ggtggaatgtctagactat

SEQ ID NO: 533044 - DNA, 19 bp, Mus musculus
  siRNA target sequence for C3ip1 (NM_153128.1,1191-1209).
gtggaatgtctagactata

SEQ ID NO: 533045 - DNA, 19 bp, Mus musculus
  siRNA target sequence for C3ip1 (NM_153128.1,1193-1211).
ggaatgtctagactataca

SEQ ID NO: 533046 - DNA, 19 bp, Mus musculus
  siRNA target sequence for C3ip1 (NM_153128.1,1276-1294).
ccaccactctgggagatat

SEQ ID NO: 533047 - DNA, 19 bp, Mus musculus
  siRNA target sequence for C3ip1 (NM_153128.1,1280-1298).
cactctgggagatatgatt

SEQ ID NO: 533048 - DNA, 19 bp, Mus musculus
  siRNA target sequence for C3ip1 (NM_153128.1,1282-1300).
ctctgggagatatgattta

SEQ ID NO: 533049 - DNA, 19 bp, Mus musculus
  siRNA target sequence for C3ip1 (NM_153128.1,1324-1342).
gtaggcgtcatacaagtat

SEQ ID NO: 533050 - DNA, 19 bp, Mus musculus
  siRNA target sequence for C3ip1 (NM_153128.1,1375-1393).
gtatgctgggagatatgca

SEQ ID NO: 533051 - DNA, 19 bp, Mus musculus
  siRNA target sequence for C3ip1 (NM_153128.1,1419-1437).
gtagtggccagcggaataa

SEQ ID NO: 533052 - DNA, 19 bp, Mus musculus
  siRNA target sequence for C3ip1 (NM_153128.1,1422-1440).
gtggccagcggaataatct

SEQ ID NO: 533053 - DNA, 19 bp, Mus musculus
  siRNA target sequence for C3ip1 (NM_153128.1,1424-1442).
ggccagcggaataatctat

SEQ ID NO: 533054 - DNA, 19 bp, Mus musculus
  siRNA target sequence for C3ip1 (NM_153128.1,1425-1443).
gccagcggaataatctatt

SEQ ID NO: 533055 - DNA, 19 bp, Mus musculus
  siRNA target sequence for C3ip1 (NM_153128.1,1427-1445).
cagcggaataatctattgt

SEQ ID NO: 533056 - DNA, 19 bp, Mus musculus
  siRNA target sequence for C3ip1 (NM_153128.1,1429-1447).
gcggaataatctattgtct

SEQ ID NO: 533057 - DNA, 19 bp, Mus musculus
  siRNA target sequence for C3ip1 (NM_153128.1,1430-1448).
cggaataatctattgtcta

SEQ ID NO: 533058 - DNA, 19 bp, Mus musculus
  siRNA target sequence for C3ip1 (NM_153128.1,1439-1457).
ctattgtctaggaggatat

SEQ ID NO: 533059 - DNA, 19 bp, Mus musculus
  siRNA target sequence for C3ip1 (NM_153128.1,1452-1470).
ggatatgatggcttgaaca

SEQ ID NO: 533060 - DNA, 19 bp, Mus musculus
  siRNA target sequence for C3ip1 (NM_153128.1,1453-1471).
gatatgatggcttgaacat

SEQ ID NO: 533061 - DNA, 19 bp, Mus musculus
  siRNA target sequence for C3ip1 (NM_153128.1,1535-1553).
caccaagcgttctgcttat

SEQ ID NO: 533062 - DNA, 19 bp, Mus musculus
  siRNA target sequence for C3ip1 (NM_153128.1,1541-1559).
gcgttctgcttataacatt

SEQ ID NO: 533063 - DNA, 19 bp, Mus musculus
  siRNA target sequence for C3ip1 (NM_153128.1,1592-1610).
gaccacgcctcgatgctat

SEQ ID NO: 533064 - DNA, 19 bp, Mus musculus
  siRNA target sequence for C3ip1 (NM_153128.1,1595-1613).
cacgcctcgatgctatgta

SEQ ID NO: 533065 - DNA, 19 bp, Mus musculus
  siRNA target sequence for C3ip1 (NM_153128.1,1625-1643).
gcttcgagggagactctat

SEQ ID NO: 533066 - DNA, 19 bp, Mus musculus
  siRNA target sequence for C3ip1 (NM_153128.1,1629-1647).
cgagggagactctatgcaa

SEQ ID NO: 533067 - DNA, 19 bp, Mus musculus
  siRNA target sequence for C3ip1 (NM_153128.1,1630-1648).
gagggagactctatgcaat

SEQ ID NO: 533068 - DNA, 19 bp, Mus musculus
  siRNA target sequence for C3ip1 (NM_153128.1,1634-1652).
gagactctatgcaattgca

SEQ ID NO: 533069 - DNA, 19 bp, Mus musculus
  siRNA target sequence for C3ip1 (NM_153128.1,1654-1672).
gatacgatgggaattctct

SEQ ID NO: 533070 - DNA, 19 bp, Mus musculus
  siRNA target sequence for C3ip1 (NM_153128.1,1733-1751).
gggaacccagcgttgtgat

SEQ ID NO: 533071 - DNA, 19 bp, Mus musculus
  siRNA target sequence for C530050O22Rik (NM_172871.1,523-541).
ctggaactacgcggttttt

SEQ ID NO: 533072 - DNA, 19 bp, Mus musculus
  siRNA target sequence for C530050O22Rik (NM_172871.1,525-543).
ggaactacgcggtttttta

SEQ ID NO: 533073 - DNA, 19 bp, Mus musculus
  siRNA target sequence for C530050O22Rik (NM_172871.1,553-571).
cgcacagttcggttgtatt

SEQ ID NO: 533074 - DNA, 19 bp, Mus musculus
  siRNA target sequence for C530050O22Rik (NM_172871.1,557-575).
cagttcggttgtattgcaa

SEQ ID NO: 533075 - DNA, 19 bp, Mus musculus
  siRNA target sequence for C530050O22Rik (NM_172871.1,642-660).
gaaatcttcccggttcata

SEQ ID NO: 533076 - DNA, 19 bp, Mus musculus
  siRNA target sequence for C530050O22Rik (NM_172871.1,671-689).
ggcgtctgccagtgattat

SEQ ID NO: 533077 - DNA, 19 bp, Mus musculus
  siRNA target sequence for C530050O22Rik (NM_172871.1,672-690).
gcgtctgccagtgattatt

SEQ ID NO: 533078 - DNA, 19 bp, Mus musculus
  siRNA target sequence for C530050O22Rik (NM_172871.1,743-761).
gcttcatggggtgaacaaa

SEQ ID NO: 533079 - DNA, 19 bp, Mus musculus
  siRNA target sequence for C530050O22Rik (NM_172871.1,808-826).
ctcttaatatggacaatct

SEQ ID NO: 533080 - DNA, 19 bp, Mus musculus
  siRNA target sequence for C530050O22Rik (NM_172871.1,860-878).
gatcttgccggttttggat

SEQ ID NO: 533081 - DNA, 19 bp, Mus musculus
  siRNA target sequence for C530050O22Rik (NM_172871.1,901-919).
caggcgtctctttggataa

SEQ ID NO: 533082 - DNA, 19 bp, Mus musculus
  siRNA target sequence for C530050O22Rik (NM_172871.1,943-961).
ctaacacctacaatcttat

SEQ ID NO: 533083 - DNA, 19 bp, Mus musculus
  siRNA target sequence for C530050O22Rik (NM_172871.1,949-967).
cctacaatcttatagaagt

SEQ ID NO: 533084 - DNA, 19 bp, Mus musculus
  siRNA target sequence for C530050O22Rik (NM_172871.1,966-984).
gtggataaatacgtaaata

SEQ ID NO: 533085 - DNA, 19 bp, Mus musculus
  siRNA target sequence for C530050O22Rik (NM_172871.1,1001-1019).
ctttcctgccttgttgaat

SEQ ID NO: 533086 - DNA, 19 bp, Mus musculus
  siRNA target sequence for C530050O22Rik (NM_172871.1,1151-1169).
ggactatgccgcaaaatta

SEQ ID NO: 533087 - DNA, 19 bp, Mus musculus
  siRNA target sequence for C530050O22Rik (NM_172871.1,1152-1170).
gactatgccgcaaaattaa

SEQ ID NO: 533088 - DNA, 19 bp, Mus musculus
  siRNA target sequence for C530050O22Rik (NM_172871.1,1217-1235).
ctatgtgcagacagtagat

SEQ ID NO: 533089 - DNA, 19 bp, Mus musculus
  siRNA target sequence for C530050O22Rik (NM_172871.1,1250-1268).
caatacctgtgtgaattta

SEQ ID NO: 533090 - DNA, 19 bp, Mus musculus
  siRNA target sequence for C530050O22Rik (NM_172871.1,1335-1353).
gccattcgatctgattcta

SEQ ID NO: 533091 - DNA, 19 bp, Mus musculus
  siRNA target sequence for C530050O22Rik (NM_172871.1,1337-1355).
cattcgatctgattctact

SEQ ID NO: 533092 - DNA, 19 bp, Mus musculus
  siRNA target sequence for C530050O22Rik (NM_172871.1,1345-1363).
ctgattctactcatttggt

SEQ ID NO: 533093 - DNA, 19 bp, Mus musculus
  siRNA target sequence for C530050O22Rik (NM_172871.1,1347-1365).
gattctactcatttggtta

SEQ ID NO: 533094 - DNA, 19 bp, Mus musculus
  siRNA target sequence for C530050O22Rik (NM_172871.1,1402-1420).
gtaaagagttacgaatgta

SEQ ID NO: 533095 - DNA, 19 bp, Mus musculus
  siRNA target sequence for C530050O22Rik (NM_172871.1,1491-1509).
gttattggaaatttccttt

SEQ ID NO: 533096 - DNA, 19 bp, Mus musculus
  siRNA target sequence for C530050O22Rik (NM_172871.1,1545-1563).
ggaaaaacggctgttgata

SEQ ID NO: 533097 - DNA, 19 bp, Mus musculus
  siRNA target sequence for C530050O22Rik (NM_172871.1,1552-1570).
cggctgttgatacagtttt

SEQ ID NO: 533098 - DNA, 19 bp, Mus musculus
  siRNA target sequence for C530050O22Rik (NM_172871.1,1554-1572).
gctgttgatacagttttca

SEQ ID NO: 533099 - DNA, 19 bp, Mus musculus
  siRNA target sequence for C530050O22Rik (NM_172871.1,1557-1575).
gttgatacagttttcagat

SEQ ID NO: 533100 - DNA, 19 bp, Mus musculus
  siRNA target sequence for C530050O22Rik (NM_172871.1,1571-1589).
cagatttgatcctcgttat

SEQ ID NO: 533101 - DNA, 19 bp, Mus musculus
  siRNA target sequence for C530050O22Rik (NM_172871.1,1604-1622).
ggtggcatcattaaacgaa

SEQ ID NO: 533102 - DNA, 19 bp, Mus musculus
  siRNA target sequence for C530050O22Rik (NM_172871.1,1605-1623).
gtggcatcattaaacgaaa

SEQ ID NO: 533103 - DNA, 19 bp, Mus musculus
  siRNA target sequence for C530050O22Rik (NM_172871.1,1619-1637).
cgaaaagcgcacattcttt

SEQ ID NO: 533104 - DNA, 19 bp, Mus musculus
  siRNA target sequence for C530050O22Rik (NM_172871.1,1648-1666).
ccctcaaaggacatttata

SEQ ID NO: 533105 - DNA, 19 bp, Mus musculus
  siRNA target sequence for C530050O22Rik (NM_172871.1,1649-1667).
cctcaaaggacatttatat

SEQ ID NO: 533106 - DNA, 19 bp, Mus musculus
  siRNA target sequence for C530050O22Rik (NM_172871.1,1738-1756).
ggagctacgttgcaaagat

SEQ ID NO: 533107 - DNA, 19 bp, Mus musculus
  siRNA target sequence for C530050O22Rik (NM_172871.1,1786-1804).
cagtatatgggggtttaat

SEQ ID NO: 533108 - DNA, 19 bp, Mus musculus
  siRNA target sequence for C530050O22Rik (NM_172871.1,1884-1902).
cagaaggctcctatgacta

SEQ ID NO: 533109 - DNA, 19 bp, Mus musculus
  siRNA target sequence for C530050O22Rik (NM_172871.1,1997-2015).
cctaagctgcgaatactat

SEQ ID NO: 533110 - DNA, 19 bp, Mus musculus
  siRNA target sequence for C530050O22Rik (NM_172871.1,1998-2016).
ctaagctgcgaatactatt

SEQ ID NO: 533111 - DNA, 19 bp, Mus musculus
  siRNA target sequence for C530050O22Rik (NM_172871.1,2076-2094).
ggagttgcagtctttgaaa

SEQ ID NO: 533112 - DNA, 19 bp, Mus musculus
  siRNA target sequence for C530050O22Rik (NM_172871.1,2132-2150).
ccggtgcatggtagaaatt

SEQ ID NO: 533113 - DNA, 19 bp, Mus musculus
  siRNA target sequence for C530050O22Rik (NM_172871.1,2134-2152).
ggtgcatggtagaaattgt

SEQ ID NO: 533114 - DNA, 19 bp, Mus musculus
  siRNA target sequence for C530050O22Rik (NM_172871.1,2180-2198).
gtggcataaagtttttgat

SEQ ID NO: 533115 - DNA, 19 bp, Mus musculus
  siRNA target sequence for C530050O22Rik (NM_172871.1,2226-2244).
gcttgcactctcacagttt

SEQ ID NO: 533116 - DNA, 19 bp, Mus musculus
  siRNA target sequence for C630013N10Rik (NM_172052.1,536-554).
cactcgagcgccttgtctt

SEQ ID NO: 533117 - DNA, 19 bp, Mus musculus
  siRNA target sequence for C630013N10Rik (NM_172052.1,540-558).
cgagcgccttgtcttcttt

SEQ ID NO: 533118 - DNA, 19 bp, Mus musculus
  siRNA target sequence for C630013N10Rik (NM_172052.1,794-812).
cctgccgccagcatgacat

SEQ ID NO: 533119 - DNA, 19 bp, Mus musculus
  siRNA target sequence for C630013N10Rik (NM_172052.1,986-1004).
gcgtggctgtgctggataa

SEQ ID NO: 533120 - DNA, 19 bp, Mus musculus
  siRNA target sequence for C630013N10Rik (NM_172052.1,1065-1083).
cgcctgctaccgctatgat

SEQ ID NO: 533121 - DNA, 19 bp, Mus musculus
  siRNA target sequence for C630013N10Rik (NM_172052.1,1151-1169).
cactgggagggctgttgta

SEQ ID NO: 533122 - DNA, 19 bp, Mus musculus
  siRNA target sequence for C630013N10Rik (NM_172052.1,1295-1313).
ctgctggtcgcctctacat

SEQ ID NO: 533123 - DNA, 19 bp, Mus musculus
  siRNA target sequence for C630013N10Rik (NM_172052.1,1297-1315).
gctggtcgcctctacatct

SEQ ID NO: 533124 - DNA, 19 bp, Mus musculus
  siRNA target sequence for C630013N10Rik (NM_178771.2,346-364).
gtggcctgcgtcacatcat

SEQ ID NO: 533125 - DNA, 19 bp, Mus musculus
  siRNA target sequence for C630013N10Rik (NM_178771.2,351-369).
ctgcgtcacatcatcgatt

SEQ ID NO: 533126 - DNA, 19 bp, Mus musculus
  siRNA target sequence for C630013N10Rik (NM_178771.2,353-371).
gcgtcacatcatcgatttt

SEQ ID NO: 533127 - DNA, 19 bp, Mus musculus
  siRNA target sequence for C730002N09Rik (NM_021319.1,1254-1272).
ggctgccacttggattctt

SEQ ID NO: 533128 - DNA, 19 bp, Mus musculus
  siRNA target sequence for C730002N09Rik (NM_021319.1,1256-1274).
ctgccacttggattcttat

SEQ ID NO: 533129 - DNA, 19 bp, Mus musculus
  siRNA target sequence for C730002N09Rik (NM_021319.1,1258-1276).
gccacttggattcttatat

SEQ ID NO: 533130 - DNA, 19 bp, Mus musculus
  siRNA target sequence for C730002N09Rik (NM_021319.1,1260-1278).
cacttggattcttatatgt

SEQ ID NO: 533131 - DNA, 19 bp, Mus musculus
  siRNA target sequence for C730002N09Rik (NM_021319.1,1379-1397).
gatgacatcggctacagtt

SEQ ID NO: 533132 - DNA, 19 bp, Mus musculus
  siRNA target sequence for Cables1 (NM_022021.1,1069-1087).
gtgccatcggccagctttt

SEQ ID NO: 533133 - DNA, 19 bp, Mus musculus
  siRNA target sequence for Cables1 (NM_022021.1,1175-1193).
ggcagaactcgcagaacta

SEQ ID NO: 533134 - DNA, 19 bp, Mus musculus
  siRNA target sequence for Cables1 (NM_022021.1,1267-1285).
ctcatctcccagagatcat

SEQ ID NO: 533135 - DNA, 19 bp, Mus musculus
  siRNA target sequence for Cables1 (NM_022021.1,1269-1287).
catctcccagagatcatct

SEQ ID NO: 533136 - DNA, 19 bp, Mus musculus
  siRNA target sequence for Cables1 (NM_022021.1,1564-1582).
gggaaccgtagaaatacca

SEQ ID NO: 533137 - DNA, 19 bp, Mus musculus
  siRNA target sequence for Cables1 (NM_022021.1,1565-1583).
ggaaccgtagaaataccat

SEQ ID NO: 533138 - DNA, 19 bp, Mus musculus
  siRNA target sequence for Cables1 (NM_022021.1,1566-1584).
gaaccgtagaaataccata

SEQ ID NO: 533139 - DNA, 19 bp, Mus musculus
  siRNA target sequence for Cables1 (NM_022021.1,1570-1588).
cgtagaaataccatagact

SEQ ID NO: 533140 - DNA, 19 bp, Mus musculus
  siRNA target sequence for Cables1 (NM_022021.1,1762-1780).
ctgaccttcccttcataca

SEQ ID NO: 533141 - DNA, 19 bp, Mus musculus
  siRNA target sequence for Cables1 (NM_022021.1,1846-1864).
gagaagtttcctcacatta

SEQ ID NO: 533142 - DNA, 19 bp, Mus musculus
  siRNA target sequence for Cables1 (NM_022021.1,1851-1869).
gtttcctcacattaaatta

SEQ ID NO: 533143 - DNA, 19 bp, Mus musculus
  siRNA target sequence for Cables1 (NM_022021.1,1856-1874).
ctcacattaaattaacact

SEQ ID NO: 533144 - DNA, 19 bp, Mus musculus
  siRNA target sequence for Cables1 (NM_022021.1,2082-2100).
caagcacctgattgacaaa

SEQ ID NO: 533145 - DNA, 19 bp, Mus musculus
  siRNA target sequence for Cables2 (NM_145851.1,1071-1089).
gagatgcagtggaatacaa

SEQ ID NO: 533146 - DNA, 19 bp, Mus musculus
  siRNA target sequence for Cables2 (NM_145851.1,1162-1180).
gaccaccgttatagagtat

SEQ ID NO: 533147 - DNA, 19 bp, Mus musculus
  siRNA target sequence for Cables2 (NM_145851.1,1164-1182).
ccaccgttatagagtatgt

SEQ ID NO: 533148 - DNA, 19 bp, Mus musculus
  siRNA target sequence for Cables2 (NM_145851.1,1168-1186).
cgttatagagtatgtgaaa

SEQ ID NO: 533149 - DNA, 19 bp, Mus musculus
  siRNA target sequence for Cacnb1 (NM_031173.1,524-542).
gacaaatgttggctacaat

SEQ ID NO: 533150 - DNA, 19 bp, Mus musculus
  siRNA target sequence for Cacnb1 (NM_031173.1,823-841).
cccctgccagtggtaatga

SEQ ID NO: 533151 - DNA, 19 bp, Mus musculus
  siRNA target sequence for Cacnb1 (NM_031173.1,830-848).
cagtggtaatgaaatgact

SEQ ID NO: 533152 - DNA, 19 bp, Mus musculus
  siRNA target sequence for Cacnb1 (NM_031173.1,832-850).
gtggtaatgaaatgactaa

SEQ ID NO: 533153 - DNA, 19 bp, Mus musculus
  siRNA target sequence for Cacnb1 (NM_031173.1,834-852).
ggtaatgaaatgactaact

SEQ ID NO: 533154 - DNA, 19 bp, Mus musculus
  siRNA target sequence for Cacnb1 (NM_031173.1,835-853).
gtaatgaaatgactaactt

SEQ ID NO: 533155 - DNA, 19 bp, Mus musculus
  siRNA target sequence for Cacnb1 (NM_031173.1,863-881).
gctagaccccctagagtta

SEQ ID NO: 533156 - DNA, 19 bp, Mus musculus
  siRNA target sequence for Cacnb1 (NM_031173.1,1106-1124).
cctcaagcatcggtttgat

SEQ ID NO: 533157 - DNA, 19 bp, Mus musculus
  siRNA target sequence for Cacnb1 (NM_031173.1,1143-1161).
cgggtaacagctgacattt

SEQ ID NO: 533158 - DNA, 19 bp, Mus musculus
  siRNA target sequence for Cacnb1 (NM_031173.1,1329-1347).
gcccagctctctaaaacgt

SEQ ID NO: 533159 - DNA, 19 bp, Mus musculus
  siRNA target sequence for Cacnb1 (NM_031173.1,1357-1375).
ccatcattgtttacatcaa

SEQ ID NO: 533160 - DNA, 19 bp, Mus musculus
  siRNA target sequence for Cacnb1 (NM_031173.1,1417-1435).
gagggaagtctcaatccaa

SEQ ID NO: 533161 - DNA, 19 bp, Mus musculus
  siRNA target sequence for Cacnb1 (NM_031173.1,1439-1457).
cctcaatgtccaaatagca

SEQ ID NO: 533162 - DNA, 19 bp, Mus musculus
  siRNA target sequence for Cacnb1 (NM_031173.1,1485-1503).
cccgaaatgtttgacataa

SEQ ID NO: 533163 - DNA, 19 bp, Mus musculus
  siRNA target sequence for Cacnb1 (NM_031173.1,1486-1504).
ccgaaatgtttgacataat

SEQ ID NO: 533164 - DNA, 19 bp, Mus musculus
  siRNA target sequence for Cacnb1 (NM_031173.1,1508-1526).
ggacgagaaccaattggaa

SEQ ID NO: 533165 - DNA, 19 bp, Mus musculus
  siRNA target sequence for Calm1 (NM_009790.3,224-242).
ctccctattcgataaagat

SEQ ID NO: 533166 - DNA, 19 bp, Mus musculus
  siRNA target sequence for Calm1 (NM_009790.3,243-261).
ggtgacggcaccatcacaa

SEQ ID NO: 533167 - DNA, 19 bp, Mus musculus
  siRNA target sequence for Calm1 (NM_009790.3,492-510).
cgccacgtcatgacaaact

SEQ ID NO: 533168 - DNA, 19 bp, Mus musculus
  siRNA target sequence for Calm1 (NM_009790.3,493-511).
gccacgtcatgacaaactt

SEQ ID NO: 533169 - DNA, 19 bp, Mus musculus
  siRNA target sequence for Calm1 (NM_009790.3,494-512).
ccacgtcatgacaaactta

SEQ ID NO: 533170 - DNA, 19 bp, Mus musculus
  siRNA target sequence for Calm1 (NM_009790.3,571-589).
gcgacggacaagtcaacta

SEQ ID NO: 533171 - DNA, 19 bp, Mus musculus
  siRNA target sequence for Calm1 (NM_009790.3,572-590).
cgacggacaagtcaactat

SEQ ID NO: 533172 - DNA, 19 bp, Mus musculus
  siRNA target sequence for Calm1 (NM_009790.3,584-602).
caactatgaagaattcgta

SEQ ID NO: 533173 - DNA, 19 bp, Mus musculus
  siRNA target sequence for Card10 (NM_130859.2,597-615).
gcctgactcagttcttgat

SEQ ID NO: 533174 - DNA, 19 bp, Mus musculus
  siRNA target sequence for Card10 (NM_130859.2,599-617).
ctgactcagttcttgatga

SEQ ID NO: 533175 - DNA, 19 bp, Mus musculus
  siRNA target sequence for Card10 (NM_130859.2,642-660).
ctcggaagagccaattgca

SEQ ID NO: 533176 - DNA, 19 bp, Mus musculus
  siRNA target sequence for Card10 (NM_130859.2,850-868).
gctcagcgaggagaagaat

SEQ ID NO: 533177 - DNA, 19 bp, Mus musculus
  siRNA target sequence for Card10 (NM_130859.2,851-869).
ctcagcgaggagaagaatt

SEQ ID NO: 533178 - DNA, 19 bp, Mus musculus
  siRNA target sequence for Card10 (NM_130859.2,1008-1026).
cagatggcgctgatcttct

SEQ ID NO: 533179 - DNA, 19 bp, Mus musculus
  siRNA target sequence for Card10 (NM_130859.2,1131-1149).
gtatcctactggacatact

SEQ ID NO: 533180 - DNA, 19 bp, Mus musculus
  siRNA target sequence for Card10 (NM_130859.2,1270-1288).
ggatctgcggctcaaacat

SEQ ID NO: 533181 - DNA, 19 bp, Mus musculus
  siRNA target sequence for Card10 (NM_130859.2,1397-1415).
cggatccagctgcagtatt

SEQ ID NO: 533182 - DNA, 19 bp, Mus musculus
  siRNA target sequence for Card10 (NM_130859.2,1399-1417).
gatccagctgcagtattct

SEQ ID NO: 533183 - DNA, 19 bp, Mus musculus
  siRNA target sequence for Card10 (NM_130859.2,1801-1819).
gccccctaagaggtctttt

SEQ ID NO: 533184 - DNA, 19 bp, Mus musculus
  siRNA target sequence for Card10 (NM_130859.2,1802-1820).
ccccctaagaggtctttta

SEQ ID NO: 533185 - DNA, 19 bp, Mus musculus
  siRNA target sequence for Card10 (NM_130859.2,1822-1840).
cagcatgtcggatatcaca

SEQ ID NO: 533186 - DNA, 19 bp, Mus musculus
  siRNA target sequence for Card10 (NM_130859.2,1949-1967).
ctggacttcctcaataggt

SEQ ID NO: 533187 - DNA, 19 bp, Mus musculus
  siRNA target sequence for Card10 (NM_130859.2,2007-2025).
gcctggatccccaggataa

SEQ ID NO: 533188 - DNA, 19 bp, Mus musculus
  siRNA target sequence for Card10 (NM_130859.2,2228-2246).
gactcaaaggcctgtcatt

SEQ ID NO: 533189 - DNA, 19 bp, Mus musculus
  siRNA target sequence for Card10 (NM_130859.2,2285-2303).
ggtgccgagcccttctaca

SEQ ID NO: 533190 - DNA, 19 bp, Mus musculus
  siRNA target sequence for Card10 (NM_130859.2,2286-2304).
gtgccgagcccttctacat

SEQ ID NO: 533191 - DNA, 19 bp, Mus musculus
  siRNA target sequence for Card10 (NM_130859.2,2341-2359).
ccatgccctttgtgtgaaa

SEQ ID NO: 533192 - DNA, 19 bp, Mus musculus
  siRNA target sequence for Card10 (NM_130859.2,2458-2476).
gggcaccgtgcccaattat

SEQ ID NO: 533193 - DNA, 19 bp, Mus musculus
  siRNA target sequence for Card10 (NM_130859.2,2495-2513).
ctagaagtccaggaaaaat

SEQ ID NO: 533194 - DNA, 19 bp, Mus musculus
  siRNA target sequence for Card10 (NM_130859.2,2498-2516).
gaagtccaggaaaaatact

SEQ ID NO: 533195 - DNA, 19 bp, Mus musculus
  siRNA target sequence for Card10 (NM_130859.2,2647-2665).
gctagaacgaagcctaaaa

SEQ ID NO: 533196 - DNA, 19 bp, Mus musculus
  siRNA target sequence for Catnbip1 (NM_023465.2,348-366).
ccgccagtgaggaggaatt

SEQ ID NO: 533197 - DNA, 19 bp, Mus musculus
  siRNA target sequence for Cav (NM_007616.2,264-282).
gacgtggtcaagattgact

SEQ ID NO: 533198 - DNA, 19 bp, Mus musculus
  siRNA target sequence for Cav (NM_007616.2,304-322).
cagaagggacacacagttt

SEQ ID NO: 533199 - DNA, 19 bp, Mus musculus
  siRNA target sequence for Cav (NM_007616.2,358-376).
ctgtgacaaaatattggtt

SEQ ID NO: 533200 - DNA, 19 bp, Mus musculus
  siRNA target sequence for Cav (NM_007616.2,415-433).
cactcatctggggcattta

SEQ ID NO: 533201 - DNA, 19 bp, Mus musculus
  siRNA target sequence for Cav (NM_007616.2,417-435).
ctcatctggggcatttact

SEQ ID NO: 533202 - DNA, 19 bp, Mus musculus
  siRNA target sequence for Cav (NM_007616.2,468-486).
gttgtaccgtgcatcaaga

SEQ ID NO: 533203 - DNA, 19 bp, Mus musculus
  siRNA target sequence for Cav (NM_007616.2,487-505).
gcttcctgattgagattca

SEQ ID NO: 533204 - DNA, 19 bp, Mus musculus
  siRNA target sequence for Cav (NM_007616.2,542-560).
cttctgcgatccactcttt

SEQ ID NO: 533205 - DNA, 19 bp, Mus musculus
  siRNA target sequence for Cav (NM_007616.2,545-563).
ctgcgatccactctttgaa

SEQ ID NO: 533206 - DNA, 19 bp, Mus musculus
  siRNA target sequence for Cav (NM_007616.2,564-582).
gctattggcaagatattca

SEQ ID NO: 533207 - DNA, 19 bp, Mus musculus
  siRNA target sequence for Cbl (NM_007619.1,233-251).
cctgcacggtggacaagaa

SEQ ID NO: 533208 - DNA, 19 bp, Mus musculus
  siRNA target sequence for Cbl (NM_007619.1,236-254).
gcacggtggacaagaagat

SEQ ID NO: 533209 - DNA, 19 bp, Mus musculus
  siRNA target sequence for Cbl (NM_007619.1,286-304).
gtggtgcggttgtgtcaaa

SEQ ID NO: 533210 - DNA, 19 bp, Mus musculus
  siRNA target sequence for Cbl (NM_007619.1,376-394).
cgcactgtcttgtcaagat

SEQ ID NO: 533211 - DNA, 19 bp, Mus musculus
  siRNA target sequence for Cbl (NM_007619.1,533-551).
ggcgaaacctgaccaaatt

SEQ ID NO: 533212 - DNA, 19 bp, Mus musculus
  siRNA target sequence for Cbl (NM_007619.1,534-552).
gcgaaacctgaccaaatta

SEQ ID NO: 533213 - DNA, 19 bp, Mus musculus
  siRNA target sequence for Cbl (NM_007619.1,535-553).
cgaaacctgaccaaattat

SEQ ID NO: 533214 - DNA, 19 bp, Mus musculus
  siRNA target sequence for Cbl (NM_007619.1,545-563).
ccaaattatccctgatctt

SEQ ID NO: 533215 - DNA, 19 bp, Mus musculus
  siRNA target sequence for Cbl (NM_007619.1,619-637).
gacactttccggattacta

SEQ ID NO: 533216 - DNA, 19 bp, Mus musculus
  siRNA target sequence for Cbl (NM_007619.1,621-639).
cactttccggattactaaa

SEQ ID NO: 533217 - DNA, 19 bp, Mus musculus
  siRNA target sequence for Cbl (NM_007619.1,640-658).
gctgatgctgccgaatttt

SEQ ID NO: 533218 - DNA, 19 bp, Mus musculus
  siRNA target sequence for Cbl (NM_007619.1,643-661).
gatgctgccgaattttgga

SEQ ID NO: 533219 - DNA, 19 bp, Mus musculus
  siRNA target sequence for Cbl (NM_007619.1,775-793).
gatctgacctgcaatgatt

SEQ ID NO: 533220 - DNA, 19 bp, Mus musculus
  siRNA target sequence for Cbl (NM_007619.1,778-796).
ctgacctgcaatgattata

SEQ ID NO: 533221 - DNA, 19 bp, Mus musculus
  siRNA target sequence for Cbl (NM_007619.1,780-798).
gacctgcaatgattatatt

SEQ ID NO: 533222 - DNA, 19 bp, Mus musculus
  siRNA target sequence for Cbl (NM_007619.1,785-803).
gcaatgattatatttctgt

SEQ ID NO: 533223 - DNA, 19 bp, Mus musculus
  siRNA target sequence for Cbl (NM_007619.1,842-860).
ggtcctctttgctcagaaa

SEQ ID NO: 533224 - DNA, 19 bp, Mus musculus
  siRNA target sequence for Cbl (NM_007619.1,843-861).
gtcctctttgctcagaaat

SEQ ID NO: 533225 - DNA, 19 bp, Mus musculus
  siRNA target sequence for Cbl (NM_007619.1,897-915).
ggctttcctgacatacgat

SEQ ID NO: 533226 - DNA, 19 bp, Mus musculus
  siRNA target sequence for Cbl (NM_007619.1,996-1014).
gtgggctattgggtatgtt

SEQ ID NO: 533227 - DNA, 19 bp, Mus musculus
  siRNA target sequence for Cbl (NM_007619.1,1025-1043).
ggaacattctgcagacaat

SEQ ID NO: 533228 - DNA, 19 bp, Mus musculus
  siRNA target sequence for Cbl (NM_007619.1,1059-1077).
gctcttccaagcactgatt

SEQ ID NO: 533229 - DNA, 19 bp, Mus musculus
  siRNA target sequence for Cbl (NM_007619.1,1104-1122).
gtttcctgatggacgaaat

SEQ ID NO: 533230 - DNA, 19 bp, Mus musculus
  siRNA target sequence for Cbl (NM_007619.1,1129-1147).
cctgacctgacaggtttat

SEQ ID NO: 533231 - DNA, 19 bp, Mus musculus
  siRNA target sequence for Cbl (NM_007619.1,1154-1172).
caactcctcaagatcatat

SEQ ID NO: 533232 - DNA, 19 bp, Mus musculus
  siRNA target sequence for Cbl (NM_007619.1,1185-1203).
gatatgtgctgagaatgat

SEQ ID NO: 533233 - DNA, 19 bp, Mus musculus
  siRNA target sequence for Cbl (NM_007619.1,1256-1274).
cgtcgtggcaggaatcaga

SEQ ID NO: 533234 - DNA, 19 bp, Mus musculus
  siRNA target sequence for Cbl (NM_007619.1,1257-1275).
gtcgtggcaggaatcagaa

SEQ ID NO: 533235 - DNA, 19 bp, Mus musculus
  siRNA target sequence for Cbl (NM_007619.1,1288-1306).
cctttttgccgatgtgaaa

SEQ ID NO: 533236 - DNA, 19 bp, Mus musculus
  siRNA target sequence for Cbl (NM_007619.1,1289-1307).
ctttttgccgatgtgaaat

SEQ ID NO: 533237 - DNA, 19 bp, Mus musculus
  siRNA target sequence for Cbl (NM_007619.1,1297-1315).
cgatgtgaaatcaaaggta

SEQ ID NO: 533238 - DNA, 19 bp, Mus musculus
  siRNA target sequence for Cbl (NM_007619.1,1351-1369).
ggcagtggcagcctattaa

SEQ ID NO: 533239 - DNA, 19 bp, Mus musculus
  siRNA target sequence for Cbl (NM_007619.1,1388-1406).
ctccttccccaaattacga

SEQ ID NO: 533240 - DNA, 19 bp, Mus musculus
  siRNA target sequence for Cbl (NM_007619.1,1397-1415).
caaattacgacgatgatga

SEQ ID NO: 533241 - DNA, 19 bp, Mus musculus
  siRNA target sequence for Cbl (NM_007619.1,1612-1630).
ggctcccttcataaagaca

SEQ ID NO: 533242 - DNA, 19 bp, Mus musculus
  siRNA target sequence for Cbl (NM_007619.1,1613-1631).
gctcccttcataaagacaa

SEQ ID NO: 533243 - DNA, 19 bp, Mus musculus
  siRNA target sequence for Cbl (NM_007619.1,1629-1647).
caaaccattgccaatacct

SEQ ID NO: 533244 - DNA, 19 bp, Mus musculus
  siRNA target sequence for Cbl (NM_007619.1,1754-1772).
gtccatctagagacaaact

SEQ ID NO: 533245 - DNA, 19 bp, Mus musculus
  siRNA target sequence for Cbl (NM_007619.1,1891-1909).
cactcgcttccattctcat

SEQ ID NO: 533246 - DNA, 19 bp, Mus musculus
  siRNA target sequence for Cbl (NM_007619.1,1966-1984).
ctggatacctctatgacta

SEQ ID NO: 533247 - DNA, 19 bp, Mus musculus
  siRNA target sequence for Cbl (NM_007619.1,2015-2033).
gtgagcacccaaagatcaa

SEQ ID NO: 533248 - DNA, 19 bp, Mus musculus
  siRNA target sequence for Cbl (NM_007619.1,2156-2174).
ggcctgtaggggttcagaa

SEQ ID NO: 533249 - DNA, 19 bp, Mus musculus
  siRNA target sequence for Cbl (NM_007619.1,2238-2256).
gatcgacagctgtacctat

SEQ ID NO: 533250 - DNA, 19 bp, Mus musculus
  siRNA target sequence for Cbl (NM_007619.1,2354-2372).
ctgaggaatccgaaaacga

SEQ ID NO: 533251 - DNA, 19 bp, Mus musculus
  siRNA target sequence for Cbl (NM_007619.1,2370-2388).
cgaggatgatggctatgat

SEQ ID NO: 533252 - DNA, 19 bp, Mus musculus
  siRNA target sequence for Cbl (NM_007619.1,2482-2500).
ggtgaccctacaaacttca

SEQ ID NO: 533253 - DNA, 19 bp, Mus musculus
  siRNA target sequence for Cbl (NM_007619.1,2483-2501).
gtgaccctacaaacttcaa

SEQ ID NO: 533254 - DNA, 19 bp, Mus musculus
  siRNA target sequence for Cbl (NM_007619.1,2549-2567).
gaatcaactcagaacgaaa

SEQ ID NO: 533255 - DNA, 19 bp, Mus musculus
  siRNA target sequence for Cbr2 (NM_007621.1,387-405).
ggtagccagggacatgatt

SEQ ID NO: 533256 - DNA, 19 bp, Mus musculus
  siRNA target sequence for Cbr2 (NM_007621.1,388-406).
gtagccagggacatgatta

SEQ ID NO: 533257 - DNA, 19 bp, Mus musculus
  siRNA target sequence for Cbr2 (NM_007621.1,417-435).
gccagggtccattgtcaat

SEQ ID NO: 533258 - DNA, 19 bp, Mus musculus
  siRNA target sequence for Cbr2 (NM_007621.1,419-437).
cagggtccattgtcaatgt

SEQ ID NO: 533259 - DNA, 19 bp, Mus musculus
  siRNA target sequence for Cbr2 (NM_007621.1,457-475).
gtcacctttcctaacttga

SEQ ID NO: 533260 - DNA, 19 bp, Mus musculus
  siRNA target sequence for Cbr2 (NM_007621.1,491-509).
ccaagggagcgatgactat

SEQ ID NO: 533261 - DNA, 19 bp, Mus musculus
  siRNA target sequence for Ccl1 (NM_011329.1,150-168).
cttacggtctccaatagct

SEQ ID NO: 533262 - DNA, 19 bp, Mus musculus
  siRNA target sequence for Ccl1 (NM_011329.1,249-267).
cccccagctgtggtattca

SEQ ID NO: 533263 - DNA, 19 bp, Mus musculus
  siRNA target sequence for Ccl1 (NM_011329.1,289-307).
gctgcgcctcaactaacaa

SEQ ID NO: 533264 - DNA, 19 bp, Mus musculus
  siRNA target sequence for Ccl1 (NM_011329.1,290-308).
ctgcgcctcaactaacaaa

SEQ ID NO: 533265 - DNA, 19 bp, Mus musculus
  siRNA target sequence for Ccl2 (NM_011333.1,208-226).
caagatgatcccaatgagt

SEQ ID NO: 533266 - DNA, 19 bp, Mus musculus
  siRNA target sequence for Ccl2 (NM_011333.1,333-351).
gggtccagacatacattaa

SEQ ID NO: 533267 - DNA, 19 bp, Mus musculus
  siRNA target sequence for Ccl2 (NM_011333.1,359-377).
gatcggaaccaaatgagat

SEQ ID NO: 533268 - DNA, 19 bp, Mus musculus
  siRNA target sequence for Ccl2 (NM_011333.1,378-396).
cagaacctacaactttatt

SEQ ID NO: 533269 - DNA, 19 bp, Mus musculus
  siRNA target sequence for Ccl2 (NM_011333.1,380-398).
gaacctacaactttattta

SEQ ID NO: 533270 - DNA, 19 bp, Mus musculus
  siRNA target sequence for Ccl2 (NM_011333.1,420-438).
cttcagcacctttgaatgt

SEQ ID NO: 533271 - DNA, 19 bp, Mus musculus
  siRNA target sequence for Ccl2 (NM_011333.1,437-455).
gtgaagttgacccgtaaat

SEQ ID NO: 533272 - DNA, 19 bp, Mus musculus
  siRNA target sequence for Ccl2 (NM_011333.1,439-457).
gaagttgacccgtaaatct

SEQ ID NO: 533273 - DNA, 19 bp, Mus musculus
  siRNA target sequence for Ccl2 (NM_011333.1,442-460).
gttgacccgtaaatctgaa

SEQ ID NO: 533274 - DNA, 19 bp, Mus musculus
  siRNA target sequence for Ccl2 (NM_011333.1,447-465).
cccgtaaatctgaagctaa

SEQ ID NO: 533275 - DNA, 19 bp, Mus musculus
  siRNA target sequence for Ccl2 (NM_011333.1,467-485).
gcatccactaccttttcca

SEQ ID NO: 533276 - DNA, 19 bp, Mus musculus
  siRNA target sequence for Ccl25 (NM_009138.1,196-214).
gcacaggatcaaatggaat

SEQ ID NO: 533277 - DNA, 19 bp, Mus musculus
  siRNA target sequence for Ccl25 (NM_009138.1,222-240).
ggcatgctaggaattatca

SEQ ID NO: 533278 - DNA, 19 bp, Mus musculus
  siRNA target sequence for Ccl25 (NM_009138.1,269-287).
ctacgtgctgtgagattct

SEQ ID NO: 533279 - DNA, 19 bp, Mus musculus
  siRNA target sequence for Ccl25 (NM_009138.1,272-290).
cgtgctgtgagattctact

SEQ ID NO: 533280 - DNA, 19 bp, Mus musculus
  siRNA target sequence for Ccl25 (NM_009138.1,286-304).
ctacttccgccagaaagta

SEQ ID NO: 533281 - DNA, 19 bp, Mus musculus
  siRNA target sequence for Cd22 (NM_009845.1,633-651).
gattccttgcaagtacaaa

SEQ ID NO: 533282 - DNA, 19 bp, Mus musculus
  siRNA target sequence for Cd22 (NM_009845.1,675-693).
ggacaacatcctccttttt

SEQ ID NO: 533283 - DNA, 19 bp, Mus musculus
  siRNA target sequence for Cd22 (NM_009845.1,688-706).
ctttttcagaactatgagt

SEQ ID NO: 533284 - DNA, 19 bp, Mus musculus
  siRNA target sequence for Cd22 (NM_009845.1,1113-1131).
ctccattaagaatgtctat

SEQ ID NO: 533285 - DNA, 19 bp, Mus musculus
  siRNA target sequence for Cd22 (NM_009845.1,1231-1249).
gtgcgtctggatgttaagt

SEQ ID NO: 533286 - DNA, 19 bp, Mus musculus
  siRNA target sequence for Cd22 (NM_009845.1,1233-1251).
gcgtctggatgttaagtat

SEQ ID NO: 533287 - DNA, 19 bp, Mus musculus
  siRNA target sequence for Cd22 (NM_009845.1,1234-1252).
cgtctggatgttaagtata

SEQ ID NO: 533288 - DNA, 19 bp, Mus musculus
  siRNA target sequence for Cd22 (NM_009845.1,1811-1829).
cggtgaccacagtgattca

SEQ ID NO: 533289 - DNA, 19 bp, Mus musculus
  siRNA target sequence for Cd22 (NM_009845.1,2005-2023).
gcctgcaaccacaagtgtt

SEQ ID NO: 533290 - DNA, 19 bp, Mus musculus
  siRNA target sequence for Cd22 (NM_009845.1,2071-2089).
gtgaaggtactgaaggtaa

SEQ ID NO: 533291 - DNA, 19 bp, Mus musculus
  siRNA target sequence for Cd22 (NM_009845.1,2167-2185).
cgcttcttctggaagaaga

SEQ ID NO: 533292 - DNA, 19 bp, Mus musculus
  siRNA target sequence for Cd22 (NM_009845.1,2351-2369).
gccctggggaccatgtgat

SEQ ID NO: 533293 - DNA, 19 bp, Mus musculus
  siRNA target sequence for Cd22 (NM_009845.1,2652-2670).
ggccatctgggggatgaaa

SEQ ID NO: 533294 - DNA, 19 bp, Mus musculus
  siRNA target sequence for Cd22 (NM_009845.1,2653-2671).
gccatctgggggatgaaaa

SEQ ID NO: 533295 - DNA, 19 bp, Mus musculus
  siRNA target sequence for Cd22 (NM_009845.1,2728-2746).
ggccagagcttttttgtga

SEQ ID NO: 533296 - DNA, 19 bp, Mus musculus
  siRNA target sequence for Cd22 (NM_009845.1,2802-2820).
ctacaatccggcaatggat

SEQ ID NO: 533297 - DNA, 19 bp, Mus musculus
  siRNA target sequence for Cd22 (NM_009845.1,2817-2835).
ggatgacaccgttagttat

SEQ ID NO: 533298 - DNA, 19 bp, Mus musculus
  siRNA target sequence for Cd22 (NM_009845.1,2933-2951).
cttactcggtgatacagaa

SEQ ID NO: 533299 - DNA, 19 bp, Mus musculus
  siRNA target sequence for Cd22 (NM_009845.1,2952-2970).
gcggcctatgggggattat

SEQ ID NO: 533300 - DNA, 19 bp, Mus musculus
  siRNA target sequence for Cd22 (NM_009845.1,2954-2972).
ggcctatgggggattatga

SEQ ID NO: 533301 - DNA, 19 bp, Mus musculus
  siRNA target sequence for Cd22 (NM_009845.1,2956-2974).
cctatgggggattatgaga

SEQ ID NO: 533302 - DNA, 19 bp, Mus musculus
  siRNA target sequence for Cd22 (NM_009845.1,2957-2975).
ctatgggggattatgagaa

SEQ ID NO: 533303 - DNA, 19 bp, Mus musculus
  siRNA target sequence for Cd22 (NM_009845.1,2962-2980).
ggggattatgagaatgtga

SEQ ID NO: 533304 - DNA, 19 bp, Mus musculus
  siRNA target sequence for Cd22 (NM_009845.1,2995-3013).
gaggatgagagcatccatt

SEQ ID NO: 533305 - DNA, 19 bp, Mus musculus
  siRNA target sequence for Cd22 (NM_009845.1,2998-3016).
gatgagagcatccattact

SEQ ID NO: 533306 - DNA, 19 bp, Mus musculus
  siRNA target sequence for Cd22 (NM_009845.1,3056-3074).
caaaggaagacgtagacta

SEQ ID NO: 533307 - DNA, 19 bp, Mus musculus
  siRNA target sequence for Cd22 (NM_009845.1,3061-3079).
gaagacgtagactatgtga

SEQ ID NO: 533308 - DNA, 19 bp, Mus musculus
  siRNA target sequence for Cd28 (NM_007642.2,47-65).
ctcagttcaagtaacagaa

SEQ ID NO: 533309 - DNA, 19 bp, Mus musculus
  siRNA target sequence for Cd28 (NM_007642.2,49-67).
cagttcaagtaacagaaaa

SEQ ID NO: 533310 - DNA, 19 bp, Mus musculus
  siRNA target sequence for Cd28 (NM_007642.2,63-81).
gaaaacaagattttggtaa

SEQ ID NO: 533311 - DNA, 19 bp, Mus musculus
  siRNA target sequence for Cd28 (NM_007642.2,143-161).
caaccttctcgcaaaggaa

SEQ ID NO: 533312 - DNA, 19 bp, Mus musculus
  siRNA target sequence for Cd28 (NM_007642.2,213-231).
gggaatgggaattttacct

SEQ ID NO: 533313 - DNA, 19 bp, Mus musculus
  siRNA target sequence for Cd28 (NM_007642.2,214-232).
ggaatgggaattttaccta

SEQ ID NO: 533314 - DNA, 19 bp, Mus musculus
  siRNA target sequence for Cd28 (NM_007642.2,247-265).
gctcgaatgccgagttcaa

SEQ ID NO: 533315 - DNA, 19 bp, Mus musculus
  siRNA target sequence for Cd28 (NM_007642.2,273-291).
ggggatttcgacaacgaaa

SEQ ID NO: 533316 - DNA, 19 bp, Mus musculus
  siRNA target sequence for Cd28 (NM_007642.2,310-328).
ggaatctgcacgtcaatca

SEQ ID NO: 533317 - DNA, 19 bp, Mus musculus
  siRNA target sequence for Cd28 (NM_007642.2,320-338).
cgtcaatcacacagatatt

SEQ ID NO: 533318 - DNA, 19 bp, Mus musculus
  siRNA target sequence for Cd28 (NM_007642.2,327-345).
cacacagatatttacttct

SEQ ID NO: 533319 - DNA, 19 bp, Mus musculus
  siRNA target sequence for Cd28 (NM_007642.2,362-380).
gtaccctccgccttaccta

SEQ ID NO: 533320 - DNA, 19 bp, Mus musculus
  siRNA target sequence for Cd28 (NM_007642.2,367-385).
ctccgccttacctagacaa

SEQ ID NO: 533321 - DNA, 19 bp, Mus musculus
  siRNA target sequence for Cd28 (NM_007642.2,389-407).
gaggagcaatggaactatt

SEQ ID NO: 533322 - DNA, 19 bp, Mus musculus
  siRNA target sequence for Cd28 (NM_007642.2,391-409).
ggagcaatggaactattat

SEQ ID NO: 533323 - DNA, 19 bp, Mus musculus
  siRNA target sequence for Cd28 (NM_007642.2,392-410).
gagcaatggaactattatt

SEQ ID NO: 533324 - DNA, 19 bp, Mus musculus
  siRNA target sequence for Cd28 (NM_007642.2,422-440).
gaaacatctttgtcatact

SEQ ID NO: 533325 - DNA, 19 bp, Mus musculus
  siRNA target sequence for Cd28 (NM_007642.2,514-532).
cagtggctctttgtgttat

SEQ ID NO: 533326 - DNA, 19 bp, Mus musculus
  siRNA target sequence for Cd28 (NM_007642.2,516-534).
gtggctctttgtgttatct

SEQ ID NO: 533327 - DNA, 19 bp, Mus musculus
  siRNA target sequence for Cd28 (NM_007642.2,528-546).
gttatctggacaaatagta

SEQ ID NO: 533328 - DNA, 19 bp, Mus musculus
  siRNA target sequence for Cd28 (NM_007642.2,629-647).
cgcccctgccagagacttt

SEQ ID NO: 533329 - DNA, 19 bp, Mus musculus
  siRNA target sequence for Cd2ap (NM_009847.2,110-128).
ctatgatgctgtacatgat

SEQ ID NO: 533330 - DNA, 19 bp, Mus musculus
  siRNA target sequence for Cd2ap (NM_009847.2,123-141).
catgatgatgagttaacta

SEQ ID NO: 533331 - DNA, 19 bp, Mus musculus
  siRNA target sequence for Cd2ap (NM_009847.2,151-169).
gggaaatcatcagaaatgt

SEQ ID NO: 533332 - DNA, 19 bp, Mus musculus
  siRNA target sequence for Cd2ap (NM_009847.2,222-240).
gggatgttccctgacaatt

SEQ ID NO: 533333 - DNA, 19 bp, Mus musculus
  siRNA target sequence for Cd2ap (NM_009847.2,223-241).
ggatgttccctgacaattt

SEQ ID NO: 533334 - DNA, 19 bp, Mus musculus
  siRNA target sequence for Cd2ap (NM_009847.2,267-285).
gaacccaaggatgacaatt

SEQ ID NO: 533335 - DNA, 19 bp, Mus musculus
  siRNA target sequence for Cd2ap (NM_009847.2,332-350).
gcgaatcagcacttatgga

SEQ ID NO: 533336 - DNA, 19 bp, Mus musculus
  siRNA target sequence for Cd2ap (NM_009847.2,415-433).
gtcagtgtaaagttctttt

SEQ ID NO: 533337 - DNA, 19 bp, Mus musculus
  siRNA target sequence for Cd2ap (NM_009847.2,470-488).
gatcgtgggggatgtcatt

SEQ ID NO: 533338 - DNA, 19 bp, Mus musculus
  siRNA target sequence for Cd2ap (NM_009847.2,520-538).
ggagtggaaccctgaacaa

SEQ ID NO: 533339 - DNA, 19 bp, Mus musculus
  siRNA target sequence for Cd2ap (NM_009847.2,521-539).
gagtggaaccctgaacaat

SEQ ID NO: 533340 - DNA, 19 bp, Mus musculus
  siRNA target sequence for Cd2ap (NM_009847.2,525-543).
ggaaccctgaacaataagt

SEQ ID NO: 533341 - DNA, 19 bp, Mus musculus
  siRNA target sequence for Cd2ap (NM_009847.2,536-554).
caataagttgggactgttt

SEQ ID NO: 533342 - DNA, 19 bp, Mus musculus
  siRNA target sequence for Cd2ap (NM_009847.2,756-774).
gtgaaacttcggacaagaa

SEQ ID NO: 533343 - DNA, 19 bp, Mus musculus
  siRNA target sequence for Cd2ap (NM_009847.2,758-776).
gaaacttcggacaagaact

SEQ ID NO: 533344 - DNA, 19 bp, Mus musculus
  siRNA target sequence for Cd2ap (NM_009847.2,872-890).
cgttgatggcaagattaaa

SEQ ID NO: 533345 - DNA, 19 bp, Mus musculus
  siRNA target sequence for Cd2ap (NM_009847.2,891-909).
gctaaggaatattgtagaa

SEQ ID NO: 533346 - DNA, 19 bp, Mus musculus
  siRNA target sequence for Cd2ap (NM_009847.2,920-938).
ctatacaggaaccaatgaa

SEQ ID NO: 533347 - DNA, 19 bp, Mus musculus
  siRNA target sequence for Cd2ap (NM_009847.2,960-978).
ggggagattatccatttga

SEQ ID NO: 533348 - DNA, 19 bp, Mus musculus
  siRNA target sequence for Cd2ap (NM_009847.2,961-979).
gggagattatccatttgat

SEQ ID NO: 533349 - DNA, 19 bp, Mus musculus
  siRNA target sequence for Cd2ap (NM_009847.2,962-980).
ggagattatccatttgata

SEQ ID NO: 533350 - DNA, 19 bp, Mus musculus
  siRNA target sequence for Cd2ap (NM_009847.2,963-981).
gagattatccatttgataa

SEQ ID NO: 533351 - DNA, 19 bp, Mus musculus
  siRNA target sequence for Cd2ap (NM_009847.2,965-983).
gattatccatttgataagt

SEQ ID NO: 533352 - DNA, 19 bp, Mus musculus
  siRNA target sequence for Cd2ap (NM_009847.2,1025-1043).
cggtaaagaaggagtgttt

SEQ ID NO: 533353 - DNA, 19 bp, Mus musculus
  siRNA target sequence for Cd2ap (NM_009847.2,1062-1080).
cagataagtgaactagata

SEQ ID NO: 533354 - DNA, 19 bp, Mus musculus
  siRNA target sequence for Cd2ap (NM_009847.2,1375-1393).
ctataatttcttcaaagat

SEQ ID NO: 533355 - DNA, 19 bp, Mus musculus
  siRNA target sequence for Cd2ap (NM_009847.2,1384-1402).
cttcaaagattgatactga

SEQ ID NO: 533356 - DNA, 19 bp, Mus musculus
  siRNA target sequence for Cd2ap (NM_009847.2,1439-1457).
gccagttagaccaaaatca

SEQ ID NO: 533357 - DNA, 19 bp, Mus musculus
  siRNA target sequence for Cd2ap (NM_009847.2,1595-1613).
cttcaacggtggacattct

SEQ ID NO: 533358 - DNA, 19 bp, Mus musculus
  siRNA target sequence for Cd2ap (NM_009847.2,1656-1674).
gatgatagtggcaacctaa

SEQ ID NO: 533359 - DNA, 19 bp, Mus musculus
  siRNA target sequence for Cd2ap (NM_009847.2,1671-1689).
ctaaagcctttggagttta

SEQ ID NO: 533360 - DNA, 19 bp, Mus musculus
  siRNA target sequence for Cd2ap (NM_009847.2,1773-1791).
ccgttagaactcaaagcta

SEQ ID NO: 533361 - DNA, 19 bp, Mus musculus
  siRNA target sequence for Cd2ap (NM_009847.2,1774-1792).
cgttagaactcaaagctaa

SEQ ID NO: 533362 - DNA, 19 bp, Mus musculus
  siRNA target sequence for Cd2ap (NM_009847.2,1830-1848).
gaacttagagcccagatta

SEQ ID NO: 533363 - DNA, 19 bp, Mus musculus
  siRNA target sequence for Cd2ap (NM_009847.2,1837-1855).
gagcccagattattgaatt

SEQ ID NO: 533364 - DNA, 19 bp, Mus musculus
  siRNA target sequence for Cd2ap (NM_009847.2,1842-1860).
cagattattgaattgttgt

SEQ ID NO: 533365 - DNA, 19 bp, Mus musculus
  siRNA target sequence for Cd2ap (NM_009847.2,1931-1949).
gaaggccatgcgaagtaat

SEQ ID NO: 533366 - DNA, 19 bp, Mus musculus
  siRNA target sequence for Cd2ap (NM_009847.2,1934-1952).
ggccatgcgaagtaatcta

SEQ ID NO: 533367 - DNA, 19 bp, Mus musculus
  siRNA target sequence for Cd2ap (NM_009847.2,1936-1954).
ccatgcgaagtaatctaga

SEQ ID NO: 533368 - DNA, 19 bp, Mus musculus
  siRNA target sequence for Cd8b (NM_009858.1,143-161).
ccaaccatacggcaaagat

SEQ ID NO: 533369 - DNA, 19 bp, Mus musculus
  siRNA target sequence for Cd8b (NM_009858.1,159-177).
gatgtcctgtgaggttaaa

SEQ ID NO: 533370 - DNA, 19 bp, Mus musculus
  siRNA target sequence for Cd8b (NM_009858.1,164-182).
cctgtgaggttaaaagcat

SEQ ID NO: 533371 - DNA, 19 bp, Mus musculus
  siRNA target sequence for Cd8b (NM_009858.1,343-361).
ccctttctcagtatcatga

SEQ ID NO: 533372 - DNA, 19 bp, Mus musculus
  siRNA target sequence for Cd8b (NM_009858.1,616-634).
ggagtggccgtctactttt

SEQ ID NO: 533373 - DNA, 19 bp, Mus musculus
  siRNA target sequence for Cd8b (NM_009858.1,619-637).
gtggccgtctacttttact

SEQ ID NO: 533374 - DNA, 19 bp, Mus musculus
  siRNA target sequence for Cd8b (NM_009858.1,644-662).
ggaggagagcccgaattca

SEQ ID NO: 533375 - DNA, 19 bp, Mus musculus
  siRNA target sequence for Cd8b (NM_009858.1,647-665).
ggagagcccgaattcactt

SEQ ID NO: 533376 - DNA, 19 bp, Mus musculus
  siRNA target sequence for Cd8b (NM_009858.1,650-668).
gagcccgaattcacttcat

SEQ ID NO: 533377 - DNA, 19 bp, Mus musculus
  siRNA target sequence for Cd8b (NM_009858.1,652-670).
gcccgaattcacttcatga

SEQ ID NO: 533378 - DNA, 19 bp, Mus musculus
  siRNA target sequence for Cd8b (NM_009858.1,653-671).
cccgaattcacttcatgaa

SEQ ID NO: 533379 - DNA, 19 bp, Mus musculus
  siRNA target sequence for Cd8b (NM_009858.1,654-672).
ccgaattcacttcatgaaa

SEQ ID NO: 533380 - DNA, 19 bp, Mus musculus
  siRNA target sequence for Cd9 (NM_007657.2,159-177).
ctgctcttcggatttaact

SEQ ID NO: 533381 - DNA, 19 bp, Mus musculus
  siRNA target sequence for Cd9 (NM_007657.2,162-180).
ctcttcggatttaacttca

SEQ ID NO: 533382 - DNA, 19 bp, Mus musculus
  siRNA target sequence for Cd9 (NM_007657.2,196-214).
gcattgcagtgcttgctat

SEQ ID NO: 533383 - DNA, 19 bp, Mus musculus
  siRNA target sequence for Cd9 (NM_007657.2,197-215).
cattgcagtgcttgctatt

SEQ ID NO: 533384 - DNA, 19 bp, Mus musculus
  siRNA target sequence for Cd9 (NM_007657.2,257-275).
cgagcaagagaataaccat

SEQ ID NO: 533385 - DNA, 19 bp, Mus musculus
  siRNA target sequence for Cd9 (NM_007657.2,289-307).
caggagtgtacattctgat

SEQ ID NO: 533386 - DNA, 19 bp, Mus musculus
  siRNA target sequence for Cd9 (NM_007657.2,408-426).
gtgatattcgccattgaga

SEQ ID NO: 533387 - DNA, 19 bp, Mus musculus
  siRNA target sequence for Cd9 (NM_007657.2,410-428).
gatattcgccattgagata

SEQ ID NO: 533388 - DNA, 19 bp, Mus musculus
  siRNA target sequence for Cd9 (NM_007657.2,453-471).
cacaaggatgaggtgatta

SEQ ID NO: 533389 - DNA, 19 bp, Mus musculus
  siRNA target sequence for Cd9 (NM_007657.2,494-512).
ggacacctaccaaaagtta

SEQ ID NO: 533390 - DNA, 19 bp, Mus musculus
  siRNA target sequence for Cd9 (NM_007657.2,530-548).
ccagcgggaaacactcaaa

SEQ ID NO: 533391 - DNA, 19 bp, Mus musculus
  siRNA target sequence for Cd9 (NM_007657.2,673-691).
gtgaggtcttcaacaacaa

SEQ ID NO: 533392 - DNA, 19 bp, Mus musculus
  siRNA target sequence for Cdc37l (NM_025950.1,231-249).
gagctctgttgcatgtaaa

SEQ ID NO: 533393 - DNA, 19 bp, Mus musculus
  siRNA target sequence for Cdc37l (NM_025950.1,435-453).
cattagcaaggatgttttt

SEQ ID NO: 533394 - DNA, 19 bp, Mus musculus
  siRNA target sequence for Cdc37l (NM_025950.1,495-513).
ggaagataaatcacaatca

SEQ ID NO: 533395 - DNA, 19 bp, Mus musculus
  siRNA target sequence for Cdc37l (NM_025950.1,499-517).
gataaatcacaatcattta

SEQ ID NO: 533396 - DNA, 19 bp, Mus musculus
  siRNA target sequence for Cdc37l (NM_025950.1,571-589).
gacagtcagaggtttttgt

SEQ ID NO: 533397 - DNA, 19 bp, Mus musculus
  siRNA target sequence for Cdc37l (NM_025950.1,573-591).
cagtcagaggtttttgtct

SEQ ID NO: 533398 - DNA, 19 bp, Mus musculus
  siRNA target sequence for Cdc37l (NM_025950.1,597-615).
cccacacctcgtatgtgaa

SEQ ID NO: 533399 - DNA, 19 bp, Mus musculus
  siRNA target sequence for Cdc37l (NM_025950.1,618-636).
gactgctaaatatcttatt

SEQ ID NO: 533400 - DNA, 19 bp, Mus musculus
  siRNA target sequence for Cdc37l (NM_025950.1,622-640).
gctaaatatcttattttat

SEQ ID NO: 533401 - DNA, 19 bp, Mus musculus
  siRNA target sequence for Cdc37l (NM_025950.1,666-684).
gaaaggcgctctaatggaa

SEQ ID NO: 533402 - DNA, 19 bp, Mus musculus
  siRNA target sequence for Cdc37l (NM_025950.1,671-689).
gcgctctaatggaacagat

SEQ ID NO: 533403 - DNA, 19 bp, Mus musculus
  siRNA target sequence for Cdc37l (NM_025950.1,672-690).
cgctctaatggaacagata

SEQ ID NO: 533404 - DNA, 19 bp, Mus musculus
  siRNA target sequence for Cdc37l (NM_025950.1,700-718).
gctgtggtaatgcagttta

SEQ ID NO: 533405 - DNA, 19 bp, Mus musculus
  siRNA target sequence for Cdc37l (NM_025950.1,701-719).
ctgtggtaatgcagtttat

SEQ ID NO: 533406 - DNA, 19 bp, Mus musculus
  siRNA target sequence for Cdc37l (NM_025950.1,755-773).
gaggctgttttcgtttgtt

SEQ ID NO: 533407 - DNA, 19 bp, Mus musculus
  siRNA target sequence for Cdc37l (NM_025950.1,790-808).
gcggaggaagaaggttatt

SEQ ID NO: 533408 - DNA, 19 bp, Mus musculus
  siRNA target sequence for Cdc37l (NM_025950.1,854-872).
gactttacgctcaatcaca

SEQ ID NO: 533409 - DNA, 19 bp, Mus musculus
  siRNA target sequence for Cdc37l (NM_025950.1,950-968).
cacagaatccagattctct

SEQ ID NO: 533410 - DNA, 19 bp, Mus musculus
  siRNA target sequence for Cdc42ep1 (NM_027219.1,497-515).
gccgtggtggggatgtctt

SEQ ID NO: 533411 - DNA, 19 bp, Mus musculus
  siRNA target sequence for Cdc42ep1 (NM_027219.1,739-757).
ctggtgatgggcaagctta

SEQ ID NO: 533412 - DNA, 19 bp, Mus musculus
  siRNA target sequence for Cdc42ep1 (NM_027219.1,742-760).
gtgatgggcaagcttagtt

SEQ ID NO: 533413 - DNA, 19 bp, Mus musculus
  siRNA target sequence for Cdc42ep1 (NM_027219.1,744-762).
gatgggcaagcttagtttt

SEQ ID NO: 533414 - DNA, 19 bp, Mus musculus
  siRNA target sequence for Cdc42ep1 (NM_027219.1,748-766).
ggcaagcttagttttgaca

SEQ ID NO: 533415 - DNA, 19 bp, Mus musculus
  siRNA target sequence for Cdc42ep1 (NM_027219.1,895-913).
caagaccgagagcaaagtt

SEQ ID NO: 533416 - DNA, 19 bp, Mus musculus
  siRNA target sequence for Cdc42ep1 (NM_027219.1,898-916).
gaccgagagcaaagttctt

SEQ ID NO: 533417 - DNA, 19 bp, Mus musculus
  siRNA target sequence for Cdc42ep3 (NM_026514.1,529-547).
ctgaaagcggctaacaaca

SEQ ID NO: 533418 - DNA, 19 bp, Mus musculus
  siRNA target sequence for Cdc42ep3 (NM_026514.1,770-788).
gcacctcggactcaatgtt

SEQ ID NO: 533419 - DNA, 19 bp, Mus musculus
  siRNA target sequence for Cdc42ep3 (NM_026514.1,778-796).
gactcaatgttcacagaaa

SEQ ID NO: 533420 - DNA, 19 bp, Mus musculus
  siRNA target sequence for Cdc42ep3 (NM_026514.1,799-817).
ccctccccggtgctcaaaa

SEQ ID NO: 533421 - DNA, 19 bp, Mus musculus
  siRNA target sequence for Cdc42ep3 (NM_026514.1,800-818).
cctccccggtgctcaaaaa

SEQ ID NO: 533422 - DNA, 19 bp, Mus musculus
  siRNA target sequence for Cdc42ep3 (NM_026514.1,801-819).
ctccccggtgctcaaaaat

SEQ ID NO: 533423 - DNA, 19 bp, Mus musculus
  siRNA target sequence for Cdc42ep3 (NM_026514.1,854-872).
ctctgatgctgcccttatt

SEQ ID NO: 533424 - DNA, 19 bp, Mus musculus
  siRNA target sequence for Cdc42ep3 (NM_026514.1,856-874).
ctgatgctgcccttattgt

SEQ ID NO: 533425 - DNA, 19 bp, Mus musculus
  siRNA target sequence for Cdc42ep3 (NM_026514.1,873-891).
gtccccagtgacatttcat

SEQ ID NO: 533426 - DNA, 19 bp, Mus musculus
  siRNA target sequence for Cdc42ep3 (NM_026514.1,905-923).
cctttgggcgtcctaagtt

SEQ ID NO: 533427 - DNA, 19 bp, Mus musculus
  siRNA target sequence for Cdc42ep3 (NM_026514.1,1212-1230).
ggatcttgggccttcactt

SEQ ID NO: 533428 - DNA, 19 bp, Mus musculus
  siRNA target sequence for Cdc42ep3 (NM_026514.1,1213-1231).
gatcttgggccttcacttt

SEQ ID NO: 533429 - DNA, 19 bp, Mus musculus
  siRNA target sequence for Cdc42ep3 (NM_026514.1,1223-1241).
cttcacttttggatgaagt

SEQ ID NO: 533430 - DNA, 19 bp, Mus musculus
  siRNA target sequence for Cdc42ep3 (NM_026514.1,1249-1267).
gtcatggataaaaataagt

SEQ ID NO: 533431 - DNA, 19 bp, Mus musculus
  siRNA target sequence for Cdc42ep4 (NM_020006.1,1002-1020).
gcgggactcagcactgttt

SEQ ID NO: 533432 - DNA, 19 bp, Mus musculus
  siRNA target sequence for Cdc42ep4 (NM_020006.1,1103-1121).
cgtccagccctgtgaagaa

SEQ ID NO: 533433 - DNA, 19 bp, Mus musculus
  siRNA target sequence for Cdc42ep4 (NM_020006.1,1310-1328).
ccatgctgggagatgttct

SEQ ID NO: 533434 - DNA, 19 bp, Mus musculus
  siRNA target sequence for Cdgap (NM_020260.1,46-64).
gccgccagtgcgtttggat

SEQ ID NO: 533435 - DNA, 19 bp, Mus musculus
  siRNA target sequence for Cdgap (NM_020260.1,92-110).
cgggacaggatgttccata

SEQ ID NO: 533436 - DNA, 19 bp, Mus musculus
  siRNA target sequence for Cdgap (NM_020260.1,95-113).
gacaggatgttccatatgt

SEQ ID NO: 533437 - DNA, 19 bp, Mus musculus
  siRNA target sequence for Cdgap (NM_020260.1,176-194).
cgggcatcacctcaaacat

SEQ ID NO: 533438 - DNA, 19 bp, Mus musculus
  siRNA target sequence for Cdgap (NM_020260.1,211-229).
gagtttggctcagatcaat

SEQ ID NO: 533439 - DNA, 19 bp, Mus musculus
  siRNA target sequence for Cdgap (NM_020260.1,387-405).
ggccagaatccagaatgtt

SEQ ID NO: 533440 - DNA, 19 bp, Mus musculus
  siRNA target sequence for Cdgap (NM_020260.1,389-407).
ccagaatccagaatgttat

SEQ ID NO: 533441 - DNA, 19 bp, Mus musculus
  siRNA target sequence for Cdgap (NM_020260.1,540-558).
caggagtaagaaaatcgaa

SEQ ID NO: 533442 - DNA, 19 bp, Mus musculus
  siRNA target sequence for Cdgap (NM_020260.1,549-567).
gaaaatcgaagccactatt

SEQ ID NO: 533443 - DNA, 19 bp, Mus musculus
  siRNA target sequence for Cdgap (NM_020260.1,555-573).
cgaagccactatttgcaat

SEQ ID NO: 533444 - DNA, 19 bp, Mus musculus
  siRNA target sequence for Cdgap (NM_020260.1,604-622).
cagcaggtggtgattgagt

SEQ ID NO: 533445 - DNA, 19 bp, Mus musculus
  siRNA target sequence for Cdgap (NM_020260.1,609-627).
ggtggtgattgagttcata

SEQ ID NO: 533446 - DNA, 19 bp, Mus musculus
  siRNA target sequence for Cdgap (NM_020260.1,636-654).
cgctgatcaaatcttcaat

SEQ ID NO: 533447 - DNA, 19 bp, Mus musculus
  siRNA target sequence for Cdgap (NM_020260.1,685-703).
gaaagccgtactatcacaa

SEQ ID NO: 533448 - DNA, 19 bp, Mus musculus
  siRNA target sequence for Cdgap (NM_020260.1,730-748).
ctgcccatgaagttggtaa

SEQ ID NO: 533449 - DNA, 19 bp, Mus musculus
  siRNA target sequence for Cdgap (NM_020260.1,998-1016).
cagtggaaaaggctactat

SEQ ID NO: 533450 - DNA, 19 bp, Mus musculus
  siRNA target sequence for Cdgap (NM_020260.1,1096-1114).
gtcaccactgggggatttt

SEQ ID NO: 533451 - DNA, 19 bp, Mus musculus
  siRNA target sequence for Cdgap (NM_020260.1,1315-1333).
cttctcgggatgttctaca

SEQ ID NO: 533452 - DNA, 19 bp, Mus musculus
  siRNA target sequence for Cdgap (NM_020260.1,1341-1359).
cgacagtcctggcaaatct

SEQ ID NO: 533453 - DNA, 19 bp, Mus musculus
  siRNA target sequence for Cdgap (NM_020260.1,1351-1369).
ggcaaatctgtcttcacaa

SEQ ID NO: 533454 - DNA, 19 bp, Mus musculus
  siRNA target sequence for Cdgap (NM_020260.1,1408-1426).
cgaaaggcgctcaacatct

SEQ ID NO: 533455 - DNA, 19 bp, Mus musculus
  siRNA target sequence for Cdgap (NM_020260.1,1524-1542).
ctccagcctcgaagagttt

SEQ ID NO: 533456 - DNA, 19 bp, Mus musculus
  siRNA target sequence for Cdgap (NM_020260.1,1529-1547).
gcctcgaagagttttcttt

SEQ ID NO: 533457 - DNA, 19 bp, Mus musculus
  siRNA target sequence for Cdgap (NM_020260.1,1609-1627).
ccaggctctgttactaaga

SEQ ID NO: 533458 - DNA, 19 bp, Mus musculus
  siRNA target sequence for Cdgap (NM_020260.1,1610-1628).
caggctctgttactaagaa

SEQ ID NO: 533459 - DNA, 19 bp, Mus musculus
  siRNA target sequence for Cdgap (NM_020260.1,1862-1880).
ggactgaaccattgattct

SEQ ID NO: 533460 - DNA, 19 bp, Mus musculus
  siRNA target sequence for Cdgap (NM_020260.1,1933-1951).
caacaggaactgaaaatca

SEQ ID NO: 533461 - DNA, 19 bp, Mus musculus
  siRNA target sequence for Cdgap (NM_020260.1,1939-1957).
gaactgaaaatcattgaat

SEQ ID NO: 533462 - DNA, 19 bp, Mus musculus
  siRNA target sequence for Cdgap (NM_020260.1,2216-2234).
gtctagcgcctctggaaat

SEQ ID NO: 533463 - DNA, 19 bp, Mus musculus
  siRNA target sequence for Cdgap (NM_020260.1,2258-2276).
ctccggctaggatagagat

SEQ ID NO: 533464 - DNA, 19 bp, Mus musculus
  siRNA target sequence for Cdgap (NM_020260.1,2274-2292).
gataggaggcccaaggaat

SEQ ID NO: 533465 - DNA, 19 bp, Mus musculus
  siRNA target sequence for Cdh17 (NM_019753.2,121-139).
gtcttctcacactttattt

SEQ ID NO: 533466 - DNA, 19 bp, Mus musculus
  siRNA target sequence for Cdh17 (NM_019753.2,153-171).
ggcgaagaagggaagttca

SEQ ID NO: 533467 - DNA, 19 bp, Mus musculus
  siRNA target sequence for Cdh17 (NM_019753.2,177-195).
cccctgaagcccatgacat

SEQ ID NO: 533468 - DNA, 19 bp, Mus musculus
  siRNA target sequence for Cdh17 (NM_019753.2,178-196).
ccctgaagcccatgacatt

SEQ ID NO: 533469 - DNA, 19 bp, Mus musculus
  siRNA target sequence for Cdh17 (NM_019753.2,186-204).
cccatgacattctccattt

SEQ ID NO: 533470 - DNA, 19 bp, Mus musculus
  siRNA target sequence for Cdh17 (NM_019753.2,191-209).
gacattctccatttttgaa

SEQ ID NO: 533471 - DNA, 19 bp, Mus musculus
  siRNA target sequence for Cdh17 (NM_019753.2,216-234).
gaaccgagtcaagtcatat

SEQ ID NO: 533472 - DNA, 19 bp, Mus musculus
  siRNA target sequence for Cdh17 (NM_019753.2,220-238).
cgagtcaagtcatattcca

SEQ ID NO: 533473 - DNA, 19 bp, Mus musculus
  siRNA target sequence for Cdh17 (NM_019753.2,277-295).
cgggagagacagatggtat

SEQ ID NO: 533474 - DNA, 19 bp, Mus musculus
  siRNA target sequence for Cdh17 (NM_019753.2,386-404).
ggattctcatggagctata

SEQ ID NO: 533475 - DNA, 19 bp, Mus musculus
  siRNA target sequence for Cdh17 (NM_019753.2,460-478).
ccacgtttctccagtcaaa

SEQ ID NO: 533476 - DNA, 19 bp, Mus musculus
  siRNA target sequence for Cdh17 (NM_019753.2,461-479).
cacgtttctccagtcaaaa

SEQ ID NO: 533477 - DNA, 19 bp, Mus musculus
  siRNA target sequence for Cdh17 (NM_019753.2,463-481).
cgtttctccagtcaaaata

SEQ ID NO: 533478 - DNA, 19 bp, Mus musculus
  siRNA target sequence for Cdh17 (NM_019753.2,527-545).
gtatgtcaatgctacagat

SEQ ID NO: 533479 - DNA, 19 bp, Mus musculus
  siRNA target sequence for Cdh17 (NM_019753.2,565-583).
ccaatggccagctttttta

SEQ ID NO: 533480 - DNA, 19 bp, Mus musculus
  siRNA target sequence for Cdh17 (NM_019753.2,566-584).
caatggccagcttttttat

SEQ ID NO: 533481 - DNA, 19 bp, Mus musculus
  siRNA target sequence for Cdh17 (NM_019753.2,571-589).
gccagcttttttatcaaat

SEQ ID NO: 533482 - DNA, 19 bp, Mus musculus
  siRNA target sequence for Cdh17 (NM_019753.2,576-594).
cttttttatcaaattgtca

SEQ ID NO: 533483 - DNA, 19 bp, Mus musculus
  siRNA target sequence for Cdh17 (NM_019753.2,603-621).
ccccaaatcaacgatgtta

SEQ ID NO: 533484 - DNA, 19 bp, Mus musculus
  siRNA target sequence for Cdh17 (NM_019753.2,604-622).
cccaaatcaacgatgttat

SEQ ID NO: 533485 - DNA, 19 bp, Mus musculus
  siRNA target sequence for Cdh17 (NM_019753.2,606-624).
caaatcaacgatgttatgt

SEQ ID NO: 533486 - DNA, 19 bp, Mus musculus
  siRNA target sequence for Cdh17 (NM_019753.2,611-629).
caacgatgttatgtacttt

SEQ ID NO: 533487 - DNA, 19 bp, Mus musculus
  siRNA target sequence for Cdh17 (NM_019753.2,614-632).
cgatgttatgtactttcaa

SEQ ID NO: 533488 - DNA, 19 bp, Mus musculus
  siRNA target sequence for Cdh17 (NM_019753.2,741-759).
ggccagagtgagaattcct

SEQ ID NO: 533489 - DNA, 19 bp, Mus musculus
  siRNA target sequence for Cdh17 (NM_019753.2,742-760).
gccagagtgagaattcctt

SEQ ID NO: 533490 - DNA, 19 bp, Mus musculus
  siRNA target sequence for Cdh17 (NM_019753.2,819-837).
cccgtggagattagagaaa

SEQ ID NO: 533491 - DNA, 19 bp, Mus musculus
  siRNA target sequence for Cdh17 (NM_019753.2,943-961).
cgatcgaccaagaaggaaa

SEQ ID NO: 533492 - DNA, 19 bp, Mus musculus
  siRNA target sequence for Cdh17 (NM_019753.2,944-962).
gatcgaccaagaaggaaat

SEQ ID NO: 533493 - DNA, 19 bp, Mus musculus
  siRNA target sequence for Cdh17 (NM_019753.2,984-1002).
gaccgggaggaaaagaact

SEQ ID NO: 533494 - DNA, 19 bp, Mus musculus
  siRNA target sequence for Cdh17 (NM_019753.2,1018-1036).
caactgccaaggatgagaa

SEQ ID NO: 533495 - DNA, 19 bp, Mus musculus
  siRNA target sequence for Cdh17 (NM_019753.2,1051-1069).
catatccactggaaattta

SEQ ID NO: 533496 - DNA, 19 bp, Mus musculus
  siRNA target sequence for Cdh17 (NM_019753.2,1073-1091).
gaaagttattgacattaat

SEQ ID NO: 533497 - DNA, 19 bp, Mus musculus
  siRNA target sequence for Cdh17 (NM_019753.2,1110-1128).
ctgtctccagtgactgtat

SEQ ID NO: 533498 - DNA, 19 bp, Mus musculus
  siRNA target sequence for Cdh17 (NM_019753.2,1112-1130).
gtctccagtgactgtattt

SEQ ID NO: 533499 - DNA, 19 bp, Mus musculus
  siRNA target sequence for Cdh17 (NM_019753.2,1117-1135).
cagtgactgtatttgaagt

SEQ ID NO: 533500 - DNA, 19 bp, Mus musculus
  siRNA target sequence for Cdh17 (NM_019753.2,1197-1215).
gctaacaacatcaacagta

SEQ ID NO: 533501 - DNA, 19 bp, Mus musculus
  siRNA target sequence for Cdh17 (NM_019753.2,1198-1216).
ctaacaacatcaacagtat

SEQ ID NO: 533502 - DNA, 19 bp, Mus musculus
  siRNA target sequence for Cdh17 (NM_019753.2,1258-1276).
cagatggactttttctcat

SEQ ID NO: 533503 - DNA, 19 bp, Mus musculus
  siRNA target sequence for Cdh17 (NM_019753.2,1289-1307).
gggaaaggttcagttaagt

SEQ ID NO: 533504 - DNA, 19 bp, Mus musculus
  siRNA target sequence for Cdh17 (NM_019753.2,1290-1308).
ggaaaggttcagttaagta

SEQ ID NO: 533505 - DNA, 19 bp, Mus musculus
  siRNA target sequence for Cdh17 (NM_019753.2,1306-1324).
gtaaacagtccttgaagaa

SEQ ID NO: 533506 - DNA, 19 bp, Mus musculus
  siRNA target sequence for Cdh17 (NM_019753.2,1335-1353).
cctcagtacaacttaagta

SEQ ID NO: 533507 - DNA, 19 bp, Mus musculus
  siRNA target sequence for Cdh17 (NM_019753.2,1336-1354).
ctcagtacaacttaagtat

SEQ ID NO: 533508 - DNA, 19 bp, Mus musculus
  siRNA target sequence for Cdh17 (NM_019753.2,1359-1377).
gtgtctgacgtagatttca

SEQ ID NO: 533509 - DNA, 19 bp, Mus musculus
  siRNA target sequence for Cdh17 (NM_019753.2,1379-1397).
gactctctgttatattcaa

SEQ ID NO: 533510 - DNA, 19 bp, Mus musculus
  siRNA target sequence for Cdh17 (NM_019753.2,1398-1416).
gtcaacgttattgatatca

SEQ ID NO: 533511 - DNA, 19 bp, Mus musculus
  siRNA target sequence for Cdh17 (NM_019753.2,1400-1418).
caacgttattgatatcaat

SEQ ID NO: 533512 - DNA, 19 bp, Mus musculus
  siRNA target sequence for Cdh17 (NM_019753.2,1403-1421).
cgttattgatatcaatgat

SEQ ID NO: 533513 - DNA, 19 bp, Mus musculus
  siRNA target sequence for Cdh17 (NM_019753.2,1428-1446).
cccatctttgaaacatcaa

SEQ ID NO: 533514 - DNA, 19 bp, Mus musculus
  siRNA target sequence for Cdh17 (NM_019753.2,1430-1448).
catctttgaaacatcaaat

SEQ ID NO: 533515 - DNA, 19 bp, Mus musculus
  siRNA target sequence for Cdh17 (NM_019753.2,1485-1503).
ggatccaccatcctaatca

SEQ ID NO: 533516 - DNA, 19 bp, Mus musculus
  siRNA target sequence for Cdh17 (NM_019753.2,1486-1504).
gatccaccatcctaatcat

SEQ ID NO: 533517 - DNA, 19 bp, Mus musculus
  siRNA target sequence for Cdh17 (NM_019753.2,1607-1625).
cacgaccaatgcaggatat

SEQ ID NO: 533518 - DNA, 19 bp, Mus musculus
  siRNA target sequence for Cdh17 (NM_019753.2,1609-1627).
cgaccaatgcaggatatgt

SEQ ID NO: 533519 - DNA, 19 bp, Mus musculus
  siRNA target sequence for Cdh17 (NM_019753.2,1612-1630).
ccaatgcaggatatgtcaa

SEQ ID NO: 533520 - DNA, 19 bp, Mus musculus
  siRNA target sequence for Cdh17 (NM_019753.2,1618-1636).
caggatatgtcaagatcaa

SEQ ID NO: 533521 - DNA, 19 bp, Mus musculus
  siRNA target sequence for Cdh17 (NM_019753.2,1631-1649).
gatcaaaaagcctcttgat

SEQ ID NO: 533522 - DNA, 19 bp, Mus musculus
  siRNA target sequence for Cdh17 (NM_019753.2,1754-1772).
gattgtgacggatgtgaat

SEQ ID NO: 533523 - DNA, 19 bp, Mus musculus
  siRNA target sequence for Cdh17 (NM_019753.2,1782-1800).
gtgttcccccagcgaatat

SEQ ID NO: 533524 - DNA, 19 bp, Mus musculus
  siRNA target sequence for Cdh17 (NM_019753.2,1787-1805).
cccccagcgaatattccaa

SEQ ID NO: 533525 - DNA, 19 bp, Mus musculus
  siRNA target sequence for Cdh17 (NM_019753.2,1909-1927).
gaggctggcttaaaatcga

SEQ ID NO: 533526 - DNA, 19 bp, Mus musculus
  siRNA target sequence for Cdh17 (NM_019753.2,1928-1946).
ctctgtcactggtgagata

SEQ ID NO: 533527 - DNA, 19 bp, Mus musculus
  siRNA target sequence for Cdh17 (NM_019753.2,1932-1950).
gtcactggtgagatattta

SEQ ID NO: 533528 - DNA, 19 bp, Mus musculus
  siRNA target sequence for Cdh17 (NM_019753.2,1934-1952).
cactggtgagatatttagt

SEQ ID NO: 533529 - DNA, 19 bp, Mus musculus
  siRNA target sequence for Cdh17 (NM_019753.2,1960-1978).
cgctggatagggaaacaga

SEQ ID NO: 533530 - DNA, 19 bp, Mus musculus
  siRNA target sequence for Cdh17 (NM_019753.2,1981-1999).
gtgtgtatcgagtacaagt

SEQ ID NO: 533531 - DNA, 19 bp, Mus musculus
  siRNA target sequence for Cdh17 (NM_019753.2,2032-2050).
gttctacggcagatttcca

SEQ ID NO: 533532 - DNA, 19 bp, Mus musculus
  siRNA target sequence for Cdh17 (NM_019753.2,2232-2250).
gactgggaagtttcaaaaa

SEQ ID NO: 533533 - DNA, 19 bp, Mus musculus
  siRNA target sequence for Cdh17 (NM_019753.2,2301-2319).
caagtttataacattccaa

SEQ ID NO: 533534 - DNA, 19 bp, Mus musculus
  siRNA target sequence for Cdh17 (NM_019753.2,2312-2330).
cattccaatccgcatcaat

SEQ ID NO: 533535 - DNA, 19 bp, Mus musculus
  siRNA target sequence for Cdh17 (NM_019753.2,2446-2464).
gcatggcagttggtatact

SEQ ID NO: 533536 - DNA, 19 bp, Mus musculus
  siRNA target sequence for Cdh17 (NM_019753.2,2478-2496).
ctggtcattggtataattt

SEQ ID NO: 533537 - DNA, 19 bp, Mus musculus
  siRNA target sequence for Cdh17 (NM_019753.2,2510-2528).
catccgcatgaggaaagat

SEQ ID NO: 533538 - DNA, 19 bp, Mus musculus
  siRNA target sequence for Cdh17 (NM_019753.2,2513-2531).
ccgcatgaggaaagataaa

SEQ ID NO: 533539 - DNA, 19 bp, Mus musculus
  siRNA target sequence for Cdh17 (NM_019753.2,2515-2533).
gcatgaggaaagataaagt

SEQ ID NO: 533540 - DNA, 19 bp, Mus musculus
  siRNA target sequence for Cdh17 (NM_019753.2,2516-2534).
catgaggaaagataaagtt

SEQ ID NO: 533541 - DNA, 19 bp, Mus musculus
  siRNA target sequence for Cdh17 (NM_019753.2,2542-2560).
cgcagtcccctgagaataa

SEQ ID NO: 533542 - DNA, 19 bp, Mus musculus
  siRNA target sequence for Cdh23 (NM_023370.1,216-234).
ggaggcctcccgattcttt

SEQ ID NO: 533543 - DNA, 19 bp, Mus musculus
  siRNA target sequence for Cdh23 (NM_023370.1,554-572).
gcatagtcaccgtgattca

SEQ ID NO: 533544 - DNA, 19 bp, Mus musculus
  siRNA target sequence for Cdh23 (NM_023370.1,567-585).
gattcaggagctagactat

SEQ ID NO: 533545 - DNA, 19 bp, Mus musculus
  siRNA target sequence for Cdh23 (NM_023370.1,715-733).
ctgccctacagtactaaca

SEQ ID NO: 533546 - DNA, 19 bp, Mus musculus
  siRNA target sequence for Cdh23 (NM_023370.1,719-737).
cctacagtactaacatcta

SEQ ID NO: 533547 - DNA, 19 bp, Mus musculus
  siRNA target sequence for Cdh23 (NM_023370.1,805-823).
cgtgggattggctacacta

SEQ ID NO: 533548 - DNA, 19 bp, Mus musculus
  siRNA target sequence for Cdh23 (NM_023370.1,809-827).
ggattggctacactattgt

SEQ ID NO: 533549 - DNA, 19 bp, Mus musculus
  siRNA target sequence for Cdh23 (NM_023370.1,945-963).
gggcactgagctgaatgat

SEQ ID NO: 533550 - DNA, 19 bp, Mus musculus
  siRNA target sequence for Cdh23 (NM_023370.1,1056-1074).
gtacagcgtggccattaca

SEQ ID NO: 533551 - DNA, 19 bp, Mus musculus
  siRNA target sequence for Cdh23 (NM_023370.1,1326-1344).
ctatgccaaggtgaagatt

SEQ ID NO: 533552 - DNA, 19 bp, Mus musculus
  siRNA target sequence for Cdh23 (NM_023370.1,1348-1366).
ctcatcaatgaaaatgaca

SEQ ID NO: 533553 - DNA, 19 bp, Mus musculus
  siRNA target sequence for Cdh23 (NM_023370.1,1458-1476).
caatgacgtgggcactttt

SEQ ID NO: 533554 - DNA, 19 bp, Mus musculus
  siRNA target sequence for Cdh23 (NM_023370.1,1469-1487).
gcacttttggggaagtcaa

SEQ ID NO: 533555 - DNA, 19 bp, Mus musculus
  siRNA target sequence for Cdh23 (NM_023370.1,1477-1495).
ggggaagtcaactacttct

SEQ ID NO: 533556 - DNA, 19 bp, Mus musculus
  siRNA target sequence for Cdh23 (NM_023370.1,1478-1496).
gggaagtcaactacttctt

SEQ ID NO: 533557 - DNA, 19 bp, Mus musculus
  siRNA target sequence for Cdh23 (NM_023370.1,1743-1761).
gcggctcagggcaacagat

SEQ ID NO: 533558 - DNA, 19 bp, Mus musculus
  siRNA target sequence for Cdh23 (NM_023370.1,1830-1848).
cgacatcagcatatatgaa

SEQ ID NO: 533559 - DNA, 19 bp, Mus musculus
  siRNA target sequence for Cdh23 (NM_023370.1,2057-2075).
caggagccacagtgttgtt

SEQ ID NO: 533560 - DNA, 19 bp, Mus musculus
  siRNA target sequence for Cdh23 (NM_023370.1,2113-2131).
gggcaggagtctatcatct

SEQ ID NO: 533561 - DNA, 19 bp, Mus musculus
  siRNA target sequence for Cdh23 (NM_023370.1,2114-2132).
ggcaggagtctatcatcta

SEQ ID NO: 533562 - DNA, 19 bp, Mus musculus
  siRNA target sequence for Cdh23 (NM_023370.1,2148-2166).
ctcgcagtttcgcatcaat

SEQ ID NO: 533563 - DNA, 19 bp, Mus musculus
  siRNA target sequence for Cdh23 (NM_023370.1,2211-2229).
gaccaagtctgaatacata

SEQ ID NO: 533564 - DNA, 19 bp, Mus musculus
  siRNA target sequence for Cdh23 (NM_023370.1,2213-2231).
ccaagtctgaatacatact

SEQ ID NO: 533565 - DNA, 19 bp, Mus musculus
  siRNA target sequence for Cdh23 (NM_023370.1,2259-2277).
gggccacaaccagaaaact

SEQ ID NO: 533566 - DNA, 19 bp, Mus musculus
  siRNA target sequence for Cdh23 (NM_023370.1,2279-2297).
gcattgccacagtgaatgt

SEQ ID NO: 533567 - DNA, 19 bp, Mus musculus
  siRNA target sequence for Cdh23 (NM_023370.1,2455-2473).
ccccccaacaagttctata

SEQ ID NO: 533568 - DNA, 19 bp, Mus musculus
  siRNA target sequence for Cdh23 (NM_023370.1,2457-2475).
ccccaacaagttctatagt

SEQ ID NO: 533569 - DNA, 19 bp, Mus musculus
  siRNA target sequence for Cdh23 (NM_023370.1,2553-2571).
gctcatgcgaaagatcatt

SEQ ID NO: 533570 - DNA, 19 bp, Mus musculus
  siRNA target sequence for Cdh23 (NM_023370.1,3048-3066).
gctgaactgcacagacaat

SEQ ID NO: 533571 - DNA, 19 bp, Mus musculus
  siRNA target sequence for Cdh23 (NM_023370.1,3114-3132).
cgtggatgggaagtttagt

SEQ ID NO: 533572 - DNA, 19 bp, Mus musculus
  siRNA target sequence for Cdh23 (NM_023370.1,3420-3438).
catcctccacggtaaccat

SEQ ID NO: 533573 - DNA, 19 bp, Mus musculus
  siRNA target sequence for Cdh23 (NM_023370.1,3897-3915).
ctacgtgacacttctcaat

SEQ ID NO: 533574 - DNA, 19 bp, Mus musculus
  siRNA target sequence for Cdh23 (NM_023370.1,3950-3968).
cctacgaggcagtcatcat

SEQ ID NO: 533575 - DNA, 19 bp, Mus musculus
  siRNA target sequence for Cdh23 (NM_023370.1,4000-4018).
cgggtgcaagcctattcta

SEQ ID NO: 533576 - DNA, 19 bp, Mus musculus
  siRNA target sequence for Cdh23 (NM_023370.1,4005-4023).
gcaagcctattctatcgat

SEQ ID NO: 533577 - DNA, 19 bp, Mus musculus
  siRNA target sequence for Cdh23 (NM_023370.1,4006-4024).
caagcctattctatcgata

SEQ ID NO: 533578 - DNA, 19 bp, Mus musculus
  siRNA target sequence for Cdh23 (NM_023370.1,4010-4028).
cctattctatcgataacct

SEQ ID NO: 533579 - DNA, 19 bp, Mus musculus
  siRNA target sequence for Cdh23 (NM_023370.1,4045-4063).
cgcttcgacgcctatacca

SEQ ID NO: 533580 - DNA, 19 bp, Mus musculus
  siRNA target sequence for Cdh23 (NM_023370.1,4074-4092).
caaagccctcttcaagata

SEQ ID NO: 533581 - DNA, 19 bp, Mus musculus
  siRNA target sequence for Cdh23 (NM_023370.1,4136-4154).
gagagaagggcgacttcta

SEQ ID NO: 533582 - DNA, 19 bp, Mus musculus
  siRNA target sequence for Cdh23 (NM_023370.1,4144-4162).
ggcgacttctacacattga

SEQ ID NO: 533583 - DNA, 19 bp, Mus musculus
  siRNA target sequence for Cdh23 (NM_023370.1,4146-4164).
cgacttctacacattgaca

SEQ ID NO: 533584 - DNA, 19 bp, Mus musculus
  siRNA target sequence for Cdh23 (NM_023370.1,4371-4389).
cctggcctctggtaacatt

SEQ ID NO: 533585 - DNA, 19 bp, Mus musculus
  siRNA target sequence for Cdh23 (NM_023370.1,4393-4411).
ggggcctttgagattatca

SEQ ID NO: 533586 - DNA, 19 bp, Mus musculus
  siRNA target sequence for Cdh23 (NM_023370.1,4520-4538).
ggaagaaagaccacatctt

SEQ ID NO: 533587 - DNA, 19 bp, Mus musculus
  siRNA target sequence for Cdh23 (NM_023370.1,4663-4681).
cgtgacatcgggatcaaca

SEQ ID NO: 533588 - DNA, 19 bp, Mus musculus
  siRNA target sequence for Cdh23 (NM_023370.1,4737-4755).
ccgtatcagcggtgagatt

SEQ ID NO: 533589 - DNA, 19 bp, Mus musculus
  siRNA target sequence for Cdh23 (NM_023370.1,4780-4798).
cgtgagcgccagaacttct

SEQ ID NO: 533590 - DNA, 19 bp, Mus musculus
  siRNA target sequence for Cdh23 (NM_023370.1,4781-4799).
gtgagcgccagaacttcta

SEQ ID NO: 533591 - DNA, 19 bp, Mus musculus
  siRNA target sequence for Cdh23 (NM_023370.1,4868-4886).
ctatcgtggacgagaatga

SEQ ID NO: 533592 - DNA, 19 bp, Mus musculus
  siRNA target sequence for Cdh23 (NM_023370.1,4933-4951).
gagggcccagacacaatca

SEQ ID NO: 533593 - DNA, 19 bp, Mus musculus
  siRNA target sequence for Cdh23 (NM_023370.1,4936-4954).
ggcccagacacaatcaaca

SEQ ID NO: 533594 - DNA, 19 bp, Mus musculus
  siRNA target sequence for Cdh23 (NM_023370.1,5023-5041).
gtggcaggcaacatcatca

SEQ ID NO: 533595 - DNA, 19 bp, Mus musculus
  siRNA target sequence for Cdh23 (NM_023370.1,5061-5079).
gcacacgggtgtcattact

SEQ ID NO: 533596 - DNA, 19 bp, Mus musculus
  siRNA target sequence for Cdh23 (NM_023370.1,5084-5102).
ccaaggaactagactatga

SEQ ID NO: 533597 - DNA, 19 bp, Mus musculus
  siRNA target sequence for Cdh23 (NM_023370.1,5114-5132).
gccgctacaccctgattgt

SEQ ID NO: 533598 - DNA, 19 bp, Mus musculus
  siRNA target sequence for Cdh23 (NM_023370.1,5116-5134).
cgctacaccctgattgtca

SEQ ID NO: 533599 - DNA, 19 bp, Mus musculus
  siRNA target sequence for Cdh23 (NM_023370.1,5143-5161).
gaccagtgtcccatcttgt

SEQ ID NO: 533600 - DNA, 19 bp, Mus musculus
  siRNA target sequence for Cdh23 (NM_023370.1,5164-5182).
caccgcctcacctctacta

SEQ ID NO: 533601 - DNA, 19 bp, Mus musculus
  siRNA target sequence for Cdh23 (NM_023370.1,5362-5380).
ccactaggggagtttgtga

SEQ ID NO: 533602 - DNA, 19 bp, Mus musculus
  siRNA target sequence for Cdh23 (NM_023370.1,5434-5452).
gagaccatcgccttctaca

SEQ ID NO: 533603 - DNA, 19 bp, Mus musculus
  siRNA target sequence for Cdh23 (NM_023370.1,5544-5562).
cccagtgctactgaatctt

SEQ ID NO: 533604 - DNA, 19 bp, Mus musculus
  siRNA target sequence for Cdh23 (NM_023370.1,5707-5725).
gccacgacagggattgtca

SEQ ID NO: 533605 - DNA, 19 bp, Mus musculus
  siRNA target sequence for Cdh23 (NM_023370.1,5763-5781).
gtacaggctgactgtttct

SEQ ID NO: 533606 - DNA, 19 bp, Mus musculus
  siRNA target sequence for Cdh23 (NM_023370.1,5816-5834).
ggaaggactttgacttact

SEQ ID NO: 533607 - DNA, 19 bp, Mus musculus
  siRNA target sequence for Cdh23 (NM_023370.1,5958-5976).
ggccctggacgctgatgaa

SEQ ID NO: 533608 - DNA, 19 bp, Mus musculus
  siRNA target sequence for Cdh23 (NM_023370.1,6065-6083).
ggtccgggatcatcattga

SEQ ID NO: 533609 - DNA, 19 bp, Mus musculus
  siRNA target sequence for Cdh23 (NM_023370.1,6157-6175).
gcccacctgttcatcacta

SEQ ID NO: 533610 - DNA, 19 bp, Mus musculus
  siRNA target sequence for Cdh23 (NM_023370.1,6158-6176).
cccacctgttcatcactat

SEQ ID NO: 533611 - DNA, 19 bp, Mus musculus
  siRNA target sequence for Cdh23 (NM_023370.1,6173-6191).
ctatcctagatgacaatga

SEQ ID NO: 533612 - DNA, 19 bp, Mus musculus
  siRNA target sequence for Cdh23 (NM_023370.1,6204-6222).
cttcagtcctcccacttat

SEQ ID NO: 533613 - DNA, 19 bp, Mus musculus
  siRNA target sequence for Cdh23 (NM_023370.1,6254-6272).
gattctcagtccttcaagt

SEQ ID NO: 533614 - DNA, 19 bp, Mus musculus
  siRNA target sequence for Cdh23 (NM_023370.1,6486-6504).
cctgatcgacgacatcaat

SEQ ID NO: 533615 - DNA, 19 bp, Mus musculus
  siRNA target sequence for Cdh23 (NM_023370.1,6614-6632).
ccaaactggagtatcacat

SEQ ID NO: 533616 - DNA, 19 bp, Mus musculus
  siRNA target sequence for Cdh23 (NM_023370.1,6619-6637).
ctggagtatcacatcatca

SEQ ID NO: 533617 - DNA, 19 bp, Mus musculus
  siRNA target sequence for Cdh23 (NM_023370.1,6685-6703).
gacgcctttgctgtgaata

SEQ ID NO: 533618 - DNA, 19 bp, Mus musculus
  siRNA target sequence for Cdh23 (NM_023370.1,6744-6762).
cgagctggttgcaacctat

SEQ ID NO: 533619 - DNA, 19 bp, Mus musculus
  siRNA target sequence for Cdh23 (NM_023370.1,6763-6781).
gaggtcacgctctcagtaa

SEQ ID NO: 533620 - DNA, 19 bp, Mus musculus
  siRNA target sequence for Cdh23 (NM_023370.1,7067-7085).
ccaaccggactgtagacta

SEQ ID NO: 533621 - DNA, 19 bp, Mus musculus
  siRNA target sequence for Cdh23 (NM_023370.1,7090-7108).
gaagtgcactggcttaact

SEQ ID NO: 533622 - DNA, 19 bp, Mus musculus
  siRNA target sequence for Cdh23 (NM_023370.1,7167-7185).
cctggaaattgtagacatt

SEQ ID NO: 533623 - DNA, 19 bp, Mus musculus
  siRNA target sequence for Cdh23 (NM_023370.1,7168-7186).
ctggaaattgtagacatta

SEQ ID NO: 533624 - DNA, 19 bp, Mus musculus
  siRNA target sequence for Cdh23 (NM_023370.1,7227-7245).
ggccgtttttgaggatata

SEQ ID NO: 533625 - DNA, 19 bp, Mus musculus
  siRNA target sequence for Cdh23 (NM_023370.1,7404-7422).
ggaccactatatcttaact

SEQ ID NO: 533626 - DNA, 19 bp, Mus musculus
  siRNA target sequence for Cdh23 (NM_023370.1,7708-7726).
ccgctgcaatcctatgaga

SEQ ID NO: 533627 - DNA, 19 bp, Mus musculus
  siRNA target sequence for Cdh23 (NM_023370.1,7797-7815).
ggaggtcatcgatgtcaat

SEQ ID NO: 533628 - DNA, 19 bp, Mus musculus
  siRNA target sequence for Cdh23 (NM_023370.1,7875-7893).
gatcccgctacgttccaat

SEQ ID NO: 533629 - DNA, 19 bp, Mus musculus
  siRNA target sequence for Cdh23 (NM_023370.1,7879-7897).
ccgctacgttccaatgtgt

SEQ ID NO: 533630 - DNA, 19 bp, Mus musculus
  siRNA target sequence for Cdh23 (NM_023370.1,7880-7898).
cgctacgttccaatgtgta

SEQ ID NO: 533631 - DNA, 19 bp, Mus musculus
  siRNA target sequence for Cdh23 (NM_023370.1,7881-7899).
gctacgttccaatgtgtat

SEQ ID NO: 533632 - DNA, 19 bp, Mus musculus
  siRNA target sequence for Cdh23 (NM_023370.1,7886-7904).
gttccaatgtgtatgaagt

SEQ ID NO: 533633 - DNA, 19 bp, Mus musculus
  siRNA target sequence for Cdh23 (NM_023370.1,7894-7912).
gtgtatgaagtctatgcta

SEQ ID NO: 533634 - DNA, 19 bp, Mus musculus
  siRNA target sequence for Cdh23 (NM_023370.1,7975-7993).
cgtgactgggagtacttca

SEQ ID NO: 533635 - DNA, 19 bp, Mus musculus
  siRNA target sequence for Cdh23 (NM_023370.1,8054-8072).
ccgtgtacagtctcatctt

SEQ ID NO: 533636 - DNA, 19 bp, Mus musculus
  siRNA target sequence for Cdh23 (NM_023370.1,8274-8292).
gggtcccaacgccattgta

SEQ ID NO: 533637 - DNA, 19 bp, Mus musculus
  siRNA target sequence for Cdh23 (NM_023370.1,8275-8293).
ggtcccaacgccattgtat

SEQ ID NO: 533638 - DNA, 19 bp, Mus musculus
  siRNA target sequence for Cdh23 (NM_023370.1,8276-8294).
gtcccaacgccattgtata

SEQ ID NO: 533639 - DNA, 19 bp, Mus musculus
  siRNA target sequence for Cdh23 (NM_023370.1,8279-8297).
ccaacgccattgtatacta

SEQ ID NO: 533640 - DNA, 19 bp, Mus musculus
  siRNA target sequence for Cdh23 (NM_023370.1,8309-8327).
ctggtgacgaggacaagaa

SEQ ID NO: 533641 - DNA, 19 bp, Mus musculus
  siRNA target sequence for Cdh23 (NM_023370.1,8311-8329).
ggtgacgaggacaagaatt

SEQ ID NO: 533642 - DNA, 19 bp, Mus musculus
  siRNA target sequence for Cdh23 (NM_023370.1,8312-8330).
gtgacgaggacaagaattt

SEQ ID NO: 533643 - DNA, 19 bp, Mus musculus
  siRNA target sequence for Cdh23 (NM_023370.1,8617-8635).
gcggacattggcaacaaca

SEQ ID NO: 533644 - DNA, 19 bp, Mus musculus
  siRNA target sequence for Cdh23 (NM_023370.1,8650-8668).
ggcattctggctatccatt

SEQ ID NO: 533645 - DNA, 19 bp, Mus musculus
  siRNA target sequence for Cdh23 (NM_023370.1,8651-8669).
gcattctggctatccatta

SEQ ID NO: 533646 - DNA, 19 bp, Mus musculus
  siRNA target sequence for Cdh23 (NM_023370.1,8867-8885).
gcgtgaagatcgtcatcaa

SEQ ID NO: 533647 - DNA, 19 bp, Mus musculus
  siRNA target sequence for Cdh23 (NM_023370.1,8977-8995).
cagttccacgtggatatga

SEQ ID NO: 533648 - DNA, 19 bp, Mus musculus
  siRNA target sequence for Cdh23 (NM_023370.1,9014-9032).
cgcagacagaactgcttat

SEQ ID NO: 533649 - DNA, 19 bp, Mus musculus
  siRNA target sequence for Cdh23 (NM_023370.1,9244-9262).
ctcttcgtcctcatgaact

SEQ ID NO: 533650 - DNA, 19 bp, Mus musculus
  siRNA target sequence for Cdh23 (NM_023370.1,9318-9336).
ggggaaccgtggcttcatt

SEQ ID NO: 533651 - DNA, 19 bp, Mus musculus
  siRNA target sequence for Cdh23 (NM_023370.1,9348-9366).
catgcccaataccaacaaa

SEQ ID NO: 533652 - DNA, 19 bp, Mus musculus
  siRNA target sequence for Cdh23 (NM_023370.1,9352-9370).
cccaataccaacaaatact

SEQ ID NO: 533653 - DNA, 19 bp, Mus musculus
  siRNA target sequence for Cdh23 (NM_023370.1,9500-9518).
cccgcacccatggaacttt

SEQ ID NO: 533654 - DNA, 19 bp, Mus musculus
  siRNA target sequence for Cdh23 (NM_023370.1,9501-9519).
ccgcacccatggaactttt

SEQ ID NO: 533655 - DNA, 19 bp, Mus musculus
  siRNA target sequence for Cdh23 (NM_023370.1,9536-9554).
cagtcaagcccgatgatga

SEQ ID NO: 533656 - DNA, 19 bp, Mus musculus
  siRNA target sequence for Cdh23 (NM_023370.1,9569-9587).
cagccatccaggaatacga

SEQ ID NO: 533657 - DNA, 19 bp, Mus musculus
  siRNA target sequence for Cdh23 (NM_023370.1,9661-9679).
gattacctacggctcaaaa

SEQ ID NO: 533658 - DNA, 19 bp, Mus musculus
  siRNA target sequence for Cdh23 (NM_023370.1,9667-9685).
ctacggctcaaaaaactct

SEQ ID NO: 533659 - DNA, 19 bp, Mus musculus
  siRNA target sequence for Cdh23 (NM_023370.1,9688-9706).
gcacaacggatggtacaaa

SEQ ID NO: 533660 - DNA, 19 bp, Mus musculus
  siRNA target sequence for Cdh23 (NM_023370.1,9689-9707).
cacaacggatggtacaaaa

SEQ ID NO: 533661 - DNA, 19 bp, Mus musculus
  siRNA target sequence for Chc1l (NM_134083.2,306-324).
catcgttgaagatgttaga

SEQ ID NO: 533662 - DNA, 19 bp, Mus musculus
  siRNA target sequence for Chc1l (NM_134083.2,309-327).
cgttgaagatgttagatgt

SEQ ID NO: 533663 - DNA, 19 bp, Mus musculus
  siRNA target sequence for Chc1l (NM_134083.2,357-375).
ctgaggaagagttacagtt

SEQ ID NO: 533664 - DNA, 19 bp, Mus musculus
  siRNA target sequence for Chc1l (NM_134083.2,429-447).
cagtcaacgatgagatttt

SEQ ID NO: 533665 - DNA, 19 bp, Mus musculus
  siRNA target sequence for Chc1l (NM_134083.2,479-497).
ggggtaggcgacattcaga

SEQ ID NO: 533666 - DNA, 19 bp, Mus musculus
  siRNA target sequence for Chc1l (NM_134083.2,525-543).
ctctaactggcaaaaaaat

SEQ ID NO: 533667 - DNA, 19 bp, Mus musculus
  siRNA target sequence for Chc1l (NM_134083.2,577-595).
cgtccttgcgacaacagat

SEQ ID NO: 533668 - DNA, 19 bp, Mus musculus
  siRNA target sequence for Chc1l (NM_134083.2,637-655).
gggcaatgggacaacgaat

SEQ ID NO: 533669 - DNA, 19 bp, Mus musculus
  siRNA target sequence for Chc1l (NM_134083.2,640-658).
caatgggacaacgaatcat

SEQ ID NO: 533670 - DNA, 19 bp, Mus musculus
  siRNA target sequence for Chc1l (NM_134083.2,646-664).
gacaacgaatcatggttta

SEQ ID NO: 533671 - DNA, 19 bp, Mus musculus
  siRNA target sequence for Chc1l (NM_134083.2,670-688).
ctgccatatctctacgaat

SEQ ID NO: 533672 - DNA, 19 bp, Mus musculus
  siRNA target sequence for Chc1l (NM_134083.2,672-690).
gccatatctctacgaattt

SEQ ID NO: 533673 - DNA, 19 bp, Mus musculus
  siRNA target sequence for Chc1l (NM_134083.2,674-692).
catatctctacgaatttgt

SEQ ID NO: 533674 - DNA, 19 bp, Mus musculus
  siRNA target sequence for Chc1l (NM_134083.2,681-699).
ctacgaatttgtcaaacaa

SEQ ID NO: 533675 - DNA, 19 bp, Mus musculus
  siRNA target sequence for Chc1l (NM_134083.2,684-702).
cgaatttgtcaaacaaaca

SEQ ID NO: 533676 - DNA, 19 bp, Mus musculus
  siRNA target sequence for Chc1l (NM_134083.2,730-748).
ccactctttggttctaaca

SEQ ID NO: 533677 - DNA, 19 bp, Mus musculus
  siRNA target sequence for Chc1l (NM_134083.2,769-787).
ctggggttataataactca

SEQ ID NO: 533678 - DNA, 19 bp, Mus musculus
  siRNA target sequence for Chc1l (NM_134083.2,843-861).
gatgcttgcagaataaagt

SEQ ID NO: 533679 - DNA, 19 bp, Mus musculus
  siRNA target sequence for Chc1l (NM_134083.2,922-940).
ctacgtctggggttacaat

SEQ ID NO: 533680 - DNA, 19 bp, Mus musculus
  siRNA target sequence for Chc1l (NM_134083.2,1038-1056).
gctacgcacacacattagt

SEQ ID NO: 533681 - DNA, 19 bp, Mus musculus
  siRNA target sequence for Chc1l (NM_134083.2,1042-1060).
cgcacacacattagtatta

SEQ ID NO: 533682 - DNA, 19 bp, Mus musculus
  siRNA target sequence for Chc1l (NM_134083.2,1048-1066).
cacattagtattaacagat

SEQ ID NO: 533683 - DNA, 19 bp, Mus musculus
  siRNA target sequence for Chc1l (NM_134083.2,1083-1101).
cttggggtgcaaattctta

SEQ ID NO: 533684 - DNA, 19 bp, Mus musculus
  siRNA target sequence for Chc1l (NM_134083.2,1112-1130).
ggcactggcaataaaagta

SEQ ID NO: 533685 - DNA, 19 bp, Mus musculus
  siRNA target sequence for Chc1l (NM_134083.2,1138-1156).
ctatcctacccctgttgtt

SEQ ID NO: 533686 - DNA, 19 bp, Mus musculus
  siRNA target sequence for Chc1l (NM_134083.2,1435-1453).
gtttctggttgatggaaaa

SEQ ID NO: 533687 - DNA, 19 bp, Mus musculus
  siRNA target sequence for Chc1l (NM_134083.2,1439-1457).
ctggttgatggaaaataca

SEQ ID NO: 533688 - DNA, 19 bp, Mus musculus
  siRNA target sequence for Chc1l (NM_134083.2,1472-1490).
gtccttctcaaaattaggt

SEQ ID NO: 533689 - DNA, 19 bp, Mus musculus
  siRNA target sequence for Chc1l (NM_134083.2,1521-1539).
gtgaagacgatattgtaga

SEQ ID NO: 533690 - DNA, 19 bp, Mus musculus
  siRNA target sequence for Chc1l (NM_134083.2,1535-1553).
gtagaaatgagcgagtttt

SEQ ID NO: 533691 - DNA, 19 bp, Mus musculus
  siRNA target sequence for Chc1l (NM_134083.2,1538-1556).
gaaatgagcgagttttcgt

SEQ ID NO: 533692 - DNA, 19 bp, Mus musculus
  siRNA target sequence for Chc1l (NM_134083.2,1569-1587).
gagctttcctggagtatct

SEQ ID NO: 533693 - DNA, 19 bp, Mus musculus
  siRNA target sequence for Chc1l (NM_134083.2,1571-1589).
gctttcctggagtatctat

SEQ ID NO: 533694 - DNA, 19 bp, Mus musculus
  siRNA target sequence for Chc1l (NM_134083.2,1637-1655).
gatctggctacattttaca

SEQ ID NO: 533695 - DNA, 19 bp, Mus musculus
  siRNA target sequence for Chc1l (NM_134083.2,1654-1672).
cagtgagactcggttgaaa

SEQ ID NO: 533696 - DNA, 19 bp, Mus musculus
  siRNA target sequence for Chc1l (NM_134083.2,1705-1723).
ctgtgaggagaatgctatt

SEQ ID NO: 533697 - DNA, 19 bp, Mus musculus
  siRNA target sequence for Chc1l (NM_134083.2,1795-1813).
ccatctgactgtagtaaca

SEQ ID NO: 533698 - DNA, 19 bp, Mus musculus
  siRNA target sequence for Chc1l (NM_134083.2,1818-1836).
cgtcaggctttgcagaaat

SEQ ID NO: 533699 - DNA, 19 bp, Mus musculus
  siRNA target sequence for Chc1l (NM_134083.2,1821-1839).
caggctttgcagaaatgga

SEQ ID NO: 533700 - DNA, 19 bp, Mus musculus
  siRNA target sequence for Chc1l (NM_134083.2,1838-1856).
gaccacgatcttctaaaga

SEQ ID NO: 533701 - DNA, 19 bp, Mus musculus
  siRNA target sequence for Cldn1 (NM_016674.2,293-311).
ctgccccagtggaagattt

SEQ ID NO: 533702 - DNA, 19 bp, Mus musculus
  siRNA target sequence for Cldn1 (NM_016674.2,296-314).
ccccagtggaagatttact

SEQ ID NO: 533703 - DNA, 19 bp, Mus musculus
  siRNA target sequence for Cldn1 (NM_016674.2,453-471).
cccgagccttgatggtaat

SEQ ID NO: 533704 - DNA, 19 bp, Mus musculus
  siRNA target sequence for Cldn1 (NM_016674.2,484-502).
ggggctgatcgcaatcttt

SEQ ID NO: 533705 - DNA, 19 bp, Mus musculus
  siRNA target sequence for Cldn1 (NM_016674.2,486-504).
ggctgatcgcaatctttgt

SEQ ID NO: 533706 - DNA, 19 bp, Mus musculus
  siRNA target sequence for Cldn1 (NM_016674.2,488-506).
ctgatcgcaatctttgtgt

SEQ ID NO: 533707 - DNA, 19 bp, Mus musculus
  siRNA target sequence for Cldn1 (NM_016674.2,570-588).
ctgtcattgggggcataat

SEQ ID NO: 533708 - DNA, 19 bp, Mus musculus
  siRNA target sequence for Cldn1 (NM_016674.2,572-590).
gtcattgggggcataatat

SEQ ID NO: 533709 - DNA, 19 bp, Mus musculus
  siRNA target sequence for Cldn1 (NM_016674.2,579-597).
ggggcataatatttttaat

SEQ ID NO: 533710 - DNA, 19 bp, Mus musculus
  siRNA target sequence for Cldn1 (NM_016674.2,620-638).
gccacagcatggtatggaa

SEQ ID NO: 533711 - DNA, 19 bp, Mus musculus
  siRNA target sequence for Cldn1 (NM_016674.2,621-639).
ccacagcatggtatggaaa

SEQ ID NO: 533712 - DNA, 19 bp, Mus musculus
  siRNA target sequence for Cldn1 (NM_016674.2,676-694).
catcaatgccaggtatgaa

SEQ ID NO: 533713 - DNA, 19 bp, Mus musculus
  siRNA target sequence for Cldn1 (NM_016674.2,743-761).
ctgggaggtgtcctacttt

SEQ ID NO: 533714 - DNA, 19 bp, Mus musculus
  siRNA target sequence for Cldn1 (NM_016674.2,766-784).
ctcctgtccccggaaaaca

SEQ ID NO: 533715 - DNA, 19 bp, Mus musculus
  siRNA target sequence for Cldn1 (NM_016674.2,814-832).
caagccaacaccttctagt

SEQ ID NO: 533716 - DNA, 19 bp, Mus musculus
  siRNA target sequence for Clnk (NM_013748.2,277-295).
ggacaacgaaagaaggatt

SEQ ID NO: 533717 - DNA, 19 bp, Mus musculus
  siRNA target sequence for Clnk (NM_013748.2,292-310).
gattcggtgatctgagatt

SEQ ID NO: 533718 - DNA, 19 bp, Mus musculus
  siRNA target sequence for Clnk (NM_013748.2,317-335).
cgtctctctgctgaaaaat

SEQ ID NO: 533719 - DNA, 19 bp, Mus musculus
  siRNA target sequence for Clnk (NM_013748.2,421-439).
gggtcccaggtggagaaaa

SEQ ID NO: 533720 - DNA, 19 bp, Mus musculus
  siRNA target sequence for Clnk (NM_013748.2,426-444).
ccaggtggagaaaaatgca

SEQ ID NO: 533721 - DNA, 19 bp, Mus musculus
  siRNA target sequence for Clnk (NM_013748.2,427-445).
caggtggagaaaaatgcaa

SEQ ID NO: 533722 - DNA, 19 bp, Mus musculus
  siRNA target sequence for Clnk (NM_013748.2,432-450).
ggagaaaaatgcaacagta

SEQ ID NO: 533723 - DNA, 19 bp, Mus musculus
  siRNA target sequence for Clnk (NM_013748.2,489-507).
gcatggccatcaatgaaaa

SEQ ID NO: 533724 - DNA, 19 bp, Mus musculus
  siRNA target sequence for Clnk (NM_013748.2,493-511).
ggccatcaatgaaaatttt

SEQ ID NO: 533725 - DNA, 19 bp, Mus musculus
  siRNA target sequence for Clnk (NM_013748.2,544-562).
cagatacacgctatttcca

SEQ ID NO: 533726 - DNA, 19 bp, Mus musculus
  siRNA target sequence for Clnk (NM_013748.2,572-590).
ggaggctccccttctgtta

SEQ ID NO: 533727 - DNA, 19 bp, Mus musculus
  siRNA target sequence for Clnk (NM_013748.2,683-701).
cagaagccaacgctttaaa

SEQ ID NO: 533728 - DNA, 19 bp, Mus musculus
  siRNA target sequence for Clnk (NM_013748.2,688-706).
gccaacgctttaaaggatt

SEQ ID NO: 533729 - DNA, 19 bp, Mus musculus
  siRNA target sequence for Clnk (NM_013748.2,693-711).
cgctttaaaggattcaaat

SEQ ID NO: 533730 - DNA, 19 bp, Mus musculus
  siRNA target sequence for Clnk (NM_013748.2,943-961).
gcccatcatcaaaccaaaa

SEQ ID NO: 533731 - DNA, 19 bp, Mus musculus
  siRNA target sequence for Clnk (NM_013748.2,1006-1024).
caggaaagcacagtataca

SEQ ID NO: 533732 - DNA, 19 bp, Mus musculus
  siRNA target sequence for Clnk (NM_013748.2,1098-1116).
cgaatgctgccctatgaaa

SEQ ID NO: 533733 - DNA, 19 bp, Mus musculus
  siRNA target sequence for Clnk (NM_013748.2,1099-1117).
gaatgctgccctatgaaaa

SEQ ID NO: 533734 - DNA, 19 bp, Mus musculus
  siRNA target sequence for Clnk (NM_013748.2,1103-1121).
gctgccctatgaaaacaca

SEQ ID NO: 533735 - DNA, 19 bp, Mus musculus
  siRNA target sequence for Clnk (NM_013748.2,1104-1122).
ctgccctatgaaaacacaa

SEQ ID NO: 533736 - DNA, 19 bp, Mus musculus
  siRNA target sequence for Clnk (NM_013748.2,1161-1179).
gatgtctggcagaatgaat

SEQ ID NO: 533737 - DNA, 19 bp, Mus musculus
  siRNA target sequence for Clnk (NM_013748.2,1205-1223).
ggcagtggaagatgtgtta

SEQ ID NO: 533738 - DNA, 19 bp, Mus musculus
  siRNA target sequence for Clnk (NM_013748.2,1206-1224).
gcagtggaagatgtgttaa

SEQ ID NO: 533739 - DNA, 19 bp, Mus musculus
  siRNA target sequence for Clnk (NM_013748.2,1209-1227).
gtggaagatgtgttaatga

SEQ ID NO: 533740 - DNA, 19 bp, Mus musculus
  siRNA target sequence for Clnk (NM_013748.2,1256-1274).
ccgagactgctctacaaaa

SEQ ID NO: 533741 - DNA, 19 bp, Mus musculus
  siRNA target sequence for Clnk (NM_013748.2,1276-1294).
ccaaggcagaaccatatgt

SEQ ID NO: 533742 - DNA, 19 bp, Mus musculus
  siRNA target sequence for Clnk (NM_013748.2,1312-1330).
ggaacaaggtctacaatgt

SEQ ID NO: 533743 - DNA, 19 bp, Mus musculus
  siRNA target sequence for Clnk (NM_013748.2,1346-1364).
cgagagcaatcaacagttt

SEQ ID NO: 533744 - DNA, 19 bp, Mus musculus
  siRNA target sequence for Clnk (NM_013748.2,1373-1391).
cacaggactacgaggaaat

SEQ ID NO: 533745 - DNA, 19 bp, Mus musculus
  siRNA target sequence for Clnk (NM_013748.2,1377-1395).
ggactacgaggaaatgaga

SEQ ID NO: 533746 - DNA, 19 bp, Mus musculus
  siRNA target sequence for Clnk (NM_013748.2,1378-1396).
gactacgaggaaatgagat

SEQ ID NO: 533747 - DNA, 19 bp, Mus musculus
  siRNA target sequence for Clnk (NM_013748.2,1449-1467).
ctaatagatgggaaagaca

SEQ ID NO: 533748 - DNA, 19 bp, Mus musculus
  siRNA target sequence for Clnk (NM_013748.2,1470-1488).
gctgcacgcaggaaacagt

SEQ ID NO: 533749 - DNA, 19 bp, Mus musculus
  siRNA target sequence for Cnot7 (NM_011135.2,1183-1201).
gcagcaaccgtagatcata

SEQ ID NO: 533750 - DNA, 19 bp, Mus musculus
  siRNA target sequence for Cnot7 (NM_011135.2,1214-1232).
gtgaagtttgggcttgtaa

SEQ ID NO: 533751 - DNA, 19 bp, Mus musculus
  siRNA target sequence for Cnot7 (NM_011135.2,1248-1266).
gaagaaaatccgtcaagtt

SEQ ID NO: 533752 - DNA, 19 bp, Mus musculus
  siRNA target sequence for Cnot7 (NM_011135.2,1258-1276).
cgtcaagttatccgaaaat

SEQ ID NO: 533753 - DNA, 19 bp, Mus musculus
  siRNA target sequence for Cnot7 (NM_011135.2,1259-1277).
gtcaagttatccgaaaata

SEQ ID NO: 533754 - DNA, 19 bp, Mus musculus
  siRNA target sequence for Cnot7 (NM_011135.2,1261-1279).
caagttatccgaaaatata

SEQ ID NO: 533755 - DNA, 19 bp, Mus musculus
  siRNA target sequence for Cnot7 (NM_011135.2,1264-1282).
gttatccgaaaatataatt

SEQ ID NO: 533756 - DNA, 19 bp, Mus musculus
  siRNA target sequence for Cnot7 (NM_011135.2,1338-1356).
cagaagcaatgctgactat

SEQ ID NO: 533757 - DNA, 19 bp, Mus musculus
  siRNA target sequence for Cnot7 (NM_011135.2,1362-1380).
ccaactgttgcggtgtaat

SEQ ID NO: 533758 - DNA, 19 bp, Mus musculus
  siRNA target sequence for Cnot7 (NM_011135.2,1373-1391).
ggtgtaatgtagacttgtt

SEQ ID NO: 533759 - DNA, 19 bp, Mus musculus
  siRNA target sequence for Cnot7 (NM_011135.2,1374-1392).
gtgtaatgtagacttgtta

SEQ ID NO: 533760 - DNA, 19 bp, Mus musculus
  siRNA target sequence for Cnot7 (NM_011135.2,1376-1394).
gtaatgtagacttgttaaa

SEQ ID NO: 533761 - DNA, 19 bp, Mus musculus
  siRNA target sequence for Cnot7 (NM_011135.2,1407-1425).
cggactgacctttatgaat

SEQ ID NO: 533762 - DNA, 19 bp, Mus musculus
  siRNA target sequence for Cnot7 (NM_011135.2,1451-1469).
cgtcaacttggcagtttaa

SEQ ID NO: 533763 - DNA, 19 bp, Mus musculus
  siRNA target sequence for Cnot7 (NM_011135.2,1507-1525).
gactctatagagctactaa

SEQ ID NO: 533764 - DNA, 19 bp, Mus musculus
  siRNA target sequence for Cnot7 (NM_011135.2,1509-1527).
ctctatagagctactaaca

SEQ ID NO: 533765 - DNA, 19 bp, Mus musculus
  siRNA target sequence for Cnot7 (NM_011135.2,1532-1550).
ctggtatccagtttaaaaa

SEQ ID NO: 533766 - DNA, 19 bp, Mus musculus
  siRNA target sequence for Cnot7 (NM_011135.2,1565-1583).
gaattgagacccaatattt

SEQ ID NO: 533767 - DNA, 19 bp, Mus musculus
  siRNA target sequence for Cnot7 (NM_011135.2,1575-1593).
ccaatattttgcagaactt

SEQ ID NO: 533768 - DNA, 19 bp, Mus musculus
  siRNA target sequence for Cnot7 (NM_011135.2,1615-1633).
ctttgtgaaggggtcaaat

SEQ ID NO: 533769 - DNA, 19 bp, Mus musculus
  siRNA target sequence for Cnot7 (NM_011135.2,1659-1677).
ctttggctatttaatcaaa

SEQ ID NO: 533770 - DNA, 19 bp, Mus musculus
  siRNA target sequence for Cnot7 (NM_011135.2,1723-1741).
gagatccttcggttatttt

SEQ ID NO: 533771 - DNA, 19 bp, Mus musculus
  siRNA target sequence for Cnot7 (NM_011135.2,1776-1794).
gagctgcaaaaatctcaaa

SEQ ID NO: 533772 - DNA, 19 bp, Mus musculus
  siRNA target sequence for Cnot7 (NM_011135.2,1908-1926).
gttctttgaagatcacatt

SEQ ID NO: 533773 - DNA, 19 bp, Mus musculus
  siRNA target sequence for Cnot7 (NM_011135.2,1935-1953).
caaatactgtggtcactta

SEQ ID NO: 533774 - DNA, 19 bp, Mus musculus
  siRNA target sequence for Cnot7 (NM_011135.2,1967-1985).
ctggctcatcctatgtaca

SEQ ID NO: 533775 - DNA, 19 bp, Mus musculus
  siRNA target sequence for Cntnap4 (NM_130457.2,112-130).
ctggagctgttctcaagat

SEQ ID NO: 533776 - DNA, 19 bp, Mus musculus
  siRNA target sequence for Cntnap4 (NM_130457.2,115-133).
gagctgttctcaagatgtt

SEQ ID NO: 533777 - DNA, 19 bp, Mus musculus
  siRNA target sequence for Cntnap4 (NM_130457.2,455-473).
ctggaagcagtatagacaa

SEQ ID NO: 533778 - DNA, 19 bp, Mus musculus
  siRNA target sequence for Cntnap4 (NM_130457.2,458-476).
gaagcagtatagacaagaa

SEQ ID NO: 533779 - DNA, 19 bp, Mus musculus
  siRNA target sequence for Cntnap4 (NM_130457.2,511-529).
cagacagcgttgtgtacta

SEQ ID NO: 533780 - DNA, 19 bp, Mus musculus
  siRNA target sequence for Cntnap4 (NM_130457.2,513-531).
gacagcgttgtgtactata

SEQ ID NO: 533781 - DNA, 19 bp, Mus musculus
  siRNA target sequence for Cntnap4 (NM_130457.2,515-533).
cagcgttgtgtactataga

SEQ ID NO: 533782 - DNA, 19 bp, Mus musculus
  siRNA target sequence for Cntnap4 (NM_130457.2,517-535).
gcgttgtgtactatagact

SEQ ID NO: 533783 - DNA, 19 bp, Mus musculus
  siRNA target sequence for Cntnap4 (NM_130457.2,532-550).
gactccagccttcaatcaa

SEQ ID NO: 533784 - DNA, 19 bp, Mus musculus
  siRNA target sequence for Cntnap4 (NM_130457.2,564-582).
cgcttcattcctctagaat

SEQ ID NO: 533785 - DNA, 19 bp, Mus musculus
  siRNA target sequence for Cntnap4 (NM_130457.2,630-648).
gcataccggtcggttgtaa

SEQ ID NO: 533786 - DNA, 19 bp, Mus musculus
  siRNA target sequence for Cntnap4 (NM_130457.2,631-649).
cataccggtcggttgtaat

SEQ ID NO: 533787 - DNA, 19 bp, Mus musculus
  siRNA target sequence for Cntnap4 (NM_130457.2,635-653).
ccggtcggttgtaattgat

SEQ ID NO: 533788 - DNA, 19 bp, Mus musculus
  siRNA target sequence for Cntnap4 (NM_130457.2,637-655).
ggtcggttgtaattgatct

SEQ ID NO: 533789 - DNA, 19 bp, Mus musculus
  siRNA target sequence for Cntnap4 (NM_130457.2,638-656).
gtcggttgtaattgatctt

SEQ ID NO: 533790 - DNA, 19 bp, Mus musculus
  siRNA target sequence for Cntnap4 (NM_130457.2,640-658).
cggttgtaattgatcttga

SEQ ID NO: 533791 - DNA, 19 bp, Mus musculus
  siRNA target sequence for Cntnap4 (NM_130457.2,651-669).
gatcttgatggaaaaagtt

SEQ ID NO: 533792 - DNA, 19 bp, Mus musculus
  siRNA target sequence for Cntnap4 (NM_130457.2,695-713).
ctccttgagtccaataaga

SEQ ID NO: 533793 - DNA, 19 bp, Mus musculus
  siRNA target sequence for Cntnap4 (NM_130457.2,703-721).
gtccaataagagatatcat

SEQ ID NO: 533794 - DNA, 19 bp, Mus musculus
  siRNA target sequence for Cntnap4 (NM_130457.2,789-807).
catatcacattggagttaa

SEQ ID NO: 533795 - DNA, 19 bp, Mus musculus
  siRNA target sequence for Cntnap4 (NM_130457.2,794-812).
cacattggagttaagaaga

SEQ ID NO: 533796 - DNA, 19 bp, Mus musculus
  siRNA target sequence for Cntnap4 (NM_130457.2,814-832).
gaaagctcttcttacttat

SEQ ID NO: 533797 - DNA, 19 bp, Mus musculus
  siRNA target sequence for Cntnap4 (NM_130457.2,819-837).
ctcttcttacttattaatt

SEQ ID NO: 533798 - DNA, 19 bp, Mus musculus
  siRNA target sequence for Cntnap4 (NM_130457.2,859-877).
ccagttcgaccctgatcaa

SEQ ID NO: 533799 - DNA, 19 bp, Mus musculus
  siRNA target sequence for Cntnap4 (NM_130457.2,941-959).
gaaacaggtcaactttaca

SEQ ID NO: 533800 - DNA, 19 bp, Mus musculus
  siRNA target sequence for Cntnap4 (NM_130457.2,984-1002).
catgcccaaggagaattca

SEQ ID NO: 533801 - DNA, 19 bp, Mus musculus
  siRNA target sequence for Cntnap4 (NM_130457.2,988-1006).
cccaaggagaattcaatta

SEQ ID NO: 533802 - DNA, 19 bp, Mus musculus
  siRNA target sequence for Cntnap4 (NM_130457.2,1060-1078).
cagtgtccttgccatacaa

SEQ ID NO: 533803 - DNA, 19 bp, Mus musculus
  siRNA target sequence for Cntnap4 (NM_130457.2,1093-1111).
gtttagagaacctctttta

SEQ ID NO: 533804 - DNA, 19 bp, Mus musculus
  siRNA target sequence for Cntnap4 (NM_130457.2,1146-1164).
cacagccctcagatcatca

SEQ ID NO: 533805 - DNA, 19 bp, Mus musculus
  siRNA target sequence for Cntnap4 (NM_130457.2,1225-1243).
gccccaggagttatttggt

SEQ ID NO: 533806 - DNA, 19 bp, Mus musculus
  siRNA target sequence for Cntnap4 (NM_130457.2,1242-1260).
gtcctcccagcgtctacta

SEQ ID NO: 533807 - DNA, 19 bp, Mus musculus
  siRNA target sequence for Cntnap4 (NM_130457.2,1244-1262).
cctcccagcgtctactaaa

SEQ ID NO: 533808 - DNA, 19 bp, Mus musculus
  siRNA target sequence for Cntnap4 (NM_130457.2,1287-1305).
caattccgaacctggaata

SEQ ID NO: 533809 - DNA, 19 bp, Mus musculus
  siRNA target sequence for Cntnap4 (NM_130457.2,1369-1387).
gcgatggaaaacttaaact

SEQ ID NO: 533810 - DNA, 19 bp, Mus musculus
  siRNA target sequence for Cntnap4 (NM_130457.2,1596-1614).
ggctttggatccaagtgta

SEQ ID NO: 533811 - DNA, 19 bp, Mus musculus
  siRNA target sequence for Cntnap4 (NM_130457.2,1597-1615).
gctttggatccaagtgtaa

SEQ ID NO: 533812 - DNA, 19 bp, Mus musculus
  siRNA target sequence for Cntnap4 (NM_130457.2,1618-1636).
gccctctaggtggatttca

SEQ ID NO: 533813 - DNA, 19 bp, Mus musculus
  siRNA target sequence for Cntnap4 (NM_130457.2,1619-1637).
ccctctaggtggatttcaa

SEQ ID NO: 533814 - DNA, 19 bp, Mus musculus
  siRNA target sequence for Cntnap4 (NM_130457.2,1876-1894).
catgtgaagcctataagca

SEQ ID NO: 533815 - DNA, 19 bp, Mus musculus
  siRNA target sequence for Cntnap4 (NM_130457.2,1909-1927).
ctggattctactacataga

SEQ ID NO: 533816 - DNA, 19 bp, Mus musculus
  siRNA target sequence for Cntnap4 (NM_130457.2,1911-1929).
ggattctactacatagact

SEQ ID NO: 533817 - DNA, 19 bp, Mus musculus
  siRNA target sequence for Cntnap4 (NM_130457.2,1950-1968).
cagccattcctcttatact

SEQ ID NO: 533818 - DNA, 19 bp, Mus musculus
  siRNA target sequence for Cntnap4 (NM_130457.2,1961-1979).
cttatactgcaatatgact

SEQ ID NO: 533819 - DNA, 19 bp, Mus musculus
  siRNA target sequence for Cntnap4 (NM_130457.2,2033-2051).
gaacactcactctgagaat

SEQ ID NO: 533820 - DNA, 19 bp, Mus musculus
  siRNA target sequence for Cntnap4 (NM_130457.2,2053-2071).
cgcacactggggtgtttga

SEQ ID NO: 533821 - DNA, 19 bp, Mus musculus
  siRNA target sequence for Cntnap4 (NM_130457.2,2127-2145).
caacaggagctggtgtatt

SEQ ID NO: 533822 - DNA, 19 bp, Mus musculus
  siRNA target sequence for Cntnap4 (NM_130457.2,2130-2148).
caggagctggtgtattact

SEQ ID NO: 533823 - DNA, 19 bp, Mus musculus
  siRNA target sequence for Cntnap4 (NM_130457.2,2139-2157).
gtgtattactgcaagaagt

SEQ ID NO: 533824 - DNA, 19 bp, Mus musculus
  siRNA target sequence for Cntnap4 (NM_130457.2,2153-2171).
gaagtcgcgcctcgttaat

SEQ ID NO: 533825 - DNA, 19 bp, Mus musculus
  siRNA target sequence for Cntnap4 (NM_130457.2,2287-2305).
gcattgatgcccagtatca

SEQ ID NO: 533826 - DNA, 19 bp, Mus musculus
  siRNA target sequence for Cntnap4 (NM_130457.2,2288-2306).
cattgatgcccagtatcat

SEQ ID NO: 533827 - DNA, 19 bp, Mus musculus
  siRNA target sequence for Cntnap4 (NM_130457.2,2316-2334).
gatgcagatctgaacgaat

SEQ ID NO: 533828 - DNA, 19 bp, Mus musculus
  siRNA target sequence for Cntnap4 (NM_130457.2,2347-2365).
ctggattcctctcctataa

SEQ ID NO: 533829 - DNA, 19 bp, Mus musculus
  siRNA target sequence for Cntnap4 (NM_130457.2,2354-2372).
cctctcctataaagaacat

SEQ ID NO: 533830 - DNA, 19 bp, Mus musculus
  siRNA target sequence for Cntnap4 (NM_130457.2,2377-2395).
ctgtcactaagattgtgat

SEQ ID NO: 533831 - DNA, 19 bp, Mus musculus
  siRNA target sequence for Cntnap4 (NM_130457.2,2414-2432).
ccattcagaagctgcttat

SEQ ID NO: 533832 - DNA, 19 bp, Mus musculus
  siRNA target sequence for Cntnap4 (NM_130457.2,2415-2433).
cattcagaagctgcttata

SEQ ID NO: 533833 - DNA, 19 bp, Mus musculus
  siRNA target sequence for Cntnap4 (NM_130457.2,2458-2476).
gagacaggccgttttggaa

SEQ ID NO: 533834 - DNA, 19 bp, Mus musculus
  siRNA target sequence for Cntnap4 (NM_130457.2,2573-2591).
cctctctggggtgttttta

SEQ ID NO: 533835 - DNA, 19 bp, Mus musculus
  siRNA target sequence for Cntnap4 (NM_130457.2,2581-2599).
gggtgtttttagaaaacct

SEQ ID NO: 533836 - DNA, 19 bp, Mus musculus
  siRNA target sequence for Cntnap4 (NM_130457.2,2612-2630).
cttcatacgaatagaatta

SEQ ID NO: 533837 - DNA, 19 bp, Mus musculus
  siRNA target sequence for Cntnap4 (NM_130457.2,2639-2657).
cacaacagtcaccttttca

SEQ ID NO: 533838 - DNA, 19 bp, Mus musculus
  siRNA target sequence for Cntnap4 (NM_130457.2,2644-2662).
cagtcaccttttcatttga

SEQ ID NO: 533839 - DNA, 19 bp, Mus musculus
  siRNA target sequence for Cntnap4 (NM_130457.2,2777-2795).
cgagctccctccaaagata

SEQ ID NO: 533840 - DNA, 19 bp, Mus musculus
  siRNA target sequence for Cntnap4 (NM_130457.2,2780-2798).
gctccctccaaagatacaa

SEQ ID NO: 533841 - DNA, 19 bp, Mus musculus
  siRNA target sequence for Cntnap4 (NM_130457.2,2820-2838).
gtcctgttacagctcaata

SEQ ID NO: 533842 - DNA, 19 bp, Mus musculus
  siRNA target sequence for Cntnap4 (NM_130457.2,2825-2843).
gttacagctcaatagtcaa

SEQ ID NO: 533843 - DNA, 19 bp, Mus musculus
  siRNA target sequence for Cntnap4 (NM_130457.2,2831-2849).
gctcaatagtcaactcttt

SEQ ID NO: 533844 - DNA, 19 bp, Mus musculus
  siRNA target sequence for Cntnap4 (NM_130457.2,2834-2852).
caatagtcaactctttgtt

SEQ ID NO: 533845 - DNA, 19 bp, Mus musculus
  siRNA target sequence for Cntnap4 (NM_130457.2,3115-3133).
ctgggtcttctgtgattta

SEQ ID NO: 533846 - DNA, 19 bp, Mus musculus
  siRNA target sequence for Cntnap4 (NM_130457.2,3117-3135).
gggtcttctgtgatttaca

SEQ ID NO: 533847 - DNA, 19 bp, Mus musculus
  siRNA target sequence for Cntnap4 (NM_130457.2,3118-3136).
ggtcttctgtgatttacaa

SEQ ID NO: 533848 - DNA, 19 bp, Mus musculus
  siRNA target sequence for Cntnap4 (NM_130457.2,3212-3230).
cagagagatgatcaaattt

SEQ ID NO: 533849 - DNA, 19 bp, Mus musculus
  siRNA target sequence for Cntnap4 (NM_130457.2,3252-3270).
ccaagcttgctgcttcata

SEQ ID NO: 533850 - DNA, 19 bp, Mus musculus
  siRNA target sequence for Cntnap4 (NM_130457.2,3253-3271).
caagcttgctgcttcatat

SEQ ID NO: 533851 - DNA, 19 bp, Mus musculus
  siRNA target sequence for Cntnap4 (NM_130457.2,3263-3281).
gcttcatatgagttccttt

SEQ ID NO: 533852 - DNA, 19 bp, Mus musculus
  siRNA target sequence for Cntnap4 (NM_130457.2,3322-3340).
gtttgcagatacgatacaa

SEQ ID NO: 533853 - DNA, 19 bp, Mus musculus
  siRNA target sequence for Cntnap4 (NM_130457.2,3327-3345).
cagatacgatacaagctaa

SEQ ID NO: 533854 - DNA, 19 bp, Mus musculus
  siRNA target sequence for Cntnap4 (NM_130457.2,3329-3347).
gatacgatacaagctaaat

SEQ ID NO: 533855 - DNA, 19 bp, Mus musculus
  siRNA target sequence for Cntnap4 (NM_130457.2,3333-3351).
cgatacaagctaaataagt

SEQ ID NO: 533856 - DNA, 19 bp, Mus musculus
  siRNA target sequence for Cntnap4 (NM_130457.2,3399-3417).
gggcagcttcaccacataa

SEQ ID NO: 533857 - DNA, 19 bp, Mus musculus
  siRNA target sequence for Cntnap4 (NM_130457.2,3408-3426).
caccacataaagatcaaca

SEQ ID NO: 533858 - DNA, 19 bp, Mus musculus
  siRNA target sequence for Cntnap4 (NM_130457.2,3446-3464).
cgtggagattgatgagaat

SEQ ID NO: 533859 - DNA, 19 bp, Mus musculus
  siRNA target sequence for Cntnap4 (NM_130457.2,3450-3468).
gagattgatgagaatacaa

SEQ ID NO: 533860 - DNA, 19 bp, Mus musculus
  siRNA target sequence for Cntnap4 (NM_130457.2,3536-3554).
gctagagtacagtgatgta

SEQ ID NO: 533861 - DNA, 19 bp, Mus musculus
  siRNA target sequence for Cntnap4 (NM_130457.2,3790-3808).
ctctcactcatgcaatcaa

SEQ ID NO: 533862 - DNA, 19 bp, Mus musculus
  siRNA target sequence for Cntnap4 (NM_130457.2,3846-3864).
gtgatctttatcttgcttt

SEQ ID NO: 533863 - DNA, 19 bp, Mus musculus
  siRNA target sequence for Cntnap4 (NM_130457.2,3874-3892).
ccatagctgttcgcattta

SEQ ID NO: 533864 - DNA, 19 bp, Mus musculus
  siRNA target sequence for Cntnap4 (NM_130457.2,3899-3917).
gaaaaggttatacaaaaga

SEQ ID NO: 533865 - DNA, 19 bp, Mus musculus
  siRNA target sequence for Cntnap4 (NM_130457.2,3923-3941).
ggcaaaaaggtcagagaat

SEQ ID NO: 533866 - DNA, 19 bp, Mus musculus
  siRNA target sequence for Cntnap4 (NM_130457.2,3965-3983).
gaaaagcgagcttcatatt

SEQ ID NO: 533867 - DNA, 19 bp, Mus musculus
  siRNA target sequence for Cntnap4 (NM_130457.2,3971-3989).
cgagcttcatattcagaat

SEQ ID NO: 533868 - DNA, 19 bp, Mus musculus
  siRNA target sequence for Cntnap4 (NM_130457.2,3986-4004).
gaatgcagtcggtgaaaat

SEQ ID NO: 533869 - DNA, 19 bp, Mus musculus
  siRNA target sequence for Coil (NM_016706.1,27-45).
gttaggctacggcttcaat

SEQ ID NO: 533870 - DNA, 19 bp, Mus musculus
  siRNA target sequence for Coil (NM_016706.1,31-49).
ggctacggcttcaatttga

SEQ ID NO: 533871 - DNA, 19 bp, Mus musculus
  siRNA target sequence for Coil (NM_016706.1,33-51).
ctacggcttcaatttgact

SEQ ID NO: 533872 - DNA, 19 bp, Mus musculus
  siRNA target sequence for Coil (NM_016706.1,147-165).
cagcgcttcggcttcagtt

SEQ ID NO: 533873 - DNA, 19 bp, Mus musculus
  siRNA target sequence for Coil (NM_016706.1,243-261).
gacagcctcagggttaagt

SEQ ID NO: 533874 - DNA, 19 bp, Mus musculus
  siRNA target sequence for Coil (NM_016706.1,245-263).
cagcctcagggttaagtta

SEQ ID NO: 533875 - DNA, 19 bp, Mus musculus
  siRNA target sequence for Coil (NM_016706.1,375-393).
gatcagggatacaagtctt

SEQ ID NO: 533876 - DNA, 19 bp, Mus musculus
  siRNA target sequence for Coil (NM_016706.1,442-460).
cctcggacctggaaactaa

SEQ ID NO: 533877 - DNA, 19 bp, Mus musculus
  siRNA target sequence for Coil (NM_016706.1,443-461).
ctcggacctggaaactaaa

SEQ ID NO: 533878 - DNA, 19 bp, Mus musculus
  siRNA target sequence for Coil (NM_016706.1,602-620).
ggcctccaagtcttccaaa

SEQ ID NO: 533879 - DNA, 19 bp, Mus musculus
  siRNA target sequence for Coil (NM_016706.1,778-796).
gccactgcagtgtcatgat

SEQ ID NO: 533880 - DNA, 19 bp, Mus musculus
  siRNA target sequence for Coil (NM_016706.1,1057-1075).
ctggtccagggctgtcatt

SEQ ID NO: 533881 - DNA, 19 bp, Mus musculus
  siRNA target sequence for Coil (NM_016706.1,1261-1279).
cggtctcctgtgtctttaa

SEQ ID NO: 533882 - DNA, 19 bp, Mus musculus
  siRNA target sequence for Coil (NM_016706.1,1366-1384).
ccaagaaggactatagtct

SEQ ID NO: 533883 - DNA, 19 bp, Mus musculus
  siRNA target sequence for Coil (NM_016706.1,1367-1385).
caagaaggactatagtcta

SEQ ID NO: 533884 - DNA, 19 bp, Mus musculus
  siRNA target sequence for Coil (NM_016706.1,1370-1388).
gaaggactatagtctatta

SEQ ID NO: 533885 - DNA, 19 bp, Mus musculus
  siRNA target sequence for Coil (NM_016706.1,1373-1391).
ggactatagtctattacca

SEQ ID NO: 533886 - DNA, 19 bp, Mus musculus
  siRNA target sequence for Coil (NM_016706.1,1516-1534).
cccagcaagtggacataga

SEQ ID NO: 533887 - DNA, 19 bp, Mus musculus
  siRNA target sequence for Coil (NM_016706.1,1543-1561).
cctcgctaccggctttgaa

SEQ ID NO: 533888 - DNA, 19 bp, Mus musculus
  siRNA target sequence for Coil (NM_016706.1,1544-1562).
ctcgctaccggctttgaaa

SEQ ID NO: 533889 - DNA, 19 bp, Mus musculus
  siRNA target sequence for Coil (NM_016706.1,1546-1564).
cgctaccggctttgaaaga

SEQ ID NO: 533890 - DNA, 19 bp, Mus musculus
  siRNA target sequence for Coil (NM_016706.1,1670-1688).
cgatccgaggctgatcatt

SEQ ID NO: 533891 - DNA, 19 bp, Mus musculus
  siRNA target sequence for Coil (NM_016706.1,1674-1692).
ccgaggctgatcattgact

SEQ ID NO: 533892 - DNA, 19 bp, Mus musculus
  siRNA target sequence for Coil (NM_016706.1,1698-1716).
ggtagcatctcgagtacat

SEQ ID NO: 533893 - DNA, 19 bp, Mus musculus
  siRNA target sequence for Coil (NM_181329.2,317-335).
gaacctgatagtaagcaat

SEQ ID NO: 533894 - DNA, 19 bp, Mus musculus
  siRNA target sequence for Col26a1 (NM_024474.2,366-384).
gtgccaacctcgtgagtta

SEQ ID NO: 533895 - DNA, 19 bp, Mus musculus
  siRNA target sequence for Col26a1 (NM_024474.2,368-386).
gccaacctcgtgagttaca

SEQ ID NO: 533896 - DNA, 19 bp, Mus musculus
  siRNA target sequence for Col26a1 (NM_024474.2,402-420).
cgacctaccgggtttccta

SEQ ID NO: 533897 - DNA, 19 bp, Mus musculus
  siRNA target sequence for Col26a1 (NM_024474.2,472-490).
caactgcgaggaagaatgt

SEQ ID NO: 533898 - DNA, 19 bp, Mus musculus
  siRNA target sequence for Col26a1 (NM_024474.2,479-497).
gaggaagaatgtatgaact

SEQ ID NO: 533899 - DNA, 19 bp, Mus musculus
  siRNA target sequence for Col26a1 (NM_024474.2,911-929).
ccccaaggcgtcctgtatt

SEQ ID NO: 533900 - DNA, 19 bp, Mus musculus
  siRNA target sequence for Col26a1 (NM_024474.2,970-988).
gctgaaccctgctgttgta

SEQ ID NO: 533901 - DNA, 19 bp, Mus musculus
  siRNA target sequence for Col26a1 (NM_024474.2,1232-1250).
cttatccttgagcatatga

SEQ ID NO: 533902 - DNA, 19 bp, Mus musculus
  siRNA target sequence for Col26a1 (NM_024474.2,1376-1394).
cccgaccctgcacaaaaga

SEQ ID NO: 533903 - DNA, 19 bp, Mus musculus
  siRNA target sequence for Crk (NM_133656.2,260-278).
cttagcgtctccgaaaact

SEQ ID NO: 533904 - DNA, 19 bp, Mus musculus
  siRNA target sequence for Crk (NM_133656.2,367-385).
ctccaggctccgaatagga

SEQ ID NO: 533905 - DNA, 19 bp, Mus musculus
  siRNA target sequence for Crk (NM_133656.2,376-394).
ccgaataggagatcaagaa

SEQ ID NO: 533906 - DNA, 19 bp, Mus musculus
  siRNA target sequence for Crk (NM_133656.2,377-395).
cgaataggagatcaagaat

SEQ ID NO: 533907 - DNA, 19 bp, Mus musculus
  siRNA target sequence for Crk (NM_133656.2,378-396).
gaataggagatcaagaatt

SEQ ID NO: 533908 - DNA, 19 bp, Mus musculus
  siRNA target sequence for Crk (NM_133656.2,408-426).
ctgctttactggaattcta

SEQ ID NO: 533909 - DNA, 19 bp, Mus musculus
  siRNA target sequence for Crk (NM_133656.2,434-452).
cactatttggacactacaa

SEQ ID NO: 533910 - DNA, 19 bp, Mus musculus
  siRNA target sequence for Crk (NM_133656.2,461-479).
gaaccagtggccagatcaa

SEQ ID NO: 533911 - DNA, 19 bp, Mus musculus
  siRNA target sequence for Crk (NM_133656.2,485-503).
ggtagtggagtgattctca

SEQ ID NO: 533912 - DNA, 19 bp, Mus musculus
  siRNA target sequence for Crk (NM_133656.2,667-685).
cccttacgtggagaagtat

SEQ ID NO: 533913 - DNA, 19 bp, Mus musculus
  siRNA target sequence for Crk (NM_133656.2,668-686).
ccttacgtggagaagtata

SEQ ID NO: 533914 - DNA, 19 bp, Mus musculus
  siRNA target sequence for Crk (NM_133656.2,700-718).
ctcagtatcggctctgatt

SEQ ID NO: 533915 - DNA, 19 bp, Mus musculus
  siRNA target sequence for Crk (NM_133656.2,905-923).
gtaaaggttacgaagatta

SEQ ID NO: 533916 - DNA, 19 bp, Mus musculus
  siRNA target sequence for Crk (NM_133656.2,911-929).
gttacgaagattaatgtga

SEQ ID NO: 533917 - DNA, 19 bp, Mus musculus
  siRNA target sequence for Csrp1 (NM_007791.2,117-135).
gccagaagacggtctactt

SEQ ID NO: 533918 - DNA, 19 bp, Mus musculus
  siRNA target sequence for Csrp1 (NM_007791.2,118-136).
ccagaagacggtctacttt

SEQ ID NO: 533919 - DNA, 19 bp, Mus musculus
  siRNA target sequence for Csrp1 (NM_007791.2,232-250).
gcatggagaagagatctat

SEQ ID NO: 533920 - DNA, 19 bp, Mus musculus
  siRNA target sequence for Csrp1 (NM_007791.2,236-254).
ggagaagagatctattgca

SEQ ID NO: 533921 - DNA, 19 bp, Mus musculus
  siRNA target sequence for Csrp1 (NM_007791.2,237-255).
gagaagagatctattgcaa

SEQ ID NO: 533922 - DNA, 19 bp, Mus musculus
  siRNA target sequence for Csrp1 (NM_007791.2,242-260).
gagatctattgcaagtcat

SEQ ID NO: 533923 - DNA, 19 bp, Mus musculus
  siRNA target sequence for Csrp1 (NM_007791.2,258-276).
catgttacggcaagaagta

SEQ ID NO: 533924 - DNA, 19 bp, Mus musculus
  siRNA target sequence for Csrp1 (NM_007791.2,388-406).
ccccaatgcatccaagttt

SEQ ID NO: 533925 - DNA, 19 bp, Mus musculus
  siRNA target sequence for Csrp1 (NM_007791.2,563-581).
gatggtgagatctactgta

SEQ ID NO: 533926 - DNA, 19 bp, Mus musculus
  siRNA target sequence for Cul1 (NM_012042.3,400-418).
ggaattcagcaggtgtata

SEQ ID NO: 533927 - DNA, 19 bp, Mus musculus
  siRNA target sequence for Cul1 (NM_012042.3,450-468).
ggaactctacactcatgtt

SEQ ID NO: 533928 - DNA, 19 bp, Mus musculus
  siRNA target sequence for Cul1 (NM_012042.3,451-469).
gaactctacactcatgttt

SEQ ID NO: 533929 - DNA, 19 bp, Mus musculus
  siRNA target sequence for Cul1 (NM_012042.3,463-481).
catgtttataactactgta

SEQ ID NO: 533930 - DNA, 19 bp, Mus musculus
  siRNA target sequence for Cul1 (NM_012042.3,554-572).
ctgggggagctcagtttgt

SEQ ID NO: 533931 - DNA, 19 bp, Mus musculus
  siRNA target sequence for Cul1 (NM_012042.3,658-676).
gagagtgtcctgaagttct

SEQ ID NO: 533932 - DNA, 19 bp, Mus musculus
  siRNA target sequence for Cul1 (NM_012042.3,752-770).
gggttcgccgtgaatgtga

SEQ ID NO: 533933 - DNA, 19 bp, Mus musculus
  siRNA target sequence for Cul1 (NM_012042.3,753-771).
ggttcgccgtgaatgtgat

SEQ ID NO: 533934 - DNA, 19 bp, Mus musculus
  siRNA target sequence for Cul1 (NM_012042.3,776-794).
gacgaaaaggaatatatga

SEQ ID NO: 533935 - DNA, 19 bp, Mus musculus
  siRNA target sequence for Cul1 (NM_012042.3,778-796).
cgaaaaggaatatatgaaa

SEQ ID NO: 533936 - DNA, 19 bp, Mus musculus
  siRNA target sequence for Cul1 (NM_012042.3,866-884).
ctgttttaaagttgattga

SEQ ID NO: 533937 - DNA, 19 bp, Mus musculus
  siRNA target sequence for Cul1 (NM_012042.3,906-924).
catcaatacaagactgatt

SEQ ID NO: 533938 - DNA, 19 bp, Mus musculus
  siRNA target sequence for Cul1 (NM_012042.3,909-927).
caatacaagactgattagt

SEQ ID NO: 533939 - DNA, 19 bp, Mus musculus
  siRNA target sequence for Cul1 (NM_012042.3,921-939).
gattagtggagttgtacaa

SEQ ID NO: 533940 - DNA, 19 bp, Mus musculus
  siRNA target sequence for Cul1 (NM_012042.3,979-997).
gcaaagggccctacgttaa

SEQ ID NO: 533941 - DNA, 19 bp, Mus musculus
  siRNA target sequence for Cul1 (NM_012042.3,987-1005).
ccctacgttaacagtgtat

SEQ ID NO: 533942 - DNA, 19 bp, Mus musculus
  siRNA target sequence for Cul1 (NM_012042.3,1080-1098).
gcagaacccagttactgaa

SEQ ID NO: 533943 - DNA, 19 bp, Mus musculus
  siRNA target sequence for Cul1 (NM_012042.3,1081-1099).
cagaacccagttactgaat

SEQ ID NO: 533944 - DNA, 19 bp, Mus musculus
  siRNA target sequence for Cul1 (NM_012042.3,1083-1101).
gaacccagttactgaatat

SEQ ID NO: 533945 - DNA, 19 bp, Mus musculus
  siRNA target sequence for Cul1 (NM_012042.3,1158-1176).
ccacgagagcacacaagat

SEQ ID NO: 533946 - DNA, 19 bp, Mus musculus
  siRNA target sequence for Cul1 (NM_012042.3,1201-1219).
gtcctcattgaaaaacact

SEQ ID NO: 533947 - DNA, 19 bp, Mus musculus
  siRNA target sequence for Cul1 (NM_012042.3,1281-1299).
ccgcatgtataatcttgta

SEQ ID NO: 533948 - DNA, 19 bp, Mus musculus
  siRNA target sequence for Cul1 (NM_012042.3,1282-1300).
cgcatgtataatcttgtat

SEQ ID NO: 533949 - DNA, 19 bp, Mus musculus
  siRNA target sequence for Cul1 (NM_012042.3,1284-1302).
catgtataatcttgtatct

SEQ ID NO: 533950 - DNA, 19 bp, Mus musculus
  siRNA target sequence for Cul1 (NM_012042.3,1287-1305).
gtataatcttgtatctaga

SEQ ID NO: 533951 - DNA, 19 bp, Mus musculus
  siRNA target sequence for Cul1 (NM_012042.3,1312-1330).
gatggcctaggagaattga

SEQ ID NO: 533952 - DNA, 19 bp, Mus musculus
  siRNA target sequence for Cul1 (NM_012042.3,1339-1357).
ctagagacacatattcata

SEQ ID NO: 533953 - DNA, 19 bp, Mus musculus
  siRNA target sequence for Cul1 (NM_012042.3,1385-1403).
gtggagaagctgctctaaa

SEQ ID NO: 533954 - DNA, 19 bp, Mus musculus
  siRNA target sequence for Cul1 (NM_012042.3,1435-1453).
gatgttcataaaaaataca

SEQ ID NO: 533955 - DNA, 19 bp, Mus musculus
  siRNA target sequence for Cul1 (NM_012042.3,1491-1509).
cttcgtagctgctcttgat

SEQ ID NO: 533956 - DNA, 19 bp, Mus musculus
  siRNA target sequence for Cul1 (NM_012042.3,1512-1530).
ggcttgtggtcgcttcata

SEQ ID NO: 533957 - DNA, 19 bp, Mus musculus
  siRNA target sequence for Cul1 (NM_012042.3,1513-1531).
gcttgtggtcgcttcataa

SEQ ID NO: 533958 - DNA, 19 bp, Mus musculus
  siRNA target sequence for Cul1 (NM_012042.3,1514-1532).
cttgtggtcgcttcataaa

SEQ ID NO: 533959 - DNA, 19 bp, Mus musculus
  siRNA target sequence for Cul1 (NM_012042.3,1517-1535).
gtggtcgcttcataaacaa

SEQ ID NO: 533960 - DNA, 19 bp, Mus musculus
  siRNA target sequence for Cul1 (NM_012042.3,1519-1537).
ggtcgcttcataaacaaca

SEQ ID NO: 533961 - DNA, 19 bp, Mus musculus
  siRNA target sequence for Cul1 (NM_012042.3,1533-1551).
caacaatgcggttaccaaa

SEQ ID NO: 533962 - DNA, 19 bp, Mus musculus
  siRNA target sequence for Cul1 (NM_012042.3,1733-1751).
ccaagagactggtacatca

SEQ ID NO: 533963 - DNA, 19 bp, Mus musculus
  siRNA target sequence for Cul1 (NM_012042.3,1734-1752).
caagagactggtacatcaa

SEQ ID NO: 533964 - DNA, 19 bp, Mus musculus
  siRNA target sequence for Cul1 (NM_012042.3,1836-1854).
gcgaatgtttcaagacatt

SEQ ID NO: 533965 - DNA, 19 bp, Mus musculus
  siRNA target sequence for Cul1 (NM_012042.3,1851-1869).
cattggtgtaagcaaagat

SEQ ID NO: 533966 - DNA, 19 bp, Mus musculus
  siRNA target sequence for Cul1 (NM_012042.3,2002-2020).
cgcagttatcagcgattta

SEQ ID NO: 533967 - DNA, 19 bp, Mus musculus
  siRNA target sequence for Cul1 (NM_012042.3,2004-2022).
cagttatcagcgatttaca

SEQ ID NO: 533968 - DNA, 19 bp, Mus musculus
  siRNA target sequence for Cul1 (NM_012042.3,2083-2101).
ggggaactagtcactaact

SEQ ID NO: 533969 - DNA, 19 bp, Mus musculus
  siRNA target sequence for Cul1 (NM_012042.3,2103-2121).
cttcaaaaacagatacact

SEQ ID NO: 533970 - DNA, 19 bp, Mus musculus
  siRNA target sequence for Cul1 (NM_012042.3,2125-2143).
caggcgtccacatttcaga

SEQ ID NO: 533971 - DNA, 19 bp, Mus musculus
  siRNA target sequence for Cul1 (NM_012042.3,2146-2164).
gcaatcctgcttcagtata

SEQ ID NO: 533972 - DNA, 19 bp, Mus musculus
  siRNA target sequence for Cul1 (NM_012042.3,2147-2165).
caatcctgcttcagtataa

SEQ ID NO: 533973 - DNA, 19 bp, Mus musculus
  siRNA target sequence for Cul1 (NM_012042.3,2151-2169).
cctgcttcagtataacaca

SEQ ID NO: 533974 - DNA, 19 bp, Mus musculus
  siRNA target sequence for Cul1 (NM_012042.3,2166-2184).
cacagaagacgcctatact

SEQ ID NO: 533975 - DNA, 19 bp, Mus musculus
  siRNA target sequence for Cul1 (NM_012042.3,2168-2186).
cagaagacgcctatactgt

SEQ ID NO: 533976 - DNA, 19 bp, Mus musculus
  siRNA target sequence for Cul1 (NM_012042.3,2198-2216).
ctgacagcactcagattaa

SEQ ID NO: 533977 - DNA, 19 bp, Mus musculus
  siRNA target sequence for Cul1 (NM_012042.3,2200-2218).
gacagcactcagattaaaa

SEQ ID NO: 533978 - DNA, 19 bp, Mus musculus
  siRNA target sequence for Cul1 (NM_012042.3,2229-2247).
ggcacaagtcctacagatt

SEQ ID NO: 533979 - DNA, 19 bp, Mus musculus
  siRNA target sequence for Cul1 (NM_012042.3,2293-2311).
gttgatgaggtggaattga

SEQ ID NO: 533980 - DNA, 19 bp, Mus musculus
  siRNA target sequence for Cul1 (NM_012042.3,2310-2328).
gaagccagacaccttaata

SEQ ID NO: 533981 - DNA, 19 bp, Mus musculus
  siRNA target sequence for Cul1 (NM_012042.3,2317-2335).
gacaccttaataaagttat

SEQ ID NO: 533982 - DNA, 19 bp, Mus musculus
  siRNA target sequence for Cul1 (NM_012042.3,2321-2339).
ccttaataaagttatatct

SEQ ID NO: 533983 - DNA, 19 bp, Mus musculus
  siRNA target sequence for Cul1 (NM_012042.3,2361-2379).
gagggttaatatcaatgta

SEQ ID NO: 533984 - DNA, 19 bp, Mus musculus
  siRNA target sequence for Cul1 (NM_012042.3,2373-2391).
caatgtaccaatgaaaact

SEQ ID NO: 533985 - DNA, 19 bp, Mus musculus
  siRNA target sequence for Cul1 (NM_012042.3,2461-2479).
gccatcgtgagaatcatga

SEQ ID NO: 533986 - DNA, 19 bp, Mus musculus
  siRNA target sequence for Cul1 (NM_012042.3,2552-2570).
ctcgggtcccggtgatcaa

SEQ ID NO: 533987 - DNA, 19 bp, Mus musculus
  siRNA target sequence for Cul1 (NM_012042.3,2554-2572).
cgggtcccggtgatcaaga

SEQ ID NO: 533988 - DNA, 19 bp, Mus musculus
  siRNA target sequence for Cul1 (NM_012042.3,2555-2573).
gggtcccggtgatcaagaa

SEQ ID NO: 533989 - DNA, 19 bp, Mus musculus
  siRNA target sequence for Cul1 (NM_012042.3,2556-2574).
ggtcccggtgatcaagaaa

SEQ ID NO: 533990 - DNA, 19 bp, Mus musculus
  siRNA target sequence for Cul1 (NM_012042.3,2557-2575).
gtcccggtgatcaagaaat

SEQ ID NO: 533991 - DNA, 19 bp, Mus musculus
  siRNA target sequence for Cul1 (NM_012042.3,2565-2583).
gatcaagaaatgcattgat

SEQ ID NO: 533992 - DNA, 19 bp, Mus musculus
  siRNA target sequence for Cyln2 (NM_009990.1,72-90).
cgttgggtctgcttcatct

SEQ ID NO: 533993 - DNA, 19 bp, Mus musculus
  siRNA target sequence for Cyln2 (NM_009990.1,73-91).
gttgggtctgcttcatctt

SEQ ID NO: 533994 - DNA, 19 bp, Mus musculus
  siRNA target sequence for Cyln2 (NM_009990.1,294-312).
cctgggtgagacacagttt

SEQ ID NO: 533995 - DNA, 19 bp, Mus musculus
  siRNA target sequence for Cyln2 (NM_009990.1,403-421).
gctctacagggcatcttca

SEQ ID NO: 533996 - DNA, 19 bp, Mus musculus
  siRNA target sequence for Cyln2 (NM_009990.1,561-579).
cctgcgggagagtgttctt

SEQ ID NO: 533997 - DNA, 19 bp, Mus musculus
  siRNA target sequence for Cyln2 (NM_009990.1,562-580).
ctgcgggagagtgttctta

SEQ ID NO: 533998 - DNA, 19 bp, Mus musculus
  siRNA target sequence for Cyln2 (NM_009990.1,565-583).
cgggagagtgttcttaaca

SEQ ID NO: 533999 - DNA, 19 bp, Mus musculus
  siRNA target sequence for Cyln2 (NM_009990.1,698-716).
ccggtgtggtgcgatatgt

SEQ ID NO: 534000 - DNA, 19 bp, Mus musculus
  siRNA target sequence for Cyln2 (NM_009990.1,699-717).
cggtgtggtgcgatatgtt

SEQ ID NO: 534001 - DNA, 19 bp, Mus musculus
  siRNA target sequence for Cyln2 (NM_009990.1,946-964).
cccagcagctcttccatta

SEQ ID NO: 534002 - DNA, 19 bp, Mus musculus
  siRNA target sequence for Cyln2 (NM_009990.1,1458-1476).
gcggctgctcagagaatta

SEQ ID NO: 534003 - DNA, 19 bp, Mus musculus
  siRNA target sequence for Cyln2 (NM_009990.1,1613-1631).
cagaggccgctgagacttt

SEQ ID NO: 534004 - DNA, 19 bp, Mus musculus
  siRNA target sequence for Cyln2 (NM_009990.1,1981-1999).
caccagctggagttaggta

SEQ ID NO: 534005 - DNA, 19 bp, Mus musculus
  siRNA target sequence for Cyln2 (NM_009990.1,2278-2296).
gaaaagaagatgctagatt

SEQ ID NO: 534006 - DNA, 19 bp, Mus musculus
  siRNA target sequence for Cyln2 (NM_009990.1,2413-2431).
cacagccatgtgatcgaat

SEQ ID NO: 534007 - DNA, 19 bp, Mus musculus
  siRNA target sequence for Cyln2 (NM_009990.1,2790-2808).
gagccgtgaagtacacaaa

SEQ ID NO: 534008 - DNA, 19 bp, Mus musculus
  siRNA target sequence for Cyln2 (NM_009990.1,2810-2828).
ctgaatggcggataaagga

SEQ ID NO: 534009 - DNA, 19 bp, Mus musculus
  siRNA target sequence for Cyln2 (NM_009990.1,2816-2834).
ggcggataaaggaacagaa

SEQ ID NO: 534010 - DNA, 19 bp, Mus musculus
  siRNA target sequence for Cyln2 (NM_009990.1,2909-2927).
gacgctactccctcattga

SEQ ID NO: 534011 - DNA, 19 bp, Mus musculus
  siRNA target sequence for Cyln2 (NM_009990.1,3083-3101).
gttctgccaacggtattca

SEQ ID NO: 534012 - DNA, 19 bp, Mus musculus
  siRNA target sequence for Cyln2 (NM_009990.1,3107-3125).
cagacaaggcccacaaaca

SEQ ID NO: 534013 - DNA, 19 bp, Mus musculus
  siRNA target sequence for D030019D19Rik (NM_022811.1,189-207).
cgcttcaccttgtacaaca

SEQ ID NO: 534014 - DNA, 19 bp, Mus musculus
  siRNA target sequence for D030019D19Rik (NM_022811.1,203-221).
caacagcaccgacttagta

SEQ ID NO: 534015 - DNA, 19 bp, Mus musculus
  siRNA target sequence for D030019D19Rik (NM_022811.1,248-266).
cgtggcagctgaaacagat

SEQ ID NO: 534016 - DNA, 19 bp, Mus musculus
  siRNA target sequence for D030019D19Rik (NM_022811.1,275-293).
ctatgtcggaaacaatttt

SEQ ID NO: 534017 - DNA, 19 bp, Mus musculus
  siRNA target sequence for D030019D19Rik (NM_022811.1,294-312).
gggaccggtgccctcaaat

SEQ ID NO: 534018 - DNA, 19 bp, Mus musculus
  siRNA target sequence for D030019D19Rik (NM_022811.1,299-317).
cggtgccctcaaatgcaat

SEQ ID NO: 534019 - DNA, 19 bp, Mus musculus
  siRNA target sequence for D030019D19Rik (NM_022811.1,319-337).
ctctttgcagacactttgt

SEQ ID NO: 534020 - DNA, 19 bp, Mus musculus
  siRNA target sequence for D030019D19Rik (NM_022811.1,358-376).
ctggccagatggaagtcta

SEQ ID NO: 534021 - DNA, 19 bp, Mus musculus
  siRNA target sequence for D030019D19Rik (NM_022811.1,362-380).
ccagatggaagtctatgat

SEQ ID NO: 534022 - DNA, 19 bp, Mus musculus
  siRNA target sequence for D030019D19Rik (NM_022811.1,378-396).
gatgccgaactgttcaaca

SEQ ID NO: 534023 - DNA, 19 bp, Mus musculus
  siRNA target sequence for D030019D19Rik (NM_022811.1,407-425).
gtttgctgacgatgctatt

SEQ ID NO: 534024 - DNA, 19 bp, Mus musculus
  siRNA target sequence for D030019D19Rik (NM_022811.1,473-491).
gttggattcttgcattgaa

SEQ ID NO: 534025 - DNA, 19 bp, Mus musculus
  siRNA target sequence for D030019D19Rik (NM_022811.1,510-528).
cagaagcggtccctaaact

SEQ ID NO: 534026 - DNA, 19 bp, Mus musculus
  siRNA target sequence for D030019D19Rik (NM_022811.1,527-545).
ctccaggcggatgaacaaa

SEQ ID NO: 534027 - DNA, 19 bp, Mus musculus
  siRNA target sequence for D030019D19Rik (NM_022811.1,529-547).
ccaggcggatgaacaaagt

SEQ ID NO: 534028 - DNA, 19 bp, Mus musculus
  siRNA target sequence for D030019D19Rik (NM_022811.1,530-548).
caggcggatgaacaaagtt

SEQ ID NO: 534029 - DNA, 19 bp, Mus musculus
  siRNA target sequence for D030019D19Rik (NM_022811.1,585-603).
gcggagagtattattgata

SEQ ID NO: 534030 - DNA, 19 bp, Mus musculus
  siRNA target sequence for D030019D19Rik (NM_022811.1,700-718).
cggaagacgtgtatagatt

SEQ ID NO: 534031 - DNA, 19 bp, Mus musculus
  siRNA target sequence for D030019D19Rik (NM_022811.1,782-800).
ggtcacatcggaagacata

SEQ ID NO: 534032 - DNA, 19 bp, Mus musculus
  siRNA target sequence for D030019D19Rik (NM_022811.1,827-845).
ctgctcctacgtcatagaa

SEQ ID NO: 534033 - DNA, 19 bp, Mus musculus
  siRNA target sequence for D030019D19Rik (NM_022811.1,829-847).
gctcctacgtcatagaaat

SEQ ID NO: 534034 - DNA, 19 bp, Mus musculus
  siRNA target sequence for D030019D19Rik (NM_022811.1,909-927).
ctagacgccctcatcagat

SEQ ID NO: 534035 - DNA, 19 bp, Mus musculus
  siRNA target sequence for D030019D19Rik (NM_022811.1,925-943).
gattccgagctcagaaagt

SEQ ID NO: 534036 - DNA, 19 bp, Mus musculus
  siRNA target sequence for D030019D19Rik (NM_022811.1,929-947).
ccgagctcagaaagtgata

SEQ ID NO: 534037 - DNA, 19 bp, Mus musculus
  siRNA target sequence for D030019D19Rik (NM_022811.1,969-987).
cctggaatcccgcacatta

SEQ ID NO: 534038 - DNA, 19 bp, Mus musculus
  siRNA target sequence for D030019D19Rik (NM_022811.1,970-988).
ctggaatcccgcacattat

SEQ ID NO: 534039 - DNA, 19 bp, Mus musculus
  siRNA target sequence for D030019D19Rik (NM_022811.1,973-991).
gaatcccgcacattatcaa

SEQ ID NO: 534040 - DNA, 19 bp, Mus musculus
  siRNA target sequence for D030019D19Rik (NM_022811.1,1046-1064).
gaacctcatttcaagttct

SEQ ID NO: 534041 - DNA, 19 bp, Mus musculus
  siRNA target sequence for D030019D19Rik (NM_022811.1,1050-1068).
ctcatttcaagttctatga

SEQ ID NO: 534042 - DNA, 19 bp, Mus musculus
  siRNA target sequence for D030019D19Rik (NM_022811.1,1070-1088).
ggccaagatcacttcgtat

SEQ ID NO: 534043 - DNA, 19 bp, Mus musculus
  siRNA target sequence for D030019D19Rik (NM_022811.1,1079-1097).
cacttcgtatgcgattata

SEQ ID NO: 534044 - DNA, 19 bp, Mus musculus
  siRNA target sequence for D030019D19Rik (NM_022811.1,1081-1099).
cttcgtatgcgattatact

SEQ ID NO: 534045 - DNA, 19 bp, Mus musculus
  siRNA target sequence for D030019D19Rik (NM_022811.1,1098-1116).
cttgccctgcacataaata

SEQ ID NO: 534046 - DNA, 19 bp, Mus musculus
  siRNA target sequence for D030019D19Rik (NM_022811.1,1101-1119).
gccctgcacataaataact

SEQ ID NO: 534047 - DNA, 19 bp, Mus musculus
  siRNA target sequence for D030019D19Rik (NM_022811.1,1160-1178).
gagtgagaaaaggatgatt

SEQ ID NO: 534048 - DNA, 19 bp, Mus musculus
  siRNA target sequence for D030019D19Rik (NM_022811.1,1162-1180).
gtgagaaaaggatgattga

SEQ ID NO: 534049 - DNA, 19 bp, Mus musculus
  siRNA target sequence for D030019D19Rik (NM_022811.1,1164-1182).
gagaaaaggatgattgaga

SEQ ID NO: 534050 - DNA, 19 bp, Mus musculus
  siRNA target sequence for D130026O08Rik (NM_080448.2,493-511).
gagaaacagtttaacaagt

SEQ ID NO: 534051 - DNA, 19 bp, Mus musculus
  siRNA target sequence for D130026O08Rik (NM_080448.2,562-580).
cgcagctccgtgaagaaga

SEQ ID NO: 534052 - DNA, 19 bp, Mus musculus
  siRNA target sequence for D130026O08Rik (NM_080448.2,602-620).
ggcaggccaagtattctga

SEQ ID NO: 534053 - DNA, 19 bp, Mus musculus
  siRNA target sequence for D130026O08Rik (NM_080448.2,712-730).
gtctctgatctcatcgatt

SEQ ID NO: 534054 - DNA, 19 bp, Mus musculus
  siRNA target sequence for D130026O08Rik (NM_080448.2,721-739).
ctcatcgattgctgtgatt

SEQ ID NO: 534055 - DNA, 19 bp, Mus musculus
  siRNA target sequence for D130026O08Rik (NM_080448.2,908-926).
gccctccactcaagtttga

SEQ ID NO: 534056 - DNA, 19 bp, Mus musculus
  siRNA target sequence for D130026O08Rik (NM_080448.2,1144-1162).
cgatctacagagtccataa

SEQ ID NO: 534057 - DNA, 19 bp, Mus musculus
  siRNA target sequence for D130026O08Rik (NM_080448.2,1177-1195).
gagacctacatgagcaaaa

SEQ ID NO: 534058 - DNA, 19 bp, Mus musculus
  siRNA target sequence for D130026O08Rik (NM_080448.2,1296-1314).
gcaagccaagcatgactta

SEQ ID NO: 534059 - DNA, 19 bp, Mus musculus
  siRNA target sequence for D130026O08Rik (NM_080448.2,1401-1419).
gagacctaggcctctttca

SEQ ID NO: 534060 - DNA, 19 bp, Mus musculus
  siRNA target sequence for D130026O08Rik (NM_080448.2,1403-1421).
gacctaggcctctttcagt

SEQ ID NO: 534061 - DNA, 19 bp, Mus musculus
  siRNA target sequence for D130026O08Rik (NM_080448.2,1418-1436).
cagtgtatagccataaact

SEQ ID NO: 534062 - DNA, 19 bp, Mus musculus
  siRNA target sequence for D130026O08Rik (NM_080448.2,1420-1438).
gtgtatagccataaactct

SEQ ID NO: 534063 - DNA, 19 bp, Mus musculus
  siRNA target sequence for D130026O08Rik (NM_080448.2,1422-1440).
gtatagccataaactcttt

SEQ ID NO: 534064 - DNA, 19 bp, Mus musculus
  siRNA target sequence for D130026O08Rik (NM_080448.2,1453-1471).
gaagcgttcattaaggatt

SEQ ID NO: 534065 - DNA, 19 bp, Mus musculus
  siRNA target sequence for D130026O08Rik (NM_080448.2,1467-1485).
ggattcaggacaagctata

SEQ ID NO: 534066 - DNA, 19 bp, Mus musculus
  siRNA target sequence for D130026O08Rik (NM_080448.2,1563-1581).
gtctcaggttgaagtcaat

SEQ ID NO: 534067 - DNA, 19 bp, Mus musculus
  siRNA target sequence for D130026O08Rik (NM_080448.2,1565-1583).
ctcaggttgaagtcaatga

SEQ ID NO: 534068 - DNA, 19 bp, Mus musculus
  siRNA target sequence for D130026O08Rik (NM_080448.2,1616-1634).
ccctcgtggatgaccaaaa

SEQ ID NO: 534069 - DNA, 19 bp, Mus musculus
  siRNA target sequence for D130026O08Rik (NM_080448.2,1617-1635).
cctcgtggatgaccaaaat

SEQ ID NO: 534070 - DNA, 19 bp, Mus musculus
  siRNA target sequence for D130026O08Rik (NM_080448.2,1630-1648).
caaaatgagcgagatatca

SEQ ID NO: 534071 - DNA, 19 bp, Mus musculus
  siRNA target sequence for D130026O08Rik (NM_080448.2,1638-1656).
gcgagatatcaattcagtt

SEQ ID NO: 534072 - DNA, 19 bp, Mus musculus
  siRNA target sequence for D130026O08Rik (NM_080448.2,1723-1741).
gatttgatatctactatta

SEQ ID NO: 534073 - DNA, 19 bp, Mus musculus
  siRNA target sequence for D130026O08Rik (NM_080448.2,1969-1987).
gaagtcatcaaaactatca

SEQ ID NO: 534074 - DNA, 19 bp, Mus musculus
  siRNA target sequence for D130026O08Rik (NM_080448.2,2029-2047).
gagggacccgtgtacgaaa

SEQ ID NO: 534075 - DNA, 19 bp, Mus musculus
  siRNA target sequence for D130026O08Rik (NM_080448.2,2032-2050).
ggacccgtgtacgaaaaat

SEQ ID NO: 534076 - DNA, 19 bp, Mus musculus
  siRNA target sequence for D130026O08Rik (NM_080448.2,2099-2117).
ggaccattgatgaagttga

SEQ ID NO: 534077 - DNA, 19 bp, Mus musculus
  siRNA target sequence for D130026O08Rik (NM_080448.2,2199-2217).
gcggtcccctcgtgaacta

SEQ ID NO: 534078 - DNA, 19 bp, Mus musculus
  siRNA target sequence for D130026O08Rik (NM_080448.2,2200-2218).
cggtcccctcgtgaactat

SEQ ID NO: 534079 - DNA, 19 bp, Mus musculus
  siRNA target sequence for D130026O08Rik (NM_080448.2,2204-2222).
cccctcgtgaactatcctt

SEQ ID NO: 534080 - DNA, 19 bp, Mus musculus
  siRNA target sequence for D130026O08Rik (NM_080448.2,2209-2227).
cgtgaactatccttcaaaa

SEQ ID NO: 534081 - DNA, 19 bp, Mus musculus
  siRNA target sequence for D130026O08Rik (NM_080448.2,2210-2228).
gtgaactatccttcaaaaa

SEQ ID NO: 534082 - DNA, 19 bp, Mus musculus
  siRNA target sequence for D130026O08Rik (NM_080448.2,2234-2252).
cctcactactcctgtatca

SEQ ID NO: 534083 - DNA, 19 bp, Mus musculus
  siRNA target sequence for D130026O08Rik (NM_080448.2,2444-2462).
cagagcacatctctgatta

SEQ ID NO: 534084 - DNA, 19 bp, Mus musculus
  siRNA target sequence for D130026O08Rik (NM_080448.2,2680-2698).
gggagcgctggcagtatca

SEQ ID NO: 534085 - DNA, 19 bp, Mus musculus
  siRNA target sequence for D130026O08Rik (NM_080448.2,2681-2699).
ggagcgctggcagtatcaa

SEQ ID NO: 534086 - DNA, 19 bp, Mus musculus
  siRNA target sequence for D130026O08Rik (NM_080448.2,2684-2702).
gcgctggcagtatcaacta

SEQ ID NO: 534087 - DNA, 19 bp, Mus musculus
  siRNA target sequence for D130026O08Rik (NM_080448.2,2962-2980).
cccctgcacaccattgtca

SEQ ID NO: 534088 - DNA, 19 bp, Mus musculus
  siRNA target sequence for D130026O08Rik (NM_080448.2,3017-3035).
gctcatcgacggagatgat

SEQ ID NO: 534089 - DNA, 19 bp, Mus musculus
  siRNA target sequence for D130026O08Rik (NM_080448.2,3173-3191).
cacccacggagaagatgtt

SEQ ID NO: 534090 - DNA, 19 bp, Mus musculus
  siRNA target sequence for D130026O08Rik (NM_153070.1,419-437).
cacaactggagggaattgt

SEQ ID NO: 534091 - DNA, 19 bp, Mus musculus
  siRNA target sequence for D130026O08Rik (NM_153070.1,495-513).
ggagggaaacggattccta

SEQ ID NO: 534092 - DNA, 19 bp, Mus musculus
  siRNA target sequence for D130026O08Rik (NM_153070.1,519-537).
cggaaaggtttatatccaa

SEQ ID NO: 534093 - DNA, 19 bp, Mus musculus
  siRNA target sequence for D130026O08Rik (NM_153070.1,520-538).
ggaaaggtttatatccaat

SEQ ID NO: 534094 - DNA, 19 bp, Mus musculus
  siRNA target sequence for D130026O08Rik (NM_153070.1,526-544).
gtttatatccaatgaagaa

SEQ ID NO: 534095 - DNA, 19 bp, Mus musculus
  siRNA target sequence for D130026O08Rik (NM_153070.1,729-747).
gggtgcatccctttcttat

SEQ ID NO: 534096 - DNA, 19 bp, Mus musculus
  siRNA target sequence for D130026O08Rik (NM_153070.1,805-823).
ggccagcgcacatacattt

SEQ ID NO: 534097 - DNA, 19 bp, Mus musculus
  siRNA target sequence for D130026O08Rik (NM_153070.1,808-826).
cagcgcacatacatttgga

SEQ ID NO: 534098 - DNA, 19 bp, Mus musculus
  siRNA target sequence for D130026O08Rik (NM_153070.1,825-843).
gaacgagtgctggaaaact

SEQ ID NO: 534099 - DNA, 19 bp, Mus musculus
  siRNA target sequence for D130026O08Rik (NM_153070.1,911-929).
gttccacactagagcaaat

SEQ ID NO: 534100 - DNA, 19 bp, Mus musculus
  siRNA target sequence for D130026O08Rik (NM_153070.1,959-977).
ggtggagtggggtgtcatt

SEQ ID NO: 534101 - DNA, 19 bp, Mus musculus
  siRNA target sequence for D130026O08Rik (NM_153070.1,960-978).
gtggagtggggtgtcattt

SEQ ID NO: 534102 - DNA, 19 bp, Mus musculus
  siRNA target sequence for D130026O08Rik (NM_153070.1,1002-1020).
cgtactgggaggaaaaggt

SEQ ID NO: 534103 - DNA, 19 bp, Mus musculus
  siRNA target sequence for D1Ertd8e (NM_030211.1,120-138).
cagaagacgtgctagatat

SEQ ID NO: 534104 - DNA, 19 bp, Mus musculus
  siRNA target sequence for D1Ertd8e (NM_030211.1,192-210).
gccgctttaaggattctat

SEQ ID NO: 534105 - DNA, 19 bp, Mus musculus
  siRNA target sequence for D1Ertd8e (NM_030211.1,211-229).
gctggcatctatgtttagt

SEQ ID NO: 534106 - DNA, 19 bp, Mus musculus
  siRNA target sequence for D1Ertd8e (NM_030211.1,228-246).
gtggtcgtttccctctaaa

SEQ ID NO: 534107 - DNA, 19 bp, Mus musculus
  siRNA target sequence for D1Ertd8e (NM_030211.1,230-248).
ggtcgtttccctctaaaaa

SEQ ID NO: 534108 - DNA, 19 bp, Mus musculus
  siRNA target sequence for D1Ertd8e (NM_030211.1,254-272).
gaatctggggcgtgcatta

SEQ ID NO: 534109 - DNA, 19 bp, Mus musculus
  siRNA target sequence for D1Ertd8e (NM_030211.1,258-276).
ctggggcgtgcattattaa

SEQ ID NO: 534110 - DNA, 19 bp, Mus musculus
  siRNA target sequence for D1Ertd8e (NM_030211.1,278-296).
cgtgatggacatctattca

SEQ ID NO: 534111 - DNA, 19 bp, Mus musculus
  siRNA target sequence for D1Ertd8e (NM_030211.1,281-299).
gatggacatctattcaaat

SEQ ID NO: 534112 - DNA, 19 bp, Mus musculus
  siRNA target sequence for D1Ertd8e (NM_030211.1,284-302).
ggacatctattcaaataca

SEQ ID NO: 534113 - DNA, 19 bp, Mus musculus
  siRNA target sequence for D1Ertd8e (NM_030211.1,367-385).
ggaggaggctgactacttt

SEQ ID NO: 534114 - DNA, 19 bp, Mus musculus
  siRNA target sequence for D1Ertd8e (NM_030211.1,434-452).
gagacatattctttaaggt

SEQ ID NO: 534115 - DNA, 19 bp, Mus musculus
  siRNA target sequence for D1Ertd8e (NM_030211.1,444-462).
ctttaaggtcaaatataga

SEQ ID NO: 534116 - DNA, 19 bp, Mus musculus
  siRNA target sequence for D1Ertd8e (NM_030211.1,461-479).
gaacttaaaaaggctttaa

SEQ ID NO: 534117 - DNA, 19 bp, Mus musculus
  siRNA target sequence for D1Ertd8e (NM_030211.1,480-498).
cagacttctgtgattccta

SEQ ID NO: 534118 - DNA, 19 bp, Mus musculus
  siRNA target sequence for D1Ertd8e (NM_030211.1,491-509).
gattcctatggcttagttt

SEQ ID NO: 534119 - DNA, 19 bp, Mus musculus
  siRNA target sequence for D1Ertd8e (NM_030211.1,495-513).
cctatggcttagtttgcaa

SEQ ID NO: 534120 - DNA, 19 bp, Mus musculus
  siRNA target sequence for D1Ertd8e (NM_030211.1,496-514).
ctatggcttagtttgcaat

SEQ ID NO: 534121 - DNA, 19 bp, Mus musculus
  siRNA target sequence for D1Ertd8e (NM_030211.1,502-520).
cttagtttgcaataaacca

SEQ ID NO: 534122 - DNA, 19 bp, Mus musculus
  siRNA target sequence for D1Ertd8e (NM_030211.1,528-546).
gggttctccactatcttaa

SEQ ID NO: 534123 - DNA, 19 bp, Mus musculus
  siRNA target sequence for D1Ertd8e (NM_030211.1,530-548).
gttctccactatcttaaca

SEQ ID NO: 534124 - DNA, 19 bp, Mus musculus
  siRNA target sequence for D1Ertd8e (NM_030211.1,533-551).
ctccactatcttaacacat

SEQ ID NO: 534125 - DNA, 19 bp, Mus musculus
  siRNA target sequence for D1Ertd8e (NM_030211.1,561-579).
gctgtgagagtagaattat

SEQ ID NO: 534126 - DNA, 19 bp, Mus musculus
  siRNA target sequence for D1Ertd8e (NM_030211.1,562-580).
ctgtgagagtagaattatt

SEQ ID NO: 534127 - DNA, 19 bp, Mus musculus
  siRNA target sequence for D1Ertd8e (NM_030211.1,581-599).
ggtgtctatgctacaaaaa

SEQ ID NO: 534128 - DNA, 19 bp, Mus musculus
  siRNA target sequence for D1Ertd8e (NM_030211.1,604-622).
cgggacagatgccattgat

SEQ ID NO: 534129 - DNA, 19 bp, Mus musculus
  siRNA target sequence for D1Ertd8e (NM_030211.1,631-649).
gggaggaaggattcatagt

SEQ ID NO: 534130 - DNA, 19 bp, Mus musculus
  siRNA target sequence for D1Ertd8e (NM_030211.1,632-650).
ggaggaaggattcatagta

SEQ ID NO: 534131 - DNA, 19 bp, Mus musculus
  siRNA target sequence for D1Ertd8e (NM_030211.1,675-693).
ggaacaacgttcagtacat

SEQ ID NO: 534132 - DNA, 19 bp, Mus musculus
  siRNA target sequence for D1Ertd8e (NM_030211.1,676-694).
gaacaacgttcagtacatt

SEQ ID NO: 534133 - DNA, 19 bp, Mus musculus
  siRNA target sequence for D1Ertd8e (NM_030211.1,691-709).
catttggagctattactca

SEQ ID NO: 534134 - DNA, 19 bp, Mus musculus
  siRNA target sequence for D1Ertd8e (NM_030211.1,710-728).
gtagccgagttgaagaaaa

SEQ ID NO: 534135 - DNA, 19 bp, Mus musculus
  siRNA target sequence for D430004I08Rik (NM_173424.1,221-239).
gtgggaacatacaattgga

SEQ ID NO: 534136 - DNA, 19 bp, Mus musculus
  siRNA target sequence for D430004I08Rik (NM_173424.1,260-278).
ctgttctgagccatctcaa

SEQ ID NO: 534137 - DNA, 19 bp, Mus musculus
  siRNA target sequence for D430004I08Rik (NM_173424.1,305-323).
gtgatattgtggtcaatgt

SEQ ID NO: 534138 - DNA, 19 bp, Mus musculus
  siRNA target sequence for D430004I08Rik (NM_173424.1,335-353).
cttttcgggctcacaaagt

SEQ ID NO: 534139 - DNA, 19 bp, Mus musculus
  siRNA target sequence for D430004I08Rik (NM_173424.1,374-392).
cttatttccgggatcacat

SEQ ID NO: 534140 - DNA, 19 bp, Mus musculus
  siRNA target sequence for D430004I08Rik (NM_173424.1,393-411).
gtccttgaatgaaatgagt

SEQ ID NO: 534141 - DNA, 19 bp, Mus musculus
  siRNA target sequence for D430004I08Rik (NM_173424.1,408-426).
gagtactgtgtccatttct

SEQ ID NO: 534142 - DNA, 19 bp, Mus musculus
  siRNA target sequence for D430004I08Rik (NM_173424.1,429-447).
catcaagaaccctactgtt

SEQ ID NO: 534143 - DNA, 19 bp, Mus musculus
  siRNA target sequence for D430004I08Rik (NM_173424.1,443-461).
ctgtttttgagcaacttct

SEQ ID NO: 534144 - DNA, 19 bp, Mus musculus
  siRNA target sequence for D430004I08Rik (NM_173424.1,488-506).
gcctgcaactagcagatat

SEQ ID NO: 534145 - DNA, 19 bp, Mus musculus
  siRNA target sequence for D430004I08Rik (NM_173424.1,543-561).
gcagcatattatagacaaa

SEQ ID NO: 534146 - DNA, 19 bp, Mus musculus
  siRNA target sequence for D430004I08Rik (NM_173424.1,609-627).
ggttgaagcagaattaagt

SEQ ID NO: 534147 - DNA, 19 bp, Mus musculus
  siRNA target sequence for D430004I08Rik (NM_173424.1,613-631).
gaagcagaattaagtcaaa

SEQ ID NO: 534148 - DNA, 19 bp, Mus musculus
  siRNA target sequence for D430004I08Rik (NM_173424.1,671-689).
gggctacaccaaatctaaa

SEQ ID NO: 534149 - DNA, 19 bp, Mus musculus
  siRNA target sequence for D430004I08Rik (NM_173424.1,786-804).
gcccaccagtcctcagata

SEQ ID NO: 534150 - DNA, 19 bp, Mus musculus
  siRNA target sequence for D430004I08Rik (NM_173424.1,787-805).
cccaccagtcctcagataa

SEQ ID NO: 534151 - DNA, 19 bp, Mus musculus
  siRNA target sequence for D430004I08Rik (NM_173424.1,838-856).
cccattcttcgaatcaaca

SEQ ID NO: 534152 - DNA, 19 bp, Mus musculus
  siRNA target sequence for D430004I08Rik (NM_173424.1,904-922).
cggagtggtgacgaagtta

SEQ ID NO: 534153 - DNA, 19 bp, Mus musculus
  siRNA target sequence for D430004I08Rik (NM_173424.1,935-953).
cagtgcacatcaaaactga

SEQ ID NO: 534154 - DNA, 19 bp, Mus musculus
  siRNA target sequence for D430004I08Rik (NM_173424.1,1043-1061).
ccacaggccatggttctat

SEQ ID NO: 534155 - DNA, 19 bp, Mus musculus
  siRNA target sequence for D430004I08Rik (NM_173424.1,1044-1062).
cacaggccatggttctata

SEQ ID NO: 534156 - DNA, 19 bp, Mus musculus
  siRNA target sequence for D430004I08Rik (NM_173424.1,1110-1128).
gccaaccagcagtgaagtt

SEQ ID NO: 534157 - DNA, 19 bp, Mus musculus
  siRNA target sequence for D430004I08Rik (NM_173424.1,1141-1159).
ccctccggcagtgttgttt

SEQ ID NO: 534158 - DNA, 19 bp, Mus musculus
  siRNA target sequence for D430004I08Rik (NM_173424.1,1145-1163).
ccggcagtgttgtttccat

SEQ ID NO: 534159 - DNA, 19 bp, Mus musculus
  siRNA target sequence for D430004I08Rik (NM_173424.1,1262-1280).
gcgcctatgtggagtatct

SEQ ID NO: 534160 - DNA, 19 bp, Mus musculus
  siRNA target sequence for D430004I08Rik (NM_173424.1,1272-1290).
ggagtatctccgagaacaa

SEQ ID NO: 534161 - DNA, 19 bp, Mus musculus
  siRNA target sequence for D430004I08Rik (NM_173424.1,1324-1342).
cgtctcacctgcatctact

SEQ ID NO: 534162 - DNA, 19 bp, Mus musculus
  siRNA target sequence for D430004I08Rik (NM_173424.1,1345-1363).
gccaaatctttcaaccaaa

SEQ ID NO: 534163 - DNA, 19 bp, Mus musculus
  siRNA target sequence for D430004I08Rik (NM_173424.1,1399-1417).
ggaatcacaccgtttgtct

SEQ ID NO: 534164 - DNA, 19 bp, Mus musculus
  siRNA target sequence for D430004I08Rik (NM_173424.1,1418-1436).
gccgcatgtgtggaaaaaa

SEQ ID NO: 534165 - DNA, 19 bp, Mus musculus
  siRNA target sequence for D430004I08Rik (NM_173424.1,1504-1522).
cacgtttgtggcaaaagtt

SEQ ID NO: 534166 - DNA, 19 bp, Mus musculus
  siRNA target sequence for D430004I08Rik (NM_173424.1,1584-1602).
ggaagggcctcatagcatt

SEQ ID NO: 534167 - DNA, 19 bp, Mus musculus
  siRNA target sequence for D430004I08Rik (NM_173424.1,1585-1603).
gaagggcctcatagcattt

SEQ ID NO: 534168 - DNA, 19 bp, Mus musculus
  siRNA target sequence for D430004I08Rik (NM_173424.1,1646-1664).
caccttcacacgaagaaat

SEQ ID NO: 534169 - DNA, 19 bp, Mus musculus
  siRNA target sequence for D5Ertd363e (NM_026448.1,155-173).
ctccggcgtggaaaagagt

SEQ ID NO: 534170 - DNA, 19 bp, Mus musculus
  siRNA target sequence for D5Ertd363e (NM_026448.1,232-250).
ggttcatgggcgtcatgaa

SEQ ID NO: 534171 - DNA, 19 bp, Mus musculus
  siRNA target sequence for D5Ertd363e (NM_026448.1,337-355).
cagccagtcacttctttaa

SEQ ID NO: 534172 - DNA, 19 bp, Mus musculus
  siRNA target sequence for D5Ertd363e (NM_026448.1,345-363).
cacttctttaacttaatgt

SEQ ID NO: 534173 - DNA, 19 bp, Mus musculus
  siRNA target sequence for D5Ertd363e (NM_026448.1,370-388).
ctaacatgcttgaatctaa

SEQ ID NO: 534174 - DNA, 19 bp, Mus musculus
  siRNA target sequence for D5Ertd363e (NM_026448.1,411-429).
gatgctgaacctgatatta

SEQ ID NO: 534175 - DNA, 19 bp, Mus musculus
  siRNA target sequence for D5Ertd363e (NM_026448.1,415-433).
ctgaacctgatattattga

SEQ ID NO: 534176 - DNA, 19 bp, Mus musculus
  siRNA target sequence for D5Ertd363e (NM_026448.1,459-477).
gctagaatttctgtgaata

SEQ ID NO: 534177 - DNA, 19 bp, Mus musculus
  siRNA target sequence for D5Ertd363e (NM_026448.1,478-496).
gcaacaatgttcagtcttt

SEQ ID NO: 534178 - DNA, 19 bp, Mus musculus
  siRNA target sequence for D5Ertd363e (NM_026448.1,508-526).
caaatcagtaccagattga

SEQ ID NO: 534179 - DNA, 19 bp, Mus musculus
  siRNA target sequence for D5Ertd363e (NM_026448.1,707-725).
caagcgagtgacacatctt

SEQ ID NO: 534180 - DNA, 19 bp, Mus musculus
  siRNA target sequence for D5Ertd363e (NM_026448.1,777-795).
gccgtgaggtggttgaaat

SEQ ID NO: 534181 - DNA, 19 bp, Mus musculus
  siRNA target sequence for D5Ertd363e (NM_026448.1,778-796).
ccgtgaggtggttgaaata

SEQ ID NO: 534182 - DNA, 19 bp, Mus musculus
  siRNA target sequence for D5Ertd363e (NM_026448.1,779-797).
cgtgaggtggttgaaatat

SEQ ID NO: 534183 - DNA, 19 bp, Mus musculus
  siRNA target sequence for D5Ertd363e (NM_026448.1,782-800).
gaggtggttgaaatatgat

SEQ ID NO: 534184 - DNA, 19 bp, Mus musculus
  siRNA target sequence for D5Ertd363e (NM_026448.1,805-823).
ctaaccgccagccattcat

SEQ ID NO: 534185 - DNA, 19 bp, Mus musculus
  siRNA target sequence for D5Ertd363e (NM_026448.1,813-831).
cagccattcatggttgata

SEQ ID NO: 534186 - DNA, 19 bp, Mus musculus
  siRNA target sequence for D5Ertd363e (NM_026448.1,817-835).
cattcatggttgatatcct

SEQ ID NO: 534187 - DNA, 19 bp, Mus musculus
  siRNA target sequence for D5Ertd363e (NM_026448.1,843-861).
gtcaggtttcctcttatat

SEQ ID NO: 534188 - DNA, 19 bp, Mus musculus
  siRNA target sequence for D5Ertd363e (NM_026448.1,852-870).
cctcttatatcgaagaatt

SEQ ID NO: 534189 - DNA, 19 bp, Mus musculus
  siRNA target sequence for D5Ertd363e (NM_026448.1,997-1015).
cacggcctagaagaaagaa

SEQ ID NO: 534190 - DNA, 19 bp, Mus musculus
  siRNA target sequence for D5Ertd363e (NM_026448.1,1050-1068).
caaccacagtcctgtagat

SEQ ID NO: 534191 - DNA, 19 bp, Mus musculus
  siRNA target sequence for D5Ertd363e (NM_026448.1,1106-1124).
ctgcccctttgaaaaacga

SEQ ID NO: 534192 - DNA, 19 bp, Mus musculus
  siRNA target sequence for D5Ertd363e (NM_026448.1,1187-1205).
ccccataaagcgaatggat

SEQ ID NO: 534193 - DNA, 19 bp, Mus musculus
  siRNA target sequence for D5Ertd363e (NM_026448.1,1188-1206).
cccataaagcgaatggatt

SEQ ID NO: 534194 - DNA, 19 bp, Mus musculus
  siRNA target sequence for D5Ertd363e (NM_026448.1,1196-1214).
gcgaatggattgctacaat

SEQ ID NO: 534195 - DNA, 19 bp, Mus musculus
  siRNA target sequence for D5Ertd363e (NM_026448.1,1198-1216).
gaatggattgctacaatgt

SEQ ID NO: 534196 - DNA, 19 bp, Mus musculus
  siRNA target sequence for D5Ertd363e (NM_026448.1,1202-1220).
ggattgctacaatgttgta

SEQ ID NO: 534197 - DNA, 19 bp, Mus musculus
  siRNA target sequence for D5Ertd363e (NM_026448.1,1208-1226).
ctacaatgttgtaaaggat

SEQ ID NO: 534198 - DNA, 19 bp, Mus musculus
  siRNA target sequence for D5Ertd363e (NM_026448.1,1218-1236).
gtaaaggatagctggtatt

SEQ ID NO: 534199 - DNA, 19 bp, Mus musculus
  siRNA target sequence for D5Ertd363e (NM_026448.1,1223-1241).
ggatagctggtattccaaa

SEQ ID NO: 534200 - DNA, 19 bp, Mus musculus
  siRNA target sequence for D5Ertd363e (NM_026448.1,1279-1297).
gtgcagcagaaggcaaaat

SEQ ID NO: 534201 - DNA, 19 bp, Mus musculus
  siRNA target sequence for D5Ertd363e (NM_026448.1,1330-1348).
cggccctgtatttgtttga

SEQ ID NO: 534202 - DNA, 19 bp, Mus musculus
  siRNA target sequence for D5Ertd363e (NM_026448.1,1332-1350).
gccctgtatttgtttgaat

SEQ ID NO: 534203 - DNA, 19 bp, Mus musculus
  siRNA target sequence for D5Ertd363e (NM_026448.1,1337-1355).
gtatttgtttgaatgctat

SEQ ID NO: 534204 - DNA, 19 bp, Mus musculus
  siRNA target sequence for D5Ertd363e (NM_026448.1,1528-1546).
ggactgagctgtgttcaat

SEQ ID NO: 534205 - DNA, 19 bp, Mus musculus
  siRNA target sequence for D5Ertd363e (NM_026448.1,1547-1565).
gattgagcccaggaagaat

SEQ ID NO: 534206 - DNA, 19 bp, Mus musculus
  siRNA target sequence for D5Ertd363e (NM_026448.1,1583-1601).
gaaggacaagatatttgct

SEQ ID NO: 534207 - DNA, 19 bp, Mus musculus
  siRNA target sequence for D5Ertd363e (NM_026448.1,1602-1620).
gtcggtggtcagaatggtt

SEQ ID NO: 534208 - DNA, 19 bp, Mus musculus
  siRNA target sequence for D5Ertd363e (NM_026448.1,1634-1652).
caatgtggaatattacgat

SEQ ID NO: 534209 - DNA, 19 bp, Mus musculus
  siRNA target sequence for D5Ertd363e (NM_026448.1,1638-1656).
gtggaatattacgatatca

SEQ ID NO: 534210 - DNA, 19 bp, Mus musculus
  siRNA target sequence for D5Ertd363e (NM_026448.1,1641-1659).
gaatattacgatatcaagt

SEQ ID NO: 534211 - DNA, 19 bp, Mus musculus
  siRNA target sequence for D5Ertd363e (NM_026448.1,1765-1783).
gcagattggggcatatcct

SEQ ID NO: 534212 - DNA, 19 bp, Mus musculus
  siRNA target sequence for D5Ertd363e (NM_026448.1,1766-1784).
cagattggggcatatcctt

SEQ ID NO: 534213 - DNA, 19 bp, Mus musculus
  siRNA target sequence for D5Ertd363e (NM_026448.1,1772-1790).
ggggcatatccttgagtat

SEQ ID NO: 534214 - DNA, 19 bp, Mus musculus
  siRNA target sequence for D5Ertd363e (NM_026448.1,1773-1791).
gggcatatccttgagtata

SEQ ID NO: 534215 - DNA, 19 bp, Mus musculus
  siRNA target sequence for D5Ertd363e (NM_026448.1,1775-1793).
gcatatccttgagtataat

SEQ ID NO: 534216 - DNA, 19 bp, Mus musculus
  siRNA target sequence for D5Ertd363e (NM_026448.1,1781-1799).
ccttgagtataatactgaa

SEQ ID NO: 534217 - DNA, 19 bp, Mus musculus
  siRNA target sequence for D5Ertd363e (NM_026448.1,1808-1826).
gtggatcgccaactcaaaa

SEQ ID NO: 534218 - DNA, 19 bp, Mus musculus
  siRNA target sequence for D5Ertd363e (NM_026448.1,1842-1860).
gtcacaagttgtctaattt

SEQ ID NO: 534219 - DNA, 19 bp, Mus musculus
  siRNA target sequence for D5Ertd363e (NM_026448.1,1844-1862).
cacaagttgtctaatttgt

SEQ ID NO: 534220 - DNA, 19 bp, Mus musculus
  siRNA target sequence for D5Ertd363e (NM_026448.1,1846-1864).
caagttgtctaatttgtgt

SEQ ID NO: 534221 - DNA, 19 bp, Mus musculus
  siRNA target sequence for D5Ertd363e (NM_026448.1,1852-1870).
gtctaatttgtgttgttga

SEQ ID NO: 534222 - DNA, 19 bp, Mus musculus
  siRNA target sequence for D930047P17 (NM_172925.1,174-192).
caagctgaatgctctaaat

SEQ ID NO: 534223 - DNA, 19 bp, Mus musculus
  siRNA target sequence for D930047P17 (NM_172925.1,260-278).
ccaacctcctcgaaggttt

SEQ ID NO: 534224 - DNA, 19 bp, Mus musculus
  siRNA target sequence for D930047P17 (NM_172925.1,264-282).
cctcctcgaaggtttaagt

SEQ ID NO: 534225 - DNA, 19 bp, Mus musculus
  siRNA target sequence for D930047P17 (NM_172925.1,268-286).
ctcgaaggtttaagtaaaa

SEQ ID NO: 534226 - DNA, 19 bp, Mus musculus
  siRNA target sequence for D930047P17 (NM_172925.1,312-330).
cttggtcatcggtaccaaa

SEQ ID NO: 534227 - DNA, 19 bp, Mus musculus
  siRNA target sequence for D930047P17 (NM_172925.1,316-334).
gtcatcggtaccaaaacca

SEQ ID NO: 534228 - DNA, 19 bp, Mus musculus
  siRNA target sequence for D930047P17 (NM_172925.1,374-392).
gcgagtacttttataacat

SEQ ID NO: 534229 - DNA, 19 bp, Mus musculus
  siRNA target sequence for D930047P17 (NM_172925.1,419-437).
gggtagacctcaatgatat

SEQ ID NO: 534230 - DNA, 19 bp, Mus musculus
  siRNA target sequence for D930047P17 (NM_172925.1,458-476).
cagtgatcgcgtatgctta

SEQ ID NO: 534231 - DNA, 19 bp, Mus musculus
  siRNA target sequence for D930047P17 (NM_172925.1,491-509).
ccctttctttatacacaat

SEQ ID NO: 534232 - DNA, 19 bp, Mus musculus
  siRNA target sequence for D930047P17 (NM_172925.1,504-522).
cacaataggaagcatcatt

SEQ ID NO: 534233 - DNA, 19 bp, Mus musculus
  siRNA target sequence for D930047P17 (NM_172925.1,606-624).
catgtacgtggttaacatt

SEQ ID NO: 534234 - DNA, 19 bp, Mus musculus
  siRNA target sequence for D930047P17 (NM_172925.1,676-694).
cgggataacttcatcgaat

SEQ ID NO: 534235 - DNA, 19 bp, Mus musculus
  siRNA target sequence for D930047P17 (NM_172925.1,677-695).
gggataacttcatcgaatt

SEQ ID NO: 534236 - DNA, 19 bp, Mus musculus
  siRNA target sequence for D930047P17 (NM_172925.1,697-715).
gcagaatccgaacaattta

SEQ ID NO: 534237 - DNA, 19 bp, Mus musculus
  siRNA target sequence for D930047P17 (NM_172925.1,698-716).
cagaatccgaacaatttat

SEQ ID NO: 534238 - DNA, 19 bp, Mus musculus
  siRNA target sequence for D930047P17 (NM_172925.1,700-718).
gaatccgaacaatttatga

SEQ ID NO: 534239 - DNA, 19 bp, Mus musculus
  siRNA target sequence for D930047P17 (NM_172925.1,725-743).
cgtttgaacagattaacga

SEQ ID NO: 534240 - DNA, 19 bp, Mus musculus
  siRNA target sequence for D930047P17 (NM_172925.1,750-768).
cgtagatgacgacttacaa

SEQ ID NO: 534241 - DNA, 19 bp, Mus musculus
  siRNA target sequence for D930047P17 (NM_172925.1,793-811).
cagatcgcaatgaaatggt

SEQ ID NO: 534242 - DNA, 19 bp, Mus musculus
  siRNA target sequence for D930047P17 (NM_172925.1,809-827).
ggttagaattcgaccaaaa

SEQ ID NO: 534243 - DNA, 19 bp, Mus musculus
  siRNA target sequence for D930047P17 (NM_172925.1,834-852).
gaagcatgcggcagatctt

SEQ ID NO: 534244 - DNA, 19 bp, Mus musculus
  siRNA target sequence for D930047P17 (NM_172925.1,837-855).
gcatgcggcagatcttcta

SEQ ID NO: 534245 - DNA, 19 bp, Mus musculus
  siRNA target sequence for D930047P17 (NM_172925.1,884-902).
cacaagacctggtcaatta

SEQ ID NO: 534246 - DNA, 19 bp, Mus musculus
  siRNA target sequence for D930047P17 (NM_172925.1,891-909).
cctggtcaattatgttcaa

SEQ ID NO: 534247 - DNA, 19 bp, Mus musculus
  siRNA target sequence for D930047P17 (NM_172925.1,892-910).
ctggtcaattatgttcaaa

SEQ ID NO: 534248 - DNA, 19 bp, Mus musculus
  siRNA target sequence for D930047P17 (NM_172925.1,924-942).
gatgcaagacgctgattgt

SEQ ID NO: 534249 - DNA, 19 bp, Mus musculus
  siRNA target sequence for D930047P17 (NM_172925.1,928-946).
caagacgctgattgtcata

SEQ ID NO: 534250 - DNA, 19 bp, Mus musculus
  siRNA target sequence for D930047P17 (NM_172925.1,952-970).
cttgtggatgccatgaact

SEQ ID NO: 534251 - DNA, 19 bp, Mus musculus
  siRNA target sequence for D930047P17 (NM_172925.1,958-976).
gatgccatgaactatcact

SEQ ID NO: 534252 - DNA, 19 bp, Mus musculus
  siRNA target sequence for D930047P17 (NM_172925.1,1003-1021).
caatctaggcgcacaagaa

SEQ ID NO: 534253 - DNA, 19 bp, Mus musculus
  siRNA target sequence for D930047P17 (NM_172925.1,1028-1046).
gcggctgccgagttctgat

SEQ ID NO: 534254 - DNA, 19 bp, Mus musculus
  siRNA target sequence for D930047P17 (NM_172925.1,1080-1098).
gtcccttagtagagacatt

SEQ ID NO: 534255 - DNA, 19 bp, Mus musculus
  siRNA target sequence for D930047P17 (NM_172925.1,1121-1139).
gatggagcaagcttacaga

SEQ ID NO: 534256 - DNA, 19 bp, Mus musculus
  siRNA target sequence for D930047P17 (NM_172925.1,1145-1163).
cagccaagagttttaatca

SEQ ID NO: 534257 - DNA, 19 bp, Mus musculus
  siRNA target sequence for D930047P17 (NM_172925.1,1147-1165).
gccaagagttttaatcagt

SEQ ID NO: 534258 - DNA, 19 bp, Mus musculus
  siRNA target sequence for D930047P17 (NM_172925.1,1174-1192).
gtgatggatggattccttt

SEQ ID NO: 534259 - DNA, 19 bp, Mus musculus
  siRNA target sequence for D930047P17 (NM_172925.1,1179-1197).
ggatggattcctttatgta

SEQ ID NO: 534260 - DNA, 19 bp, Mus musculus
  siRNA target sequence for D930047P17 (NM_172925.1,1215-1233).
gaatgacgccagaaaccaa

SEQ ID NO: 534261 - DNA, 19 bp, Mus musculus
  siRNA target sequence for Dab1 (NM_010014.1,339-357).
cgcagcgaagccactttga

SEQ ID NO: 534262 - DNA, 19 bp, Mus musculus
  siRNA target sequence for Dab1 (NM_010014.1,340-358).
gcagcgaagccactttgat

SEQ ID NO: 534263 - DNA, 19 bp, Mus musculus
  siRNA target sequence for Dab1 (NM_010014.1,341-359).
cagcgaagccactttgata

SEQ ID NO: 534264 - DNA, 19 bp, Mus musculus
  siRNA target sequence for Dab1 (NM_010014.1,343-361).
gcgaagccactttgataaa

SEQ ID NO: 534265 - DNA, 19 bp, Mus musculus
  siRNA target sequence for Dab1 (NM_010014.1,374-392).
cgaaggggtccggtacaaa

SEQ ID NO: 534266 - DNA, 19 bp, Mus musculus
  siRNA target sequence for Dab1 (NM_010014.1,398-416).
gctgattgggattgatgaa

SEQ ID NO: 534267 - DNA, 19 bp, Mus musculus
  siRNA target sequence for Dab1 (NM_010014.1,426-444).
gctcggggagacaagttat

SEQ ID NO: 534268 - DNA, 19 bp, Mus musculus
  siRNA target sequence for Dab1 (NM_010014.1,461-479).
gaagctcaagggtgttgtt

SEQ ID NO: 534269 - DNA, 19 bp, Mus musculus
  siRNA target sequence for Dab1 (NM_010014.1,490-508).
gttccaagggagaacacaa

SEQ ID NO: 534270 - DNA, 19 bp, Mus musculus
  siRNA target sequence for Dab1 (NM_010014.1,578-596).
gcatcaccatgctgttcat

SEQ ID NO: 534271 - DNA, 19 bp, Mus musculus
  siRNA target sequence for Dab1 (NM_010014.1,588-606).
gctgttcatgaaatttcct

SEQ ID NO: 534272 - DNA, 19 bp, Mus musculus
  siRNA target sequence for Dab1 (NM_010014.1,589-607).
ctgttcatgaaatttccta

SEQ ID NO: 534273 - DNA, 19 bp, Mus musculus
  siRNA target sequence for Dab1 (NM_010014.1,633-651).
cgggctttcggatacgttt

SEQ ID NO: 534274 - DNA, 19 bp, Mus musculus
  siRNA target sequence for Dab1 (NM_010014.1,700-718).
cggctgaacctgttatcct

SEQ ID NO: 534275 - DNA, 19 bp, Mus musculus
  siRNA target sequence for Dab1 (NM_010014.1,849-867).
cccgtgtaccaggtaattt

SEQ ID NO: 534276 - DNA, 19 bp, Mus musculus
  siRNA target sequence for Dab2 (NM_023118.1,211-229).
gtctaacgaagtagaaaca

SEQ ID NO: 534277 - DNA, 19 bp, Mus musculus
  siRNA target sequence for Dab2 (NM_023118.1,264-282).
ccccgaaagcgccatcaaa

SEQ ID NO: 534278 - DNA, 19 bp, Mus musculus
  siRNA target sequence for Dab2 (NM_023118.1,322-340).
cttgttggccaggttcaaa

SEQ ID NO: 534279 - DNA, 19 bp, Mus musculus
  siRNA target sequence for Dab2 (NM_023118.1,342-360).
gtgatggtgtaaaatacaa

SEQ ID NO: 534280 - DNA, 19 bp, Mus musculus
  siRNA target sequence for Dab2 (NM_023118.1,363-381).
ccaagctaatcggtattga

SEQ ID NO: 534281 - DNA, 19 bp, Mus musculus
  siRNA target sequence for Dab2 (NM_023118.1,364-382).
caagctaatcggtattgat

SEQ ID NO: 534282 - DNA, 19 bp, Mus musculus
  siRNA target sequence for Dab2 (NM_023118.1,367-385).
gctaatcggtattgatgat

SEQ ID NO: 534283 - DNA, 19 bp, Mus musculus
  siRNA target sequence for Dab2 (NM_023118.1,505-523).
gtctggcataaaaatcatt

SEQ ID NO: 534284 - DNA, 19 bp, Mus musculus
  siRNA target sequence for Dab2 (NM_023118.1,534-552).
ctggggtaattgaacatga

SEQ ID NO: 534285 - DNA, 19 bp, Mus musculus
  siRNA target sequence for Dab2 (NM_023118.1,537-555).
gggtaattgaacatgaaca

SEQ ID NO: 534286 - DNA, 19 bp, Mus musculus
  siRNA target sequence for Dab2 (NM_023118.1,548-566).
catgaacatccagtaaata

SEQ ID NO: 534287 - DNA, 19 bp, Mus musculus
  siRNA target sequence for Dab2 (NM_023118.1,554-572).
catccagtaaataagattt

SEQ ID NO: 534288 - DNA, 19 bp, Mus musculus
  siRNA target sequence for Dab2 (NM_023118.1,596-614).
gacaacagagcatttggtt

SEQ ID NO: 534289 - DNA, 19 bp, Mus musculus
  siRNA target sequence for Dab2 (NM_023118.1,635-653).
cagcatcaattttttgcta

SEQ ID NO: 534290 - DNA, 19 bp, Mus musculus
  siRNA target sequence for Dab2 (NM_023118.1,637-655).
gcatcaattttttgctata

SEQ ID NO: 534291 - DNA, 19 bp, Mus musculus
  siRNA target sequence for Dab2 (NM_023118.1,664-682).
gcaacaggctgaaccatta

SEQ ID NO: 534292 - DNA, 19 bp, Mus musculus
  siRNA target sequence for Dab2 (NM_023118.1,677-695).
ccattagtcgtcgatctta

SEQ ID NO: 534293 - DNA, 19 bp, Mus musculus
  siRNA target sequence for Dab2 (NM_023118.1,678-696).
cattagtcgtcgatcttaa

SEQ ID NO: 534294 - DNA, 19 bp, Mus musculus
  siRNA target sequence for Dab2 (NM_023118.1,707-725).
caagttatctataatgtaa

SEQ ID NO: 534295 - DNA, 19 bp, Mus musculus
  siRNA target sequence for Dab2 (NM_023118.1,792-810).
ccctaatgacccttgatga

SEQ ID NO: 534296 - DNA, 19 bp, Mus musculus
  siRNA target sequence for Dab2 (NM_023118.1,793-811).
cctaatgacccttgatgat

SEQ ID NO: 534297 - DNA, 19 bp, Mus musculus
  siRNA target sequence for Dab2 (NM_023118.1,801-819).
cccttgatgatcaagctaa

SEQ ID NO: 534298 - DNA, 19 bp, Mus musculus
  siRNA target sequence for Dab2 (NM_023118.1,809-827).
gatcaagctaacaaattga

SEQ ID NO: 534299 - DNA, 19 bp, Mus musculus
  siRNA target sequence for Dab2 (NM_023118.1,834-852).
gtgttgaccagatggattt

SEQ ID NO: 534300 - DNA, 19 bp, Mus musculus
  siRNA target sequence for Dab2 (NM_023118.1,836-854).
gttgaccagatggatttgt

SEQ ID NO: 534301 - DNA, 19 bp, Mus musculus
  siRNA target sequence for Dab2 (NM_023118.1,880-898).
cctaaatagtccaacagaa

SEQ ID NO: 534302 - DNA, 19 bp, Mus musculus
  siRNA target sequence for Dab2 (NM_023118.1,881-899).
ctaaatagtccaacagaaa

SEQ ID NO: 534303 - DNA, 19 bp, Mus musculus
  siRNA target sequence for Dab2 (NM_023118.1,913-931).
gttagtggatctaaactct

SEQ ID NO: 534304 - DNA, 19 bp, Mus musculus
  siRNA target sequence for Dab2 (NM_023118.1,1126-1144).
ggcaccctcttcgtttgat

SEQ ID NO: 534305 - DNA, 19 bp, Mus musculus
  siRNA target sequence for Dab2 (NM_023118.1,1127-1145).
gcaccctcttcgtttgatt

SEQ ID NO: 534306 - DNA, 19 bp, Mus musculus
  siRNA target sequence for Dab2 (NM_023118.1,1189-1207).
gtctactccacagagtaaa

SEQ ID NO: 534307 - DNA, 19 bp, Mus musculus
  siRNA target sequence for Dab2 (NM_023118.1,1212-1230).
ccctgaacggtgatactga

SEQ ID NO: 534308 - DNA, 19 bp, Mus musculus
  siRNA target sequence for Dab2 (NM_023118.1,1213-1231).
cctgaacggtgatactgat

SEQ ID NO: 534309 - DNA, 19 bp, Mus musculus
  siRNA target sequence for Dab2 (NM_023118.1,1214-1232).
ctgaacggtgatactgatt

SEQ ID NO: 534310 - DNA, 19 bp, Mus musculus
  siRNA target sequence for Dab2 (NM_023118.1,1338-1356).
ctcaaaatggggtatctga

SEQ ID NO: 534311 - DNA, 19 bp, Mus musculus
  siRNA target sequence for Dab2 (NM_023118.1,1340-1358).
caaaatggggtatctgaaa

SEQ ID NO: 534312 - DNA, 19 bp, Mus musculus
  siRNA target sequence for Dab2 (NM_023118.1,1366-1384).
gaacggcttccatatcaaa

SEQ ID NO: 534313 - DNA, 19 bp, Mus musculus
  siRNA target sequence for Dab2 (NM_023118.1,1369-1387).
cggcttccatatcaaatct

SEQ ID NO: 534314 - DNA, 19 bp, Mus musculus
  siRNA target sequence for Dab2 (NM_023118.1,1370-1388).
ggcttccatatcaaatctt

SEQ ID NO: 534315 - DNA, 19 bp, Mus musculus
  siRNA target sequence for Dab2 (NM_023118.1,1534-1552).
cagaaggactgctaagtct

SEQ ID NO: 534316 - DNA, 19 bp, Mus musculus
  siRNA target sequence for Dab2 (NM_023118.1,1641-1659).
cgaactttctggatctctt

SEQ ID NO: 534317 - DNA, 19 bp, Mus musculus
  siRNA target sequence for Dab2 (NM_023118.1,1737-1755).
cctggacgcctgttgtcta

SEQ ID NO: 534318 - DNA, 19 bp, Mus musculus
  siRNA target sequence for Dab2 (NM_023118.1,1777-1795).
cccaggagccataataagt

SEQ ID NO: 534319 - DNA, 19 bp, Mus musculus
  siRNA target sequence for Dab2 (NM_023118.1,1816-1834).
ccagccactcgtttttggt

SEQ ID NO: 534320 - DNA, 19 bp, Mus musculus
  siRNA target sequence for Dab2 (NM_023118.1,1857-1875).
ggaatcagtctccatcatt

SEQ ID NO: 534321 - DNA, 19 bp, Mus musculus
  siRNA target sequence for Dab2 (NM_023118.1,1858-1876).
gaatcagtctccatcattt

SEQ ID NO: 534322 - DNA, 19 bp, Mus musculus
  siRNA target sequence for Dab2 (NM_023118.1,1956-1974).
gccctctggggaatccttt

SEQ ID NO: 534323 - DNA, 19 bp, Mus musculus
  siRNA target sequence for Dab2 (NM_023118.1,1965-1983).
ggaatccttttcagagtaa

SEQ ID NO: 534324 - DNA, 19 bp, Mus musculus
  siRNA target sequence for Dab2 (NM_023118.1,1966-1984).
gaatccttttcagagtaat

SEQ ID NO: 534325 - DNA, 19 bp, Mus musculus
  siRNA target sequence for Dab2 (NM_023118.1,1970-1988).
ccttttcagagtaataata

SEQ ID NO: 534326 - DNA, 19 bp, Mus musculus
  siRNA target sequence for Dab2 (NM_023118.1,2182-2200).
gcggcagccacctcttgtt

SEQ ID NO: 534327 - DNA, 19 bp, Mus musculus
  siRNA target sequence for Dab2 (NM_023118.1,2287-2305).
gcatgtagaccatgatgat

SEQ ID NO: 534328 - DNA, 19 bp, Mus musculus
  siRNA target sequence for Dab2 (NM_023118.1,2482-2500).
gagccctttcggaaatcct

SEQ ID NO: 534329 - DNA, 19 bp, Mus musculus
  siRNA target sequence for Dab2 (NM_023118.1,2484-2502).
gccctttcggaaatccttt

SEQ ID NO: 534330 - DNA, 19 bp, Mus musculus
  siRNA target sequence for Dab2 (NM_023118.1,2485-2503).
ccctttcggaaatcctttt

SEQ ID NO: 534331 - DNA, 19 bp, Mus musculus
  siRNA target sequence for Dag1 (NM_010017.1,667-685).
gagcattccaacggattta

SEQ ID NO: 534332 - DNA, 19 bp, Mus musculus
  siRNA target sequence for Dag1 (NM_010017.1,669-687).
gcattccaacggatttaat

SEQ ID NO: 534333 - DNA, 19 bp, Mus musculus
  siRNA target sequence for Dag1 (NM_010017.1,670-688).
cattccaacggatttaatt

SEQ ID NO: 534334 - DNA, 19 bp, Mus musculus
  siRNA target sequence for Dag1 (NM_010017.1,836-854).
cgcctgggagccaatggaa

SEQ ID NO: 534335 - DNA, 19 bp, Mus musculus
  siRNA target sequence for Dag1 (NM_010017.1,987-1005).
cagtgactgtccttacagt

SEQ ID NO: 534336 - DNA, 19 bp, Mus musculus
  siRNA target sequence for Dag1 (NM_010017.1,1074-1092).
gcttctcagaagtagaact

SEQ ID NO: 534337 - DNA, 19 bp, Mus musculus
  siRNA target sequence for Dag1 (NM_010017.1,1109-1127).
gtgcctgtagtgaataata

SEQ ID NO: 534338 - DNA, 19 bp, Mus musculus
  siRNA target sequence for Dag1 (NM_010017.1,1113-1131).
ctgtagtgaataatagact

SEQ ID NO: 534339 - DNA, 19 bp, Mus musculus
  siRNA target sequence for Dag1 (NM_010017.1,1115-1133).
gtagtgaataatagactat

SEQ ID NO: 534340 - DNA, 19 bp, Mus musculus
  siRNA target sequence for Dag1 (NM_010017.1,1150-1168).
catggctggcccaggaaat

SEQ ID NO: 534341 - DNA, 19 bp, Mus musculus
  siRNA target sequence for Dag1 (NM_010017.1,1244-1262).
gacatccgtggtgtagaaa

SEQ ID NO: 534342 - DNA, 19 bp, Mus musculus
  siRNA target sequence for Dag1 (NM_010017.1,1285-1303).
gtctgcccaacttggttat

SEQ ID NO: 534343 - DNA, 19 bp, Mus musculus
  siRNA target sequence for Dag1 (NM_010017.1,1314-1332).
gttggcacattgccaataa

SEQ ID NO: 534344 - DNA, 19 bp, Mus musculus
  siRNA target sequence for Dag1 (NM_010017.1,1539-1557).
ggacgcgaggtgccattat

SEQ ID NO: 534345 - DNA, 19 bp, Mus musculus
  siRNA target sequence for Dag1 (NM_010017.1,1540-1558).
gacgcgaggtgccattatt

SEQ ID NO: 534346 - DNA, 19 bp, Mus musculus
  siRNA target sequence for Dag1 (NM_010017.1,1542-1560).
cgcgaggtgccattattca

SEQ ID NO: 534347 - DNA, 19 bp, Mus musculus
  siRNA target sequence for Dag1 (NM_010017.1,1633-1651).
cccaacactgacaattcct

SEQ ID NO: 534348 - DNA, 19 bp, Mus musculus
  siRNA target sequence for Dag1 (NM_010017.1,1644-1662).
caattcctggctatgtaga

SEQ ID NO: 534349 - DNA, 19 bp, Mus musculus
  siRNA target sequence for Dag1 (NM_010017.1,1661-1679).
gagcccacagccgttatta

SEQ ID NO: 534350 - DNA, 19 bp, Mus musculus
  siRNA target sequence for Dag1 (NM_010017.1,1663-1681).
gcccacagccgttattact

SEQ ID NO: 534351 - DNA, 19 bp, Mus musculus
  siRNA target sequence for Dag1 (NM_010017.1,1730-1748).
gcaacgccttcaactgatt

SEQ ID NO: 534352 - DNA, 19 bp, Mus musculus
  siRNA target sequence for Dag1 (NM_010017.1,1768-1786).
gaggccaaccaaaaaacca

SEQ ID NO: 534353 - DNA, 19 bp, Mus musculus
  siRNA target sequence for Dag1 (NM_010017.1,1890-1908).
cccgtgggggagaacctaa

SEQ ID NO: 534354 - DNA, 19 bp, Mus musculus
  siRNA target sequence for Dag1 (NM_010017.1,1912-1930).
gcggccagagctcaagaat

SEQ ID NO: 534355 - DNA, 19 bp, Mus musculus
  siRNA target sequence for Dbpht1 (NM_019416.1,646-664).
gccatttacagcaatagca

SEQ ID NO: 534356 - DNA, 19 bp, Mus musculus
  siRNA target sequence for Dbpht1 (NM_019416.1,663-681).
cagcaactcttatttggat

SEQ ID NO: 534357 - DNA, 19 bp, Mus musculus
  siRNA target sequence for Dbpht1 (NM_019416.1,688-706).
ctttgccacgcagatcttt

SEQ ID NO: 534358 - DNA, 19 bp, Mus musculus
  siRNA target sequence for Dbpht1 (NM_019416.1,719-737).
cttgtgagggtctctgtat

SEQ ID NO: 534359 - DNA, 19 bp, Mus musculus
  siRNA target sequence for Dbt (NM_010022.1,66-84).
gacctgtgttcgctatttt

SEQ ID NO: 534360 - DNA, 19 bp, Mus musculus
  siRNA target sequence for Dbt (NM_010022.1,103-121).
cgtgttttgaagccaaaat

SEQ ID NO: 534361 - DNA, 19 bp, Mus musculus
  siRNA target sequence for Dbt (NM_010022.1,126-144).
gtgctctgtgggttatcca

SEQ ID NO: 534362 - DNA, 19 bp, Mus musculus
  siRNA target sequence for Dbt (NM_010022.1,133-151).
gtgggttatccattgttca

SEQ ID NO: 534363 - DNA, 19 bp, Mus musculus
  siRNA target sequence for Dbt (NM_010022.1,136-154).
ggttatccattgttcaagt

SEQ ID NO: 534364 - DNA, 19 bp, Mus musculus
  siRNA target sequence for Dbt (NM_010022.1,137-155).
gttatccattgttcaagta

SEQ ID NO: 534365 - DNA, 19 bp, Mus musculus
  siRNA target sequence for Dbt (NM_010022.1,224-242).
ccgacatcggagaaggaat

SEQ ID NO: 534366 - DNA, 19 bp, Mus musculus
  siRNA target sequence for Dbt (NM_010022.1,225-243).
cgacatcggagaaggaatt

SEQ ID NO: 534367 - DNA, 19 bp, Mus musculus
  siRNA target sequence for Dbt (NM_010022.1,228-246).
catcggagaaggaattcga

SEQ ID NO: 534368 - DNA, 19 bp, Mus musculus
  siRNA target sequence for Dbt (NM_010022.1,235-253).
gaaggaattcgagaagtaa

SEQ ID NO: 534369 - DNA, 19 bp, Mus musculus
  siRNA target sequence for Dbt (NM_010022.1,238-256).
ggaattcgagaagtaacta

SEQ ID NO: 534370 - DNA, 19 bp, Mus musculus
  siRNA target sequence for Dbt (NM_010022.1,239-257).
gaattcgagaagtaactat

SEQ ID NO: 534371 - DNA, 19 bp, Mus musculus
  siRNA target sequence for Dbt (NM_010022.1,342-360).
catcaccagccgttacgat

SEQ ID NO: 534372 - DNA, 19 bp, Mus musculus
  siRNA target sequence for Dbt (NM_010022.1,352-370).
cgttacgatggcgtcatta

SEQ ID NO: 534373 - DNA, 19 bp, Mus musculus
  siRNA target sequence for Dbt (NM_010022.1,353-371).
gttacgatggcgtcattaa

SEQ ID NO: 534374 - DNA, 19 bp, Mus musculus
  siRNA target sequence for Dbt (NM_010022.1,364-382).
gtcattaagaggctctatt

SEQ ID NO: 534375 - DNA, 19 bp, Mus musculus
  siRNA target sequence for Dbt (NM_010022.1,374-392).
ggctctattacaatctaga

SEQ ID NO: 534376 - DNA, 19 bp, Mus musculus
  siRNA target sequence for Dbt (NM_010022.1,375-393).
gctctattacaatctagat

SEQ ID NO: 534377 - DNA, 19 bp, Mus musculus
  siRNA target sequence for Dbt (NM_010022.1,378-396).
ctattacaatctagatgat

SEQ ID NO: 534378 - DNA, 19 bp, Mus musculus
  siRNA target sequence for Dbt (NM_010022.1,498-516).
cactcaccaagagataaaa

SEQ ID NO: 534379 - DNA, 19 bp, Mus musculus
  siRNA target sequence for Dbt (NM_010022.1,508-526).
gagataaaaggccagaaaa

SEQ ID NO: 534380 - DNA, 19 bp, Mus musculus
  siRNA target sequence for Dbt (NM_010022.1,547-565).
cgtcggctggcaatggaaa

SEQ ID NO: 534381 - DNA, 19 bp, Mus musculus
  siRNA target sequence for Dbt (NM_010022.1,548-566).
gtcggctggcaatggaaaa

SEQ ID NO: 534382 - DNA, 19 bp, Mus musculus
  siRNA target sequence for Dbt (NM_010022.1,836-854).
cccacttcgggtattgtga

SEQ ID NO: 534383 - DNA, 19 bp, Mus musculus
  siRNA target sequence for Dbt (NM_010022.1,837-855).
ccacttcgggtattgtgat

SEQ ID NO: 534384 - DNA, 19 bp, Mus musculus
  siRNA target sequence for Dbt (NM_010022.1,843-861).
cgggtattgtgatgagatt

SEQ ID NO: 534385 - DNA, 19 bp, Mus musculus
  siRNA target sequence for Dbt (NM_010022.1,845-863).
ggtattgtgatgagattga

SEQ ID NO: 534386 - DNA, 19 bp, Mus musculus
  siRNA target sequence for Dbt (NM_010022.1,908-926).
ctttggcgcgtggaatcaa

SEQ ID NO: 534387 - DNA, 19 bp, Mus musculus
  siRNA target sequence for Dbt (NM_010022.1,913-931).
gcgcgtggaatcaaactct

SEQ ID NO: 534388 - DNA, 19 bp, Mus musculus
  siRNA target sequence for Dbt (NM_010022.1,1039-1057).
cacaacattgggatagcaa

SEQ ID NO: 534389 - DNA, 19 bp, Mus musculus
  siRNA target sequence for Dbt (NM_010022.1,1099-1117).
gttcaggtccgctctgtat

SEQ ID NO: 534390 - DNA, 19 bp, Mus musculus
  siRNA target sequence for Dbt (NM_010022.1,1190-1208).
caggagggacatttactct

SEQ ID NO: 534391 - DNA, 19 bp, Mus musculus
  siRNA target sequence for Dbt (NM_010022.1,1192-1210).
ggagggacatttactcttt

SEQ ID NO: 534392 - DNA, 19 bp, Mus musculus
  siRNA target sequence for Dbt (NM_010022.1,1196-1214).
ggacatttactctttccaa

SEQ ID NO: 534393 - DNA, 19 bp, Mus musculus
  siRNA target sequence for Dbt (NM_010022.1,1326-1344).
cgtttataaagcacagata

SEQ ID NO: 534394 - DNA, 19 bp, Mus musculus
  siRNA target sequence for Dbt (NM_010022.1,1336-1354).
gcacagataatgaatgtga

SEQ ID NO: 534395 - DNA, 19 bp, Mus musculus
  siRNA target sequence for Dbt (NM_010022.1,1392-1410).
catgtcacgcttctctaat

SEQ ID NO: 534396 - DNA, 19 bp, Mus musculus
  siRNA target sequence for Dcxr (NM_026428.1,350-368).
gtgacacatccttcaatgt

SEQ ID NO: 534397 - DNA, 19 bp, Mus musculus
  siRNA target sequence for Dcxr (NM_026428.1,384-402).
catccaggtgtctcagatt

SEQ ID NO: 534398 - DNA, 19 bp, Mus musculus
  siRNA target sequence for Dcxr (NM_026428.1,472-490).
cgtgcactgaccaaccata

SEQ ID NO: 534399 - DNA, 19 bp, Mus musculus
  siRNA target sequence for Dcxr (NM_026428.1,476-494).
cactgaccaaccatactgt

SEQ ID NO: 534400 - DNA, 19 bp, Mus musculus
  siRNA target sequence for Dcxr (NM_026428.1,694-712).
gtcgtggacaccattctct

SEQ ID NO: 534401 - DNA, 19 bp, Mus musculus
  siRNA target sequence for Disc1 (NM_170596.1,370-388).
gcccagcgctctatgagaa

SEQ ID NO: 534402 - DNA, 19 bp, Mus musculus
  siRNA target sequence for Disc1 (NM_170596.1,371-389).
cccagcgctctatgagaaa

SEQ ID NO: 534403 - DNA, 19 bp, Mus musculus
  siRNA target sequence for Disc1 (NM_170596.1,372-390).
ccagcgctctatgagaaaa

SEQ ID NO: 534404 - DNA, 19 bp, Mus musculus
  siRNA target sequence for Disc1 (NM_170596.1,375-393).
gcgctctatgagaaaaaga

SEQ ID NO: 534405 - DNA, 19 bp, Mus musculus
  siRNA target sequence for Disc1 (NM_170596.1,397-415).
gtgcactttgcggttcatt

SEQ ID NO: 534406 - DNA, 19 bp, Mus musculus
  siRNA target sequence for Disc1 (NM_170596.1,407-425).
cggttcattccaagaatga

SEQ ID NO: 534407 - DNA, 19 bp, Mus musculus
  siRNA target sequence for Disc1 (NM_170596.1,409-427).
gttcattccaagaatgaca

SEQ ID NO: 534408 - DNA, 19 bp, Mus musculus
  siRNA target sequence for Disc1 (NM_170596.1,441-459).
gaggctgactgggtcattt

SEQ ID NO: 534409 - DNA, 19 bp, Mus musculus
  siRNA target sequence for Disc1 (NM_170596.1,477-495).
gttttggcaagaattatta

SEQ ID NO: 534410 - DNA, 19 bp, Mus musculus
  siRNA target sequence for Disc1 (NM_170596.1,582-600).
ggcatcaccggcgttgaat

SEQ ID NO: 534411 - DNA, 19 bp, Mus musculus
  siRNA target sequence for Disc1 (NM_170596.1,992-1010).
cccatggatggcatacatt

SEQ ID NO: 534412 - DNA, 19 bp, Mus musculus
  siRNA target sequence for Disc1 (NM_170596.1,1119-1137).
cgaggatggcgattacgat

SEQ ID NO: 534413 - DNA, 19 bp, Mus musculus
  siRNA target sequence for Disc1 (NM_170596.1,1120-1138).
gaggatggcgattacgata

SEQ ID NO: 534414 - DNA, 19 bp, Mus musculus
  siRNA target sequence for Disc1 (NM_170596.1,1154-1172).
ctgttcgtagacagtttca

SEQ ID NO: 534415 - DNA, 19 bp, Mus musculus
  siRNA target sequence for Disc1 (NM_174853.1,1146-1164).
gatactgcagagacattga

SEQ ID NO: 534416 - DNA, 19 bp, Mus musculus
  siRNA target sequence for Disc1 (NM_174853.1,1385-1403).
gagggactggcttattcga

SEQ ID NO: 534417 - DNA, 19 bp, Mus musculus
  siRNA target sequence for Disc1 (NM_174853.1,1391-1409).
ctggcttattcgagagaaa

SEQ ID NO: 534418 - DNA, 19 bp, Mus musculus
  siRNA target sequence for Disc1 (NM_174853.1,1659-1677).
ctccgggaaaggacaaaat

SEQ ID NO: 534419 - DNA, 19 bp, Mus musculus
  siRNA target sequence for Disc1 (NM_174853.1,1802-1820).
gctggccctatcagaaaca

SEQ ID NO: 534420 - DNA, 19 bp, Mus musculus
  siRNA target sequence for Disc1 (NM_174853.1,2148-2166).
gaggattctcacatcgttt

SEQ ID NO: 534421 - DNA, 19 bp, Mus musculus
  siRNA target sequence for Disc1 (NM_174854.1,1839-1857).
gagctcacggaggagattt

SEQ ID NO: 534422 - DNA, 19 bp, Mus musculus
  siRNA target sequence for Dlc1 (NM_015802.1,300-318).
ccggacaccatgatcctaa

SEQ ID NO: 534423 - DNA, 19 bp, Mus musculus
  siRNA target sequence for Dlc1 (NM_015802.1,305-323).
caccatgatcctaacacaa

SEQ ID NO: 534424 - DNA, 19 bp, Mus musculus
  siRNA target sequence for Dlc1 (NM_015802.1,308-326).
catgatcctaacacaaatt

SEQ ID NO: 534425 - DNA, 19 bp, Mus musculus
  siRNA target sequence for Dlc1 (NM_015802.1,466-484).
ctctctgcaggcgcttaaa

SEQ ID NO: 534426 - DNA, 19 bp, Mus musculus
  siRNA target sequence for Dlc1 (NM_015802.1,468-486).
ctctgcaggcgcttaaata

SEQ ID NO: 534427 - DNA, 19 bp, Mus musculus
  siRNA target sequence for Dlc1 (NM_015802.1,470-488).
ctgcaggcgcttaaatact

SEQ ID NO: 534428 - DNA, 19 bp, Mus musculus
  siRNA target sequence for Dlc1 (NM_015802.1,472-490).
gcaggcgcttaaatactct

SEQ ID NO: 534429 - DNA, 19 bp, Mus musculus
  siRNA target sequence for Dlc1 (NM_015802.1,473-491).
caggcgcttaaatactcta

SEQ ID NO: 534430 - DNA, 19 bp, Mus musculus
  siRNA target sequence for Dlc1 (NM_015802.1,475-493).
ggcgcttaaatactctaaa

SEQ ID NO: 534431 - DNA, 19 bp, Mus musculus
  siRNA target sequence for Dlc1 (NM_015802.1,477-495).
cgcttaaatactctaaaca

SEQ ID NO: 534432 - DNA, 19 bp, Mus musculus
  siRNA target sequence for Dlc1 (NM_015802.1,478-496).
gcttaaatactctaaacaa

SEQ ID NO: 534433 - DNA, 19 bp, Mus musculus
  siRNA target sequence for Dlc1 (NM_015802.1,613-631).
ggtcccgccttgaagagtt

SEQ ID NO: 534434 - DNA, 19 bp, Mus musculus
  siRNA target sequence for Dlc1 (NM_015802.1,614-632).
gtcccgccttgaagagttt

SEQ ID NO: 534435 - DNA, 19 bp, Mus musculus
  siRNA target sequence for Dlc1 (NM_015802.1,616-634).
cccgccttgaagagtttga

SEQ ID NO: 534436 - DNA, 19 bp, Mus musculus
  siRNA target sequence for Dlc1 (NM_015802.1,675-693).
gacaactctcgtttgcaaa

SEQ ID NO: 534437 - DNA, 19 bp, Mus musculus
  siRNA target sequence for Dlc1 (NM_015802.1,697-715).
ccacaagccacgaaagcat

SEQ ID NO: 534438 - DNA, 19 bp, Mus musculus
  siRNA target sequence for Dlc1 (NM_015802.1,916-934).
ccagcttcagttttagcat

SEQ ID NO: 534439 - DNA, 19 bp, Mus musculus
  siRNA target sequence for Dlc1 (NM_015802.1,920-938).
cttcagttttagcatgaaa

SEQ ID NO: 534440 - DNA, 19 bp, Mus musculus
  siRNA target sequence for Dlc1 (NM_015802.1,1158-1176).
cccatggtacggaaaagga

SEQ ID NO: 534441 - DNA, 19 bp, Mus musculus
  siRNA target sequence for Dlc1 (NM_015802.1,1168-1186).
ggaaaaggagcgtgtctaa

SEQ ID NO: 534442 - DNA, 19 bp, Mus musculus
  siRNA target sequence for Dlc1 (NM_015802.1,1286-1304).
caagcgggtgggcatgtat

SEQ ID NO: 534443 - DNA, 19 bp, Mus musculus
  siRNA target sequence for Dlc1 (NM_015802.1,1289-1307).
gcgggtgggcatgtatcta

SEQ ID NO: 534444 - DNA, 19 bp, Mus musculus
  siRNA target sequence for Dlc1 (NM_015802.1,1310-1328).
gggcttcgacccattcagt

SEQ ID NO: 534445 - DNA, 19 bp, Mus musculus
  siRNA target sequence for Dlc1 (NM_015802.1,1327-1345).
gtcagtccaccttgaacaa

SEQ ID NO: 534446 - DNA, 19 bp, Mus musculus
  siRNA target sequence for Dlc1 (NM_015802.1,1346-1364).
cgtgacggagcagaactat

SEQ ID NO: 534447 - DNA, 19 bp, Mus musculus
  siRNA target sequence for Dlc1 (NM_015802.1,1349-1367).
gacggagcagaactataaa

SEQ ID NO: 534448 - DNA, 19 bp, Mus musculus
  siRNA target sequence for Dlc1 (NM_015802.1,1351-1369).
cggagcagaactataaaaa

SEQ ID NO: 534449 - DNA, 19 bp, Mus musculus
  siRNA target sequence for Dlc1 (NM_015802.1,1386-1404).
gaggacacggtgttctaca

SEQ ID NO: 534450 - DNA, 19 bp, Mus musculus
  siRNA target sequence for Dlc1 (NM_015802.1,1388-1406).
ggacacggtgttctacatt

SEQ ID NO: 534451 - DNA, 19 bp, Mus musculus
  siRNA target sequence for Dlc1 (NM_015802.1,1595-1613).
cagccgcctgagcatctat

SEQ ID NO: 534452 - DNA, 19 bp, Mus musculus
  siRNA target sequence for Dlc1 (NM_015802.1,1597-1615).
gccgcctgagcatctatga

SEQ ID NO: 534453 - DNA, 19 bp, Mus musculus
  siRNA target sequence for Dlc1 (NM_015802.1,1598-1616).
ccgcctgagcatctatgat

SEQ ID NO: 534454 - DNA, 19 bp, Mus musculus
  siRNA target sequence for Dlc1 (NM_015802.1,1599-1617).
cgcctgagcatctatgata

SEQ ID NO: 534455 - DNA, 19 bp, Mus musculus
  siRNA target sequence for Dlc1 (NM_015802.1,1600-1618).
gcctgagcatctatgataa

SEQ ID NO: 534456 - DNA, 19 bp, Mus musculus
  siRNA target sequence for Dlc1 (NM_015802.1,1604-1622).
gagcatctatgataacgta

SEQ ID NO: 534457 - DNA, 19 bp, Mus musculus
  siRNA target sequence for Dlc1 (NM_015802.1,1719-1737).
gggatgcagcggatagtca

SEQ ID NO: 534458 - DNA, 19 bp, Mus musculus
  siRNA target sequence for Dlc1 (NM_015802.1,1720-1738).
ggatgcagcggatagtcaa

SEQ ID NO: 534459 - DNA, 19 bp, Mus musculus
  siRNA target sequence for Dlc1 (NM_015802.1,1739-1757).
ccagtggtccgagaagttt

SEQ ID NO: 534460 - DNA, 19 bp, Mus musculus
  siRNA target sequence for Dlc1 (NM_015802.1,1807-1825).
cgtcatctccaaaacagat

SEQ ID NO: 534461 - DNA, 19 bp, Mus musculus
  siRNA target sequence for Dlc1 (NM_015802.1,1896-1914).
cccgaagagcccactgata

SEQ ID NO: 534462 - DNA, 19 bp, Mus musculus
  siRNA target sequence for Dlc1 (NM_015802.1,1897-1915).
ccgaagagcccactgatat

SEQ ID NO: 534463 - DNA, 19 bp, Mus musculus
  siRNA target sequence for Dlc1 (NM_015802.1,2145-2163).
gctgtgcccaagttcatga

SEQ ID NO: 534464 - DNA, 19 bp, Mus musculus
  siRNA target sequence for Dlc1 (NM_015802.1,2368-2386).
gcgctgaagataatgtcaa

SEQ ID NO: 534465 - DNA, 19 bp, Mus musculus
  siRNA target sequence for Dlc1 (NM_015802.1,2690-2708).
cctgaagcgagagaattct

SEQ ID NO: 534466 - DNA, 19 bp, Mus musculus
  siRNA target sequence for Dlc1 (NM_015802.1,2691-2709).
ctgaagcgagagaattctt

SEQ ID NO: 534467 - DNA, 19 bp, Mus musculus
  siRNA target sequence for Dlc1 (NM_015802.1,2707-2725).
cttctccaagggtaatgca

SEQ ID NO: 534468 - DNA, 19 bp, Mus musculus
  siRNA target sequence for Dlc1 (NM_015802.1,2712-2730).
ccaagggtaatgcaaagaa

SEQ ID NO: 534469 - DNA, 19 bp, Mus musculus
  siRNA target sequence for Dlc1 (NM_015802.1,2901-2919).
gccttgggacacctgaata

SEQ ID NO: 534470 - DNA, 19 bp, Mus musculus
  siRNA target sequence for Dlc1 (NM_015802.1,2903-2921).
cttgggacacctgaatagt

SEQ ID NO: 534471 - DNA, 19 bp, Mus musculus
  siRNA target sequence for Dlc1 (NM_015802.1,3105-3123).
gcacccgaggagatcttaa

SEQ ID NO: 534472 - DNA, 19 bp, Mus musculus
  siRNA target sequence for Dlc1 (NM_015802.1,3167-3185).
ggactccaaggtgattgaa

SEQ ID NO: 534473 - DNA, 19 bp, Mus musculus
  siRNA target sequence for Dlc1 (NM_015802.1,3168-3186).
gactccaaggtgattgaaa

SEQ ID NO: 534474 - DNA, 19 bp, Mus musculus
  siRNA target sequence for Dlc1 (NM_015802.1,3189-3207).
ctggacagccagactgaaa

SEQ ID NO: 534475 - DNA, 19 bp, Mus musculus
  siRNA target sequence for Dlc1 (NM_015802.1,3249-3267).
cgggactacgtcgtattga

SEQ ID NO: 534476 - DNA, 19 bp, Mus musculus
  siRNA target sequence for Dlc1 (NM_015802.1,3297-3315).
gcctgtgctctcttactca

SEQ ID NO: 534477 - DNA, 19 bp, Mus musculus
  siRNA target sequence for Dlc1 (NM_015802.1,3368-3386).
cctgtccagatatttgatt

SEQ ID NO: 534478 - DNA, 19 bp, Mus musculus
  siRNA target sequence for Dlc1 (NM_015802.1,3390-3408).
ccctgcgggtcaggaaaat

SEQ ID NO: 534479 - DNA, 19 bp, Mus musculus
  siRNA target sequence for Dlc1 (NM_015802.1,3394-3412).
gcgggtcaggaaaatccaa

SEQ ID NO: 534480 - DNA, 19 bp, Mus musculus
  siRNA target sequence for Dlc1 (NM_015802.1,3422-3440).
catgtgcagagctgattta

SEQ ID NO: 534481 - DNA, 19 bp, Mus musculus
  siRNA target sequence for Dlc1 (NM_015802.1,3452-3470).
gccggagtggtactcaaaa

SEQ ID NO: 534482 - DNA, 19 bp, Mus musculus
  siRNA target sequence for Dlc1 (NM_015802.1,3453-3471).
ccggagtggtactcaaaat

SEQ ID NO: 534483 - DNA, 19 bp, Mus musculus
  siRNA target sequence for Dlc1 (NM_015802.1,3455-3473).
ggagtggtactcaaaatct

SEQ ID NO: 534484 - DNA, 19 bp, Mus musculus
  siRNA target sequence for Dlc1 (NM_015802.1,3456-3474).
gagtggtactcaaaatctt

SEQ ID NO: 534485 - DNA, 19 bp, Mus musculus
  siRNA target sequence for Dlc1 (NM_015802.1,3509-3527).
ccgagactccttcagtaat

SEQ ID NO: 534486 - DNA, 19 bp, Mus musculus
  siRNA target sequence for Dlc1 (NM_015802.1,3513-3531).
gactccttcagtaatcaga

SEQ ID NO: 534487 - DNA, 19 bp, Mus musculus
  siRNA target sequence for Dlgh1 (NM_007862.2,318-336).
ccggtccggaagcaagata

SEQ ID NO: 534488 - DNA, 19 bp, Mus musculus
  siRNA target sequence for Dlgh1 (NM_007862.2,350-368).
gcatctgttggaagaatat

SEQ ID NO: 534489 - DNA, 19 bp, Mus musculus
  siRNA target sequence for Dlgh1 (NM_007862.2,354-372).
ctgttggaagaatatcgat

SEQ ID NO: 534490 - DNA, 19 bp, Mus musculus
  siRNA target sequence for Dlgh1 (NM_007862.2,359-377).
ggaagaatatcgatcgaaa

SEQ ID NO: 534491 - DNA, 19 bp, Mus musculus
  siRNA target sequence for Dlgh1 (NM_007862.2,363-381).
gaatatcgatcgaaactaa

SEQ ID NO: 534492 - DNA, 19 bp, Mus musculus
  siRNA target sequence for Dlgh1 (NM_007862.2,373-391).
cgaaactaagccaaactga

SEQ ID NO: 534493 - DNA, 19 bp, Mus musculus
  siRNA target sequence for Dlgh1 (NM_007862.2,412-430).
ccatagagcgggttattaa

SEQ ID NO: 534494 - DNA, 19 bp, Mus musculus
  siRNA target sequence for Dlgh1 (NM_007862.2,417-435).
gagcgggttattaacatat

SEQ ID NO: 534495 - DNA, 19 bp, Mus musculus
  siRNA target sequence for Dlgh1 (NM_007862.2,419-437).
gcgggttattaacatattt

SEQ ID NO: 534496 - DNA, 19 bp, Mus musculus
  siRNA target sequence for Dlgh1 (NM_007862.2,488-506).
gaccttacttgataatcca

SEQ ID NO: 534497 - DNA, 19 bp, Mus musculus
  siRNA target sequence for Dlgh1 (NM_007862.2,490-508).
ccttacttgataatccaaa

SEQ ID NO: 534498 - DNA, 19 bp, Mus musculus
  siRNA target sequence for Dlgh1 (NM_007862.2,504-522).
ccaaaatgtgtggatcatt

SEQ ID NO: 534499 - DNA, 19 bp, Mus musculus
  siRNA target sequence for Dlgh1 (NM_007862.2,540-558).
gttcagcctgtgactactt

SEQ ID NO: 534500 - DNA, 19 bp, Mus musculus
  siRNA target sequence for Dlgh1 (NM_007862.2,619-637).
gccctccagtagagaaata

SEQ ID NO: 534501 - DNA, 19 bp, Mus musculus
  siRNA target sequence for Dlgh1 (NM_007862.2,752-770).
gaatgtccatggatttgtt

SEQ ID NO: 534502 - DNA, 19 bp, Mus musculus
  siRNA target sequence for Dlgh1 (NM_007862.2,931-949).
gcttagagacaccaactta

SEQ ID NO: 534503 - DNA, 19 bp, Mus musculus
  siRNA target sequence for Dlgh1 (NM_007862.2,932-950).
cttagagacaccaacttat

SEQ ID NO: 534504 - DNA, 19 bp, Mus musculus
  siRNA target sequence for Dlgh1 (NM_007862.2,936-954).
gagacaccaacttatgtta

SEQ ID NO: 534505 - DNA, 19 bp, Mus musculus
  siRNA target sequence for Dlgh1 (NM_007862.2,981-999).
gaggaaatcacacttgaaa

SEQ ID NO: 534506 - DNA, 19 bp, Mus musculus
  siRNA target sequence for Dlgh1 (NM_007862.2,1059-1077).
gatgactcaagtattttca

SEQ ID NO: 534507 - DNA, 19 bp, Mus musculus
  siRNA target sequence for Dlgh1 (NM_007862.2,1117-1135).
gaagattgcgggtaaatga

SEQ ID NO: 534508 - DNA, 19 bp, Mus musculus
  siRNA target sequence for Dlgh1 (NM_007862.2,1124-1142).
gcgggtaaatgactgtata

SEQ ID NO: 534509 - DNA, 19 bp, Mus musculus
  siRNA target sequence for Dlgh1 (NM_007862.2,1134-1152).
gactgtatactgagagtaa

SEQ ID NO: 534510 - DNA, 19 bp, Mus musculus
  siRNA target sequence for Dlgh1 (NM_007862.2,1138-1156).
gtatactgagagtaaatga

SEQ ID NO: 534511 - DNA, 19 bp, Mus musculus
  siRNA target sequence for Dlgh1 (NM_007862.2,1213-1231).
gatctattgtgcgattgta

SEQ ID NO: 534512 - DNA, 19 bp, Mus musculus
  siRNA target sequence for Dlgh1 (NM_007862.2,1216-1234).
ctattgtgcgattgtatgt

SEQ ID NO: 534513 - DNA, 19 bp, Mus musculus
  siRNA target sequence for Dlgh1 (NM_007862.2,1221-1239).
gtgcgattgtatgtgaaaa

SEQ ID NO: 534514 - DNA, 19 bp, Mus musculus
  siRNA target sequence for Dlgh1 (NM_007862.2,1241-1259).
gcggaagccagcatcagaa

SEQ ID NO: 534515 - DNA, 19 bp, Mus musculus
  siRNA target sequence for Dlgh1 (NM_007862.2,1277-1295).
gctcattaaaggtcctaaa

SEQ ID NO: 534516 - DNA, 19 bp, Mus musculus
  siRNA target sequence for Dlgh1 (NM_007862.2,1473-1491).
gcagtgactgccttaaaga

SEQ ID NO: 534517 - DNA, 19 bp, Mus musculus
  siRNA target sequence for Dlgh1 (NM_007862.2,1557-1575).
gcaccacctgacatcacta

SEQ ID NO: 534518 - DNA, 19 bp, Mus musculus
  siRNA target sequence for Dlgh1 (NM_007862.2,1560-1578).
ccacctgacatcactaatt

SEQ ID NO: 534519 - DNA, 19 bp, Mus musculus
  siRNA target sequence for Dlgh1 (NM_007862.2,1563-1581).
cctgacatcactaattctt

SEQ ID NO: 534520 - DNA, 19 bp, Mus musculus
  siRNA target sequence for Dlgh1 (NM_007862.2,1566-1584).
gacatcactaattcttctt

SEQ ID NO: 534521 - DNA, 19 bp, Mus musculus
  siRNA target sequence for Dlgh1 (NM_007862.2,1651-1669).
ggtactcacccatttctaa

SEQ ID NO: 534522 - DNA, 19 bp, Mus musculus
  siRNA target sequence for Dlgh1 (NM_007862.2,1680-1698).
ggagatgacgagatcacta

SEQ ID NO: 534523 - DNA, 19 bp, Mus musculus
  siRNA target sequence for Dlgh1 (NM_007862.2,1699-1717).
gggaacctagaaaagttgt

SEQ ID NO: 534524 - DNA, 19 bp, Mus musculus
  siRNA target sequence for Dlgh1 (NM_007862.2,1705-1723).
ctagaaaagttgttcttca

SEQ ID NO: 534525 - DNA, 19 bp, Mus musculus
  siRNA target sequence for Dlgh1 (NM_007862.2,1732-1750).
caacaggacttggttttaa

SEQ ID NO: 534526 - DNA, 19 bp, Mus musculus
  siRNA target sequence for Dlgh1 (NM_007862.2,1738-1756).
gacttggttttaacattgt

SEQ ID NO: 534527 - DNA, 19 bp, Mus musculus
  siRNA target sequence for Dlgh1 (NM_007862.2,1803-1821).
ggcggacctgctgatctaa

SEQ ID NO: 534528 - DNA, 19 bp, Mus musculus
  siRNA target sequence for Dlgh1 (NM_007862.2,1805-1823).
cggacctgctgatctaagt

SEQ ID NO: 534529 - DNA, 19 bp, Mus musculus
  siRNA target sequence for Dlgh1 (NM_007862.2,1931-1949).
caccatcgttgcgcaatat

SEQ ID NO: 534530 - DNA, 19 bp, Mus musculus
  siRNA target sequence for Dlgh1 (NM_007862.2,1934-1952).
catcgttgcgcaatatcga

SEQ ID NO: 534531 - DNA, 19 bp, Mus musculus
  siRNA target sequence for Dlgh1 (NM_007862.2,1964-1982).
cagtcgttttgaagctaaa

SEQ ID NO: 534532 - DNA, 19 bp, Mus musculus
  siRNA target sequence for Dlgh1 (NM_007862.2,1966-1984).
gtcgttttgaagctaaaat

SEQ ID NO: 534533 - DNA, 19 bp, Mus musculus
  siRNA target sequence for Dlgh1 (NM_007862.2,1969-1987).
gttttgaagctaaaatcca

SEQ ID NO: 534534 - DNA, 19 bp, Mus musculus
  siRNA target sequence for Dlgh1 (NM_007862.2,2232-2250).
gtgattcctagtaaacgaa

SEQ ID NO: 534535 - DNA, 19 bp, Mus musculus
  siRNA target sequence for Dlgh1 (NM_007862.2,2264-2282).
ggaacgagcccgattaaaa

SEQ ID NO: 534536 - DNA, 19 bp, Mus musculus
  siRNA target sequence for Dlgh1 (NM_007862.2,2265-2283).
gaacgagcccgattaaaaa

SEQ ID NO: 534537 - DNA, 19 bp, Mus musculus
  siRNA target sequence for Dlgh1 (NM_007862.2,2415-2433).
gctgaccagcacgtaactt

SEQ ID NO: 534538 - DNA, 19 bp, Mus musculus
  siRNA target sequence for Dlgh1 (NM_007862.2,2418-2436).
gaccagcacgtaacttcta

SEQ ID NO: 534539 - DNA, 19 bp, Mus musculus
  siRNA target sequence for Dlgh1 (NM_007862.2,2420-2438).
ccagcacgtaacttctaat

SEQ ID NO: 534540 - DNA, 19 bp, Mus musculus
  siRNA target sequence for Dlgh1 (NM_007862.2,2434-2452).
ctaatgccagcgatagtga

SEQ ID NO: 534541 - DNA, 19 bp, Mus musculus
  siRNA target sequence for Dlgh1 (NM_007862.2,2441-2459).
cagcgatagtgaaagtagt

SEQ ID NO: 534542 - DNA, 19 bp, Mus musculus
  siRNA target sequence for Dlgh1 (NM_007862.2,2443-2461).
gcgatagtgaaagtagtta

SEQ ID NO: 534543 - DNA, 19 bp, Mus musculus
  siRNA target sequence for Dlgh1 (NM_007862.2,2458-2476).
gttaccgtggtcaagaaga

SEQ ID NO: 534544 - DNA, 19 bp, Mus musculus
  siRNA target sequence for Dlgh1 (NM_007862.2,2495-2513).
gccagtgaatcaacaagaa

SEQ ID NO: 534545 - DNA, 19 bp, Mus musculus
  siRNA target sequence for Dlgh1 (NM_007862.2,2499-2517).
gtgaatcaacaagaagtta

SEQ ID NO: 534546 - DNA, 19 bp, Mus musculus
  siRNA target sequence for Dlgh1 (NM_007862.2,2524-2542).
cccgaccagtcatcatatt

SEQ ID NO: 534547 - DNA, 19 bp, Mus musculus
  siRNA target sequence for Dlgh1 (NM_007862.2,2525-2543).
ccgaccagtcatcatatta

SEQ ID NO: 534548 - DNA, 19 bp, Mus musculus
  siRNA target sequence for Dlgh1 (NM_007862.2,2558-2576).
cagagtaaatgatgactta

SEQ ID NO: 534549 - DNA, 19 bp, Mus musculus
  siRNA target sequence for Dlgh1 (NM_007862.2,2562-2580).
gtaaatgatgacttaatct

SEQ ID NO: 534550 - DNA, 19 bp, Mus musculus
  siRNA target sequence for Dlgh1 (NM_007862.2,2568-2586).
gatgacttaatctcagaat

SEQ ID NO: 534551 - DNA, 19 bp, Mus musculus
  siRNA target sequence for Dlgh1 (NM_007862.2,2626-2644).
gaccgaagcgtgactatga

SEQ ID NO: 534552 - DNA, 19 bp, Mus musculus
  siRNA target sequence for Dlgh1 (NM_007862.2,2645-2663).
ggtggatggacgagattat

SEQ ID NO: 534553 - DNA, 19 bp, Mus musculus
  siRNA target sequence for Dlgh1 (NM_007862.2,2648-2666).
ggatggacgagattatcat

SEQ ID NO: 534554 - DNA, 19 bp, Mus musculus
  siRNA target sequence for Dlgh1 (NM_007862.2,2649-2667).
gatggacgagattatcatt

SEQ ID NO: 534555 - DNA, 19 bp, Mus musculus
  siRNA target sequence for Dlgh1 (NM_007862.2,2653-2671).
gacgagattatcattttgt

SEQ ID NO: 534556 - DNA, 19 bp, Mus musculus
  siRNA target sequence for Dlgh1 (NM_007862.2,2655-2673).
cgagattatcattttgtga

SEQ ID NO: 534557 - DNA, 19 bp, Mus musculus
  siRNA target sequence for Dlgh1 (NM_007862.2,2697-2715).
gatattcaggagcataagt

SEQ ID NO: 534558 - DNA, 19 bp, Mus musculus
  siRNA target sequence for Dlgh1 (NM_007862.2,2705-2723).
ggagcataagttcattgaa

SEQ ID NO: 534559 - DNA, 19 bp, Mus musculus
  siRNA target sequence for Dlgh1 (NM_007862.2,2780-2798).
ggcagagaagggcaaacat

SEQ ID NO: 534560 - DNA, 19 bp, Mus musculus
  siRNA target sequence for Dlgh1 (NM_007862.2,2789-2807).
gggcaaacattgtatcctt

SEQ ID NO: 534561 - DNA, 19 bp, Mus musculus
  siRNA target sequence for Dlgh1 (NM_007862.2,2804-2822).
ccttgatgtgtctggaaat

SEQ ID NO: 534562 - DNA, 19 bp, Mus musculus
  siRNA target sequence for Dlgh1 (NM_007862.2,2844-2862).
gcacagctttatccaatat

SEQ ID NO: 534563 - DNA, 19 bp, Mus musculus
  siRNA target sequence for Dlgh1 (NM_007862.2,2847-2865).
cagctttatccaatatcta

SEQ ID NO: 534564 - DNA, 19 bp, Mus musculus
  siRNA target sequence for Dlgh1 (NM_007862.2,2856-2874).
ccaatatctatttttatta

SEQ ID NO: 534565 - DNA, 19 bp, Mus musculus
  siRNA target sequence for Dlgh1 (NM_007862.2,2878-2896).
ccaaatccatggaaaatat

SEQ ID NO: 534566 - DNA, 19 bp, Mus musculus
  siRNA target sequence for Dlgh1 (NM_007862.2,2931-2949).
gccagaaaaacatttgaga

SEQ ID NO: 534567 - DNA, 19 bp, Mus musculus
  siRNA target sequence for Dlgh1 (NM_007862.2,3006-3024).
gacacgctggaggacattt

SEQ ID NO: 534568 - DNA, 19 bp, Mus musculus
  siRNA target sequence for Dlgh1 (NM_007862.2,3071-3089).
ctgggtcccagcgaaagaa

SEQ ID NO: 534569 - DNA, 19 bp, Mus musculus
  siRNA target sequence for Dlgh1 (NM_007862.2,3073-3091).
gggtcccagcgaaagaaaa

SEQ ID NO: 534570 - DNA, 19 bp, Mus musculus
  siRNA target sequence for Dlgh3 (NM_016747.1,462-480).
ggctagctccggttatgga

SEQ ID NO: 534571 - DNA, 19 bp, Mus musculus
  siRNA target sequence for Dlgh3 (NM_016747.1,599-617).
gcaagagcaccccaaaact

SEQ ID NO: 534572 - DNA, 19 bp, Mus musculus
  siRNA target sequence for Dlgh3 (NM_016747.1,923-941).
gtgtgctacgggtgaatga

SEQ ID NO: 534573 - DNA, 19 bp, Mus musculus
  siRNA target sequence for Dlgh3 (NM_016747.1,1034-1052).
ccccacctgagactatcat

SEQ ID NO: 534574 - DNA, 19 bp, Mus musculus
  siRNA target sequence for Dlgh3 (NM_016747.1,1208-1226).
ggctgcttgcggtgaacaa

SEQ ID NO: 534575 - DNA, 19 bp, Mus musculus
  siRNA target sequence for Dlgh3 (NM_016747.1,1209-1227).
gctgcttgcggtgaacaat

SEQ ID NO: 534576 - DNA, 19 bp, Mus musculus
  siRNA target sequence for Dlgh3 (NM_016747.1,1210-1228).
ctgcttgcggtgaacaata

SEQ ID NO: 534577 - DNA, 19 bp, Mus musculus
  siRNA target sequence for Dlgh3 (NM_016747.1,1319-1337).
gcatccacctcaacgatat

SEQ ID NO: 534578 - DNA, 19 bp, Mus musculus
  siRNA target sequence for Dlgh3 (NM_016747.1,1323-1341).
ccacctcaacgatatgtat

SEQ ID NO: 534579 - DNA, 19 bp, Mus musculus
  siRNA target sequence for Dlgh3 (NM_016747.1,1338-1356).
gtatgctccccctgactat

SEQ ID NO: 534580 - DNA, 19 bp, Mus musculus
  siRNA target sequence for Dlgh3 (NM_016747.1,1351-1369).
gactatgccagcactttca

SEQ ID NO: 534581 - DNA, 19 bp, Mus musculus
  siRNA target sequence for Dlgh3 (NM_016747.1,1464-1482).
gccccctactcgttactct

SEQ ID NO: 534582 - DNA, 19 bp, Mus musculus
  siRNA target sequence for Dlgh3 (NM_016747.1,1668-1686).
ccggatcttatcggtaaat

SEQ ID NO: 534583 - DNA, 19 bp, Mus musculus
  siRNA target sequence for Dlgh3 (NM_016747.1,1813-1831).
gacttgcgggaacaaatga

SEQ ID NO: 534584 - DNA, 19 bp, Mus musculus
  siRNA target sequence for Dlgh3 (NM_016747.1,1899-1917).
ggccctgtttgattatgat

SEQ ID NO: 534585 - DNA, 19 bp, Mus musculus
  siRNA target sequence for Dlgh3 (NM_016747.1,1947-1965).
gggactcagtttctcttat

SEQ ID NO: 534586 - DNA, 19 bp, Mus musculus
  siRNA target sequence for Dlgh3 (NM_016747.1,2053-2071).
ggtgtgatccctagtaaaa

SEQ ID NO: 534587 - DNA, 19 bp, Mus musculus
  siRNA target sequence for Dlgh3 (NM_016747.1,2054-2072).
gtgtgatccctagtaaaaa

SEQ ID NO: 534588 - DNA, 19 bp, Mus musculus
  siRNA target sequence for Dlgh3 (NM_016747.1,2056-2074).
gtgatccctagtaaaaaga

SEQ ID NO: 534589 - DNA, 19 bp, Mus musculus
  siRNA target sequence for Dlgh3 (NM_016747.1,2089-2107).
gagcgagctcgattgaaaa

SEQ ID NO: 534590 - DNA, 19 bp, Mus musculus
  siRNA target sequence for Dlgh3 (NM_016747.1,2091-2109).
gcgagctcgattgaaaact

SEQ ID NO: 534591 - DNA, 19 bp, Mus musculus
  siRNA target sequence for Dlgh3 (NM_016747.1,2093-2111).
gagctcgattgaaaactgt

SEQ ID NO: 534592 - DNA, 19 bp, Mus musculus
  siRNA target sequence for Dlgh3 (NM_016747.1,2129-2147).
cagggatgattgagtctaa

SEQ ID NO: 534593 - DNA, 19 bp, Mus musculus
  siRNA target sequence for Dlgh3 (NM_016747.1,2151-2169).
ggacttccctgggttaagt

SEQ ID NO: 534594 - DNA, 19 bp, Mus musculus
  siRNA target sequence for Dlgh3 (NM_016747.1,2161-2179).
gggttaagtgacgattatt

SEQ ID NO: 534595 - DNA, 19 bp, Mus musculus
  siRNA target sequence for Dlgh3 (NM_016747.1,2162-2180).
ggttaagtgacgattatta

SEQ ID NO: 534596 - DNA, 19 bp, Mus musculus
  siRNA target sequence for Dlgh3 (NM_016747.1,2163-2181).
gttaagtgacgattattat

SEQ ID NO: 534597 - DNA, 19 bp, Mus musculus
  siRNA target sequence for Dlgh3 (NM_016747.1,2223-2241).
cagcgaaagcagttccaaa

SEQ ID NO: 534598 - DNA, 19 bp, Mus musculus
  siRNA target sequence for Dlgh3 (NM_016747.1,2248-2266).
gaggatgctattttgtcat

SEQ ID NO: 534599 - DNA, 19 bp, Mus musculus
  siRNA target sequence for Dlgh3 (NM_016747.1,2271-2289).
gccagtgacacgacaagaa

SEQ ID NO: 534600 - DNA, 19 bp, Mus musculus
  siRNA target sequence for Dlgh3 (NM_016747.1,2272-2290).
ccagtgacacgacaagaaa

SEQ ID NO: 534601 - DNA, 19 bp, Mus musculus
  siRNA target sequence for Dlgh3 (NM_016747.1,2299-2317).
gccaggcctgtgatcatct

SEQ ID NO: 534602 - DNA, 19 bp, Mus musculus
  siRNA target sequence for Dlgh3 (NM_016747.1,2355-2373).
ctctgagttcccgcataaa

SEQ ID NO: 534603 - DNA, 19 bp, Mus musculus
  siRNA target sequence for Dlgh3 (NM_016747.1,2361-2379).
gttcccgcataaatttgga

SEQ ID NO: 534604 - DNA, 19 bp, Mus musculus
  siRNA target sequence for Dlgh3 (NM_016747.1,2402-2420).
ggcctcggcgtgataacga

SEQ ID NO: 534605 - DNA, 19 bp, Mus musculus
  siRNA target sequence for Dlgh3 (NM_016747.1,2473-2491).
gatattcaggacaacaagt

SEQ ID NO: 534606 - DNA, 19 bp, Mus musculus
  siRNA target sequence for Dlgh3 (NM_016747.1,2504-2522).
gccagttcaatgataatct

SEQ ID NO: 534607 - DNA, 19 bp, Mus musculus
  siRNA target sequence for Dlgh3 (NM_016747.1,2568-2586).
caagcactgcatcttagat

SEQ ID NO: 534608 - DNA, 19 bp, Mus musculus
  siRNA target sequence for Dlgh3 (NM_016747.1,2685-2703).
ccgacggcagacatacgaa

SEQ ID NO: 534609 - DNA, 19 bp, Mus musculus
  siRNA target sequence for Dlgh3 (NM_016747.1,2784-2802).
ctcactggaagagatttat

SEQ ID NO: 534610 - DNA, 19 bp, Mus musculus
  siRNA target sequence for Dlgh3 (NM_016747.1,2794-2812).
gagatttataacaaaatca

SEQ ID NO: 534611 - DNA, 19 bp, Mus musculus
  siRNA target sequence for Dlgh3 (NM_016747.1,2829-2847).
ccagtctgggcactacatt

SEQ ID NO: 534612 - DNA, 19 bp, Mus musculus
  siRNA target sequence for Dlgh3 (NM_016747.1,2830-2848).
cagtctgggcactacattt

SEQ ID NO: 534613 - DNA, 19 bp, Mus musculus
  siRNA target sequence for Dnajb11 (NM_026400.2,192-210).
ggcgagatttctataagat

SEQ ID NO: 534614 - DNA, 19 bp, Mus musculus
  siRNA target sequence for Dnajb11 (NM_026400.2,221-239).
cctcgaagtgcctccataa

SEQ ID NO: 534615 - DNA, 19 bp, Mus musculus
  siRNA target sequence for Dnajb11 (NM_026400.2,355-373).
gtcagatagtgaaaaacga

SEQ ID NO: 534616 - DNA, 19 bp, Mus musculus
  siRNA target sequence for Dnajb11 (NM_026400.2,357-375).
cagatagtgaaaaacgaaa

SEQ ID NO: 534617 - DNA, 19 bp, Mus musculus
  siRNA target sequence for Dnajb11 (NM_026400.2,391-409).
cggtgaagaaggcttgaaa

SEQ ID NO: 534618 - DNA, 19 bp, Mus musculus
  siRNA target sequence for Dnajb11 (NM_026400.2,488-506).
cgtcagcaggacaggaata

SEQ ID NO: 534619 - DNA, 19 bp, Mus musculus
  siRNA target sequence for Dnajb11 (NM_026400.2,519-537).
gtgatatcatcgtagatct

SEQ ID NO: 534620 - DNA, 19 bp, Mus musculus
  siRNA target sequence for Dnajb11 (NM_026400.2,554-572).
gaagtgtacgcaggaaatt

SEQ ID NO: 534621 - DNA, 19 bp, Mus musculus
  siRNA target sequence for Dnajb11 (NM_026400.2,567-585).
gaaattttgtggaagtagt

SEQ ID NO: 534622 - DNA, 19 bp, Mus musculus
  siRNA target sequence for Dnajb11 (NM_026400.2,575-593).
gtggaagtagttagaaaca

SEQ ID NO: 534623 - DNA, 19 bp, Mus musculus
  siRNA target sequence for Dnajb11 (NM_026400.2,614-632).
cctggcaaacggaaatgca

SEQ ID NO: 534624 - DNA, 19 bp, Mus musculus
  siRNA target sequence for Dnajb11 (NM_026400.2,615-633).
ctggcaaacggaaatgcaa

SEQ ID NO: 534625 - DNA, 19 bp, Mus musculus
  siRNA target sequence for Dnajb11 (NM_026400.2,630-648).
gcaactgtcggcaagagat

SEQ ID NO: 534626 - DNA, 19 bp, Mus musculus
  siRNA target sequence for Dnajb11 (NM_026400.2,665-683).
ggaccgggacgcttccaaa

SEQ ID NO: 534627 - DNA, 19 bp, Mus musculus
  siRNA target sequence for Dnajb11 (NM_026400.2,666-684).
gaccgggacgcttccaaat

SEQ ID NO: 534628 - DNA, 19 bp, Mus musculus
  siRNA target sequence for Dnajb11 (NM_026400.2,668-686).
ccgggacgcttccaaatga

SEQ ID NO: 534629 - DNA, 19 bp, Mus musculus
  siRNA target sequence for Dnajb11 (NM_026400.2,704-722).
gacgagtgccctaatgtca

SEQ ID NO: 534630 - DNA, 19 bp, Mus musculus
  siRNA target sequence for Dnajb11 (NM_026400.2,706-724).
cgagtgccctaatgtcaaa

SEQ ID NO: 534631 - DNA, 19 bp, Mus musculus
  siRNA target sequence for Dnajb11 (NM_026400.2,707-725).
gagtgccctaatgtcaaat

SEQ ID NO: 534632 - DNA, 19 bp, Mus musculus
  siRNA target sequence for Dnajb11 (NM_026400.2,711-729).
gccctaatgtcaaattagt

SEQ ID NO: 534633 - DNA, 19 bp, Mus musculus
  siRNA target sequence for Dnajb11 (NM_026400.2,784-802).
ggagtacccctttattgga

SEQ ID NO: 534634 - DNA, 19 bp, Mus musculus
  siRNA target sequence for Dnajb11 (NM_026400.2,838-856).
cttacggttccgaatcaaa

SEQ ID NO: 534635 - DNA, 19 bp, Mus musculus
  siRNA target sequence for Dnajb11 (NM_026400.2,843-861).
ggttccgaatcaaagttgt

SEQ ID NO: 534636 - DNA, 19 bp, Mus musculus
  siRNA target sequence for Dnajb11 (NM_026400.2,893-911).
gacctgtacacaaatgtga

SEQ ID NO: 534637 - DNA, 19 bp, Mus musculus
  siRNA target sequence for Dnajb11 (NM_026400.2,929-947).
gctctggttggctttgaga

SEQ ID NO: 534638 - DNA, 19 bp, Mus musculus
  siRNA target sequence for Dnajb11 (NM_026400.2,1033-1051).
ggaagggctgcccaacttt

SEQ ID NO: 534639 - DNA, 19 bp, Mus musculus
  siRNA target sequence for Dnajb11 (NM_026400.2,1037-1055).
gggctgcccaactttgata

SEQ ID NO: 534640 - DNA, 19 bp, Mus musculus
  siRNA target sequence for Dnajb11 (NM_026400.2,1038-1056).
ggctgcccaactttgataa

SEQ ID NO: 534641 - DNA, 19 bp, Mus musculus
  siRNA target sequence for Dnajb11 (NM_026400.2,1069-1087).
gggctctttgataatcact

SEQ ID NO: 534642 - DNA, 19 bp, Mus musculus
  siRNA target sequence for Dncic1 (NM_010063.1,267-285).
gaaagagcccgttcaagat

SEQ ID NO: 534643 - DNA, 19 bp, Mus musculus
  siRNA target sequence for Dncic1 (NM_010063.1,380-398).
ctccctcttcgaaatcagt

SEQ ID NO: 534644 - DNA, 19 bp, Mus musculus
  siRNA target sequence for Dncic1 (NM_010063.1,433-451).
ggcgatctggggccattaa

SEQ ID NO: 534645 - DNA, 19 bp, Mus musculus
  siRNA target sequence for Dncic1 (NM_010063.1,435-453).
cgatctggggccattaaca

SEQ ID NO: 534646 - DNA, 19 bp, Mus musculus
  siRNA target sequence for Dncic1 (NM_010063.1,495-513).
gcagtcagactcagaactt

SEQ ID NO: 534647 - DNA, 19 bp, Mus musculus
  siRNA target sequence for Dncic1 (NM_010063.1,564-582).
cctgcctagggaagtagta

SEQ ID NO: 534648 - DNA, 19 bp, Mus musculus
  siRNA target sequence for Dncic1 (NM_010063.1,565-583).
ctgcctagggaagtagtat

SEQ ID NO: 534649 - DNA, 19 bp, Mus musculus
  siRNA target sequence for Dncic1 (NM_010063.1,569-587).
ctagggaagtagtatccta

SEQ ID NO: 534650 - DNA, 19 bp, Mus musculus
  siRNA target sequence for Dncic1 (NM_010063.1,603-621).
gactcctcttgcaacacat

SEQ ID NO: 534651 - DNA, 19 bp, Mus musculus
  siRNA target sequence for Dncic1 (NM_010063.1,651-669).
gatggtagaacccaaaatt

SEQ ID NO: 534652 - DNA, 19 bp, Mus musculus
  siRNA target sequence for Dncic1 (NM_010063.1,654-672).
ggtagaacccaaaattggt

SEQ ID NO: 534653 - DNA, 19 bp, Mus musculus
  siRNA target sequence for Dncic1 (NM_010063.1,772-790).
gaagaattcctcatcttct

SEQ ID NO: 534654 - DNA, 19 bp, Mus musculus
  siRNA target sequence for Dncic1 (NM_010063.1,795-813).
ccggacaatccgagtaatt

SEQ ID NO: 534655 - DNA, 19 bp, Mus musculus
  siRNA target sequence for Dncic1 (NM_010063.1,797-815).
ggacaatccgagtaattga

SEQ ID NO: 534656 - DNA, 19 bp, Mus musculus
  siRNA target sequence for Dncic1 (NM_010063.1,798-816).
gacaatccgagtaattgaa

SEQ ID NO: 534657 - DNA, 19 bp, Mus musculus
  siRNA target sequence for Dncic1 (NM_010063.1,831-849).
ggactcggacatctttttt

SEQ ID NO: 534658 - DNA, 19 bp, Mus musculus
  siRNA target sequence for Dncic1 (NM_010063.1,920-938).
gtcagttctacgatgaaca

SEQ ID NO: 534659 - DNA, 19 bp, Mus musculus
  siRNA target sequence for Dncic1 (NM_010063.1,994-1012).
ctgatggttgcttcttata

SEQ ID NO: 534660 - DNA, 19 bp, Mus musculus
  siRNA target sequence for Dncic1 (NM_010063.1,1128-1146).
ctgctttgcccgttttcat

SEQ ID NO: 534661 - DNA, 19 bp, Mus musculus
  siRNA target sequence for Dncic1 (NM_010063.1,1135-1153).
gcccgttttcatcctaatt

SEQ ID NO: 534662 - DNA, 19 bp, Mus musculus
  siRNA target sequence for Dncic1 (NM_010063.1,1136-1154).
cccgttttcatcctaattt

SEQ ID NO: 534663 - DNA, 19 bp, Mus musculus
  siRNA target sequence for Dncic1 (NM_010063.1,1139-1157).
gttttcatcctaatttggt

SEQ ID NO: 534664 - DNA, 19 bp, Mus musculus
  siRNA target sequence for Dncic1 (NM_010063.1,1381-1399).
gagctggtgtataataagt

SEQ ID NO: 534665 - DNA, 19 bp, Mus musculus
  siRNA target sequence for Dncic1 (NM_010063.1,1433-1451).
caacgggagacgtcaacaa

SEQ ID NO: 534666 - DNA, 19 bp, Mus musculus
  siRNA target sequence for Dncic1 (NM_010063.1,1544-1562).
ggccagtgacaggcattaa

SEQ ID NO: 534667 - DNA, 19 bp, Mus musculus
  siRNA target sequence for Dncic1 (NM_010063.1,1546-1564).
ccagtgacaggcattaact

SEQ ID NO: 534668 - DNA, 19 bp, Mus musculus
  siRNA target sequence for Dncic1 (NM_010063.1,1580-1598).
gtcccatcgacttttctca

SEQ ID NO: 534669 - DNA, 19 bp, Mus musculus
  siRNA target sequence for Dncic1 (NM_010063.1,1606-1624).
gtcacgtcatcatttgact

SEQ ID NO: 534670 - DNA, 19 bp, Mus musculus
  siRNA target sequence for Dncic1 (NM_010063.1,1640-1658).
ggaccacgaagcacaacaa

SEQ ID NO: 534671 - DNA, 19 bp, Mus musculus
  siRNA target sequence for Dncic1 (NM_010063.1,1883-1901).
cagaaggccgcatttggat

SEQ ID NO: 534672 - DNA, 19 bp, Mus musculus
  siRNA target sequence for Dncic1 (NM_010063.1,1917-1935).
gcttgccgttccacacaat

SEQ ID NO: 534673 - DNA, 19 bp, Mus musculus
  siRNA target sequence for Dncic1 (NM_010063.1,1922-1940).
ccgttccacacaatgatga

SEQ ID NO: 534674 - DNA, 19 bp, Mus musculus
  siRNA target sequence for Dncic1 (NM_010063.1,1923-1941).
cgttccacacaatgatgaa

SEQ ID NO: 534675 - DNA, 19 bp, Mus musculus
  siRNA target sequence for Dncic1 (NM_010063.1,1924-1942).
gttccacacaatgatgaat

SEQ ID NO: 534676 - DNA, 19 bp, Mus musculus
  siRNA target sequence for Dncl2b (NM_029297.1,140-158).
ctccacaacggttcagtat

SEQ ID NO: 534677 - DNA, 19 bp, Mus musculus
  siRNA target sequence for Dncl2b (NM_029297.1,221-239).
gaacgacctgacttttctt

SEQ ID NO: 534678 - DNA, 19 bp, Mus musculus
  siRNA target sequence for Dncl2b (NM_029297.1,242-260).
gatcagatcgaagaaacat

SEQ ID NO: 534679 - DNA, 19 bp, Mus musculus
  siRNA target sequence for Dncl2b (NM_029297.1,245-263).
cagatcgaagaaacatgaa

SEQ ID NO: 534680 - DNA, 19 bp, Mus musculus
  siRNA target sequence for Dncl2b (NM_029297.1,247-265).
gatcgaagaaacatgaaat

SEQ ID NO: 534681 - DNA, 19 bp, Mus musculus
  siRNA target sequence for Dncl2b (NM_029297.1,269-287).
ggtagccccagataaggaa

SEQ ID NO: 534682 - DNA, 19 bp, Mus musculus
  siRNA target sequence for Dncl2b (NM_029297.1,270-288).
gtagccccagataaggaat

SEQ ID NO: 534683 - DNA, 19 bp, Mus musculus
  siRNA target sequence for Dock3 (NM_153413.1,375-393).
gaaatacggcgtagtgata

SEQ ID NO: 534684 - DNA, 19 bp, Mus musculus
  siRNA target sequence for Dock3 (NM_153413.1,423-441).
cctggtcttagaaatagga

SEQ ID NO: 534685 - DNA, 19 bp, Mus musculus
  siRNA target sequence for Dock3 (NM_153413.1,477-495).
gtacagaggagtttcaaca

SEQ ID NO: 534686 - DNA, 19 bp, Mus musculus
  siRNA target sequence for Dock3 (NM_153413.1,514-532).
gggctctttcctgcaaatt

SEQ ID NO: 534687 - DNA, 19 bp, Mus musculus
  siRNA target sequence for Dock3 (NM_153413.1,515-533).
ggctctttcctgcaaatta

SEQ ID NO: 534688 - DNA, 19 bp, Mus musculus
  siRNA target sequence for Dock3 (NM_153413.1,516-534).
gctctttcctgcaaattat

SEQ ID NO: 534689 - DNA, 19 bp, Mus musculus
  siRNA target sequence for Dock3 (NM_153413.1,560-578).
gtaacagggggcagtatga

SEQ ID NO: 534690 - DNA, 19 bp, Mus musculus
  siRNA target sequence for Dock3 (NM_153413.1,564-582).
cagggggcagtatgaaact

SEQ ID NO: 534691 - DNA, 19 bp, Mus musculus
  siRNA target sequence for Dock3 (NM_153413.1,585-603).
ggttccgctggaagattct

SEQ ID NO: 534692 - DNA, 19 bp, Mus musculus
  siRNA target sequence for Dock3 (NM_153413.1,586-604).
gttccgctggaagattcta

SEQ ID NO: 534693 - DNA, 19 bp, Mus musculus
  siRNA target sequence for Dock3 (NM_153413.1,655-673).
caactatatgtgaaacaca

SEQ ID NO: 534694 - DNA, 19 bp, Mus musculus
  siRNA target sequence for Dock3 (NM_153413.1,698-716).
gccatgtgatgaatgaact

SEQ ID NO: 534695 - DNA, 19 bp, Mus musculus
  siRNA target sequence for Dock3 (NM_153413.1,797-815).
gtctggactggggtaatga

SEQ ID NO: 534696 - DNA, 19 bp, Mus musculus
  siRNA target sequence for Dock3 (NM_153413.1,859-877).
gtggattcagaccagatta

SEQ ID NO: 534697 - DNA, 19 bp, Mus musculus
  siRNA target sequence for Dock3 (NM_153413.1,878-896).
gcgtctcagatctctataa

SEQ ID NO: 534698 - DNA, 19 bp, Mus musculus
  siRNA target sequence for Dock3 (NM_153413.1,879-897).
cgtctcagatctctataaa

SEQ ID NO: 534699 - DNA, 19 bp, Mus musculus
  siRNA target sequence for Dock3 (NM_153413.1,880-898).
gtctcagatctctataaaa

SEQ ID NO: 534700 - DNA, 19 bp, Mus musculus
  siRNA target sequence for Dock3 (NM_153413.1,930-948).
gagcacatcccaagtagat

SEQ ID NO: 534701 - DNA, 19 bp, Mus musculus
  siRNA target sequence for Dock3 (NM_153413.1,933-951).
cacatcccaagtagataca

SEQ ID NO: 534702 - DNA, 19 bp, Mus musculus
  siRNA target sequence for Dock3 (NM_153413.1,935-953).
catcccaagtagatacaat

SEQ ID NO: 534703 - DNA, 19 bp, Mus musculus
  siRNA target sequence for Dock3 (NM_153413.1,1014-1032).
gaagagtttcacctataat

SEQ ID NO: 534704 - DNA, 19 bp, Mus musculus
  siRNA target sequence for Dock3 (NM_153413.1,1019-1037).
gtttcacctataataccat

SEQ ID NO: 534705 - DNA, 19 bp, Mus musculus
  siRNA target sequence for Dock3 (NM_153413.1,1149-1167).
gaagatagaacgaatgtgt

SEQ ID NO: 534706 - DNA, 19 bp, Mus musculus
  siRNA target sequence for Dock3 (NM_153413.1,1159-1177).
cgaatgtgtgcccttttta

SEQ ID NO: 534707 - DNA, 19 bp, Mus musculus
  siRNA target sequence for Dock3 (NM_153413.1,1284-1302).
gcactacaggcgaccatat

SEQ ID NO: 534708 - DNA, 19 bp, Mus musculus
  siRNA target sequence for Dock3 (NM_153413.1,1333-1351).
ctacagtcactaacagaat

SEQ ID NO: 534709 - DNA, 19 bp, Mus musculus
  siRNA target sequence for Dock3 (NM_153413.1,1336-1354).
cagtcactaacagaattaa

SEQ ID NO: 534710 - DNA, 19 bp, Mus musculus
  siRNA target sequence for Dock3 (NM_153413.1,1375-1393).
cttaaggtgtacacatgta

SEQ ID NO: 534711 - DNA, 19 bp, Mus musculus
  siRNA target sequence for Dock3 (NM_153413.1,1403-1421).
gtgaatggacccagattca

SEQ ID NO: 534712 - DNA, 19 bp, Mus musculus
  siRNA target sequence for Dock3 (NM_153413.1,1425-1443).
gaacatcatccgaaagtca

SEQ ID NO: 534713 - DNA, 19 bp, Mus musculus
  siRNA target sequence for Dock3 (NM_153413.1,1470-1488).
cagccatggtcttattatt

SEQ ID NO: 534714 - DNA, 19 bp, Mus musculus
  siRNA target sequence for Dock3 (NM_153413.1,1527-1545).
gagagaaaatcccatgata

SEQ ID NO: 534715 - DNA, 19 bp, Mus musculus
  siRNA target sequence for Dock3 (NM_153413.1,1555-1573).
ggattagcaattacaagaa

SEQ ID NO: 534716 - DNA, 19 bp, Mus musculus
  siRNA target sequence for Dock3 (NM_153413.1,1579-1597).
ggatttcctgatgttatta

SEQ ID NO: 534717 - DNA, 19 bp, Mus musculus
  siRNA target sequence for Dock3 (NM_153413.1,1603-1621).
ggtgatatccgcaatgatt

SEQ ID NO: 534718 - DNA, 19 bp, Mus musculus
  siRNA target sequence for Dock3 (NM_153413.1,1604-1622).
gtgatatccgcaatgattt

SEQ ID NO: 534719 - DNA, 19 bp, Mus musculus
  siRNA target sequence for Dock3 (NM_153413.1,1612-1630).
cgcaatgatttgtacctaa

SEQ ID NO: 534720 - DNA, 19 bp, Mus musculus
  siRNA target sequence for Dock3 (NM_153413.1,1755-1773).
gccaaataggagttcctat

SEQ ID NO: 534721 - DNA, 19 bp, Mus musculus
  siRNA target sequence for Dock3 (NM_153413.1,1769-1787).
cctatcactcctttgttct

SEQ ID NO: 534722 - DNA, 19 bp, Mus musculus
  siRNA target sequence for Dock3 (NM_153413.1,1802-1820).
gtcctcgctggggagaaat

SEQ ID NO: 534723 - DNA, 19 bp, Mus musculus
  siRNA target sequence for Dock3 (NM_153413.1,1804-1822).
cctcgctggggagaaatta

SEQ ID NO: 534724 - DNA, 19 bp, Mus musculus
  siRNA target sequence for Dock3 (NM_153413.1,1805-1823).
ctcgctggggagaaattat

SEQ ID NO: 534725 - DNA, 19 bp, Mus musculus
  siRNA target sequence for Dock3 (NM_153413.1,1807-1825).
cgctggggagaaattatca

SEQ ID NO: 534726 - DNA, 19 bp, Mus musculus
  siRNA target sequence for Dock3 (NM_153413.1,1808-1826).
gctggggagaaattatcaa

SEQ ID NO: 534727 - DNA, 19 bp, Mus musculus
  siRNA target sequence for Dock3 (NM_153413.1,1811-1829).
ggggagaaattatcaaatt

SEQ ID NO: 534728 - DNA, 19 bp, Mus musculus
  siRNA target sequence for Dock3 (NM_153413.1,1961-1979).
cactctcagatgatattca

SEQ ID NO: 534729 - DNA, 19 bp, Mus musculus
  siRNA target sequence for Dock3 (NM_153413.1,1978-1996).
catgagctttatgtgtata

SEQ ID NO: 534730 - DNA, 19 bp, Mus musculus
  siRNA target sequence for Dock3 (NM_153413.1,1981-1999).
gagctttatgtgtataagt

SEQ ID NO: 534731 - DNA, 19 bp, Mus musculus
  siRNA target sequence for Dock3 (NM_153413.1,2002-2020).
gatgagaatagcacattta

SEQ ID NO: 534732 - DNA, 19 bp, Mus musculus
  siRNA target sequence for Dock3 (NM_153413.1,2005-2023).
gagaatagcacatttaaca

SEQ ID NO: 534733 - DNA, 19 bp, Mus musculus
  siRNA target sequence for Dock3 (NM_153413.1,2147-2165).
ctaccaaactcacacaaaa

SEQ ID NO: 534734 - DNA, 19 bp, Mus musculus
  siRNA target sequence for Dock3 (NM_153413.1,2206-2224).
gaccggatcatggacatat

SEQ ID NO: 534735 - DNA, 19 bp, Mus musculus
  siRNA target sequence for Dock3 (NM_153413.1,2269-2287).
ctgcaggatatcttagata

SEQ ID NO: 534736 - DNA, 19 bp, Mus musculus
  siRNA target sequence for Dock3 (NM_153413.1,2284-2302).
gatacactctttgtgattt

SEQ ID NO: 534737 - DNA, 19 bp, Mus musculus
  siRNA target sequence for Dock3 (NM_153413.1,2364-2382).
cctgcttcgagacataaaa

SEQ ID NO: 534738 - DNA, 19 bp, Mus musculus
  siRNA target sequence for Dock3 (NM_153413.1,2365-2383).
ctgcttcgagacataaaat

SEQ ID NO: 534739 - DNA, 19 bp, Mus musculus
  siRNA target sequence for Dock3 (NM_153413.1,2396-2414).
gacctgtaatggacacata

SEQ ID NO: 534740 - DNA, 19 bp, Mus musculus
  siRNA target sequence for Dock3 (NM_153413.1,2431-2449).
gctggagccctggcatata

SEQ ID NO: 534741 - DNA, 19 bp, Mus musculus
  siRNA target sequence for Dock3 (NM_153413.1,2432-2450).
ctggagccctggcatataa

SEQ ID NO: 534742 - DNA, 19 bp, Mus musculus
  siRNA target sequence for Dock3 (NM_153413.1,2435-2453).
gagccctggcatataagga

SEQ ID NO: 534743 - DNA, 19 bp, Mus musculus
  siRNA target sequence for Dock3 (NM_153413.1,2455-2473).
ctcatccgctgtttgaagt

SEQ ID NO: 534744 - DNA, 19 bp, Mus musculus
  siRNA target sequence for Dock3 (NM_153413.1,2541-2559).
gtaccttttcaagttcatt

SEQ ID NO: 534745 - DNA, 19 bp, Mus musculus
  siRNA target sequence for Dock3 (NM_153413.1,2563-2581).
cagtcacgaatcctgtatt

SEQ ID NO: 534746 - DNA, 19 bp, Mus musculus
  siRNA target sequence for Dock3 (NM_153413.1,2699-2717).
ctcaggctgcactactcaa

SEQ ID NO: 534747 - DNA, 19 bp, Mus musculus
  siRNA target sequence for Dock3 (NM_153413.1,2739-2757).
cgagctgctacagatgttt

SEQ ID NO: 534748 - DNA, 19 bp, Mus musculus
  siRNA target sequence for Dock3 (NM_153413.1,2820-2838).
catcgggcagtcaatggat

SEQ ID NO: 534749 - DNA, 19 bp, Mus musculus
  siRNA target sequence for Dock3 (NM_153413.1,2869-2887).
gtggatagtcgcctatttt

SEQ ID NO: 534750 - DNA, 19 bp, Mus musculus
  siRNA target sequence for Dock3 (NM_153413.1,2871-2889).
ggatagtcgcctattttca

SEQ ID NO: 534751 - DNA, 19 bp, Mus musculus
  siRNA target sequence for Dock3 (NM_153413.1,2872-2890).
gatagtcgcctattttcat

SEQ ID NO: 534752 - DNA, 19 bp, Mus musculus
  siRNA target sequence for Dock3 (NM_153413.1,2918-2936).
ctgtggttcttcatcacat

SEQ ID NO: 534753 - DNA, 19 bp, Mus musculus
  siRNA target sequence for Dock3 (NM_153413.1,2956-2974).
cagaaagagttgctaatct

SEQ ID NO: 534754 - DNA, 19 bp, Mus musculus
  siRNA target sequence for Dock3 (NM_153413.1,3094-3112).
ctcaccatcatgagtaaat

SEQ ID NO: 534755 - DNA, 19 bp, Mus musculus
  siRNA target sequence for Dock3 (NM_153413.1,3096-3114).
caccatcatgagtaaatca

SEQ ID NO: 534756 - DNA, 19 bp, Mus musculus
  siRNA target sequence for Dock3 (NM_153413.1,3099-3117).
catcatgagtaaatcacat

SEQ ID NO: 534757 - DNA, 19 bp, Mus musculus
  siRNA target sequence for Dock3 (NM_153413.1,3155-3173).
ccgagatcactggtgaata

SEQ ID NO: 534758 - DNA, 19 bp, Mus musculus
  siRNA target sequence for Dock3 (NM_153413.1,3156-3174).
cgagatcactggtgaatat

SEQ ID NO: 534759 - DNA, 19 bp, Mus musculus
  siRNA target sequence for Dock3 (NM_153413.1,3389-3407).
cctctgcactgcataagaa

SEQ ID NO: 534760 - DNA, 19 bp, Mus musculus
  siRNA target sequence for Dock3 (NM_153413.1,3432-3450).
caaggtgtggaattcttat

SEQ ID NO: 534761 - DNA, 19 bp, Mus musculus
  siRNA target sequence for Dock3 (NM_153413.1,3456-3474).
cctggcagttctgttcata

SEQ ID NO: 534762 - DNA, 19 bp, Mus musculus
  siRNA target sequence for Dock3 (NM_153413.1,3482-3500).
caagccttcagctagaaat

SEQ ID NO: 534763 - DNA, 19 bp, Mus musculus
  siRNA target sequence for Dock3 (NM_153413.1,3490-3508).
cagctagaaatcattactt

SEQ ID NO: 534764 - DNA, 19 bp, Mus musculus
  siRNA target sequence for Dock3 (NM_153413.1,3665-3683).
cagaagtgcggaatatcat

SEQ ID NO: 534765 - DNA, 19 bp, Mus musculus
  siRNA target sequence for Dock3 (NM_153413.1,3667-3685).
gaagtgcggaatatcatga

SEQ ID NO: 534766 - DNA, 19 bp, Mus musculus
  siRNA target sequence for Dock3 (NM_153413.1,3889-3907).
cgtgagactggcatttcct

SEQ ID NO: 534767 - DNA, 19 bp, Mus musculus
  siRNA target sequence for Dock3 (NM_153413.1,3894-3912).
gactggcatttcctttgtt

SEQ ID NO: 534768 - DNA, 19 bp, Mus musculus
  siRNA target sequence for Dock3 (NM_153413.1,4001-4019).
ctgttaacctgatgaactt

SEQ ID NO: 534769 - DNA, 19 bp, Mus musculus
  siRNA target sequence for Dock3 (NM_153413.1,4003-4021).
gttaacctgatgaactttt

SEQ ID NO: 534770 - DNA, 19 bp, Mus musculus
  siRNA target sequence for Dock3 (NM_153413.1,4009-4027).
ctgatgaacttttacaaat

SEQ ID NO: 534771 - DNA, 19 bp, Mus musculus
  siRNA target sequence for Dock3 (NM_153413.1,4011-4029).
gatgaacttttacaaatct

SEQ ID NO: 534772 - DNA, 19 bp, Mus musculus
  siRNA target sequence for Dock3 (NM_153413.1,4056-4074).
ccgatacatccataaactt

SEQ ID NO: 534773 - DNA, 19 bp, Mus musculus
  siRNA target sequence for Dock3 (NM_153413.1,4057-4075).
cgatacatccataaacttt

SEQ ID NO: 534774 - DNA, 19 bp, Mus musculus
  siRNA target sequence for Dock3 (NM_153413.1,4334-4352).
gctggatccggaaaatgga

SEQ ID NO: 534775 - DNA, 19 bp, Mus musculus
  siRNA target sequence for Dock3 (NM_153413.1,4578-4596).
gtgtgatgctcagtattta

SEQ ID NO: 534776 - DNA, 19 bp, Mus musculus
  siRNA target sequence for Dock3 (NM_153413.1,4613-4631).
cacctattccagattacgt

SEQ ID NO: 534777 - DNA, 19 bp, Mus musculus
  siRNA target sequence for Dock3 (NM_153413.1,4671-4689).
gagcttctatcgtgtcaat

SEQ ID NO: 534778 - DNA, 19 bp, Mus musculus
  siRNA target sequence for Dock3 (NM_153413.1,4673-4691).
gcttctatcgtgtcaataa

SEQ ID NO: 534779 - DNA, 19 bp, Mus musculus
  siRNA target sequence for Dock3 (NM_153413.1,4674-4692).
cttctatcgtgtcaataat

SEQ ID NO: 534780 - DNA, 19 bp, Mus musculus
  siRNA target sequence for Dock3 (NM_153413.1,4698-4716).
gaagttccggtatgataga

SEQ ID NO: 534781 - DNA, 19 bp, Mus musculus
  siRNA target sequence for Dock3 (NM_153413.1,4809-4827).
catctctcggtggtttgaa

SEQ ID NO: 534782 - DNA, 19 bp, Mus musculus
  siRNA target sequence for Dock3 (NM_153413.1,4938-4956).
ggtacatggcaacatcaat

SEQ ID NO: 534783 - DNA, 19 bp, Mus musculus
  siRNA target sequence for Dock3 (NM_153413.1,4968-4986).
gtgcctgaacggagtcatt

SEQ ID NO: 534784 - DNA, 19 bp, Mus musculus
  siRNA target sequence for Dock3 (NM_153413.1,4970-4988).
gcctgaacggagtcattga

SEQ ID NO: 534785 - DNA, 19 bp, Mus musculus
  siRNA target sequence for Dock3 (NM_153413.1,4983-5001).
cattgacgctgctgtcaat

SEQ ID NO: 534786 - DNA, 19 bp, Mus musculus
  siRNA target sequence for Dock3 (NM_153413.1,5025-5043).
ggccttttttgataaagat

SEQ ID NO: 534787 - DNA, 19 bp, Mus musculus
  siRNA target sequence for Dock3 (NM_153413.1,5081-5099).
cccagctcaaagaactaat

SEQ ID NO: 534788 - DNA, 19 bp, Mus musculus
  siRNA target sequence for Dock3 (NM_153413.1,5133-5151).
ggcggttcatgagaagttt

SEQ ID NO: 534789 - DNA, 19 bp, Mus musculus
  siRNA target sequence for Dock3 (NM_153413.1,5233-5251).
ccaggtttggataagctaa

SEQ ID NO: 534790 - DNA, 19 bp, Mus musculus
  siRNA target sequence for Dock3 (NM_153413.1,5274-5292).
caccccacggggaaatgtt

SEQ ID NO: 534791 - DNA, 19 bp, Mus musculus
  siRNA target sequence for Dock3 (NM_153413.1,5276-5294).
ccccacggggaaatgttct

SEQ ID NO: 534792 - DNA, 19 bp, Mus musculus
  siRNA target sequence for Dock3 (NM_153413.1,5394-5412).
ctcctcacatgcatctagt

SEQ ID NO: 534793 - DNA, 19 bp, Mus musculus
  siRNA target sequence for Dock3 (NM_153413.1,5397-5415).
ctcacatgcatctagtgaa

SEQ ID NO: 534794 - DNA, 19 bp, Mus musculus
  siRNA target sequence for Dock3 (NM_153413.1,5408-5426).
ctagtgaagcaggaaacat

SEQ ID NO: 534795 - DNA, 19 bp, Mus musculus
  siRNA target sequence for Dock3 (NM_153413.1,5411-5429).
gtgaagcaggaaacatgat

SEQ ID NO: 534796 - DNA, 19 bp, Mus musculus
  siRNA target sequence for Dock3 (NM_153413.1,5571-5589).
cagcctgagttctacacat

SEQ ID NO: 534797 - DNA, 19 bp, Mus musculus
  siRNA target sequence for Dock3 (NM_153413.1,5574-5592).
cctgagttctacacattca

SEQ ID NO: 534798 - DNA, 19 bp, Mus musculus
  siRNA target sequence for Dock3 (NM_153413.1,5593-5611).
gctccgtcccagatgatca

SEQ ID NO: 534799 - DNA, 19 bp, Mus musculus
  siRNA target sequence for Dock3 (NM_153413.1,5641-5659).
ccctctctgccagataagt

SEQ ID NO: 534800 - DNA, 19 bp, Mus musculus
  siRNA target sequence for Dock3 (NM_153413.1,5709-5727).
cccaagcagtgccatgtat

SEQ ID NO: 534801 - DNA, 19 bp, Mus musculus
  siRNA target sequence for Dock3 (NM_153413.1,5774-5792).
ccctgttccagcaagtagt

SEQ ID NO: 534802 - DNA, 19 bp, Mus musculus
  siRNA target sequence for Dock3 (NM_153413.1,5813-5831).
gtgaccccaatctgtctat

SEQ ID NO: 534803 - DNA, 19 bp, Mus musculus
  siRNA target sequence for Dock3 (NM_153413.1,5833-5851).
gctgaaaaaggtcattact

SEQ ID NO: 534804 - DNA, 19 bp, Mus musculus
  siRNA target sequence for Dock3 (NM_153413.1,5843-5861).
gtcattactccctacactt

SEQ ID NO: 534805 - DNA, 19 bp, Mus musculus
  siRNA target sequence for Dock3 (NM_153413.1,6017-6035).
gtgtatcctccttaagtga

SEQ ID NO: 534806 - DNA, 19 bp, Mus musculus
  siRNA target sequence for Dock3 (NM_153413.1,6172-6190).
gtccttgatgccatcaagt

SEQ ID NO: 534807 - DNA, 19 bp, Mus musculus
  siRNA target sequence for Dock3 (NM_153413.1,6300-6318).
gcatgatgagggtatgcta

SEQ ID NO: 534808 - DNA, 19 bp, Mus musculus
  siRNA target sequence for Dock3 (NM_153413.1,6301-6319).
catgatgagggtatgctat

SEQ ID NO: 534809 - DNA, 19 bp, Mus musculus
  siRNA target sequence for Dpysl5 (NM_023047.2,296-314).
ccagcgtgcggattctcat

SEQ ID NO: 534810 - DNA, 19 bp, Mus musculus
  siRNA target sequence for Dpysl5 (NM_023047.2,299-317).
gcgtgcggattctcatcaa

SEQ ID NO: 534811 - DNA, 19 bp, Mus musculus
  siRNA target sequence for Dpysl5 (NM_023047.2,416-434).
gtggggccaaggtgattga

SEQ ID NO: 534812 - DNA, 19 bp, Mus musculus
  siRNA target sequence for Dpysl5 (NM_023047.2,509-527).
cctgtgtggacgacttcta

SEQ ID NO: 534813 - DNA, 19 bp, Mus musculus
  siRNA target sequence for Dpysl5 (NM_023047.2,846-864).
ggtccacgctgaaaatgga

SEQ ID NO: 534814 - DNA, 19 bp, Mus musculus
  siRNA target sequence for Dpysl5 (NM_023047.2,884-902).
ctaaggaggctctagactt

SEQ ID NO: 534815 - DNA, 19 bp, Mus musculus
  siRNA target sequence for Dpysl5 (NM_023047.2,1015-1033).
gtcaatgtgtctagtatct

SEQ ID NO: 534816 - DNA, 19 bp, Mus musculus
  siRNA target sequence for Dpysl5 (NM_023047.2,1017-1035).
caatgtgtctagtatctca

SEQ ID NO: 534817 - DNA, 19 bp, Mus musculus
  siRNA target sequence for Dpysl5 (NM_023047.2,1224-1242).
caatgacactctgaacatt

SEQ ID NO: 534818 - DNA, 19 bp, Mus musculus
  siRNA target sequence for Dpysl5 (NM_023047.2,1325-1343).
gcggtgtacaggatcgaat

SEQ ID NO: 534819 - DNA, 19 bp, Mus musculus
  siRNA target sequence for Dpysl5 (NM_023047.2,1399-1417).
gtggccgtcaccagttcta

SEQ ID NO: 534820 - DNA, 19 bp, Mus musculus
  siRNA target sequence for Dpysl5 (NM_023047.2,1445-1463).
ctcgcaagggccgtatcat

SEQ ID NO: 534821 - DNA, 19 bp, Mus musculus
  siRNA target sequence for Dpysl5 (NM_023047.2,1604-1622).
ggggacgagtcgtgtatga

SEQ ID NO: 534822 - DNA, 19 bp, Mus musculus
  siRNA target sequence for Dpysl5 (NM_023047.2,1621-1639).
gagaacggcgtcttcatgt

SEQ ID NO: 534823 - DNA, 19 bp, Mus musculus
  siRNA target sequence for Dpysl5 (NM_023047.2,1671-1689).
gcggtctttcccagacatt

SEQ ID NO: 534824 - DNA, 19 bp, Mus musculus
  siRNA target sequence for Dpysl5 (NM_023047.2,1682-1700).
cagacattgtctataagaa

SEQ ID NO: 534825 - DNA, 19 bp, Mus musculus
  siRNA target sequence for Dpysl5 (NM_023047.2,1712-1730).
gagagaagaccttaaaagt

SEQ ID NO: 534826 - DNA, 19 bp, Mus musculus
  siRNA target sequence for Dpysl5 (NM_023047.2,1850-1868).
gcatgcgggaccttcatga

SEQ ID NO: 534827 - DNA, 19 bp, Mus musculus
  siRNA target sequence for Dpysl5 (NM_023047.2,1851-1869).
catgcgggaccttcatgaa

SEQ ID NO: 534828 - DNA, 19 bp, Mus musculus
  siRNA target sequence for Dpysl5 (NM_023047.2,1951-1969).
ggcaggtcgagcggtattt

SEQ ID NO: 534829 - DNA, 19 bp, Mus musculus
  siRNA target sequence for Dtnbp1 (NM_025772.3,793-811).
cctatgggcagcatgtcat

SEQ ID NO: 534830 - DNA, 19 bp, Mus musculus
  siRNA target sequence for Dtnbp1 (NM_025772.3,807-825).
gtcatccatggaagtgaat

SEQ ID NO: 534831 - DNA, 19 bp, Mus musculus
  siRNA target sequence for Dtnbp1 (NM_025772.3,899-917).
gcggagaggacaacattgt

SEQ ID NO: 534832 - DNA, 19 bp, Mus musculus
  siRNA target sequence for Dtnbp1 (NM_025772.3,940-958).
gaatccaaccccaatcaga

SEQ ID NO: 534833 - DNA, 19 bp, Mus musculus
  siRNA target sequence for Dtnbp1 (NM_025772.3,949-967).
cccaatcagaatgaaatga

SEQ ID NO: 534834 - DNA, 19 bp, Mus musculus
  siRNA target sequence for Dtnbp1 (NM_025772.3,1092-1110).
cacggccttggtcacatta

SEQ ID NO: 534835 - DNA, 19 bp, Mus musculus
  siRNA target sequence for Dtx1 (NM_008052.1,303-321).
ccggtgcgacgcaacttct

SEQ ID NO: 534836 - DNA, 19 bp, Mus musculus
  siRNA target sequence for Dtx1 (NM_008052.1,304-322).
cggtgcgacgcaacttcta

SEQ ID NO: 534837 - DNA, 19 bp, Mus musculus
  siRNA target sequence for Dtx1 (NM_008052.1,469-487).
gcttctgctacctcatcta

SEQ ID NO: 534838 - DNA, 19 bp, Mus musculus
  siRNA target sequence for Dtx1 (NM_008052.1,1002-1020).
gcgctccccgtgaagaact

SEQ ID NO: 534839 - DNA, 19 bp, Mus musculus
  siRNA target sequence for Dtx1 (NM_008052.1,1003-1021).
cgctccccgtgaagaactt

SEQ ID NO: 534840 - DNA, 19 bp, Mus musculus
  siRNA target sequence for Dtx1 (NM_008052.1,1007-1025).
ccccgtgaagaacttgaat

SEQ ID NO: 534841 - DNA, 19 bp, Mus musculus
  siRNA target sequence for Dtx1 (NM_008052.1,1130-1148).
cccaccaccagtaagcaaa

SEQ ID NO: 534842 - DNA, 19 bp, Mus musculus
  siRNA target sequence for Dtx1 (NM_008052.1,1379-1397).
ccgctgcggccacatgtat

SEQ ID NO: 534843 - DNA, 19 bp, Mus musculus
  siRNA target sequence for Dtx1 (NM_008052.1,1381-1399).
gctgcggccacatgtatca

SEQ ID NO: 534844 - DNA, 19 bp, Mus musculus
  siRNA target sequence for Dtx1 (NM_008052.1,1532-1550).
gcactcgctgcctggtttt

SEQ ID NO: 534845 - DNA, 19 bp, Mus musculus
  siRNA target sequence for Dtx1 (NM_008052.1,1535-1553).
ctcgctgcctggttttgca

SEQ ID NO: 534846 - DNA, 19 bp, Mus musculus
  siRNA target sequence for Dtx1 (NM_008052.1,1564-1582).
cgatccgcatcgtctatga

SEQ ID NO: 534847 - DNA, 19 bp, Mus musculus
  siRNA target sequence for Dtx1 (NM_008052.1,1660-1678).
gctacctacccaacaatga

SEQ ID NO: 534848 - DNA, 19 bp, Mus musculus
  siRNA target sequence for Dtx1 (NM_008052.1,1684-1702).
gccgaaaggtgctgagatt

SEQ ID NO: 534849 - DNA, 19 bp, Mus musculus
  siRNA target sequence for Dtx1 (NM_008052.1,1717-1735).
gggaacgcagactcatctt

SEQ ID NO: 534850 - DNA, 19 bp, Mus musculus
  siRNA target sequence for Dtx1 (NM_008052.1,1719-1737).
gaacgcagactcatcttca

SEQ ID NO: 534851 - DNA, 19 bp, Mus musculus
  siRNA target sequence for Dtx1 (NM_008052.1,1722-1740).
cgcagactcatcttcacta

SEQ ID NO: 534852 - DNA, 19 bp, Mus musculus
  siRNA target sequence for Dtx1 (NM_008052.1,1723-1741).
gcagactcatcttcactat

SEQ ID NO: 534853 - DNA, 19 bp, Mus musculus
  siRNA target sequence for Dtx1 (NM_008052.1,1879-1897).
ccgcccagggggtttctga

SEQ ID NO: 534854 - DNA, 19 bp, Mus musculus
  siRNA target sequence for Dtx2 (NM_023742.1,764-782).
gcaccactggggtataact

SEQ ID NO: 534855 - DNA, 19 bp, Mus musculus
  siRNA target sequence for Dtx2 (NM_023742.1,896-914).
cgccaaatgggacttatct

SEQ ID NO: 534856 - DNA, 19 bp, Mus musculus
  siRNA target sequence for Dtx2 (NM_023742.1,982-1000).
gaccaacctgcctgcatat

SEQ ID NO: 534857 - DNA, 19 bp, Mus musculus
  siRNA target sequence for Dtx2 (NM_023742.1,985-1003).
caacctgcctgcatatcct

SEQ ID NO: 534858 - DNA, 19 bp, Mus musculus
  siRNA target sequence for Dtx2 (NM_023742.1,1051-1069).
ggcctttgccccatacaat

SEQ ID NO: 534859 - DNA, 19 bp, Mus musculus
  siRNA target sequence for Dtx2 (NM_023742.1,1052-1070).
gcctttgccccatacaata

SEQ ID NO: 534860 - DNA, 19 bp, Mus musculus
  siRNA target sequence for Dtx2 (NM_023742.1,1364-1382).
ggactccctgtgtgtctta

SEQ ID NO: 534861 - DNA, 19 bp, Mus musculus
  siRNA target sequence for Dtx2 (NM_023742.1,1414-1432).
ctcccgtccggcctctaaa

SEQ ID NO: 534862 - DNA, 19 bp, Mus musculus
  siRNA target sequence for Dtx2 (NM_023742.1,1417-1435).
ccgtccggcctctaaaagt

SEQ ID NO: 534863 - DNA, 19 bp, Mus musculus
  siRNA target sequence for Dtx2 (NM_023742.1,1419-1437).
gtccggcctctaaaagtca

SEQ ID NO: 534864 - DNA, 19 bp, Mus musculus
  siRNA target sequence for Dtx2 (NM_023742.1,1493-1511).
ccggagcaggtgatcagaa

SEQ ID NO: 534865 - DNA, 19 bp, Mus musculus
  siRNA target sequence for Dtx2 (NM_023742.1,1538-1556).
cctgaagaggactgcatta

SEQ ID NO: 534866 - DNA, 19 bp, Mus musculus
  siRNA target sequence for Dtx2 (NM_023742.1,1539-1557).
ctgaagaggactgcattat

SEQ ID NO: 534867 - DNA, 19 bp, Mus musculus
  siRNA target sequence for Dtx2 (NM_023742.1,1672-1690).
gtgcctgctggccatgtat

SEQ ID NO: 534868 - DNA, 19 bp, Mus musculus
  siRNA target sequence for Dtx2 (NM_023742.1,1718-1736).
cagtgtccgtcgtgcaaaa

SEQ ID NO: 534869 - DNA, 19 bp, Mus musculus
  siRNA target sequence for Dtx2 (NM_023742.1,1722-1740).
gtccgtcgtgcaaaaccat

SEQ ID NO: 534870 - DNA, 19 bp, Mus musculus
  siRNA target sequence for Dtx2 (NM_023742.1,1726-1744).
gtcgtgcaaaaccatctat

SEQ ID NO: 534871 - DNA, 19 bp, Mus musculus
  siRNA target sequence for Dtx2 (NM_023742.1,1820-1838).
gactgtgggactatactca

SEQ ID NO: 534872 - DNA, 19 bp, Mus musculus
  siRNA target sequence for Dtx2 (NM_023742.1,1822-1840).
ctgtgggactatactcatt

SEQ ID NO: 534873 - DNA, 19 bp, Mus musculus
  siRNA target sequence for Dtx2 (NM_023742.1,1824-1842).
gtgggactatactcattgt

SEQ ID NO: 534874 - DNA, 19 bp, Mus musculus
  siRNA target sequence for Dtx2 (NM_023742.1,1827-1845).
ggactatactcattgttta

SEQ ID NO: 534875 - DNA, 19 bp, Mus musculus
  siRNA target sequence for Dtx2 (NM_023742.1,1830-1848).
ctatactcattgtttacaa

SEQ ID NO: 534876 - DNA, 19 bp, Mus musculus
  siRNA target sequence for Dtx3 (NM_030714.1,451-469).
gcgagacttctgacatcta

SEQ ID NO: 534877 - DNA, 19 bp, Mus musculus
  siRNA target sequence for Dtx3 (NM_030714.1,538-556).
ctctcaaggggctactgaa

SEQ ID NO: 534878 - DNA, 19 bp, Mus musculus
  siRNA target sequence for Dtx3 (NM_030714.1,1003-1021).
gcaccattgtcatccaata

SEQ ID NO: 534879 - DNA, 19 bp, Mus musculus
  siRNA target sequence for Dtx3 (NM_030714.1,1195-1213).
cagggagacccaatgtcat

SEQ ID NO: 534880 - DNA, 19 bp, Mus musculus
  siRNA target sequence for Dusp16 (NM_130447.1,567-585).
gagatgattggaactcaaa

SEQ ID NO: 534881 - DNA, 19 bp, Mus musculus
  siRNA target sequence for Dusp16 (NM_130447.1,569-587).
gatgattggaactcaaatt

SEQ ID NO: 534882 - DNA, 19 bp, Mus musculus
  siRNA target sequence for Dusp16 (NM_130447.1,572-590).
gattggaactcaaattgtt

SEQ ID NO: 534883 - DNA, 19 bp, Mus musculus
  siRNA target sequence for Dusp16 (NM_130447.1,625-643).
cggaaaaagtgctgctaat

SEQ ID NO: 534884 - DNA, 19 bp, Mus musculus
  siRNA target sequence for Dusp16 (NM_130447.1,649-667).
gccgaccatttgtggaata

SEQ ID NO: 534885 - DNA, 19 bp, Mus musculus
  siRNA target sequence for Dusp16 (NM_130447.1,654-672).
ccatttgtggaatacaata

SEQ ID NO: 534886 - DNA, 19 bp, Mus musculus
  siRNA target sequence for Dusp16 (NM_130447.1,680-698).
cattttggaagccattaat

SEQ ID NO: 534887 - DNA, 19 bp, Mus musculus
  siRNA target sequence for Dusp16 (NM_130447.1,687-705).
gaagccattaatatcaact

SEQ ID NO: 534888 - DNA, 19 bp, Mus musculus
  siRNA target sequence for Dusp16 (NM_130447.1,764-782).
ccaacattctgcaaagcat

SEQ ID NO: 534889 - DNA, 19 bp, Mus musculus
  siRNA target sequence for Dusp16 (NM_130447.1,765-783).
caacattctgcaaagcata

SEQ ID NO: 534890 - DNA, 19 bp, Mus musculus
  siRNA target sequence for Dusp16 (NM_130447.1,806-824).
gaaggtggtagtttatgat

SEQ ID NO: 534891 - DNA, 19 bp, Mus musculus
  siRNA target sequence for Dusp16 (NM_130447.1,812-830).
ggtagtttatgatcaaagt

SEQ ID NO: 534892 - DNA, 19 bp, Mus musculus
  siRNA target sequence for Dusp16 (NM_130447.1,934-952).
ctgagttctctcgttgttt

SEQ ID NO: 534893 - DNA, 19 bp, Mus musculus
  siRNA target sequence for Dusp16 (NM_130447.1,995-1013).
catatctcagccttgctta

SEQ ID NO: 534894 - DNA, 19 bp, Mus musculus
  siRNA target sequence for Dusp16 (NM_130447.1,1010-1028).
cttacctgttgcgaacatt

SEQ ID NO: 534895 - DNA, 19 bp, Mus musculus
  siRNA target sequence for Dusp16 (NM_130447.1,1025-1043).
cattgggccaactcgaatt

SEQ ID NO: 534896 - DNA, 19 bp, Mus musculus
  siRNA target sequence for Dusp16 (NM_130447.1,1107-1125).
gggattggctatgtgttaa

SEQ ID NO: 534897 - DNA, 19 bp, Mus musculus
  siRNA target sequence for Dusp16 (NM_130447.1,1108-1126).
ggattggctatgtgttaaa

SEQ ID NO: 534898 - DNA, 19 bp, Mus musculus
  siRNA target sequence for Dusp16 (NM_130447.1,1179-1197).
cgagtgcctgtgaatgaca

SEQ ID NO: 534899 - DNA, 19 bp, Mus musculus
  siRNA target sequence for Dusp16 (NM_130447.1,1185-1203).
cctgtgaatgacagctttt

SEQ ID NO: 534900 - DNA, 19 bp, Mus musculus
  siRNA target sequence for Dusp16 (NM_130447.1,1305-1323).
cgctccgccactattgcta

SEQ ID NO: 534901 - DNA, 19 bp, Mus musculus
  siRNA target sequence for Dusp16 (NM_130447.1,1306-1324).
gctccgccactattgctat

SEQ ID NO: 534902 - DNA, 19 bp, Mus musculus
  siRNA target sequence for Dusp16 (NM_130447.1,1307-1325).
ctccgccactattgctatt

SEQ ID NO: 534903 - DNA, 19 bp, Mus musculus
  siRNA target sequence for Dusp16 (NM_130447.1,1320-1338).
gctattgcctacatcatga

SEQ ID NO: 534904 - DNA, 19 bp, Mus musculus
  siRNA target sequence for Dusp16 (NM_130447.1,1321-1339).
ctattgcctacatcatgaa

SEQ ID NO: 534905 - DNA, 19 bp, Mus musculus
  siRNA target sequence for Dusp16 (NM_130447.1,1343-1361).
gatggacatgtctctagat

SEQ ID NO: 534906 - DNA, 19 bp, Mus musculus
  siRNA target sequence for Dusp16 (NM_130447.1,1393-1411).
ctactatatctccgaattt

SEQ ID NO: 534907 - DNA, 19 bp, Mus musculus
  siRNA target sequence for Dusp16 (NM_130447.1,1396-1414).
ctatatctccgaattttaa

SEQ ID NO: 534908 - DNA, 19 bp, Mus musculus
  siRNA target sequence for Dusp16 (NM_130447.1,1423-1441).
gccaactcatggactatga

SEQ ID NO: 534909 - DNA, 19 bp, Mus musculus
  siRNA target sequence for Dusp16 (NM_130447.1,1434-1452).
gactatgagaagacgatta

SEQ ID NO: 534910 - DNA, 19 bp, Mus musculus
  siRNA target sequence for Dusp16 (NM_130447.1,1436-1454).
ctatgagaagacgattaat

SEQ ID NO: 534911 - DNA, 19 bp, Mus musculus
  siRNA target sequence for Dusp16 (NM_130447.1,1493-1511).
gctgctgcacctagacaaa

SEQ ID NO: 534912 - DNA, 19 bp, Mus musculus
  siRNA target sequence for Dusp16 (NM_130447.1,1640-1658).
cttacagccgtcactctta

SEQ ID NO: 534913 - DNA, 19 bp, Mus musculus
  siRNA target sequence for Dusp16 (NM_130447.1,1745-1763).
ctctctcgatatcaaatct

SEQ ID NO: 534914 - DNA, 19 bp, Mus musculus
  siRNA target sequence for Dusp16 (NM_130447.1,1747-1765).
ctctcgatatcaaatctgt

SEQ ID NO: 534915 - DNA, 19 bp, Mus musculus
  siRNA target sequence for Dusp16 (NM_130447.1,1749-1767).
ctcgatatcaaatctgttt

SEQ ID NO: 534916 - DNA, 19 bp, Mus musculus
  siRNA target sequence for Dusp16 (NM_130447.1,1751-1769).
cgatatcaaatctgtttca

SEQ ID NO: 534917 - DNA, 19 bp, Mus musculus
  siRNA target sequence for Dusp16 (NM_130447.1,1752-1770).
gatatcaaatctgtttcat

SEQ ID NO: 534918 - DNA, 19 bp, Mus musculus
  siRNA target sequence for Dusp16 (NM_130447.1,1757-1775).
caaatctgtttcatattca

SEQ ID NO: 534919 - DNA, 19 bp, Mus musculus
  siRNA target sequence for Dusp16 (NM_130447.1,1807-1825).
cgtcagaggaggctttaga

SEQ ID NO: 534920 - DNA, 19 bp, Mus musculus
  siRNA target sequence for Dusp16 (NM_130447.1,2062-2080).
ggagtgtagaggacaatta

SEQ ID NO: 534921 - DNA, 19 bp, Mus musculus
  siRNA target sequence for Dusp16 (NM_130447.1,2224-2242).
cggagccttcacacttgta

SEQ ID NO: 534922 - DNA, 19 bp, Mus musculus
  siRNA target sequence for Dusp16 (NM_130447.1,2308-2326).
cttgcagtgaccaaatcta

SEQ ID NO: 534923 - DNA, 19 bp, Mus musculus
  siRNA target sequence for Dusp16 (NM_130447.1,2418-2436).
gaagctgccaaatggaatt

SEQ ID NO: 534924 - DNA, 19 bp, Mus musculus
  siRNA target sequence for Dusp16 (NM_181320.2,629-647).
ggttgcaacaggacaaagt

SEQ ID NO: 534925 - DNA, 19 bp, Mus musculus
  siRNA target sequence for Dusp16 (NM_181320.2,633-651).
gcaacaggacaaagtatta

SEQ ID NO: 534926 - DNA, 19 bp, Mus musculus
  siRNA target sequence for Dusp16 (NM_181320.2,634-652).
caacaggacaaagtattaa

SEQ ID NO: 534927 - DNA, 19 bp, Mus musculus
  siRNA target sequence for Dusp16 (NM_181320.2,987-1005).
caaggtgggtgcttcaaaa

SEQ ID NO: 534928 - DNA, 19 bp, Mus musculus
  siRNA target sequence for Dusp19 (NM_024438.2,242-260).
ccacgctaactggaaagaa

SEQ ID NO: 534929 - DNA, 19 bp, Mus musculus
  siRNA target sequence for Dusp19 (NM_024438.2,243-261).
cacgctaactggaaagaaa

SEQ ID NO: 534930 - DNA, 19 bp, Mus musculus
  siRNA target sequence for Dusp19 (NM_024438.2,246-264).
gctaactggaaagaaactt

SEQ ID NO: 534931 - DNA, 19 bp, Mus musculus
  siRNA target sequence for Dusp19 (NM_024438.2,357-375).
cctgcaagttggcgttatt

SEQ ID NO: 534932 - DNA, 19 bp, Mus musculus
  siRNA target sequence for Dusp19 (NM_024438.2,420-438).
ggagctactgagaaagcat

SEQ ID NO: 534933 - DNA, 19 bp, Mus musculus
  siRNA target sequence for Dusp19 (NM_024438.2,421-439).
gagctactgagaaagcata

SEQ ID NO: 534934 - DNA, 19 bp, Mus musculus
  siRNA target sequence for Dusp19 (NM_024438.2,435-453).
gcataaggtgactcatatt

SEQ ID NO: 534935 - DNA, 19 bp, Mus musculus
  siRNA target sequence for Dusp19 (NM_024438.2,441-459).
ggtgactcatattctcaat

SEQ ID NO: 534936 - DNA, 19 bp, Mus musculus
  siRNA target sequence for Dusp19 (NM_024438.2,444-462).
gactcatattctcaatgtt

SEQ ID NO: 534937 - DNA, 19 bp, Mus musculus
  siRNA target sequence for Dusp19 (NM_024438.2,486-504).
cctcagtgagtttacatat

SEQ ID NO: 534938 - DNA, 19 bp, Mus musculus
  siRNA target sequence for Dusp19 (NM_024438.2,500-518).
catataagaccatttctat

SEQ ID NO: 534939 - DNA, 19 bp, Mus musculus
  siRNA target sequence for Dusp19 (NM_024438.2,536-554).
ccaatatcctgtcttattt

SEQ ID NO: 534940 - DNA, 19 bp, Mus musculus
  siRNA target sequence for Dusp19 (NM_024438.2,537-555).
caatatcctgtcttatttt

SEQ ID NO: 534941 - DNA, 19 bp, Mus musculus
  siRNA target sequence for Dusp19 (NM_024438.2,603-621).
ggttctcgtgcactgtaat

SEQ ID NO: 534942 - DNA, 19 bp, Mus musculus
  siRNA target sequence for Dusp19 (NM_024438.2,635-653).
gggctgctgcaattgtcat

SEQ ID NO: 534943 - DNA, 19 bp, Mus musculus
  siRNA target sequence for Dusp19 (NM_024438.2,636-654).
ggctgctgcaattgtcatt

SEQ ID NO: 534944 - DNA, 19 bp, Mus musculus
  siRNA target sequence for Dusp19 (NM_024438.2,712-730).
gaggcgagaccatccatat

SEQ ID NO: 534945 - DNA, 19 bp, Mus musculus
  siRNA target sequence for Dusp19 (NM_024438.2,714-732).
ggcgagaccatccatatgt

SEQ ID NO: 534946 - DNA, 19 bp, Mus musculus
  siRNA target sequence for Dusp22 (NM_134068.1,63-81).
gtacattggcaacttcaaa

SEQ ID NO: 534947 - DNA, 19 bp, Mus musculus
  siRNA target sequence for Dusp22 (NM_134068.1,75-93).
cttcaaagacgcaagagat

SEQ ID NO: 534948 - DNA, 19 bp, Mus musculus
  siRNA target sequence for Dusp22 (NM_134068.1,86-104).
caagagatgcagaacagtt

SEQ ID NO: 534949 - DNA, 19 bp, Mus musculus
  siRNA target sequence for Dusp22 (NM_134068.1,155-173).
ccatgttggagggagttaa

SEQ ID NO: 534950 - DNA, 19 bp, Mus musculus
  siRNA target sequence for Dusp22 (NM_134068.1,208-226).
caaaacctgacaagacatt

SEQ ID NO: 534951 - DNA, 19 bp, Mus musculus
  siRNA target sequence for Dusp22 (NM_134068.1,213-231).
cctgacaagacatttcaaa

SEQ ID NO: 534952 - DNA, 19 bp, Mus musculus
  siRNA target sequence for Dusp22 (NM_134068.1,267-285).
gggtgagagctgtcttgta

SEQ ID NO: 534953 - DNA, 19 bp, Mus musculus
  siRNA target sequence for Dusp22 (NM_134068.1,271-289).
gagagctgtcttgtacatt

SEQ ID NO: 534954 - DNA, 19 bp, Mus musculus
  siRNA target sequence for Dusp22 (NM_134068.1,317-335).
cattggtgatcgcatacat

SEQ ID NO: 534955 - DNA, 19 bp, Mus musculus
  siRNA target sequence for Dusp22 (NM_134068.1,322-340).
gtgatcgcatacatcatga

SEQ ID NO: 534956 - DNA, 19 bp, Mus musculus
  siRNA target sequence for E130014G12Rik (NM_020256.1,330-348).
gcgtggccatggtctcttt

SEQ ID NO: 534957 - DNA, 19 bp, Mus musculus
  siRNA target sequence for E130014G12Rik (NM_020256.1,331-349).
cgtggccatggtctctttt

SEQ ID NO: 534958 - DNA, 19 bp, Mus musculus
  siRNA target sequence for E130014G12Rik (NM_020256.1,335-353).
gccatggtctcttttgtga

SEQ ID NO: 534959 - DNA, 19 bp, Mus musculus
  siRNA target sequence for E130014G12Rik (NM_020256.1,336-354).
ccatggtctcttttgtgat

SEQ ID NO: 534960 - DNA, 19 bp, Mus musculus
  siRNA target sequence for E130014G12Rik (NM_020256.1,454-472).
gttgttgaactaagcttta

SEQ ID NO: 534961 - DNA, 19 bp, Mus musculus
  siRNA target sequence for E130014G12Rik (NM_020256.1,457-475).
gttgaactaagctttataa

SEQ ID NO: 534962 - DNA, 19 bp, Mus musculus
  siRNA target sequence for E130014G12Rik (NM_020256.1,468-486).
ctttataagagctgagatt

SEQ ID NO: 534963 - DNA, 19 bp, Mus musculus
  siRNA target sequence for E130014G12Rik (NM_020256.1,519-537).
caaagttgtccgtgttaga

SEQ ID NO: 534964 - DNA, 19 bp, Mus musculus
  siRNA target sequence for E130014G12Rik (NM_020256.1,530-548).
gtgttagagcagatttgct

SEQ ID NO: 534965 - DNA, 19 bp, Mus musculus
  siRNA target sequence for E130014G12Rik (NM_020256.1,573-591).
gttactaggcgtgaaattt

SEQ ID NO: 534966 - DNA, 19 bp, Mus musculus
  siRNA target sequence for E130014G12Rik (NM_020256.1,613-631).
ctgtcacaggttaaaagca

SEQ ID NO: 534967 - DNA, 19 bp, Mus musculus
  siRNA target sequence for E130014G12Rik (NM_020256.1,615-633).
gtcacaggttaaaagcata

SEQ ID NO: 534968 - DNA, 19 bp, Mus musculus
  siRNA target sequence for E130014G12Rik (NM_020256.1,727-745).
gataatggggctacagtaa

SEQ ID NO: 534969 - DNA, 19 bp, Mus musculus
  siRNA target sequence for E130014G12Rik (NM_020256.1,737-755).
ctacagtaatgcccattat

SEQ ID NO: 534970 - DNA, 19 bp, Mus musculus
  siRNA target sequence for E130014G12Rik (NM_020256.1,832-850).
gatgacgatgtcattttct

SEQ ID NO: 534971 - DNA, 19 bp, Mus musculus
  siRNA target sequence for E130014G12Rik (NM_020256.1,877-895).
gatttgccaagtaacaaca

SEQ ID NO: 534972 - DNA, 19 bp, Mus musculus
  siRNA target sequence for E130014G12Rik (NM_020256.1,945-963).
gacaccttgcgctagcaat

SEQ ID NO: 534973 - DNA, 19 bp, Mus musculus
  siRNA target sequence for E130014G12Rik (NM_020256.1,947-965).
caccttgcgctagcaataa

SEQ ID NO: 534974 - DNA, 19 bp, Mus musculus
  siRNA target sequence for E130014G12Rik (NM_020256.1,949-967).
ccttgcgctagcaataact

SEQ ID NO: 534975 - DNA, 19 bp, Mus musculus
  siRNA target sequence for E130014G12Rik (NM_020256.1,984-1002).
catcacacctactcaactt

SEQ ID NO: 534976 - DNA, 19 bp, Mus musculus
  siRNA target sequence for E130014G12Rik (NM_020256.1,1012-1030).
gtgaatcaggcaactctaa

SEQ ID NO: 534977 - DNA, 19 bp, Mus musculus
  siRNA target sequence for E130014G12Rik (NM_020256.1,1085-1103).
ctcctaacattattttgtt

SEQ ID NO: 534978 - DNA, 19 bp, Mus musculus
  siRNA target sequence for E130014G12Rik (NM_020256.1,1126-1144).
ccaccgagtgccagttctt

SEQ ID NO: 534979 - DNA, 19 bp, Mus musculus
  siRNA target sequence for E130014G12Rik (NM_020256.1,1139-1157).
gttcttcactcccaaatca

SEQ ID NO: 534980 - DNA, 19 bp, Mus musculus
  siRNA target sequence for E130014G12Rik (NM_020256.1,1199-1217).
cgcctaacagtgctgtttt

SEQ ID NO: 534981 - DNA, 19 bp, Mus musculus
  siRNA target sequence for E130014G12Rik (NM_020256.1,1315-1333).
gtccctcaggctgataact

SEQ ID NO: 534982 - DNA, 19 bp, Mus musculus
  siRNA target sequence for E130014G12Rik (NM_020256.1,1321-1339).
caggctgataactccaaaa

SEQ ID NO: 534983 - DNA, 19 bp, Mus musculus
  siRNA target sequence for E130014G12Rik (NM_020256.1,1323-1341).
ggctgataactccaaaagt

SEQ ID NO: 534984 - DNA, 19 bp, Mus musculus
  siRNA target sequence for E130014G12Rik (NM_020256.1,1324-1342).
gctgataactccaaaagta

SEQ ID NO: 534985 - DNA, 19 bp, Mus musculus
  siRNA target sequence for E130014G12Rik (NM_020256.1,1334-1352).
ccaaaagtaccactttaga

SEQ ID NO: 534986 - DNA, 19 bp, Mus musculus
  siRNA target sequence for E130014G12Rik (NM_020256.1,1335-1353).
caaaagtaccactttagat

SEQ ID NO: 534987 - DNA, 19 bp, Mus musculus
  siRNA target sequence for E130014G12Rik (NM_020256.1,1343-1361).
ccactttagatggatcatt

SEQ ID NO: 534988 - DNA, 19 bp, Mus musculus
  siRNA target sequence for E130014G12Rik (NM_020256.1,1393-1411).
caagagccaccttctaatt

SEQ ID NO: 534989 - DNA, 19 bp, Mus musculus
  siRNA target sequence for E130014G12Rik (NM_020256.1,1398-1416).
gccaccttctaattcttta

SEQ ID NO: 534990 - DNA, 19 bp, Mus musculus
  siRNA target sequence for E130014G12Rik (NM_020256.1,1429-1447).
gtcattactagaaacacta

SEQ ID NO: 534991 - DNA, 19 bp, Mus musculus
  siRNA target sequence for E130014G12Rik (NM_020256.1,1431-1449).
cattactagaaacactaat

SEQ ID NO: 534992 - DNA, 19 bp, Mus musculus
  siRNA target sequence for E130014G12Rik (NM_020256.1,1454-1472).
caggcttaaggtcaaaaca

SEQ ID NO: 534993 - DNA, 19 bp, Mus musculus
  siRNA target sequence for E130014G12Rik (NM_020256.1,1457-1475).
gcttaaggtcaaaacatgt

SEQ ID NO: 534994 - DNA, 19 bp, Mus musculus
  siRNA target sequence for E130014G12Rik (NM_020256.1,1463-1481).
ggtcaaaacatgtaatgga

SEQ ID NO: 534995 - DNA, 19 bp, Mus musculus
  siRNA target sequence for E130014G12Rik (NM_020256.1,1484-1502).
gtcagaagatcattacatt

SEQ ID NO: 534996 - DNA, 19 bp, Mus musculus
  siRNA target sequence for E130014G12Rik (NM_020256.1,1491-1509).
gatcattacattagataca

SEQ ID NO: 534997 - DNA, 19 bp, Mus musculus
  siRNA target sequence for E130014G12Rik (NM_020256.1,1516-1534).
gaaatcgaaggcttgtcaa

SEQ ID NO: 534998 - DNA, 19 bp, Mus musculus
  siRNA target sequence for E130014G12Rik (NM_020256.1,1552-1570).
gcaaatatcggtgaagata

SEQ ID NO: 534999 - DNA, 19 bp, Mus musculus
  siRNA target sequence for E130014G12Rik (NM_020256.1,1614-1632).
ggaggccaaacttgataat

SEQ ID NO: 535000 - DNA, 19 bp, Mus musculus
  siRNA target sequence for E130014G12Rik (NM_020256.1,1627-1645).
gataatgagctaccaaaaa

SEQ ID NO: 535001 - DNA, 19 bp, Mus musculus
  siRNA target sequence for E130014G12Rik (NM_020256.1,1664-1682).
caaacaagcgtatgaaagt

SEQ ID NO: 535002 - DNA, 19 bp, Mus musculus
  siRNA target sequence for E130014G12Rik (NM_020256.1,1698-1716).
ctatgagttaatagtagat

SEQ ID NO: 535003 - DNA, 19 bp, Mus musculus
  siRNA target sequence for E130014G12Rik (NM_020256.1,1722-1740).
ggtctattatatttgcatt

SEQ ID NO: 535004 - DNA, 19 bp, Mus musculus
  siRNA target sequence for E130014G12Rik (NM_020256.1,1767-1785).
gacaagcttgcgaagacat

SEQ ID NO: 535005 - DNA, 19 bp, Mus musculus
  siRNA target sequence for E130014G12Rik (NM_020256.1,1769-1787).
caagcttgcgaagacattt

SEQ ID NO: 535006 - DNA, 19 bp, Mus musculus
  siRNA target sequence for E130014G12Rik (NM_020256.1,1776-1794).
gcgaagacattttaacatt

SEQ ID NO: 535007 - DNA, 19 bp, Mus musculus
  siRNA target sequence for E130014G12Rik (NM_020256.1,1812-1830).
gtatcagtgccgttactgt

SEQ ID NO: 535008 - DNA, 19 bp, Mus musculus
  siRNA target sequence for E130014G12Rik (NM_020256.1,1818-1836).
gtgccgttactgtgataaa

SEQ ID NO: 535009 - DNA, 19 bp, Mus musculus
  siRNA target sequence for E130014G12Rik (NM_020256.1,1820-1838).
gccgttactgtgataaagt

SEQ ID NO: 535010 - DNA, 19 bp, Mus musculus
  siRNA target sequence for E130014G12Rik (NM_020256.1,1881-1899).
cacaggggagcgaaggtat

SEQ ID NO: 535011 - DNA, 19 bp, Mus musculus
  siRNA target sequence for E130014G12Rik (NM_020256.1,1890-1908).
gcgaaggtatcagtgttta

SEQ ID NO: 535012 - DNA, 19 bp, Mus musculus
  siRNA target sequence for E130014G12Rik (NM_020256.1,2026-2044).
cagatcagacagtatgcat

SEQ ID NO: 535013 - DNA, 19 bp, Mus musculus
  siRNA target sequence for E130014G12Rik (NM_020256.1,2037-2055).
gtatgcatacctttctaat

SEQ ID NO: 535014 - DNA, 19 bp, Mus musculus
  siRNA target sequence for E130014G12Rik (NM_020256.1,2125-2143).
ccagtagggaccacatcta

SEQ ID NO: 535015 - DNA, 19 bp, Mus musculus
  siRNA target sequence for E130014G12Rik (NM_020256.1,2190-2208).
gcaagaaaatgattccatt

SEQ ID NO: 535016 - DNA, 19 bp, Mus musculus
  siRNA target sequence for E130014G12Rik (NM_020256.1,2226-2244).
cgatggcagtactgagttt

SEQ ID NO: 535017 - DNA, 19 bp, Mus musculus
  siRNA target sequence for E130014G12Rik (NM_020256.1,2231-2249).
gcagtactgagtttgaatt

SEQ ID NO: 535018 - DNA, 19 bp, Mus musculus
  siRNA target sequence for E130014G12Rik (NM_020256.1,2232-2250).
cagtactgagtttgaattt

SEQ ID NO: 535019 - DNA, 19 bp, Mus musculus
  siRNA target sequence for Ebi3 (NM_015766.1,390-408).
cagatccacgtccttcatt

SEQ ID NO: 535020 - DNA, 19 bp, Mus musculus
  siRNA target sequence for Ebi3 (NM_015766.1,515-533).
cggtgccctacatgctaaa

SEQ ID NO: 535021 - DNA, 19 bp, Mus musculus
  siRNA target sequence for Ebi3 (NM_015766.1,516-534).
ggtgccctacatgctaaat

SEQ ID NO: 535022 - DNA, 19 bp, Mus musculus
  siRNA target sequence for Ebi3 (NM_015766.1,520-538).
ccctacatgctaaatgtca

SEQ ID NO: 535023 - DNA, 19 bp, Mus musculus
  siRNA target sequence for Ebi3 (NM_015766.1,799-817).
ccccatgccaagtattgca

SEQ ID NO: 535024 - DNA, 19 bp, Mus musculus
  siRNA target sequence for Eed (NM_021876.1,549-567).
cctctcgggagacgaaaat

SEQ ID NO: 535025 - DNA, 19 bp, Mus musculus
  siRNA target sequence for Eed (NM_021876.1,571-589).
gatgctgtcagtattgaga

SEQ ID NO: 535026 - DNA, 19 bp, Mus musculus
  siRNA target sequence for Eed (NM_021876.1,610-628).
ccggacacgcccacaaata

SEQ ID NO: 535027 - DNA, 19 bp, Mus musculus
  siRNA target sequence for Eed (NM_021876.1,713-731).
gcctcaaggaagatcataa

SEQ ID NO: 535028 - DNA, 19 bp, Mus musculus
  siRNA target sequence for Eed (NM_021876.1,753-771).
gtttaactggcacagtaaa

SEQ ID NO: 535029 - DNA, 19 bp, Mus musculus
  siRNA target sequence for Eed (NM_021876.1,778-796).
gaccctctggtgtttgcaa

SEQ ID NO: 535030 - DNA, 19 bp, Mus musculus
  siRNA target sequence for Eed (NM_021876.1,803-821).
gaagcaacagagtaacctt

SEQ ID NO: 535031 - DNA, 19 bp, Mus musculus
  siRNA target sequence for Eed (NM_021876.1,810-828).
cagagtaaccttatacgaa

SEQ ID NO: 535032 - DNA, 19 bp, Mus musculus
  siRNA target sequence for Eed (NM_021876.1,905-923).
catggacctatgatagcaa

SEQ ID NO: 535033 - DNA, 19 bp, Mus musculus
  siRNA target sequence for Eed (NM_021876.1,952-970).
ggatctagaggcattataa

SEQ ID NO: 535034 - DNA, 19 bp, Mus musculus
  siRNA target sequence for Eed (NM_021876.1,956-974).
ctagaggcattataagaat

SEQ ID NO: 535035 - DNA, 19 bp, Mus musculus
  siRNA target sequence for Eed (NM_021876.1,959-977).
gaggcattataagaataat

SEQ ID NO: 535036 - DNA, 19 bp, Mus musculus
  siRNA target sequence for Eed (NM_021876.1,1050-1068).
cccacgagacccaaacctt

SEQ ID NO: 535037 - DNA, 19 bp, Mus musculus
  siRNA target sequence for Eed (NM_021876.1,1071-1089).
cctgtcagtaagtaaagat

SEQ ID NO: 535038 - DNA, 19 bp, Mus musculus
  siRNA target sequence for Eed (NM_021876.1,1074-1092).
gtcagtaagtaaagatcat

SEQ ID NO: 535039 - DNA, 19 bp, Mus musculus
  siRNA target sequence for Eed (NM_021876.1,1090-1108).
catgctttacggttatgga

SEQ ID NO: 535040 - DNA, 19 bp, Mus musculus
  siRNA target sequence for Eed (NM_021876.1,1093-1111).
gctttacggttatggaata

SEQ ID NO: 535041 - DNA, 19 bp, Mus musculus
  siRNA target sequence for Eed (NM_021876.1,1094-1112).
ctttacggttatggaatat

SEQ ID NO: 535042 - DNA, 19 bp, Mus musculus
  siRNA target sequence for Eed (NM_021876.1,1099-1117).
cggttatggaatatccaaa

SEQ ID NO: 535043 - DNA, 19 bp, Mus musculus
  siRNA target sequence for Eed (NM_021876.1,1173-1191).
gagtgctgattatgatctt

SEQ ID NO: 535044 - DNA, 19 bp, Mus musculus
  siRNA target sequence for Eed (NM_021876.1,1216-1234).
ggtatggatcactctctta

SEQ ID NO: 535045 - DNA, 19 bp, Mus musculus
  siRNA target sequence for Eed (NM_021876.1,1222-1240).
gatcactctcttaaactgt

SEQ ID NO: 535046 - DNA, 19 bp, Mus musculus
  siRNA target sequence for Eed (NM_021876.1,1259-1277).
ggatgatgaatgcaattaa

SEQ ID NO: 535047 - DNA, 19 bp, Mus musculus
  siRNA target sequence for Eed (NM_021876.1,1271-1289).
caattaaggagtcttatga

SEQ ID NO: 535048 - DNA, 19 bp, Mus musculus
  siRNA target sequence for Eed (NM_021876.1,1358-1376).
gagacatacataggaatta

SEQ ID NO: 535049 - DNA, 19 bp, Mus musculus
  siRNA target sequence for Eed (NM_021876.1,1390-1408).
cgatggttaggcgatttga

SEQ ID NO: 535050 - DNA, 19 bp, Mus musculus
  siRNA target sequence for Eed (NM_021876.1,1391-1409).
gatggttaggcgatttgat

SEQ ID NO: 535051 - DNA, 19 bp, Mus musculus
  siRNA target sequence for Eed (NM_021876.1,1394-1412).
ggttaggcgatttgatact

SEQ ID NO: 535052 - DNA, 19 bp, Mus musculus
  siRNA target sequence for Eed (NM_021876.1,1395-1413).
gttaggcgatttgatactt

SEQ ID NO: 535053 - DNA, 19 bp, Mus musculus
  siRNA target sequence for Eed (NM_021876.1,1400-1418).
gcgatttgatactttccaa

SEQ ID NO: 535054 - DNA, 19 bp, Mus musculus
  siRNA target sequence for Eed (NM_021876.1,1442-1460).
gctggaaacctggcaaaat

SEQ ID NO: 535055 - DNA, 19 bp, Mus musculus
  siRNA target sequence for Eed (NM_021876.1,1453-1471).
ggcaaaatggaggatgata

SEQ ID NO: 535056 - DNA, 19 bp, Mus musculus
  siRNA target sequence for Eed (NM_021876.1,1454-1472).
gcaaaatggaggatgatat

SEQ ID NO: 535057 - DNA, 19 bp, Mus musculus
  siRNA target sequence for Eed (NM_021876.1,1455-1473).
caaaatggaggatgatata

SEQ ID NO: 535058 - DNA, 19 bp, Mus musculus
  siRNA target sequence for Eed (NM_021876.1,1494-1512).
gtctaatgtgactattctt

SEQ ID NO: 535059 - DNA, 19 bp, Mus musculus
  siRNA target sequence for Eed (NM_021876.1,1505-1523).
ctattcttgggcgatttga

SEQ ID NO: 535060 - DNA, 19 bp, Mus musculus
  siRNA target sequence for Eed (NM_021876.1,1571-1589).
ggcaaaagatgcttgcatt

SEQ ID NO: 535061 - DNA, 19 bp, Mus musculus
  siRNA target sequence for Eed (NM_021876.1,1599-1617).
ggttggcaaactgtatgtt

SEQ ID NO: 535062 - DNA, 19 bp, Mus musculus
  siRNA target sequence for Eed (NM_021876.1,1600-1618).
gttggcaaactgtatgttt

SEQ ID NO: 535063 - DNA, 19 bp, Mus musculus
  siRNA target sequence for Eed (NM_021876.1,1639-1657).
cctcataaagccaaatgca

SEQ ID NO: 535064 - DNA, 19 bp, Mus musculus
  siRNA target sequence for Eed (NM_021876.1,1658-1676).
caacactgacccatcataa

SEQ ID NO: 535065 - DNA, 19 bp, Mus musculus
  siRNA target sequence for Eed (NM_021876.1,1693-1711).
cgacaaaccagtttcagta

SEQ ID NO: 535066 - DNA, 19 bp, Mus musculus
  siRNA target sequence for Eif3s6ip (NM_145139.1,71-89).
cgagtctgaggctgcttat

SEQ ID NO: 535067 - DNA, 19 bp, Mus musculus
  siRNA target sequence for Eif3s6ip (NM_145139.1,188-206).
gataccggaagtgatcaaa

SEQ ID NO: 535068 - DNA, 19 bp, Mus musculus
  siRNA target sequence for Eif3s6ip (NM_145139.1,195-213).
gaagtgatcaaaaacttca

SEQ ID NO: 535069 - DNA, 19 bp, Mus musculus
  siRNA target sequence for Eif3s6ip (NM_145139.1,280-298).
gcgtctcgagtgatgtcat

SEQ ID NO: 535070 - DNA, 19 bp, Mus musculus
  siRNA target sequence for Eif3s6ip (NM_145139.1,281-299).
cgtctcgagtgatgtcatt

SEQ ID NO: 535071 - DNA, 19 bp, Mus musculus
  siRNA target sequence for Eif3s6ip (NM_145139.1,346-364).
ccaagctaactgaaaggtt

SEQ ID NO: 535072 - DNA, 19 bp, Mus musculus
  siRNA target sequence for Eif3s6ip (NM_145139.1,415-433).
gcaatgatgccgtattcct

SEQ ID NO: 535073 - DNA, 19 bp, Mus musculus
  siRNA target sequence for Eif3s6ip (NM_145139.1,416-434).
caatgatgccgtattccta

SEQ ID NO: 535074 - DNA, 19 bp, Mus musculus
  siRNA target sequence for Eif3s6ip (NM_145139.1,423-441).
gccgtattcctaattttgt

SEQ ID NO: 535075 - DNA, 19 bp, Mus musculus
  siRNA target sequence for Eif3s6ip (NM_145139.1,484-502).
ggggtccctccttagaaca

SEQ ID NO: 535076 - DNA, 19 bp, Mus musculus
  siRNA target sequence for Eif3s6ip (NM_145139.1,498-516).
gaacagaggttcgaatctt

SEQ ID NO: 535077 - DNA, 19 bp, Mus musculus
  siRNA target sequence for Eif3s6ip (NM_145139.1,501-519).
cagaggttcgaatcttatt

SEQ ID NO: 535078 - DNA, 19 bp, Mus musculus
  siRNA target sequence for Eif3s6ip (NM_145139.1,505-523).
ggttcgaatcttattacaa

SEQ ID NO: 535079 - DNA, 19 bp, Mus musculus
  siRNA target sequence for Eif3s6ip (NM_145139.1,796-814).
gaggtgacccggaaagtgt

SEQ ID NO: 535080 - DNA, 19 bp, Mus musculus
  siRNA target sequence for Eif3s6ip (NM_145139.1,892-910).
ctctactgggggattacta

SEQ ID NO: 535081 - DNA, 19 bp, Mus musculus
  siRNA target sequence for Eif3s6ip (NM_145139.1,983-1001).
ggtcaccacctactattat

SEQ ID NO: 535082 - DNA, 19 bp, Mus musculus
  siRNA target sequence for Eif3s6ip (NM_145139.1,986-1004).
caccacctactattatgtt

SEQ ID NO: 535083 - DNA, 19 bp, Mus musculus
  siRNA target sequence for Eif3s6ip (NM_145139.1,1002-1020).
gttggctttgcgtatttaa

SEQ ID NO: 535084 - DNA, 19 bp, Mus musculus
  siRNA target sequence for Eif3s6ip (NM_145139.1,1005-1023).
ggctttgcgtatttaatga

SEQ ID NO: 535085 - DNA, 19 bp, Mus musculus
  siRNA target sequence for Eif3s6ip (NM_145139.1,1027-1045).
gtcgatatcaggatgctat

SEQ ID NO: 535086 - DNA, 19 bp, Mus musculus
  siRNA target sequence for Eif3s6ip (NM_145139.1,1037-1055).
ggatgctatccgagtcttt

SEQ ID NO: 535087 - DNA, 19 bp, Mus musculus
  siRNA target sequence for Eif3s6ip (NM_145139.1,1057-1075).
ccaacatcctcctgtacat

SEQ ID NO: 535088 - DNA, 19 bp, Mus musculus
  siRNA target sequence for Eif3s6ip (NM_145139.1,1077-1095).
cagaggaccaagagtatgt

SEQ ID NO: 535089 - DNA, 19 bp, Mus musculus
  siRNA target sequence for Eif3s6ip (NM_145139.1,1097-1115).
ccagaggaccacatacaaa

SEQ ID NO: 535090 - DNA, 19 bp, Mus musculus
  siRNA target sequence for Eif3s6ip (NM_145139.1,1209-1227).
ctccagctgcgggagaaat

SEQ ID NO: 535091 - DNA, 19 bp, Mus musculus
  siRNA target sequence for Eif3s6ip (NM_145139.1,1312-1330).
cgcctgtggtgccaaacta

SEQ ID NO: 535092 - DNA, 19 bp, Mus musculus
  siRNA target sequence for Eif3s6ip (NM_145139.1,1570-1588).
ccctagatggcgaattcca

SEQ ID NO: 535093 - DNA, 19 bp, Mus musculus
  siRNA target sequence for Eif3s6ip (NM_145139.1,1594-1612).
cctcggaggtggacttcta

SEQ ID NO: 535094 - DNA, 19 bp, Mus musculus
  siRNA target sequence for Eif3s6ip (NM_145139.1,1595-1613).
ctcggaggtggacttctat

SEQ ID NO: 535095 - DNA, 19 bp, Mus musculus
  siRNA target sequence for Eif3s6ip (NM_145139.1,1597-1615).
cggaggtggacttctatat

SEQ ID NO: 535096 - DNA, 19 bp, Mus musculus
  siRNA target sequence for Eif3s6ip (NM_145139.1,1601-1619).
ggtggacttctatattgat

SEQ ID NO: 535097 - DNA, 19 bp, Mus musculus
  siRNA target sequence for Eif3s6ip (NM_145139.1,1602-1620).
gtggacttctatattgata

SEQ ID NO: 535098 - DNA, 19 bp, Mus musculus
  siRNA target sequence for Eif3s6ip (NM_145139.1,1622-1640).
ggacatgatccatattgca

SEQ ID NO: 535099 - DNA, 19 bp, Mus musculus
  siRNA target sequence for Eif3s6ip (NM_145139.1,1659-1677).
cgctatggggatttcttta

SEQ ID NO: 535100 - DNA, 19 bp, Mus musculus
  siRNA target sequence for Eif3s6ip (NM_145139.1,1694-1712).
gtttgaagagcttaatcga

SEQ ID NO: 535101 - DNA, 19 bp, Mus musculus
  siRNA target sequence for Emu1 (NM_080595.1,226-244).
gtggtgagacccttgtaca

SEQ ID NO: 535102 - DNA, 19 bp, Mus musculus
  siRNA target sequence for Emu1 (NM_080595.1,640-658).
cagagcccagtgaggatta

SEQ ID NO: 535103 - DNA, 19 bp, Mus musculus
  siRNA target sequence for Emu1 (NM_080595.1,642-660).
gagcccagtgaggattaga

SEQ ID NO: 535104 - DNA, 19 bp, Mus musculus
  siRNA target sequence for Emu1 (NM_080595.1,713-731).
caggcacccctggaaagat

SEQ ID NO: 535105 - DNA, 19 bp, Mus musculus
  siRNA target sequence for Emu1 (NM_080595.1,818-836).
gggatccactgctgtctaa

SEQ ID NO: 535106 - DNA, 19 bp, Mus musculus
  siRNA target sequence for Emu1 (NM_080595.1,819-837).
ggatccactgctgtctaat

SEQ ID NO: 535107 - DNA, 19 bp, Mus musculus
  siRNA target sequence for Emu1 (NM_080595.1,820-838).
gatccactgctgtctaata

SEQ ID NO: 535108 - DNA, 19 bp, Mus musculus
  siRNA target sequence for Emu1 (NM_080595.1,823-841).
ccactgctgtctaatacct

SEQ ID NO: 535109 - DNA, 19 bp, Mus musculus
  siRNA target sequence for Emu1 (NM_080595.1,1141-1159).
ctacgcgaggctttgaaga

SEQ ID NO: 535110 - DNA, 19 bp, Mus musculus
  siRNA target sequence for Emu1 (NM_080595.1,1144-1162).
cgcgaggctttgaagattt

SEQ ID NO: 535111 - DNA, 19 bp, Mus musculus
  siRNA target sequence for Emu1 (NM_080595.1,1145-1163).
gcgaggctttgaagatttt

SEQ ID NO: 535112 - DNA, 19 bp, Mus musculus
  siRNA target sequence for Emu1 (NM_080595.1,1165-1183).
gctgagagggttttaatct

SEQ ID NO: 535113 - DNA, 19 bp, Mus musculus
  siRNA target sequence for Emu1 (NM_080595.1,1190-1208).
caatgattgggctctatga

SEQ ID NO: 535114 - DNA, 19 bp, Mus musculus
  siRNA target sequence for F11r (NM_172647.1,102-120).
cgggaggaaactgttgttt

SEQ ID NO: 535115 - DNA, 19 bp, Mus musculus
  siRNA target sequence for F11r (NM_172647.1,104-122).
ggaggaaactgttgtttct

SEQ ID NO: 535116 - DNA, 19 bp, Mus musculus
  siRNA target sequence for F11r (NM_172647.1,168-186).
ggtgtacactgctcaatct

SEQ ID NO: 535117 - DNA, 19 bp, Mus musculus
  siRNA target sequence for F11r (NM_172647.1,201-219).
cgagaacgagtccatcaaa

SEQ ID NO: 535118 - DNA, 19 bp, Mus musculus
  siRNA target sequence for F11r (NM_172647.1,287-305).
ctgcacttgtgtgttataa

SEQ ID NO: 535119 - DNA, 19 bp, Mus musculus
  siRNA target sequence for F11r (NM_172647.1,331-349).
gaccgagtcaccttctcat

SEQ ID NO: 535120 - DNA, 19 bp, Mus musculus
  siRNA target sequence for F11r (NM_172647.1,384-402).
ggacaatggagagtatact

SEQ ID NO: 535121 - DNA, 19 bp, Mus musculus
  siRNA target sequence for F11r (NM_172647.1,385-403).
gacaatggagagtatactt

SEQ ID NO: 535122 - DNA, 19 bp, Mus musculus
  siRNA target sequence for F11r (NM_172647.1,656-674).
caaagtcgggggatctgat

SEQ ID NO: 535123 - DNA, 19 bp, Mus musculus
  siRNA target sequence for F11r (NM_172647.1,660-678).
gtcgggggatctgatcttt

SEQ ID NO: 535124 - DNA, 19 bp, Mus musculus
  siRNA target sequence for F11r (NM_172647.1,684-702).
cgtgacagcctttgatagt

SEQ ID NO: 535125 - DNA, 19 bp, Mus musculus
  siRNA target sequence for F11r (NM_172647.1,692-710).
cctttgatagtggtgaata

SEQ ID NO: 535126 - DNA, 19 bp, Mus musculus
  siRNA target sequence for F11r (NM_172647.1,697-715).
gatagtggtgaatactact

SEQ ID NO: 535127 - DNA, 19 bp, Mus musculus
  siRNA target sequence for F11r (NM_172647.1,896-914).
ggactgcaccgggtaagaa

SEQ ID NO: 535128 - DNA, 19 bp, Mus musculus
  siRNA target sequence for F11r (NM_172647.1,905-923).
cgggtaagaaggtcattta

SEQ ID NO: 535129 - DNA, 19 bp, Mus musculus
  siRNA target sequence for F11r (NM_172647.1,907-925).
ggtaagaaggtcatttaca

SEQ ID NO: 535130 - DNA, 19 bp, Mus musculus
  siRNA target sequence for F11r (NM_172647.1,944-962).
gtgagggggaattcaaaca

SEQ ID NO: 535131 - DNA, 19 bp, Mus musculus
  siRNA target sequence for F11r (NM_172647.1,946-964).
gagggggaattcaaacaga

SEQ ID NO: 535132 - DNA, 19 bp, Mus musculus
  siRNA target sequence for Fbxo32 (NM_026346.1,332-350).
gcgcttcttggatgagaaa

SEQ ID NO: 535133 - DNA, 19 bp, Mus musculus
  siRNA target sequence for Fbxo32 (NM_026346.1,333-351).
cgcttcttggatgagaaaa

SEQ ID NO: 535134 - DNA, 19 bp, Mus musculus
  siRNA target sequence for Fbxo32 (NM_026346.1,509-527).
gtggatctatgttcacaaa

SEQ ID NO: 535135 - DNA, 19 bp, Mus musculus
  siRNA target sequence for Fbxo32 (NM_026346.1,535-553).
cgaaggagcgccatggata

SEQ ID NO: 535136 - DNA, 19 bp, Mus musculus
  siRNA target sequence for Fbxo32 (NM_026346.1,540-558).
gagcgccatggatactgta

SEQ ID NO: 535137 - DNA, 19 bp, Mus musculus
  siRNA target sequence for Fbxo32 (NM_026346.1,543-561).
cgccatggatactgtactt

SEQ ID NO: 535138 - DNA, 19 bp, Mus musculus
  siRNA target sequence for Fbxo32 (NM_026346.1,544-562).
gccatggatactgtacttt

SEQ ID NO: 535139 - DNA, 19 bp, Mus musculus
  siRNA target sequence for Fbxo32 (NM_026346.1,636-654).
ctgttggagctgatagcaa

SEQ ID NO: 535140 - DNA, 19 bp, Mus musculus
  siRNA target sequence for Fbxo32 (NM_026346.1,676-694).
gtggcatcgcccaaaagaa

SEQ ID NO: 535141 - DNA, 19 bp, Mus musculus
  siRNA target sequence for Fbxo32 (NM_026346.1,679-697).
gcatcgcccaaaagaactt

SEQ ID NO: 535142 - DNA, 19 bp, Mus musculus
  siRNA target sequence for Fbxo32 (NM_026346.1,743-761).
gcaaaacataagacttata

SEQ ID NO: 535143 - DNA, 19 bp, Mus musculus
  siRNA target sequence for Fbxo32 (NM_026346.1,754-772).
gacttatacgggaacttct

SEQ ID NO: 535144 - DNA, 19 bp, Mus musculus
  siRNA target sequence for Fbxo32 (NM_026346.1,776-794).
gactctctacacatcctta

SEQ ID NO: 535145 - DNA, 19 bp, Mus musculus
  siRNA target sequence for Fbxo32 (NM_026346.1,780-798).
ctctacacatccttatgca

SEQ ID NO: 535146 - DNA, 19 bp, Mus musculus
  siRNA target sequence for Fbxo32 (NM_026346.1,828-846).
ctggtgggcaacattaaca

SEQ ID NO: 535147 - DNA, 19 bp, Mus musculus
  siRNA target sequence for Fbxo32 (NM_026346.1,955-973).
gcttacaactgaacatcat

SEQ ID NO: 535148 - DNA, 19 bp, Mus musculus
  siRNA target sequence for Fbxo32 (NM_026346.1,1131-1149).
cagctggattggaagaaga

SEQ ID NO: 535149 - DNA, 19 bp, Mus musculus
  siRNA target sequence for Fbxo32 (NM_026346.1,1137-1155).
gattggaagaagatgtatt

SEQ ID NO: 535150 - DNA, 19 bp, Mus musculus
  siRNA target sequence for Fbxo32 (NM_026346.1,1199-1217).
caccctgcagctttgcaaa

SEQ ID NO: 535151 - DNA, 19 bp, Mus musculus
  siRNA target sequence for Fbxo32 (NM_026346.1,1298-1316).
ccctcaagactttatcaat

SEQ ID NO: 535152 - DNA, 19 bp, Mus musculus
  siRNA target sequence for Fcamr (NM_144960.1,113-131).
gaacgagatgggaaatact

SEQ ID NO: 535153 - DNA, 19 bp, Mus musculus
  siRNA target sequence for Fcamr (NM_144960.1,116-134).
cgagatgggaaatacttct

SEQ ID NO: 535154 - DNA, 19 bp, Mus musculus
  siRNA target sequence for Fcamr (NM_144960.1,448-466).
gtcgtgtccaccaaccaat

SEQ ID NO: 535155 - DNA, 19 bp, Mus musculus
  siRNA target sequence for Fcamr (NM_144960.1,453-471).
gtccaccaaccaatacact

SEQ ID NO: 535156 - DNA, 19 bp, Mus musculus
  siRNA target sequence for Fcamr (NM_144960.1,796-814).
ggtaccagcaaaactacat

SEQ ID NO: 535157 - DNA, 19 bp, Mus musculus
  siRNA target sequence for Fcamr (NM_144960.1,1048-1066).
gatgggccacgagatgaaa

SEQ ID NO: 535158 - DNA, 19 bp, Mus musculus
  siRNA target sequence for Fcamr (NM_144960.1,1125-1143).
ggccctgatctcagaacat

SEQ ID NO: 535159 - DNA, 19 bp, Mus musculus
  siRNA target sequence for Fcamr (NM_144960.1,1127-1145).
ccctgatctcagaacatgt

SEQ ID NO: 535160 - DNA, 19 bp, Mus musculus
  siRNA target sequence for Fcamr (NM_144960.1,1284-1302).
cattgatgggagtcttgaa

SEQ ID NO: 535161 - DNA, 19 bp, Mus musculus
  siRNA target sequence for Fcamr (NM_144960.1,1468-1486).
gctgctctgatcctattga

SEQ ID NO: 535162 - DNA, 19 bp, Mus musculus
  siRNA target sequence for Fcamr (NM_144960.1,1474-1492).
ctgatcctattgaaaagga

SEQ ID NO: 535163 - DNA, 19 bp, Mus musculus
  siRNA target sequence for Fcamr (NM_144960.1,1538-1556).
ggatcactctaattcagat

SEQ ID NO: 535164 - DNA, 19 bp, Mus musculus
  siRNA target sequence for Fcamr (NM_144960.1,1559-1577).
cacatttcctaccagataa

SEQ ID NO: 535165 - DNA, 19 bp, Mus musculus
  siRNA target sequence for Fgfrl1 (NM_054071.1,250-268).
cgcgaggacccccaagaat

SEQ ID NO: 535166 - DNA, 19 bp, Mus musculus
  siRNA target sequence for Fgfrl1 (NM_054071.1,260-278).
cccaagaatggcagacaaa

SEQ ID NO: 535167 - DNA, 19 bp, Mus musculus
  siRNA target sequence for Fgfrl1 (NM_054071.1,448-466).
ccgaggatgccggtgttta

SEQ ID NO: 535168 - DNA, 19 bp, Mus musculus
  siRNA target sequence for Fgfrl1 (NM_054071.1,449-467).
cgaggatgccggtgtttat

SEQ ID NO: 535169 - DNA, 19 bp, Mus musculus
  siRNA target sequence for Fgfrl1 (NM_054071.1,453-471).
gatgccggtgtttatgtgt

SEQ ID NO: 535170 - DNA, 19 bp, Mus musculus
  siRNA target sequence for Fgfrl1 (NM_054071.1,830-848).
gtacacgtgccgtgtatct

SEQ ID NO: 535171 - DNA, 19 bp, Mus musculus
  siRNA target sequence for Fgfrl1 (NM_054071.1,835-853).
cgtgccgtgtatctaacaa

SEQ ID NO: 535172 - DNA, 19 bp, Mus musculus
  siRNA target sequence for Fgfrl1 (NM_054071.1,863-881).
catcaacgccacctacaaa

SEQ ID NO: 535173 - DNA, 19 bp, Mus musculus
  siRNA target sequence for Fgfrl1 (NM_054071.1,874-892).
cctacaaagtggatgtaat

SEQ ID NO: 535174 - DNA, 19 bp, Mus musculus
  siRNA target sequence for Fgfrl1 (NM_054071.1,1184-1202).
catctgcctaggtgcaaat

SEQ ID NO: 535175 - DNA, 19 bp, Mus musculus
  siRNA target sequence for Fgfrl1 (NM_054071.1,1635-1653).
ggagggcaaggttcatcaa

SEQ ID NO: 535176 - DNA, 19 bp, Mus musculus
  siRNA target sequence for Fgfrl1 (NM_054071.1,1657-1675).
cagcatgtccactatcagt

SEQ ID NO: 535177 - DNA, 19 bp, Mus musculus
  siRNA target sequence for Fgfrl1 (NM_054071.1,1663-1681).
gtccactatcagtgctaaa

SEQ ID NO: 535178 - DNA, 19 bp, Mus musculus
  siRNA target sequence for Fgfrl1 (NM_054071.1,1665-1683).
ccactatcagtgctaaata

SEQ ID NO: 535179 - DNA, 19 bp, Mus musculus
  siRNA target sequence for Fgfrl1 (NM_054071.1,1733-1751).
gcaacaggttgggagaatt

SEQ ID NO: 535180 - DNA, 19 bp, Mus musculus
  siRNA target sequence for Fhl2 (NM_010212.1,218-236).
cggcaagaagtacattcta

SEQ ID NO: 535181 - DNA, 19 bp, Mus musculus
  siRNA target sequence for Fhl2 (NM_010212.1,273-291).
gaactctatgccaatacct

SEQ ID NO: 535182 - DNA, 19 bp, Mus musculus
  siRNA target sequence for Fhl2 (NM_010212.1,357-375).
catgaaggctgcttccatt

SEQ ID NO: 535183 - DNA, 19 bp, Mus musculus
  siRNA target sequence for Fhl2 (NM_010212.1,504-522).
ggtacccgcaagatggaat

SEQ ID NO: 535184 - DNA, 19 bp, Mus musculus
  siRNA target sequence for Fhl2 (NM_010212.1,505-523).
gtacccgcaagatggaata

SEQ ID NO: 535185 - DNA, 19 bp, Mus musculus
  siRNA target sequence for Fhl2 (NM_010212.1,508-526).
cccgcaagatggaatacaa

SEQ ID NO: 535186 - DNA, 19 bp, Mus musculus
  siRNA target sequence for Fhl2 (NM_010212.1,586-604).
ccaagagcttcatacctaa

SEQ ID NO: 535187 - DNA, 19 bp, Mus musculus
  siRNA target sequence for Fhl2 (NM_010212.1,654-672).
cagtgcgtgcagtgcaaaa

SEQ ID NO: 535188 - DNA, 19 bp, Mus musculus
  siRNA target sequence for Fhl2 (NM_010212.1,682-700).
ccacaggaggtgttactta

SEQ ID NO: 535189 - DNA, 19 bp, Mus musculus
  siRNA target sequence for Fhl2 (NM_010212.1,777-795).
gcacgggatgagtttccat

SEQ ID NO: 535190 - DNA, 19 bp, Mus musculus
  siRNA target sequence for Fhl2 (NM_010212.1,778-796).
cacgggatgagtttccata

SEQ ID NO: 535191 - DNA, 19 bp, Mus musculus
  siRNA target sequence for Fhl2 (NM_010212.1,818-836).
cttgtacgctaagaaatgt

SEQ ID NO: 535192 - DNA, 19 bp, Mus musculus
  siRNA target sequence for Fhl2 (NM_010212.1,842-860).
gtgcaccaaccccattagt

SEQ ID NO: 535193 - DNA, 19 bp, Mus musculus
  siRNA target sequence for Fhl2 (NM_010212.1,867-885).
ggtggcacaaagtacatct

SEQ ID NO: 535194 - DNA, 19 bp, Mus musculus
  siRNA target sequence for Fhl2 (NM_010212.1,904-922).
ggcacaacgactgctttaa

SEQ ID NO: 535195 - DNA, 19 bp, Mus musculus
  siRNA target sequence for Fhl2 (NM_010212.1,906-924).
cacaacgactgctttaact

SEQ ID NO: 535196 - DNA, 19 bp, Mus musculus
  siRNA target sequence for Fhl2 (NM_010212.1,908-926).
caacgactgctttaactgt

SEQ ID NO: 535197 - DNA, 19 bp, Mus musculus
  siRNA target sequence for Fhl2 (NM_010212.1,912-930).
gactgctttaactgtaaga

SEQ ID NO: 535198 - DNA, 19 bp, Mus musculus
  siRNA target sequence for Figf (NM_010216.1,358-376).
catggaccagtgaaggatt

SEQ ID NO: 535199 - DNA, 19 bp, Mus musculus
  siRNA target sequence for Figf (NM_010216.1,402-420).
catgttggaacgatctgaa

SEQ ID NO: 535200 - DNA, 19 bp, Mus musculus
  siRNA target sequence for Figf (NM_010216.1,405-423).
gttggaacgatctgaacaa

SEQ ID NO: 535201 - DNA, 19 bp, Mus musculus
  siRNA target sequence for Figf (NM_010216.1,498-516).
ccggttgaagctcaaaagt

SEQ ID NO: 535202 - DNA, 19 bp, Mus musculus
  siRNA target sequence for Figf (NM_010216.1,557-575).
ccagatttgcggcaacttt

SEQ ID NO: 535203 - DNA, 19 bp, Mus musculus
  siRNA target sequence for Figf (NM_010216.1,560-578).
gatttgcggcaactttcta

SEQ ID NO: 535204 - DNA, 19 bp, Mus musculus
  siRNA target sequence for Figf (NM_010216.1,782-800).
ccaaacagctctttgagat

SEQ ID NO: 535205 - DNA, 19 bp, Mus musculus
  siRNA target sequence for Figf (NM_010216.1,824-842).
ccgagttagtgcctgttaa

SEQ ID NO: 535206 - DNA, 19 bp, Mus musculus
  siRNA target sequence for Figf (NM_010216.1,825-843).
cgagttagtgcctgttaaa

SEQ ID NO: 535207 - DNA, 19 bp, Mus musculus
  siRNA target sequence for Figf (NM_010216.1,828-846).
gttagtgcctgttaaaatt

SEQ ID NO: 535208 - DNA, 19 bp, Mus musculus
  siRNA target sequence for Figf (NM_010216.1,848-866).
ccaaccatacgggttgtaa

SEQ ID NO: 535209 - DNA, 19 bp, Mus musculus
  siRNA target sequence for Figf (NM_010216.1,886-904).
cgccatccttactcaatta

SEQ ID NO: 535210 - DNA, 19 bp, Mus musculus
  siRNA target sequence for Figf (NM_010216.1,889-907).
catccttactcaattatca

SEQ ID NO: 535211 - DNA, 19 bp, Mus musculus
  siRNA target sequence for Figf (NM_010216.1,941-959).
gtcctcattccaagaaact

SEQ ID NO: 535212 - DNA, 19 bp, Mus musculus
  siRNA target sequence for Figf (NM_010216.1,951-969).
caagaaactctgtcctatt

SEQ ID NO: 535213 - DNA, 19 bp, Mus musculus
  siRNA target sequence for Figf (NM_010216.1,1031-1049).
ggacagaagaccactctta

SEQ ID NO: 535214 - DNA, 19 bp, Mus musculus
  siRNA target sequence for Figf (NM_010216.1,1076-1094).
cgcacatgacgtttgatga

SEQ ID NO: 535215 - DNA, 19 bp, Mus musculus
  siRNA target sequence for Figf (NM_010216.1,1127-1145).
gtccgggagatctcattca

SEQ ID NO: 535216 - DNA, 19 bp, Mus musculus
  siRNA target sequence for Figf (NM_010216.1,1243-1261).
gacagatgtccttttcaca

SEQ ID NO: 535217 - DNA, 19 bp, Mus musculus
  siRNA target sequence for Fmip (NM_172438.1,145-163).
cggagcaggaaggcaaata

SEQ ID NO: 535218 - DNA, 19 bp, Mus musculus
  siRNA target sequence for Fmip (NM_172438.1,202-220).
gcagagactatgagttgta

SEQ ID NO: 535219 - DNA, 19 bp, Mus musculus
  siRNA target sequence for Fmip (NM_172438.1,207-225).
gactatgagttgtacaaat

SEQ ID NO: 535220 - DNA, 19 bp, Mus musculus
  siRNA target sequence for Fmip (NM_172438.1,213-231).
gagttgtacaaatacactt

SEQ ID NO: 535221 - DNA, 19 bp, Mus musculus
  siRNA target sequence for Fmip (NM_172438.1,363-381).
cgattagcccacatcagat

SEQ ID NO: 535222 - DNA, 19 bp, Mus musculus
  siRNA target sequence for Fmip (NM_172438.1,364-382).
gattagcccacatcagatt

SEQ ID NO: 535223 - DNA, 19 bp, Mus musculus
  siRNA target sequence for Fmip (NM_172438.1,369-387).
gcccacatcagattaaaga

SEQ ID NO: 535224 - DNA, 19 bp, Mus musculus
  siRNA target sequence for Fmip (NM_172438.1,500-518).
ggagttcaagtcaaagcat

SEQ ID NO: 535225 - DNA, 19 bp, Mus musculus
  siRNA target sequence for Fmip (NM_172438.1,810-828).
gaccaggcgcacaaacagt

SEQ ID NO: 535226 - DNA, 19 bp, Mus musculus
  siRNA target sequence for Fmip (NM_172438.1,812-830).
ccaggcgcacaaacagtat

SEQ ID NO: 535227 - DNA, 19 bp, Mus musculus
  siRNA target sequence for Fmip (NM_172438.1,910-928).
cgctgtccgtggcaattga

SEQ ID NO: 535228 - DNA, 19 bp, Mus musculus
  siRNA target sequence for Fmip (NM_172438.1,911-929).
gctgtccgtggcaattgaa

SEQ ID NO: 535229 - DNA, 19 bp, Mus musculus
  siRNA target sequence for Fmip (NM_172438.1,942-960).
gaagccaaagctcttttca

SEQ ID NO: 535230 - DNA, 19 bp, Mus musculus
  siRNA target sequence for Fmip (NM_172438.1,1064-1082).
gcgcaaggagatgctaaaa

SEQ ID NO: 535231 - DNA, 19 bp, Mus musculus
  siRNA target sequence for Fmip (NM_172438.1,1065-1083).
cgcaaggagatgctaaaaa

SEQ ID NO: 535232 - DNA, 19 bp, Mus musculus
  siRNA target sequence for Fmip (NM_172438.1,1134-1152).
cttcatctgactttctact

SEQ ID NO: 535233 - DNA, 19 bp, Mus musculus
  siRNA target sequence for Fmip (NM_172438.1,1140-1158).
ctgactttctactatctca

SEQ ID NO: 535234 - DNA, 19 bp, Mus musculus
  siRNA target sequence for Fmip (NM_172438.1,1144-1162).
ctttctactatctcatgaa

SEQ ID NO: 535235 - DNA, 19 bp, Mus musculus
  siRNA target sequence for Fmip (NM_172438.1,1296-1314).
ccaaatccagccaatcagt

SEQ ID NO: 535236 - DNA, 19 bp, Mus musculus
  siRNA target sequence for Fmip (NM_172438.1,1297-1315).
caaatccagccaatcagta

SEQ ID NO: 535237 - DNA, 19 bp, Mus musculus
  siRNA target sequence for Fmip (NM_172438.1,1313-1331).
gtatcagtttgacaaagtt

SEQ ID NO: 535238 - DNA, 19 bp, Mus musculus
  siRNA target sequence for Fmip (NM_172438.1,1340-1358).
gactttgagagactatgta

SEQ ID NO: 535239 - DNA, 19 bp, Mus musculus
  siRNA target sequence for Fmip (NM_172438.1,1348-1366).
gagactatgtacttgagtt

SEQ ID NO: 535240 - DNA, 19 bp, Mus musculus
  siRNA target sequence for Fmip (NM_172438.1,1375-1393).
cctacttgtgggtacagaa

SEQ ID NO: 535241 - DNA, 19 bp, Mus musculus
  siRNA target sequence for Fmip (NM_172438.1,1515-1533).
ctggctctccacaaacagt

SEQ ID NO: 535242 - DNA, 19 bp, Mus musculus
  siRNA target sequence for Fmip (NM_172438.1,1602-1620).
gtttctcgcctggtaaagt

SEQ ID NO: 535243 - DNA, 19 bp, Mus musculus
  siRNA target sequence for Fmip (NM_172438.1,1611-1629).
ctggtaaagtgggtgataa

SEQ ID NO: 535244 - DNA, 19 bp, Mus musculus
  siRNA target sequence for Fmip (NM_172438.1,1613-1631).
ggtaaagtgggtgataatt

SEQ ID NO: 535245 - DNA, 19 bp, Mus musculus
  siRNA target sequence for Fmip (NM_172438.1,1614-1632).
gtaaagtgggtgataatta

SEQ ID NO: 535246 - DNA, 19 bp, Mus musculus
  siRNA target sequence for Fmip (NM_172438.1,1625-1643).
gataattacccatgaagat

SEQ ID NO: 535247 - DNA, 19 bp, Mus musculus
  siRNA target sequence for Fmip (NM_172438.1,1689-1707).
gccggagacaccaatctct

SEQ ID NO: 535248 - DNA, 19 bp, Mus musculus
  siRNA target sequence for Fmip (NM_172438.1,1693-1711).
gagacaccaatctctacta

SEQ ID NO: 535249 - DNA, 19 bp, Mus musculus
  siRNA target sequence for Fmip (NM_172438.1,1709-1727).
ctacctggcgctaattgaa

SEQ ID NO: 535250 - DNA, 19 bp, Mus musculus
  siRNA target sequence for Fmip (NM_172438.1,1791-1809).
gttttccgactctgtctaa

SEQ ID NO: 535251 - DNA, 19 bp, Mus musculus
  siRNA target sequence for Fmip (NM_172438.1,2024-2042).
gatgtgcctgcggcttttt

SEQ ID NO: 535252 - DNA, 19 bp, Mus musculus
  siRNA target sequence for Fmip (NM_172438.1,2056-2074).
ggatgaagccgtttaaata

SEQ ID NO: 535253 - DNA, 19 bp, Mus musculus
  siRNA target sequence for Fmip (NM_172438.1,2079-2097).
catccccaagggttcttca

SEQ ID NO: 535254 - DNA, 19 bp, Mus musculus
  siRNA target sequence for Fnbp1 (NM_019406.1,165-183).
cagtttgacaacttggaaa

SEQ ID NO: 535255 - DNA, 19 bp, Mus musculus
  siRNA target sequence for Fnbp1 (NM_019406.1,190-208).
cacagtggggaatcgatat

SEQ ID NO: 535256 - DNA, 19 bp, Mus musculus
  siRNA target sequence for Fnbp1 (NM_019406.1,194-212).
gtggggaatcgatattctt

SEQ ID NO: 535257 - DNA, 19 bp, Mus musculus
  siRNA target sequence for Fnbp1 (NM_019406.1,196-214).
ggggaatcgatattcttga

SEQ ID NO: 535258 - DNA, 19 bp, Mus musculus
  siRNA target sequence for Fnbp1 (NM_019406.1,332-350).
caagtacacggcttgcaaa

SEQ ID NO: 535259 - DNA, 19 bp, Mus musculus
  siRNA target sequence for Fnbp1 (NM_019406.1,504-522).
gctcagcagcacatagaaa

SEQ ID NO: 535260 - DNA, 19 bp, Mus musculus
  siRNA target sequence for Fnbp1 (NM_019406.1,556-574).
ggtttgagcgggactgtaa

SEQ ID NO: 535261 - DNA, 19 bp, Mus musculus
  siRNA target sequence for Fnbp1 (NM_019406.1,664-682).
ctcagatacgccagcaaat

SEQ ID NO: 535262 - DNA, 19 bp, Mus musculus
  siRNA target sequence for Fnbp1 (NM_019406.1,700-718).
cagattactccttaatcct

SEQ ID NO: 535263 - DNA, 19 bp, Mus musculus
  siRNA target sequence for Fnbp1 (NM_019406.1,709-727).
ccttaatcctgcagagatt

SEQ ID NO: 535264 - DNA, 19 bp, Mus musculus
  siRNA target sequence for Fnbp1 (NM_019406.1,732-750).
caggagcaatgggaatact

SEQ ID NO: 535265 - DNA, 19 bp, Mus musculus
  siRNA target sequence for Fnbp1 (NM_019406.1,880-898).
gcctggacgggatagtgaa

SEQ ID NO: 535266 - DNA, 19 bp, Mus musculus
  siRNA target sequence for Fnbp1 (NM_019406.1,910-928).
ctatcgaccagaaaaacga

SEQ ID NO: 535267 - DNA, 19 bp, Mus musculus
  siRNA target sequence for Fnbp1 (NM_019406.1,939-957).
gtcgtagaagcctataagt

SEQ ID NO: 535268 - DNA, 19 bp, Mus musculus
  siRNA target sequence for Fnbp1 (NM_019406.1,941-959).
cgtagaagcctataagtca

SEQ ID NO: 535269 - DNA, 19 bp, Mus musculus
  siRNA target sequence for Fnbp1 (NM_019406.1,973-991).
ctggagacattgaattcga

SEQ ID NO: 535270 - DNA, 19 bp, Mus musculus
  siRNA target sequence for Fnbp1 (NM_019406.1,1097-1115).
ctggccattcatcaagaaa

SEQ ID NO: 535271 - DNA, 19 bp, Mus musculus
  siRNA target sequence for Fnbp3 (NM_018785.1,31-49).
ggcctcatggtgagtgaaa

SEQ ID NO: 535272 - DNA, 19 bp, Mus musculus
  siRNA target sequence for Fnbp3 (NM_018785.1,82-100).
gacggggagcggagattgt

SEQ ID NO: 535273 - DNA, 19 bp, Mus musculus
  siRNA target sequence for Fnbp3 (NM_018785.1,281-299).
ggcctccaatgggacaaat

SEQ ID NO: 535274 - DNA, 19 bp, Mus musculus
  siRNA target sequence for Fnbp3 (NM_018785.1,295-313).
caaatgcctggaatgatgt

SEQ ID NO: 535275 - DNA, 19 bp, Mus musculus
  siRNA target sequence for Fnbp3 (NM_018785.1,371-389).
ccttaccgcctggagtaaa

SEQ ID NO: 535276 - DNA, 19 bp, Mus musculus
  siRNA target sequence for Fnbp3 (NM_018785.1,372-390).
cttaccgcctggagtaaat

SEQ ID NO: 535277 - DNA, 19 bp, Mus musculus
  siRNA target sequence for Fnbp3 (NM_018785.1,376-394).
ccgcctggagtaaatagta

SEQ ID NO: 535278 - DNA, 19 bp, Mus musculus
  siRNA target sequence for Fnbp3 (NM_018785.1,377-395).
cgcctggagtaaatagtat

SEQ ID NO: 535279 - DNA, 19 bp, Mus musculus
  siRNA target sequence for Fnbp3 (NM_018785.1,454-472).
cctgatggaaggacttatt

SEQ ID NO: 535280 - DNA, 19 bp, Mus musculus
  siRNA target sequence for Fnbp3 (NM_018785.1,467-485).
cttattattacaatactga

SEQ ID NO: 535281 - DNA, 19 bp, Mus musculus
  siRNA target sequence for Fnbp3 (NM_018785.1,527-545).
cacctgctgagcaactatt

SEQ ID NO: 535282 - DNA, 19 bp, Mus musculus
  siRNA target sequence for Fnbp3 (NM_018785.1,529-547).
cctgctgagcaactattgt

SEQ ID NO: 535283 - DNA, 19 bp, Mus musculus
  siRNA target sequence for Fnbp3 (NM_018785.1,532-550).
gctgagcaactattgtcta

SEQ ID NO: 535284 - DNA, 19 bp, Mus musculus
  siRNA target sequence for Fnbp3 (NM_018785.1,533-551).
ctgagcaactattgtctaa

SEQ ID NO: 535285 - DNA, 19 bp, Mus musculus
  siRNA target sequence for Fnbp3 (NM_018785.1,546-564).
gtctaaatgcccatggaaa

SEQ ID NO: 535286 - DNA, 19 bp, Mus musculus
  siRNA target sequence for Fnbp3 (NM_018785.1,577-595).
gattccgggaagccttatt

SEQ ID NO: 535287 - DNA, 19 bp, Mus musculus
  siRNA target sequence for Fnbp3 (NM_018785.1,585-603).
gaagccttattactataat

SEQ ID NO: 535288 - DNA, 19 bp, Mus musculus
  siRNA target sequence for Fnbp3 (NM_018785.1,588-606).
gccttattactataattct

SEQ ID NO: 535289 - DNA, 19 bp, Mus musculus
  siRNA target sequence for Fnbp3 (NM_018785.1,620-638).
cccgctgggccaaacctaa

SEQ ID NO: 535290 - DNA, 19 bp, Mus musculus
  siRNA target sequence for Fnbp3 (NM_018785.1,652-670).
cttgaaggataccagaata

SEQ ID NO: 535291 - DNA, 19 bp, Mus musculus
  siRNA target sequence for Fnbp3 (NM_018785.1,676-694).
gttgctggaggtcttatta

SEQ ID NO: 535292 - DNA, 19 bp, Mus musculus
  siRNA target sequence for Fnbp3 (NM_018785.1,741-759).
gcaagaagaatgtactaca

SEQ ID NO: 535293 - DNA, 19 bp, Mus musculus
  siRNA target sequence for Fnbp3 (NM_018785.1,868-886).
gcagctaatgccaatactt

SEQ ID NO: 535294 - DNA, 19 bp, Mus musculus
  siRNA target sequence for Fnbp3 (NM_018785.1,884-902).
cttccaccacacctactaa

SEQ ID NO: 535295 - DNA, 19 bp, Mus musculus
  siRNA target sequence for Fnbp3 (NM_018785.1,928-946).
cctgaacctgaggttactt

SEQ ID NO: 535296 - DNA, 19 bp, Mus musculus
  siRNA target sequence for Fnbp3 (NM_018785.1,956-974).
ctactgctgtagataatga

SEQ ID NO: 535297 - DNA, 19 bp, Mus musculus
  siRNA target sequence for Fnbp3 (NM_018785.1,1022-1040).
ccacagctattcaagatct

SEQ ID NO: 535298 - DNA, 19 bp, Mus musculus
  siRNA target sequence for Fnbp3 (NM_018785.1,1036-1054).
gatctcagtggtgatatat

SEQ ID NO: 535299 - DNA, 19 bp, Mus musculus
  siRNA target sequence for Fnbp3 (NM_018785.1,1039-1057).
ctcagtggtgatatatcca

SEQ ID NO: 535300 - DNA, 19 bp, Mus musculus
  siRNA target sequence for Fnbp3 (NM_018785.1,1045-1063).
ggtgatatatccagtaaca

SEQ ID NO: 535301 - DNA, 19 bp, Mus musculus
  siRNA target sequence for Fnbp3 (NM_018785.1,1095-1113).
ctccgattttactcctaaa

SEQ ID NO: 535302 - DNA, 19 bp, Mus musculus
  siRNA target sequence for Fnbp3 (NM_018785.1,1097-1115).
ccgattttactcctaaaaa

SEQ ID NO: 535303 - DNA, 19 bp, Mus musculus
  siRNA target sequence for Fnbp3 (NM_018785.1,1171-1189).
gaggcaaagcaagcattta

SEQ ID NO: 535304 - DNA, 19 bp, Mus musculus
  siRNA target sequence for Fnbp3 (NM_018785.1,1183-1201).
gcatttaaagaattattga

SEQ ID NO: 535305 - DNA, 19 bp, Mus musculus
  siRNA target sequence for Fnbp3 (NM_018785.1,1210-1228).
cgggtgccctccaatgctt

SEQ ID NO: 535306 - DNA, 19 bp, Mus musculus
  siRNA target sequence for Fnbp3 (NM_018785.1,1237-1255).
caggctatgaaaatgatca

SEQ ID NO: 535307 - DNA, 19 bp, Mus musculus
  siRNA target sequence for Fnbp3 (NM_018785.1,1239-1257).
ggctatgaaaatgatcata

SEQ ID NO: 535308 - DNA, 19 bp, Mus musculus
  siRNA target sequence for Fnbp3 (NM_018785.1,1267-1285).
cggtacagtgctttagcaa

SEQ ID NO: 535309 - DNA, 19 bp, Mus musculus
  siRNA target sequence for Fnbp3 (NM_018785.1,1268-1286).
ggtacagtgctttagcaaa

SEQ ID NO: 535310 - DNA, 19 bp, Mus musculus
  siRNA target sequence for Fnbp3 (NM_018785.1,1385-1403).
cttttcagcgttttcttga

SEQ ID NO: 535311 - DNA, 19 bp, Mus musculus
  siRNA target sequence for Fnbp3 (NM_018785.1,1421-1439).
cttccacaaccagatacaa

SEQ ID NO: 535312 - DNA, 19 bp, Mus musculus
  siRNA target sequence for Fnbp3 (NM_018785.1,1461-1479).
ggagatggaagtttggaat

SEQ ID NO: 535313 - DNA, 19 bp, Mus musculus
  siRNA target sequence for Fnbp3 (NM_018785.1,1489-1507).
gagcgtgatcgtctagaaa

SEQ ID NO: 535314 - DNA, 19 bp, Mus musculus
  siRNA target sequence for Fnbp3 (NM_018785.1,1492-1510).
cgtgatcgtctagaaatct

SEQ ID NO: 535315 - DNA, 19 bp, Mus musculus
  siRNA target sequence for Fnbp3 (NM_018785.1,1493-1511).
gtgatcgtctagaaatcta

SEQ ID NO: 535316 - DNA, 19 bp, Mus musculus
  siRNA target sequence for Fnbp3 (NM_018785.1,1560-1578).
gcagctacgaaagagaaat

SEQ ID NO: 535317 - DNA, 19 bp, Mus musculus
  siRNA target sequence for Fnbp3 (NM_018785.1,1603-1621).
gacaatatggctaacgtta

SEQ ID NO: 535318 - DNA, 19 bp, Mus musculus
  siRNA target sequence for Fnbp3 (NM_018785.1,1611-1629).
ggctaacgttacatactct

SEQ ID NO: 535319 - DNA, 19 bp, Mus musculus
  siRNA target sequence for Fnbp3 (NM_018785.1,1612-1630).
gctaacgttacatactcta

SEQ ID NO: 535320 - DNA, 19 bp, Mus musculus
  siRNA target sequence for Fnbp3 (NM_018785.1,1642-1660).
gaagcccagcagtatctga

SEQ ID NO: 535321 - DNA, 19 bp, Mus musculus
  siRNA target sequence for Fnbp3 (NM_018785.1,1650-1668).
gcagtatctgatggataat

SEQ ID NO: 535322 - DNA, 19 bp, Mus musculus
  siRNA target sequence for Fnbp3 (NM_018785.1,1711-1729).
gaagatgcattaatatgct

SEQ ID NO: 535323 - DNA, 19 bp, Mus musculus
  siRNA target sequence for Fnbp3 (NM_018785.1,1738-1756).
cacatccgggctttagaaa

SEQ ID NO: 535324 - DNA, 19 bp, Mus musculus
  siRNA target sequence for Fnbp3 (NM_018785.1,1799-1817).
ggaggaggcagcgtaaaaa

SEQ ID NO: 535325 - DNA, 19 bp, Mus musculus
  siRNA target sequence for Fnbp3 (NM_018785.1,1800-1818).
gaggaggcagcgtaaaaat

SEQ ID NO: 535326 - DNA, 19 bp, Mus musculus
  siRNA target sequence for Fnbp3 (NM_018785.1,1810-1828).
cgtaaaaatagggaatctt

SEQ ID NO: 535327 - DNA, 19 bp, Mus musculus
  siRNA target sequence for Fnbp3 (NM_018785.1,1913-1931).
ctgacattcgcttcactaa

SEQ ID NO: 535328 - DNA, 19 bp, Mus musculus
  siRNA target sequence for Fnbp3 (NM_018785.1,1915-1933).
gacattcgcttcactaaca

SEQ ID NO: 535329 - DNA, 19 bp, Mus musculus
  siRNA target sequence for Fnbp3 (NM_018785.1,1947-1965).
gggatcaactgcacttgat

SEQ ID NO: 535330 - DNA, 19 bp, Mus musculus
  siRNA target sequence for Fnbp3 (NM_018785.1,1955-1973).
ctgcacttgatcttttcaa

SEQ ID NO: 535331 - DNA, 19 bp, Mus musculus
  siRNA target sequence for Fnbp3 (NM_018785.1,1957-1975).
gcacttgatcttttcaagt

SEQ ID NO: 535332 - DNA, 19 bp, Mus musculus
  siRNA target sequence for Fnbp3 (NM_018785.1,1958-1976).
cacttgatcttttcaagtt

SEQ ID NO: 535333 - DNA, 19 bp, Mus musculus
  siRNA target sequence for Fnbp3 (NM_018785.1,1996-2014).
gcacgatatcatgatgaaa

SEQ ID NO: 535334 - DNA, 19 bp, Mus musculus
  siRNA target sequence for Fnbp3 (NM_018785.1,1997-2015).
cacgatatcatgatgaaaa

SEQ ID NO: 535335 - DNA, 19 bp, Mus musculus
  siRNA target sequence for Fnbp3 (NM_018785.1,2077-2095).
gaagattttgtggcaataa

SEQ ID NO: 535336 - DNA, 19 bp, Mus musculus
  siRNA target sequence for Fnbp3 (NM_018785.1,2145-2163).
ggctttcaatagtttacta

SEQ ID NO: 535337 - DNA, 19 bp, Mus musculus
  siRNA target sequence for Fnbp3 (NM_018785.1,2231-2249).
ctgcctttaagagtatgtt

SEQ ID NO: 535338 - DNA, 19 bp, Mus musculus
  siRNA target sequence for Fnbp3 (NM_018785.1,2233-2251).
gcctttaagagtatgttga

SEQ ID NO: 535339 - DNA, 19 bp, Mus musculus
  siRNA target sequence for Fnbp3 (NM_018785.1,2235-2253).
ctttaagagtatgttgaaa

SEQ ID NO: 535340 - DNA, 19 bp, Mus musculus
  siRNA target sequence for Fnbp3 (NM_018785.1,2278-2296).
gatgctgtctgggaagata

SEQ ID NO: 535341 - DNA, 19 bp, Mus musculus
  siRNA target sequence for Fnbp3 (NM_018785.1,2290-2308).
gaagatatccgggaaagat

SEQ ID NO: 535342 - DNA, 19 bp, Mus musculus
  siRNA target sequence for Fnbp3 (NM_018785.1,2320-2338).
ccagcgtttgaggatataa

SEQ ID NO: 535343 - DNA, 19 bp, Mus musculus
  siRNA target sequence for Fnbp3 (NM_018785.1,2324-2342).
cgtttgaggatataactct

SEQ ID NO: 535344 - DNA, 19 bp, Mus musculus
  siRNA target sequence for Fnbp3 (NM_018785.1,2441-2459).
ctaaaaagcaccataggaa

SEQ ID NO: 535345 - DNA, 19 bp, Mus musculus
  siRNA target sequence for Fnbp3 (NM_018785.1,2478-2496).
gggatcagagtcagatgat

SEQ ID NO: 535346 - DNA, 19 bp, Mus musculus
  siRNA target sequence for Fnbp3 (NM_018785.1,2497-2515).
gacgacagccattcaaaga

SEQ ID NO: 535347 - DNA, 19 bp, Mus musculus
  siRNA target sequence for Fnbp3 (NM_018785.1,2524-2542).
cagcgatcagagtctcatt

SEQ ID NO: 535348 - DNA, 19 bp, Mus musculus
  siRNA target sequence for Fnbp3 (NM_018785.1,2526-2544).
gcgatcagagtctcattct

SEQ ID NO: 535349 - DNA, 19 bp, Mus musculus
  siRNA target sequence for Fnbp3 (NM_018785.1,2642-2660).
ctccagaatcagatactga

SEQ ID NO: 535350 - DNA, 19 bp, Mus musculus
  siRNA target sequence for Fnbp3 (NM_018785.1,2689-2707).
cgggacagtgaaaaagaca

SEQ ID NO: 535351 - DNA, 19 bp, Mus musculus
  siRNA target sequence for Fnbp3 (NM_018785.1,2822-2840).
gcagaagaacccttttgga

SEQ ID NO: 535352 - DNA, 19 bp, Mus musculus
  siRNA target sequence for Fnbp4 (NM_018828.1,134-152).
cggtgccacggttcatgaa

SEQ ID NO: 535353 - DNA, 19 bp, Mus musculus
  siRNA target sequence for Fnbp4 (NM_018828.1,135-153).
ggtgccacggttcatgaat

SEQ ID NO: 535354 - DNA, 19 bp, Mus musculus
  siRNA target sequence for Fnbp4 (NM_018828.1,136-154).
gtgccacggttcatgaata

SEQ ID NO: 535355 - DNA, 19 bp, Mus musculus
  siRNA target sequence for Fnbp4 (NM_018828.1,138-156).
gccacggttcatgaatatt

SEQ ID NO: 535356 - DNA, 19 bp, Mus musculus
  siRNA target sequence for Fnbp4 (NM_018828.1,140-158).
cacggttcatgaatattga

SEQ ID NO: 535357 - DNA, 19 bp, Mus musculus
  siRNA target sequence for Fnbp4 (NM_018828.1,441-459).
ggactcgccttcagaagat

SEQ ID NO: 535358 - DNA, 19 bp, Mus musculus
  siRNA target sequence for Fnbp4 (NM_018828.1,561-579).
cttacttggtgcttatgct

SEQ ID NO: 535359 - DNA, 19 bp, Mus musculus
  siRNA target sequence for Fnbp4 (NM_018828.1,687-705).
ggagatagacgccataaca

SEQ ID NO: 535360 - DNA, 19 bp, Mus musculus
  siRNA target sequence for Fnbp4 (NM_018828.1,755-773).
cacctcgaccagaaccaaa

SEQ ID NO: 535361 - DNA, 19 bp, Mus musculus
  siRNA target sequence for Fnbp4 (NM_018828.1,758-776).
ctcgaccagaaccaaaaga

SEQ ID NO: 535362 - DNA, 19 bp, Mus musculus
  siRNA target sequence for Fnbp4 (NM_018828.1,799-817).
cccaccgcatcaaatggat

SEQ ID NO: 535363 - DNA, 19 bp, Mus musculus
  siRNA target sequence for Fnbp4 (NM_018828.1,831-849).
gacgccagggtggcattat

SEQ ID NO: 535364 - DNA, 19 bp, Mus musculus
  siRNA target sequence for Fnbp4 (NM_018828.1,833-851).
cgccagggtggcattatga

SEQ ID NO: 535365 - DNA, 19 bp, Mus musculus
  siRNA target sequence for Fnbp4 (NM_018828.1,835-853).
ccagggtggcattatgaca

SEQ ID NO: 535366 - DNA, 19 bp, Mus musculus
  siRNA target sequence for Fnbp4 (NM_018828.1,913-931).
gagaacacaggttgctatt

SEQ ID NO: 535367 - DNA, 19 bp, Mus musculus
  siRNA target sequence for Fnbp4 (NM_018828.1,918-936).
cacaggttgctattattat

SEQ ID NO: 535368 - DNA, 19 bp, Mus musculus
  siRNA target sequence for Fnbp4 (NM_018828.1,965-983).
gggagttaccccaatacct

SEQ ID NO: 535369 - DNA, 19 bp, Mus musculus
  siRNA target sequence for Fnbp4 (NM_018828.1,989-1007).
cacaggttcagggattaca

SEQ ID NO: 535370 - DNA, 19 bp, Mus musculus
  siRNA target sequence for Fnbp4 (NM_018828.1,1041-1059).
ggctgcttttgtggtaaat

SEQ ID NO: 535371 - DNA, 19 bp, Mus musculus
  siRNA target sequence for Fnbp4 (NM_018828.1,1119-1137).
catcaccaaacgagaagtt

SEQ ID NO: 535372 - DNA, 19 bp, Mus musculus
  siRNA target sequence for Fnbp4 (NM_018828.1,1293-1311).
ggtgtcagagactaaggaa

SEQ ID NO: 535373 - DNA, 19 bp, Mus musculus
  siRNA target sequence for Fnbp4 (NM_018828.1,1401-1419).
ctgcagtgtcgttcaatct

SEQ ID NO: 535374 - DNA, 19 bp, Mus musculus
  siRNA target sequence for Fnbp4 (NM_018828.1,1410-1428).
cgttcaatctggagaaagt

SEQ ID NO: 535375 - DNA, 19 bp, Mus musculus
  siRNA target sequence for Fnbp4 (NM_018828.1,1579-1597).
gacggagtgcgtaggatta

SEQ ID NO: 535376 - DNA, 19 bp, Mus musculus
  siRNA target sequence for Fnbp4 (NM_018828.1,1585-1603).
gtgcgtaggattatgtcta

SEQ ID NO: 535377 - DNA, 19 bp, Mus musculus
  siRNA target sequence for Fnbp4 (NM_018828.1,1587-1605).
gcgtaggattatgtctaaa

SEQ ID NO: 535378 - DNA, 19 bp, Mus musculus
  siRNA target sequence for Fnbp4 (NM_018828.1,1588-1606).
cgtaggattatgtctaaaa

SEQ ID NO: 535379 - DNA, 19 bp, Mus musculus
  siRNA target sequence for Fnbp4 (NM_018828.1,1656-1674).
ccgaagttctagtaaaact

SEQ ID NO: 535380 - DNA, 19 bp, Mus musculus
  siRNA target sequence for Fnbp4 (NM_018828.1,1676-1694).
gacgagattctccagaaaa

SEQ ID NO: 535381 - DNA, 19 bp, Mus musculus
  siRNA target sequence for Fnbp4 (NM_018828.1,1705-1723).
gcaattggtgctgaagatt

SEQ ID NO: 535382 - DNA, 19 bp, Mus musculus
  siRNA target sequence for Fnbp4 (NM_018828.1,1749-1767).
caaagaaacggaagtagaa

SEQ ID NO: 535383 - DNA, 19 bp, Mus musculus
  siRNA target sequence for Fnbp4 (NM_018828.1,1770-1788).
gtcttctgagaagatcaaa

SEQ ID NO: 535384 - DNA, 19 bp, Mus musculus
  siRNA target sequence for Fnbp4 (NM_018828.1,1821-1839).
ggacctgaaatttcagatt

SEQ ID NO: 535385 - DNA, 19 bp, Mus musculus
  siRNA target sequence for Fnbp4 (NM_018828.1,1849-1867).
gcaaataccctgacaagta

SEQ ID NO: 535386 - DNA, 19 bp, Mus musculus
  siRNA target sequence for Fnbp4 (NM_018828.1,1850-1868).
caaataccctgacaagtaa

SEQ ID NO: 535387 - DNA, 19 bp, Mus musculus
  siRNA target sequence for Fnbp4 (NM_018828.1,1856-1874).
ccctgacaagtaaatttga

SEQ ID NO: 535388 - DNA, 19 bp, Mus musculus
  siRNA target sequence for Fnbp4 (NM_018828.1,1857-1875).
cctgacaagtaaatttgaa

SEQ ID NO: 535389 - DNA, 19 bp, Mus musculus
  siRNA target sequence for Fnbp4 (NM_018828.1,1858-1876).
ctgacaagtaaatttgaat

SEQ ID NO: 535390 - DNA, 19 bp, Mus musculus
  siRNA target sequence for Fnbp4 (NM_018828.1,1873-1891).
gaattcctagggattaata

SEQ ID NO: 535391 - DNA, 19 bp, Mus musculus
  siRNA target sequence for Fnbp4 (NM_018828.1,1898-1916).
ccatctccaactttcacat

SEQ ID NO: 535392 - DNA, 19 bp, Mus musculus
  siRNA target sequence for Fnbp4 (NM_018828.1,1929-1947).
gactgagactcgaattgca

SEQ ID NO: 535393 - DNA, 19 bp, Mus musculus
  siRNA target sequence for Fnbp4 (NM_018828.1,1966-1984).
ctcaatggaaattacctaa

SEQ ID NO: 535394 - DNA, 19 bp, Mus musculus
  siRNA target sequence for Fnbp4 (NM_018828.1,2059-2077).
cactgggacagggatcata

SEQ ID NO: 535395 - DNA, 19 bp, Mus musculus
  siRNA target sequence for Fnbp4 (NM_018828.1,2067-2085).
cagggatcatagacgatat

SEQ ID NO: 535396 - DNA, 19 bp, Mus musculus
  siRNA target sequence for Fnbp4 (NM_018828.1,2069-2087).
gggatcatagacgatattt

SEQ ID NO: 535397 - DNA, 19 bp, Mus musculus
  siRNA target sequence for Fnbp4 (NM_018828.1,2101-2119).
cagtcgggcgagtctcaat

SEQ ID NO: 535398 - DNA, 19 bp, Mus musculus
  siRNA target sequence for Fnbp4 (NM_018828.1,2154-2172).
ccaaacaaaggaagttaga

SEQ ID NO: 535399 - DNA, 19 bp, Mus musculus
  siRNA target sequence for Fnbp4 (NM_018828.1,2191-2209).
ctgaccgtgaaggacaaaa

SEQ ID NO: 535400 - DNA, 19 bp, Mus musculus
  siRNA target sequence for Fnbp4 (NM_018828.1,2244-2262).
gaacccgacaggttctctt

SEQ ID NO: 535401 - DNA, 19 bp, Mus musculus
  siRNA target sequence for Fnbp4 (NM_018828.1,2248-2266).
ccgacaggttctctttgta

SEQ ID NO: 535402 - DNA, 19 bp, Mus musculus
  siRNA target sequence for Fnbp4 (NM_018828.1,2250-2268).
gacaggttctctttgtaaa

SEQ ID NO: 535403 - DNA, 19 bp, Mus musculus
  siRNA target sequence for Fnbp4 (NM_018828.1,2258-2276).
ctctttgtaaagaatcatt

SEQ ID NO: 535404 - DNA, 19 bp, Mus musculus
  siRNA target sequence for Fnbp4 (NM_018828.1,2321-2339).
ggaccctcctccaatcaaa

SEQ ID NO: 535405 - DNA, 19 bp, Mus musculus
  siRNA target sequence for Fnbp4 (NM_018828.1,2322-2340).
gaccctcctccaatcaaat

SEQ ID NO: 535406 - DNA, 19 bp, Mus musculus
  siRNA target sequence for Fnbp4 (NM_018828.1,2349-2367).
gcttcaacctccattacct

SEQ ID NO: 535407 - DNA, 19 bp, Mus musculus
  siRNA target sequence for Fnbp4 (NM_018828.1,2432-2450).
ctccacccccaccattaga

SEQ ID NO: 535408 - DNA, 19 bp, Mus musculus
  siRNA target sequence for Fnbp4 (NM_018828.1,2564-2582).
ccagccagagtctagttga

SEQ ID NO: 535409 - DNA, 19 bp, Mus musculus
  siRNA target sequence for Fnbp4 (NM_018828.1,2565-2583).
cagccagagtctagttgat

SEQ ID NO: 535410 - DNA, 19 bp, Mus musculus
  siRNA target sequence for Fnbp4 (NM_018828.1,2568-2586).
ccagagtctagttgattct

SEQ ID NO: 535411 - DNA, 19 bp, Mus musculus
  siRNA target sequence for Fnbp4 (NM_018828.1,2571-2589).
gagtctagttgattctact

SEQ ID NO: 535412 - DNA, 19 bp, Mus musculus
  siRNA target sequence for Fnbp4 (NM_018828.1,2594-2612).
ctagtcctccatccaataa

SEQ ID NO: 535413 - DNA, 19 bp, Mus musculus
  siRNA target sequence for Fnbp4 (NM_018828.1,2658-2676).
gagatcagccactattggt

SEQ ID NO: 535414 - DNA, 19 bp, Mus musculus
  siRNA target sequence for Fnbp4 (NM_018828.1,2757-2775).
ggcacaccaagcagtatct

SEQ ID NO: 535415 - DNA, 19 bp, Mus musculus
  siRNA target sequence for Fnbp4 (NM_018828.1,2871-2889).
gagttatgctgaatgttct

SEQ ID NO: 535416 - DNA, 19 bp, Mus musculus
  siRNA target sequence for Fnbp4 (NM_018828.1,3122-3140).
gtatccagcgggagttaga

SEQ ID NO: 535417 - DNA, 19 bp, Mus musculus
  siRNA target sequence for Fnbp4 (NM_018828.1,3129-3147).
gcgggagttagatgaagaa

SEQ ID NO: 535418 - DNA, 19 bp, Mus musculus
  siRNA target sequence for Fnbp4 (NM_018828.1,3195-3213).
gcggattgaggaatggaaa

SEQ ID NO: 535419 - DNA, 19 bp, Mus musculus
  siRNA target sequence for G2an (NM_008060.1,44-62).
gaggcggtcttggttaagt

SEQ ID NO: 535420 - DNA, 19 bp, Mus musculus
  siRNA target sequence for G2an (NM_008060.1,46-64).
ggcggtcttggttaagttt

SEQ ID NO: 535421 - DNA, 19 bp, Mus musculus
  siRNA target sequence for G2an (NM_008060.1,61-79).
gtttggtgctggcatactt

SEQ ID NO: 535422 - DNA, 19 bp, Mus musculus
  siRNA target sequence for G2an (NM_008060.1,83-101).
ggtctgtctggggattaca

SEQ ID NO: 535423 - DNA, 19 bp, Mus musculus
  siRNA target sequence for G2an (NM_008060.1,86-104).
ctgtctggggattacactt

SEQ ID NO: 535424 - DNA, 19 bp, Mus musculus
  siRNA target sequence for G2an (NM_008060.1,108-126).
gtggatagaagcaacttta

SEQ ID NO: 535425 - DNA, 19 bp, Mus musculus
  siRNA target sequence for G2an (NM_008060.1,152-170).
caaacggcagcgaagcatt

SEQ ID NO: 535426 - DNA, 19 bp, Mus musculus
  siRNA target sequence for G2an (NM_008060.1,229-247).
ctcttacagtccatctgat

SEQ ID NO: 535427 - DNA, 19 bp, Mus musculus
  siRNA target sequence for G2an (NM_008060.1,352-370).
gagtgccagatgttttagt

SEQ ID NO: 535428 - DNA, 19 bp, Mus musculus
  siRNA target sequence for G2an (NM_008060.1,382-400).
ccacagctaggctttcagt

SEQ ID NO: 535429 - DNA, 19 bp, Mus musculus
  siRNA target sequence for G2an (NM_008060.1,439-457).
ctgagggaccctacaaaat

SEQ ID NO: 535430 - DNA, 19 bp, Mus musculus
  siRNA target sequence for G2an (NM_008060.1,441-459).
gagggaccctacaaaatca

SEQ ID NO: 535431 - DNA, 19 bp, Mus musculus
  siRNA target sequence for G2an (NM_008060.1,445-463).
gaccctacaaaatcatttt

SEQ ID NO: 535432 - DNA, 19 bp, Mus musculus
  siRNA target sequence for G2an (NM_008060.1,506-524).
cctcctgctcagtgtcaat

SEQ ID NO: 535433 - DNA, 19 bp, Mus musculus
  siRNA target sequence for G2an (NM_008060.1,566-584).
ggtccctttctcggataaa

SEQ ID NO: 535434 - DNA, 19 bp, Mus musculus
  siRNA target sequence for G2an (NM_008060.1,569-587).
ccctttctcggataaagtt

SEQ ID NO: 535435 - DNA, 19 bp, Mus musculus
  siRNA target sequence for G2an (NM_008060.1,570-588).
cctttctcggataaagtta

SEQ ID NO: 535436 - DNA, 19 bp, Mus musculus
  siRNA target sequence for G2an (NM_008060.1,600-618).
ggtagcgtgtgggataaga

SEQ ID NO: 535437 - DNA, 19 bp, Mus musculus
  siRNA target sequence for G2an (NM_008060.1,601-619).
gtagcgtgtgggataagat

SEQ ID NO: 535438 - DNA, 19 bp, Mus musculus
  siRNA target sequence for G2an (NM_008060.1,604-622).
gcgtgtgggataagatcaa

SEQ ID NO: 535439 - DNA, 19 bp, Mus musculus
  siRNA target sequence for G2an (NM_008060.1,612-630).
gataagatcaagaaccttt

SEQ ID NO: 535440 - DNA, 19 bp, Mus musculus
  siRNA target sequence for G2an (NM_008060.1,617-635).
gatcaagaaccttttctct

SEQ ID NO: 535441 - DNA, 19 bp, Mus musculus
  siRNA target sequence for G2an (NM_008060.1,632-650).
ctctaggcaagaatcaaaa

SEQ ID NO: 535442 - DNA, 19 bp, Mus musculus
  siRNA target sequence for G2an (NM_008060.1,752-770).
ctgggaggagacattcaaa

SEQ ID NO: 535443 - DNA, 19 bp, Mus musculus
  siRNA target sequence for G2an (NM_008060.1,796-814).
gccccacgtctgtaggttt

SEQ ID NO: 535444 - DNA, 19 bp, Mus musculus
  siRNA target sequence for G2an (NM_008060.1,902-920).
gccgtaccgcctgtacaat

SEQ ID NO: 535445 - DNA, 19 bp, Mus musculus
  siRNA target sequence for G2an (NM_008060.1,903-921).
ccgtaccgcctgtacaatt

SEQ ID NO: 535446 - DNA, 19 bp, Mus musculus
  siRNA target sequence for G2an (NM_008060.1,904-922).
cgtaccgcctgtacaattt

SEQ ID NO: 535447 - DNA, 19 bp, Mus musculus
  siRNA target sequence for G2an (NM_008060.1,947-965).
caaccccatggctctatat

SEQ ID NO: 535448 - DNA, 19 bp, Mus musculus
  siRNA target sequence for G2an (NM_008060.1,1122-1140).
ccacagacagacattcgtt

SEQ ID NO: 535449 - DNA, 19 bp, Mus musculus
  siRNA target sequence for G2an (NM_008060.1,1151-1169).
gagtggcattattgatgtt

SEQ ID NO: 535450 - DNA, 19 bp, Mus musculus
  siRNA target sequence for G2an (NM_008060.1,1183-1201).
gcccttcggtttttgatgt

SEQ ID NO: 535451 - DNA, 19 bp, Mus musculus
  siRNA target sequence for G2an (NM_008060.1,1200-1218).
gtctttaggcagtatgcta

SEQ ID NO: 535452 - DNA, 19 bp, Mus musculus
  siRNA target sequence for G2an (NM_008060.1,1287-1305).
cgggatgaggctgatgttt

SEQ ID NO: 535453 - DNA, 19 bp, Mus musculus
  siRNA target sequence for G2an (NM_008060.1,1288-1306).
gggatgaggctgatgtttt

SEQ ID NO: 535454 - DNA, 19 bp, Mus musculus
  siRNA target sequence for G2an (NM_008060.1,1337-1355).
catgccttgtgatgtcatt

SEQ ID NO: 535455 - DNA, 19 bp, Mus musculus
  siRNA target sequence for G2an (NM_008060.1,1341-1359).
ccttgtgatgtcatttggt

SEQ ID NO: 535456 - DNA, 19 bp, Mus musculus
  siRNA target sequence for G2an (NM_008060.1,1352-1370).
catttggttggacattgaa

SEQ ID NO: 535457 - DNA, 19 bp, Mus musculus
  siRNA target sequence for G2an (NM_008060.1,1417-1435).
ctcagcccctcaatatgct

SEQ ID NO: 535458 - DNA, 19 bp, Mus musculus
  siRNA target sequence for G2an (NM_008060.1,1517-1535).
cgaagaattgcgaaaccat

SEQ ID NO: 535459 - DNA, 19 bp, Mus musculus
  siRNA target sequence for G2an (NM_008060.1,1528-1546).
gaaaccatgggctgtatgt

SEQ ID NO: 535460 - DNA, 19 bp, Mus musculus
  siRNA target sequence for G2an (NM_008060.1,1533-1551).
catgggctgtatgttaaaa

SEQ ID NO: 535461 - DNA, 19 bp, Mus musculus
  siRNA target sequence for G2an (NM_008060.1,1585-1603).
ggccaggctcagctagtta

SEQ ID NO: 535462 - DNA, 19 bp, Mus musculus
  siRNA target sequence for G2an (NM_008060.1,1633-1651).
cctggtggtctaacatgtt

SEQ ID NO: 535463 - DNA, 19 bp, Mus musculus
  siRNA target sequence for G2an (NM_008060.1,1670-1688).
gggttcagctcctaatctt

SEQ ID NO: 535464 - DNA, 19 bp, Mus musculus
  siRNA target sequence for G2an (NM_008060.1,1681-1699).
ctaatctttatgtttggaa

SEQ ID NO: 535465 - DNA, 19 bp, Mus musculus
  siRNA target sequence for G2an (NM_008060.1,1751-1769).
ggatgctgtgcattatgga

SEQ ID NO: 535466 - DNA, 19 bp, Mus musculus
  siRNA target sequence for G2an (NM_008060.1,1779-1797).
caccgggacatccataaca

SEQ ID NO: 535467 - DNA, 19 bp, Mus musculus
  siRNA target sequence for G2an (NM_008060.1,1783-1801).
gggacatccataacatcta

SEQ ID NO: 535468 - DNA, 19 bp, Mus musculus
  siRNA target sequence for G2an (NM_008060.1,1784-1802).
ggacatccataacatctat

SEQ ID NO: 535469 - DNA, 19 bp, Mus musculus
  siRNA target sequence for G2an (NM_008060.1,1938-1956).
gccgaatgggatcatttga

SEQ ID NO: 535470 - DNA, 19 bp, Mus musculus
  siRNA target sequence for G2an (NM_008060.1,1947-1965).
gatcatttgaagatctcta

SEQ ID NO: 535471 - DNA, 19 bp, Mus musculus
  siRNA target sequence for G2an (NM_008060.1,1987-2005).
cactggtggggctttcctt

SEQ ID NO: 535472 - DNA, 19 bp, Mus musculus
  siRNA target sequence for G2an (NM_008060.1,2137-2155).
ggctgttagcgtctcaata

SEQ ID NO: 535473 - DNA, 19 bp, Mus musculus
  siRNA target sequence for G2an (NM_008060.1,2175-2193).
gccttgttccagcgatatt

SEQ ID NO: 535474 - DNA, 19 bp, Mus musculus
  siRNA target sequence for G2an (NM_008060.1,2207-2225).
ctggtataccctcttctat

SEQ ID NO: 535475 - DNA, 19 bp, Mus musculus
  siRNA target sequence for G2an (NM_008060.1,2209-2227).
ggtataccctcttctatca

SEQ ID NO: 535476 - DNA, 19 bp, Mus musculus
  siRNA target sequence for G2an (NM_008060.1,2257-2275).
ggcccctctgggtacagta

SEQ ID NO: 535477 - DNA, 19 bp, Mus musculus
  siRNA target sequence for G2an (NM_008060.1,2258-2276).
gcccctctgggtacagtat

SEQ ID NO: 535478 - DNA, 19 bp, Mus musculus
  siRNA target sequence for G2an (NM_008060.1,2271-2289).
cagtatcctgaggatatgt

SEQ ID NO: 535479 - DNA, 19 bp, Mus musculus
  siRNA target sequence for G2an (NM_008060.1,2273-2291).
gtatcctgaggatatgtct

SEQ ID NO: 535480 - DNA, 19 bp, Mus musculus
  siRNA target sequence for G2an (NM_008060.1,2299-2317).
gtatagaggatcagttcat

SEQ ID NO: 535481 - DNA, 19 bp, Mus musculus
  siRNA target sequence for G2an (NM_008060.1,2323-2341).
gtgatgcactccttattca

SEQ ID NO: 535482 - DNA, 19 bp, Mus musculus
  siRNA target sequence for G2an (NM_008060.1,2364-2382).
cacggagtgcaggtctatt

SEQ ID NO: 535483 - DNA, 19 bp, Mus musculus
  siRNA target sequence for G2an (NM_008060.1,2542-2560).
gtatgaaggacgatcctat

SEQ ID NO: 535484 - DNA, 19 bp, Mus musculus
  siRNA target sequence for G2an (NM_008060.1,2546-2564).
gaaggacgatcctatcact

SEQ ID NO: 535485 - DNA, 19 bp, Mus musculus
  siRNA target sequence for G2an (NM_008060.1,2552-2570).
cgatcctatcactctcttt

SEQ ID NO: 535486 - DNA, 19 bp, Mus musculus
  siRNA target sequence for G2an (NM_008060.1,2625-2643).
cacacctttaactatcaga

SEQ ID NO: 535487 - DNA, 19 bp, Mus musculus
  siRNA target sequence for G2an (NM_008060.1,2740-2758).
ggattgagcgagtagtcat

SEQ ID NO: 535488 - DNA, 19 bp, Mus musculus
  siRNA target sequence for G2an (NM_008060.1,2884-2902).
catccgactggagtattca

SEQ ID NO: 535489 - DNA, 19 bp, Mus musculus
  siRNA target sequence for G2an (NM_008060.1,2887-2905).
ccgactggagtattcatct

SEQ ID NO: 535490 - DNA, 19 bp, Mus musculus
  siRNA target sequence for Gab2 (NM_010248.1,638-656).
gtgcacctcaggagtatct

SEQ ID NO: 535491 - DNA, 19 bp, Mus musculus
  siRNA target sequence for Gab2 (NM_010248.1,641-659).
cacctcaggagtatctcta

SEQ ID NO: 535492 - DNA, 19 bp, Mus musculus
  siRNA target sequence for Gab2 (NM_010248.1,723-741).
ccggcagaagagtgataca

SEQ ID NO: 535493 - DNA, 19 bp, Mus musculus
  siRNA target sequence for Gab2 (NM_010248.1,764-782).
gcaatggacactgtatcaa

SEQ ID NO: 535494 - DNA, 19 bp, Mus musculus
  siRNA target sequence for Gab2 (NM_010248.1,830-848).
gccgacacaatacagaatt

SEQ ID NO: 535495 - DNA, 19 bp, Mus musculus
  siRNA target sequence for Gab2 (NM_010248.1,914-932).
cagggtctgagactgataa

SEQ ID NO: 535496 - DNA, 19 bp, Mus musculus
  siRNA target sequence for Gab2 (NM_010248.1,917-935).
ggtctgagactgataacga

SEQ ID NO: 535497 - DNA, 19 bp, Mus musculus
  siRNA target sequence for Gab2 (NM_010248.1,926-944).
ctgataacgaggatgtgta

SEQ ID NO: 535498 - DNA, 19 bp, Mus musculus
  siRNA target sequence for Gab2 (NM_010248.1,993-1011).
ccttgtggacaatatggat

SEQ ID NO: 535499 - DNA, 19 bp, Mus musculus
  siRNA target sequence for Gab2 (NM_010248.1,1035-1053).
ctaccagatccctagaaca

SEQ ID NO: 535500 - DNA, 19 bp, Mus musculus
  siRNA target sequence for Gab2 (NM_010248.1,1137-1155).
gccaagtcaggcagaaaca

SEQ ID NO: 535501 - DNA, 19 bp, Mus musculus
  siRNA target sequence for Gab2 (NM_010248.1,1144-1162).
caggcagaaacatctcaat

SEQ ID NO: 535502 - DNA, 19 bp, Mus musculus
  siRNA target sequence for Gab2 (NM_010248.1,1183-1201).
cctccaatcagcgaaaata

SEQ ID NO: 535503 - DNA, 19 bp, Mus musculus
  siRNA target sequence for Gab2 (NM_010248.1,1186-1204).
ccaatcagcgaaaatagca

SEQ ID NO: 535504 - DNA, 19 bp, Mus musculus
  siRNA target sequence for Gab2 (NM_010248.1,1194-1212).
cgaaaatagcagatctgta

SEQ ID NO: 535505 - DNA, 19 bp, Mus musculus
  siRNA target sequence for Gab2 (NM_010248.1,1205-1223).
gatctgtagctgctactat

SEQ ID NO: 535506 - DNA, 19 bp, Mus musculus
  siRNA target sequence for Gab2 (NM_010248.1,1355-1373).
ctgccgtaggtcgatcaaa

SEQ ID NO: 535507 - DNA, 19 bp, Mus musculus
  siRNA target sequence for Gab2 (NM_010248.1,1357-1375).
gccgtaggtcgatcaaata

SEQ ID NO: 535508 - DNA, 19 bp, Mus musculus
  siRNA target sequence for Gab2 (NM_010248.1,1359-1377).
cgtaggtcgatcaaatagt

SEQ ID NO: 535509 - DNA, 19 bp, Mus musculus
  siRNA target sequence for Gab2 (NM_010248.1,1481-1499).
gcccaggaccccatcactt

SEQ ID NO: 535510 - DNA, 19 bp, Mus musculus
  siRNA target sequence for Gab2 (NM_010248.1,1517-1535).
cgtccacagcccttcctat

SEQ ID NO: 535511 - DNA, 19 bp, Mus musculus
  siRNA target sequence for Gab2 (NM_010248.1,1619-1637).
caccccttgacctgagaaa

SEQ ID NO: 535512 - DNA, 19 bp, Mus musculus
  siRNA target sequence for Gab2 (NM_010248.1,1621-1639).
ccccttgacctgagaaaca

SEQ ID NO: 535513 - DNA, 19 bp, Mus musculus
  siRNA target sequence for Gab2 (NM_010248.1,1791-1809).
gaactatgtccctatgcaa

SEQ ID NO: 535514 - DNA, 19 bp, Mus musculus
  siRNA target sequence for Gab2 (NM_010248.1,1831-1849).
gttcccagtggcactaaca

SEQ ID NO: 535515 - DNA, 19 bp, Mus musculus
  siRNA target sequence for Gab2 (NM_010248.1,1868-1886).
gtactggcagtgtggatta

SEQ ID NO: 535516 - DNA, 19 bp, Mus musculus
  siRNA target sequence for Gab3 (NM_153073.1,171-189).
gcaatcctgatgtcttaga

SEQ ID NO: 535517 - DNA, 19 bp, Mus musculus
  siRNA target sequence for Gab3 (NM_153073.1,172-190).
caatcctgatgtcttagaa

SEQ ID NO: 535518 - DNA, 19 bp, Mus musculus
  siRNA target sequence for Gab3 (NM_153073.1,214-232).
caagcccatccgtgtgata

SEQ ID NO: 535519 - DNA, 19 bp, Mus musculus
  siRNA target sequence for Gab3 (NM_153073.1,272-290).
ggtttcattaggaaggaat

SEQ ID NO: 535520 - DNA, 19 bp, Mus musculus
  siRNA target sequence for Gab3 (NM_153073.1,273-291).
gtttcattaggaaggaatt

SEQ ID NO: 535521 - DNA, 19 bp, Mus musculus
  siRNA target sequence for Gab3 (NM_153073.1,476-494).
cctgccagttcacttcata

SEQ ID NO: 535522 - DNA, 19 bp, Mus musculus
  siRNA target sequence for Gab3 (NM_153073.1,565-583).
cagacgtgagtcagagttt

SEQ ID NO: 535523 - DNA, 19 bp, Mus musculus
  siRNA target sequence for Gab3 (NM_153073.1,567-585).
gacgtgagtcagagtttct

SEQ ID NO: 535524 - DNA, 19 bp, Mus musculus
  siRNA target sequence for Gab3 (NM_153073.1,647-665).
cttcccaccagatgtgata

SEQ ID NO: 535525 - DNA, 19 bp, Mus musculus
  siRNA target sequence for Gab3 (NM_153073.1,662-680).
gatagctggtcaaattcaa

SEQ ID NO: 535526 - DNA, 19 bp, Mus musculus
  siRNA target sequence for Gab3 (NM_153073.1,722-740).
gatggtctacagccattta

SEQ ID NO: 535527 - DNA, 19 bp, Mus musculus
  siRNA target sequence for Gab3 (NM_153073.1,725-743).
ggtctacagccatttatct

SEQ ID NO: 535528 - DNA, 19 bp, Mus musculus
  siRNA target sequence for Gab3 (NM_153073.1,731-749).
cagccatttatctctaata

SEQ ID NO: 535529 - DNA, 19 bp, Mus musculus
  siRNA target sequence for Gab3 (NM_153073.1,734-752).
ccatttatctctaataatt

SEQ ID NO: 535530 - DNA, 19 bp, Mus musculus
  siRNA target sequence for Gab3 (NM_153073.1,774-792).
ggaaagtatctcaggattt

SEQ ID NO: 535531 - DNA, 19 bp, Mus musculus
  siRNA target sequence for Gab3 (NM_153073.1,775-793).
gaaagtatctcaggatttt

SEQ ID NO: 535532 - DNA, 19 bp, Mus musculus
  siRNA target sequence for Gab3 (NM_153073.1,806-824).
ccccaggcttctttaatct

SEQ ID NO: 535533 - DNA, 19 bp, Mus musculus
  siRNA target sequence for Gab3 (NM_153073.1,816-834).
ctttaatctggaatagaga

SEQ ID NO: 535534 - DNA, 19 bp, Mus musculus
  siRNA target sequence for Gab3 (NM_153073.1,889-907).
cttaaaccccacagttcat

SEQ ID NO: 535535 - DNA, 19 bp, Mus musculus
  siRNA target sequence for Gab3 (NM_153073.1,895-913).
ccccacagttcatgtagaa

SEQ ID NO: 535536 - DNA, 19 bp, Mus musculus
  siRNA target sequence for Gab3 (NM_153073.1,897-915).
ccacagttcatgtagaaga

SEQ ID NO: 535537 - DNA, 19 bp, Mus musculus
  siRNA target sequence for Gab3 (NM_153073.1,936-954).
gtggggtaaaagaactaaa

SEQ ID NO: 535538 - DNA, 19 bp, Mus musculus
  siRNA target sequence for Gab3 (NM_153073.1,938-956).
ggggtaaaagaactaaaca

SEQ ID NO: 535539 - DNA, 19 bp, Mus musculus
  siRNA target sequence for Gab3 (NM_153073.1,939-957).
gggtaaaagaactaaacat

SEQ ID NO: 535540 - DNA, 19 bp, Mus musculus
  siRNA target sequence for Gab3 (NM_153073.1,986-1004).
cctaagccaagttatctct

SEQ ID NO: 535541 - DNA, 19 bp, Mus musculus
  siRNA target sequence for Gab3 (NM_153073.1,1051-1069).
caagaagccagggtatact

SEQ ID NO: 535542 - DNA, 19 bp, Mus musculus
  siRNA target sequence for Gab3 (NM_153073.1,1072-1090).
ggtaccaagaagaatctct

SEQ ID NO: 535543 - DNA, 19 bp, Mus musculus
  siRNA target sequence for Gab3 (NM_153073.1,1117-1135).
ctggaaaggtgatgtacaa

SEQ ID NO: 535544 - DNA, 19 bp, Mus musculus
  siRNA target sequence for Gab3 (NM_153073.1,1155-1173).
gagataagcggctcagttt

SEQ ID NO: 535545 - DNA, 19 bp, Mus musculus
  siRNA target sequence for Gab3 (NM_153073.1,1185-1203).
gtaagttttcaccgatata

SEQ ID NO: 535546 - DNA, 19 bp, Mus musculus
  siRNA target sequence for Gab3 (NM_153073.1,1350-1368).
cacccccagtgaacagaaa

SEQ ID NO: 535547 - DNA, 19 bp, Mus musculus
  siRNA target sequence for Gab3 (NM_153073.1,1402-1420).
cttggactcgagaaacctt

SEQ ID NO: 535548 - DNA, 19 bp, Mus musculus
  siRNA target sequence for Gab3 (NM_153073.1,1470-1488).
gcaatcgaaccagttttct

SEQ ID NO: 535549 - DNA, 19 bp, Mus musculus
  siRNA target sequence for Gab3 (NM_153073.1,1681-1699).
ggccctggacttcaattca

SEQ ID NO: 535550 - DNA, 19 bp, Mus musculus
  siRNA target sequence for Gab3 (NM_153073.1,1682-1700).
gccctggacttcaattcaa

SEQ ID NO: 535551 - DNA, 19 bp, Mus musculus
  siRNA target sequence for Gab3 (NM_153073.1,1684-1702).
cctggacttcaattcaaca

SEQ ID NO: 535552 - DNA, 19 bp, Mus musculus
  siRNA target sequence for Gab3 (NM_153073.1,1687-1705).
ggacttcaattcaacatca

SEQ ID NO: 535553 - DNA, 19 bp, Mus musculus
  siRNA target sequence for Gab3 (NM_153073.1,1744-1762).
gcagagagtagactatgtt

SEQ ID NO: 535554 - DNA, 19 bp, Mus musculus
  siRNA target sequence for Gab3 (NM_153073.1,1747-1765).
gagagtagactatgttcaa

SEQ ID NO: 535555 - DNA, 19 bp, Mus musculus
  siRNA target sequence for Gab3 (NM_153073.1,1763-1781).
caagtggatgaacaaaaga

SEQ ID NO: 535556 - DNA, 19 bp, Mus musculus
  siRNA target sequence for Gab3 (NM_181584.2,639-657).
gatgaccgaaacactaata

SEQ ID NO: 535557 - DNA, 19 bp, Mus musculus
  siRNA target sequence for Gab3 (NM_181584.2,644-662).
ccgaaacactaatagtgta

SEQ ID NO: 535558 - DNA, 19 bp, Mus musculus
  siRNA target sequence for Gcl (NM_011818.2,459-477).
gcacatcaaaatacatcta

SEQ ID NO: 535559 - DNA, 19 bp, Mus musculus
  siRNA target sequence for Gcl (NM_011818.2,497-515).
ggtgaaaacagtgacatta

SEQ ID NO: 535560 - DNA, 19 bp, Mus musculus
  siRNA target sequence for Gcl (NM_011818.2,533-551).
gaagagtggagcttacaca

SEQ ID NO: 535561 - DNA, 19 bp, Mus musculus
  siRNA target sequence for Gcl (NM_011818.2,540-558).
ggagcttacacaaaatcta

SEQ ID NO: 535562 - DNA, 19 bp, Mus musculus
  siRNA target sequence for Gcl (NM_011818.2,543-561).
gcttacacaaaatctactt

SEQ ID NO: 535563 - DNA, 19 bp, Mus musculus
  siRNA target sequence for Gcl (NM_011818.2,544-562).
cttacacaaaatctactta

SEQ ID NO: 535564 - DNA, 19 bp, Mus musculus
  siRNA target sequence for Gcl (NM_011818.2,589-607).
gttcagtggttcttggaaa

SEQ ID NO: 535565 - DNA, 19 bp, Mus musculus
  siRNA target sequence for Gcl (NM_011818.2,608-626).
gaatccagcatgaatatta

SEQ ID NO: 535566 - DNA, 19 bp, Mus musculus
  siRNA target sequence for Gcl (NM_011818.2,676-694).
cgcatttggatcactgtat

SEQ ID NO: 535567 - DNA, 19 bp, Mus musculus
  siRNA target sequence for Gcl (NM_011818.2,695-713).
cgagatgacgtcttaataa

SEQ ID NO: 535568 - DNA, 19 bp, Mus musculus
  siRNA target sequence for Gcl (NM_011818.2,696-714).
gagatgacgtcttaataaa

SEQ ID NO: 535569 - DNA, 19 bp, Mus musculus
  siRNA target sequence for Gcl (NM_011818.2,720-738).
gcagggtcgttgccatttt

SEQ ID NO: 535570 - DNA, 19 bp, Mus musculus
  siRNA target sequence for Gcl (NM_011818.2,821-839).
gtgtgtggctattacacat

SEQ ID NO: 535571 - DNA, 19 bp, Mus musculus
  siRNA target sequence for Gcl (NM_011818.2,854-872).
ggactagactctgtaaaga

SEQ ID NO: 535572 - DNA, 19 bp, Mus musculus
  siRNA target sequence for Gcl (NM_011818.2,855-873).
gactagactctgtaaagaa

SEQ ID NO: 535573 - DNA, 19 bp, Mus musculus
  siRNA target sequence for Gcl (NM_011818.2,914-932).
cagagtgtggagcttttca

SEQ ID NO: 535574 - DNA, 19 bp, Mus musculus
  siRNA target sequence for Gcl (NM_011818.2,962-980).
ctcattggttcgtctaact

SEQ ID NO: 535575 - DNA, 19 bp, Mus musculus
  siRNA target sequence for Gcl (NM_011818.2,964-982).
cattggttcgtctaactta

SEQ ID NO: 535576 - DNA, 19 bp, Mus musculus
  siRNA target sequence for Gcl (NM_011818.2,992-1010).
caagtggagatggatgtat

SEQ ID NO: 535577 - DNA, 19 bp, Mus musculus
  siRNA target sequence for Gcl (NM_011818.2,1007-1025).
gtatatacagctcttaaaa

SEQ ID NO: 535578 - DNA, 19 bp, Mus musculus
  siRNA target sequence for Gcl (NM_011818.2,1053-1071).
cctggaatgggtctttaaa

SEQ ID NO: 535579 - DNA, 19 bp, Mus musculus
  siRNA target sequence for Gcl (NM_011818.2,1091-1109).
gatgtctggttttcaaagt

SEQ ID NO: 535580 - DNA, 19 bp, Mus musculus
  siRNA target sequence for Gcl (NM_011818.2,1127-1145).
gggacgactttccttgaaa

SEQ ID NO: 535581 - DNA, 19 bp, Mus musculus
  siRNA target sequence for Gcl (NM_011818.2,1131-1149).
cgactttccttgaaactga

SEQ ID NO: 535582 - DNA, 19 bp, Mus musculus
  siRNA target sequence for Gcl (NM_011818.2,1169-1187).
cccgtgttcagacatttaa

SEQ ID NO: 535583 - DNA, 19 bp, Mus musculus
  siRNA target sequence for Gcl (NM_011818.2,1260-1278).
ggctggcggcagtgtataa

SEQ ID NO: 535584 - DNA, 19 bp, Mus musculus
  siRNA target sequence for Gcl (NM_011818.2,1261-1279).
gctggcggcagtgtataaa

SEQ ID NO: 535585 - DNA, 19 bp, Mus musculus
  siRNA target sequence for Gcl (NM_011818.2,1369-1387).
gaggtgtggtcgaaagctt

SEQ ID NO: 535586 - DNA, 19 bp, Mus musculus
  siRNA target sequence for Gcl (NM_011818.2,1411-1429).
gcgctggacaggcttcaat

SEQ ID NO: 535587 - DNA, 19 bp, Mus musculus
  siRNA target sequence for Gcl (NM_011818.2,1412-1430).
cgctggacaggcttcaatt

SEQ ID NO: 535588 - DNA, 19 bp, Mus musculus
  siRNA target sequence for Gcl (NM_011818.2,1448-1466).
gtgacttacaccaatcgat

SEQ ID NO: 535589 - DNA, 19 bp, Mus musculus
  siRNA target sequence for Gcl (NM_011818.2,1456-1474).
caccaatcgatacatcatt

SEQ ID NO: 535590 - DNA, 19 bp, Mus musculus
  siRNA target sequence for Gcl (NM_011818.2,1458-1476).
ccaatcgatacatcatttt

SEQ ID NO: 535591 - DNA, 19 bp, Mus musculus
  siRNA target sequence for Gcl (NM_011818.2,1489-1507).
gctgaaccagccatgtagt

SEQ ID NO: 535592 - DNA, 19 bp, Mus musculus
  siRNA target sequence for Gcl (NM_011818.2,1529-1547).
cgaaggagcatagcattta

SEQ ID NO: 535593 - DNA, 19 bp, Mus musculus
  siRNA target sequence for Gcl (NM_011818.2,1548-1566).
gattgcgcttggcttcttt

SEQ ID NO: 535594 - DNA, 19 bp, Mus musculus
  siRNA target sequence for Gcl (NM_011818.2,1570-1588).
cagtagtgggaaactcata

SEQ ID NO: 535595 - DNA, 19 bp, Mus musculus
  siRNA target sequence for Gcl (NM_011818.2,1610-1628).
caaatactgacgcttgaaa

SEQ ID NO: 535596 - DNA, 19 bp, Mus musculus
  siRNA target sequence for Gcl (NM_011818.2,1637-1655).
gagcaagtggtgatgaact

SEQ ID NO: 535597 - DNA, 19 bp, Mus musculus
  siRNA target sequence for Gcl (NM_011818.2,1690-1708).
ctgctgtaacttcttgtat

SEQ ID NO: 535598 - DNA, 19 bp, Mus musculus
  siRNA target sequence for Gcl (NM_011818.2,1734-1752).
gtaatcgtcacccagaaaa

SEQ ID NO: 535599 - DNA, 19 bp, Mus musculus
  siRNA target sequence for Gcn5l2 (NM_020004.1,316-334).
gcttgcaaggccaatgaaa

SEQ ID NO: 535600 - DNA, 19 bp, Mus musculus
  siRNA target sequence for Gcn5l2 (NM_020004.1,504-522).
gggaatggtagtagatgta

SEQ ID NO: 535601 - DNA, 19 bp, Mus musculus
  siRNA target sequence for Gcn5l2 (NM_020004.1,506-524).
gaatggtagtagatgtaga

SEQ ID NO: 535602 - DNA, 19 bp, Mus musculus
  siRNA target sequence for Gcn5l2 (NM_020004.1,520-538).
gtagaaaatctgttcatgt

SEQ ID NO: 535603 - DNA, 19 bp, Mus musculus
  siRNA target sequence for Gcn5l2 (NM_020004.1,728-746).
cccgagagcgccagacaat

SEQ ID NO: 535604 - DNA, 19 bp, Mus musculus
  siRNA target sequence for Gcn5l2 (NM_020004.1,731-749).
gagagcgccagacaatgtt

SEQ ID NO: 535605 - DNA, 19 bp, Mus musculus
  siRNA target sequence for Gcn5l2 (NM_020004.1,743-761).
caatgtttgagctctcaaa

SEQ ID NO: 535606 - DNA, 19 bp, Mus musculus
  siRNA target sequence for Gcn5l2 (NM_020004.1,834-852).
ggatgtcgctacctacaaa

SEQ ID NO: 535607 - DNA, 19 bp, Mus musculus
  siRNA target sequence for Gcn5l2 (NM_020004.1,838-856).
gtcgctacctacaaagtca

SEQ ID NO: 535608 - DNA, 19 bp, Mus musculus
  siRNA target sequence for Gcn5l2 (NM_020004.1,840-858).
cgctacctacaaagtcaat

SEQ ID NO: 535609 - DNA, 19 bp, Mus musculus
  siRNA target sequence for Gcn5l2 (NM_020004.1,841-859).
gctacctacaaagtcaatt

SEQ ID NO: 535610 - DNA, 19 bp, Mus musculus
  siRNA target sequence for Gcn5l2 (NM_020004.1,944-962).
gccttctacggtccatttt

SEQ ID NO: 535611 - DNA, 19 bp, Mus musculus
  siRNA target sequence for Gcn5l2 (NM_020004.1,976-994).
cggcagctactggaaaaat

SEQ ID NO: 535612 - DNA, 19 bp, Mus musculus
  siRNA target sequence for Gcn5l2 (NM_020004.1,977-995).
ggcagctactggaaaaatt

SEQ ID NO: 535613 - DNA, 19 bp, Mus musculus
  siRNA target sequence for Gcn5l2 (NM_020004.1,1081-1099).
gagatctacggggcaaatt

SEQ ID NO: 535614 - DNA, 19 bp, Mus musculus
  siRNA target sequence for Gcn5l2 (NM_020004.1,1083-1101).
gatctacggggcaaattct

SEQ ID NO: 535615 - DNA, 19 bp, Mus musculus
  siRNA target sequence for Gcn5l2 (NM_020004.1,1167-1185).
cacggtcagtgcaacagtt

SEQ ID NO: 535616 - DNA, 19 bp, Mus musculus
  siRNA target sequence for Gcn5l2 (NM_020004.1,1573-1591).
ccaagaatgcccaaggaat

SEQ ID NO: 535617 - DNA, 19 bp, Mus musculus
  siRNA target sequence for Gcn5l2 (NM_020004.1,1574-1592).
caagaatgcccaaggaata

SEQ ID NO: 535618 - DNA, 19 bp, Mus musculus
  siRNA target sequence for Gcn5l2 (NM_020004.1,1577-1595).
gaatgcccaaggaatatat

SEQ ID NO: 535619 - DNA, 19 bp, Mus musculus
  siRNA target sequence for Gcn5l2 (NM_020004.1,1654-1672).
gtcatcggtggcatttgct

SEQ ID NO: 535620 - DNA, 19 bp, Mus musculus
  siRNA target sequence for Gcn5l2 (NM_020004.1,1665-1683).
catttgcttccgcatgttt

SEQ ID NO: 535621 - DNA, 19 bp, Mus musculus
  siRNA target sequence for Gcn5l2 (NM_020004.1,1888-1906).
cgctatctgggctacatca

SEQ ID NO: 535622 - DNA, 19 bp, Mus musculus
  siRNA target sequence for Gcn5l2 (NM_020004.1,1889-1907).
gctatctgggctacatcaa

SEQ ID NO: 535623 - DNA, 19 bp, Mus musculus
  siRNA target sequence for Gcn5l2 (NM_020004.1,1971-1989).
gtcccacatcatcaagaaa

SEQ ID NO: 535624 - DNA, 19 bp, Mus musculus
  siRNA target sequence for Gcn5l2 (NM_020004.1,2163-2181).
ggatcctgatcagctatat

SEQ ID NO: 535625 - DNA, 19 bp, Mus musculus
  siRNA target sequence for Gcn5l2 (NM_020004.1,2267-2285).
ctgactactacgaggttat

SEQ ID NO: 535626 - DNA, 19 bp, Mus musculus
  siRNA target sequence for Gcn5l2 (NM_020004.1,2326-2344).
cgcagtcgctactatgtga

SEQ ID NO: 535627 - DNA, 19 bp, Mus musculus
  siRNA target sequence for Golga3 (NM_008146.3,442-460).
gtccagcagtgatgtttca

SEQ ID NO: 535628 - DNA, 19 bp, Mus musculus
  siRNA target sequence for Golga3 (NM_008146.3,501-519).
cccgactgcctgatcaaca

SEQ ID NO: 535629 - DNA, 19 bp, Mus musculus
  siRNA target sequence for Golga3 (NM_008146.3,545-563).
gaggtaaacagaggtttta

SEQ ID NO: 535630 - DNA, 19 bp, Mus musculus
  siRNA target sequence for Golga3 (NM_008146.3,798-816).
ccagtcaacctgcaactaa

SEQ ID NO: 535631 - DNA, 19 bp, Mus musculus
  siRNA target sequence for Golga3 (NM_008146.3,799-817).
cagtcaacctgcaactaaa

SEQ ID NO: 535632 - DNA, 19 bp, Mus musculus
  siRNA target sequence for Golga3 (NM_008146.3,801-819).
gtcaacctgcaactaaaat

SEQ ID NO: 535633 - DNA, 19 bp, Mus musculus
  siRNA target sequence for Golga3 (NM_008146.3,809-827).
gcaactaaaatgaaacttt

SEQ ID NO: 535634 - DNA, 19 bp, Mus musculus
  siRNA target sequence for Golga3 (NM_008146.3,820-838).
gaaactttttagtacactt

SEQ ID NO: 535635 - DNA, 19 bp, Mus musculus
  siRNA target sequence for Golga3 (NM_008146.3,839-857).
gatcctgagctcatgttaa

SEQ ID NO: 535636 - DNA, 19 bp, Mus musculus
  siRNA target sequence for Golga3 (NM_008146.3,871-889).
gccaagggccagtactgta

SEQ ID NO: 535637 - DNA, 19 bp, Mus musculus
  siRNA target sequence for Golga3 (NM_008146.3,1007-1025).
cggtctctggctgactata

SEQ ID NO: 535638 - DNA, 19 bp, Mus musculus
  siRNA target sequence for Golga3 (NM_008146.3,1009-1027).
gtctctggctgactataga

SEQ ID NO: 535639 - DNA, 19 bp, Mus musculus
  siRNA target sequence for Golga3 (NM_008146.3,1133-1151).
ccatcatctgagactgata

SEQ ID NO: 535640 - DNA, 19 bp, Mus musculus
  siRNA target sequence for Golga3 (NM_008146.3,1134-1152).
catcatctgagactgataa

SEQ ID NO: 535641 - DNA, 19 bp, Mus musculus
  siRNA target sequence for Golga3 (NM_008146.3,1298-1316).
gttgatggccaggagattt

SEQ ID NO: 535642 - DNA, 19 bp, Mus musculus
  siRNA target sequence for Golga3 (NM_008146.3,1330-1348).
gggccagtttccttcaatt

SEQ ID NO: 535643 - DNA, 19 bp, Mus musculus
  siRNA target sequence for Golga3 (NM_008146.3,1344-1362).
caattaaagacgtactaca

SEQ ID NO: 535644 - DNA, 19 bp, Mus musculus
  siRNA target sequence for Golga3 (NM_008146.3,1481-1499).
gaattgttgcagattctta

SEQ ID NO: 535645 - DNA, 19 bp, Mus musculus
  siRNA target sequence for Golga3 (NM_008146.3,1899-1917).
gccagctccagcaagtaca

SEQ ID NO: 535646 - DNA, 19 bp, Mus musculus
  siRNA target sequence for Golga3 (NM_008146.3,1932-1950).
ccctgaccagcaaactaca

SEQ ID NO: 535647 - DNA, 19 bp, Mus musculus
  siRNA target sequence for Golga3 (NM_008146.3,2196-2214).
gcattgaggctgacatgtt

SEQ ID NO: 535648 - DNA, 19 bp, Mus musculus
  siRNA target sequence for Golga3 (NM_008146.3,2197-2215).
cattgaggctgacatgtta

SEQ ID NO: 535649 - DNA, 19 bp, Mus musculus
  siRNA target sequence for Golga3 (NM_008146.3,2224-2242).
ggcagcatttgtacagatt

SEQ ID NO: 535650 - DNA, 19 bp, Mus musculus
  siRNA target sequence for Golga3 (NM_008146.3,2303-2321).
gaacgggagcagttacaga

SEQ ID NO: 535651 - DNA, 19 bp, Mus musculus
  siRNA target sequence for Golga3 (NM_008146.3,2340-2358).
catccctggagcaacagtt

SEQ ID NO: 535652 - DNA, 19 bp, Mus musculus
  siRNA target sequence for Golga3 (NM_008146.3,2416-2434).
ggagcacctagatgtgata

SEQ ID NO: 535653 - DNA, 19 bp, Mus musculus
  siRNA target sequence for Golga3 (NM_008146.3,2491-2509).
cctgcatacacgttacgat

SEQ ID NO: 535654 - DNA, 19 bp, Mus musculus
  siRNA target sequence for Golga3 (NM_008146.3,2556-2574).
gggaggatgcaattcactt

SEQ ID NO: 535655 - DNA, 19 bp, Mus musculus
  siRNA target sequence for Golga3 (NM_008146.3,2652-2670).
cacggcgtttggaagaaga

SEQ ID NO: 535656 - DNA, 19 bp, Mus musculus
  siRNA target sequence for Golga3 (NM_008146.3,2654-2672).
cggcgtttggaagaagata

SEQ ID NO: 535657 - DNA, 19 bp, Mus musculus
  siRNA target sequence for Golga3 (NM_008146.3,2685-2703).
caggacttttggaacaatt

SEQ ID NO: 535658 - DNA, 19 bp, Mus musculus
  siRNA target sequence for Golga3 (NM_008146.3,2759-2777).
gccacgttgagaaaacaga

SEQ ID NO: 535659 - DNA, 19 bp, Mus musculus
  siRNA target sequence for Golga3 (NM_008146.3,2833-2851).
gcgagatgctacttccaaa

SEQ ID NO: 535660 - DNA, 19 bp, Mus musculus
  siRNA target sequence for Golga3 (NM_008146.3,2848-2866).
caaagatcaactcatcaat

SEQ ID NO: 535661 - DNA, 19 bp, Mus musculus
  siRNA target sequence for Golga3 (NM_008146.3,3110-3128).
cttaccgaggccaatgaga

SEQ ID NO: 535662 - DNA, 19 bp, Mus musculus
  siRNA target sequence for Golga3 (NM_008146.3,3464-3482).
gaggtgatcacaatgacta

SEQ ID NO: 535663 - DNA, 19 bp, Mus musculus
  siRNA target sequence for Golga3 (NM_008146.3,3559-3577).
gaagataaaacgtcttgaa

SEQ ID NO: 535664 - DNA, 19 bp, Mus musculus
  siRNA target sequence for Golga3 (NM_008146.3,3569-3587).
cgtcttgaagagtcaaata

SEQ ID NO: 535665 - DNA, 19 bp, Mus musculus
  siRNA target sequence for Golga3 (NM_008146.3,3630-3648).
ctggccttggacaatctaa

SEQ ID NO: 535666 - DNA, 19 bp, Mus musculus
  siRNA target sequence for Golga3 (NM_008146.3,3634-3652).
ccttggacaatctaatgca

SEQ ID NO: 535667 - DNA, 19 bp, Mus musculus
  siRNA target sequence for Golga3 (NM_008146.3,4008-4026).
ctcaagaaatagcacaatt

SEQ ID NO: 535668 - DNA, 19 bp, Mus musculus
  siRNA target sequence for Golga3 (NM_008146.3,4104-4122).
cgacagggagccaagagat

SEQ ID NO: 535669 - DNA, 19 bp, Mus musculus
  siRNA target sequence for Golga3 (NM_008146.3,4138-4156).
ggaattggatcagaaagaa

SEQ ID NO: 535670 - DNA, 19 bp, Mus musculus
  siRNA target sequence for Golga3 (NM_008146.3,4252-4270).
gtctgagttggaaatggta

SEQ ID NO: 535671 - DNA, 19 bp, Mus musculus
  siRNA target sequence for Golga3 (NM_008146.3,4442-4460).
cctgcaacacccatcaaga

SEQ ID NO: 535672 - DNA, 19 bp, Mus musculus
  siRNA target sequence for Golga3 (NM_008146.3,4525-4543).
caaggaacccctcaagaat

SEQ ID NO: 535673 - DNA, 19 bp, Mus musculus
  siRNA target sequence for Gopc (NM_053187.2,352-370).
gaccaggcggacatcactt

SEQ ID NO: 535674 - DNA, 19 bp, Mus musculus
  siRNA target sequence for Gopc (NM_053187.2,354-372).
ccaggcggacatcacttat

SEQ ID NO: 535675 - DNA, 19 bp, Mus musculus
  siRNA target sequence for Gopc (NM_053187.2,478-496).
gatctgcgatcggaattga

SEQ ID NO: 535676 - DNA, 19 bp, Mus musculus
  siRNA target sequence for Gopc (NM_053187.2,503-521).
ctcaagcagagaaagttgt

SEQ ID NO: 535677 - DNA, 19 bp, Mus musculus
  siRNA target sequence for Gopc (NM_053187.2,772-790).
gctgccaagtacttggata

SEQ ID NO: 535678 - DNA, 19 bp, Mus musculus
  siRNA target sequence for Gopc (NM_053187.2,801-819).
cggcagggtgcaacagata

SEQ ID NO: 535679 - DNA, 19 bp, Mus musculus
  siRNA target sequence for Gopc (NM_053187.2,807-825).
ggtgcaacagatacaatta

SEQ ID NO: 535680 - DNA, 19 bp, Mus musculus
  siRNA target sequence for Gopc (NM_053187.2,845-863).
gacctgctcacgataagct

SEQ ID NO: 535681 - DNA, 19 bp, Mus musculus
  siRNA target sequence for Gopc (NM_053187.2,889-907).
catttgcatcgccacaaaa

SEQ ID NO: 535682 - DNA, 19 bp, Mus musculus
  siRNA target sequence for Gopc (NM_053187.2,926-944).
gagggcgcaacgacttgaa

SEQ ID NO: 535683 - DNA, 19 bp, Mus musculus
  siRNA target sequence for Gopc (NM_053187.2,962-980).
ccccaggccacgatcaaga

SEQ ID NO: 535684 - DNA, 19 bp, Mus musculus
  siRNA target sequence for Gopc (NM_053187.2,968-986).
gccacgatcaagactcttt

SEQ ID NO: 535685 - DNA, 19 bp, Mus musculus
  siRNA target sequence for Gopc (NM_053187.2,970-988).
cacgatcaagactctttga

SEQ ID NO: 535686 - DNA, 19 bp, Mus musculus
  siRNA target sequence for Gopc (NM_053187.2,973-991).
gatcaagactctttgaaga

SEQ ID NO: 535687 - DNA, 19 bp, Mus musculus
  siRNA target sequence for Gopc (NM_053187.2,996-1014).
ccagggagtcggtccaatt

SEQ ID NO: 535688 - DNA, 19 bp, Mus musculus
  siRNA target sequence for Gopc (NM_053187.2,997-1015).
cagggagtcggtccaatta

SEQ ID NO: 535689 - DNA, 19 bp, Mus musculus
  siRNA target sequence for Gopc (NM_053187.2,1000-1018).
ggagtcggtccaattagaa

SEQ ID NO: 535690 - DNA, 19 bp, Mus musculus
  siRNA target sequence for Gopc (NM_053187.2,1001-1019).
gagtcggtccaattagaaa

SEQ ID NO: 535691 - DNA, 19 bp, Mus musculus
  siRNA target sequence for Gopc (NM_053187.2,1005-1023).
cggtccaattagaaaagtt

SEQ ID NO: 535692 - DNA, 19 bp, Mus musculus
  siRNA target sequence for Gopc (NM_053187.2,1045-1063).
gaaggcctgggcatttcta

SEQ ID NO: 535693 - DNA, 19 bp, Mus musculus
  siRNA target sequence for Gopc (NM_053187.2,1048-1066).
ggcctgggcatttctatca

SEQ ID NO: 535694 - DNA, 19 bp, Mus musculus
  siRNA target sequence for Gopc (NM_053187.2,1146-1164).
gcatgttggagatgctatt

SEQ ID NO: 535695 - DNA, 19 bp, Mus musculus
  siRNA target sequence for Gopc (NM_053187.2,1185-1203).
cctaagagacacaaagcat

SEQ ID NO: 535696 - DNA, 19 bp, Mus musculus
  siRNA target sequence for Gopc (NM_053187.2,1207-1225).
gaagctgtaactatactct

SEQ ID NO: 535697 - DNA, 19 bp, Mus musculus
  siRNA target sequence for Gopc (NM_053187.2,1233-1251).
gagaggagagattgagttt

SEQ ID NO: 535698 - DNA, 19 bp, Mus musculus
  siRNA target sequence for Gopc (NM_053187.2,1276-1294).
gtggattctgacgatgaaa

SEQ ID NO: 535699 - DNA, 19 bp, Mus musculus
  siRNA target sequence for Gopc (NM_053187.2,1325-1343).
gctatcgtctgtatcttga

SEQ ID NO: 535700 - DNA, 19 bp, Mus musculus
  siRNA target sequence for Gopc (NM_053187.2,1335-1353).
gtatcttgacgagttagaa

SEQ ID NO: 535701 - DNA, 19 bp, Mus musculus
  siRNA target sequence for Gopc (NM_053187.2,1369-1387).
ggtgctagttgcaaagaca

SEQ ID NO: 535702 - DNA, 19 bp, Mus musculus
  siRNA target sequence for Gopc (NM_053187.2,1394-1412).
gcgagatgaaaatgttaca

SEQ ID NO: 535703 - DNA, 19 bp, Mus musculus
  siRNA target sequence for Gopc (NM_053187.2,1434-1452).
gagggatgcgcatgagaat

SEQ ID NO: 535704 - DNA, 19 bp, Mus musculus
  siRNA target sequence for Grb2 (NM_008163.2,334-352).
ggaagccatcgccaaatat

SEQ ID NO: 535705 - DNA, 19 bp, Mus musculus
  siRNA target sequence for Grb2 (NM_008163.2,339-357).
ccatcgccaaatatgactt

SEQ ID NO: 535706 - DNA, 19 bp, Mus musculus
  siRNA target sequence for Grb2 (NM_008163.2,343-361).
cgccaaatatgacttcaaa

SEQ ID NO: 535707 - DNA, 19 bp, Mus musculus
  siRNA target sequence for Grb2 (NM_008163.2,438-456).
ggtataaggcagaactcaa

SEQ ID NO: 535708 - DNA, 19 bp, Mus musculus
  siRNA target sequence for Grb2 (NM_008163.2,472-490).
catccccaagaattacata

SEQ ID NO: 535709 - DNA, 19 bp, Mus musculus
  siRNA target sequence for Grb2 (NM_008163.2,475-493).
ccccaagaattacatagaa

SEQ ID NO: 535710 - DNA, 19 bp, Mus musculus
  siRNA target sequence for Grb2 (NM_008163.2,507-525).
cgtggttttttggcaaaat

SEQ ID NO: 535711 - DNA, 19 bp, Mus musculus
  siRNA target sequence for Grb2 (NM_008163.2,616-634).
ctccctgtccgtcaagttt

SEQ ID NO: 535712 - DNA, 19 bp, Mus musculus
  siRNA target sequence for Grb2 (NM_008163.2,667-685).
cgacggagccgggaagtat

SEQ ID NO: 535713 - DNA, 19 bp, Mus musculus
  siRNA target sequence for Grb2 (NM_008163.2,668-686).
gacggagccgggaagtatt

SEQ ID NO: 535714 - DNA, 19 bp, Mus musculus
  siRNA target sequence for Grb2 (NM_008163.2,672-690).
gagccgggaagtatttcct

SEQ ID NO: 535715 - DNA, 19 bp, Mus musculus
  siRNA target sequence for Grb2 (NM_008163.2,691-709).
gtgggtggtgaagtttaat

SEQ ID NO: 535716 - DNA, 19 bp, Mus musculus
  siRNA target sequence for Grb2 (NM_008163.2,725-743).
gtagattaccacagatcaa

SEQ ID NO: 535717 - DNA, 19 bp, Mus musculus
  siRNA target sequence for Grb2 (NM_008163.2,728-746).
gattaccacagatcaacat

SEQ ID NO: 535718 - DNA, 19 bp, Mus musculus
  siRNA target sequence for Grb2 (NM_008163.2,753-771).
ccaggaaccagcagatatt

SEQ ID NO: 535719 - DNA, 19 bp, Mus musculus
  siRNA target sequence for Grb2 (NM_008163.2,756-774).
ggaaccagcagatattctt

SEQ ID NO: 535720 - DNA, 19 bp, Mus musculus
  siRNA target sequence for Grb2 (NM_008163.2,757-775).
gaaccagcagatattctta

SEQ ID NO: 535721 - DNA, 19 bp, Mus musculus
  siRNA target sequence for Grb2 (NM_008163.2,812-830).
gtccaggcgctctttgact

SEQ ID NO: 535722 - DNA, 19 bp, Mus musculus
  siRNA target sequence for Grb2 (NM_008163.2,865-883).
cagaggagacttcattcat

SEQ ID NO: 535723 - DNA, 19 bp, Mus musculus
  siRNA target sequence for Grb2 (NM_008163.2,928-946).
cgggcagaccggcatgttt

SEQ ID NO: 535724 - DNA, 19 bp, Mus musculus
  siRNA target sequence for Grb2 (NM_008163.2,939-957).
gcatgtttccccgcaatta

SEQ ID NO: 535725 - DNA, 19 bp, Mus musculus
  siRNA target sequence for Grb2 (NM_008163.2,940-958).
catgtttccccgcaattat

SEQ ID NO: 535726 - DNA, 19 bp, Mus musculus
  siRNA target sequence for Hhip (NM_020259.3,482-500).
ctgaagatgctctcgttta

SEQ ID NO: 535727 - DNA, 19 bp, Mus musculus
  siRNA target sequence for Hhip (NM_020259.3,610-628).
cccaaagcgcctaaagaga

SEQ ID NO: 535728 - DNA, 19 bp, Mus musculus
  siRNA target sequence for Hhip (NM_020259.3,611-629).
ccaaagcgcctaaagagaa

SEQ ID NO: 535729 - DNA, 19 bp, Mus musculus
  siRNA target sequence for Hhip (NM_020259.3,691-709).
cttctacccacgagtatct

SEQ ID NO: 535730 - DNA, 19 bp, Mus musculus
  siRNA target sequence for Hhip (NM_020259.3,741-759).
ggcgtctggagaacaagat

SEQ ID NO: 535731 - DNA, 19 bp, Mus musculus
  siRNA target sequence for Hhip (NM_020259.3,743-761).
cgtctggagaacaagatct

SEQ ID NO: 535732 - DNA, 19 bp, Mus musculus
  siRNA target sequence for Hhip (NM_020259.3,748-766).
ggagaacaagatcttttct

SEQ ID NO: 535733 - DNA, 19 bp, Mus musculus
  siRNA target sequence for Hhip (NM_020259.3,847-865).
ctacacacctgaaagagat

SEQ ID NO: 535734 - DNA, 19 bp, Mus musculus
  siRNA target sequence for Hhip (NM_020259.3,907-925).
ctactgcaaagaattcttt

SEQ ID NO: 535735 - DNA, 19 bp, Mus musculus
  siRNA target sequence for Hhip (NM_020259.3,947-965).
ccaggtcttcttcaaacaa

SEQ ID NO: 535736 - DNA, 19 bp, Mus musculus
  siRNA target sequence for Hhip (NM_020259.3,1044-1062).
gaggaccagcatctaacta

SEQ ID NO: 535737 - DNA, 19 bp, Mus musculus
  siRNA target sequence for Hhip (NM_020259.3,1046-1064).
ggaccagcatctaactact

SEQ ID NO: 535738 - DNA, 19 bp, Mus musculus
  siRNA target sequence for Hhip (NM_020259.3,1047-1065).
gaccagcatctaactactt

SEQ ID NO: 535739 - DNA, 19 bp, Mus musculus
  siRNA target sequence for Hhip (NM_020259.3,1191-1209).
gctcccatcggctcttcat

SEQ ID NO: 535740 - DNA, 19 bp, Mus musculus
  siRNA target sequence for Hhip (NM_020259.3,1192-1210).
ctcccatcggctcttcatt

SEQ ID NO: 535741 - DNA, 19 bp, Mus musculus
  siRNA target sequence for Hhip (NM_020259.3,1194-1212).
cccatcggctcttcattct

SEQ ID NO: 535742 - DNA, 19 bp, Mus musculus
  siRNA target sequence for Hhip (NM_020259.3,1195-1213).
ccatcggctcttcattcta

SEQ ID NO: 535743 - DNA, 19 bp, Mus musculus
  siRNA target sequence for Hhip (NM_020259.3,1223-1241).
ggctacgtgaagattctaa

SEQ ID NO: 535744 - DNA, 19 bp, Mus musculus
  siRNA target sequence for Hhip (NM_020259.3,1245-1263).
cagaaggagaactgttcaa

SEQ ID NO: 535745 - DNA, 19 bp, Mus musculus
  siRNA target sequence for Hhip (NM_020259.3,1268-1286).
ccttacttggacattcaca

SEQ ID NO: 535746 - DNA, 19 bp, Mus musculus
  siRNA target sequence for Hhip (NM_020259.3,1273-1291).
cttggacattcacaaactt

SEQ ID NO: 535747 - DNA, 19 bp, Mus musculus
  siRNA target sequence for Hhip (NM_020259.3,1276-1294).
ggacattcacaaacttgtt

SEQ ID NO: 535748 - DNA, 19 bp, Mus musculus
  siRNA target sequence for Hhip (NM_020259.3,1340-1358).
gcattccatcccaattaca

SEQ ID NO: 535749 - DNA, 19 bp, Mus musculus
  siRNA target sequence for Hhip (NM_020259.3,1341-1359).
cattccatcccaattacaa

SEQ ID NO: 535750 - DNA, 19 bp, Mus musculus
  siRNA target sequence for Hhip (NM_020259.3,1373-1391).
ctgtatgtgtcttatacca

SEQ ID NO: 535751 - DNA, 19 bp, Mus musculus
  siRNA target sequence for Hhip (NM_020259.3,1417-1435).
gcctcacgaccacattctt

SEQ ID NO: 535752 - DNA, 19 bp, Mus musculus
  siRNA target sequence for Hhip (NM_020259.3,1433-1451).
cttcgggttgtggaataca

SEQ ID NO: 535753 - DNA, 19 bp, Mus musculus
  siRNA target sequence for Hhip (NM_020259.3,1583-1601).
cttggggatggtatgatca

SEQ ID NO: 535754 - DNA, 19 bp, Mus musculus
  siRNA target sequence for Hhip (NM_020259.3,1587-1605).
gggatggtatgatcacatt

SEQ ID NO: 535755 - DNA, 19 bp, Mus musculus
  siRNA target sequence for Hhip (NM_020259.3,1683-1701).
gcaatgtgccttattccat

SEQ ID NO: 535756 - DNA, 19 bp, Mus musculus
  siRNA target sequence for Hhip (NM_020259.3,1684-1702).
caatgtgccttattccata

SEQ ID NO: 535757 - DNA, 19 bp, Mus musculus
  siRNA target sequence for Hhip (NM_020259.3,1789-1807).
ggatcgacatcctactgat

SEQ ID NO: 535758 - DNA, 19 bp, Mus musculus
  siRNA target sequence for Hhip (NM_020259.3,1790-1808).
gatcgacatcctactgata

SEQ ID NO: 535759 - DNA, 19 bp, Mus musculus
  siRNA target sequence for Hhip (NM_020259.3,1793-1811).
cgacatcctactgatataa

SEQ ID NO: 535760 - DNA, 19 bp, Mus musculus
  siRNA target sequence for Hhip (NM_020259.3,1799-1817).
cctactgatataaacatca

SEQ ID NO: 535761 - DNA, 19 bp, Mus musculus
  siRNA target sequence for Hhip (NM_020259.3,1800-1818).
ctactgatataaacatcaa

SEQ ID NO: 535762 - DNA, 19 bp, Mus musculus
  siRNA target sequence for Hhip (NM_020259.3,1836-1854).
cagattccaacgggaaaaa

SEQ ID NO: 535763 - DNA, 19 bp, Mus musculus
  siRNA target sequence for Hhip (NM_020259.3,1858-1876).
gtcatcagccagaatccta

SEQ ID NO: 535764 - DNA, 19 bp, Mus musculus
  siRNA target sequence for Hhip (NM_020259.3,1865-1883).
gccagaatcctacagataa

SEQ ID NO: 535765 - DNA, 19 bp, Mus musculus
  siRNA target sequence for Hhip (NM_020259.3,1910-1928).
ccatctcttcttgaattca

SEQ ID NO: 535766 - DNA, 19 bp, Mus musculus
  siRNA target sequence for Hhip (NM_020259.3,2013-2031).
gagatcgcaatgggaattt

SEQ ID NO: 535767 - DNA, 19 bp, Mus musculus
  siRNA target sequence for Hhip (NM_020259.3,2015-2033).
gatcgcaatgggaatttct

SEQ ID NO: 535768 - DNA, 19 bp, Mus musculus
  siRNA target sequence for Hhip (NM_020259.3,2018-2036).
cgcaatgggaatttcttaa

SEQ ID NO: 535769 - DNA, 19 bp, Mus musculus
  siRNA target sequence for Hhip (NM_020259.3,2150-2168).
gaattaggagaggtttaca

SEQ ID NO: 535770 - DNA, 19 bp, Mus musculus
  siRNA target sequence for Hhip (NM_020259.3,2156-2174).
ggagaggtttacattctat

SEQ ID NO: 535771 - DNA, 19 bp, Mus musculus
  siRNA target sequence for Hhip (NM_020259.3,2199-2217).
ctcacaatggaaaactcta

SEQ ID NO: 535772 - DNA, 19 bp, Mus musculus
  siRNA target sequence for Hhip (NM_020259.3,2228-2246).
gaccccaaaagacctttaa

SEQ ID NO: 535773 - DNA, 19 bp, Mus musculus
  siRNA target sequence for Hhip (NM_020259.3,2368-2386).
gggagacttctgcagaatt

SEQ ID NO: 535774 - DNA, 19 bp, Mus musculus
  siRNA target sequence for Hhip (NM_020259.3,2466-2484).
gtcctcaatgtgaacaagt

SEQ ID NO: 535775 - DNA, 19 bp, Mus musculus
  siRNA target sequence for Hhip (NM_020259.3,2506-2524).
gaccagggcaggtatcctt

SEQ ID NO: 535776 - DNA, 19 bp, Mus musculus
  siRNA target sequence for Hhip (NM_020259.3,2517-2535).
gtatccttgatcagatcat

SEQ ID NO: 535777 - DNA, 19 bp, Mus musculus
  siRNA target sequence for Hhip (NM_020259.3,2555-2573).
ctggatctcacaagttaca

SEQ ID NO: 535778 - DNA, 19 bp, Mus musculus
  siRNA target sequence for Hhip (NM_020259.3,2557-2575).
ggatctcacaagttacatt

SEQ ID NO: 535779 - DNA, 19 bp, Mus musculus
  siRNA target sequence for Homer1 (NM_011982.1,774-792).
caattcagcaatcatgatt

SEQ ID NO: 535780 - DNA, 19 bp, Mus musculus
  siRNA target sequence for Hps6 (NM_176785.1,240-258).
cgccacttgctgctattaa

SEQ ID NO: 535781 - DNA, 19 bp, Mus musculus
  siRNA target sequence for Hps6 (NM_176785.1,349-367).
cgccgctggacgtcttttt

SEQ ID NO: 535782 - DNA, 19 bp, Mus musculus
  siRNA target sequence for Hps6 (NM_176785.1,352-370).
cgctggacgtctttttcgt

SEQ ID NO: 535783 - DNA, 19 bp, Mus musculus
  siRNA target sequence for Hps6 (NM_176785.1,550-568).
gtcagccgggtgttaagga

SEQ ID NO: 535784 - DNA, 19 bp, Mus musculus
  siRNA target sequence for Hps6 (NM_176785.1,600-618).
caccgtgtgtgcttcaaga

SEQ ID NO: 535785 - DNA, 19 bp, Mus musculus
  siRNA target sequence for Hps6 (NM_176785.1,683-701).
ccccctttttggactgata

SEQ ID NO: 535786 - DNA, 19 bp, Mus musculus
  siRNA target sequence for Hps6 (NM_176785.1,784-802).
gcaaggggaaggtaatagt

SEQ ID NO: 535787 - DNA, 19 bp, Mus musculus
  siRNA target sequence for Hps6 (NM_176785.1,946-964).
cttcgcagggcttgttgtt

SEQ ID NO: 535788 - DNA, 19 bp, Mus musculus
  siRNA target sequence for Hps6 (NM_176785.1,1037-1055).
ggcccctgtaagcctaaaa

SEQ ID NO: 535789 - DNA, 19 bp, Mus musculus
  siRNA target sequence for Hps6 (NM_176785.1,1165-1183).
gtacagacagagtacattt

SEQ ID NO: 535790 - DNA, 19 bp, Mus musculus
  siRNA target sequence for Hps6 (NM_176785.1,1168-1186).
cagacagagtacatttgct

SEQ ID NO: 535791 - DNA, 19 bp, Mus musculus
  siRNA target sequence for Hps6 (NM_176785.1,1236-1254).
ggagccctacgattgcttt

SEQ ID NO: 535792 - DNA, 19 bp, Mus musculus
  siRNA target sequence for Hps6 (NM_176785.1,1397-1415).
gagacacaacagcatgttt

SEQ ID NO: 535793 - DNA, 19 bp, Mus musculus
  siRNA target sequence for Hps6 (NM_176785.1,1491-1509).
gagctccgggattatcgta

SEQ ID NO: 535794 - DNA, 19 bp, Mus musculus
  siRNA target sequence for Hps6 (NM_176785.1,1496-1514).
ccgggattatcgtagtata

SEQ ID NO: 535795 - DNA, 19 bp, Mus musculus
  siRNA target sequence for Hps6 (NM_176785.1,1498-1516).
gggattatcgtagtataga

SEQ ID NO: 535796 - DNA, 19 bp, Mus musculus
  siRNA target sequence for Hps6 (NM_176785.1,1855-1873).
ggctccccccatttgtgaa

SEQ ID NO: 535797 - DNA, 19 bp, Mus musculus
  siRNA target sequence for Hps6 (NM_176785.1,1856-1874).
gctccccccatttgtgaaa

SEQ ID NO: 535798 - DNA, 19 bp, Mus musculus
  siRNA target sequence for Hps6 (NM_176785.1,2360-2378).
gccgtctggcccagttcaa

SEQ ID NO: 535799 - DNA, 19 bp, Mus musculus
  siRNA target sequence for Hps6 (NM_176785.1,2361-2379).
ccgtctggcccagttcaaa

SEQ ID NO: 535800 - DNA, 19 bp, Mus musculus
  siRNA target sequence for Hs1bp1 (NM_011826.1,330-348).
gcgattccacggcaacttt

SEQ ID NO: 535801 - DNA, 19 bp, Mus musculus
  siRNA target sequence for Hs1bp1 (NM_011826.1,358-376).
gatctagtacgagatttta

SEQ ID NO: 535802 - DNA, 19 bp, Mus musculus
  siRNA target sequence for Hs1bp1 (NM_011826.1,361-379).
ctagtacgagattttaata

SEQ ID NO: 535803 - DNA, 19 bp, Mus musculus
  siRNA target sequence for Hs1bp1 (NM_011826.1,364-382).
gtacgagattttaatagca

SEQ ID NO: 535804 - DNA, 19 bp, Mus musculus
  siRNA target sequence for Hs1bp3 (NM_021429.1,48-66).
ccgcacctccagacaagtt

SEQ ID NO: 535805 - DNA, 19 bp, Mus musculus
  siRNA target sequence for Hs1bp3 (NM_021429.1,53-71).
cctccagacaagttcagaa

SEQ ID NO: 535806 - DNA, 19 bp, Mus musculus
  siRNA target sequence for Hs1bp3 (NM_021429.1,115-133).
gtgcggggtaagatgatgt

SEQ ID NO: 535807 - DNA, 19 bp, Mus musculus
  siRNA target sequence for Hs1bp3 (NM_021429.1,169-187).
cggttggctgtgttcaagt

SEQ ID NO: 535808 - DNA, 19 bp, Mus musculus
  siRNA target sequence for Hs1bp3 (NM_021429.1,216-234).
ccagttcttggtctctaaa

SEQ ID NO: 535809 - DNA, 19 bp, Mus musculus
  siRNA target sequence for Hs1bp3 (NM_021429.1,242-260).
gcgagatcgaggagtttta

SEQ ID NO: 535810 - DNA, 19 bp, Mus musculus
  siRNA target sequence for Hs1bp3 (NM_021429.1,345-363).
ggagaggcgagccatgttt

SEQ ID NO: 535811 - DNA, 19 bp, Mus musculus
  siRNA target sequence for Hs1bp3 (NM_021429.1,348-366).
gaggcgagccatgtttgat

SEQ ID NO: 535812 - DNA, 19 bp, Mus musculus
  siRNA target sequence for Hs1bp3 (NM_021429.1,350-368).
ggcgagccatgtttgatga

SEQ ID NO: 535813 - DNA, 19 bp, Mus musculus
  siRNA target sequence for Igbp1b (NM_015777.1,48-66).
gttggaaaccggcatacaa

SEQ ID NO: 535814 - DNA, 19 bp, Mus musculus
  siRNA target sequence for Igbp1b (NM_015777.1,217-235).
gcttccgctgacctaaagt

SEQ ID NO: 535815 - DNA, 19 bp, Mus musculus
  siRNA target sequence for Igbp1b (NM_015777.1,218-236).
cttccgctgacctaaagta

SEQ ID NO: 535816 - DNA, 19 bp, Mus musculus
  siRNA target sequence for Igbp1b (NM_015777.1,316-334).
gctcgagaacacttcatga

SEQ ID NO: 535817 - DNA, 19 bp, Mus musculus
  siRNA target sequence for Igbp1b (NM_015777.1,317-335).
ctcgagaacacttcatgaa

SEQ ID NO: 535818 - DNA, 19 bp, Mus musculus
  siRNA target sequence for Igbp1b (NM_015777.1,319-337).
cgagaacacttcatgaact

SEQ ID NO: 535819 - DNA, 19 bp, Mus musculus
  siRNA target sequence for Igbp1b (NM_015777.1,325-343).
cacttcatgaacttcctaa

SEQ ID NO: 535820 - DNA, 19 bp, Mus musculus
  siRNA target sequence for Igbp1b (NM_015777.1,356-374).
gctaccatgtggctgattt

SEQ ID NO: 535821 - DNA, 19 bp, Mus musculus
  siRNA target sequence for Igbp1b (NM_015777.1,464-482).
cccagaggcagaccaaaat

SEQ ID NO: 535822 - DNA, 19 bp, Mus musculus
  siRNA target sequence for Igbp1b (NM_015777.1,592-610).
cagcttcgtaggtggatta

SEQ ID NO: 535823 - DNA, 19 bp, Mus musculus
  siRNA target sequence for Igbp1b (NM_015777.1,595-613).
cttcgtaggtggattagca

SEQ ID NO: 535824 - DNA, 19 bp, Mus musculus
  siRNA target sequence for Igbp1b (NM_015777.1,735-753).
cgtcctcactcgaagtgtt

SEQ ID NO: 535825 - DNA, 19 bp, Mus musculus
  siRNA target sequence for Igbp1b (NM_015777.1,819-837).
cgagcagcgccagaaaaat

SEQ ID NO: 535826 - DNA, 19 bp, Mus musculus
  siRNA target sequence for Igsf4 (NM_018770.1,684-702).
ccccagcctgtgatggtaa

SEQ ID NO: 535827 - DNA, 19 bp, Mus musculus
  siRNA target sequence for Igsf4 (NM_018770.1,707-725).
ggtgagagtcgatgatgaa

SEQ ID NO: 535828 - DNA, 19 bp, Mus musculus
  siRNA target sequence for Igsf4 (NM_018770.1,708-726).
gtgagagtcgatgatgaaa

SEQ ID NO: 535829 - DNA, 19 bp, Mus musculus
  siRNA target sequence for Igsf4 (NM_018770.1,754-772).
caaacctgttcatcaataa

SEQ ID NO: 535830 - DNA, 19 bp, Mus musculus
  siRNA target sequence for Igsf4 (NM_018770.1,803-821).
ctgtgaggcttccaacata

SEQ ID NO: 535831 - DNA, 19 bp, Mus musculus
  siRNA target sequence for Igsf4 (NM_018770.1,805-823).
gtgaggcttccaacatagt

SEQ ID NO: 535832 - DNA, 19 bp, Mus musculus
  siRNA target sequence for Igsf4 (NM_018770.1,832-850).
ctcattcggactatatgct

SEQ ID NO: 535833 - DNA, 19 bp, Mus musculus
  siRNA target sequence for Igsf4 (NM_018770.1,838-856).
cggactatatgctgtatgt

SEQ ID NO: 535834 - DNA, 19 bp, Mus musculus
  siRNA target sequence for Igsf4 (NM_018770.1,839-857).
ggactatatgctgtatgta

SEQ ID NO: 535835 - DNA, 19 bp, Mus musculus
  siRNA target sequence for Igsf4 (NM_018770.1,840-858).
gactatatgctgtatgtat

SEQ ID NO: 535836 - DNA, 19 bp, Mus musculus
  siRNA target sequence for Igsf4 (NM_018770.1,1017-1035).
gtggtgtttgccatgctat

SEQ ID NO: 535837 - DNA, 19 bp, Mus musculus
  siRNA target sequence for Igsf4 (NM_018770.1,1056-1074).
cgctattttgccagacata

SEQ ID NO: 535838 - DNA, 19 bp, Mus musculus
  siRNA target sequence for Igsf4 (NM_018770.1,1057-1075).
gctattttgccagacataa

SEQ ID NO: 535839 - DNA, 19 bp, Mus musculus
  siRNA target sequence for Igsf4 (NM_018770.1,1058-1076).
ctattttgccagacataaa

SEQ ID NO: 535840 - DNA, 19 bp, Mus musculus
  siRNA target sequence for Igsf4 (NM_018770.1,1125-1143).
gcagacacagctataatca

SEQ ID NO: 535841 - DNA, 19 bp, Mus musculus
  siRNA target sequence for Il16 (NM_010551.1,172-190).
gactatagctttgatatca

SEQ ID NO: 535842 - DNA, 19 bp, Mus musculus
  siRNA target sequence for Il16 (NM_010551.1,174-192).
ctatagctttgatatcact

SEQ ID NO: 535843 - DNA, 19 bp, Mus musculus
  siRNA target sequence for Il16 (NM_010551.1,196-214).
gaagacccttgggttagaa

SEQ ID NO: 535844 - DNA, 19 bp, Mus musculus
  siRNA target sequence for Il16 (NM_010551.1,218-236).
ccgactgcatcaaaaactt

SEQ ID NO: 535845 - DNA, 19 bp, Mus musculus
  siRNA target sequence for Il16 (NM_010551.1,219-237).
cgactgcatcaaaaactta

SEQ ID NO: 535846 - DNA, 19 bp, Mus musculus
  siRNA target sequence for Il16 (NM_010551.1,222-240).
ctgcatcaaaaacttattt

SEQ ID NO: 535847 - DNA, 19 bp, Mus musculus
  siRNA target sequence for Il16 (NM_010551.1,514-532).
cagcctacaccagtttcta

SEQ ID NO: 535848 - DNA, 19 bp, Mus musculus
  siRNA target sequence for Il16 (NM_010551.1,659-677).
ctggggagaccaccaaatt

SEQ ID NO: 535849 - DNA, 19 bp, Mus musculus
  siRNA target sequence for Il16 (NM_010551.1,663-681).
ggagaccaccaaatttcca

SEQ ID NO: 535850 - DNA, 19 bp, Mus musculus
  siRNA target sequence for Il16 (NM_010551.1,687-705).
gcaagatggaggacgattt

SEQ ID NO: 535851 - DNA, 19 bp, Mus musculus
  siRNA target sequence for Il16 (NM_010551.1,717-735).
gggtcaaggggctacagta

SEQ ID NO: 535852 - DNA, 19 bp, Mus musculus
  siRNA target sequence for Il16 (NM_010551.1,893-911).
cacaatccgaggatactca

SEQ ID NO: 535853 - DNA, 19 bp, Mus musculus
  siRNA target sequence for Il16 (NM_010551.1,1351-1369).
ctagatgaagcaacattga

SEQ ID NO: 535854 - DNA, 19 bp, Mus musculus
  siRNA target sequence for Il16 (NM_010551.1,1361-1379).
caacattgaagcaattaga

SEQ ID NO: 535855 - DNA, 19 bp, Mus musculus
  siRNA target sequence for Il16 (NM_010551.1,1371-1389).
gcaattagacagcattcat

SEQ ID NO: 535856 - DNA, 19 bp, Mus musculus
  siRNA target sequence for Il16 (NM_010551.1,1439-1457).
caggaggggcagatctaga

SEQ ID NO: 535857 - DNA, 19 bp, Mus musculus
  siRNA target sequence for Il16 (NM_010551.1,1442-1460).
gaggggcagatctagaaaa

SEQ ID NO: 535858 - DNA, 19 bp, Mus musculus
  siRNA target sequence for Il16 (NM_010551.1,1509-1527).
ggaaggcacaattcagaaa

SEQ ID NO: 535859 - DNA, 19 bp, Mus musculus
  siRNA target sequence for Il16 (NM_010551.1,1529-1547).
gcaacgaggttctttccat

SEQ ID NO: 535860 - DNA, 19 bp, Mus musculus
  siRNA target sequence for Il16 (NM_010551.1,1544-1562).
ccatcaatggcaaatctct

SEQ ID NO: 535861 - DNA, 19 bp, Mus musculus
  siRNA target sequence for Il16 (NM_010551.1,1566-1584).
gggcgctacccacaatgat

SEQ ID NO: 535862 - DNA, 19 bp, Mus musculus
  siRNA target sequence for Il16 (NM_010551.1,1614-1632).
cccaaggcaagctgtgatt

SEQ ID NO: 535863 - DNA, 19 bp, Mus musculus
  siRNA target sequence for Il16 (NM_010551.1,1616-1634).
caaggcaagctgtgattgt

SEQ ID NO: 535864 - DNA, 19 bp, Mus musculus
  siRNA target sequence for Il16 (NM_010551.1,1820-1838).
gtgacaagcctcttaccat

SEQ ID NO: 535865 - DNA, 19 bp, Mus musculus
  siRNA target sequence for Il16 (NM_010551.1,1822-1840).
gacaagcctcttaccataa

SEQ ID NO: 535866 - DNA, 19 bp, Mus musculus
  siRNA target sequence for Il16 (NM_010551.1,1831-1849).
cttaccataaacaggattt

SEQ ID NO: 535867 - DNA, 19 bp, Mus musculus
  siRNA target sequence for Il16 (NM_010551.1,1967-1985).
ctgatggacctgtcactat

SEQ ID NO: 535868 - DNA, 19 bp, Mus musculus
  siRNA target sequence for Il16 (NM_010551.1,1972-1990).
ggacctgtcactatagtca

SEQ ID NO: 535869 - DNA, 19 bp, Mus musculus
  siRNA target sequence for Il16 (NM_010551.1,1973-1991).
gacctgtcactatagtcat

SEQ ID NO: 535870 - DNA, 19 bp, Mus musculus
  siRNA target sequence for Il25 (NM_080837.1,138-156).
gaggggtcgtgcattcgtt

SEQ ID NO: 535871 - DNA, 19 bp, Mus musculus
  siRNA target sequence for Il25 (NM_080837.1,167-185).
gtaggacccgggaacaagt

SEQ ID NO: 535872 - DNA, 19 bp, Mus musculus
  siRNA target sequence for Il25 (NM_080837.1,170-188).
ggacccgggaacaagttta

SEQ ID NO: 535873 - DNA, 19 bp, Mus musculus
  siRNA target sequence for Il25 (NM_080837.1,176-194).
gggaacaagtttacatgta

SEQ ID NO: 535874 - DNA, 19 bp, Mus musculus
  siRNA target sequence for Il25 (NM_080837.1,178-196).
gaacaagtttacatgtaca

SEQ ID NO: 535875 - DNA, 19 bp, Mus musculus
  siRNA target sequence for Il25 (NM_080837.1,257-275).
gaagacagccagcacttta

SEQ ID NO: 535876 - DNA, 19 bp, Mus musculus
  siRNA target sequence for Il25 (NM_080837.1,300-318).
ggaaatcctacctctactt

SEQ ID NO: 535877 - DNA, 19 bp, Mus musculus
  siRNA target sequence for Il27 (NM_145636.1,112-130).
gagctgcgcagggaattca

SEQ ID NO: 535878 - DNA, 19 bp, Mus musculus
  siRNA target sequence for Il27 (NM_145636.1,114-132).
gctgcgcagggaattcaca

SEQ ID NO: 535879 - DNA, 19 bp, Mus musculus
  siRNA target sequence for Il27 (NM_145636.1,228-246).
cctgcccctgggataccat

SEQ ID NO: 535880 - DNA, 19 bp, Mus musculus
  siRNA target sequence for Il27 (NM_145636.1,251-269).
ccaatgtttccctgacttt

SEQ ID NO: 535881 - DNA, 19 bp, Mus musculus
  siRNA target sequence for Inha (NM_010564.3,412-430).
gtctcccaggctatccttt

SEQ ID NO: 535882 - DNA, 19 bp, Mus musculus
  siRNA target sequence for Inha (NM_010564.3,960-978).
ccatcgagctgctctcaat

SEQ ID NO: 535883 - DNA, 19 bp, Mus musculus
  siRNA target sequence for Inha (NM_010564.3,964-982).
cgagctgctctcaatatct

SEQ ID NO: 535884 - DNA, 19 bp, Mus musculus
  siRNA target sequence for Inha (NM_010564.3,1015-1033).
gtacaccctcccagtttca

SEQ ID NO: 535885 - DNA, 19 bp, Mus musculus
  siRNA target sequence for Inha (NM_010564.3,1018-1036).
caccctcccagtttcatct

SEQ ID NO: 535886 - DNA, 19 bp, Mus musculus
  siRNA target sequence for Inha (NM_010564.3,1111-1129).
ccggttcagcccctgtttt

SEQ ID NO: 535887 - DNA, 19 bp, Mus musculus
  siRNA target sequence for Inha (NM_010564.3,1207-1225).
ggaggttactctttcaagt

SEQ ID NO: 535888 - DNA, 19 bp, Mus musculus
  siRNA target sequence for Inha (NM_010564.3,1208-1226).
gaggttactctttcaagta

SEQ ID NO: 535889 - DNA, 19 bp, Mus musculus
  siRNA target sequence for Inha (NM_010564.3,1228-1246).
gagatggtacccaacctta

SEQ ID NO: 535890 - DNA, 19 bp, Mus musculus
  siRNA target sequence for Inha (NM_010564.3,1230-1248).
gatggtacccaaccttatt

SEQ ID NO: 535891 - DNA, 19 bp, Mus musculus
  siRNA target sequence for Insig1 (NM_153526.2,505-523).
cagcgttatgcgctgtatt

SEQ ID NO: 535892 - DNA, 19 bp, Mus musculus
  siRNA target sequence for Insig1 (NM_153526.2,544-562).
ccacgccagtgccaaatta

SEQ ID NO: 535893 - DNA, 19 bp, Mus musculus
  siRNA target sequence for Insig1 (NM_153526.2,547-565).
cgccagtgccaaattagat

SEQ ID NO: 535894 - DNA, 19 bp, Mus musculus
  siRNA target sequence for Insig1 (NM_153526.2,548-566).
gccagtgccaaattagatt

SEQ ID NO: 535895 - DNA, 19 bp, Mus musculus
  siRNA target sequence for Insig1 (NM_153526.2,550-568).
cagtgccaaattagatttt

SEQ ID NO: 535896 - DNA, 19 bp, Mus musculus
  siRNA target sequence for Insig1 (NM_153526.2,580-598).
ccagctgtccttgacttta

SEQ ID NO: 535897 - DNA, 19 bp, Mus musculus
  siRNA target sequence for Insig1 (NM_153526.2,684-702).
cgctgatcactcagtttct

SEQ ID NO: 535898 - DNA, 19 bp, Mus musculus
  siRNA target sequence for Insig1 (NM_153526.2,685-703).
gctgatcactcagtttctt

SEQ ID NO: 535899 - DNA, 19 bp, Mus musculus
  siRNA target sequence for Insig1 (NM_153526.2,693-711).
ctcagtttcttgtgtataa

SEQ ID NO: 535900 - DNA, 19 bp, Mus musculus
  siRNA target sequence for Insig1 (NM_153526.2,732-750).
cccctgatttcctctatat

SEQ ID NO: 535901 - DNA, 19 bp, Mus musculus
  siRNA target sequence for Insig1 (NM_153526.2,756-774).
cttggctcccctgtatatt

SEQ ID NO: 535902 - DNA, 19 bp, Mus musculus
  siRNA target sequence for Insig1 (NM_153526.2,759-777).
ggctcccctgtatattttt

SEQ ID NO: 535903 - DNA, 19 bp, Mus musculus
  siRNA target sequence for Insig2 (NM_133748.1,223-241).
gagtcacctcggcctaaaa

SEQ ID NO: 535904 - DNA, 19 bp, Mus musculus
  siRNA target sequence for Insig2 (NM_133748.1,298-316).
ggggtggtactcttcttca

SEQ ID NO: 535905 - DNA, 19 bp, Mus musculus
  siRNA target sequence for Insig2 (NM_133748.1,320-338).
gagtgttcctggcattagt

SEQ ID NO: 535906 - DNA, 19 bp, Mus musculus
  siRNA target sequence for Insig2 (NM_133748.1,388-406).
gtgatcacgagcatctttt

SEQ ID NO: 535907 - DNA, 19 bp, Mus musculus
  siRNA target sequence for Insig2 (NM_133748.1,393-411).
cacgagcatcttttcatct

SEQ ID NO: 535908 - DNA, 19 bp, Mus musculus
  siRNA target sequence for Insig2 (NM_133748.1,487-505).
ctaggagaacctcataaat

SEQ ID NO: 535909 - DNA, 19 bp, Mus musculus
  siRNA target sequence for Insig2 (NM_133748.1,490-508).
ggagaacctcataaattta

SEQ ID NO: 535910 - DNA, 19 bp, Mus musculus
  siRNA target sequence for Insig2 (NM_133748.1,541-559).
gcggtgttcgtgggtataa

SEQ ID NO: 535911 - DNA, 19 bp, Mus musculus
  siRNA target sequence for Insig2 (NM_133748.1,566-584).
ccagtgctaaagtagactt

SEQ ID NO: 535912 - DNA, 19 bp, Mus musculus
  siRNA target sequence for Insig2 (NM_133748.1,586-604).
gacaacaacttccagtttt

SEQ ID NO: 535913 - DNA, 19 bp, Mus musculus
  siRNA target sequence for Insig2 (NM_133748.1,701-719).
ccgttgtcacccaactgtt

SEQ ID NO: 535914 - DNA, 19 bp, Mus musculus
  siRNA target sequence for Insig2 (NM_133748.1,702-720).
cgttgtcacccaactgtta

SEQ ID NO: 535915 - DNA, 19 bp, Mus musculus
  siRNA target sequence for Insig2 (NM_133748.1,706-724).
gtcacccaactgttagtct

SEQ ID NO: 535916 - DNA, 19 bp, Mus musculus
  siRNA target sequence for Insig2 (NM_133748.1,710-728).
cccaactgttagtctacaa

SEQ ID NO: 535917 - DNA, 19 bp, Mus musculus
  siRNA target sequence for Insig2 (NM_133748.1,711-729).
ccaactgttagtctacaat

SEQ ID NO: 535918 - DNA, 19 bp, Mus musculus
  siRNA target sequence for Insig2 (NM_133748.1,730-748).
ggtgtttatcaatacacat

SEQ ID NO: 535919 - DNA, 19 bp, Mus musculus
  siRNA target sequence for Insig2 (NM_133748.1,803-821).
gcataacgatgggaaacat

SEQ ID NO: 535920 - DNA, 19 bp, Mus musculus
  siRNA target sequence for Insig2 (NM_133748.1,825-843).
ccgtcaactggcaatgtat

SEQ ID NO: 535921 - DNA, 19 bp, Mus musculus
  siRNA target sequence for Insig2 (NM_133748.1,827-845).
gtcaactggcaatgtatga

SEQ ID NO: 535922 - DNA, 19 bp, Mus musculus
  siRNA target sequence for Insig2 (NM_133748.1,848-866).
gcaaagttattgctgaaaa

SEQ ID NO: 535923 - DNA, 19 bp, Mus musculus
  siRNA target sequence for Irak1bp1 (NM_022986.2,333-351).
ggggtttcaggcagaaaat

SEQ ID NO: 535924 - DNA, 19 bp, Mus musculus
  siRNA target sequence for Irak1bp1 (NM_022986.2,335-353).
ggtttcaggcagaaaatgt

SEQ ID NO: 535925 - DNA, 19 bp, Mus musculus
  siRNA target sequence for Irak1bp1 (NM_022986.2,352-370).
gtaactgtgacaaagaaca

SEQ ID NO: 535926 - DNA, 19 bp, Mus musculus
  siRNA target sequence for Irak1bp1 (NM_022986.2,379-397).
gtagaaaatgcgtatcaca

SEQ ID NO: 535927 - DNA, 19 bp, Mus musculus
  siRNA target sequence for Irak1bp1 (NM_022986.2,400-418).
gaagccgaggtctgcatta

SEQ ID NO: 535928 - DNA, 19 bp, Mus musculus
  siRNA target sequence for Irak1bp1 (NM_022986.2,406-424).
gaggtctgcattacattta

SEQ ID NO: 535929 - DNA, 19 bp, Mus musculus
  siRNA target sequence for Irak1bp1 (NM_022986.2,408-426).
ggtctgcattacatttact

SEQ ID NO: 535930 - DNA, 19 bp, Mus musculus
  siRNA target sequence for Irak1bp1 (NM_022986.2,492-510).
cagcccacctgagttctat

SEQ ID NO: 535931 - DNA, 19 bp, Mus musculus
  siRNA target sequence for Irak1bp1 (NM_022986.2,518-536).
caggttctgttgagaatct

SEQ ID NO: 535932 - DNA, 19 bp, Mus musculus
  siRNA target sequence for Irak1bp1 (NM_022986.2,551-569).
gtctggttgctgttgagaa

SEQ ID NO: 535933 - DNA, 19 bp, Mus musculus
  siRNA target sequence for Irak1bp1 (NM_022986.2,609-627).
ccaaactctgggaaaacct

SEQ ID NO: 535934 - DNA, 19 bp, Mus musculus
  siRNA target sequence for Irak1bp1 (NM_022986.2,673-691).
gatgatcatcagttatcca

SEQ ID NO: 535935 - DNA, 19 bp, Mus musculus
  siRNA target sequence for Irak1bp1 (NM_022986.2,690-708).
cagactgccaggcacatta

SEQ ID NO: 535936 - DNA, 19 bp, Mus musculus
  siRNA target sequence for Irak1bp1 (NM_022986.2,704-722).
cattaactgtacaacagaa

SEQ ID NO: 535937 - DNA, 19 bp, Mus musculus
  siRNA target sequence for Irak1bp1 (NM_022986.2,746-764).
cagcttcgaaggtgttcat

SEQ ID NO: 535938 - DNA, 19 bp, Mus musculus
  siRNA target sequence for Irak1bp1 (NM_022986.2,752-770).
cgaaggtgttcattacttt

SEQ ID NO: 535939 - DNA, 19 bp, Mus musculus
  siRNA target sequence for Irak1bp1 (NM_022986.2,762-780).
cattacttttgaggtaaaa

SEQ ID NO: 535940 - DNA, 19 bp, Mus musculus
  siRNA target sequence for Itsn (NM_010587.1,36-54).
ggatgtctgggccataact

SEQ ID NO: 535941 - DNA, 19 bp, Mus musculus
  siRNA target sequence for Itsn (NM_010587.1,73-91).
catgaccagcagttcctta

SEQ ID NO: 535942 - DNA, 19 bp, Mus musculus
  siRNA target sequence for Itsn (NM_010587.1,99-117).
gccgatagcgggatttatt

SEQ ID NO: 535943 - DNA, 19 bp, Mus musculus
  siRNA target sequence for Itsn (NM_010587.1,100-118).
ccgatagcgggatttatta

SEQ ID NO: 535944 - DNA, 19 bp, Mus musculus
  siRNA target sequence for Itsn (NM_010587.1,102-120).
gatagcgggatttattact

SEQ ID NO: 535945 - DNA, 19 bp, Mus musculus
  siRNA target sequence for Itsn (NM_010587.1,124-142).
gatcaagcgaggaactttt

SEQ ID NO: 535946 - DNA, 19 bp, Mus musculus
  siRNA target sequence for Itsn (NM_010587.1,131-149).
cgaggaacttttttttcca

SEQ ID NO: 535947 - DNA, 19 bp, Mus musculus
  siRNA target sequence for Itsn (NM_010587.1,165-183).
gcctgtcttagcacaaata

SEQ ID NO: 535948 - DNA, 19 bp, Mus musculus
  siRNA target sequence for Itsn (NM_010587.1,166-184).
cctgtcttagcacaaatat

SEQ ID NO: 535949 - DNA, 19 bp, Mus musculus
  siRNA target sequence for Itsn (NM_010587.1,185-203).
gggcgctagcggacatgaa

SEQ ID NO: 535950 - DNA, 19 bp, Mus musculus
  siRNA target sequence for Itsn (NM_010587.1,186-204).
ggcgctagcggacatgaat

SEQ ID NO: 535951 - DNA, 19 bp, Mus musculus
  siRNA target sequence for Itsn (NM_010587.1,187-205).
gcgctagcggacatgaata

SEQ ID NO: 535952 - DNA, 19 bp, Mus musculus
  siRNA target sequence for Itsn (NM_010587.1,188-206).
cgctagcggacatgaataa

SEQ ID NO: 535953 - DNA, 19 bp, Mus musculus
  siRNA target sequence for Itsn (NM_010587.1,215-233).
ggatggatcaagtggaatt

SEQ ID NO: 535954 - DNA, 19 bp, Mus musculus
  siRNA target sequence for Itsn (NM_010587.1,236-254).
ccatagccatgaagcttat

SEQ ID NO: 535955 - DNA, 19 bp, Mus musculus
  siRNA target sequence for Itsn (NM_010587.1,310-328).
cagcaaccagtggctattt

SEQ ID NO: 535956 - DNA, 19 bp, Mus musculus
  siRNA target sequence for Itsn (NM_010587.1,332-350).
gtgcaccagcatttggtat

SEQ ID NO: 535957 - DNA, 19 bp, Mus musculus
  siRNA target sequence for Itsn (NM_010587.1,482-500).
gggctcctcccgtcataca

SEQ ID NO: 535958 - DNA, 19 bp, Mus musculus
  siRNA target sequence for Itsn (NM_010587.1,565-583).
ggtccagggtcacaattaa

SEQ ID NO: 535959 - DNA, 19 bp, Mus musculus
  siRNA target sequence for Itsn (NM_010587.1,568-586).
ccagggtcacaattaaaca

SEQ ID NO: 535960 - DNA, 19 bp, Mus musculus
  siRNA target sequence for Itsn (NM_010587.1,571-589).
gggtcacaattaaacacta

SEQ ID NO: 535961 - DNA, 19 bp, Mus musculus
  siRNA target sequence for Itsn (NM_010587.1,572-590).
ggtcacaattaaacactaa

SEQ ID NO: 535962 - DNA, 19 bp, Mus musculus
  siRNA target sequence for Itsn (NM_010587.1,575-593).
cacaattaaacactaagtt

SEQ ID NO: 535963 - DNA, 19 bp, Mus musculus
  siRNA target sequence for Itsn (NM_010587.1,597-615).
gaaggcacaatcattcgat

SEQ ID NO: 535964 - DNA, 19 bp, Mus musculus
  siRNA target sequence for Itsn (NM_010587.1,687-705).
caacagccacgacaaaact

SEQ ID NO: 535965 - DNA, 19 bp, Mus musculus
  siRNA target sequence for Itsn (NM_010587.1,693-711).
ccacgacaaaactatgagt

SEQ ID NO: 535966 - DNA, 19 bp, Mus musculus
  siRNA target sequence for Itsn (NM_010587.1,730-748).
caggcaagaactattctca

SEQ ID NO: 535967 - DNA, 19 bp, Mus musculus
  siRNA target sequence for Itsn (NM_010587.1,768-786).
ggctcagctggcttcaata

SEQ ID NO: 535968 - DNA, 19 bp, Mus musculus
  siRNA target sequence for Itsn (NM_010587.1,774-792).
gctggcttcaatatggaat

SEQ ID NO: 535969 - DNA, 19 bp, Mus musculus
  siRNA target sequence for Itsn (NM_010587.1,777-795).
ggcttcaatatggaatctt

SEQ ID NO: 535970 - DNA, 19 bp, Mus musculus
  siRNA target sequence for Itsn (NM_010587.1,820-838).
ctcactgcagaagaattta

SEQ ID NO: 535971 - DNA, 19 bp, Mus musculus
  siRNA target sequence for Itsn (NM_010587.1,840-858).
cctagctatgcacctaatt

SEQ ID NO: 535972 - DNA, 19 bp, Mus musculus
  siRNA target sequence for Itsn (NM_010587.1,890-908).
ccgtcctgcctccagaata

SEQ ID NO: 535973 - DNA, 19 bp, Mus musculus
  siRNA target sequence for Itsn (NM_010587.1,892-910).
gtcctgcctccagaataca

SEQ ID NO: 535974 - DNA, 19 bp, Mus musculus
  siRNA target sequence for Itsn (NM_010587.1,954-972).
cgtcataagctcttcttct

SEQ ID NO: 535975 - DNA, 19 bp, Mus musculus
  siRNA target sequence for Itsn (NM_010587.1,1477-1495).
ggaaaacttcaggatatca

SEQ ID NO: 535976 - DNA, 19 bp, Mus musculus
  siRNA target sequence for Itsn (NM_010587.1,1528-1546).
gagagcacgaacaagtcta

SEQ ID NO: 535977 - DNA, 19 bp, Mus musculus
  siRNA target sequence for Itsn (NM_010587.1,1542-1560).
gtctagagagctaagaatt

SEQ ID NO: 535978 - DNA, 19 bp, Mus musculus
  siRNA target sequence for Itsn (NM_010587.1,1552-1570).
ctaagaattgctgaaatca

SEQ ID NO: 535979 - DNA, 19 bp, Mus musculus
  siRNA target sequence for Itsn (NM_010587.1,1562-1580).
ctgaaatcacccacttaca

SEQ ID NO: 535980 - DNA, 19 bp, Mus musculus
  siRNA target sequence for Itsn (NM_010587.1,1624-1642).
ccagagaaacagatactca

SEQ ID NO: 535981 - DNA, 19 bp, Mus musculus
  siRNA target sequence for Itsn (NM_010587.1,1641-1659).
cagtgaccagttaaaacaa

SEQ ID NO: 535982 - DNA, 19 bp, Mus musculus
  siRNA target sequence for Itsn (NM_010587.1,1643-1661).
gtgaccagttaaaacaagt

SEQ ID NO: 535983 - DNA, 19 bp, Mus musculus
  siRNA target sequence for Itsn (NM_010587.1,1678-1696).
catagagactcgcttctta

SEQ ID NO: 535984 - DNA, 19 bp, Mus musculus
  siRNA target sequence for Itsn (NM_010587.1,2106-2124).
gcagagtcggcttttccat

SEQ ID NO: 535985 - DNA, 19 bp, Mus musculus
  siRNA target sequence for Itsn (NM_010587.1,2764-2782).
gacaaccacttaaatttta

SEQ ID NO: 535986 - DNA, 19 bp, Mus musculus
  siRNA target sequence for Itsn (NM_010587.1,2916-2934).
cgatactggccctactgaa

SEQ ID NO: 535987 - DNA, 19 bp, Mus musculus
  siRNA target sequence for Itsn (NM_010587.1,2917-2935).
gatactggccctactgaaa

SEQ ID NO: 535988 - DNA, 19 bp, Mus musculus
  siRNA target sequence for Itsn (NM_010587.1,2932-2950).
gaaagtcctgctagtctaa

SEQ ID NO: 535989 - DNA, 19 bp, Mus musculus
  siRNA target sequence for Itsn (NM_010587.1,2981-2999).
ccattcccggagaagagtt

SEQ ID NO: 535990 - DNA, 19 bp, Mus musculus
  siRNA target sequence for Itsn (NM_010587.1,2982-3000).
cattcccggagaagagttt

SEQ ID NO: 535991 - DNA, 19 bp, Mus musculus
  siRNA target sequence for Itsn (NM_010587.1,2995-3013).
gagtttattgccatgtaca

SEQ ID NO: 535992 - DNA, 19 bp, Mus musculus
  siRNA target sequence for Itsn (NM_010587.1,3030-3048).
gcaaggagatttaaccttt

SEQ ID NO: 535993 - DNA, 19 bp, Mus musculus
  siRNA target sequence for Itsn (NM_010587.1,3063-3081).
gattgtggttaccaagaaa

SEQ ID NO: 535994 - DNA, 19 bp, Mus musculus
  siRNA target sequence for Itsn (NM_010587.1,3119-3137).
ccggagtcttcccttctaa

SEQ ID NO: 535995 - DNA, 19 bp, Mus musculus
  siRNA target sequence for Itsn (NM_010587.1,3122-3140).
gagtcttcccttctaacta

SEQ ID NO: 535996 - DNA, 19 bp, Mus musculus
  siRNA target sequence for Itsn (NM_010587.1,3138-3156).
ctatgtgaggcttaaagat

SEQ ID NO: 535997 - DNA, 19 bp, Mus musculus
  siRNA target sequence for Itsn (NM_010587.1,3180-3198).
gaaaacagggagtttagga

SEQ ID NO: 535998 - DNA, 19 bp, Mus musculus
  siRNA target sequence for Itsn (NM_010587.1,3357-3375).
gtggtttccagcaaattat

SEQ ID NO: 535999 - DNA, 19 bp, Mus musculus
  siRNA target sequence for Itsn (NM_010587.1,3457-3475).
gtgatcgggatgtacgatt

SEQ ID NO: 536000 - DNA, 19 bp, Mus musculus
  siRNA target sequence for Itsn (NM_010587.1,3644-3662).
gctcagacctgcatctctt

SEQ ID NO: 536001 - DNA, 19 bp, Mus musculus
  siRNA target sequence for Itsn (NM_010587.1,3649-3667).
gacctgcatctcttagata

SEQ ID NO: 536002 - DNA, 19 bp, Mus musculus
  siRNA target sequence for Itsn (NM_010587.1,3698-3716).
gctacatccatgaactcat

SEQ ID NO: 536003 - DNA, 19 bp, Mus musculus
  siRNA target sequence for Itsn (NM_010587.1,3699-3717).
ctacatccatgaactcatt

SEQ ID NO: 536004 - DNA, 19 bp, Mus musculus
  siRNA target sequence for Itsn (NM_010587.1,3811-3829).
gttgctatgatttttgtta

SEQ ID NO: 536005 - DNA, 19 bp, Mus musculus
  siRNA target sequence for Itsn (NM_010587.1,3837-3855).
ggagctgatcatgtgtaat

SEQ ID NO: 536006 - DNA, 19 bp, Mus musculus
  siRNA target sequence for Itsn (NM_010587.1,3838-3856).
gagctgatcatgtgtaata

SEQ ID NO: 536007 - DNA, 19 bp, Mus musculus
  siRNA target sequence for Itsn (NM_010587.1,4066-4084).
gaccctcggtgcaaaggaa

SEQ ID NO: 536008 - DNA, 19 bp, Mus musculus
  siRNA target sequence for Itsn (NM_010587.1,4127-4145).
caagatacccgctgatcat

SEQ ID NO: 536009 - DNA, 19 bp, Mus musculus
  siRNA target sequence for Itsn (NM_010587.1,4130-4148).
gatacccgctgatcattaa

SEQ ID NO: 536010 - DNA, 19 bp, Mus musculus
  siRNA target sequence for Itsn (NM_010587.1,4135-4153).
ccgctgatcattaaaaaca

SEQ ID NO: 536011 - DNA, 19 bp, Mus musculus
  siRNA target sequence for Itsn (NM_010587.1,4136-4154).
cgctgatcattaaaaacat

SEQ ID NO: 536012 - DNA, 19 bp, Mus musculus
  siRNA target sequence for Itsn (NM_010587.1,4318-4336).
gagcaactggtgttcaatt

SEQ ID NO: 536013 - DNA, 19 bp, Mus musculus
  siRNA target sequence for Itsn (NM_010587.1,4438-4456).
ctcctgctgacccaaatca

SEQ ID NO: 536014 - DNA, 19 bp, Mus musculus
  siRNA target sequence for Itsn (NM_010587.1,4440-4458).
cctgctgacccaaatcaca

SEQ ID NO: 536015 - DNA, 19 bp, Mus musculus
  siRNA target sequence for Itsn (NM_010587.1,4475-4493).
ccggcaccgacaaagtctt

SEQ ID NO: 536016 - DNA, 19 bp, Mus musculus
  siRNA target sequence for Itsn (NM_010587.1,4527-4545).
caaaacgcccattttctta

SEQ ID NO: 536017 - DNA, 19 bp, Mus musculus
  siRNA target sequence for Itsn (NM_010587.1,4532-4550).
cgcccattttcttaaatga

SEQ ID NO: 536018 - DNA, 19 bp, Mus musculus
  siRNA target sequence for Itsn (NM_010587.1,4632-4650).
ccgagcagagagcataaat

SEQ ID NO: 536019 - DNA, 19 bp, Mus musculus
  siRNA target sequence for Itsn (NM_010587.1,4685-4703).
cgtctgagctctacataga

SEQ ID NO: 536020 - DNA, 19 bp, Mus musculus
  siRNA target sequence for Itsn (NM_010587.1,4865-4883).
gccacatcaccaagacaat

SEQ ID NO: 536021 - DNA, 19 bp, Mus musculus
  siRNA target sequence for Itsn (NM_010587.1,4900-4918).
cccaagtggaattctaact

SEQ ID NO: 536022 - DNA, 19 bp, Mus musculus
  siRNA target sequence for Itsn (NM_010587.1,4980-4998).
ccagttctcgcctgatgat

SEQ ID NO: 536023 - DNA, 19 bp, Mus musculus
  siRNA target sequence for Itsn (NM_010587.1,4983-5001).
gttctcgcctgatgatttt

SEQ ID NO: 536024 - DNA, 19 bp, Mus musculus
  siRNA target sequence for Ivns1abp (NM_028582.2,508-526).
ccaatggatatttgatgtt

SEQ ID NO: 536025 - DNA, 19 bp, Mus musculus
  siRNA target sequence for Ivns1abp (NM_028582.2,655-673).
gctgtagcccctatctatt

SEQ ID NO: 536026 - DNA, 19 bp, Mus musculus
  siRNA target sequence for Ivns1abp (NM_028582.2,656-674).
ctgtagcccctatctattt

SEQ ID NO: 536027 - DNA, 19 bp, Mus musculus
  siRNA target sequence for Ivns1abp (NM_028582.2,661-679).
gcccctatctatttgaaat

SEQ ID NO: 536028 - DNA, 19 bp, Mus musculus
  siRNA target sequence for Ivns1abp (NM_028582.2,663-681).
ccctatctatttgaaatct

SEQ ID NO: 536029 - DNA, 19 bp, Mus musculus
  siRNA target sequence for Ivns1abp (NM_028582.2,664-682).
cctatctatttgaaatctt

SEQ ID NO: 536030 - DNA, 19 bp, Mus musculus
  siRNA target sequence for Ivns1abp (NM_028582.2,706-724).
gagtttctcatgtgaagtt

SEQ ID NO: 536031 - DNA, 19 bp, Mus musculus
  siRNA target sequence for Ivns1abp (NM_028582.2,739-757).
cagaagctgttgaagtctt

SEQ ID NO: 536032 - DNA, 19 bp, Mus musculus
  siRNA target sequence for Ivns1abp (NM_028582.2,747-765).
gttgaagtcttgctgaatt

SEQ ID NO: 536033 - DNA, 19 bp, Mus musculus
  siRNA target sequence for Ivns1abp (NM_028582.2,753-771).
gtcttgctgaattatgcat

SEQ ID NO: 536034 - DNA, 19 bp, Mus musculus
  siRNA target sequence for Ivns1abp (NM_028582.2,769-787).
catacacggctcagttgaa

SEQ ID NO: 536035 - DNA, 19 bp, Mus musculus
  siRNA target sequence for Ivns1abp (NM_028582.2,778-796).
ctcagttgaaagctgataa

SEQ ID NO: 536036 - DNA, 19 bp, Mus musculus
  siRNA target sequence for Ivns1abp (NM_028582.2,789-807).
gctgataaggaattagtaa

SEQ ID NO: 536037 - DNA, 19 bp, Mus musculus
  siRNA target sequence for Ivns1abp (NM_028582.2,790-808).
ctgataaggaattagtaaa

SEQ ID NO: 536038 - DNA, 19 bp, Mus musculus
  siRNA target sequence for Ivns1abp (NM_028582.2,798-816).
gaattagtaaaagatgttt

SEQ ID NO: 536039 - DNA, 19 bp, Mus musculus
  siRNA target sequence for Ivns1abp (NM_028582.2,854-872).
gcaggtctgcggagattat

SEQ ID NO: 536040 - DNA, 19 bp, Mus musculus
  siRNA target sequence for Ivns1abp (NM_028582.2,855-873).
caggtctgcggagattatt

SEQ ID NO: 536041 - DNA, 19 bp, Mus musculus
  siRNA target sequence for Ivns1abp (NM_028582.2,857-875).
ggtctgcggagattattta

SEQ ID NO: 536042 - DNA, 19 bp, Mus musculus
  siRNA target sequence for Ivns1abp (NM_028582.2,860-878).
ctgcggagattatttacta

SEQ ID NO: 536043 - DNA, 19 bp, Mus musculus
  siRNA target sequence for Ivns1abp (NM_028582.2,863-881).
cggagattatttactatct

SEQ ID NO: 536044 - DNA, 19 bp, Mus musculus
  siRNA target sequence for Ivns1abp (NM_028582.2,864-882).
ggagattatttactatcta

SEQ ID NO: 536045 - DNA, 19 bp, Mus musculus
  siRNA target sequence for Ivns1abp (NM_028582.2,867-885).
gattatttactatctagaa

SEQ ID NO: 536046 - DNA, 19 bp, Mus musculus
  siRNA target sequence for Ivns1abp (NM_028582.2,891-909).
gttactagctgcatctctt

SEQ ID NO: 536047 - DNA, 19 bp, Mus musculus
  siRNA target sequence for Ivns1abp (NM_028582.2,901-919).
gcatctcttaccgaaattt

SEQ ID NO: 536048 - DNA, 19 bp, Mus musculus
  siRNA target sequence for Ivns1abp (NM_028582.2,902-920).
catctcttaccgaaatttt

SEQ ID NO: 536049 - DNA, 19 bp, Mus musculus
  siRNA target sequence for Ivns1abp (NM_028582.2,905-923).
ctcttaccgaaattttgca

SEQ ID NO: 536050 - DNA, 19 bp, Mus musculus
  siRNA target sequence for Ivns1abp (NM_028582.2,911-929).
ccgaaattttgcaagttgt

SEQ ID NO: 536051 - DNA, 19 bp, Mus musculus
  siRNA target sequence for Ivns1abp (NM_028582.2,912-930).
cgaaattttgcaagttgta

SEQ ID NO: 536052 - DNA, 19 bp, Mus musculus
  siRNA target sequence for Ivns1abp (NM_028582.2,933-951).
ggagactcccgtttgttga

SEQ ID NO: 536053 - DNA, 19 bp, Mus musculus
  siRNA target sequence for Ivns1abp (NM_028582.2,934-952).
gagactcccgtttgttgaa

SEQ ID NO: 536054 - DNA, 19 bp, Mus musculus
  siRNA target sequence for Ivns1abp (NM_028582.2,936-954).
gactcccgtttgttgaata

SEQ ID NO: 536055 - DNA, 19 bp, Mus musculus
  siRNA target sequence for Ivns1abp (NM_028582.2,964-982).
cttatattcaggagcattt

SEQ ID NO: 536056 - DNA, 19 bp, Mus musculus
  siRNA target sequence for Ivns1abp (NM_028582.2,972-990).
caggagcatttgttacaaa

SEQ ID NO: 536057 - DNA, 19 bp, Mus musculus
  siRNA target sequence for Ivns1abp (NM_028582.2,1034-1052).
ggaggtaatgcttgaagat

SEQ ID NO: 536058 - DNA, 19 bp, Mus musculus
  siRNA target sequence for Ivns1abp (NM_028582.2,1035-1053).
gaggtaatgcttgaagata

SEQ ID NO: 536059 - DNA, 19 bp, Mus musculus
  siRNA target sequence for Ivns1abp (NM_054102.1,1158-1176).
gttcaaaccttgtactact

SEQ ID NO: 536060 - DNA, 19 bp, Mus musculus
  siRNA target sequence for Ivns1abp (NM_054102.1,1226-1244).
ggtgtttggcagtgatgat

SEQ ID NO: 536061 - DNA, 19 bp, Mus musculus
  siRNA target sequence for Ivns1abp (NM_054102.1,1239-1257).
gatgatgaccacattcagt

SEQ ID NO: 536062 - DNA, 19 bp, Mus musculus
  siRNA target sequence for Ivns1abp (NM_054102.1,1358-1376).
gcatgagtggaaaatcgtt

SEQ ID NO: 536063 - DNA, 19 bp, Mus musculus
  siRNA target sequence for Ivns1abp (NM_054102.1,1373-1391).
cgttgcttcagaaaagact

SEQ ID NO: 536064 - DNA, 19 bp, Mus musculus
  siRNA target sequence for Ivns1abp (NM_054102.1,1374-1392).
gttgcttcagaaaagactt

SEQ ID NO: 536065 - DNA, 19 bp, Mus musculus
  siRNA target sequence for Ivns1abp (NM_054102.1,1419-1437).
gtgctggacagtacattct

SEQ ID NO: 536066 - DNA, 19 bp, Mus musculus
  siRNA target sequence for Ivns1abp (NM_054102.1,1491-1509).
ccaaaactgagcaagagtt

SEQ ID NO: 536067 - DNA, 19 bp, Mus musculus
  siRNA target sequence for Ivns1abp (NM_054102.1,1593-1611).
gagatgaatggcaaactca

SEQ ID NO: 536068 - DNA, 19 bp, Mus musculus
  siRNA target sequence for Ivns1abp (NM_054102.1,1595-1613).
gatgaatggcaaactcata

SEQ ID NO: 536069 - DNA, 19 bp, Mus musculus
  siRNA target sequence for Ivns1abp (NM_054102.1,1610-1628).
catagctgcaggtggttat

SEQ ID NO: 536070 - DNA, 19 bp, Mus musculus
  siRNA target sequence for Ivns1abp (NM_054102.1,1614-1632).
gctgcaggtggttataaca

SEQ ID NO: 536071 - DNA, 19 bp, Mus musculus
  siRNA target sequence for Ivns1abp (NM_054102.1,1660-1678).
gctatgatccacatacaga

SEQ ID NO: 536072 - DNA, 19 bp, Mus musculus
  siRNA target sequence for Ivns1abp (NM_054102.1,1711-1729).
caagagcccgctttcaaat

SEQ ID NO: 536073 - DNA, 19 bp, Mus musculus
  siRNA target sequence for Ivns1abp (NM_054102.1,1847-1865).
gagaaccaaccgttgtaat

SEQ ID NO: 536074 - DNA, 19 bp, Mus musculus
  siRNA target sequence for Ivns1abp (NM_054102.1,1883-1901).
gaatgggaaattgtacatt

SEQ ID NO: 536075 - DNA, 19 bp, Mus musculus
  siRNA target sequence for Ivns1abp (NM_054102.1,1923-1941).
ggtcaaaagggcctgaaaa

SEQ ID NO: 536076 - DNA, 19 bp, Mus musculus
  siRNA target sequence for Ivns1abp (NM_054102.1,1931-1949).
gggcctgaaaaattgtgat

SEQ ID NO: 536077 - DNA, 19 bp, Mus musculus
  siRNA target sequence for Ivns1abp (NM_054102.1,1956-1974).
gatcctgtaacgaagtcat

SEQ ID NO: 536078 - DNA, 19 bp, Mus musculus
  siRNA target sequence for Ivns1abp (NM_054102.1,1978-1996).
caagctgtgctcctcttaa

SEQ ID NO: 536079 - DNA, 19 bp, Mus musculus
  siRNA target sequence for Ivns1abp (NM_054102.1,1981-1999).
gctgtgctcctcttaacat

SEQ ID NO: 536080 - DNA, 19 bp, Mus musculus
  siRNA target sequence for Ivns1abp (NM_054102.1,2023-2041).
gtgaacttggtggttattt

SEQ ID NO: 536081 - DNA, 19 bp, Mus musculus
  siRNA target sequence for Ivns1abp (NM_054102.1,2091-2109).
cgatacaatcctgaaaaca

SEQ ID NO: 536082 - DNA, 19 bp, Mus musculus
  siRNA target sequence for Ivns1abp (NM_054102.1,2092-2110).
gatacaatcctgaaaacaa

SEQ ID NO: 536083 - DNA, 19 bp, Mus musculus
  siRNA target sequence for Ivns1abp (NM_054102.1,2108-2126).
caacacctggactttaatt

SEQ ID NO: 536084 - DNA, 19 bp, Mus musculus
  siRNA target sequence for Ivns1abp (NM_054102.1,2111-2129).
cacctggactttaattgca

SEQ ID NO: 536085 - DNA, 19 bp, Mus musculus
  siRNA target sequence for Ivns1abp (NM_054102.1,2162-2180).
cgctgtgcttgatggaaaa

SEQ ID NO: 536086 - DNA, 19 bp, Mus musculus
  siRNA target sequence for Ivns1abp (NM_054102.1,2205-2223).
ggttctcacgccatcagtt

SEQ ID NO: 536087 - DNA, 19 bp, Mus musculus
  siRNA target sequence for Ivns1abp (NM_054102.1,2231-2249).
gatgtatgatccaactaga

SEQ ID NO: 536088 - DNA, 19 bp, Mus musculus
  siRNA target sequence for Ivns1abp (NM_054102.1,2305-2323).
caactgtagggaataccat

SEQ ID NO: 536089 - DNA, 19 bp, Mus musculus
  siRNA target sequence for Ivns1abp (NM_054102.1,2338-2356).
gattcgatggcaatgagtt

SEQ ID NO: 536090 - DNA, 19 bp, Mus musculus
  siRNA target sequence for Ivns1abp (NM_054102.1,2346-2364).
ggcaatgagtttctgaata

SEQ ID NO: 536091 - DNA, 19 bp, Mus musculus
  siRNA target sequence for Ivns1abp (NM_054102.1,2348-2366).
caatgagtttctgaatact

SEQ ID NO: 536092 - DNA, 19 bp, Mus musculus
  siRNA target sequence for Ivns1abp (NM_054102.1,2375-2393).
ctacaaccctcagtcaaat

SEQ ID NO: 536093 - DNA, 19 bp, Mus musculus
  siRNA target sequence for Ivns1abp (NM_054102.1,2398-2416).
ggagcccttacacaaagat

SEQ ID NO: 536094 - DNA, 19 bp, Mus musculus
  siRNA target sequence for Ivns1abp (NM_054102.1,2399-2417).
gagcccttacacaaagatt

SEQ ID NO: 536095 - DNA, 19 bp, Mus musculus
  siRNA target sequence for Kbtbd3 (NM_026962.1,322-340).
gacagaaaatcttaagtgt

SEQ ID NO: 536096 - DNA, 19 bp, Mus musculus
  siRNA target sequence for Kbtbd3 (NM_026962.1,360-378).
cagaatgtcttttatgact

SEQ ID NO: 536097 - DNA, 19 bp, Mus musculus
  siRNA target sequence for Kbtbd3 (NM_026962.1,428-446).
ggctgcatgcagtgacttt

SEQ ID NO: 536098 - DNA, 19 bp, Mus musculus
  siRNA target sequence for Kbtbd3 (NM_026962.1,429-447).
gctgcatgcagtgactttt

SEQ ID NO: 536099 - DNA, 19 bp, Mus musculus
  siRNA target sequence for Kbtbd3 (NM_026962.1,430-448).
ctgcatgcagtgacttttt

SEQ ID NO: 536100 - DNA, 19 bp, Mus musculus
  siRNA target sequence for Kbtbd3 (NM_026962.1,451-469).
gggctatgttcgaagtaaa

SEQ ID NO: 536101 - DNA, 19 bp, Mus musculus
  siRNA target sequence for Kbtbd3 (NM_026962.1,454-472).
ctatgttcgaagtaaacat

SEQ ID NO: 536102 - DNA, 19 bp, Mus musculus
  siRNA target sequence for Kbtbd3 (NM_026962.1,458-476).
gttcgaagtaaacatgaaa

SEQ ID NO: 536103 - DNA, 19 bp, Mus musculus
  siRNA target sequence for Kbtbd3 (NM_026962.1,486-504).
gacggaagtgttaccatta

SEQ ID NO: 536104 - DNA, 19 bp, Mus musculus
  siRNA target sequence for Kbtbd3 (NM_026962.1,488-506).
cggaagtgttaccattact

SEQ ID NO: 536105 - DNA, 19 bp, Mus musculus
  siRNA target sequence for Kbtbd3 (NM_026962.1,495-513).
gttaccattactaacttgt

SEQ ID NO: 536106 - DNA, 19 bp, Mus musculus
  siRNA target sequence for Kbtbd3 (NM_026962.1,546-564).
gcctatacgggaaaaacaa

SEQ ID NO: 536107 - DNA, 19 bp, Mus musculus
  siRNA target sequence for Kbtbd3 (NM_026962.1,571-589).
cagatgataacgtggaaat

SEQ ID NO: 536108 - DNA, 19 bp, Mus musculus
  siRNA target sequence for Kbtbd3 (NM_026962.1,640-658).
gcagtgactttttaataaa

SEQ ID NO: 536109 - DNA, 19 bp, Mus musculus
  siRNA target sequence for Kbtbd3 (NM_026962.1,669-687).
ctggtcaactgtttgcatt

SEQ ID NO: 536110 - DNA, 19 bp, Mus musculus
  siRNA target sequence for Kbtbd3 (NM_026962.1,722-740).
gttgttcagtcacacttta

SEQ ID NO: 536111 - DNA, 19 bp, Mus musculus
  siRNA target sequence for Kbtbd3 (NM_026962.1,770-788).
gtataaatccagtgacttt

SEQ ID NO: 536112 - DNA, 19 bp, Mus musculus
  siRNA target sequence for Kbtbd3 (NM_026962.1,869-887).
ggctgtcctcacatggatt

SEQ ID NO: 536113 - DNA, 19 bp, Mus musculus
  siRNA target sequence for Kbtbd3 (NM_026962.1,871-889).
ctgtcctcacatggattaa

SEQ ID NO: 536114 - DNA, 19 bp, Mus musculus
  siRNA target sequence for Kbtbd3 (NM_026962.1,873-891).
gtcctcacatggattaagt

SEQ ID NO: 536115 - DNA, 19 bp, Mus musculus
  siRNA target sequence for Kbtbd3 (NM_026962.1,883-901).
ggattaagtacaacttaga

SEQ ID NO: 536116 - DNA, 19 bp, Mus musculus
  siRNA target sequence for Kbtbd3 (NM_026962.1,915-933).
cacctgcctcacttgatta

SEQ ID NO: 536117 - DNA, 19 bp, Mus musculus
  siRNA target sequence for Kbtbd3 (NM_026962.1,920-938).
gcctcacttgattaccaaa

SEQ ID NO: 536118 - DNA, 19 bp, Mus musculus
  siRNA target sequence for Kbtbd3 (NM_026962.1,929-947).
gattaccaaagtaagatta

SEQ ID NO: 536119 - DNA, 19 bp, Mus musculus
  siRNA target sequence for Kbtbd3 (NM_026962.1,934-952).
ccaaagtaagattacatca

SEQ ID NO: 536120 - DNA, 19 bp, Mus musculus
  siRNA target sequence for Kbtbd3 (NM_026962.1,943-961).
gattacatcagttatctga

SEQ ID NO: 536121 - DNA, 19 bp, Mus musculus
  siRNA target sequence for Kbtbd3 (NM_026962.1,962-980).
ggacacacttcaagactat

SEQ ID NO: 536122 - DNA, 19 bp, Mus musculus
  siRNA target sequence for Kbtbd3 (NM_026962.1,990-1008).
gaagagtatttactcaaaa

SEQ ID NO: 536123 - DNA, 19 bp, Mus musculus
  siRNA target sequence for Kbtbd3 (NM_026962.1,1083-1101).
cgaccatccacaactgaaa

SEQ ID NO: 536124 - DNA, 19 bp, Mus musculus
  siRNA target sequence for Kbtbd3 (NM_026962.1,1090-1108).
ccacaactgaaaaatatat

SEQ ID NO: 536125 - DNA, 19 bp, Mus musculus
  siRNA target sequence for Kbtbd3 (NM_026962.1,1091-1109).
cacaactgaaaaatatata

SEQ ID NO: 536126 - DNA, 19 bp, Mus musculus
  siRNA target sequence for Kbtbd3 (NM_026962.1,1134-1152).
ggagaaaatcaatatacat

SEQ ID NO: 536127 - DNA, 19 bp, Mus musculus
  siRNA target sequence for Kbtbd3 (NM_026962.1,1135-1153).
gagaaaatcaatatacatt

SEQ ID NO: 536128 - DNA, 19 bp, Mus musculus
  siRNA target sequence for Kbtbd3 (NM_026962.1,1156-1174).
gctataatattaaaactga

SEQ ID NO: 536129 - DNA, 19 bp, Mus musculus
  siRNA target sequence for Kbtbd3 (NM_026962.1,1181-1199).
gaaaatattgccacaatca

SEQ ID NO: 536130 - DNA, 19 bp, Mus musculus
  siRNA target sequence for Kbtbd3 (NM_026962.1,1190-1208).
gccacaatcacatctgatt

SEQ ID NO: 536131 - DNA, 19 bp, Mus musculus
  siRNA target sequence for Kbtbd3 (NM_026962.1,1192-1210).
cacaatcacatctgattga

SEQ ID NO: 536132 - DNA, 19 bp, Mus musculus
  siRNA target sequence for Kbtbd3 (NM_026962.1,1285-1303).
gaaggattcgacttcatat

SEQ ID NO: 536133 - DNA, 19 bp, Mus musculus
  siRNA target sequence for Kbtbd3 (NM_026962.1,1289-1307).
gattcgacttcatattgca

SEQ ID NO: 536134 - DNA, 19 bp, Mus musculus
  siRNA target sequence for Kbtbd3 (NM_026962.1,1342-1360).
gctactgtccagctaaaaa

SEQ ID NO: 536135 - DNA, 19 bp, Mus musculus
  siRNA target sequence for Kbtbd3 (NM_026962.1,1343-1361).
ctactgtccagctaaaaat

SEQ ID NO: 536136 - DNA, 19 bp, Mus musculus
  siRNA target sequence for Kbtbd3 (NM_026962.1,1348-1366).
gtccagctaaaaatgagtt

SEQ ID NO: 536137 - DNA, 19 bp, Mus musculus
  siRNA target sequence for Kbtbd3 (NM_026962.1,1350-1368).
ccagctaaaaatgagtttt

SEQ ID NO: 536138 - DNA, 19 bp, Mus musculus
  siRNA target sequence for Kbtbd3 (NM_026962.1,1351-1369).
cagctaaaaatgagttttt

SEQ ID NO: 536139 - DNA, 19 bp, Mus musculus
  siRNA target sequence for Kbtbd3 (NM_026962.1,1392-1410).
ccaagaaccatgcatacat

SEQ ID NO: 536140 - DNA, 19 bp, Mus musculus
  siRNA target sequence for Kbtbd3 (NM_026962.1,1413-1431).
gtcatggctctcaatcgat

SEQ ID NO: 536141 - DNA, 19 bp, Mus musculus
  siRNA target sequence for Kbtbd3 (NM_026962.1,1415-1433).
catggctctcaatcgatta

SEQ ID NO: 536142 - DNA, 19 bp, Mus musculus
  siRNA target sequence for Kbtbd3 (NM_026962.1,1418-1436).
ggctctcaatcgattattt

SEQ ID NO: 536143 - DNA, 19 bp, Mus musculus
  siRNA target sequence for Kbtbd3 (NM_026962.1,1420-1438).
ctctcaatcgattatttgt

SEQ ID NO: 536144 - DNA, 19 bp, Mus musculus
  siRNA target sequence for Kbtbd3 (NM_026962.1,1422-1440).
ctcaatcgattatttgtta

SEQ ID NO: 536145 - DNA, 19 bp, Mus musculus
  siRNA target sequence for Kbtbd3 (NM_026962.1,1424-1442).
caatcgattatttgttata

SEQ ID NO: 536146 - DNA, 19 bp, Mus musculus
  siRNA target sequence for Kbtbd3 (NM_026962.1,1437-1455).
gttataggcggaaaaacta

SEQ ID NO: 536147 - DNA, 19 bp, Mus musculus
  siRNA target sequence for Kbtbd3 (NM_026962.1,1462-1480).
cccaggacattaaaagtct

SEQ ID NO: 536148 - DNA, 19 bp, Mus musculus
  siRNA target sequence for Kbtbd3 (NM_026962.1,1466-1484).
ggacattaaaagtctctta

SEQ ID NO: 536149 - DNA, 19 bp, Mus musculus
  siRNA target sequence for Kbtbd3 (NM_026962.1,1479-1497).
ctcttagatgttgaatctt

SEQ ID NO: 536150 - DNA, 19 bp, Mus musculus
  siRNA target sequence for Kbtbd3 (NM_026962.1,1481-1499).
cttagatgttgaatcttat

SEQ ID NO: 536151 - DNA, 19 bp, Mus musculus
  siRNA target sequence for Kbtbd3 (NM_026962.1,1573-1591).
gccagaatatcatttatgt

SEQ ID NO: 536152 - DNA, 19 bp, Mus musculus
  siRNA target sequence for Kbtbd3 (NM_026962.1,1670-1688).
ccagtggtctgaactagta

SEQ ID NO: 536153 - DNA, 19 bp, Mus musculus
  siRNA target sequence for Kbtbd3 (NM_026962.1,1690-1708).
cagagtttgggcagttttt

SEQ ID NO: 536154 - DNA, 19 bp, Mus musculus
  siRNA target sequence for Kbtbd3 (NM_026962.1,1737-1755).
gtaaactgcaccctttata

SEQ ID NO: 536155 - DNA, 19 bp, Mus musculus
  siRNA target sequence for Kbtbd3 (NM_026962.1,1742-1760).
ctgcaccctttatatatgt

SEQ ID NO: 536156 - DNA, 19 bp, Mus musculus
  siRNA target sequence for Kbtbd3 (NM_026962.1,1744-1762).
gcaccctttatatatgtga

SEQ ID NO: 536157 - DNA, 19 bp, Mus musculus
  siRNA target sequence for Kbtbd3 (NM_026962.1,1745-1763).
caccctttatatatgtgat

SEQ ID NO: 536158 - DNA, 19 bp, Mus musculus
  siRNA target sequence for Kbtbd3 (NM_026962.1,1849-1867).
caggtgcaattggaattga

SEQ ID NO: 536159 - DNA, 19 bp, Mus musculus
  siRNA target sequence for Kbtbd3 (NM_026962.1,1855-1873).
caattggaattgaggataa

SEQ ID NO: 536160 - DNA, 19 bp, Mus musculus
  siRNA target sequence for Kbtbd3 (NM_026962.1,1861-1879).
gaattgaggataagattta

SEQ ID NO: 536161 - DNA, 19 bp, Mus musculus
  siRNA target sequence for Kbtbd3 (NM_026962.1,1880-1898).
catattaggtggagattat

SEQ ID NO: 536162 - DNA, 19 bp, Mus musculus
  siRNA target sequence for Kbtbd3 (NM_026962.1,1926-1944).
caggtctaccacagtagta

SEQ ID NO: 536163 - DNA, 19 bp, Mus musculus
  siRNA target sequence for Kbtbd3 (NM_026962.1,1975-1993).
caagagctttaactgaatt

SEQ ID NO: 536164 - DNA, 19 bp, Mus musculus
  siRNA target sequence for Kbtbd3 (NM_026962.1,1978-1996).
gagctttaactgaatttta

SEQ ID NO: 536165 - DNA, 19 bp, Mus musculus
  siRNA target sequence for Kbtbd3 (NM_026962.1,1999-2017).
gtcaggtcattcagttcaa

SEQ ID NO: 536166 - DNA, 19 bp, Mus musculus
  siRNA target sequence for Kbtbd3 (NM_026962.1,2026-2044).
gggacccatggtattcaaa

SEQ ID NO: 536167 - DNA, 19 bp, Mus musculus
  siRNA target sequence for Kbtbd3 (NM_026962.1,2030-2048).
cccatggtattcaaatcat

SEQ ID NO: 536168 - DNA, 19 bp, Mus musculus
  siRNA target sequence for Kbtbd3 (NM_026962.1,2031-2049).
ccatggtattcaaatcatt

SEQ ID NO: 536169 - DNA, 19 bp, Mus musculus
  siRNA target sequence for Kbtbd3 (NM_026962.1,2032-2050).
catggtattcaaatcattt

SEQ ID NO: 536170 - DNA, 19 bp, Mus musculus
  siRNA target sequence for Kcna1 (NM_010595.2,1176-1194).
gctgcgagcgcgtagtaat

SEQ ID NO: 536171 - DNA, 19 bp, Mus musculus
  siRNA target sequence for Kcna1 (NM_010595.2,1179-1197).
gcgagcgcgtagtaatcaa

SEQ ID NO: 536172 - DNA, 19 bp, Mus musculus
  siRNA target sequence for Kcna1 (NM_010595.2,1181-1199).
gagcgcgtagtaatcaaca

SEQ ID NO: 536173 - DNA, 19 bp, Mus musculus
  siRNA target sequence for Kcna1 (NM_010595.2,1184-1202).
cgcgtagtaatcaacatct

SEQ ID NO: 536174 - DNA, 19 bp, Mus musculus
  siRNA target sequence for Kcna1 (NM_010595.2,1273-1291).
gaaacgcatgcgctacttt

SEQ ID NO: 536175 - DNA, 19 bp, Mus musculus
  siRNA target sequence for Kcna1 (NM_010595.2,1408-1426).
gttctccgaggagattaaa

SEQ ID NO: 536176 - DNA, 19 bp, Mus musculus
  siRNA target sequence for Kcna1 (NM_010595.2,1411-1429).
ctccgaggagattaaattt

SEQ ID NO: 536177 - DNA, 19 bp, Mus musculus
  siRNA target sequence for Kcna1 (NM_010595.2,1413-1431).
ccgaggagattaaatttta

SEQ ID NO: 536178 - DNA, 19 bp, Mus musculus
  siRNA target sequence for Kcna1 (NM_010595.2,1961-1979).
gtaagggtgttcagaatct

SEQ ID NO: 536179 - DNA, 19 bp, Mus musculus
  siRNA target sequence for Kcna1 (NM_010595.2,2074-2092).
cattggggtcatactgttt

SEQ ID NO: 536180 - DNA, 19 bp, Mus musculus
  siRNA target sequence for Kcna1 (NM_010595.2,2279-2297).
cccgtacctgtcattgtgt

SEQ ID NO: 536181 - DNA, 19 bp, Mus musculus
  siRNA target sequence for Kcna1 (NM_010595.2,2345-2363).
gctcagttgctccatgtta

SEQ ID NO: 536182 - DNA, 19 bp, Mus musculus
  siRNA target sequence for Kcna1 (NM_010595.2,2348-2366).
cagttgctccatgttagtt

SEQ ID NO: 536183 - DNA, 19 bp, Mus musculus
  siRNA target sequence for Kcna1 (NM_010595.2,2350-2368).
gttgctccatgttagttct

SEQ ID NO: 536184 - DNA, 19 bp, Mus musculus
  siRNA target sequence for Kcna1 (NM_010595.2,2471-2489).
cattacagacaggctaata

SEQ ID NO: 536185 - DNA, 19 bp, Mus musculus
  siRNA target sequence for Kcna1 (NM_010595.2,2505-2523).
gcaccacagctgatcaaaa

SEQ ID NO: 536186 - DNA, 19 bp, Mus musculus
  siRNA target sequence for Kcna1 (NM_010595.2,2516-2534).
gatcaaaactgcgttaata

SEQ ID NO: 536187 - DNA, 19 bp, Mus musculus
  siRNA target sequence for Kcna1 (NM_010595.2,2519-2537).
caaaactgcgttaataaga

SEQ ID NO: 536188 - DNA, 19 bp, Mus musculus
  siRNA target sequence for Kcna2 (NM_008417.2,756-774).
ccagaggcagaccatgaat

SEQ ID NO: 536189 - DNA, 19 bp, Mus musculus
  siRNA target sequence for Kcna2 (NM_008417.2,805-823).
gcctgcggttcgaaactca

SEQ ID NO: 536190 - DNA, 19 bp, Mus musculus
  siRNA target sequence for Kcna2 (NM_008417.2,811-829).
ggttcgaaactcagctaaa

SEQ ID NO: 536191 - DNA, 19 bp, Mus musculus
  siRNA target sequence for Kcna2 (NM_008417.2,891-909).
gatcccctccgaaatgagt

SEQ ID NO: 536192 - DNA, 19 bp, Mus musculus
  siRNA target sequence for Kcna2 (NM_008417.2,896-914).
cctccgaaatgagtacttt

SEQ ID NO: 536193 - DNA, 19 bp, Mus musculus
  siRNA target sequence for Kcna2 (NM_008417.2,899-917).
ccgaaatgagtactttttt

SEQ ID NO: 536194 - DNA, 19 bp, Mus musculus
  siRNA target sequence for Kcna2 (NM_008417.2,987-1005).
gtgaacgtgcccttagata

SEQ ID NO: 536195 - DNA, 19 bp, Mus musculus
  siRNA target sequence for Kcna2 (NM_008417.2,993-1011).
gtgcccttagatatcttct

SEQ ID NO: 536196 - DNA, 19 bp, Mus musculus
  siRNA target sequence for Kcna2 (NM_008417.2,1012-1030).
cggaagaaatccggtttta

SEQ ID NO: 536197 - DNA, 19 bp, Mus musculus
  siRNA target sequence for Kcna2 (NM_008417.2,1013-1031).
ggaagaaatccggttttat

SEQ ID NO: 536198 - DNA, 19 bp, Mus musculus
  siRNA target sequence for Kcna2 (NM_008417.2,1094-1112).
gcgtcctctgcctgaaaat

SEQ ID NO: 536199 - DNA, 19 bp, Mus musculus
  siRNA target sequence for Kcna2 (NM_008417.2,1172-1190).
gattatagccattgtatct

SEQ ID NO: 536200 - DNA, 19 bp, Mus musculus
  siRNA target sequence for Kcna2 (NM_008417.2,1219-1237).
gcttctgtctggaaacctt

SEQ ID NO: 536201 - DNA, 19 bp, Mus musculus
  siRNA target sequence for Kcna2 (NM_008417.2,1467-1485).
gctatcatcccttacttta

SEQ ID NO: 536202 - DNA, 19 bp, Mus musculus
  siRNA target sequence for Kcna2 (NM_008417.2,1468-1486).
ctatcatcccttactttat

SEQ ID NO: 536203 - DNA, 19 bp, Mus musculus
  siRNA target sequence for Kcna2 (NM_008417.2,1577-1595).
ggtaagagtctttaggatt

SEQ ID NO: 536204 - DNA, 19 bp, Mus musculus
  siRNA target sequence for Kcna2 (NM_008417.2,1613-1631).
ctccaaaggtctacagatt

SEQ ID NO: 536205 - DNA, 19 bp, Mus musculus
  siRNA target sequence for Kcna2 (NM_008417.2,1615-1633).
ccaaaggtctacagattct

SEQ ID NO: 536206 - DNA, 19 bp, Mus musculus
  siRNA target sequence for Kcna2 (NM_008417.2,1616-1634).
caaaggtctacagattcta

SEQ ID NO: 536207 - DNA, 19 bp, Mus musculus
  siRNA target sequence for Kcna2 (NM_008417.2,1662-1680).
gaattgggcctcctgatat

SEQ ID NO: 536208 - DNA, 19 bp, Mus musculus
  siRNA target sequence for Kcna2 (NM_008417.2,1820-1838).
catggttccaactaccatt

SEQ ID NO: 536209 - DNA, 19 bp, Mus musculus
  siRNA target sequence for Kcna2 (NM_008417.2,1834-1852).
ccattggggggaagatagt

SEQ ID NO: 536210 - DNA, 19 bp, Mus musculus
  siRNA target sequence for Kcna2 (NM_008417.2,1866-1884).
gcaattgcaggtgtgttaa

SEQ ID NO: 536211 - DNA, 19 bp, Mus musculus
  siRNA target sequence for Kcna2 (NM_008417.2,1999-2017).
cgtcctcccctgacctaaa

SEQ ID NO: 536212 - DNA, 19 bp, Mus musculus
  siRNA target sequence for Kcna2 (NM_008417.2,2006-2024).
ccctgacctaaagaaaagt

SEQ ID NO: 536213 - DNA, 19 bp, Mus musculus
  siRNA target sequence for Kcna2 (NM_008417.2,2007-2025).
cctgacctaaagaaaagta

SEQ ID NO: 536214 - DNA, 19 bp, Mus musculus
  siRNA target sequence for Kcna2 (NM_008417.2,2029-2047).
gtgcctctaccataagtaa

SEQ ID NO: 536215 - DNA, 19 bp, Mus musculus
  siRNA target sequence for Kcna2 (NM_008417.2,2031-2049).
gcctctaccataagtaagt

SEQ ID NO: 536216 - DNA, 19 bp, Mus musculus
  siRNA target sequence for Kcna2 (NM_008417.2,2033-2051).
ctctaccataagtaagtct

SEQ ID NO: 536217 - DNA, 19 bp, Mus musculus
  siRNA target sequence for Kcna2 (NM_008417.2,2038-2056).
ccataagtaagtctgatta

SEQ ID NO: 536218 - DNA, 19 bp, Mus musculus
  siRNA target sequence for Kcna2 (NM_008417.2,2126-2144).
ctgtaccttggctaacaca

SEQ ID NO: 536219 - DNA, 19 bp, Mus musculus
  siRNA target sequence for Kcna2 (NM_008417.2,2128-2146).
gtaccttggctaacacaaa

SEQ ID NO: 536220 - DNA, 19 bp, Mus musculus
  siRNA target sequence for Kcna2 (NM_008417.2,2131-2149).
ccttggctaacacaaacta

SEQ ID NO: 536221 - DNA, 19 bp, Mus musculus
  siRNA target sequence for Kcna2 (NM_008417.2,2137-2155).
ctaacacaaactatgtgaa

SEQ ID NO: 536222 - DNA, 19 bp, Mus musculus
  siRNA target sequence for Kcna2 (NM_008417.2,2147-2165).
ctatgtgaatattaccaaa

SEQ ID NO: 536223 - DNA, 19 bp, Mus musculus
  siRNA target sequence for Kcna2 (NM_008417.2,2151-2169).
gtgaatattaccaaaatgt

SEQ ID NO: 536224 - DNA, 19 bp, Mus musculus
  siRNA target sequence for Kcna3 (NM_008418.1,167-185).
gcgagcgtgtggtcatcaa

SEQ ID NO: 536225 - DNA, 19 bp, Mus musculus
  siRNA target sequence for Kcna3 (NM_008418.1,280-298).
gacccactccgcaatgagt

SEQ ID NO: 536226 - DNA, 19 bp, Mus musculus
  siRNA target sequence for Kcna3 (NM_008418.1,382-400).
gtgcccatcgacatcttct

SEQ ID NO: 536227 - DNA, 19 bp, Mus musculus
  siRNA target sequence for Kcna3 (NM_008418.1,629-647).
ccgagtttcgcgatgagaa

SEQ ID NO: 536228 - DNA, 19 bp, Mus musculus
  siRNA target sequence for Kcna3 (NM_008418.1,630-648).
cgagtttcgcgatgagaaa

SEQ ID NO: 536229 - DNA, 19 bp, Mus musculus
  siRNA target sequence for Kcna3 (NM_008418.1,665-683).
cgtcgcaggacgtgtttga

SEQ ID NO: 536230 - DNA, 19 bp, Mus musculus
  siRNA target sequence for Kcna3 (NM_008418.1,786-804).
gcttctggtgcggttcttt

SEQ ID NO: 536231 - DNA, 19 bp, Mus musculus
  siRNA target sequence for Kcna3 (NM_008418.1,821-839).
ccaccttctccagaaatat

SEQ ID NO: 536232 - DNA, 19 bp, Mus musculus
  siRNA target sequence for Kcna3 (NM_008418.1,900-918).
ggctgaacgacaaggtaat

SEQ ID NO: 536233 - DNA, 19 bp, Mus musculus
  siRNA target sequence for Kcna3 (NM_008418.1,1126-1144).
gacccttcttcgggtttta

SEQ ID NO: 536234 - DNA, 19 bp, Mus musculus
  siRNA target sequence for Kcna3 (NM_008418.1,1129-1147).
ccttcttcgggttttaaca

SEQ ID NO: 536235 - DNA, 19 bp, Mus musculus
  siRNA target sequence for Kcna3 (NM_008418.1,1133-1151).
cttcgggttttaacagtat

SEQ ID NO: 536236 - DNA, 19 bp, Mus musculus
  siRNA target sequence for Kcna3 (NM_008418.1,1185-1203).
gacaactgttggttatggt

SEQ ID NO: 536237 - DNA, 19 bp, Mus musculus
  siRNA target sequence for Kcna3 (NM_008418.1,1190-1208).
ctgttggttatggtgatat

SEQ ID NO: 536238 - DNA, 19 bp, Mus musculus
  siRNA target sequence for Kcna3 (NM_008418.1,1218-1236).
gaccataggaggcaagatt

SEQ ID NO: 536239 - DNA, 19 bp, Mus musculus
  siRNA target sequence for Kcna3 (NM_008418.1,1220-1238).
ccataggaggcaagattgt

SEQ ID NO: 536240 - DNA, 19 bp, Mus musculus
  siRNA target sequence for Kcna3 (NM_008418.1,1405-1423).
cgaaaagcccggagtaact

SEQ ID NO: 536241 - DNA, 19 bp, Mus musculus
  siRNA target sequence for Kcna3 (NM_008418.1,1429-1447).
ctgagtaagtcggagtata

SEQ ID NO: 536242 - DNA, 19 bp, Mus musculus
  siRNA target sequence for Kcna3 (NM_008418.1,1433-1451).
gtaagtcggagtatatggt

SEQ ID NO: 536243 - DNA, 19 bp, Mus musculus
  siRNA target sequence for Kcna3 (NM_008418.1,1521-1539).
cacttgcaccacgaacaat

SEQ ID NO: 536244 - DNA, 19 bp, Mus musculus
  siRNA target sequence for Kcna3 (NM_008418.1,1523-1541).
cttgcaccacgaacaataa

SEQ ID NO: 536245 - DNA, 19 bp, Mus musculus
  siRNA target sequence for Kcna3 (NM_008418.1,1560-1578).
catcaagaagatattcact

SEQ ID NO: 536246 - DNA, 19 bp, Mus musculus
  siRNA target sequence for Kcna4 (NM_021275.2,1240-1258).
cagccatatgccttatggt

SEQ ID NO: 536247 - DNA, 19 bp, Mus musculus
  siRNA target sequence for Kcna4 (NM_021275.2,1242-1260).
gccatatgccttatggtta

SEQ ID NO: 536248 - DNA, 19 bp, Mus musculus
  siRNA target sequence for Kcna4 (NM_021275.2,1430-1448).
ggtagccgtggaagtagaa

SEQ ID NO: 536249 - DNA, 19 bp, Mus musculus
  siRNA target sequence for Kcna4 (NM_021275.2,1458-1476).
gtcagcgaactgagaagaa

SEQ ID NO: 536250 - DNA, 19 bp, Mus musculus
  siRNA target sequence for Kcna4 (NM_021275.2,1611-1629).
gaaggttttactatagtga

SEQ ID NO: 536251 - DNA, 19 bp, Mus musculus
  siRNA target sequence for Kcna4 (NM_021275.2,1699-1717).
cagttcagtccgctatagt

SEQ ID NO: 536252 - DNA, 19 bp, Mus musculus
  siRNA target sequence for Kcna4 (NM_021275.2,1701-1719).
gttcagtccgctatagtga

SEQ ID NO: 536253 - DNA, 19 bp, Mus musculus
  siRNA target sequence for Kcna4 (NM_021275.2,1757-1775).
cgcttcgaaacccaaatga

SEQ ID NO: 536254 - DNA, 19 bp, Mus musculus
  siRNA target sequence for Kcna4 (NM_021275.2,1759-1777).
cttcgaaacccaaatgaaa

SEQ ID NO: 536255 - DNA, 19 bp, Mus musculus
  siRNA target sequence for Kcna4 (NM_021275.2,1838-1856).
gaccctttgcgcaatgagt

SEQ ID NO: 536256 - DNA, 19 bp, Mus musculus
  siRNA target sequence for Kcna4 (NM_021275.2,1840-1858).
ccctttgcgcaatgagtat

SEQ ID NO: 536257 - DNA, 19 bp, Mus musculus
  siRNA target sequence for Kcna4 (NM_021275.2,1841-1859).
cctttgcgcaatgagtatt

SEQ ID NO: 536258 - DNA, 19 bp, Mus musculus
  siRNA target sequence for Kcna4 (NM_021275.2,1842-1860).
ctttgcgcaatgagtattt

SEQ ID NO: 536259 - DNA, 19 bp, Mus musculus
  siRNA target sequence for Kcna4 (NM_021275.2,1846-1864).
gcgcaatgagtattttttt

SEQ ID NO: 536260 - DNA, 19 bp, Mus musculus
  siRNA target sequence for Kcna4 (NM_021275.2,1921-1939).
cctgaagagaccagtcaat

SEQ ID NO: 536261 - DNA, 19 bp, Mus musculus
  siRNA target sequence for Kcna4 (NM_021275.2,1959-1977).
ccgaggaggtgaagttcta

SEQ ID NO: 536262 - DNA, 19 bp, Mus musculus
  siRNA target sequence for Kcna4 (NM_021275.2,1964-1982).
gaggtgaagttctatcagt

SEQ ID NO: 536263 - DNA, 19 bp, Mus musculus
  siRNA target sequence for Kcna4 (NM_021275.2,2048-2066).
gctctgccagaaaatgaat

SEQ ID NO: 536264 - DNA, 19 bp, Mus musculus
  siRNA target sequence for Kcna4 (NM_021275.2,2144-2162).
ctggtcatcttaatctcta

SEQ ID NO: 536265 - DNA, 19 bp, Mus musculus
  siRNA target sequence for Kcna4 (NM_021275.2,2146-2164).
ggtcatcttaatctctatt

SEQ ID NO: 536266 - DNA, 19 bp, Mus musculus
  siRNA target sequence for Kcna4 (NM_021275.2,2189-2207).
ccggagttcagggatgata

SEQ ID NO: 536267 - DNA, 19 bp, Mus musculus
  siRNA target sequence for Kcna4 (NM_021275.2,2281-2299).
gaactcagggcacacaata

SEQ ID NO: 536268 - DNA, 19 bp, Mus musculus
  siRNA target sequence for Kcna4 (NM_021275.2,2286-2304).
cagggcacacaatattcaa

SEQ ID NO: 536269 - DNA, 19 bp, Mus musculus
  siRNA target sequence for Kcna4 (NM_021275.2,2360-2378).
gtggttcgatgctttgctt

SEQ ID NO: 536270 - DNA, 19 bp, Mus musculus
  siRNA target sequence for Kcna4 (NM_021275.2,2387-2405).
caagcactcttcttcaaaa

SEQ ID NO: 536271 - DNA, 19 bp, Mus musculus
  siRNA target sequence for Kcna4 (NM_021275.2,2549-2567).
cgagtattccggatcttca

SEQ ID NO: 536272 - DNA, 19 bp, Mus musculus
  siRNA target sequence for Kcna4 (NM_021275.2,2550-2568).
gagtattccggatcttcaa

SEQ ID NO: 536273 - DNA, 19 bp, Mus musculus
  siRNA target sequence for Kcna4 (NM_021275.2,2627-2645).
cgggaactgggccttctta

SEQ ID NO: 536274 - DNA, 19 bp, Mus musculus
  siRNA target sequence for Kcna4 (NM_021275.2,2633-2651).
ctgggccttcttatctttt

SEQ ID NO: 536275 - DNA, 19 bp, Mus musculus
  siRNA target sequence for Kcna4 (NM_021275.2,2680-2698).
cagcgctgtgtattttgca

SEQ ID NO: 536276 - DNA, 19 bp, Mus musculus
  siRNA target sequence for Kcna4 (NM_021275.2,2715-2733).
ctacccatttccaaagcat

SEQ ID NO: 536277 - DNA, 19 bp, Mus musculus
  siRNA target sequence for Kcna4 (NM_021275.2,2834-2852).
gccattgcgggtgtcttaa

SEQ ID NO: 536278 - DNA, 19 bp, Mus musculus
  siRNA target sequence for Kcna4 (NM_021275.2,2870-2888).
ccggtgattgtgtctaact

SEQ ID NO: 536279 - DNA, 19 bp, Mus musculus
  siRNA target sequence for Kcna4 (NM_021275.2,2871-2889).
cggtgattgtgtctaactt

SEQ ID NO: 536280 - DNA, 19 bp, Mus musculus
  siRNA target sequence for Kcna4 (NM_021275.2,2872-2890).
ggtgattgtgtctaacttt

SEQ ID NO: 536281 - DNA, 19 bp, Mus musculus
  siRNA target sequence for Kcna4 (NM_021275.2,2927-2945).
cagacccagctgacacaaa

SEQ ID NO: 536282 - DNA, 19 bp, Mus musculus
  siRNA target sequence for Kcna4 (NM_021275.2,2958-2976).
gtccatacctaccttctaa

SEQ ID NO: 536283 - DNA, 19 bp, Mus musculus
  siRNA target sequence for Kcna4 (NM_021275.2,2960-2978).
ccatacctaccttctaatt

SEQ ID NO: 536284 - DNA, 19 bp, Mus musculus
  siRNA target sequence for Kcna4 (NM_021275.2,3116-3134).
gataaaaacaactgttcta

SEQ ID NO: 536285 - DNA, 19 bp, Mus musculus
  siRNA target sequence for Kcna5 (NM_145983.1,361-379).
ccgacggctggactcaata

SEQ ID NO: 536286 - DNA, 19 bp, Mus musculus
  siRNA target sequence for Kcna5 (NM_145983.1,362-380).
cgacggctggactcaataa

SEQ ID NO: 536287 - DNA, 19 bp, Mus musculus
  siRNA target sequence for Kcna5 (NM_145983.1,363-381).
gacggctggactcaataat

SEQ ID NO: 536288 - DNA, 19 bp, Mus musculus
  siRNA target sequence for Kcna5 (NM_145983.1,365-383).
cggctggactcaataatca

SEQ ID NO: 536289 - DNA, 19 bp, Mus musculus
  siRNA target sequence for Kcna5 (NM_145983.1,577-595).
caccagcgggtcctcataa

SEQ ID NO: 536290 - DNA, 19 bp, Mus musculus
  siRNA target sequence for Kcna5 (NM_145983.1,580-598).
cagcgggtcctcataaaca

SEQ ID NO: 536291 - DNA, 19 bp, Mus musculus
  siRNA target sequence for Kcna5 (NM_145983.1,657-675).
cctgggggacccagtcaaa

SEQ ID NO: 536292 - DNA, 19 bp, Mus musculus
  siRNA target sequence for Kcna5 (NM_145983.1,687-705).
cttcgatcccttgagaaat

SEQ ID NO: 536293 - DNA, 19 bp, Mus musculus
  siRNA target sequence for Kcna5 (NM_145983.1,778-796).
cgcaggccggtcaatgtct

SEQ ID NO: 536294 - DNA, 19 bp, Mus musculus
  siRNA target sequence for Kcna5 (NM_145983.1,1236-1254).
gctgcttgtgcgtttcttt

SEQ ID NO: 536295 - DNA, 19 bp, Mus musculus
  siRNA target sequence for Kcna5 (NM_145983.1,1273-1291).
gaattctctcggaatatta

SEQ ID NO: 536296 - DNA, 19 bp, Mus musculus
  siRNA target sequence for Kcna5 (NM_145983.1,1280-1298).
ctcggaatattatgaacat

SEQ ID NO: 536297 - DNA, 19 bp, Mus musculus
  siRNA target sequence for Kcna5 (NM_145983.1,1575-1593).
cttcgcagaggcagacaat

SEQ ID NO: 536298 - DNA, 19 bp, Mus musculus
  siRNA target sequence for Kcna5 (NM_145983.1,1755-1773).
cgtcatcgtctccaatttt

SEQ ID NO: 536299 - DNA, 19 bp, Mus musculus
  siRNA target sequence for Kcna5 (NM_145983.1,1758-1776).
catcgtctccaattttaat

SEQ ID NO: 536300 - DNA, 19 bp, Mus musculus
  siRNA target sequence for Kcna5 (NM_145983.1,1929-1947).
gagtactgacagtatcaga

SEQ ID NO: 536301 - DNA, 19 bp, Mus musculus
  siRNA target sequence for Kcna5 (NM_145983.1,1950-1968).
gggtagctgtcctctagaa

SEQ ID NO: 536302 - DNA, 19 bp, Mus musculus
  siRNA target sequence for Kcna5 (NM_145983.1,2001-2019).
cctgcgaaggtctctgtat

SEQ ID NO: 536303 - DNA, 19 bp, Mus musculus
  siRNA target sequence for Kcna5 (NM_145983.1,2034-2052).
cactagccgggaaacagat

SEQ ID NO: 536304 - DNA, 19 bp, Mus musculus
  siRNA target sequence for Kcna5 (NM_145983.1,2036-2054).
ctagccgggaaacagattt

SEQ ID NO: 536305 - DNA, 19 bp, Mus musculus
  siRNA target sequence for Kcna6 (NM_013568.3,389-407).
gtgagaggttggtgatcaa

SEQ ID NO: 536306 - DNA, 19 bp, Mus musculus
  siRNA target sequence for Kcna6 (NM_013568.3,482-500).
gccgcagagtccgtttctt

SEQ ID NO: 536307 - DNA, 19 bp, Mus musculus
  siRNA target sequence for Kcna6 (NM_013568.3,483-501).
ccgcagagtccgtttcttt

SEQ ID NO: 536308 - DNA, 19 bp, Mus musculus
  siRNA target sequence for Kcna6 (NM_013568.3,552-570).
cgctatcctttattactat

SEQ ID NO: 536309 - DNA, 19 bp, Mus musculus
  siRNA target sequence for Kcna6 (NM_013568.3,624-642).
ggaagagatccgcttctat

SEQ ID NO: 536310 - DNA, 19 bp, Mus musculus
  siRNA target sequence for Kcna6 (NM_013568.3,628-646).
gagatccgcttctatcagt

SEQ ID NO: 536311 - DNA, 19 bp, Mus musculus
  siRNA target sequence for Kcna6 (NM_013568.3,1000-1018).
gggactggaggaacatctt

SEQ ID NO: 536312 - DNA, 19 bp, Mus musculus
  siRNA target sequence for Kcna6 (NM_013568.3,1025-1043).
gtactctcgggggttcttt

SEQ ID NO: 536313 - DNA, 19 bp, Mus musculus
  siRNA target sequence for Kcna6 (NM_013568.3,1455-1473).
cttcgcagaggctgatgat

SEQ ID NO: 536314 - DNA, 19 bp, Mus musculus
  siRNA target sequence for Kcna6 (NM_013568.3,1458-1476).
cgcagaggctgatgatgtt

SEQ ID NO: 536315 - DNA, 19 bp, Mus musculus
  siRNA target sequence for Kcna6 (NM_013568.3,1526-1544).
caatgaccacggtaggtta

SEQ ID NO: 536316 - DNA, 19 bp, Mus musculus
  siRNA target sequence for Kcna6 (NM_013568.3,1608-1626).
ggtcctcaccattgcatta

SEQ ID NO: 536317 - DNA, 19 bp, Mus musculus
  siRNA target sequence for Kcna6 (NM_013568.3,1812-1830).
gactccacatcgagcttat

SEQ ID NO: 536318 - DNA, 19 bp, Mus musculus
  siRNA target sequence for Kcna6 (NM_013568.3,1822-1840).
cgagcttatgcggagaaaa

SEQ ID NO: 536319 - DNA, 19 bp, Mus musculus
  siRNA target sequence for Kcna6 (NM_013568.3,1826-1844).
cttatgcggagaaaaggat

SEQ ID NO: 536320 - DNA, 19 bp, Mus musculus
  siRNA target sequence for Kcna7 (NM_010596.1,389-407).
gccggactttccatgctat

SEQ ID NO: 536321 - DNA, 19 bp, Mus musculus
  siRNA target sequence for Kcna7 (NM_010596.1,390-408).
ccggactttccatgctatt

SEQ ID NO: 536322 - DNA, 19 bp, Mus musculus
  siRNA target sequence for Kcna7 (NM_010596.1,391-409).
cggactttccatgctattt

SEQ ID NO: 536323 - DNA, 19 bp, Mus musculus
  siRNA target sequence for Kcna7 (NM_010596.1,691-709).
gatgcggtgctctactact

SEQ ID NO: 536324 - DNA, 19 bp, Mus musculus
  siRNA target sequence for Kcna7 (NM_010596.1,1101-1119).
cttcaacgatccattcttt

SEQ ID NO: 536325 - DNA, 19 bp, Mus musculus
  siRNA target sequence for Kcna7 (NM_010596.1,1210-1228).
gtgatgaacctaattgact

SEQ ID NO: 536326 - DNA, 19 bp, Mus musculus
  siRNA target sequence for Kcna7 (NM_010596.1,1373-1391).
cgaagggtctacagatctt

SEQ ID NO: 536327 - DNA, 19 bp, Mus musculus
  siRNA target sequence for Kcna7 (NM_010596.1,1498-1516).
cgggtggacacccatttca

SEQ ID NO: 536328 - DNA, 19 bp, Mus musculus
  siRNA target sequence for Kcna7 (NM_010596.1,1711-1729).
gaagaggcagggatgtaca

SEQ ID NO: 536329 - DNA, 19 bp, Mus musculus
  siRNA target sequence for Kcnb1 (NM_008420.3,445-463).
gcgccttcacctctattct

SEQ ID NO: 536330 - DNA, 19 bp, Mus musculus
  siRNA target sequence for Kcnb1 (NM_008420.3,447-465).
gccttcacctctattctca

SEQ ID NO: 536331 - DNA, 19 bp, Mus musculus
  siRNA target sequence for Kcnb1 (NM_008420.3,921-939).
ctgtcctcgcccaagaaat

SEQ ID NO: 536332 - DNA, 19 bp, Mus musculus
  siRNA target sequence for Kcnb1 (NM_008420.3,932-950).
caagaaatggaagttcttt

SEQ ID NO: 536333 - DNA, 19 bp, Mus musculus
  siRNA target sequence for Kcnb1 (NM_008420.3,957-975).
cccctcaacgccattgact

SEQ ID NO: 536334 - DNA, 19 bp, Mus musculus
  siRNA target sequence for Kcnb1 (NM_008420.3,958-976).
ccctcaacgccattgactt

SEQ ID NO: 536335 - DNA, 19 bp, Mus musculus
  siRNA target sequence for Kcnb1 (NM_008420.3,1392-1410).
gccctccccattccaatta

SEQ ID NO: 536336 - DNA, 19 bp, Mus musculus
  siRNA target sequence for Kcnb1 (NM_008420.3,1393-1411).
ccctccccattccaattat

SEQ ID NO: 536337 - DNA, 19 bp, Mus musculus
  siRNA target sequence for Kcnb1 (NM_008420.3,1404-1422).
ccaattatcgtcaataact

SEQ ID NO: 536338 - DNA, 19 bp, Mus musculus
  siRNA target sequence for Kcnb1 (NM_008420.3,1405-1423).
caattatcgtcaataactt

SEQ ID NO: 536339 - DNA, 19 bp, Mus musculus
  siRNA target sequence for Kcnb1 (NM_008420.3,1629-1647).
cccaacaagtggaaatgga

SEQ ID NO: 536340 - DNA, 19 bp, Mus musculus
  siRNA target sequence for Kcnb1 (NM_008420.3,1732-1750).
ctagtccgcagcacttgaa

SEQ ID NO: 536341 - DNA, 19 bp, Mus musculus
  siRNA target sequence for Kcnb1 (NM_008420.3,1917-1935).
gacatgcgcagcatgtcta

SEQ ID NO: 536342 - DNA, 19 bp, Mus musculus
  siRNA target sequence for Kcnb1 (NM_008420.3,2178-2196).
ctgcgagcgctcaaggtta

SEQ ID NO: 536343 - DNA, 19 bp, Mus musculus
  siRNA target sequence for Kcnb1 (NM_008420.3,2181-2199).
cgagcgctcaaggttaact

SEQ ID NO: 536344 - DNA, 19 bp, Mus musculus
  siRNA target sequence for Kcnb1 (NM_008420.3,2182-2200).
gagcgctcaaggttaactt

SEQ ID NO: 536345 - DNA, 19 bp, Mus musculus
  siRNA target sequence for Kcnb1 (NM_008420.3,2230-2248).
cggctctgggcttgtatca

SEQ ID NO: 536346 - DNA, 19 bp, Mus musculus
  siRNA target sequence for Kcnb1 (NM_008420.3,2379-2397).
cgctccccagagaaacaca

SEQ ID NO: 536347 - DNA, 19 bp, Mus musculus
  siRNA target sequence for Kcnb1 (NM_008420.3,2398-2416).
cagcaatagcgttcaactt

SEQ ID NO: 536348 - DNA, 19 bp, Mus musculus
  siRNA target sequence for Kcnb1 (NM_008420.3,2539-2557).
gagctagaacagaaaagaa

SEQ ID NO: 536349 - DNA, 19 bp, Mus musculus
  siRNA target sequence for Kcnb1 (NM_008420.3,2582-2600).
cacctcccctaagttctta

SEQ ID NO: 536350 - DNA, 19 bp, Mus musculus
  siRNA target sequence for Kcnc1 (NM_008421.1,156-174).
gcgagcgcatcgtgatcaa

SEQ ID NO: 536351 - DNA, 19 bp, Mus musculus
  siRNA target sequence for Kcnc1 (NM_008421.1,285-303).
cgcgtgccgacgagttctt

SEQ ID NO: 536352 - DNA, 19 bp, Mus musculus
  siRNA target sequence for Kcnc1 (NM_008421.1,287-305).
cgtgccgacgagttcttct

SEQ ID NO: 536353 - DNA, 19 bp, Mus musculus
  siRNA target sequence for Kcnc1 (NM_008421.1,288-306).
gtgccgacgagttcttctt

SEQ ID NO: 536354 - DNA, 19 bp, Mus musculus
  siRNA target sequence for Kcnc1 (NM_008421.1,328-346).
cgctcacatcctgaactat

SEQ ID NO: 536355 - DNA, 19 bp, Mus musculus
  siRNA target sequence for Kcnc1 (NM_008421.1,330-348).
ctcacatcctgaactatta

SEQ ID NO: 536356 - DNA, 19 bp, Mus musculus
  siRNA target sequence for Kcnc1 (NM_008421.1,947-965).
gtggaattcatcaagaact

SEQ ID NO: 536357 - DNA, 19 bp, Mus musculus
  siRNA target sequence for Kcnc1 (NM_008421.1,961-979).
gaactccctcaatatcatt

SEQ ID NO: 536358 - DNA, 19 bp, Mus musculus
  siRNA target sequence for Kcnc1 (NM_008421.1,1270-1288).
cagcgaacacacacacttt

SEQ ID NO: 536359 - DNA, 19 bp, Mus musculus
  siRNA target sequence for Kcnc1 (NM_008421.1,1531-1549).
gctgggatctcccaattat

SEQ ID NO: 536360 - DNA, 19 bp, Mus musculus
  siRNA target sequence for Kcnc1 (NM_008421.1,1532-1550).
ctgggatctcccaattatt

SEQ ID NO: 536361 - DNA, 19 bp, Mus musculus
  siRNA target sequence for Kcnc1 (NM_008421.1,1535-1553).
ggatctcccaattattgta

SEQ ID NO: 536362 - DNA, 19 bp, Mus musculus
  siRNA target sequence for Kcnc1 (NM_008421.1,1542-1560).
ccaattattgtaaatctgt

SEQ ID NO: 536363 - DNA, 19 bp, Mus musculus
  siRNA target sequence for Kcnc1 (NM_008421.1,1602-1620).
cgctggcccaggaagaaat

SEQ ID NO: 536364 - DNA, 19 bp, Mus musculus
  siRNA target sequence for Kcnc1 (NM_008421.1,1604-1622).
ctggcccaggaagaaattt

SEQ ID NO: 536365 - DNA, 19 bp, Mus musculus
  siRNA target sequence for Kcnc1 (NM_008421.1,1606-1624).
ggcccaggaagaaatttta

SEQ ID NO: 536366 - DNA, 19 bp, Mus musculus
  siRNA target sequence for Kcnc1 (NM_008421.1,1613-1631).
gaagaaattttagaaatta

SEQ ID NO: 536367 - DNA, 19 bp, Mus musculus
  siRNA target sequence for Kcnc3 (NM_008422.1,32-50).
gcggtaagatcgtgatcaa

SEQ ID NO: 536368 - DNA, 19 bp, Mus musculus
  siRNA target sequence for Kcnc3 (NM_008422.1,163-181).
ggcacggacgagttcttct

SEQ ID NO: 536369 - DNA, 19 bp, Mus musculus
  siRNA target sequence for Kcnc3 (NM_008422.1,164-182).
gcacggacgagttcttctt

SEQ ID NO: 536370 - DNA, 19 bp, Mus musculus
  siRNA target sequence for Kcnc3 (NM_008422.1,588-606).
ccgtgtgtgggcgcttttt

SEQ ID NO: 536371 - DNA, 19 bp, Mus musculus
  siRNA target sequence for Kcnc3 (NM_008422.1,590-608).
gtgtgtgggcgctttttga

SEQ ID NO: 536372 - DNA, 19 bp, Mus musculus
  siRNA target sequence for Kcnc3 (NM_008422.1,793-811).
gagacggaacccttcttga

SEQ ID NO: 536373 - DNA, 19 bp, Mus musculus
  siRNA target sequence for Kcnc3 (NM_008422.1,1389-1407).
cttcggcatgtactattca

SEQ ID NO: 536374 - DNA, 19 bp, Mus musculus
  siRNA target sequence for Kcnc3 (NM_008422.1,1816-1834).
gggcagggtttcttaggtt

SEQ ID NO: 536375 - DNA, 19 bp, Mus musculus
  siRNA target sequence for Kcnc3 (NM_008422.1,1920-1938).
caggattccacgtacaaga

SEQ ID NO: 536376 - DNA, 19 bp, Mus musculus
  siRNA target sequence for Kcnc3 (NM_008422.1,1940-1958).
cttgtgaacacggatttca

SEQ ID NO: 536377 - DNA, 19 bp, Mus musculus
  siRNA target sequence for Kcnc3 (NM_008422.1,1957-1975).
cagccaggctgctctcaaa

SEQ ID NO: 536378 - DNA, 19 bp, Mus musculus
  siRNA target sequence for Kcnc4 (NM_145922.1,59-77).
caagcctccgtccaaaaca

SEQ ID NO: 536379 - DNA, 19 bp, Mus musculus
  siRNA target sequence for Kcnc4 (NM_145922.1,62-80).
gcctccgtccaaaacatgt

SEQ ID NO: 536380 - DNA, 19 bp, Mus musculus
  siRNA target sequence for Kcnc4 (NM_145922.1,103-121).
gcgaggcgtcggagaagat

SEQ ID NO: 536381 - DNA, 19 bp, Mus musculus
  siRNA target sequence for Kcnc4 (NM_145922.1,108-126).
gcgtcggagaagatcatca

SEQ ID NO: 536382 - DNA, 19 bp, Mus musculus
  siRNA target sequence for Kcnc4 (NM_145922.1,109-127).
cgtcggagaagatcatcat

SEQ ID NO: 536383 - DNA, 19 bp, Mus musculus
  siRNA target sequence for Kcnc4 (NM_145922.1,410-428).
caccttctggggtatcgat

SEQ ID NO: 536384 - DNA, 19 bp, Mus musculus
  siRNA target sequence for Kcnc4 (NM_145922.1,416-434).
ctggggtatcgatgaaaca

SEQ ID NO: 536385 - DNA, 19 bp, Mus musculus
  siRNA target sequence for Kcnc4 (NM_145922.1,801-819).
catcgggtagggaatatca

SEQ ID NO: 536386 - DNA, 19 bp, Mus musculus
  siRNA target sequence for Kcnc4 (NM_145922.1,931-949).
ctgatacgctggactttgt

SEQ ID NO: 536387 - DNA, 19 bp, Mus musculus
  siRNA target sequence for Kcnc4 (NM_145922.1,933-951).
gatacgctggactttgtca

SEQ ID NO: 536388 - DNA, 19 bp, Mus musculus
  siRNA target sequence for Kcnc4 (NM_145922.1,971-989).
cgactttgtggccatctta

SEQ ID NO: 536389 - DNA, 19 bp, Mus musculus
  siRNA target sequence for Kcnc4 (NM_145922.1,1058-1076).
gcgtgtggtacgctttgta

SEQ ID NO: 536390 - DNA, 19 bp, Mus musculus
  siRNA target sequence for Kcnc4 (NM_145922.1,1524-1542).
ctcgaatcgcccatttact

SEQ ID NO: 536391 - DNA, 19 bp, Mus musculus
  siRNA target sequence for Kcnc4 (NM_145922.1,1643-1661).
gcagaatggcgatgctaat

SEQ ID NO: 536392 - DNA, 19 bp, Mus musculus
  siRNA target sequence for Kcnc4 (NM_145922.1,1756-1774).
cgcgggacagaaacaagaa

SEQ ID NO: 536393 - DNA, 19 bp, Mus musculus
  siRNA target sequence for Kcnc4 (NM_145922.1,1832-1850).
ccggaaagaaggcaatgtt

SEQ ID NO: 536394 - DNA, 19 bp, Mus musculus
  siRNA target sequence for Kcnd1 (NM_008423.1,15-33).
ggccacatggctaccattt

SEQ ID NO: 536395 - DNA, 19 bp, Mus musculus
  siRNA target sequence for Kcnd1 (NM_008423.1,18-36).
cacatggctaccatttgca

SEQ ID NO: 536396 - DNA, 19 bp, Mus musculus
  siRNA target sequence for Kcnd1 (NM_008423.1,121-139).
gttctggtggtgaatgtga

SEQ ID NO: 536397 - DNA, 19 bp, Mus musculus
  siRNA target sequence for Kcnd1 (NM_008423.1,148-166).
cgctttgagacctggaaaa

SEQ ID NO: 536398 - DNA, 19 bp, Mus musculus
  siRNA target sequence for Kcnd1 (NM_008423.1,206-224).
cggagaaggaattcttcta

SEQ ID NO: 536399 - DNA, 19 bp, Mus musculus
  siRNA target sequence for Kcnd1 (NM_008423.1,219-237).
cttctatgatgctgaatct

SEQ ID NO: 536400 - DNA, 19 bp, Mus musculus
  siRNA target sequence for Kcnd1 (NM_008423.1,230-248).
ctgaatctggcgagtactt

SEQ ID NO: 536401 - DNA, 19 bp, Mus musculus
  siRNA target sequence for Kcnd1 (NM_008423.1,232-250).
gaatctggcgagtacttct

SEQ ID NO: 536402 - DNA, 19 bp, Mus musculus
  siRNA target sequence for Kcnd1 (NM_008423.1,273-291).
ccggcacgtgctgaacttt

SEQ ID NO: 536403 - DNA, 19 bp, Mus musculus
  siRNA target sequence for Kcnd1 (NM_008423.1,276-294).
gcacgtgctgaacttttat

SEQ ID NO: 536404 - DNA, 19 bp, Mus musculus
  siRNA target sequence for Kcnd1 (NM_008423.1,677-695).
gcttccctacagccttttt

SEQ ID NO: 536405 - DNA, 19 bp, Mus musculus
  siRNA target sequence for Kcnd1 (NM_008423.1,683-701).
ctacagcctttttctgtat

SEQ ID NO: 536406 - DNA, 19 bp, Mus musculus
  siRNA target sequence for Kcnd1 (NM_008423.1,837-855).
gttcgtgcccaagaatgat

SEQ ID NO: 536407 - DNA, 19 bp, Mus musculus
  siRNA target sequence for Kcnd1 (NM_008423.1,840-858).
cgtgcccaagaatgatgat

SEQ ID NO: 536408 - DNA, 19 bp, Mus musculus
  siRNA target sequence for Kcnd1 (NM_008423.1,1142-1160).
gcaccattgcaggcaaaat

SEQ ID NO: 536409 - DNA, 19 bp, Mus musculus
  siRNA target sequence for Kcnd1 (NM_008423.1,1146-1164).
cattgcaggcaaaattttt

SEQ ID NO: 536410 - DNA, 19 bp, Mus musculus
  siRNA target sequence for Kcnd1 (NM_008423.1,1338-1356).
cctgcagtataagcaaaat

SEQ ID NO: 536411 - DNA, 19 bp, Mus musculus
  siRNA target sequence for Kcnd1 (NM_008423.1,1376-1394).
gcagtggcgacggacaaat

SEQ ID NO: 536412 - DNA, 19 bp, Mus musculus
  siRNA target sequence for Kcnd1 (NM_008423.1,1379-1397).
gtggcgacggacaaatgct

SEQ ID NO: 536413 - DNA, 19 bp, Mus musculus
  siRNA target sequence for Kcnd1 (NM_008423.1,1406-1424).
ggagccgctctgcttttga

SEQ ID NO: 536414 - DNA, 19 bp, Mus musculus
  siRNA target sequence for Kcnd1 (NM_008423.1,1409-1427).
gccgctctgcttttgaaca

SEQ ID NO: 536415 - DNA, 19 bp, Mus musculus
  siRNA target sequence for Kcnd1 (NM_008423.1,1540-1558).
cgcagtacctcagtatcat

SEQ ID NO: 536416 - DNA, 19 bp, Mus musculus
  siRNA target sequence for Kcnd1 (NM_008423.1,1550-1568).
cagtatcatcccaaccaat

SEQ ID NO: 536417 - DNA, 19 bp, Mus musculus
  siRNA target sequence for Kcnd1 (NM_008423.1,1816-1834).
gccaacacgccagatgaaa

SEQ ID NO: 536418 - DNA, 19 bp, Mus musculus
  siRNA target sequence for Kcnd1 (NM_008423.1,1818-1836).
caacacgccagatgaaagt

SEQ ID NO: 536419 - DNA, 19 bp, Mus musculus
  siRNA target sequence for Kcnd2 (NM_019697.2,1092-1110).
gactcaggacgctctgata

SEQ ID NO: 536420 - DNA, 19 bp, Mus musculus
  siRNA target sequence for Kcnd2 (NM_019697.2,1173-1191).
cactctgctgggtagttct

SEQ ID NO: 536421 - DNA, 19 bp, Mus musculus
  siRNA target sequence for Kcnd2 (NM_019697.2,1210-1228).
cacccagagacccaacaat

SEQ ID NO: 536422 - DNA, 19 bp, Mus musculus
  siRNA target sequence for Kcnd2 (NM_019697.2,1214-1232).
cagagacccaacaatactt

SEQ ID NO: 536423 - DNA, 19 bp, Mus musculus
  siRNA target sequence for Kcnd2 (NM_019697.2,1216-1234).
gagacccaacaatacttct

SEQ ID NO: 536424 - DNA, 19 bp, Mus musculus
  siRNA target sequence for Kcnd2 (NM_019697.2,1218-1236).
gacccaacaatacttcttt

SEQ ID NO: 536425 - DNA, 19 bp, Mus musculus
  siRNA target sequence for Kcnd2 (NM_019697.2,1258-1276).
cgccacatcctcaacttct

SEQ ID NO: 536426 - DNA, 19 bp, Mus musculus
  siRNA target sequence for Kcnd2 (NM_019697.2,1311-1329).
gtgcatctcggcttatgat

SEQ ID NO: 536427 - DNA, 19 bp, Mus musculus
  siRNA target sequence for Kcnd2 (NM_019697.2,1313-1331).
gcatctcggcttatgatga

SEQ ID NO: 536428 - DNA, 19 bp, Mus musculus
  siRNA target sequence for Kcnd2 (NM_019697.2,1432-1450).
gatgcagacactgacaata

SEQ ID NO: 536429 - DNA, 19 bp, Mus musculus
  siRNA target sequence for Kcnd2 (NM_019697.2,1526-1544).
ccatggccctggtgttcta

SEQ ID NO: 536430 - DNA, 19 bp, Mus musculus
  siRNA target sequence for Kcnd2 (NM_019697.2,1583-1601).
cgaatgtggtggaaacagt

SEQ ID NO: 536431 - DNA, 19 bp, Mus musculus
  siRNA target sequence for Kcnd2 (NM_019697.2,1617-1635).
cccaggccacataaaagaa

SEQ ID NO: 536432 - DNA, 19 bp, Mus musculus
  siRNA target sequence for Kcnd2 (NM_019697.2,1756-1774).
cgcagtgtcatgagtatca

SEQ ID NO: 536433 - DNA, 19 bp, Mus musculus
  siRNA target sequence for Kcnd2 (NM_019697.2,1974-1992).
cacaatggctatcatcatt

SEQ ID NO: 536434 - DNA, 19 bp, Mus musculus
  siRNA target sequence for Kcnd2 (NM_019697.2,2106-2124).
catggtaccaaaaaccata

SEQ ID NO: 536435 - DNA, 19 bp, Mus musculus
  siRNA target sequence for Kcnd2 (NM_019697.2,2191-2209).
gtgatcgtgtcgaacttca

SEQ ID NO: 536436 - DNA, 19 bp, Mus musculus
  siRNA target sequence for Kcnd2 (NM_019697.2,2214-2232).
gatctaccaccaaaaccaa

SEQ ID NO: 536437 - DNA, 19 bp, Mus musculus
  siRNA target sequence for Kcnd2 (NM_019697.2,2364-2382).
ggatgaaccggccttcata

SEQ ID NO: 536438 - DNA, 19 bp, Mus musculus
  siRNA target sequence for Kcnd2 (NM_019697.2,2365-2383).
gatgaaccggccttcataa

SEQ ID NO: 536439 - DNA, 19 bp, Mus musculus
  siRNA target sequence for Kcnd2 (NM_019697.2,2371-2389).
ccggccttcataagcaaat

SEQ ID NO: 536440 - DNA, 19 bp, Mus musculus
  siRNA target sequence for Kcnd2 (NM_019697.2,2373-2391).
ggccttcataagcaaatct

SEQ ID NO: 536441 - DNA, 19 bp, Mus musculus
  siRNA target sequence for Kcnd2 (NM_019697.2,2444-2462).
ccacgaaccatgagtttgt

SEQ ID NO: 536442 - DNA, 19 bp, Mus musculus
  siRNA target sequence for Kcnd2 (NM_019697.2,2463-2481).
cgatgaacaagtctttgaa

SEQ ID NO: 536443 - DNA, 19 bp, Mus musculus
  siRNA target sequence for Kcnd2 (NM_019697.2,2505-2523).
cgtcaatcgcccatcaagt

SEQ ID NO: 536444 - DNA, 19 bp, Mus musculus
  siRNA target sequence for Kcnd2 (NM_019697.2,2575-2593).
cggagacacaaaaagactt

SEQ ID NO: 536445 - DNA, 19 bp, Mus musculus
  siRNA target sequence for Kcnd2 (NM_019697.2,2589-2607).
gactttccgcattcctaat

SEQ ID NO: 536446 - DNA, 19 bp, Mus musculus
  siRNA target sequence for Kcnd2 (NM_019697.2,2638-2656).
gtgcaagaactcagtacaa

SEQ ID NO: 536447 - DNA, 19 bp, Mus musculus
  siRNA target sequence for Kcnd2 (NM_019697.2,2640-2658).
gcaagaactcagtacaatt

SEQ ID NO: 536448 - DNA, 19 bp, Mus musculus
  siRNA target sequence for Kcnd2 (NM_019697.2,2644-2662).
gaactcagtacaattcaga

SEQ ID NO: 536449 - DNA, 19 bp, Mus musculus
  siRNA target sequence for Kcnd2 (NM_019697.2,2694-2712).
cagccgatccagcttaaat

SEQ ID NO: 536450 - DNA, 19 bp, Mus musculus
  siRNA target sequence for Kcnd2 (NM_019697.2,2706-2724).
cttaaatgccaaaatggaa

SEQ ID NO: 536451 - DNA, 19 bp, Mus musculus
  siRNA target sequence for Kcnd2 (NM_019697.2,2722-2740).
gaagagtgtgttaaactaa

SEQ ID NO: 536452 - DNA, 19 bp, Mus musculus
  siRNA target sequence for Kcnd2 (NM_019697.2,2725-2743).
gagtgtgttaaactaaact

SEQ ID NO: 536453 - DNA, 19 bp, Mus musculus
  siRNA target sequence for Kcnd2 (NM_019697.2,2757-2775).
cgtgaccacagcaataata

SEQ ID NO: 536454 - DNA, 19 bp, Mus musculus
  siRNA target sequence for Kcnd2 (NM_019697.2,2820-2838).
gcccgagtctcctgagtat

SEQ ID NO: 536455 - DNA, 19 bp, Mus musculus
  siRNA target sequence for Kcnd2 (NM_019697.2,2821-2839).
cccgagtctcctgagtatt

SEQ ID NO: 536456 - DNA, 19 bp, Mus musculus
  siRNA target sequence for Kcnd3 (NM_019931.1,121-139).
ctgatcgtcctcaacgtaa

SEQ ID NO: 536457 - DNA, 19 bp, Mus musculus
  siRNA target sequence for Kcnd3 (NM_019931.1,232-250).
gacacgaaggagtacttct

SEQ ID NO: 536458 - DNA, 19 bp, Mus musculus
  siRNA target sequence for Kcnd3 (NM_019931.1,234-252).
cacgaaggagtacttcttt

SEQ ID NO: 536459 - DNA, 19 bp, Mus musculus
  siRNA target sequence for Kcnd3 (NM_019931.1,274-292).
cgttgtgtgcttaacttct

SEQ ID NO: 536460 - DNA, 19 bp, Mus musculus
  siRNA target sequence for Kcnd3 (NM_019931.1,309-327).
gcactacccacgctatgaa

SEQ ID NO: 536461 - DNA, 19 bp, Mus musculus
  siRNA target sequence for Kcnd3 (NM_019931.1,310-328).
cactacccacgctatgaat

SEQ ID NO: 536462 - DNA, 19 bp, Mus musculus
  siRNA target sequence for Kcnd3 (NM_019931.1,335-353).
ctgcctacgacgatgaact

SEQ ID NO: 536463 - DNA, 19 bp, Mus musculus
  siRNA target sequence for Kcnd3 (NM_019931.1,345-363).
cgatgaactggccttctat

SEQ ID NO: 536464 - DNA, 19 bp, Mus musculus
  siRNA target sequence for Kcnd3 (NM_019931.1,365-383).
gcatcctccccgagatcat

SEQ ID NO: 536465 - DNA, 19 bp, Mus musculus
  siRNA target sequence for Kcnd3 (NM_019931.1,393-411).
ctgctacgaggagtacaaa

SEQ ID NO: 536466 - DNA, 19 bp, Mus musculus
  siRNA target sequence for Kcnd3 (NM_019931.1,435-453).
gcggctcatggatgacaat

SEQ ID NO: 536467 - DNA, 19 bp, Mus musculus
  siRNA target sequence for Kcnd3 (NM_019931.1,439-457).
ctcatggatgacaatgact

SEQ ID NO: 536468 - DNA, 19 bp, Mus musculus
  siRNA target sequence for Kcnd3 (NM_019931.1,541-559).
ctggcactggtcttctact

SEQ ID NO: 536469 - DNA, 19 bp, Mus musculus
  siRNA target sequence for Kcnd3 (NM_019931.1,685-703).
ctggacactgcctgtgtaa

SEQ ID NO: 536470 - DNA, 19 bp, Mus musculus
  siRNA target sequence for Kcnd3 (NM_019931.1,720-738).
gtacctcctccgactcttt

SEQ ID NO: 536471 - DNA, 19 bp, Mus musculus
  siRNA target sequence for Kcnd3 (NM_019931.1,1055-1073).
caagcatccctgcatcttt

SEQ ID NO: 536472 - DNA, 19 bp, Mus musculus
  siRNA target sequence for Kcnd3 (NM_019931.1,1114-1132).
gacatggtgcctaagacaa

SEQ ID NO: 536473 - DNA, 19 bp, Mus musculus
  siRNA target sequence for Kcnd3 (NM_019931.1,1192-1210).
ccggtccctgtgatagtct

SEQ ID NO: 536474 - DNA, 19 bp, Mus musculus
  siRNA target sequence for Kcnd3 (NM_019931.1,1236-1254).
gaatcagagagcagataaa

SEQ ID NO: 536475 - DNA, 19 bp, Mus musculus
  siRNA target sequence for Kcnd3 (NM_019931.1,1337-1355).
gcaatgggctcctcaatga

SEQ ID NO: 536476 - DNA, 19 bp, Mus musculus
  siRNA target sequence for Kcnd3 (NM_019931.1,1455-1473).
gaccactgggttatcctat

SEQ ID NO: 536477 - DNA, 19 bp, Mus musculus
  siRNA target sequence for Kcnd3 (NM_019931.1,1458-1476).
cactgggttatcctatctt

SEQ ID NO: 536478 - DNA, 19 bp, Mus musculus
  siRNA target sequence for Kcnd3 (NM_019931.1,1460-1478).
ctgggttatcctatcttgt

SEQ ID NO: 536479 - DNA, 19 bp, Mus musculus
  siRNA target sequence for Kcnd3 (NM_019931.1,1477-1495).
gtggatgatcccctgttat

SEQ ID NO: 536480 - DNA, 19 bp, Mus musculus
  siRNA target sequence for Kcnd3 (NM_019931.1,1769-1787).
gctccagccttaatttgaa

SEQ ID NO: 536481 - DNA, 19 bp, Mus musculus
  siRNA target sequence for Kcnd3 (NM_019931.1,1803-1821).
gagaccaaactgcaaaaca

SEQ ID NO: 536482 - DNA, 19 bp, Mus musculus
  siRNA target sequence for Kcnd3 (NM_019931.1,1869-1887).
gacccccgagggagaaagt

SEQ ID NO: 536483 - DNA, 19 bp, Mus musculus
  siRNA target sequence for Kcnd3 (NM_019931.1,1917-1935).
cacgaacattccttccata

SEQ ID NO: 536484 - DNA, 19 bp, Mus musculus
  siRNA target sequence for Kcng3 (NM_153512.1,444-462).
gggagcgcaacgagtactt

SEQ ID NO: 536485 - DNA, 19 bp, Mus musculus
  siRNA target sequence for Kcng3 (NM_153512.1,555-573).
ccttctacaacgagatgat

SEQ ID NO: 536486 - DNA, 19 bp, Mus musculus
  siRNA target sequence for Kcng3 (NM_153512.1,921-939).
gggaaccctccgggataat

SEQ ID NO: 536487 - DNA, 19 bp, Mus musculus
  siRNA target sequence for Kcng3 (NM_153512.1,922-940).
ggaaccctccgggataatt

SEQ ID NO: 536488 - DNA, 19 bp, Mus musculus
  siRNA target sequence for Kcng3 (NM_153512.1,930-948).
ccgggataattgaagctat

SEQ ID NO: 536489 - DNA, 19 bp, Mus musculus
  siRNA target sequence for Kcng3 (NM_153512.1,1142-1160).
cgaatgatgcggatcttct

SEQ ID NO: 536490 - DNA, 19 bp, Mus musculus
  siRNA target sequence for Kcng3 (NM_153512.1,1228-1246).
ccgagagatggctatgtta

SEQ ID NO: 536491 - DNA, 19 bp, Mus musculus
  siRNA target sequence for Kcng3 (NM_153512.1,1307-1325).
gggctggacctggaaacat

SEQ ID NO: 536492 - DNA, 19 bp, Mus musculus
  siRNA target sequence for Kcng3 (NM_153512.1,1319-1337).
gaaacatccaacaaggatt

SEQ ID NO: 536493 - DNA, 19 bp, Mus musculus
  siRNA target sequence for Kcng3 (NM_153512.1,1360-1378).
ctggtgggtgattatctct

SEQ ID NO: 536494 - DNA, 19 bp, Mus musculus
  siRNA target sequence for Kcng3 (NM_153512.1,1513-1531).
ctaccacgagctcaagttt

SEQ ID NO: 536495 - DNA, 19 bp, Mus musculus
  siRNA target sequence for Kcng3 (NM_153512.1,1516-1534).
ccacgagctcaagtttaga

SEQ ID NO: 536496 - DNA, 19 bp, Mus musculus
  siRNA target sequence for Kcng3 (NM_153512.1,1517-1535).
cacgagctcaagtttagat

SEQ ID NO: 536497 - DNA, 19 bp, Mus musculus
  siRNA target sequence for Kcns1 (NM_008435.1,469-487).
cgcacgagttctactttga

SEQ ID NO: 536498 - DNA, 19 bp, Mus musculus
  siRNA target sequence for Kcns1 (NM_008435.1,1057-1075).
ccagcacgcgcaacttctt

SEQ ID NO: 536499 - DNA, 19 bp, Mus musculus
  siRNA target sequence for Kcns1 (NM_008435.1,1083-1101).
ccgctcaacctcattgaca

SEQ ID NO: 536500 - DNA, 19 bp, Mus musculus
  siRNA target sequence for Kcns1 (NM_008435.1,1106-1124).
gtcggtgctgcccttctat

SEQ ID NO: 536501 - DNA, 19 bp, Mus musculus
  siRNA target sequence for Kcns1 (NM_008435.1,1195-1213).
gcaaggtagtgcaagtgtt

SEQ ID NO: 536502 - DNA, 19 bp, Mus musculus
  siRNA target sequence for Kcns1 (NM_008435.1,1303-1321).
gtgaggtgggcatcttact

SEQ ID NO: 536503 - DNA, 19 bp, Mus musculus
  siRNA target sequence for Kcns1 (NM_008435.1,1363-1381).
cctacacagccgaagaaga

SEQ ID NO: 536504 - DNA, 19 bp, Mus musculus
  siRNA target sequence for Kcns1 (NM_008435.1,1380-1398).
gaaaacgagggctttcaca

SEQ ID NO: 536505 - DNA, 19 bp, Mus musculus
  siRNA target sequence for Kcns1 (NM_008435.1,1609-1627).
gcggtcagcgcgagtttga

SEQ ID NO: 536506 - DNA, 19 bp, Mus musculus
  siRNA target sequence for Kcns1 (NM_008435.1,1732-1750).
gggagcctgcaaaatctca

SEQ ID NO: 536507 - DNA, 19 bp, Mus musculus
  siRNA target sequence for Kcns1 (NM_008435.1,1738-1756).
ctgcaaaatctcacagtta

SEQ ID NO: 536508 - DNA, 19 bp, Mus musculus
  siRNA target sequence for Kcns2 (NM_008436.1,317-335).
gagagatccgcatcaatgt

SEQ ID NO: 536509 - DNA, 19 bp, Mus musculus
  siRNA target sequence for Kcns2 (NM_008436.1,460-478).
gttcagcgtgagttctact

SEQ ID NO: 536510 - DNA, 19 bp, Mus musculus
  siRNA target sequence for Kcns2 (NM_008436.1,493-511).
gagctcttcccctatgtgt

SEQ ID NO: 536511 - DNA, 19 bp, Mus musculus
  siRNA target sequence for Kcns2 (NM_008436.1,617-635).
cttgctgcagctatagcta

SEQ ID NO: 536512 - DNA, 19 bp, Mus musculus
  siRNA target sequence for Kcns2 (NM_008436.1,704-722).
cctccttcgatgagatctt

SEQ ID NO: 536513 - DNA, 19 bp, Mus musculus
  siRNA target sequence for Kcns2 (NM_008436.1,715-733).
gagatcttggccttctata

SEQ ID NO: 536514 - DNA, 19 bp, Mus musculus
  siRNA target sequence for Kcns2 (NM_008436.1,717-735).
gatcttggccttctataat

SEQ ID NO: 536515 - DNA, 19 bp, Mus musculus
  siRNA target sequence for Kcns2 (NM_008436.1,934-952).
gaagaccccaggttcgaaa

SEQ ID NO: 536516 - DNA, 19 bp, Mus musculus
  siRNA target sequence for Kcns2 (NM_008436.1,968-986).
gcattgcttggttcacatt

SEQ ID NO: 536517 - DNA, 19 bp, Mus musculus
  siRNA target sequence for Kcns2 (NM_008436.1,969-987).
cattgcttggttcacattt

SEQ ID NO: 536518 - DNA, 19 bp, Mus musculus
  siRNA target sequence for Kcns2 (NM_008436.1,1009-1027).
gtggcccctgactttctta

SEQ ID NO: 536519 - DNA, 19 bp, Mus musculus
  siRNA target sequence for Kcns2 (NM_008436.1,1035-1053).
caagaatgctctaaacctt

SEQ ID NO: 536520 - DNA, 19 bp, Mus musculus
  siRNA target sequence for Kcns2 (NM_008436.1,1043-1061).
ctctaaaccttattgatct

SEQ ID NO: 536521 - DNA, 19 bp, Mus musculus
  siRNA target sequence for Kcns2 (NM_008436.1,1067-1085).
ccattgtcccattttacat

SEQ ID NO: 536522 - DNA, 19 bp, Mus musculus
  siRNA target sequence for Kcns2 (NM_008436.1,1273-1291).
ctctcagtggggatttcca

SEQ ID NO: 536523 - DNA, 19 bp, Mus musculus
  siRNA target sequence for Kcns2 (NM_008436.1,1302-1320).
ggtggcctacaccattgaa

SEQ ID NO: 536524 - DNA, 19 bp, Mus musculus
  siRNA target sequence for Kcns2 (NM_008436.1,1303-1321).
gtggcctacaccattgaaa

SEQ ID NO: 536525 - DNA, 19 bp, Mus musculus
  siRNA target sequence for Kcns2 (NM_008436.1,1474-1492).
gtcttgcccatcactttga

SEQ ID NO: 536526 - DNA, 19 bp, Mus musculus
  siRNA target sequence for Kcns2 (NM_008436.1,1579-1597).
gaggtcccttcggtcaatt

SEQ ID NO: 536527 - DNA, 19 bp, Mus musculus
  siRNA target sequence for Kcns2 (NM_008436.1,1581-1599).
ggtcccttcggtcaattta

SEQ ID NO: 536528 - DNA, 19 bp, Mus musculus
  siRNA target sequence for Kcns2 (NM_008436.1,1582-1600).
gtcccttcggtcaatttaa

SEQ ID NO: 536529 - DNA, 19 bp, Mus musculus
  siRNA target sequence for Kcns2 (NM_008436.1,1593-1611).
caatttaagggactactat

SEQ ID NO: 536530 - DNA, 19 bp, Mus musculus
  siRNA target sequence for Kcns2 (NM_008436.1,1602-1620).
ggactactatgctcataaa

SEQ ID NO: 536531 - DNA, 19 bp, Mus musculus
  siRNA target sequence for Kcns2 (NM_008436.1,1605-1623).
ctactatgctcataaagtt

SEQ ID NO: 536532 - DNA, 19 bp, Mus musculus
  siRNA target sequence for Kcns2 (NM_008436.1,1670-1688).
gtgaactgagtttagatga

SEQ ID NO: 536533 - DNA, 19 bp, Mus musculus
  siRNA target sequence for Kcns2 (NM_008436.1,1677-1695).
gagtttagatgattctcta

SEQ ID NO: 536534 - DNA, 19 bp, Mus musculus
  siRNA target sequence for Kcns3 (NM_173417.1,472-490).
gacaagatgaggaacttgt

SEQ ID NO: 536535 - DNA, 19 bp, Mus musculus
  siRNA target sequence for Kcns3 (NM_173417.1,480-498).
gaggaacttgtcaacttga

SEQ ID NO: 536536 - DNA, 19 bp, Mus musculus
  siRNA target sequence for Kcns3 (NM_173417.1,515-533).
gcagtctgtggatcaaagt

SEQ ID NO: 536537 - DNA, 19 bp, Mus musculus
  siRNA target sequence for Kcns3 (NM_173417.1,516-534).
cagtctgtggatcaaagta

SEQ ID NO: 536538 - DNA, 19 bp, Mus musculus
  siRNA target sequence for Kcns3 (NM_173417.1,518-536).
gtctgtggatcaaagtaca

SEQ ID NO: 536539 - DNA, 19 bp, Mus musculus
  siRNA target sequence for Kcns3 (NM_173417.1,622-640).
gcgtggcagataaagagta

SEQ ID NO: 536540 - DNA, 19 bp, Mus musculus
  siRNA target sequence for Kcns3 (NM_173417.1,628-646).
cagataaagagtactactt

SEQ ID NO: 536541 - DNA, 19 bp, Mus musculus
  siRNA target sequence for Kcns3 (NM_173417.1,694-712).
cagggaagctgcatgtgat

SEQ ID NO: 536542 - DNA, 19 bp, Mus musculus
  siRNA target sequence for Kcns3 (NM_173417.1,834-852).
gactgggaccagaaaagca

SEQ ID NO: 536543 - DNA, 19 bp, Mus musculus
  siRNA target sequence for Kcns3 (NM_173417.1,867-885).
gactcctcctttgaagaat

SEQ ID NO: 536544 - DNA, 19 bp, Mus musculus
  siRNA target sequence for Kcns3 (NM_173417.1,886-904).
cgtctctgtttgagaaaga

SEQ ID NO: 536545 - DNA, 19 bp, Mus musculus
  siRNA target sequence for Kcns3 (NM_173417.1,956-974).
gattcgaatggaaaatcca

SEQ ID NO: 536546 - DNA, 19 bp, Mus musculus
  siRNA target sequence for Kcns3 (NM_173417.1,1116-1134).
gagattgcctgcattgcat

SEQ ID NO: 536547 - DNA, 19 bp, Mus musculus
  siRNA target sequence for Kcns3 (NM_173417.1,1122-1140).
gcctgcattgcatggttta

SEQ ID NO: 536548 - DNA, 19 bp, Mus musculus
  siRNA target sequence for Kcns3 (NM_173417.1,1171-1189).
ctccatcacaaaagaagtt

SEQ ID NO: 536549 - DNA, 19 bp, Mus musculus
  siRNA target sequence for Kcns3 (NM_173417.1,1595-1613).
cattgcaagcacatgtatt

SEQ ID NO: 536550 - DNA, 19 bp, Mus musculus
  siRNA target sequence for Kcns3 (NM_173417.1,1599-1617).
gcaagcacatgtattatct

SEQ ID NO: 536551 - DNA, 19 bp, Mus musculus
  siRNA target sequence for Kcns3 (NM_173417.1,1737-1755).
catgagctaccgtacttta

SEQ ID NO: 536552 - DNA, 19 bp, Mus musculus
  siRNA target sequence for Kcns3 (NM_173417.1,1740-1758).
gagctaccgtactttaaca

SEQ ID NO: 536553 - DNA, 19 bp, Mus musculus
  siRNA target sequence for Kcns3 (NM_173417.1,1742-1760).
gctaccgtactttaacatt

SEQ ID NO: 536554 - DNA, 19 bp, Mus musculus
  siRNA target sequence for Kcns3 (NM_173417.1,1743-1761).
ctaccgtactttaacatta

SEQ ID NO: 536555 - DNA, 19 bp, Mus musculus
  siRNA target sequence for Kcns3 (NM_173417.1,1757-1775).
cattagggacgtttatgca

SEQ ID NO: 536556 - DNA, 19 bp, Mus musculus
  siRNA target sequence for Kcns3 (NM_173417.1,1849-1867).
cttcgagcgttgaagacaa

SEQ ID NO: 536557 - DNA, 19 bp, Mus musculus
  siRNA target sequence for Kcns3 (NM_173417.1,1895-1913).
ggagaactgtactggaaaa

SEQ ID NO: 536558 - DNA, 19 bp, Mus musculus
  siRNA target sequence for Kcns3 (NM_173417.1,1896-1914).
gagaactgtactggaaaat

SEQ ID NO: 536559 - DNA, 19 bp, Mus musculus
  siRNA target sequence for Kcnv1 (NM_026200.1,483-501).
cggtggacaacgagtactt

SEQ ID NO: 536560 - DNA, 19 bp, Mus musculus
  siRNA target sequence for Kcnv1 (NM_026200.1,516-534).
ctcaggcgttccgttatgt

SEQ ID NO: 536561 - DNA, 19 bp, Mus musculus
  siRNA target sequence for Kcnv1 (NM_026200.1,528-546).
gttatgtcctgcactacta

SEQ ID NO: 536562 - DNA, 19 bp, Mus musculus
  siRNA target sequence for Kcnv1 (NM_026200.1,552-570).
ctggtcgcctgcatgtcat

SEQ ID NO: 536563 - DNA, 19 bp, Mus musculus
  siRNA target sequence for Kcnv1 (NM_026200.1,610-628).
gtactggggcatagatgaa

SEQ ID NO: 536564 - DNA, 19 bp, Mus musculus
  siRNA target sequence for Kcnv1 (NM_026200.1,623-641).
gatgaactcagcattgact

SEQ ID NO: 536565 - DNA, 19 bp, Mus musculus
  siRNA target sequence for Kcnv1 (NM_026200.1,673-691).
ggagctgagtgaaactctt

SEQ ID NO: 536566 - DNA, 19 bp, Mus musculus
  siRNA target sequence for Kcnv1 (NM_026200.1,681-699).
gtgaaactcttgactttaa

SEQ ID NO: 536567 - DNA, 19 bp, Mus musculus
  siRNA target sequence for Kcnv1 (NM_026200.1,765-783).
ccactgtccgacaaaagct

SEQ ID NO: 536568 - DNA, 19 bp, Mus musculus
  siRNA target sequence for Kcnv1 (NM_026200.1,824-842).
cggatctttggagtaatct

SEQ ID NO: 536569 - DNA, 19 bp, Mus musculus
  siRNA target sequence for Kcnv1 (NM_026200.1,923-941).
gagatcttggagtatgtgt

SEQ ID NO: 536570 - DNA, 19 bp, Mus musculus
  siRNA target sequence for Kcnv1 (NM_026200.1,973-991).
gcgcttcctatgtgtgaaa

SEQ ID NO: 536571 - DNA, 19 bp, Mus musculus
  siRNA target sequence for Kcnv1 (NM_026200.1,975-993).
gcttcctatgtgtgaaaga

SEQ ID NO: 536572 - DNA, 19 bp, Mus musculus
  siRNA target sequence for Kcnv1 (NM_026200.1,1011-1029).
ggaaggttccaaacatcat

SEQ ID NO: 536573 - DNA, 19 bp, Mus musculus
  siRNA target sequence for Kcnv1 (NM_026200.1,1012-1030).
gaaggttccaaacatcata

SEQ ID NO: 536574 - DNA, 19 bp, Mus musculus
  siRNA target sequence for Kcnv1 (NM_026200.1,1048-1066).
gcccttctatataactctt

SEQ ID NO: 536575 - DNA, 19 bp, Mus musculus
  siRNA target sequence for Kcnv1 (NM_026200.1,1096-1114).
cacacaagagctggaaaat

SEQ ID NO: 536576 - DNA, 19 bp, Mus musculus
  siRNA target sequence for Kcnv1 (NM_026200.1,1098-1116).
cacaagagctggaaaatgt

SEQ ID NO: 536577 - DNA, 19 bp, Mus musculus
  siRNA target sequence for Kcnv1 (NM_026200.1,1152-1170).
ctctgcgcatgctgaaact

SEQ ID NO: 536578 - DNA, 19 bp, Mus musculus
  siRNA target sequence for Kcnv1 (NM_026200.1,1193-1211).
cgctcacttgggatgacaa

SEQ ID NO: 536579 - DNA, 19 bp, Mus musculus
  siRNA target sequence for Kcnv1 (NM_026200.1,1253-1271).
ctatctgtggggatttcta

SEQ ID NO: 536580 - DNA, 19 bp, Mus musculus
  siRNA target sequence for Kcnv1 (NM_026200.1,1310-1328).
cctgatacaaccttcacaa

SEQ ID NO: 536581 - DNA, 19 bp, Mus musculus
  siRNA target sequence for Kcnv1 (NM_026200.1,1352-1370).
gccacaacatccatgacta

SEQ ID NO: 536582 - DNA, 19 bp, Mus musculus
  siRNA target sequence for Kcnv1 (NM_026200.1,1458-1476).
ccttgcctattgccattat

SEQ ID NO: 536583 - DNA, 19 bp, Mus musculus
  siRNA target sequence for Kcnv1 (NM_026200.1,1459-1477).
cttgcctattgccattatt

SEQ ID NO: 536584 - DNA, 19 bp, Mus musculus
  siRNA target sequence for Kcnv1 (NM_026200.1,1470-1488).
ccattattaatgatcgatt

SEQ ID NO: 536585 - DNA, 19 bp, Mus musculus
  siRNA target sequence for Kcnv1 (NM_026200.1,1497-1515).
gctacttcaccttgaaact

SEQ ID NO: 536586 - DNA, 19 bp, Mus musculus
  siRNA target sequence for Kcnv1 (NM_026200.1,1552-1570).
gaaacttaccaagaatata

SEQ ID NO: 536587 - DNA, 19 bp, Mus musculus
  siRNA target sequence for Kcnv1 (NM_026200.1,1581-1599).
catatattagtgttaactt

SEQ ID NO: 536588 - DNA, 19 bp, Mus musculus
  siRNA target sequence for Kcnv1 (NM_026200.1,1607-1625).
gtctatgcccggagcataa

SEQ ID NO: 536589 - DNA, 19 bp, Mus musculus
  siRNA target sequence for Kcnv1 (NM_026200.1,1652-1670).
gagagagcaagtactagaa

SEQ ID NO: 536590 - DNA, 19 bp, Mus musculus
  siRNA target sequence for Kctd10 (NM_026145.2,93-111).
gctgccacccgcactactt

SEQ ID NO: 536591 - DNA, 19 bp, Mus musculus
  siRNA target sequence for Kctd10 (NM_026145.2,369-387).
ctagccgaggccaagtact

SEQ ID NO: 536592 - DNA, 19 bp, Mus musculus
  siRNA target sequence for Kctd10 (NM_026145.2,497-515).
gcttatagcgacgtcaaat

SEQ ID NO: 536593 - DNA, 19 bp, Mus musculus
  siRNA target sequence for Kctd10 (NM_026145.2,498-516).
cttatagcgacgtcaaata

SEQ ID NO: 536594 - DNA, 19 bp, Mus musculus
  siRNA target sequence for Kctd10 (NM_026145.2,568-586).
ccagcaattctgacgataa

SEQ ID NO: 536595 - DNA, 19 bp, Mus musculus
  siRNA target sequence for Kctd10 (NM_026145.2,571-589).
gcaattctgacgataacat

SEQ ID NO: 536596 - DNA, 19 bp, Mus musculus
  siRNA target sequence for Kctd10 (NM_026145.2,577-595).
ctgacgataacatgttgaa

SEQ ID NO: 536597 - DNA, 19 bp, Mus musculus
  siRNA target sequence for Kctd10 (NM_026145.2,579-597).
gacgataacatgttgaaaa

SEQ ID NO: 536598 - DNA, 19 bp, Mus musculus
  siRNA target sequence for Kctd10 (NM_026145.2,640-658).
gggtcctgttcattaagga

SEQ ID NO: 536599 - DNA, 19 bp, Mus musculus
  siRNA target sequence for Kctd10 (NM_026145.2,674-692).
gatctgctgttggtcattt

SEQ ID NO: 536600 - DNA, 19 bp, Mus musculus
  siRNA target sequence for Kctd10 (NM_026145.2,776-794).
ccctgaagcccgcatttat

SEQ ID NO: 536601 - DNA, 19 bp, Mus musculus
  siRNA target sequence for Kctd10 (NM_026145.2,875-893).
ggcagctggacgttctcat

SEQ ID NO: 536602 - DNA, 19 bp, Mus musculus
  siRNA target sequence for Kctd10 (NM_026145.2,936-954).
cgcgtgaggaggatccata

SEQ ID NO: 536603 - DNA, 19 bp, Mus musculus
  siRNA target sequence for Kctd10 (NM_026145.2,937-955).
gcgtgaggaggatccatat

SEQ ID NO: 536604 - DNA, 19 bp, Mus musculus
  siRNA target sequence for Kctd10 (NM_026145.2,939-957).
gtgaggaggatccatatca

SEQ ID NO: 536605 - DNA, 19 bp, Mus musculus
  siRNA target sequence for Kctd12b (NM_175429.3,360-378).
cgctatcctactttgatca

SEQ ID NO: 536606 - DNA, 19 bp, Mus musculus
  siRNA target sequence for Kctd12b (NM_175429.3,391-409).
cccggctctgggaaatgtt

SEQ ID NO: 536607 - DNA, 19 bp, Mus musculus
  siRNA target sequence for Kctd12b (NM_175429.3,486-504).
cgctatgtcctagactata

SEQ ID NO: 536608 - DNA, 19 bp, Mus musculus
  siRNA target sequence for Kctd12b (NM_175429.3,519-537).
gtagtgcttccggatcatt

SEQ ID NO: 536609 - DNA, 19 bp, Mus musculus
  siRNA target sequence for Kctd12b (NM_175429.3,558-576).
catagagaagcagaatact

SEQ ID NO: 536610 - DNA, 19 bp, Mus musculus
  siRNA target sequence for Kctd12b (NM_175429.3,575-593).
ctttaagctgccagaacta

SEQ ID NO: 536611 - DNA, 19 bp, Mus musculus
  siRNA target sequence for Kctd12b (NM_175429.3,596-614).
caaaatgttggctcctaaa

SEQ ID NO: 536612 - DNA, 19 bp, Mus musculus
  siRNA target sequence for Kctd12b (NM_175429.3,644-662).
ctcatgtccgattgatcta

SEQ ID NO: 536613 - DNA, 19 bp, Mus musculus
  siRNA target sequence for Kctd12b (NM_175429.3,646-664).
catgtccgattgatctaga

SEQ ID NO: 536614 - DNA, 19 bp, Mus musculus
  siRNA target sequence for Kctd12b (NM_175429.3,649-667).
gtccgattgatctagaaga

SEQ ID NO: 536615 - DNA, 19 bp, Mus musculus
  siRNA target sequence for Kctd12b (NM_175429.3,680-698).
cattgacactacgttcaat

SEQ ID NO: 536616 - DNA, 19 bp, Mus musculus
  siRNA target sequence for Kctd12b (NM_175429.3,684-702).
gacactacgttcaatttct

SEQ ID NO: 536617 - DNA, 19 bp, Mus musculus
  siRNA target sequence for Kctd12b (NM_175429.3,701-719).
ctcttcaaccaatagcatt

SEQ ID NO: 536618 - DNA, 19 bp, Mus musculus
  siRNA target sequence for Kctd12b (NM_175429.3,706-724).
caaccaatagcattcatat

SEQ ID NO: 536619 - DNA, 19 bp, Mus musculus
  siRNA target sequence for Kctd12b (NM_175429.3,710-728).
caatagcattcatattagt

SEQ ID NO: 536620 - DNA, 19 bp, Mus musculus
  siRNA target sequence for Kctd12b (NM_175429.3,782-800).
ggctggtttcatcactatt

SEQ ID NO: 536621 - DNA, 19 bp, Mus musculus
  siRNA target sequence for Kctd12b (NM_175429.3,803-821).
ctatcgaggctcctatact

SEQ ID NO: 536622 - DNA, 19 bp, Mus musculus
  siRNA target sequence for Kctd12b (NM_175429.3,855-873).
cgccgtgtggctagaatca

SEQ ID NO: 536623 - DNA, 19 bp, Mus musculus
  siRNA target sequence for Kctd12b (NM_175429.3,856-874).
gccgtgtggctagaatcat

SEQ ID NO: 536624 - DNA, 19 bp, Mus musculus
  siRNA target sequence for Kctd12b (NM_175429.3,876-894).
gtatgtggtaagatctcat

SEQ ID NO: 536625 - DNA, 19 bp, Mus musculus
  siRNA target sequence for Kctd12b (NM_175429.3,908-926).
gttcggagacactctgaat

SEQ ID NO: 536626 - DNA, 19 bp, Mus musculus
  siRNA target sequence for Kctd12b (NM_175429.3,958-976).
gatatacttctcgatacta

SEQ ID NO: 536627 - DNA, 19 bp, Mus musculus
  siRNA target sequence for Kctd12b (NM_175429.3,967-985).
ctcgatactacctcaaatt

SEQ ID NO: 536628 - DNA, 19 bp, Mus musculus
  siRNA target sequence for Kctd12b (NM_175429.3,969-987).
cgatactacctcaaattca

SEQ ID NO: 536629 - DNA, 19 bp, Mus musculus
  siRNA target sequence for Kctd12b (NM_175429.3,988-1006).
ctttcttggaacaagcttt

SEQ ID NO: 536630 - DNA, 19 bp, Mus musculus
  siRNA target sequence for Kctd12b (NM_175429.3,1094-1112).
gatctggacctcgtatact

SEQ ID NO: 536631 - DNA, 19 bp, Mus musculus
  siRNA target sequence for Kctd12b (NM_175429.3,1097-1115).
ctggacctcgtatactgaa

SEQ ID NO: 536632 - DNA, 19 bp, Mus musculus
  siRNA target sequence for Kctd12b (NM_175429.3,1099-1117).
ggacctcgtatactgaata

SEQ ID NO: 536633 - DNA, 19 bp, Mus musculus
  siRNA target sequence for Kctd12b (NM_175429.3,1100-1118).
gacctcgtatactgaatat

SEQ ID NO: 536634 - DNA, 19 bp, Mus musculus
  siRNA target sequence for Kctd12b (NM_175429.3,1102-1120).
cctcgtatactgaatatgt

SEQ ID NO: 536635 - DNA, 19 bp, Mus musculus
  siRNA target sequence for Kctd12b (NM_175429.3,1103-1121).
ctcgtatactgaatatgtt

SEQ ID NO: 536636 - DNA, 19 bp, Mus musculus
  siRNA target sequence for Kctd13 (NM_172747.1,285-303).
caccccgaacagcaagtat

SEQ ID NO: 536637 - DNA, 19 bp, Mus musculus
  siRNA target sequence for Kctd13 (NM_172747.1,287-305).
ccccgaacagcaagtatgt

SEQ ID NO: 536638 - DNA, 19 bp, Mus musculus
  siRNA target sequence for Kctd13 (NM_172747.1,289-307).
ccgaacagcaagtatgtga

SEQ ID NO: 536639 - DNA, 19 bp, Mus musculus
  siRNA target sequence for Kctd13 (NM_172747.1,290-308).
cgaacagcaagtatgtgaa

SEQ ID NO: 536640 - DNA, 19 bp, Mus musculus
  siRNA target sequence for Kctd13 (NM_172747.1,419-437).
gaggttgggtgctgattga

SEQ ID NO: 536641 - DNA, 19 bp, Mus musculus
  siRNA target sequence for Kctd13 (NM_172747.1,449-467).
gccactttggcacaattct

SEQ ID NO: 536642 - DNA, 19 bp, Mus musculus
  siRNA target sequence for Kctd13 (NM_172747.1,580-598).
ctggcgctgcagcaaaaaa

SEQ ID NO: 536643 - DNA, 19 bp, Mus musculus
  siRNA target sequence for Kctd13 (NM_172747.1,706-724).
cgcagtaacaacaagtact

SEQ ID NO: 536644 - DNA, 19 bp, Mus musculus
  siRNA target sequence for Kctd13 (NM_172747.1,735-753).
cacttcagatgacaactta

SEQ ID NO: 536645 - DNA, 19 bp, Mus musculus
  siRNA target sequence for Kctd13 (NM_172747.1,823-841).
gtcctaggagatgagattt

SEQ ID NO: 536646 - DNA, 19 bp, Mus musculus
  siRNA target sequence for Kctd13 (NM_172747.1,826-844).
ctaggagatgagatttgct

SEQ ID NO: 536647 - DNA, 19 bp, Mus musculus
  siRNA target sequence for Kctd13 (NM_172747.1,858-876).
cgggcagggccgaaaaatt

SEQ ID NO: 536648 - DNA, 19 bp, Mus musculus
  siRNA target sequence for Kctd13 (NM_172747.1,939-957).
ccctgaggctcggatcttt

SEQ ID NO: 536649 - DNA, 19 bp, Mus musculus
  siRNA target sequence for Kctd13 (NM_172747.1,941-959).
ctgaggctcggatctttga

SEQ ID NO: 536650 - DNA, 19 bp, Mus musculus
  siRNA target sequence for Kctd13 (NM_172747.1,960-978).
ggagacactgaacatctta

SEQ ID NO: 536651 - DNA, 19 bp, Mus musculus
  siRNA target sequence for Kctd13 (NM_172747.1,961-979).
gagacactgaacatcttaa

SEQ ID NO: 536652 - DNA, 19 bp, Mus musculus
  siRNA target sequence for Kctd13 (NM_172747.1,1055-1073).
gccgaggggacgatgaaga

SEQ ID NO: 536653 - DNA, 19 bp, Mus musculus
  siRNA target sequence for Kctd13 (NM_172747.1,1133-1151).
gtccccacggccaacagat

SEQ ID NO: 536654 - DNA, 19 bp, Mus musculus
  siRNA target sequence for Kctd13 (NM_172747.1,1138-1156).
cacggccaacagattgtct

SEQ ID NO: 536655 - DNA, 19 bp, Mus musculus
  siRNA target sequence for Kctd13 (NM_172747.1,1142-1160).
gccaacagattgtcttcaa

SEQ ID NO: 536656 - DNA, 19 bp, Mus musculus
  siRNA target sequence for Kctd15 (NM_146188.1,345-363).
cacggcggagggaggaaat

SEQ ID NO: 536657 - DNA, 19 bp, Mus musculus
  siRNA target sequence for Kctd15 (NM_146188.1,347-365).
cggcggagggaggaaatat

SEQ ID NO: 536658 - DNA, 19 bp, Mus musculus
  siRNA target sequence for Kctd15 (NM_146188.1,349-367).
gcggagggaggaaatatgt

SEQ ID NO: 536659 - DNA, 19 bp, Mus musculus
  siRNA target sequence for Kctd15 (NM_146188.1,513-531).
gtaccctgactccagaata

SEQ ID NO: 536660 - DNA, 19 bp, Mus musculus
  siRNA target sequence for Kctd15 (NM_146188.1,595-613).
gaccgcgatggggagattt

SEQ ID NO: 536661 - DNA, 19 bp, Mus musculus
  siRNA target sequence for Kctd15 (NM_146188.1,606-624).
ggagattttccgctacata

SEQ ID NO: 536662 - DNA, 19 bp, Mus musculus
  siRNA target sequence for Kctd15 (NM_146188.1,943-961).
cctctcaacggctactgta

SEQ ID NO: 536663 - DNA, 19 bp, Mus musculus
  siRNA target sequence for Kctd15 (NM_146188.1,1100-1118).
caactgctgtccggataaa

SEQ ID NO: 536664 - DNA, 19 bp, Mus musculus
  siRNA target sequence for Kctd2 (NM_183285.1,382-400).
gagactggagcgtatctga

SEQ ID NO: 536665 - DNA, 19 bp, Mus musculus
  siRNA target sequence for Kctd2 (NM_183285.1,384-402).
gactggagcgtatctgatt

SEQ ID NO: 536666 - DNA, 19 bp, Mus musculus
  siRNA target sequence for Kctd2 (NM_183285.1,386-404).
ctggagcgtatctgattga

SEQ ID NO: 536667 - DNA, 19 bp, Mus musculus
  siRNA target sequence for Kctd2 (NM_183285.1,388-406).
ggagcgtatctgattgaca

SEQ ID NO: 536668 - DNA, 19 bp, Mus musculus
  siRNA target sequence for Kctd2 (NM_183285.1,417-435).
ctactttggtcctatccta

SEQ ID NO: 536669 - DNA, 19 bp, Mus musculus
  siRNA target sequence for Kctd2 (NM_183285.1,442-460).
ctccgccatgggaaactca

SEQ ID NO: 536670 - DNA, 19 bp, Mus musculus
  siRNA target sequence for Kctd2 (NM_183285.1,446-464).
gccatgggaaactcatcat

SEQ ID NO: 536671 - DNA, 19 bp, Mus musculus
  siRNA target sequence for Kctd2 (NM_183285.1,447-465).
ccatgggaaactcatcatt

SEQ ID NO: 536672 - DNA, 19 bp, Mus musculus
  siRNA target sequence for Kctd2 (NM_183285.1,448-466).
catgggaaactcatcatta

SEQ ID NO: 536673 - DNA, 19 bp, Mus musculus
  siRNA target sequence for Kctd2 (NM_183285.1,524-542).
ctctcgtgcggctggttaa

SEQ ID NO: 536674 - DNA, 19 bp, Mus musculus
  siRNA target sequence for Kctd2 (NM_183285.1,528-546).
cgtgcggctggttaaggaa

SEQ ID NO: 536675 - DNA, 19 bp, Mus musculus
  siRNA target sequence for Kctd2 (NM_183285.1,529-547).
gtgcggctggttaaggaaa

SEQ ID NO: 536676 - DNA, 19 bp, Mus musculus
  siRNA target sequence for Kctd2 (NM_183285.1,533-551).
ggctggttaaggaaaggat

SEQ ID NO: 536677 - DNA, 19 bp, Mus musculus
  siRNA target sequence for Kctd2 (NM_183285.1,534-552).
gctggttaaggaaaggata

SEQ ID NO: 536678 - DNA, 19 bp, Mus musculus
  siRNA target sequence for Kctd2 (NM_183285.1,553-571).
cgagacaatgagaacagaa

SEQ ID NO: 536679 - DNA, 19 bp, Mus musculus
  siRNA target sequence for Kctd2 (NM_183285.1,651-669).
gtctgatggctggaaattt

SEQ ID NO: 536680 - DNA, 19 bp, Mus musculus
  siRNA target sequence for Kctd2 (NM_183285.1,660-678).
ctggaaatttgaacagtta

SEQ ID NO: 536681 - DNA, 19 bp, Mus musculus
  siRNA target sequence for Kctd2 (NM_183285.1,662-680).
ggaaatttgaacagttaat

SEQ ID NO: 536682 - DNA, 19 bp, Mus musculus
  siRNA target sequence for Kctd2 (NM_183285.1,692-710).
cttcctataactatggaaa

SEQ ID NO: 536683 - DNA, 19 bp, Mus musculus
  siRNA target sequence for Kctd2 (NM_183285.1,764-782).
ccaatggcatcgtcataga

SEQ ID NO: 536684 - DNA, 19 bp, Mus musculus
  siRNA target sequence for Kctd3 (NM_172650.1,405-423).
ctggtgctatatttattga

SEQ ID NO: 536685 - DNA, 19 bp, Mus musculus
  siRNA target sequence for Kctd3 (NM_172650.1,486-504).
ggggagtcagcattaatgt

SEQ ID NO: 536686 - DNA, 19 bp, Mus musculus
  siRNA target sequence for Kctd3 (NM_172650.1,487-505).
gggagtcagcattaatgtt

SEQ ID NO: 536687 - DNA, 19 bp, Mus musculus
  siRNA target sequence for Kctd3 (NM_172650.1,627-645).
gcattcccagtcgtaaagt

SEQ ID NO: 536688 - DNA, 19 bp, Mus musculus
  siRNA target sequence for Kctd3 (NM_172650.1,632-650).
cccagtcgtaaagtaacta

SEQ ID NO: 536689 - DNA, 19 bp, Mus musculus
  siRNA target sequence for Kctd3 (NM_172650.1,633-651).
ccagtcgtaaagtaactaa

SEQ ID NO: 536690 - DNA, 19 bp, Mus musculus
  siRNA target sequence for Kctd3 (NM_172650.1,678-696).
ggaatggactgaactctat

SEQ ID NO: 536691 - DNA, 19 bp, Mus musculus
  siRNA target sequence for Kctd3 (NM_172650.1,741-759).
gaaatggagaagacactat

SEQ ID NO: 536692 - DNA, 19 bp, Mus musculus
  siRNA target sequence for Kctd3 (NM_172650.1,783-801).
caagaaaggtgctaatagt

SEQ ID NO: 536693 - DNA, 19 bp, Mus musculus
  siRNA target sequence for Kctd3 (NM_172650.1,804-822).
ctggccaccacaattggat

SEQ ID NO: 536694 - DNA, 19 bp, Mus musculus
  siRNA target sequence for Kctd3 (NM_172650.1,837-855).
cgcatttcgctgtgtgtta

SEQ ID NO: 536695 - DNA, 19 bp, Mus musculus
  siRNA target sequence for Kctd3 (NM_172650.1,919-937).
cgaacgggtggctttaaat

SEQ ID NO: 536696 - DNA, 19 bp, Mus musculus
  siRNA target sequence for Kctd3 (NM_172650.1,1060-1078).
cctcggcgttcctgtagat

SEQ ID NO: 536697 - DNA, 19 bp, Mus musculus
  siRNA target sequence for Kctd3 (NM_172650.1,1079-1097).
gctctcttcttcattggaa

SEQ ID NO: 536698 - DNA, 19 bp, Mus musculus
  siRNA target sequence for Kctd3 (NM_172650.1,1169-1187).
caggacgttgtcccaataa

SEQ ID NO: 536699 - DNA, 19 bp, Mus musculus
  siRNA target sequence for Kctd3 (NM_172650.1,1172-1190).
gacgttgtcccaataacca

SEQ ID NO: 536700 - DNA, 19 bp, Mus musculus
  siRNA target sequence for Kctd3 (NM_172650.1,1227-1245).
gcaacaacggatcaatata

SEQ ID NO: 536701 - DNA, 19 bp, Mus musculus
  siRNA target sequence for Kctd3 (NM_172650.1,1228-1246).
caacaacggatcaatatat

SEQ ID NO: 536702 - DNA, 19 bp, Mus musculus
  siRNA target sequence for Kctd3 (NM_172650.1,1234-1252).
cggatcaatatattacata

SEQ ID NO: 536703 - DNA, 19 bp, Mus musculus
  siRNA target sequence for Kctd3 (NM_172650.1,1236-1254).
gatcaatatattacataga

SEQ ID NO: 536704 - DNA, 19 bp, Mus musculus
  siRNA target sequence for Kctd3 (NM_172650.1,1239-1257).
caatatattacatagacat

SEQ ID NO: 536705 - DNA, 19 bp, Mus musculus
  siRNA target sequence for Kctd3 (NM_172650.1,1338-1356).
ccgcgctgagcgtttacct

SEQ ID NO: 536706 - DNA, 19 bp, Mus musculus
  siRNA target sequence for Kctd3 (NM_172650.1,1416-1434).
gagccgtgcgagtgattgt

SEQ ID NO: 536707 - DNA, 19 bp, Mus musculus
  siRNA target sequence for Kctd3 (NM_172650.1,1573-1591).
gacagtgacacgattcaga

SEQ ID NO: 536708 - DNA, 19 bp, Mus musculus
  siRNA target sequence for Kctd3 (NM_172650.1,1583-1601).
cgattcagagggatgatct

SEQ ID NO: 536709 - DNA, 19 bp, Mus musculus
  siRNA target sequence for Kctd3 (NM_172650.1,1622-1640).
cctttagcatccttcaaga

SEQ ID NO: 536710 - DNA, 19 bp, Mus musculus
  siRNA target sequence for Kctd3 (NM_172650.1,1707-1725).
gggaacgagatgatcaaca

SEQ ID NO: 536711 - DNA, 19 bp, Mus musculus
  siRNA target sequence for Kctd3 (NM_172650.1,1708-1726).
ggaacgagatgatcaacaa

SEQ ID NO: 536712 - DNA, 19 bp, Mus musculus
  siRNA target sequence for Kctd3 (NM_172650.1,1748-1766).
cccatcaccaacaaactgt

SEQ ID NO: 536713 - DNA, 19 bp, Mus musculus
  siRNA target sequence for Kctd3 (NM_172650.1,1775-1793).
ctgtcgtcgacaggaaaaa

SEQ ID NO: 536714 - DNA, 19 bp, Mus musculus
  siRNA target sequence for Kctd3 (NM_172650.1,1812-1830).
ctgtagactgcactacaat

SEQ ID NO: 536715 - DNA, 19 bp, Mus musculus
  siRNA target sequence for Kctd3 (NM_172650.1,1814-1832).
gtagactgcactacaatct

SEQ ID NO: 536716 - DNA, 19 bp, Mus musculus
  siRNA target sequence for Kctd3 (NM_172650.1,1941-1959).
ccacagccatggatatggt

SEQ ID NO: 536717 - DNA, 19 bp, Mus musculus
  siRNA target sequence for Kctd3 (NM_172650.1,2146-2164).
ccacgaagcggcaacctat

SEQ ID NO: 536718 - DNA, 19 bp, Mus musculus
  siRNA target sequence for Kctd3 (NM_172650.1,2182-2200).
ccgagagagccctttgtta

SEQ ID NO: 536719 - DNA, 19 bp, Mus musculus
  siRNA target sequence for Kctd3 (NM_172650.1,2208-2226).
cacggaggactgagagttt

SEQ ID NO: 536720 - DNA, 19 bp, Mus musculus
  siRNA target sequence for Kctd3 (NM_172650.1,2624-2642).
ccgtcacctcggcacaaaa

SEQ ID NO: 536721 - DNA, 19 bp, Mus musculus
  siRNA target sequence for Kctd3 (NM_172650.1,2625-2643).
cgtcacctcggcacaaaaa

SEQ ID NO: 536722 - DNA, 19 bp, Mus musculus
  siRNA target sequence for Kctd4 (NM_026214.2,98-116).
ggagcgtaaaataatcaga

SEQ ID NO: 536723 - DNA, 19 bp, Mus musculus
  siRNA target sequence for Kctd4 (NM_026214.2,99-117).
gagcgtaaaataatcagaa

SEQ ID NO: 536724 - DNA, 19 bp, Mus musculus
  siRNA target sequence for Kctd4 (NM_026214.2,203-221).
cctcaacgttggtggatat

SEQ ID NO: 536725 - DNA, 19 bp, Mus musculus
  siRNA target sequence for Kctd4 (NM_026214.2,204-222).
ctcaacgttggtggatatt

SEQ ID NO: 536726 - DNA, 19 bp, Mus musculus
  siRNA target sequence for Kctd4 (NM_026214.2,209-227).
cgttggtggatatttatat

SEQ ID NO: 536727 - DNA, 19 bp, Mus musculus
  siRNA target sequence for Kctd4 (NM_026214.2,250-268).
ccaagtacccagacacttt

SEQ ID NO: 536728 - DNA, 19 bp, Mus musculus
  siRNA target sequence for Kctd4 (NM_026214.2,254-272).
gtacccagacactttcctt

SEQ ID NO: 536729 - DNA, 19 bp, Mus musculus
  siRNA target sequence for Kctd4 (NM_026214.2,277-295).
gtatcgtaaatgggaaaat

SEQ ID NO: 536730 - DNA, 19 bp, Mus musculus
  siRNA target sequence for Kctd4 (NM_026214.2,362-380).
cctaaacttcctacgaaat

SEQ ID NO: 536731 - DNA, 19 bp, Mus musculus
  siRNA target sequence for Kctd4 (NM_026214.2,397-415).
ccgaaggatttcgagaaaa

SEQ ID NO: 536732 - DNA, 19 bp, Mus musculus
  siRNA target sequence for Kctd4 (NM_026214.2,473-491).
gaaatccaggtgggaaaaa

SEQ ID NO: 536733 - DNA, 19 bp, Mus musculus
  siRNA target sequence for Kctd4 (NM_026214.2,505-523).
cccgagagactactttctt

SEQ ID NO: 536734 - DNA, 19 bp, Mus musculus
  siRNA target sequence for Kctd4 (NM_026214.2,510-528).
gagactactttcttggaaa

SEQ ID NO: 536735 - DNA, 19 bp, Mus musculus
  siRNA target sequence for Kctd4 (NM_026214.2,512-530).
gactactttcttggaaata

SEQ ID NO: 536736 - DNA, 19 bp, Mus musculus
  siRNA target sequence for Kctd4 (NM_026214.2,521-539).
cttggaaataacagataat

SEQ ID NO: 536737 - DNA, 19 bp, Mus musculus
  siRNA target sequence for Kctd4 (NM_026214.2,556-574).
gactgagaatcttctgtaa

SEQ ID NO: 536738 - DNA, 19 bp, Mus musculus
  siRNA target sequence for Kctd4 (NM_026214.2,653-671).
gttctctgtgtcgtcaaat

SEQ ID NO: 536739 - DNA, 19 bp, Mus musculus
  siRNA target sequence for Kctd4 (NM_026214.2,658-676).
ctgtgtcgtcaaatatcat

SEQ ID NO: 536740 - DNA, 19 bp, Mus musculus
  siRNA target sequence for Kctd4 (NM_026214.2,662-680).
gtcgtcaaatatcattcaa

SEQ ID NO: 536741 - DNA, 19 bp, Mus musculus
  siRNA target sequence for Kctd4 (NM_026214.2,704-722).
gaacggcactcgacttgta

SEQ ID NO: 536742 - DNA, 19 bp, Mus musculus
  siRNA target sequence for Kctd4 (NM_026214.2,707-725).
cggcactcgacttgtacta

SEQ ID NO: 536743 - DNA, 19 bp, Mus musculus
  siRNA target sequence for Kctd4 (NM_026214.2,708-726).
ggcactcgacttgtactaa

SEQ ID NO: 536744 - DNA, 19 bp, Mus musculus
  siRNA target sequence for Kctd4 (NM_026214.2,709-727).
gcactcgacttgtactaaa

SEQ ID NO: 536745 - DNA, 19 bp, Mus musculus
  siRNA target sequence for Kctd4 (NM_026214.2,712-730).
ctcgacttgtactaaagga

SEQ ID NO: 536746 - DNA, 19 bp, Mus musculus
  siRNA target sequence for Kctd4 (NM_026214.2,748-766).
gcaccttggaaactcttaa

SEQ ID NO: 536747 - DNA, 19 bp, Mus musculus
  siRNA target sequence for Kctd4 (NM_026214.2,751-769).
ccttggaaactcttaagtt

SEQ ID NO: 536748 - DNA, 19 bp, Mus musculus
  siRNA target sequence for Kctd4 (NM_026214.2,752-770).
cttggaaactcttaagttt

SEQ ID NO: 536749 - DNA, 19 bp, Mus musculus
  siRNA target sequence for Kctd4 (NM_026214.2,824-842).
ctgctccaaagggtcaatt

SEQ ID NO: 536750 - DNA, 19 bp, Mus musculus
  siRNA target sequence for Kctd4 (NM_026214.2,829-847).
ccaaagggtcaattgttca

SEQ ID NO: 536751 - DNA, 19 bp, Mus musculus
  siRNA target sequence for Kctd4 (NM_026214.2,846-864).
cacagcgatgcacttcatt

SEQ ID NO: 536752 - DNA, 19 bp, Mus musculus
  siRNA target sequence for Kctd4 (NM_026214.2,848-866).
cagcgatgcacttcatttt

SEQ ID NO: 536753 - DNA, 19 bp, Mus musculus
  siRNA target sequence for Kctd4 (NM_026214.2,850-868).
gcgatgcacttcattttat

SEQ ID NO: 536754 - DNA, 19 bp, Mus musculus
  siRNA target sequence for Kctd4 (NM_026214.2,852-870).
gatgcacttcattttatca

SEQ ID NO: 536755 - DNA, 19 bp, Mus musculus
  siRNA target sequence for Kctd4 (NM_026214.2,855-873).
gcacttcattttatcaagt

SEQ ID NO: 536756 - DNA, 19 bp, Mus musculus
  siRNA target sequence for Kctd5 (NM_027008.1,197-215).
gccgggacccgaagtcttt

SEQ ID NO: 536757 - DNA, 19 bp, Mus musculus
  siRNA target sequence for Kctd5 (NM_027008.1,235-253).
gcggaccccgacctagatt

SEQ ID NO: 536758 - DNA, 19 bp, Mus musculus
  siRNA target sequence for Kctd5 (NM_027008.1,250-268).
gattcggacaaggatgaaa

SEQ ID NO: 536759 - DNA, 19 bp, Mus musculus
  siRNA target sequence for Kctd5 (NM_027008.1,265-283).
gaaacgggtgcctatttaa

SEQ ID NO: 536760 - DNA, 19 bp, Mus musculus
  siRNA target sequence for Kctd5 (NM_027008.1,269-287).
cgggtgcctatttaatcga

SEQ ID NO: 536761 - DNA, 19 bp, Mus musculus
  siRNA target sequence for Kctd5 (NM_027008.1,307-325).
ggacctgtactgaactact

SEQ ID NO: 536762 - DNA, 19 bp, Mus musculus
  siRNA target sequence for Kctd5 (NM_027008.1,308-326).
gacctgtactgaactactt

SEQ ID NO: 536763 - DNA, 19 bp, Mus musculus
  siRNA target sequence for Kctd5 (NM_027008.1,310-328).
cctgtactgaactacttga

SEQ ID NO: 536764 - DNA, 19 bp, Mus musculus
  siRNA target sequence for Kctd5 (NM_027008.1,329-347).
gacatggaaagctggttat

SEQ ID NO: 536765 - DNA, 19 bp, Mus musculus
  siRNA target sequence for Kctd5 (NM_027008.1,331-349).
catggaaagctggttatta

SEQ ID NO: 536766 - DNA, 19 bp, Mus musculus
  siRNA target sequence for Kctd5 (NM_027008.1,404-422).
cctcactaataaaacttgt

SEQ ID NO: 536767 - DNA, 19 bp, Mus musculus
  siRNA target sequence for Kctd5 (NM_027008.1,534-552).
gtcagacggctggaagttt

SEQ ID NO: 536768 - DNA, 19 bp, Mus musculus
  siRNA target sequence for Kctd5 (NM_027008.1,675-693).
gaaagccaagattttgcaa

SEQ ID NO: 536769 - DNA, 19 bp, Mus musculus
  siRNA target sequence for Kctd6 (NM_027782.1,248-266).
ggggactggggctatatga

SEQ ID NO: 536770 - DNA, 19 bp, Mus musculus
  siRNA target sequence for Kctd6 (NM_027782.1,249-267).
gggactggggctatatgat

SEQ ID NO: 536771 - DNA, 19 bp, Mus musculus
  siRNA target sequence for Kctd6 (NM_027782.1,251-269).
gactggggctatatgatga

SEQ ID NO: 536772 - DNA, 19 bp, Mus musculus
  siRNA target sequence for Kctd6 (NM_027782.1,270-288).
gtgacccagtcacattaaa

SEQ ID NO: 536773 - DNA, 19 bp, Mus musculus
  siRNA target sequence for Kctd6 (NM_027782.1,330-348).
cacgctacccggattctat

SEQ ID NO: 536774 - DNA, 19 bp, Mus musculus
  siRNA target sequence for Kctd6 (NM_027782.1,334-352).
ctacccggattctatgctt

SEQ ID NO: 536775 - DNA, 19 bp, Mus musculus
  siRNA target sequence for Kctd6 (NM_027782.1,345-363).
ctatgcttggagctatgtt

SEQ ID NO: 536776 - DNA, 19 bp, Mus musculus
  siRNA target sequence for Kctd6 (NM_027782.1,389-407).
gaccctcaaggcaattact

SEQ ID NO: 536777 - DNA, 19 bp, Mus musculus
  siRNA target sequence for Kctd6 (NM_027782.1,392-410).
cctcaaggcaattacttca

SEQ ID NO: 536778 - DNA, 19 bp, Mus musculus
  siRNA target sequence for Kctd6 (NM_027782.1,526-544).
ccagatcgaacccttgatt

SEQ ID NO: 536779 - DNA, 19 bp, Mus musculus
  siRNA target sequence for Kctd6 (NM_027782.1,538-556).
cttgattcagtgtctcaat

SEQ ID NO: 536780 - DNA, 19 bp, Mus musculus
  siRNA target sequence for Kctd6 (NM_027782.1,565-583).
gcctctgtatcctatggat

SEQ ID NO: 536781 - DNA, 19 bp, Mus musculus
  siRNA target sequence for Kctd6 (NM_027782.1,569-587).
ctgtatcctatggatactt

SEQ ID NO: 536782 - DNA, 19 bp, Mus musculus
  siRNA target sequence for Kctd6 (NM_027782.1,612-630).
gcactcggaagctttctaa

SEQ ID NO: 536783 - DNA, 19 bp, Mus musculus
  siRNA target sequence for Kctd6 (NM_027782.1,613-631).
cactcggaagctttctaaa

SEQ ID NO: 536784 - DNA, 19 bp, Mus musculus
  siRNA target sequence for Kctd6 (NM_027782.1,650-668).
gtcatcatcacccagttaa

SEQ ID NO: 536785 - DNA, 19 bp, Mus musculus
  siRNA target sequence for Kctd6 (NM_027782.1,697-715).
cgaaggcatctcaaactat

SEQ ID NO: 536786 - DNA, 19 bp, Mus musculus
  siRNA target sequence for Kctd6 (NM_027782.1,698-716).
gaaggcatctcaaactatt

SEQ ID NO: 536787 - DNA, 19 bp, Mus musculus
  siRNA target sequence for Kctd6 (NM_027782.1,701-719).
ggcatctcaaactatttca

SEQ ID NO: 536788 - DNA, 19 bp, Mus musculus
  siRNA target sequence for Kctd6 (NM_027782.1,804-822).
ctctccgggtccatctgat

SEQ ID NO: 536789 - DNA, 19 bp, Mus musculus
  siRNA target sequence for Kctd7 (NM_172509.1,347-365).
gaagtcgtccccttgaaca

SEQ ID NO: 536790 - DNA, 19 bp, Mus musculus
  siRNA target sequence for Kctd7 (NM_172509.1,668-686).
ggactcatgccctattaca

SEQ ID NO: 536791 - DNA, 19 bp, Mus musculus
  siRNA target sequence for Kctd7 (NM_172509.1,669-687).
gactcatgccctattacaa

SEQ ID NO: 536792 - DNA, 19 bp, Mus musculus
  siRNA target sequence for Kctd7 (NM_172509.1,902-920).
gaggccgtggctgatgtat

SEQ ID NO: 536793 - DNA, 19 bp, Mus musculus
  siRNA target sequence for Kctd7 (NM_172509.1,906-924).
ccgtggctgatgtatacga

SEQ ID NO: 536794 - DNA, 19 bp, Mus musculus
  siRNA target sequence for Kctd7 (NM_172509.1,1004-1022).
caccttgtcaaccattact

SEQ ID NO: 536795 - DNA, 19 bp, Mus musculus
  siRNA target sequence for Kctd7 (NM_172509.1,1007-1025).
cttgtcaaccattactact

SEQ ID NO: 536796 - DNA, 19 bp, Mus musculus
  siRNA target sequence for Kctd7 (NM_172509.1,1026-1044).
gcaaacgccccatctatga

SEQ ID NO: 536797 - DNA, 19 bp, Mus musculus
  siRNA target sequence for Kctd7 (NM_172509.1,1033-1051).
ccccatctatgagttcaaa

SEQ ID NO: 536798 - DNA, 19 bp, Mus musculus
  siRNA target sequence for Kctd7 (NM_172509.1,1034-1052).
cccatctatgagttcaaaa

SEQ ID NO: 536799 - DNA, 19 bp, Mus musculus
  siRNA target sequence for Kctd8 (NM_175519.3,421-439).
gtttatgtgaccaagcatt

SEQ ID NO: 536800 - DNA, 19 bp, Mus musculus
  siRNA target sequence for Kctd8 (NM_175519.3,562-580).
cgcgacggcttcctcttta

SEQ ID NO: 536801 - DNA, 19 bp, Mus musculus
  siRNA target sequence for Kctd8 (NM_175519.3,565-583).
gacggcttcctctttaggt

SEQ ID NO: 536802 - DNA, 19 bp, Mus musculus
  siRNA target sequence for Kctd8 (NM_175519.3,581-599).
ggtacgtgctggattacct

SEQ ID NO: 536803 - DNA, 19 bp, Mus musculus
  siRNA target sequence for Kctd8 (NM_175519.3,654-672).
gcgcgaagcagagttcttt

SEQ ID NO: 536804 - DNA, 19 bp, Mus musculus
  siRNA target sequence for Kctd8 (NM_175519.3,656-674).
gcgaagcagagttctttca

SEQ ID NO: 536805 - DNA, 19 bp, Mus musculus
  siRNA target sequence for Kctd8 (NM_175519.3,751-769).
gacctggaggacaacgttt

SEQ ID NO: 536806 - DNA, 19 bp, Mus musculus
  siRNA target sequence for Kctd8 (NM_175519.3,923-941).
ccacggtgcgagataacca

SEQ ID NO: 536807 - DNA, 19 bp, Mus musculus
  siRNA target sequence for Kctd8 (NM_175519.3,1048-1066).
cgtcagcctgagaagtaca

SEQ ID NO: 536808 - DNA, 19 bp, Mus musculus
  siRNA target sequence for Kctd8 (NM_175519.3,1159-1177).
ggcactgccgcctttgtca

SEQ ID NO: 536809 - DNA, 19 bp, Mus musculus
  siRNA target sequence for Kctd8 (NM_175519.3,1227-1245).
cttccgaccacctcagaaa

SEQ ID NO: 536810 - DNA, 19 bp, Mus musculus
  siRNA target sequence for Kctd8 (NM_175519.3,1230-1248).
ccgaccacctcagaaaata

SEQ ID NO: 536811 - DNA, 19 bp, Mus musculus
  siRNA target sequence for Kctd8 (NM_175519.3,1251-1269).
gtcacccaagcaagaacat

SEQ ID NO: 536812 - DNA, 19 bp, Mus musculus
  siRNA target sequence for Kctd8 (NM_175519.3,1253-1271).
cacccaagcaagaacatga

SEQ ID NO: 536813 - DNA, 19 bp, Mus musculus
  siRNA target sequence for Kctd8 (NM_175519.3,1417-1435).
cagcctaacaccttaacct

SEQ ID NO: 536814 - DNA, 19 bp, Mus musculus
  siRNA target sequence for Kctd8 (NM_175519.3,1523-1541).
gcaagtcccgagaaacaaa

SEQ ID NO: 536815 - DNA, 19 bp, Mus musculus
  siRNA target sequence for Kctd8 (NM_175519.3,1524-1542).
caagtcccgagaaacaaat

SEQ ID NO: 536816 - DNA, 19 bp, Mus musculus
  siRNA target sequence for Kctd8 (NM_175519.3,1560-1578).
ctgtgagaagctaagtgta

SEQ ID NO: 536817 - DNA, 19 bp, Mus musculus
  siRNA target sequence for Kctd8 (NM_175519.3,1566-1584).
gaagctaagtgtagaagaa

SEQ ID NO: 536818 - DNA, 19 bp, Mus musculus
  siRNA target sequence for Kctd8 (NM_175519.3,1620-1638).
ccatattccagattgtttt

SEQ ID NO: 536819 - DNA, 19 bp, Mus musculus
  siRNA target sequence for Keap1 (NM_016679.2,1344-1362).
gtgaccctgcaggtcaaat

SEQ ID NO: 536820 - DNA, 19 bp, Mus musculus
  siRNA target sequence for Keap1 (NM_016679.2,1346-1364).
gaccctgcaggtcaaatat

SEQ ID NO: 536821 - DNA, 19 bp, Mus musculus
  siRNA target sequence for Keap1 (NM_016679.2,1494-1512).
caccctaaggtcatggaaa

SEQ ID NO: 536822 - DNA, 19 bp, Mus musculus
  siRNA target sequence for Keap1 (NM_016679.2,1502-1520).
ggtcatggaaaggcttatt

SEQ ID NO: 536823 - DNA, 19 bp, Mus musculus
  siRNA target sequence for Keap1 (NM_016679.2,1585-1603).
cggtcatgtaccagattga

SEQ ID NO: 536824 - DNA, 19 bp, Mus musculus
  siRNA target sequence for Keap1 (NM_016679.2,1587-1605).
gtcatgtaccagattgaca

SEQ ID NO: 536825 - DNA, 19 bp, Mus musculus
  siRNA target sequence for Keap1 (NM_016679.2,1855-1873).
gcatcgactgggtcaaata

SEQ ID NO: 536826 - DNA, 19 bp, Mus musculus
  siRNA target sequence for Keap1 (NM_016679.2,2357-2375).
cggggtgggggtcatagat

SEQ ID NO: 536827 - DNA, 19 bp, Mus musculus
  siRNA target sequence for Keap1 (NM_016679.2,2463-2481).
ctagtcgcgccaatgttga

SEQ ID NO: 536828 - DNA, 19 bp, Mus musculus
  siRNA target sequence for Keap1 (NM_016679.2,2547-2565).
gggactaaccggcttaact

SEQ ID NO: 536829 - DNA, 19 bp, Mus musculus
  siRNA target sequence for Keap1 (NM_016679.2,2558-2576).
gcttaactccgcagaatgt

SEQ ID NO: 536830 - DNA, 19 bp, Mus musculus
  siRNA target sequence for Keap1 (NM_016679.2,2559-2577).
cttaactccgcagaatgtt

SEQ ID NO: 536831 - DNA, 19 bp, Mus musculus
  siRNA target sequence for Keap1 (NM_016679.2,2564-2582).
ctccgcagaatgttactat

SEQ ID NO: 536832 - DNA, 19 bp, Mus musculus
  siRNA target sequence for Keap1 (NM_016679.2,2603-2621).
gatgatcacaccgatgaat

SEQ ID NO: 536833 - DNA, 19 bp, Mus musculus
  siRNA target sequence for Keap1 (NM_016679.2,2647-2665).
gcgtgctgcacaactgtat

SEQ ID NO: 536834 - DNA, 19 bp, Mus musculus
  siRNA target sequence for Keap1 (NM_016679.2,2773-2791).
gtgcgctggggattactgt

SEQ ID NO: 536835 - DNA, 19 bp, Mus musculus
  siRNA target sequence for Keap1 (NM_016679.2,2822-2840).
ctatgatggccacactttt

SEQ ID NO: 536836 - DNA, 19 bp, Mus musculus
  siRNA target sequence for Keap1 (NM_016679.2,2886-2904).
gaggtgacccgcatgacat

SEQ ID NO: 536837 - DNA, 19 bp, Mus musculus
  siRNA target sequence for Keap1 (NM_016679.2,2945-2963).
ctgtcggaagcaaattgat

SEQ ID NO: 536838 - DNA, 19 bp, Mus musculus
  siRNA target sequence for Keap1 (NM_016679.2,2947-2965).
gtcggaagcaaattgatca

SEQ ID NO: 536839 - DNA, 19 bp, Mus musculus
  siRNA target sequence for Klhl2 (NM_178633.1,426-444).
cttaatctccagtgataaa

SEQ ID NO: 536840 - DNA, 19 bp, Mus musculus
  siRNA target sequence for Klhl2 (NM_178633.1,455-473).
cctccgaggagaaggtatt

SEQ ID NO: 536841 - DNA, 19 bp, Mus musculus
  siRNA target sequence for Klhl2 (NM_178633.1,456-474).
ctccgaggagaaggtattt

SEQ ID NO: 536842 - DNA, 19 bp, Mus musculus
  siRNA target sequence for Klhl2 (NM_178633.1,488-506).
cctgggtaaaccacgataa

SEQ ID NO: 536843 - DNA, 19 bp, Mus musculus
  siRNA target sequence for Klhl2 (NM_178633.1,540-558).
ggagcatgtccgattacct

SEQ ID NO: 536844 - DNA, 19 bp, Mus musculus
  siRNA target sequence for Klhl2 (NM_178633.1,620-638).
gtgcgtgcaaagattacct

SEQ ID NO: 536845 - DNA, 19 bp, Mus musculus
  siRNA target sequence for Klhl2 (NM_178633.1,626-644).
gcaaagattacctcattga

SEQ ID NO: 536846 - DNA, 19 bp, Mus musculus
  siRNA target sequence for Klhl2 (NM_178633.1,669-687).
gacagagcagcgcatgtta

SEQ ID NO: 536847 - DNA, 19 bp, Mus musculus
  siRNA target sequence for Klhl2 (NM_178633.1,671-689).
cagagcagcgcatgttaat

SEQ ID NO: 536848 - DNA, 19 bp, Mus musculus
  siRNA target sequence for Klhl2 (NM_178633.1,783-801).
ggaatgctacgacttcaaa

SEQ ID NO: 536849 - DNA, 19 bp, Mus musculus
  siRNA target sequence for Klhl2 (NM_178633.1,788-806).
gctacgacttcaaagaaga

SEQ ID NO: 536850 - DNA, 19 bp, Mus musculus
  siRNA target sequence for Klhl2 (NM_178633.1,897-915).
caatggctcactaagagtt

SEQ ID NO: 536851 - DNA, 19 bp, Mus musculus
  siRNA target sequence for Klhl2 (NM_178633.1,929-947).
cctatgaccccgtgaaaga

SEQ ID NO: 536852 - DNA, 19 bp, Mus musculus
  siRNA target sequence for Klhl2 (NM_178633.1,1058-1076).
cgtctgtggaagcatacaa

SEQ ID NO: 536853 - DNA, 19 bp, Mus musculus
  siRNA target sequence for Klhl2 (NM_178633.1,1063-1081).
gtggaagcatacaacataa

SEQ ID NO: 536854 - DNA, 19 bp, Mus musculus
  siRNA target sequence for Klhl2 (NM_178633.1,1099-1117).
catgtcgccccaatgaaca

SEQ ID NO: 536855 - DNA, 19 bp, Mus musculus
  siRNA target sequence for Klhl2 (NM_178633.1,1186-1204).
gcatcgcgccagtgtctta

SEQ ID NO: 536856 - DNA, 19 bp, Mus musculus
  siRNA target sequence for Klhl2 (NM_178633.1,1197-1215).
gtgtcttagcacagtagaa

SEQ ID NO: 536857 - DNA, 19 bp, Mus musculus
  siRNA target sequence for Klhl2 (NM_178633.1,1210-1228).
gtagaatgctataatgcta

SEQ ID NO: 536858 - DNA, 19 bp, Mus musculus
  siRNA target sequence for Klhl2 (NM_178633.1,1231-1249).
gcaaacgagtggacttaca

SEQ ID NO: 536859 - DNA, 19 bp, Mus musculus
  siRNA target sequence for Klhl2 (NM_178633.1,1232-1250).
caaacgagtggacttacat

SEQ ID NO: 536860 - DNA, 19 bp, Mus musculus
  siRNA target sequence for Klhl2 (NM_178633.1,1241-1259).
ggacttacatagcagaaat

SEQ ID NO: 536861 - DNA, 19 bp, Mus musculus
  siRNA target sequence for Klhl2 (NM_178633.1,1279-1297).
gcaggtgttggtgtgttaa

SEQ ID NO: 536862 - DNA, 19 bp, Mus musculus
  siRNA target sequence for Klhl2 (NM_178633.1,1288-1306).
ggtgtgttaaacaacttat

SEQ ID NO: 536863 - DNA, 19 bp, Mus musculus
  siRNA target sequence for Klhl2 (NM_178633.1,1330-1348).
ggtcctttagtacgaaaaa

SEQ ID NO: 536864 - DNA, 19 bp, Mus musculus
  siRNA target sequence for Klhl2 (NM_178633.1,1334-1352).
ctttagtacgaaaaagtgt

SEQ ID NO: 536865 - DNA, 19 bp, Mus musculus
  siRNA target sequence for Klhl2 (NM_178633.1,1433-1451).
cagttaatggtctgttgta

SEQ ID NO: 536866 - DNA, 19 bp, Mus musculus
  siRNA target sequence for Klhl2 (NM_178633.1,1482-1500).
cttggcgtcggtagagtat

SEQ ID NO: 536867 - DNA, 19 bp, Mus musculus
  siRNA target sequence for Klhl2 (NM_178633.1,1485-1503).
ggcgtcggtagagtattat

SEQ ID NO: 536868 - DNA, 19 bp, Mus musculus
  siRNA target sequence for Klhl2 (NM_178633.1,1486-1504).
gcgtcggtagagtattata

SEQ ID NO: 536869 - DNA, 19 bp, Mus musculus
  siRNA target sequence for Klhl2 (NM_178633.1,1487-1505).
cgtcggtagagtattataa

SEQ ID NO: 536870 - DNA, 19 bp, Mus musculus
  siRNA target sequence for Klhl2 (NM_178633.1,1507-1525).
cccaccacggataaatgga

SEQ ID NO: 536871 - DNA, 19 bp, Mus musculus
  siRNA target sequence for Klhl2 (NM_178633.1,1528-1546).
gttgtgtcctcttgtatga

SEQ ID NO: 536872 - DNA, 19 bp, Mus musculus
  siRNA target sequence for Klhl2 (NM_178633.1,1563-1581).
cgcaggggtcacagttatt

SEQ ID NO: 536873 - DNA, 19 bp, Mus musculus
  siRNA target sequence for Klhl2 (NM_178633.1,1568-1586).
gggtcacagttattgataa

SEQ ID NO: 536874 - DNA, 19 bp, Mus musculus
  siRNA target sequence for Klhl8 (NM_178741.2,448-466).
ctctctcctgggcttctat

SEQ ID NO: 536875 - DNA, 19 bp, Mus musculus
  siRNA target sequence for Klhl8 (NM_178741.2,496-514).
gaaggttggctcaaagcta

SEQ ID NO: 536876 - DNA, 19 bp, Mus musculus
  siRNA target sequence for Klhl8 (NM_178741.2,499-517).
ggttggctcaaagctaata

SEQ ID NO: 536877 - DNA, 19 bp, Mus musculus
  siRNA target sequence for Klhl8 (NM_178741.2,503-521).
ggctcaaagctaatatctt

SEQ ID NO: 536878 - DNA, 19 bp, Mus musculus
  siRNA target sequence for Klhl8 (NM_178741.2,591-609).
ccaagcaggcgttaatcga

SEQ ID NO: 536879 - DNA, 19 bp, Mus musculus
  siRNA target sequence for Klhl8 (NM_178741.2,627-645).
gtgatgccgtggaagactt

SEQ ID NO: 536880 - DNA, 19 bp, Mus musculus
  siRNA target sequence for Klhl8 (NM_178741.2,641-659).
gacttggtgaagtttgtct

SEQ ID NO: 536881 - DNA, 19 bp, Mus musculus
  siRNA target sequence for Klhl8 (NM_178741.2,661-679).
ctcctcacggctcacttta

SEQ ID NO: 536882 - DNA, 19 bp, Mus musculus
  siRNA target sequence for Klhl8 (NM_178741.2,664-682).
ctcacggctcactttaaca

SEQ ID NO: 536883 - DNA, 19 bp, Mus musculus
  siRNA target sequence for Klhl8 (NM_178741.2,666-684).
cacggctcactttaacagt

SEQ ID NO: 536884 - DNA, 19 bp, Mus musculus
  siRNA target sequence for Klhl8 (NM_178741.2,703-721).
gctgtatgcagcgtgtatt

SEQ ID NO: 536885 - DNA, 19 bp, Mus musculus
  siRNA target sequence for Klhl8 (NM_178741.2,736-754).
ggtggccagagcttgttgt

SEQ ID NO: 536886 - DNA, 19 bp, Mus musculus
  siRNA target sequence for Klhl8 (NM_178741.2,740-758).
gccagagcttgttgtgaat

SEQ ID NO: 536887 - DNA, 19 bp, Mus musculus
  siRNA target sequence for Klhl8 (NM_178741.2,760-778).
catgcagctacactttcat

SEQ ID NO: 536888 - DNA, 19 bp, Mus musculus
  siRNA target sequence for Klhl8 (NM_178741.2,937-955).
ctctagcgacctcaacatt

SEQ ID NO: 536889 - DNA, 19 bp, Mus musculus
  siRNA target sequence for Klhl8 (NM_178741.2,939-957).
ctagcgacctcaacattga

SEQ ID NO: 536890 - DNA, 19 bp, Mus musculus
  siRNA target sequence for Klhl8 (NM_178741.2,1007-1025).
ccgcaacatcatcctaaat

SEQ ID NO: 536891 - DNA, 19 bp, Mus musculus
  siRNA target sequence for Klhl8 (NM_178741.2,1058-1076).
ccattgctgccagttgatt

SEQ ID NO: 536892 - DNA, 19 bp, Mus musculus
  siRNA target sequence for Klhl8 (NM_178741.2,1084-1102).
gggtgttgtggcgaaagaa

SEQ ID NO: 536893 - DNA, 19 bp, Mus musculus
  siRNA target sequence for Klhl8 (NM_178741.2,1086-1104).
gtgttgtggcgaaagaaca

SEQ ID NO: 536894 - DNA, 19 bp, Mus musculus
  siRNA target sequence for Klhl8 (NM_178741.2,1139-1157).
ctggacgaagcgagaaatt

SEQ ID NO: 536895 - DNA, 19 bp, Mus musculus
  siRNA target sequence for Klhl8 (NM_178741.2,1162-1180).
ccttcacttgagcagtaaa

SEQ ID NO: 536896 - DNA, 19 bp, Mus musculus
  siRNA target sequence for Klhl8 (NM_178741.2,1181-1199).
ccagtcccggactttgagt

SEQ ID NO: 536897 - DNA, 19 bp, Mus musculus
  siRNA target sequence for Klhl8 (NM_178741.2,1182-1200).
cagtcccggactttgagta

SEQ ID NO: 536898 - DNA, 19 bp, Mus musculus
  siRNA target sequence for Klhl8 (NM_178741.2,1272-1290).
gtgaccccttccgtagtat

SEQ ID NO: 536899 - DNA, 19 bp, Mus musculus
  siRNA target sequence for Klhl8 (NM_178741.2,1282-1300).
ccgtagtattgaatgctat

SEQ ID NO: 536900 - DNA, 19 bp, Mus musculus
  siRNA target sequence for Klhl8 (NM_178741.2,1283-1301).
cgtagtattgaatgctatt

SEQ ID NO: 536901 - DNA, 19 bp, Mus musculus
  siRNA target sequence for Klhl8 (NM_178741.2,1287-1305).
gtattgaatgctattctat

SEQ ID NO: 536902 - DNA, 19 bp, Mus musculus
  siRNA target sequence for Klhl8 (NM_178741.2,1296-1314).
gctattctatcaacaaaaa

SEQ ID NO: 536903 - DNA, 19 bp, Mus musculus
  siRNA target sequence for Klhl8 (NM_178741.2,1425-1443).
gcagcatggagatgtttga

SEQ ID NO: 536904 - DNA, 19 bp, Mus musculus
  siRNA target sequence for Klhl8 (NM_178741.2,1483-1501).
caccaagaggcgaggaatt

SEQ ID NO: 536905 - DNA, 19 bp, Mus musculus
  siRNA target sequence for Klhl8 (NM_178741.2,1533-1551).
caattggaggattagatga

SEQ ID NO: 536906 - DNA, 19 bp, Mus musculus
  siRNA target sequence for Klhl8 (NM_178741.2,1541-1559).
ggattagatgacaatacgt

SEQ ID NO: 536907 - DNA, 19 bp, Mus musculus
  siRNA target sequence for Klhl8 (NM_178741.2,1578-1596).
gatacgacatcgaatctga

SEQ ID NO: 536908 - DNA, 19 bp, Mus musculus
  siRNA target sequence for Klhl8 (NM_178741.2,1647-1665).
ctgtggctttaataaacca

SEQ ID NO: 536909 - DNA, 19 bp, Mus musculus
  siRNA target sequence for Klhl8 (NM_178741.2,1653-1671).
ctttaataaaccacgttta

SEQ ID NO: 536910 - DNA, 19 bp, Mus musculus
  siRNA target sequence for Klhl8 (NM_178741.2,1791-1809).
gcgagcttcacggttgttt

SEQ ID NO: 536911 - DNA, 19 bp, Mus musculus
  siRNA target sequence for Klhl8 (NM_178741.2,1792-1810).
cgagcttcacggttgttta

SEQ ID NO: 536912 - DNA, 19 bp, Mus musculus
  siRNA target sequence for Klhl8 (NM_178741.2,1793-1811).
gagcttcacggttgtttat

SEQ ID NO: 536913 - DNA, 19 bp, Mus musculus
  siRNA target sequence for Klhl8 (NM_178741.2,1831-1849).
cgacaactcccctttgagt

SEQ ID NO: 536914 - DNA, 19 bp, Mus musculus
  siRNA target sequence for Klhl8 (NM_178741.2,1865-1883).
gaccctcgaagcaacaagt

SEQ ID NO: 536915 - DNA, 19 bp, Mus musculus
  siRNA target sequence for Klhl8 (NM_178741.2,1973-1991).
ggcaacgcgtacctaaaca

SEQ ID NO: 536916 - DNA, 19 bp, Mus musculus
  siRNA target sequence for Klhl8 (NM_178741.2,2072-2090).
gccgtgtgtgactgtttaa

SEQ ID NO: 536917 - DNA, 19 bp, Mus musculus
  siRNA target sequence for Klhl8 (NM_178741.2,2075-2093).
gtgtgtgactgtttaacta

SEQ ID NO: 536918 - DNA, 19 bp, Mus musculus
  siRNA target sequence for Klhl8 (NM_178741.2,2110-2128).
gggtcacgggtccactaat

SEQ ID NO: 536919 - DNA, 19 bp, Mus musculus
  siRNA target sequence for Klhl8 (NM_178741.2,2124-2142).
ctaatgtggttgactgtat

SEQ ID NO: 536920 - DNA, 19 bp, Mus musculus
  siRNA target sequence for Lama1 (NM_008480.1,169-187).
cacatcagcgccaatgcta

SEQ ID NO: 536921 - DNA, 19 bp, Mus musculus
  siRNA target sequence for Lama1 (NM_008480.1,270-288).
ggtctgtgacggtaacagt

SEQ ID NO: 536922 - DNA, 19 bp, Mus musculus
  siRNA target sequence for Lama1 (NM_008480.1,271-289).
gtctgtgacggtaacagta

SEQ ID NO: 536923 - DNA, 19 bp, Mus musculus
  siRNA target sequence for Lama1 (NM_008480.1,280-298).
ggtaacagtacgaatccta

SEQ ID NO: 536924 - DNA, 19 bp, Mus musculus
  siRNA target sequence for Lama1 (NM_008480.1,312-330).
gatatcacacgcaatcgat

SEQ ID NO: 536925 - DNA, 19 bp, Mus musculus
  siRNA target sequence for Lama1 (NM_008480.1,405-423).
cttacggcaggtctttcaa

SEQ ID NO: 536926 - DNA, 19 bp, Mus musculus
  siRNA target sequence for Lama1 (NM_008480.1,543-561).
gtgtttgacccgctacaaa

SEQ ID NO: 536927 - DNA, 19 bp, Mus musculus
  siRNA target sequence for Lama1 (NM_008480.1,545-563).
gtttgacccgctacaaaat

SEQ ID NO: 536928 - DNA, 19 bp, Mus musculus
  siRNA target sequence for Lama1 (NM_008480.1,549-567).
gacccgctacaaaataact

SEQ ID NO: 536929 - DNA, 19 bp, Mus musculus
  siRNA target sequence for Lama1 (NM_008480.1,607-625).
gtcatctgcacctcgtatt

SEQ ID NO: 536930 - DNA, 19 bp, Mus musculus
  siRNA target sequence for Lama1 (NM_008480.1,609-627).
catctgcacctcgtattat

SEQ ID NO: 536931 - DNA, 19 bp, Mus musculus
  siRNA target sequence for Lama1 (NM_008480.1,612-630).
ctgcacctcgtattattca

SEQ ID NO: 536932 - DNA, 19 bp, Mus musculus
  siRNA target sequence for Lama1 (NM_008480.1,614-632).
gcacctcgtattattcaaa

SEQ ID NO: 536933 - DNA, 19 bp, Mus musculus
  siRNA target sequence for Lama1 (NM_008480.1,633-651).
gctggtgccacttgaacat

SEQ ID NO: 536934 - DNA, 19 bp, Mus musculus
  siRNA target sequence for Lama1 (NM_008480.1,822-840).
cattgtcacaagacgttat

SEQ ID NO: 536935 - DNA, 19 bp, Mus musculus
  siRNA target sequence for Lama1 (NM_008480.1,828-846).
cacaagacgttattactat

SEQ ID NO: 536936 - DNA, 19 bp, Mus musculus
  siRNA target sequence for Lama1 (NM_008480.1,833-851).
gacgttattactattcgat

SEQ ID NO: 536937 - DNA, 19 bp, Mus musculus
  siRNA target sequence for Lama1 (NM_008480.1,835-853).
cgttattactattcgataa

SEQ ID NO: 536938 - DNA, 19 bp, Mus musculus
  siRNA target sequence for Lama1 (NM_008480.1,843-861).
ctattcgataaaagacatt

SEQ ID NO: 536939 - DNA, 19 bp, Mus musculus
  siRNA target sequence for Lama1 (NM_008480.1,940-958).
cagtgtgaacacaatacgt

SEQ ID NO: 536940 - DNA, 19 bp, Mus musculus
  siRNA target sequence for Lama1 (NM_008480.1,1067-1085).
ccaaagattgttactatga

SEQ ID NO: 536941 - DNA, 19 bp, Mus musculus
  siRNA target sequence for Lama1 (NM_008480.1,1153-1171).
gtcaactgctcgcagaata

SEQ ID NO: 536942 - DNA, 19 bp, Mus musculus
  siRNA target sequence for Lama1 (NM_008480.1,1193-1211).
cctgtatcgaccagtatta

SEQ ID NO: 536943 - DNA, 19 bp, Mus musculus
  siRNA target sequence for Lama1 (NM_008480.1,1221-1239).
caaggtatctccttatgat

SEQ ID NO: 536944 - DNA, 19 bp, Mus musculus
  siRNA target sequence for Lama1 (NM_008480.1,1246-1264).
ccttgccgtccctgtaact

SEQ ID NO: 536945 - DNA, 19 bp, Mus musculus
  siRNA target sequence for Lama1 (NM_008480.1,1316-1334).
ccgatttagccaatggaaa

SEQ ID NO: 536946 - DNA, 19 bp, Mus musculus
  siRNA target sequence for Lama1 (NM_008480.1,1349-1367).
gtccatgtaggaaaggtta

SEQ ID NO: 536947 - DNA, 19 bp, Mus musculus
  siRNA target sequence for Lama1 (NM_008480.1,1363-1381).
ggttatgctggagataaat

SEQ ID NO: 536948 - DNA, 19 bp, Mus musculus
  siRNA target sequence for Lama1 (NM_008480.1,1405-1423).
cggggtttcccaaattgca

SEQ ID NO: 536949 - DNA, 19 bp, Mus musculus
  siRNA target sequence for Lama1 (NM_008480.1,1406-1424).
ggggtttcccaaattgcat

SEQ ID NO: 536950 - DNA, 19 bp, Mus musculus
  siRNA target sequence for Lama1 (NM_008480.1,1455-1473).
gaatgaggatccatgcata

SEQ ID NO: 536951 - DNA, 19 bp, Mus musculus
  siRNA target sequence for Lama1 (NM_008480.1,1470-1488).
catagagccgtgtctttgt

SEQ ID NO: 536952 - DNA, 19 bp, Mus musculus
  siRNA target sequence for Lama1 (NM_008480.1,1474-1492).
gagccgtgtctttgtaaga

SEQ ID NO: 536953 - DNA, 19 bp, Mus musculus
  siRNA target sequence for Lama1 (NM_008480.1,1476-1494).
gccgtgtctttgtaagaaa

SEQ ID NO: 536954 - DNA, 19 bp, Mus musculus
  siRNA target sequence for Lama1 (NM_008480.1,1654-1672).
ctggtcactgacttgatga

SEQ ID NO: 536955 - DNA, 19 bp, Mus musculus
  siRNA target sequence for Lama1 (NM_008480.1,1756-1774).
ctgacttccacttactact

SEQ ID NO: 536956 - DNA, 19 bp, Mus musculus
  siRNA target sequence for Lama1 (NM_008480.1,1819-1837).
ggcggtttcctgaaataca

SEQ ID NO: 536957 - DNA, 19 bp, Mus musculus
  siRNA target sequence for Lama1 (NM_008480.1,1886-1904).
ctcatgctgacatcatcat

SEQ ID NO: 536958 - DNA, 19 bp, Mus musculus
  siRNA target sequence for Lama1 (NM_008480.1,1954-1972).
caaccctatgaggaatact

SEQ ID NO: 536959 - DNA, 19 bp, Mus musculus
  siRNA target sequence for Lama1 (NM_008480.1,1958-1976).
cctatgaggaatacttcaa

SEQ ID NO: 536960 - DNA, 19 bp, Mus musculus
  siRNA target sequence for Lama1 (NM_008480.1,1971-1989).
cttcaacgtggttagactt

SEQ ID NO: 536961 - DNA, 19 bp, Mus musculus
  siRNA target sequence for Lama1 (NM_008480.1,2060-2078).
ccaatgtgacacatctctt

SEQ ID NO: 536962 - DNA, 19 bp, Mus musculus
  siRNA target sequence for Lama1 (NM_008480.1,2076-2094).
cttgatcagagccaattat

SEQ ID NO: 536963 - DNA, 19 bp, Mus musculus
  siRNA target sequence for Lama1 (NM_008480.1,2079-2097).
gatcagagccaattataat

SEQ ID NO: 536964 - DNA, 19 bp, Mus musculus
  siRNA target sequence for Lama1 (NM_008480.1,2101-2119).
gctaaaatggcgctctata

SEQ ID NO: 536965 - DNA, 19 bp, Mus musculus
  siRNA target sequence for Lama1 (NM_008480.1,2147-2165).
caagccctaatgctataga

SEQ ID NO: 536966 - DNA, 19 bp, Mus musculus
  siRNA target sequence for Lama1 (NM_008480.1,2150-2168).
gccctaatgctatagactt

SEQ ID NO: 536967 - DNA, 19 bp, Mus musculus
  siRNA target sequence for Lama1 (NM_008480.1,2182-2200).
gatgtggaacactgtgaat

SEQ ID NO: 536968 - DNA, 19 bp, Mus musculus
  siRNA target sequence for Lama1 (NM_008480.1,2238-2256).
cctccctggctattatcga

SEQ ID NO: 536969 - DNA, 19 bp, Mus musculus
  siRNA target sequence for Lama1 (NM_008480.1,2312-2330).
catccgagtgtgacattca

SEQ ID NO: 536970 - DNA, 19 bp, Mus musculus
  siRNA target sequence for Lama1 (NM_008480.1,2319-2337).
gtgtgacattcatggaatt

SEQ ID NO: 536971 - DNA, 19 bp, Mus musculus
  siRNA target sequence for Lama1 (NM_008480.1,2454-2472).
ctccattgactctaacaat

SEQ ID NO: 536972 - DNA, 19 bp, Mus musculus
  siRNA target sequence for Lama1 (NM_008480.1,2746-2764).
gccgtgactgccaaaaact

SEQ ID NO: 536973 - DNA, 19 bp, Mus musculus
  siRNA target sequence for Lama1 (NM_008480.1,3068-3086).
gtgctcatacccagaataa

SEQ ID NO: 536974 - DNA, 19 bp, Mus musculus
  siRNA target sequence for Lama1 (NM_008480.1,3070-3088).
gctcatacccagaataact

SEQ ID NO: 536975 - DNA, 19 bp, Mus musculus
  siRNA target sequence for Lama1 (NM_008480.1,3303-3321).
cttaggctacagaagtttt

SEQ ID NO: 536976 - DNA, 19 bp, Mus musculus
  siRNA target sequence for Lama1 (NM_008480.1,3564-3582).
cgtgaggactctgataact

SEQ ID NO: 536977 - DNA, 19 bp, Mus musculus
  siRNA target sequence for Lama1 (NM_008480.1,3627-3645).
cctcaagggcacaatcgaa

SEQ ID NO: 536978 - DNA, 19 bp, Mus musculus
  siRNA target sequence for Lama1 (NM_008480.1,3688-3706).
gctgtccgccagcatatct

SEQ ID NO: 536979 - DNA, 19 bp, Mus musculus
  siRNA target sequence for Lama1 (NM_008480.1,3689-3707).
ctgtccgccagcatatcta

SEQ ID NO: 536980 - DNA, 19 bp, Mus musculus
  siRNA target sequence for Lama1 (NM_008480.1,3792-3810).
ggctttctactctacactt

SEQ ID NO: 536981 - DNA, 19 bp, Mus musculus
  siRNA target sequence for Lama1 (NM_008480.1,3811-3829).
ggcaccggaacatccaatt

SEQ ID NO: 536982 - DNA, 19 bp, Mus musculus
  siRNA target sequence for Lama1 (NM_008480.1,3812-3830).
gcaccggaacatccaatta

SEQ ID NO: 536983 - DNA, 19 bp, Mus musculus
  siRNA target sequence for Lama1 (NM_008480.1,3813-3831).
caccggaacatccaattat

SEQ ID NO: 536984 - DNA, 19 bp, Mus musculus
  siRNA target sequence for Lama1 (NM_008480.1,3815-3833).
ccggaacatccaattatga

SEQ ID NO: 536985 - DNA, 19 bp, Mus musculus
  siRNA target sequence for Lama1 (NM_008480.1,3862-3880).
gccaggaagcacgtcattt

SEQ ID NO: 536986 - DNA, 19 bp, Mus musculus
  siRNA target sequence for Lama1 (NM_008480.1,3866-3884).
ggaagcacgtcatttatat

SEQ ID NO: 536987 - DNA, 19 bp, Mus musculus
  siRNA target sequence for Lama1 (NM_008480.1,3908-3926).
gagtgagacaggattacga

SEQ ID NO: 536988 - DNA, 19 bp, Mus musculus
  siRNA target sequence for Lama1 (NM_008480.1,3940-3958).
gaggaattctggaaatatt

SEQ ID NO: 536989 - DNA, 19 bp, Mus musculus
  siRNA target sequence for Lama1 (NM_008480.1,4002-4020).
gtctgttctcagcaatatt

SEQ ID NO: 536990 - DNA, 19 bp, Mus musculus
  siRNA target sequence for Lama1 (NM_008480.1,4004-4022).
ctgttctcagcaatattga

SEQ ID NO: 536991 - DNA, 19 bp, Mus musculus
  siRNA target sequence for Lama1 (NM_008480.1,4065-4083).
gagcagaattgccaacatt

SEQ ID NO: 536992 - DNA, 19 bp, Mus musculus
  siRNA target sequence for Lama1 (NM_008480.1,4962-4980).
ggagctcaccagagtgtta

SEQ ID NO: 536993 - DNA, 19 bp, Mus musculus
  siRNA target sequence for Lama1 (NM_008480.1,4995-5013).
ggtgaacgctgaaatggaa

SEQ ID NO: 536994 - DNA, 19 bp, Mus musculus
  siRNA target sequence for Lama1 (NM_008480.1,5209-5227).
gagatgcagcagaatgcta

SEQ ID NO: 536995 - DNA, 19 bp, Mus musculus
  siRNA target sequence for Lama1 (NM_008480.1,5238-5256).
caaggctgctaaagactta

SEQ ID NO: 536996 - DNA, 19 bp, Mus musculus
  siRNA target sequence for Lama1 (NM_008480.1,5242-5260).
gctgctaaagacttattgt

SEQ ID NO: 536997 - DNA, 19 bp, Mus musculus
  siRNA target sequence for Lama1 (NM_008480.1,5318-5336).
ccaacagcctcctttccaa

SEQ ID NO: 536998 - DNA, 19 bp, Mus musculus
  siRNA target sequence for Lama1 (NM_008480.1,5333-5351).
ccaaccacagtgaaaaact

SEQ ID NO: 536999 - DNA, 19 bp, Mus musculus
  siRNA target sequence for Lama1 (NM_008480.1,5454-5472).
gaaaaagctgcgtgttcaa

SEQ ID NO: 537000 - DNA, 19 bp, Mus musculus
  siRNA target sequence for Lama1 (NM_008480.1,5599-5617).
ctgtgggccagaaaaatca

SEQ ID NO: 537001 - DNA, 19 bp, Mus musculus
  siRNA target sequence for Lama1 (NM_008480.1,5840-5858).
ctcacaagacggcgaataa

SEQ ID NO: 537002 - DNA, 19 bp, Mus musculus
  siRNA target sequence for Lama1 (NM_008480.1,5844-5862).
caagacggcgaataagaca

SEQ ID NO: 537003 - DNA, 19 bp, Mus musculus
  siRNA target sequence for Lama1 (NM_008480.1,5910-5928).
gcgctcgtcccggtttcta

SEQ ID NO: 537004 - DNA, 19 bp, Mus musculus
  siRNA target sequence for Lama1 (NM_008480.1,5911-5929).
cgctcgtcccggtttctaa

SEQ ID NO: 537005 - DNA, 19 bp, Mus musculus
  siRNA target sequence for Lama1 (NM_008480.1,5912-5930).
gctcgtcccggtttctaaa

SEQ ID NO: 537006 - DNA, 19 bp, Mus musculus
  siRNA target sequence for Lama1 (NM_008480.1,5915-5933).
cgtcccggtttctaaagga

SEQ ID NO: 537007 - DNA, 19 bp, Mus musculus
  siRNA target sequence for Lama1 (NM_008480.1,5916-5934).
gtcccggtttctaaaggaa

SEQ ID NO: 537008 - DNA, 19 bp, Mus musculus
  siRNA target sequence for Lama1 (NM_008480.1,5980-5998).
gatgagttgaaaaacttaa

SEQ ID NO: 537009 - DNA, 19 bp, Mus musculus
  siRNA target sequence for Lama1 (NM_008480.1,6046-6064).
gactcccttgcgatgctta

SEQ ID NO: 537010 - DNA, 19 bp, Mus musculus
  siRNA target sequence for Lama1 (NM_008480.1,6050-6068).
cccttgcgatgcttagaga

SEQ ID NO: 537011 - DNA, 19 bp, Mus musculus
  siRNA target sequence for Lama1 (NM_008480.1,6051-6069).
ccttgcgatgcttagagaa

SEQ ID NO: 537012 - DNA, 19 bp, Mus musculus
  siRNA target sequence for Lama1 (NM_008480.1,6052-6070).
cttgcgatgcttagagaaa

SEQ ID NO: 537013 - DNA, 19 bp, Mus musculus
  siRNA target sequence for Lama1 (NM_008480.1,6174-6192).
gagggtcttcaatacatca

SEQ ID NO: 537014 - DNA, 19 bp, Mus musculus
  siRNA target sequence for Lama1 (NM_008480.1,6230-6248).
caaacgaccttctgcataa

SEQ ID NO: 537015 - DNA, 19 bp, Mus musculus
  siRNA target sequence for Lama1 (NM_008480.1,6263-6281).
ctctgttggctggaagaaa

SEQ ID NO: 537016 - DNA, 19 bp, Mus musculus
  siRNA target sequence for Lama1 (NM_008480.1,6362-6380).
gaaacctgtcggagatcaa

SEQ ID NO: 537017 - DNA, 19 bp, Mus musculus
  siRNA target sequence for Lama1 (NM_008480.1,6473-6491).
cttcatctaccaattacaa

SEQ ID NO: 537018 - DNA, 19 bp, Mus musculus
  siRNA target sequence for Lama1 (NM_008480.1,6554-6572).
gcagcagttctgactttct

SEQ ID NO: 537019 - DNA, 19 bp, Mus musculus
  siRNA target sequence for Lama1 (NM_008480.1,6671-6689).
gatggcacagcatctacat

SEQ ID NO: 537020 - DNA, 19 bp, Mus musculus
  siRNA target sequence for Lama1 (NM_008480.1,6676-6694).
cacagcatctacataacca

SEQ ID NO: 537021 - DNA, 19 bp, Mus musculus
  siRNA target sequence for Lama1 (NM_008480.1,6751-6769).
ccggtcaggacaagcaaat

SEQ ID NO: 537022 - DNA, 19 bp, Mus musculus
  siRNA target sequence for Lama1 (NM_008480.1,6782-6800).
cgaaggttctggacataaa

SEQ ID NO: 537023 - DNA, 19 bp, Mus musculus
  siRNA target sequence for Lama1 (NM_008480.1,6787-6805).
gttctggacataaacaatt

SEQ ID NO: 537024 - DNA, 19 bp, Mus musculus
  siRNA target sequence for Lama1 (NM_008480.1,6827-6845).
ggctcggaggtcagatcaa

SEQ ID NO: 537025 - DNA, 19 bp, Mus musculus
  siRNA target sequence for Lama1 (NM_008480.1,6829-6847).
ctcggaggtcagatcaaga

SEQ ID NO: 537026 - DNA, 19 bp, Mus musculus
  siRNA target sequence for Lama1 (NM_008480.1,6831-6849).
cggaggtcagatcaagaaa

SEQ ID NO: 537027 - DNA, 19 bp, Mus musculus
  siRNA target sequence for Lama1 (NM_008480.1,6854-6872).
cggctgtgaaggttactca

SEQ ID NO: 537028 - DNA, 19 bp, Mus musculus
  siRNA target sequence for Lama1 (NM_008480.1,6855-6873).
ggctgtgaaggttactcat

SEQ ID NO: 537029 - DNA, 19 bp, Mus musculus
  siRNA target sequence for Lama1 (NM_008480.1,6859-6877).
gtgaaggttactcatttta

SEQ ID NO: 537030 - DNA, 19 bp, Mus musculus
  siRNA target sequence for Lama1 (NM_008480.1,6888-6906).
gggagaggccttcttgaat

SEQ ID NO: 537031 - DNA, 19 bp, Mus musculus
  siRNA target sequence for Lama1 (NM_008480.1,6900-6918).
cttgaatggcaaatcgatt

SEQ ID NO: 537032 - DNA, 19 bp, Mus musculus
  siRNA target sequence for Lama1 (NM_008480.1,6914-6932).
cgattggcctgtggaatta

SEQ ID NO: 537033 - DNA, 19 bp, Mus musculus
  siRNA target sequence for Lama1 (NM_008480.1,6982-7000).
gaagattcctccttccatt

SEQ ID NO: 537034 - DNA, 19 bp, Mus musculus
  siRNA target sequence for Lama1 (NM_008480.1,7043-7061).
ccaccgtgacgcagatagt

SEQ ID NO: 537035 - DNA, 19 bp, Mus musculus
  siRNA target sequence for Lama1 (NM_008480.1,7044-7062).
caccgtgacgcagatagta

SEQ ID NO: 537036 - DNA, 19 bp, Mus musculus
  siRNA target sequence for Lama1 (NM_008480.1,7046-7064).
ccgtgacgcagatagtaat

SEQ ID NO: 537037 - DNA, 19 bp, Mus musculus
  siRNA target sequence for Lama1 (NM_008480.1,7047-7065).
cgtgacgcagatagtaatt

SEQ ID NO: 537038 - DNA, 19 bp, Mus musculus
  siRNA target sequence for Lama1 (NM_008480.1,7052-7070).
cgcagatagtaattctctt

SEQ ID NO: 537039 - DNA, 19 bp, Mus musculus
  siRNA target sequence for Lama1 (NM_008480.1,7082-7100).
ccccgaatggccttctttt

SEQ ID NO: 537040 - DNA, 19 bp, Mus musculus
  siRNA target sequence for Lama1 (NM_008480.1,7085-7103).
cgaatggccttcttttcta

SEQ ID NO: 537041 - DNA, 19 bp, Mus musculus
  siRNA target sequence for Lama1 (NM_008480.1,7184-7202).
caggacccctcactcttat

SEQ ID NO: 537042 - DNA, 19 bp, Mus musculus
  siRNA target sequence for Lama1 (NM_008480.1,7186-7204).
ggacccctcactcttatga

SEQ ID NO: 537043 - DNA, 19 bp, Mus musculus
  siRNA target sequence for Lama1 (NM_008480.1,7205-7223).
cagacaggcggtataacaa

SEQ ID NO: 537044 - DNA, 19 bp, Mus musculus
  siRNA target sequence for Lama1 (NM_008480.1,7221-7239).
caacggaacctggtataaa

SEQ ID NO: 537045 - DNA, 19 bp, Mus musculus
  siRNA target sequence for Lama1 (NM_008480.1,7277-7295).
ctgtcttcgatgcatatga

SEQ ID NO: 537046 - DNA, 19 bp, Mus musculus
  siRNA target sequence for Lama1 (NM_008480.1,7380-7398).
gggtggattgcctcattct

SEQ ID NO: 537047 - DNA, 19 bp, Mus musculus
  siRNA target sequence for Lama1 (NM_008480.1,7381-7399).
ggtggattgcctcattcta

SEQ ID NO: 537048 - DNA, 19 bp, Mus musculus
  siRNA target sequence for Lama1 (NM_008480.1,7382-7400).
gtggattgcctcattctaa

SEQ ID NO: 537049 - DNA, 19 bp, Mus musculus
  siRNA target sequence for Lama1 (NM_008480.1,7430-7448).
gctatgtgggctgtatcaa

SEQ ID NO: 537050 - DNA, 19 bp, Mus musculus
  siRNA target sequence for Lama1 (NM_008480.1,7442-7460).
gtatcaagaacctagagat

SEQ ID NO: 537051 - DNA, 19 bp, Mus musculus
  siRNA target sequence for Lama1 (NM_008480.1,7466-7484).
ggtccacctttgatttgct

SEQ ID NO: 537052 - DNA, 19 bp, Mus musculus
  siRNA target sequence for Lama1 (NM_008480.1,7526-7544).
ctatccagagtgtgagttt

SEQ ID NO: 537053 - DNA, 19 bp, Mus musculus
  siRNA target sequence for Lama1 (NM_008480.1,7713-7731).
gctgcttgagggacgaatt

SEQ ID NO: 537054 - DNA, 19 bp, Mus musculus
  siRNA target sequence for Lama1 (NM_008480.1,7823-7841).
ccatctccctggttaggaa

SEQ ID NO: 537055 - DNA, 19 bp, Mus musculus
  siRNA target sequence for Lama1 (NM_008480.1,7824-7842).
catctccctggttaggaat

SEQ ID NO: 537056 - DNA, 19 bp, Mus musculus
  siRNA target sequence for Lama1 (NM_008480.1,7834-7852).
gttaggaatcggagagtta

SEQ ID NO: 537057 - DNA, 19 bp, Mus musculus
  siRNA target sequence for Lama1 (NM_008480.1,7845-7863).
gagagttatcaccatacaa

SEQ ID NO: 537058 - DNA, 19 bp, Mus musculus
  siRNA target sequence for Lama1 (NM_008480.1,7847-7865).
gagttatcaccatacaagt

SEQ ID NO: 537059 - DNA, 19 bp, Mus musculus
  siRNA target sequence for Lama1 (NM_008480.1,7856-7874).
ccatacaagtggatgagaa

SEQ ID NO: 537060 - DNA, 19 bp, Mus musculus
  siRNA target sequence for Lama1 (NM_008480.1,7870-7888).
gagaacagtcccgtagaaa

SEQ ID NO: 537061 - DNA, 19 bp, Mus musculus
  siRNA target sequence for Lama1 (NM_008480.1,7890-7908).
gaagttgggtccattaaca

SEQ ID NO: 537062 - DNA, 19 bp, Mus musculus
  siRNA target sequence for Lama1 (NM_008480.1,7912-7930).
ggaaagacgatcgacatat

SEQ ID NO: 537063 - DNA, 19 bp, Mus musculus
  siRNA target sequence for Lama1 (NM_008480.1,7967-7985).
cgaccccgatgctcaagat

SEQ ID NO: 537064 - DNA, 19 bp, Mus musculus
  siRNA target sequence for Lama1 (NM_008480.1,7994-8012).
cgttccatgggtgtattaa

SEQ ID NO: 537065 - DNA, 19 bp, Mus musculus
  siRNA target sequence for Lama1 (NM_008480.1,7995-8013).
gttccatgggtgtattaaa

SEQ ID NO: 537066 - DNA, 19 bp, Mus musculus
  siRNA target sequence for Lama1 (NM_008480.1,8019-8037).
ggtccttgacgctcaactt

SEQ ID NO: 537067 - DNA, 19 bp, Mus musculus
  siRNA target sequence for Lama1 (NM_008480.1,8321-8339).
gtggcctcatttactatgt

SEQ ID NO: 537068 - DNA, 19 bp, Mus musculus
  siRNA target sequence for Lama1 (NM_008480.1,8471-8489).
cagtcaagacagaatacat

SEQ ID NO: 537069 - DNA, 19 bp, Mus musculus
  siRNA target sequence for Lama1 (NM_008480.1,8473-8491).
gtcaagacagaatacatta

SEQ ID NO: 537070 - DNA, 19 bp, Mus musculus
  siRNA target sequence for Lama1 (NM_008480.1,8771-8789).
gatatgcagctcttgtcaa

SEQ ID NO: 537071 - DNA, 19 bp, Mus musculus
  siRNA target sequence for Lama1 (NM_008480.1,8780-8798).
ctcttgtcaaggaaggtta

SEQ ID NO: 537072 - DNA, 19 bp, Mus musculus
  siRNA target sequence for Lama1 (NM_008480.1,8799-8817).
caaagttcgattggattta

SEQ ID NO: 537073 - DNA, 19 bp, Mus musculus
  siRNA target sequence for Lama1 (NM_008480.1,8803-8821).
gttcgattggatttaaata

SEQ ID NO: 537074 - DNA, 19 bp, Mus musculus
  siRNA target sequence for Lama1 (NM_008480.1,8806-8824).
cgattggatttaaatatca

SEQ ID NO: 537075 - DNA, 19 bp, Mus musculus
  siRNA target sequence for Lama1 (NM_008480.1,8835-8853).
ccgtactacctctaagaat

SEQ ID NO: 537076 - DNA, 19 bp, Mus musculus
  siRNA target sequence for Lama1 (NM_008480.1,8937-8955).
caacggtgccggaaggata

SEQ ID NO: 537077 - DNA, 19 bp, Mus musculus
  siRNA target sequence for Lama1 (NM_008480.1,9108-9126).
caccaacgatcccatttat

SEQ ID NO: 537078 - DNA, 19 bp, Mus musculus
  siRNA target sequence for Lama1 (NM_008480.1,9135-9153).
ctatcctgcccacatcaaa

SEQ ID NO: 537079 - DNA, 19 bp, Mus musculus
  siRNA target sequence for Ldlr (NM_010700.1,56-74).
ccggagttgcagtagaaga

SEQ ID NO: 537080 - DNA, 19 bp, Mus musculus
  siRNA target sequence for Ldlr (NM_010700.1,101-119).
gtagagacggaaaatgcat

SEQ ID NO: 537081 - DNA, 19 bp, Mus musculus
  siRNA target sequence for Ldlr (NM_010700.1,198-216).
cacctgtcagtccaatcaa

SEQ ID NO: 537082 - DNA, 19 bp, Mus musculus
  siRNA target sequence for Ldlr (NM_010700.1,231-249).
ccgtgtcagccgatgcatt

SEQ ID NO: 537083 - DNA, 19 bp, Mus musculus
  siRNA target sequence for Ldlr (NM_010700.1,271-289).
ggacaggtagactgtgaaa

SEQ ID NO: 537084 - DNA, 19 bp, Mus musculus
  siRNA target sequence for Ldlr (NM_010700.1,277-295).
gtagactgtgaaaatgact

SEQ ID NO: 537085 - DNA, 19 bp, Mus musculus
  siRNA target sequence for Ldlr (NM_010700.1,453-471).
ccacttccgctgcaaatca

SEQ ID NO: 537086 - DNA, 19 bp, Mus musculus
  siRNA target sequence for Ldlr (NM_010700.1,454-472).
cacttccgctgcaaatcat

SEQ ID NO: 537087 - DNA, 19 bp, Mus musculus
  siRNA target sequence for Ldlr (NM_010700.1,459-477).
ccgctgcaaatcatccata

SEQ ID NO: 537088 - DNA, 19 bp, Mus musculus
  siRNA target sequence for Ldlr (NM_010700.1,614-632).
gtggtagcagtgagtgtat

SEQ ID NO: 537089 - DNA, 19 bp, Mus musculus
  siRNA target sequence for Ldlr (NM_010700.1,705-723).
cacctgccgacctgatgaa

SEQ ID NO: 537090 - DNA, 19 bp, Mus musculus
  siRNA target sequence for Ldlr (NM_010700.1,707-725).
cctgccgacctgatgaatt

SEQ ID NO: 537091 - DNA, 19 bp, Mus musculus
  siRNA target sequence for Ldlr (NM_010700.1,805-823).
ctcggctgcgtcaatgtga

SEQ ID NO: 537092 - DNA, 19 bp, Mus musculus
  siRNA target sequence for Ldlr (NM_010700.1,830-848).
gtgatggccccaacaagtt

SEQ ID NO: 537093 - DNA, 19 bp, Mus musculus
  siRNA target sequence for Ldlr (NM_010700.1,951-969).
cgagtgtttggacaacaat

SEQ ID NO: 537094 - DNA, 19 bp, Mus musculus
  siRNA target sequence for Ldlr (NM_010700.1,1222-1240).
cacgaggtccggaagatga

SEQ ID NO: 537095 - DNA, 19 bp, Mus musculus
  siRNA target sequence for Ldlr (NM_010700.1,1306-1324).
gaggtgaccaacaatagaa

SEQ ID NO: 537096 - DNA, 19 bp, Mus musculus
  siRNA target sequence for Ldlr (NM_010700.1,1372-1390).
gaccaggcccctaacttgt

SEQ ID NO: 537097 - DNA, 19 bp, Mus musculus
  siRNA target sequence for Ldlr (NM_010700.1,1448-1466).
ggatccaccgcaacatcta

SEQ ID NO: 537098 - DNA, 19 bp, Mus musculus
  siRNA target sequence for Ldlr (NM_010700.1,1576-1594).
cctgtgcatggcttcatgt

SEQ ID NO: 537099 - DNA, 19 bp, Mus musculus
  siRNA target sequence for Ldlr (NM_010700.1,1626-1644).
caagaaagggggtttgaat

SEQ ID NO: 537100 - DNA, 19 bp, Mus musculus
  siRNA target sequence for Ldlr (NM_010700.1,1720-1738).
cgtctctattgggttgatt

SEQ ID NO: 537101 - DNA, 19 bp, Mus musculus
  siRNA target sequence for Ldlr (NM_010700.1,1725-1743).
ctattgggttgattccaaa

SEQ ID NO: 537102 - DNA, 19 bp, Mus musculus
  siRNA target sequence for Ldlr (NM_010700.1,1776-1794).
gggcaatcggaaaaccatt

SEQ ID NO: 537103 - DNA, 19 bp, Mus musculus
  siRNA target sequence for Ldlr (NM_010700.1,1777-1795).
ggcaatcggaaaaccattt

SEQ ID NO: 537104 - DNA, 19 bp, Mus musculus
  siRNA target sequence for Ldlr (NM_010700.1,1778-1796).
gcaatcggaaaaccatttt

SEQ ID NO: 537105 - DNA, 19 bp, Mus musculus
  siRNA target sequence for Ldlr (NM_010700.1,1843-1861).
gaggacaaagtgtattgga

SEQ ID NO: 537106 - DNA, 19 bp, Mus musculus
  siRNA target sequence for Ldlr (NM_010700.1,1859-1877).
ggacagatgtcataaacga

SEQ ID NO: 537107 - DNA, 19 bp, Mus musculus
  siRNA target sequence for Ldlr (NM_010700.1,1860-1878).
gacagatgtcataaacgaa

SEQ ID NO: 537108 - DNA, 19 bp, Mus musculus
  siRNA target sequence for Ldlr (NM_010700.1,1902-1920).
cacgggttcagatgtgaat

SEQ ID NO: 537109 - DNA, 19 bp, Mus musculus
  siRNA target sequence for Ldlr (NM_010700.1,2066-2084).
gtccccactcgcccaaatt

SEQ ID NO: 537110 - DNA, 19 bp, Mus musculus
  siRNA target sequence for Ldlr (NM_010700.1,2068-2086).
ccccactcgcccaaattca

SEQ ID NO: 537111 - DNA, 19 bp, Mus musculus
  siRNA target sequence for Ldlr (NM_010700.1,2446-2464).
cggctgaagaacatcacaa

SEQ ID NO: 537112 - DNA, 19 bp, Mus musculus
  siRNA target sequence for Ldlr (NM_010700.1,2447-2465).
ggctgaagaacatcacaat

SEQ ID NO: 537113 - DNA, 19 bp, Mus musculus
  siRNA target sequence for Ldlr (NM_010700.1,2534-2552).
gccaggatggctataccta

SEQ ID NO: 537114 - DNA, 19 bp, Mus musculus
  siRNA target sequence for Lep (NM_008493.3,100-118).
cctatctgtcttatgttca

SEQ ID NO: 537115 - DNA, 19 bp, Mus musculus
  siRNA target sequence for Lep (NM_008493.3,159-177).
ctcatcaagaccattgtca

SEQ ID NO: 537116 - DNA, 19 bp, Mus musculus
  siRNA target sequence for Lep (NM_008493.3,174-192).
gtcaccaggatcaatgaca

SEQ ID NO: 537117 - DNA, 19 bp, Mus musculus
  siRNA target sequence for Lep (NM_008493.3,176-194).
caccaggatcaatgacatt

SEQ ID NO: 537118 - DNA, 19 bp, Mus musculus
  siRNA target sequence for Lep (NM_008493.3,290-308).
gactctggcagtctatcaa

SEQ ID NO: 537119 - DNA, 19 bp, Mus musculus
  siRNA target sequence for Lep (NM_008493.3,322-340).
gcctgccttcccaaaatgt

SEQ ID NO: 537120 - DNA, 19 bp, Mus musculus
  siRNA target sequence for Lepr (NM_010704.1,553-571).
ggaatttctttatgtgata

SEQ ID NO: 537121 - DNA, 19 bp, Mus musculus
  siRNA target sequence for Lepr (NM_010704.1,578-596).
cttaacctggcatatccaa

SEQ ID NO: 537122 - DNA, 19 bp, Mus musculus
  siRNA target sequence for Lepr (NM_010704.1,594-612).
caatctctccctggaaatt

SEQ ID NO: 537123 - DNA, 19 bp, Mus musculus
  siRNA target sequence for Lepr (NM_010704.1,600-618).
ctccctggaaatttaagtt

SEQ ID NO: 537124 - DNA, 19 bp, Mus musculus
  siRNA target sequence for Lepr (NM_010704.1,748-766).
cgttcctgagttatccaaa

SEQ ID NO: 537125 - DNA, 19 bp, Mus musculus
  siRNA target sequence for Lepr (NM_010704.1,749-767).
gttcctgagttatccaaaa

SEQ ID NO: 537126 - DNA, 19 bp, Mus musculus
  siRNA target sequence for Lepr (NM_010704.1,789-807).
ggaatgagcaaggtcaaaa

SEQ ID NO: 537127 - DNA, 19 bp, Mus musculus
  siRNA target sequence for Lepr (NM_010704.1,875-893).
cgccagctaggtgtaaact

SEQ ID NO: 537128 - DNA, 19 bp, Mus musculus
  siRNA target sequence for Lepr (NM_010704.1,887-905).
gtaaactgggacatagagt

SEQ ID NO: 537129 - DNA, 19 bp, Mus musculus
  siRNA target sequence for Lepr (NM_010704.1,917-935).
ggggacttgacattattca

SEQ ID NO: 537130 - DNA, 19 bp, Mus musculus
  siRNA target sequence for Lepr (NM_010704.1,918-936).
gggacttgacattattcat

SEQ ID NO: 537131 - DNA, 19 bp, Mus musculus
  siRNA target sequence for Lepr (NM_010704.1,927-945).
cattattcatctgtcatat

SEQ ID NO: 537132 - DNA, 19 bp, Mus musculus
  siRNA target sequence for Lepr (NM_010704.1,941-959).
catatggagccattaccta

SEQ ID NO: 537133 - DNA, 19 bp, Mus musculus
  siRNA target sequence for Lepr (NM_010704.1,961-979).
gaaccccttcaagaattat

SEQ ID NO: 537134 - DNA, 19 bp, Mus musculus
  siRNA target sequence for Lepr (NM_010704.1,980-998).
gactctaaggtccatcttt

SEQ ID NO: 537135 - DNA, 19 bp, Mus musculus
  siRNA target sequence for Lepr (NM_010704.1,988-1006).
ggtccatcttttatatgat

SEQ ID NO: 537136 - DNA, 19 bp, Mus musculus
  siRNA target sequence for Lepr (NM_010704.1,1009-1027).
gcctgaagtcatagatgat

SEQ ID NO: 537137 - DNA, 19 bp, Mus musculus
  siRNA target sequence for Lepr (NM_010704.1,1109-1127).
gtacccagagccaaactca

SEQ ID NO: 537138 - DNA, 19 bp, Mus musculus
  siRNA target sequence for Lepr (NM_010704.1,1141-1159).
gatgtatttggaaatcaca

SEQ ID NO: 537139 - DNA, 19 bp, Mus musculus
  siRNA target sequence for Lepr (NM_010704.1,1163-1181).
gccggtgtgagttttcagt

SEQ ID NO: 537140 - DNA, 19 bp, Mus musculus
  siRNA target sequence for Lepr (NM_010704.1,1220-1238).
cccgatccacccttaggtt

SEQ ID NO: 537141 - DNA, 19 bp, Mus musculus
  siRNA target sequence for Lepr (NM_010704.1,1221-1239).
ccgatccacccttaggttt

SEQ ID NO: 537142 - DNA, 19 bp, Mus musculus
  siRNA target sequence for Lepr (NM_010704.1,1226-1244).
ccacccttaggtttgcata

SEQ ID NO: 537143 - DNA, 19 bp, Mus musculus
  siRNA target sequence for Lepr (NM_010704.1,1227-1245).
cacccttaggtttgcatat

SEQ ID NO: 537144 - DNA, 19 bp, Mus musculus
  siRNA target sequence for Lepr (NM_010704.1,1231-1249).
cttaggtttgcatatggaa

SEQ ID NO: 537145 - DNA, 19 bp, Mus musculus
  siRNA target sequence for Lepr (NM_010704.1,1256-1274).
gatgatggtaatttaaaga

SEQ ID NO: 537146 - DNA, 19 bp, Mus musculus
  siRNA target sequence for Lepr (NM_010704.1,1302-1320).
catttccgcttcaatatca

SEQ ID NO: 537147 - DNA, 19 bp, Mus musculus
  siRNA target sequence for Lepr (NM_010704.1,1313-1331).
caatatcaggtgaaatatt

SEQ ID NO: 537148 - DNA, 19 bp, Mus musculus
  siRNA target sequence for Lepr (NM_010704.1,1321-1339).
ggtgaaatatttagagaat

SEQ ID NO: 537149 - DNA, 19 bp, Mus musculus
  siRNA target sequence for Lepr (NM_010704.1,1400-1418).
gtgcttcctggatcttcat

SEQ ID NO: 537150 - DNA, 19 bp, Mus musculus
  siRNA target sequence for Lepr (NM_010704.1,1474-1492).
gagttcacctcaagtcttt

SEQ ID NO: 537151 - DNA, 19 bp, Mus musculus
  siRNA target sequence for Lepr (NM_010704.1,1489-1507).
ctttaccacacaagatgtt

SEQ ID NO: 537152 - DNA, 19 bp, Mus musculus
  siRNA target sequence for Lepr (NM_010704.1,1510-1528).
gtattttccacccaaaatt

SEQ ID NO: 537153 - DNA, 19 bp, Mus musculus
  siRNA target sequence for Lepr (NM_010704.1,1522-1540).
caaaattctgactagtgtt

SEQ ID NO: 537154 - DNA, 19 bp, Mus musculus
  siRNA target sequence for Lepr (NM_010704.1,1531-1549).
gactagtgttggatcgaat

SEQ ID NO: 537155 - DNA, 19 bp, Mus musculus
  siRNA target sequence for Lepr (NM_010704.1,1542-1560).
gatcgaatgcttcttttca

SEQ ID NO: 537156 - DNA, 19 bp, Mus musculus
  siRNA target sequence for Lepr (NM_010704.1,1660-1678).
gagtgaccgagttagcaaa

SEQ ID NO: 537157 - DNA, 19 bp, Mus musculus
  siRNA target sequence for Lepr (NM_010704.1,1664-1682).
gaccgagttagcaaagtta

SEQ ID NO: 537158 - DNA, 19 bp, Mus musculus
  siRNA target sequence for Lepr (NM_010704.1,1705-1723).
cagacctcgagggaagttt

SEQ ID NO: 537159 - DNA, 19 bp, Mus musculus
  siRNA target sequence for Lepr (NM_010704.1,1766-1784).
caccgctatgctgaattat

SEQ ID NO: 537160 - DNA, 19 bp, Mus musculus
  siRNA target sequence for Lepr (NM_010704.1,1787-1805).
gtgatcgatgtcaatatca

SEQ ID NO: 537161 - DNA, 19 bp, Mus musculus
  siRNA target sequence for Lepr (NM_010704.1,1789-1807).
gatcgatgtcaatatcaat

SEQ ID NO: 537162 - DNA, 19 bp, Mus musculus
  siRNA target sequence for Lepr (NM_010704.1,1792-1810).
cgatgtcaatatcaatata

SEQ ID NO: 537163 - DNA, 19 bp, Mus musculus
  siRNA target sequence for Lepr (NM_010704.1,1796-1814).
gtcaatatcaatatatcat

SEQ ID NO: 537164 - DNA, 19 bp, Mus musculus
  siRNA target sequence for Lepr (NM_010704.1,1817-1835).
gaaactgacgggtacttaa

SEQ ID NO: 537165 - DNA, 19 bp, Mus musculus
  siRNA target sequence for Lepr (NM_010704.1,1821-1839).
ctgacgggtacttaactaa

SEQ ID NO: 537166 - DNA, 19 bp, Mus musculus
  siRNA target sequence for Lepr (NM_010704.1,1823-1841).
gacgggtacttaactaaaa

SEQ ID NO: 537167 - DNA, 19 bp, Mus musculus
  siRNA target sequence for Lepr (NM_010704.1,1855-1873).
gtcacccagcacaatccaa

SEQ ID NO: 537168 - DNA, 19 bp, Mus musculus
  siRNA target sequence for Lepr (NM_010704.1,1860-1878).
ccagcacaatccaatcact

SEQ ID NO: 537169 - DNA, 19 bp, Mus musculus
  siRNA target sequence for Lepr (NM_010704.1,1861-1879).
cagcacaatccaatcacta

SEQ ID NO: 537170 - DNA, 19 bp, Mus musculus
  siRNA target sequence for Lepr (NM_010704.1,1892-1910).
gtgcagctgaggtatcaca

SEQ ID NO: 537171 - DNA, 19 bp, Mus musculus
  siRNA target sequence for Lepr (NM_010704.1,1907-1925).
cacaggcgcagcctgtatt

SEQ ID NO: 537172 - DNA, 19 bp, Mus musculus
  siRNA target sequence for Lepr (NM_010704.1,1918-1936).
cctgtattgtcctgatagt

SEQ ID NO: 537173 - DNA, 19 bp, Mus musculus
  siRNA target sequence for Lepr (NM_010704.1,1926-1944).
gtcctgatagtccatctat

SEQ ID NO: 537174 - DNA, 19 bp, Mus musculus
  siRNA target sequence for Lepr (NM_010704.1,1929-1947).
ctgatagtccatctattca

SEQ ID NO: 537175 - DNA, 19 bp, Mus musculus
  siRNA target sequence for Lepr (NM_010704.1,1950-1968).
ctacgtctgagcccaaaaa

SEQ ID NO: 537176 - DNA, 19 bp, Mus musculus
  siRNA target sequence for Lepr (NM_010704.1,1987-2005).
cggcttttatgaatgtgtt

SEQ ID NO: 537177 - DNA, 19 bp, Mus musculus
  siRNA target sequence for Lepr (NM_010704.1,2011-2029).
gccaatctttctattatct

SEQ ID NO: 537178 - DNA, 19 bp, Mus musculus
  siRNA target sequence for Lepr (NM_010704.1,2021-2039).
ctattatctggctatacaa

SEQ ID NO: 537179 - DNA, 19 bp, Mus musculus
  siRNA target sequence for Lepr (NM_010704.1,2047-2065).
caggatcaaccattcttta

SEQ ID NO: 537180 - DNA, 19 bp, Mus musculus
  siRNA target sequence for Lepr (NM_010704.1,2050-2068).
gatcaaccattctttaggt

SEQ ID NO: 537181 - DNA, 19 bp, Mus musculus
  siRNA target sequence for Lepr (NM_010704.1,2096-2114).
cttcctgactccgtagtaa

SEQ ID NO: 537182 - DNA, 19 bp, Mus musculus
  siRNA target sequence for Lepr (NM_010704.1,2120-2138).
ctacctccatctaacgtaa

SEQ ID NO: 537183 - DNA, 19 bp, Mus musculus
  siRNA target sequence for Lepr (NM_010704.1,2153-2171).
gtaaacactggattattga

SEQ ID NO: 537184 - DNA, 19 bp, Mus musculus
  siRNA target sequence for Lepr (NM_010704.1,2162-2180).
ggattattgaaagtatctt

SEQ ID NO: 537185 - DNA, 19 bp, Mus musculus
  siRNA target sequence for Lepr (NM_010704.1,2221-2239).
gattcgatatggcttaagt

SEQ ID NO: 537186 - DNA, 19 bp, Mus musculus
  siRNA target sequence for Lepr (NM_010704.1,2269-2287).
ggtattcgatgcaaagtca

SEQ ID NO: 537187 - DNA, 19 bp, Mus musculus
  siRNA target sequence for Lepr (NM_010704.1,2270-2288).
gtattcgatgcaaagtcaa

SEQ ID NO: 537188 - DNA, 19 bp, Mus musculus
  siRNA target sequence for Lepr (NM_010704.1,2275-2293).
cgatgcaaagtcaaagtct

SEQ ID NO: 537189 - DNA, 19 bp, Mus musculus
  siRNA target sequence for Lepr (NM_010704.1,2352-2370).
ggttggatggactaggata

SEQ ID NO: 537190 - DNA, 19 bp, Mus musculus
  siRNA target sequence for Lepr (NM_010704.1,2353-2371).
gttggatggactaggatat

SEQ ID NO: 537191 - DNA, 19 bp, Mus musculus
  siRNA target sequence for Lepr (NM_010704.1,2391-2409).
cagcctatacgcttgtcat

SEQ ID NO: 537192 - DNA, 19 bp, Mus musculus
  siRNA target sequence for Lepr (NM_010704.1,2400-2418).
cgcttgtcatggatgtaaa

SEQ ID NO: 537193 - DNA, 19 bp, Mus musculus
  siRNA target sequence for Lepr (NM_010704.1,2401-2419).
gcttgtcatggatgtaaaa

SEQ ID NO: 537194 - DNA, 19 bp, Mus musculus
  siRNA target sequence for Lepr (NM_010704.1,2424-2442).
ctatgagagggcctgaatt

SEQ ID NO: 537195 - DNA, 19 bp, Mus musculus
  siRNA target sequence for Lepr (NM_010704.1,2455-2473).
ggatggggacgttactaaa

SEQ ID NO: 537196 - DNA, 19 bp, Mus musculus
  siRNA target sequence for Lepr (NM_010704.1,2456-2474).
gatggggacgttactaaaa

SEQ ID NO: 537197 - DNA, 19 bp, Mus musculus
  siRNA target sequence for Lepr (NM_010704.1,2594-2612).
ggaaatcggaccaatctca

SEQ ID NO: 537198 - DNA, 19 bp, Mus musculus
  siRNA target sequence for Lepr (NM_010704.1,2627-2645).
gaaccagcgcacactgtta

SEQ ID NO: 537199 - DNA, 19 bp, Mus musculus
  siRNA target sequence for Lepr (NM_010704.1,2668-2686).
cggcgcttcccttgtgaat

SEQ ID NO: 537200 - DNA, 19 bp, Mus musculus
  siRNA target sequence for Lepr (NM_010704.1,2676-2694).
cccttgtgaattttaacct

SEQ ID NO: 537201 - DNA, 19 bp, Mus musculus
  siRNA target sequence for Lepr (NM_010704.1,2701-2719).
ctcatggcccatgagtaaa

SEQ ID NO: 537202 - DNA, 19 bp, Mus musculus
  siRNA target sequence for Lepr (NM_010704.1,2703-2721).
catggcccatgagtaaagt

SEQ ID NO: 537203 - DNA, 19 bp, Mus musculus
  siRNA target sequence for Lepr (NM_010704.1,2784-2802).
cactgtcacctgatgatta

SEQ ID NO: 537204 - DNA, 19 bp, Mus musculus
  siRNA target sequence for Lepr (NM_010704.1,2795-2813).
gatgattatagtctgttat

SEQ ID NO: 537205 - DNA, 19 bp, Mus musculus
  siRNA target sequence for Lepr (NM_010704.1,2805-2823).
gtctgttatatctggttat

SEQ ID NO: 537206 - DNA, 19 bp, Mus musculus
  siRNA target sequence for Lepr (NM_010704.1,2809-2827).
gttatatctggttattgaa

SEQ ID NO: 537207 - DNA, 19 bp, Mus musculus
  siRNA target sequence for Lepr (NM_010704.1,2843-2861).
gaagatgatggaatgaagt

SEQ ID NO: 537208 - DNA, 19 bp, Mus musculus
  siRNA target sequence for Lepr (NM_010704.1,2868-2886).
gaattccctcgaatgttaa

SEQ ID NO: 537209 - DNA, 19 bp, Mus musculus
  siRNA target sequence for Lepr (NM_010704.1,2873-2891).
ccctcgaatgttaaaaagt

SEQ ID NO: 537210 - DNA, 19 bp, Mus musculus
  siRNA target sequence for Lepr (NM_010704.1,2874-2892).
cctcgaatgttaaaaagtt

SEQ ID NO: 537211 - DNA, 19 bp, Mus musculus
  siRNA target sequence for Lepr (NM_010704.1,2875-2893).
ctcgaatgttaaaaagttt

SEQ ID NO: 537212 - DNA, 19 bp, Mus musculus
  siRNA target sequence for Lepr (NM_010704.1,2915-2933).
cccatcgagaaatatcagt

SEQ ID NO: 537213 - DNA, 19 bp, Mus musculus
  siRNA target sequence for Lepr (NM_010704.1,2923-2941).
gaaatatcagtttagtctt

SEQ ID NO: 537214 - DNA, 19 bp, Mus musculus
  siRNA target sequence for Lepr (NM_010704.1,2961-2979).
gagttggaaaaccaaagat

SEQ ID NO: 537215 - DNA, 19 bp, Mus musculus
  siRNA target sequence for Lepr (NM_010704.1,3025-3043).
cgcagggctgtatgtcatt

SEQ ID NO: 537216 - DNA, 19 bp, Mus musculus
  siRNA target sequence for Lepr (NM_010704.1,3027-3045).
cagggctgtatgtcattgt

SEQ ID NO: 537217 - DNA, 19 bp, Mus musculus
  siRNA target sequence for Lepr (NM_010704.1,3038-3056).
gtcattgtacccataatta

SEQ ID NO: 537218 - DNA, 19 bp, Mus musculus
  siRNA target sequence for Lepr (NM_010704.1,3077-3095).
ctcggaacactgttaattt

SEQ ID NO: 537219 - DNA, 19 bp, Mus musculus
  siRNA target sequence for Lepr (NM_010704.1,3079-3097).
cggaacactgttaatttca

SEQ ID NO: 537220 - DNA, 19 bp, Mus musculus
  siRNA target sequence for Lepr (NM_010704.1,3098-3116).
caccagagaatgaaaaagt

SEQ ID NO: 537221 - DNA, 19 bp, Mus musculus
  siRNA target sequence for Lepr (NM_010704.1,3156-3174).
gggcacaaggactgaattt

SEQ ID NO: 537222 - DNA, 19 bp, Mus musculus
  siRNA target sequence for Lepr (NM_146146.1,2693-2711).
ccaagcatgcagaatcagt

SEQ ID NO: 537223 - DNA, 19 bp, Mus musculus
  siRNA target sequence for Lepr (NM_146146.1,2697-2715).
gcatgcagaatcagtgata

SEQ ID NO: 537224 - DNA, 19 bp, Mus musculus
  siRNA target sequence for Lepr (NM_146146.1,2698-2716).
catgcagaatcagtgatat

SEQ ID NO: 537225 - DNA, 19 bp, Mus musculus
  siRNA target sequence for Lepr (NM_146146.1,2764-2782).
gtcgatacagcttggaaaa

SEQ ID NO: 537226 - DNA, 19 bp, Mus musculus
  siRNA target sequence for Lepr (NM_146146.1,2766-2784).
cgatacagcttggaaaaat

SEQ ID NO: 537227 - DNA, 19 bp, Mus musculus
  siRNA target sequence for Lepr (NM_146146.1,2806-2824).
gctatggtctcccttcttt

SEQ ID NO: 537228 - DNA, 19 bp, Mus musculus
  siRNA target sequence for Lepr (NM_146146.1,2849-2867).
gttctatttgtattagtga

SEQ ID NO: 537229 - DNA, 19 bp, Mus musculus
  siRNA target sequence for Lepr (NM_146146.1,2858-2876).
gtattagtgaccagtgtaa

SEQ ID NO: 537230 - DNA, 19 bp, Mus musculus
  siRNA target sequence for Lepr (NM_146146.1,2932-2950).
cagagacaaccctcagtta

SEQ ID NO: 537231 - DNA, 19 bp, Mus musculus
  siRNA target sequence for Lepr (NM_146146.1,2934-2952).
gagacaaccctcagttaaa

SEQ ID NO: 537232 - DNA, 19 bp, Mus musculus
  siRNA target sequence for Lepr (NM_146146.1,2960-2978).
ctctggtcagcaacgataa

SEQ ID NO: 537233 - DNA, 19 bp, Mus musculus
  siRNA target sequence for Lepr (NM_146146.1,2964-2982).
ggtcagcaacgataaacta

SEQ ID NO: 537234 - DNA, 19 bp, Mus musculus
  siRNA target sequence for Lepr (NM_146146.1,2998-3016).
gagcaagggtttatccata

SEQ ID NO: 537235 - DNA, 19 bp, Mus musculus
  siRNA target sequence for Lepr (NM_146146.1,3027-3045).
caactgcatctccagtaat

SEQ ID NO: 537236 - DNA, 19 bp, Mus musculus
  siRNA target sequence for Lepr (NM_146146.1,3030-3048).
ctgcatctccagtaatcat

SEQ ID NO: 537237 - DNA, 19 bp, Mus musculus
  siRNA target sequence for Lepr (NM_146146.1,3121-3139).
cagcaacccaccatgattt

SEQ ID NO: 537238 - DNA, 19 bp, Mus musculus
  siRNA target sequence for Lepr (NM_146146.1,3123-3141).
gcaacccaccatgatttca

SEQ ID NO: 537239 - DNA, 19 bp, Mus musculus
  siRNA target sequence for Lepr (NM_146146.1,3158-3176).
cggggttggatgagctttt

SEQ ID NO: 537240 - DNA, 19 bp, Mus musculus
  siRNA target sequence for Lepr (NM_146146.1,3213-3231).
ggagaagtctgtctgttat

SEQ ID NO: 537241 - DNA, 19 bp, Mus musculus
  siRNA target sequence for Lepr (NM_146146.1,3261-3279).
gagtggtgtgcttttgact

SEQ ID NO: 537242 - DNA, 19 bp, Mus musculus
  siRNA target sequence for Lepr (NM_146146.1,3350-3368).
gatgctcacactttgtaga

SEQ ID NO: 537243 - DNA, 19 bp, Mus musculus
  siRNA target sequence for Lepr (NM_146146.1,3386-3404).
ggacctctggtgagaactt

SEQ ID NO: 537244 - DNA, 19 bp, Mus musculus
  siRNA target sequence for Lepr (NM_146146.1,3437-3455).
ccacgcacagtcacaagat

SEQ ID NO: 537245 - DNA, 19 bp, Mus musculus
  siRNA target sequence for Lepr (NM_146146.1,3438-3456).
cacgcacagtcacaagata

SEQ ID NO: 537246 - DNA, 19 bp, Mus musculus
  siRNA target sequence for Lepr (NM_146146.1,3440-3458).
cgcacagtcacaagataat

SEQ ID NO: 537247 - DNA, 19 bp, Mus musculus
  siRNA target sequence for Lepr (NM_146146.1,3477-3495).
cttaactgtgcaatctcat

SEQ ID NO: 537248 - DNA, 19 bp, Mus musculus
  siRNA target sequence for Lepr (NM_146146.1,3484-3502).
gtgcaatctcatccaaaaa

SEQ ID NO: 537249 - DNA, 19 bp, Mus musculus
  siRNA target sequence for Lims1 (NM_026148.1,288-306).
gagaagatcgtgaacagta

SEQ ID NO: 537250 - DNA, 19 bp, Mus musculus
  siRNA target sequence for Lims1 (NM_026148.1,293-311).
gatcgtgaacagtaatggt

SEQ ID NO: 537251 - DNA, 19 bp, Mus musculus
  siRNA target sequence for Lims1 (NM_026148.1,321-339).
cacgaacagtgcttcgtat

SEQ ID NO: 537252 - DNA, 19 bp, Mus musculus
  siRNA target sequence for Lims1 (NM_026148.1,366-384).
gaaggactcttttatgagt

SEQ ID NO: 537253 - DNA, 19 bp, Mus musculus
  siRNA target sequence for Lims1 (NM_026148.1,545-563).
catagggtttgtcaagaat

SEQ ID NO: 537254 - DNA, 19 bp, Mus musculus
  siRNA target sequence for Lims1 (NM_026148.1,575-593).
cctatgtcgcccatgtcat

SEQ ID NO: 537255 - DNA, 19 bp, Mus musculus
  siRNA target sequence for Lims1 (NM_026148.1,635-653).
gaaatgccatgccatcatt

SEQ ID NO: 537256 - DNA, 19 bp, Mus musculus
  siRNA target sequence for Lims1 (NM_026148.1,674-692).
caagaacgacccttaccat

SEQ ID NO: 537257 - DNA, 19 bp, Mus musculus
  siRNA target sequence for Lims1 (NM_026148.1,750-768).
ctgaaaggggagctatact

SEQ ID NO: 537258 - DNA, 19 bp, Mus musculus
  siRNA target sequence for Lims1 (NM_026148.1,769-787).
gtctgccatgccatgataa

SEQ ID NO: 537259 - DNA, 19 bp, Mus musculus
  siRNA target sequence for Lims1 (NM_026148.1,771-789).
ctgccatgccatgataaga

SEQ ID NO: 537260 - DNA, 19 bp, Mus musculus
  siRNA target sequence for Lims1 (NM_026148.1,788-806).
gatgggggtccctatctgt

SEQ ID NO: 537261 - DNA, 19 bp, Mus musculus
  siRNA target sequence for Lims1 (NM_026148.1,909-927).
gggcatcgccattatgaga

SEQ ID NO: 537262 - DNA, 19 bp, Mus musculus
  siRNA target sequence for Lims1 (NM_026148.1,986-1004).
ccattgcaaccgtgtcata

SEQ ID NO: 537263 - DNA, 19 bp, Mus musculus
  siRNA target sequence for Lims1 (NM_026148.1,1056-1074).
gcctgctccacctgcaata

SEQ ID NO: 537264 - DNA, 19 bp, Mus musculus
  siRNA target sequence for Lims1 (NM_026148.1,1061-1079).
ctccacctgcaataccaaa

SEQ ID NO: 537265 - DNA, 19 bp, Mus musculus
  siRNA target sequence for Lims1 (NM_026148.1,1082-1100).
cacactcaagaataaattt

SEQ ID NO: 537266 - DNA, 19 bp, Mus musculus
  siRNA target sequence for Lims1 (NM_026148.1,1133-1151).
gtgctacgagaaatttcct

SEQ ID NO: 537267 - DNA, 19 bp, Mus musculus
  siRNA target sequence for Litaf (NM_019980.1,105-123).
cacccccaacctatgaaga

SEQ ID NO: 537268 - DNA, 19 bp, Mus musculus
  siRNA target sequence for Litaf (NM_019980.1,273-291).
ccgtgcagaccgtttatgt

SEQ ID NO: 537269 - DNA, 19 bp, Mus musculus
  siRNA target sequence for Lrp8 (NM_053073.1,512-530).
gtgtcctgccgagaagtta

SEQ ID NO: 537270 - DNA, 19 bp, Mus musculus
  siRNA target sequence for Lrp8 (NM_053073.1,516-534).
cctgccgagaagttaagct

SEQ ID NO: 537271 - DNA, 19 bp, Mus musculus
  siRNA target sequence for Lrp8 (NM_053073.1,1018-1036).
gaccctgccgcgagaatga

SEQ ID NO: 537272 - DNA, 19 bp, Mus musculus
  siRNA target sequence for Lrp8 (NM_053073.1,1020-1038).
ccctgccgcgagaatgagt

SEQ ID NO: 537273 - DNA, 19 bp, Mus musculus
  siRNA target sequence for Lrp8 (NM_053073.1,1021-1039).
cctgccgcgagaatgagtt

SEQ ID NO: 537274 - DNA, 19 bp, Mus musculus
  siRNA target sequence for Lrp8 (NM_053073.1,1153-1171).
cccgcagatttcagtgtaa

SEQ ID NO: 537275 - DNA, 19 bp, Mus musculus
  siRNA target sequence for Lrp8 (NM_053073.1,1155-1173).
cgcagatttcagtgtaaga

SEQ ID NO: 537276 - DNA, 19 bp, Mus musculus
  siRNA target sequence for Lrp8 (NM_053073.1,1232-1250).
gtcggatgagcctcagaaa

SEQ ID NO: 537277 - DNA, 19 bp, Mus musculus
  siRNA target sequence for Lrp8 (NM_053073.1,1234-1252).
cggatgagcctcagaaagt

SEQ ID NO: 537278 - DNA, 19 bp, Mus musculus
  siRNA target sequence for Lrp8 (NM_053073.1,1251-1269).
gtgtgtgggctaaatgagt

SEQ ID NO: 537279 - DNA, 19 bp, Mus musculus
  siRNA target sequence for Lrp8 (NM_053073.1,1411-1429).
gccaaatctgcgtgaatta

SEQ ID NO: 537280 - DNA, 19 bp, Mus musculus
  siRNA target sequence for Lrp8 (NM_053073.1,1430-1448).
caagggctactttaagtgt

SEQ ID NO: 537281 - DNA, 19 bp, Mus musculus
  siRNA target sequence for Lrp8 (NM_053073.1,1629-1647).
gccaccaatcgcatatact

SEQ ID NO: 537282 - DNA, 19 bp, Mus musculus
  siRNA target sequence for Lrp8 (NM_053073.1,1712-1730).
gcaggtggtcctcattgat

SEQ ID NO: 537283 - DNA, 19 bp, Mus musculus
  siRNA target sequence for Lrp8 (NM_053073.1,1770-1788).
gtccataagcacatctact

SEQ ID NO: 537284 - DNA, 19 bp, Mus musculus
  siRNA target sequence for Lrp8 (NM_053073.1,1897-1915).
ccctgcgagggttcatgta

SEQ ID NO: 537285 - DNA, 19 bp, Mus musculus
  siRNA target sequence for Lrp8 (NM_053073.1,1899-1917).
ctgcgagggttcatgtact

SEQ ID NO: 537286 - DNA, 19 bp, Mus musculus
  siRNA target sequence for Lrp8 (NM_053073.1,1981-1999).
cactggtttcagacaacat

SEQ ID NO: 537287 - DNA, 19 bp, Mus musculus
  siRNA target sequence for Lrp8 (NM_053073.1,1985-2003).
ggtttcagacaacattgaa

SEQ ID NO: 537288 - DNA, 19 bp, Mus musculus
  siRNA target sequence for Lrp8 (NM_053073.1,1986-2004).
gtttcagacaacattgaat

SEQ ID NO: 537289 - DNA, 19 bp, Mus musculus
  siRNA target sequence for Lrp8 (NM_053073.1,2070-2088).
caactatccagcattgact

SEQ ID NO: 537290 - DNA, 19 bp, Mus musculus
  siRNA target sequence for Lrp8 (NM_053073.1,2258-2276).
caataacccacatgacatt

SEQ ID NO: 537291 - DNA, 19 bp, Mus musculus
  siRNA target sequence for Lrp8 (NM_053073.1,2466-2484).
cagtctacctcaactacaa

SEQ ID NO: 537292 - DNA, 19 bp, Mus musculus
  siRNA target sequence for Lrp8 (NM_053073.1,2553-2571).
cctacctaccagaaccata

SEQ ID NO: 537293 - DNA, 19 bp, Mus musculus
  siRNA target sequence for Lrp8 (NM_053073.1,2602-2620).
cccctcactcggttaacgt

SEQ ID NO: 537294 - DNA, 19 bp, Mus musculus
  siRNA target sequence for Lrp8 (NM_053073.1,2678-2696).
ccagcattatgggaatgaa

SEQ ID NO: 537295 - DNA, 19 bp, Mus musculus
  siRNA target sequence for Lrp8 (NM_053073.1,2744-2762).
cgtgcccatagtggtaata

SEQ ID NO: 537296 - DNA, 19 bp, Mus musculus
  siRNA target sequence for Lrp8 (NM_053073.1,2757-2775).
gtaatagccctgctatgta

SEQ ID NO: 537297 - DNA, 19 bp, Mus musculus
  siRNA target sequence for Lrp8 (NM_053073.1,2818-2836).
ccaagagcatgaatttcga

SEQ ID NO: 537298 - DNA, 19 bp, Mus musculus
  siRNA target sequence for Lrp8 (NM_053073.1,2924-2942).
cgcagcaatcagcaactat

SEQ ID NO: 537299 - DNA, 19 bp, Mus musculus
  siRNA target sequence for Lrp8 (NM_053073.1,2926-2944).
cagcaatcagcaactatga

SEQ ID NO: 537300 - DNA, 19 bp, Mus musculus
  siRNA target sequence for Lrp8 (NM_053073.1,3101-3119).
caagcgagtggcattaagt

SEQ ID NO: 537301 - DNA, 19 bp, Mus musculus
  siRNA target sequence for Lrp8 (NM_053073.1,3104-3122).
gcgagtggcattaagtctt

SEQ ID NO: 537302 - DNA, 19 bp, Mus musculus
  siRNA target sequence for Lrp8 (NM_053073.1,3110-3128).
ggcattaagtcttgaagat

SEQ ID NO: 537303 - DNA, 19 bp, Mus musculus
  siRNA target sequence for Mad3 (NM_016662.2,331-349).
gactgtacccgatacacta

SEQ ID NO: 537304 - DNA, 19 bp, Mus musculus
  siRNA target sequence for Madh1 (NM_008539.2,361-379).
gaatgtgaccagcttgttt

SEQ ID NO: 537305 - DNA, 19 bp, Mus musculus
  siRNA target sequence for Madh1 (NM_008539.2,365-383).
gtgaccagcttgttttcat

SEQ ID NO: 537306 - DNA, 19 bp, Mus musculus
  siRNA target sequence for Madh1 (NM_008539.2,530-548).
cctggacagccgagtaact

SEQ ID NO: 537307 - DNA, 19 bp, Mus musculus
  siRNA target sequence for Madh1 (NM_008539.2,601-619).
gggactacctcatgtcatt

SEQ ID NO: 537308 - DNA, 19 bp, Mus musculus
  siRNA target sequence for Madh1 (NM_008539.2,781-799).
gaggcacagcgagtacaat

SEQ ID NO: 537309 - DNA, 19 bp, Mus musculus
  siRNA target sequence for Madh1 (NM_008539.2,1079-1097).
cccatggacacgaacatga

SEQ ID NO: 537310 - DNA, 19 bp, Mus musculus
  siRNA target sequence for Madh1 (NM_008539.2,1104-1122).
ctccactgcccgctgaaat

SEQ ID NO: 537311 - DNA, 19 bp, Mus musculus
  siRNA target sequence for Madh1 (NM_008539.2,1149-1167).
cttacgaggaaccaaaaca

SEQ ID NO: 537312 - DNA, 19 bp, Mus musculus
  siRNA target sequence for Madh1 (NM_008539.2,1170-1188).
ggtgctctattgtgtacta

SEQ ID NO: 537313 - DNA, 19 bp, Mus musculus
  siRNA target sequence for Madh1 (NM_008539.2,1171-1189).
gtgctctattgtgtactat

SEQ ID NO: 537314 - DNA, 19 bp, Mus musculus
  siRNA target sequence for Madh1 (NM_008539.2,1173-1191).
gctctattgtgtactatga

SEQ ID NO: 537315 - DNA, 19 bp, Mus musculus
  siRNA target sequence for Madh1 (NM_008539.2,1255-1273).
cacagatccgtccaacaat

SEQ ID NO: 537316 - DNA, 19 bp, Mus musculus
  siRNA target sequence for Madh1 (NM_008539.2,1257-1275).
cagatccgtccaacaataa

SEQ ID NO: 537317 - DNA, 19 bp, Mus musculus
  siRNA target sequence for Madh1 (NM_008539.2,1259-1277).
gatccgtccaacaataaga

SEQ ID NO: 537318 - DNA, 19 bp, Mus musculus
  siRNA target sequence for Madh1 (NM_008539.2,1312-1330).
ccggaattccactattgaa

SEQ ID NO: 537319 - DNA, 19 bp, Mus musculus
  siRNA target sequence for Madh1 (NM_008539.2,1351-1369).
gaaaggagtccacctttat

SEQ ID NO: 537320 - DNA, 19 bp, Mus musculus
  siRNA target sequence for Madh1 (NM_008539.2,1356-1374).
gagtccacctttattacgt

SEQ ID NO: 537321 - DNA, 19 bp, Mus musculus
  siRNA target sequence for Madh1 (NM_008539.2,1485-1503).
gcgggtgcagcttgaaaat

SEQ ID NO: 537322 - DNA, 19 bp, Mus musculus
  siRNA target sequence for Madh1 (NM_008539.2,1488-1506).
ggtgcagcttgaaaatctt

SEQ ID NO: 537323 - DNA, 19 bp, Mus musculus
  siRNA target sequence for Madh1 (NM_008539.2,1554-1572).
ggttcgagaccgtgtatga

SEQ ID NO: 537324 - DNA, 19 bp, Mus musculus
  siRNA target sequence for Madh1 (NM_008539.2,1555-1573).
gttcgagaccgtgtatgaa

SEQ ID NO: 537325 - DNA, 19 bp, Mus musculus
  siRNA target sequence for Madh1 (NM_008539.2,1614-1632).
gttggggagccgaatacca

SEQ ID NO: 537326 - DNA, 19 bp, Mus musculus
  siRNA target sequence for Madh1 (NM_008539.2,1721-1739).
ggctcaccccacaatccta

SEQ ID NO: 537327 - DNA, 19 bp, Mus musculus
  siRNA target sequence for Madh1 (NM_008539.2,1723-1741).
ctcaccccacaatcctatt

SEQ ID NO: 537328 - DNA, 19 bp, Mus musculus
  siRNA target sequence for Madh5 (NM_008541.1,729-747).
cagccgtgaagcgattgtt

SEQ ID NO: 537329 - DNA, 19 bp, Mus musculus
  siRNA target sequence for Madh5 (NM_008541.1,988-1006).
gagccatcacgagctaaaa

SEQ ID NO: 537330 - DNA, 19 bp, Mus musculus
  siRNA target sequence for Madh5 (NM_008541.1,992-1010).
catcacgagctaaaaccat

SEQ ID NO: 537331 - DNA, 19 bp, Mus musculus
  siRNA target sequence for Madh5 (NM_008541.1,997-1015).
cgagctaaaaccattggat

SEQ ID NO: 537332 - DNA, 19 bp, Mus musculus
  siRNA target sequence for Madh5 (NM_008541.1,1049-1067).
gaagtttgtatcaatccat

SEQ ID NO: 537333 - DNA, 19 bp, Mus musculus
  siRNA target sequence for Madh5 (NM_008541.1,1112-1130).
gtgcctcgtcacaatgaat

SEQ ID NO: 537334 - DNA, 19 bp, Mus musculus
  siRNA target sequence for Madh5 (NM_008541.1,1115-1133).
cctcgtcacaatgaattca

SEQ ID NO: 537335 - DNA, 19 bp, Mus musculus
  siRNA target sequence for Madh5 (NM_008541.1,1202-1220).
gccacgtttcccgattctt

SEQ ID NO: 537336 - DNA, 19 bp, Mus musculus
  siRNA target sequence for Madh5 (NM_008541.1,1203-1221).
ccacgtttcccgattcttt

SEQ ID NO: 537337 - DNA, 19 bp, Mus musculus
  siRNA target sequence for Madh5 (NM_008541.1,1279-1297).
ccctgctagcagcacatat

SEQ ID NO: 537338 - DNA, 19 bp, Mus musculus
  siRNA target sequence for Madh5 (NM_008541.1,1323-1341).
ctggaagtccatttcaact

SEQ ID NO: 537339 - DNA, 19 bp, Mus musculus
  siRNA target sequence for Madh5 (NM_008541.1,1366-1384).
ctatatgccacctgatgat

SEQ ID NO: 537340 - DNA, 19 bp, Mus musculus
  siRNA target sequence for Madh5 (NM_008541.1,1385-1403).
cagatggccccagataatt

SEQ ID NO: 537341 - DNA, 19 bp, Mus musculus
  siRNA target sequence for Madh5 (NM_008541.1,1415-1433).
gatacaagcagtaacatga

SEQ ID NO: 537342 - DNA, 19 bp, Mus musculus
  siRNA target sequence for Madh5 (NM_008541.1,1495-1513).
caaacactggtgttcgatt

SEQ ID NO: 537343 - DNA, 19 bp, Mus musculus
  siRNA target sequence for Madh5 (NM_008541.1,1503-1521).
ggtgttcgattgtctacta

SEQ ID NO: 537344 - DNA, 19 bp, Mus musculus
  siRNA target sequence for Madh5 (NM_008541.1,1504-1522).
gtgttcgattgtctactat

SEQ ID NO: 537345 - DNA, 19 bp, Mus musculus
  siRNA target sequence for Madh5 (NM_008541.1,1509-1527).
cgattgtctactatgaatt

SEQ ID NO: 537346 - DNA, 19 bp, Mus musculus
  siRNA target sequence for Madh5 (NM_008541.1,1516-1534).
ctactatgaattaaacaat

SEQ ID NO: 537347 - DNA, 19 bp, Mus musculus
  siRNA target sequence for Madh5 (NM_008541.1,1560-1578).
cttctactagtgtgttagt

SEQ ID NO: 537348 - DNA, 19 bp, Mus musculus
  siRNA target sequence for Madh5 (NM_008541.1,1563-1581).
ctactagtgtgttagtaga

SEQ ID NO: 537349 - DNA, 19 bp, Mus musculus
  siRNA target sequence for Madh5 (NM_008541.1,1569-1587).
gtgtgttagtagatggatt

SEQ ID NO: 537350 - DNA, 19 bp, Mus musculus
  siRNA target sequence for Madh5 (NM_008541.1,1571-1589).
gtgttagtagatggattta

SEQ ID NO: 537351 - DNA, 19 bp, Mus musculus
  siRNA target sequence for Madh5 (NM_008541.1,1573-1591).
gttagtagatggatttaca

SEQ ID NO: 537352 - DNA, 19 bp, Mus musculus
  siRNA target sequence for Madh5 (NM_008541.1,1595-1613).
ccttcaaataacaaaagta

SEQ ID NO: 537353 - DNA, 19 bp, Mus musculus
  siRNA target sequence for Madh5 (NM_008541.1,1630-1648).
gttgtcaaatgttaatcgt

SEQ ID NO: 537354 - DNA, 19 bp, Mus musculus
  siRNA target sequence for Madh5 (NM_008541.1,1633-1651).
gtcaaatgttaatcgtaat

SEQ ID NO: 537355 - DNA, 19 bp, Mus musculus
  siRNA target sequence for Madh5 (NM_008541.1,1640-1658).
gttaatcgtaattcaacta

SEQ ID NO: 537356 - DNA, 19 bp, Mus musculus
  siRNA target sequence for Madh5 (NM_008541.1,1666-1684).
cactaggcggcatattgga

SEQ ID NO: 537357 - DNA, 19 bp, Mus musculus
  siRNA target sequence for Madh5 (NM_008541.1,1668-1686).
ctaggcggcatattggaaa

SEQ ID NO: 537358 - DNA, 19 bp, Mus musculus
  siRNA target sequence for Madh5 (NM_008541.1,1672-1690).
gcggcatattggaaaaggt

SEQ ID NO: 537359 - DNA, 19 bp, Mus musculus
  siRNA target sequence for Madh5 (NM_008541.1,1682-1700).
ggaaaaggtgttcatctat

SEQ ID NO: 537360 - DNA, 19 bp, Mus musculus
  siRNA target sequence for Madh5 (NM_008541.1,1759-1777).
gagtaggaactgcaacttt

SEQ ID NO: 537361 - DNA, 19 bp, Mus musculus
  siRNA target sequence for Madh5 (NM_008541.1,1824-1842).
gcagcctcaagatttttaa

SEQ ID NO: 537362 - DNA, 19 bp, Mus musculus
  siRNA target sequence for Madh5 (NM_008541.1,1909-1927).
caccaagatgtgtaccatt

SEQ ID NO: 537363 - DNA, 19 bp, Mus musculus
  siRNA target sequence for Mapkbp1 (NM_011941.1,162-180).
gaagggtcaaccattacta

SEQ ID NO: 537364 - DNA, 19 bp, Mus musculus
  siRNA target sequence for Mapkbp1 (NM_011941.1,172-190).
ccattactagccgtatcaa

SEQ ID NO: 537365 - DNA, 19 bp, Mus musculus
  siRNA target sequence for Mapkbp1 (NM_011941.1,178-196).
ctagccgtatcaagaactt

SEQ ID NO: 537366 - DNA, 19 bp, Mus musculus
  siRNA target sequence for Mapkbp1 (NM_011941.1,202-220).
ggtctccatccatcaaatt

SEQ ID NO: 537367 - DNA, 19 bp, Mus musculus
  siRNA target sequence for Mapkbp1 (NM_011941.1,203-221).
gtctccatccatcaaatta

SEQ ID NO: 537368 - DNA, 19 bp, Mus musculus
  siRNA target sequence for Mapkbp1 (NM_011941.1,215-233).
caaattacgcagaagtaaa

SEQ ID NO: 537369 - DNA, 19 bp, Mus musculus
  siRNA target sequence for Mapkbp1 (NM_011941.1,537-555).
gagctacaggagcataagt

SEQ ID NO: 537370 - DNA, 19 bp, Mus musculus
  siRNA target sequence for Mapkbp1 (NM_011941.1,580-598).
ccccaagtgccaagtacat

SEQ ID NO: 537371 - DNA, 19 bp, Mus musculus
  siRNA target sequence for Mapkbp1 (NM_011941.1,583-601).
caagtgccaagtacattgt

SEQ ID NO: 537372 - DNA, 19 bp, Mus musculus
  siRNA target sequence for Mapkbp1 (NM_011941.1,615-633).
cagcatgacatgattgtca

SEQ ID NO: 537373 - DNA, 19 bp, Mus musculus
  siRNA target sequence for Mapkbp1 (NM_011941.1,690-708).
gtaaccgcagtgtcctttt

SEQ ID NO: 537374 - DNA, 19 bp, Mus musculus
  siRNA target sequence for Mapkbp1 (NM_011941.1,738-756).
ggcaaccggcacatcaaat

SEQ ID NO: 537375 - DNA, 19 bp, Mus musculus
  siRNA target sequence for Mapkbp1 (NM_011941.1,739-757).
gcaaccggcacatcaaatt

SEQ ID NO: 537376 - DNA, 19 bp, Mus musculus
  siRNA target sequence for Mapkbp1 (NM_011941.1,1050-1068).
ggcacggtgcgccttttca

SEQ ID NO: 537377 - DNA, 19 bp, Mus musculus
  siRNA target sequence for Mapkbp1 (NM_011941.1,1051-1069).
gcacggtgcgccttttcaa

SEQ ID NO: 537378 - DNA, 19 bp, Mus musculus
  siRNA target sequence for Mapkbp1 (NM_011941.1,1052-1070).
cacggtgcgccttttcaat

SEQ ID NO: 537379 - DNA, 19 bp, Mus musculus
  siRNA target sequence for Mapkbp1 (NM_011941.1,1056-1074).
gtgcgccttttcaatcctt

SEQ ID NO: 537380 - DNA, 19 bp, Mus musculus
  siRNA target sequence for Mapkbp1 (NM_011941.1,1143-1161).
gaggccagtcgcctctttt

SEQ ID NO: 537381 - DNA, 19 bp, Mus musculus
  siRNA target sequence for Mapkbp1 (NM_011941.1,1145-1163).
ggccagtcgcctcttttct

SEQ ID NO: 537382 - DNA, 19 bp, Mus musculus
  siRNA target sequence for Mapkbp1 (NM_011941.1,1202-1220).
gaccttcgatccaactaat

SEQ ID NO: 537383 - DNA, 19 bp, Mus musculus
  siRNA target sequence for Mapkbp1 (NM_011941.1,1204-1222).
ccttcgatccaactaatca

SEQ ID NO: 537384 - DNA, 19 bp, Mus musculus
  siRNA target sequence for Mapkbp1 (NM_011941.1,1221-1239).
cagtggctatcttgtgtat

SEQ ID NO: 537385 - DNA, 19 bp, Mus musculus
  siRNA target sequence for Mapkbp1 (NM_011941.1,1244-1262).
cgaccacagcatatatgtt

SEQ ID NO: 537386 - DNA, 19 bp, Mus musculus
  siRNA target sequence for Mapkbp1 (NM_011941.1,1245-1263).
gaccacagcatatatgttt

SEQ ID NO: 537387 - DNA, 19 bp, Mus musculus
  siRNA target sequence for Mapkbp1 (NM_011941.1,1295-1313).
ggtgtactccgctctgtat

SEQ ID NO: 537388 - DNA, 19 bp, Mus musculus
  siRNA target sequence for Mapkbp1 (NM_011941.1,1459-1477).
ctaccctgcaccgtaacat

SEQ ID NO: 537389 - DNA, 19 bp, Mus musculus
  siRNA target sequence for Mapkbp1 (NM_011941.1,1479-1497).
ctcagcaatgatctcatta

SEQ ID NO: 537390 - DNA, 19 bp, Mus musculus
  siRNA target sequence for Mapkbp1 (NM_011941.1,1594-1612).
gcatccggtccgtgtgtat

SEQ ID NO: 537391 - DNA, 19 bp, Mus musculus
  siRNA target sequence for Mapkbp1 (NM_011941.1,1595-1613).
catccggtccgtgtgtatt

SEQ ID NO: 537392 - DNA, 19 bp, Mus musculus
  siRNA target sequence for Mapkbp1 (NM_011941.1,1644-1662).
gaccgcatggggacactta

SEQ ID NO: 537393 - DNA, 19 bp, Mus musculus
  siRNA target sequence for Mapkbp1 (NM_011941.1,1708-1726).
cccacgactctgagatctt

SEQ ID NO: 537394 - DNA, 19 bp, Mus musculus
  siRNA target sequence for Mapkbp1 (NM_011941.1,1839-1857).
ctggatgagcattcatctt

SEQ ID NO: 537395 - DNA, 19 bp, Mus musculus
  siRNA target sequence for Mapkbp1 (NM_011941.1,1890-1908).
gggcaagtgcgaatgatca

SEQ ID NO: 537396 - DNA, 19 bp, Mus musculus
  siRNA target sequence for Mapkbp1 (NM_011941.1,1986-2004).
cacgtggtacggaagacaa

SEQ ID NO: 537397 - DNA, 19 bp, Mus musculus
  siRNA target sequence for Mapkbp1 (NM_011941.1,1996-2014).
ggaagacaactctctatga

SEQ ID NO: 537398 - DNA, 19 bp, Mus musculus
  siRNA target sequence for Mapkbp1 (NM_011941.1,2063-2081).
ccggaatattcggatcttt

SEQ ID NO: 537399 - DNA, 19 bp, Mus musculus
  siRNA target sequence for Mapkbp1 (NM_011941.1,2064-2082).
cggaatattcggatcttta

SEQ ID NO: 537400 - DNA, 19 bp, Mus musculus
  siRNA target sequence for Mapkbp1 (NM_011941.1,2065-2083).
ggaatattcggatctttaa

SEQ ID NO: 537401 - DNA, 19 bp, Mus musculus
  siRNA target sequence for Mapkbp1 (NM_011941.1,2073-2091).
cggatctttaacattagca

SEQ ID NO: 537402 - DNA, 19 bp, Mus musculus
  siRNA target sequence for Mapkbp1 (NM_011941.1,2130-2148).
gaagatggcactctcatta

SEQ ID NO: 537403 - DNA, 19 bp, Mus musculus
  siRNA target sequence for Mapkbp1 (NM_011941.1,2162-2180).
cccctcagggatctacatt

SEQ ID NO: 537404 - DNA, 19 bp, Mus musculus
  siRNA target sequence for Mapkbp1 (NM_011941.1,2188-2206).
gctgttccgataagaatct

SEQ ID NO: 537405 - DNA, 19 bp, Mus musculus
  siRNA target sequence for Mapkbp1 (NM_011941.1,2276-2294).
catgaaatttagtaacgat

SEQ ID NO: 537406 - DNA, 19 bp, Mus musculus
  siRNA target sequence for Mapkbp1 (NM_011941.1,2579-2597).
gagcaccaagaaagaacta

SEQ ID NO: 537407 - DNA, 19 bp, Mus musculus
  siRNA target sequence for Mapkbp1 (NM_011941.1,2766-2784).
gacctgagacagatagaga

SEQ ID NO: 537408 - DNA, 19 bp, Mus musculus
  siRNA target sequence for Mapkbp1 (NM_011941.1,2876-2894).
gtcatgtgtcagtcagaat

SEQ ID NO: 537409 - DNA, 19 bp, Mus musculus
  siRNA target sequence for Mapkbp1 (NM_011941.1,2971-2989).
gagtctttgcccaagatct

SEQ ID NO: 537410 - DNA, 19 bp, Mus musculus
  siRNA target sequence for Mapkbp1 (NM_011941.1,2993-3011).
gcctgcacccattgaagat

SEQ ID NO: 537411 - DNA, 19 bp, Mus musculus
  siRNA target sequence for Mapkbp1 (NM_011941.1,3036-3054).
gacagccctaccatggata

SEQ ID NO: 537412 - DNA, 19 bp, Mus musculus
  siRNA target sequence for Mapkbp1 (NM_011941.1,3087-3105).
ggatccctaggaagaatgt

SEQ ID NO: 537413 - DNA, 19 bp, Mus musculus
  siRNA target sequence for Mapkbp1 (NM_011941.1,3185-3203).
ccctgaacaccctaatgaa

SEQ ID NO: 537414 - DNA, 19 bp, Mus musculus
  siRNA target sequence for Mapkbp1 (NM_011941.1,3338-3356).
cccagatcaggaacagttt

SEQ ID NO: 537415 - DNA, 19 bp, Mus musculus
  siRNA target sequence for Mapkbp1 (NM_011941.1,3342-3360).
gatcaggaacagtttctaa

SEQ ID NO: 537416 - DNA, 19 bp, Mus musculus
  siRNA target sequence for Mapkbp1 (NM_011941.1,3738-3756).
gcccagtctgtgcatagtt

SEQ ID NO: 537417 - DNA, 19 bp, Mus musculus
  siRNA target sequence for Mapkbp1 (NM_011941.1,3743-3761).
gtctgtgcatagtttggta

SEQ ID NO: 537418 - DNA, 19 bp, Mus musculus
  siRNA target sequence for Mapkbp1 (NM_011941.1,3901-3919).
ccaagctagcgcgtagtat

SEQ ID NO: 537419 - DNA, 19 bp, Mus musculus
  siRNA target sequence for Mapkbp1 (NM_011941.1,3902-3920).
caagctagcgcgtagtatt

SEQ ID NO: 537420 - DNA, 19 bp, Mus musculus
  siRNA target sequence for Mapkbp1 (NM_011941.1,3905-3923).
gctagcgcgtagtatttct

SEQ ID NO: 537421 - DNA, 19 bp, Mus musculus
  siRNA target sequence for Mapkbp1 (NM_011941.1,3975-3993).
cgaatctcaccattcaaca

SEQ ID NO: 537422 - DNA, 19 bp, Mus musculus
  siRNA target sequence for Mapkbp1 (NM_011941.1,3980-3998).
ctcaccattcaacaaacta

SEQ ID NO: 537423 - DNA, 19 bp, Mus musculus
  siRNA target sequence for Mapkbp1 (NM_011941.1,4177-4195).
gggagggtactactcataa

SEQ ID NO: 537424 - DNA, 19 bp, Mus musculus
  siRNA target sequence for Mapkbp1 (NM_011941.1,4178-4196).
ggagggtactactcataaa

SEQ ID NO: 537425 - DNA, 19 bp, Mus musculus
  siRNA target sequence for Mapkbp1 (NM_011941.1,4181-4199).
gggtactactcataaatct

SEQ ID NO: 537426 - DNA, 19 bp, Mus musculus
  siRNA target sequence for Mapkbp1 (NM_011941.1,4468-4486).
cttcggcagagcaaagtca

SEQ ID NO: 537427 - DNA, 19 bp, Mus musculus
  siRNA target sequence for Mapkbp1 (NM_011941.1,4608-4626).
gccctgttggagcaatact

SEQ ID NO: 537428 - DNA, 19 bp, Mus musculus
  siRNA target sequence for Mapt (NM_010838.2,133-151).
cctcgccaggagtttgaca

SEQ ID NO: 537429 - DNA, 19 bp, Mus musculus
  siRNA target sequence for Mapt (NM_010838.2,137-155).
gccaggagtttgacacaat

SEQ ID NO: 537430 - DNA, 19 bp, Mus musculus
  siRNA target sequence for Mapt (NM_010838.2,162-180).
ccatgctggagattacact

SEQ ID NO: 537431 - DNA, 19 bp, Mus musculus
  siRNA target sequence for Mapt (NM_010838.2,204-222).
catggaccatggcttaaaa

SEQ ID NO: 537432 - DNA, 19 bp, Mus musculus
  siRNA target sequence for Mapt (NM_010838.2,441-459).
cacgcccagccctaagact

SEQ ID NO: 537433 - DNA, 19 bp, Mus musculus
  siRNA target sequence for Mapt (NM_010838.2,468-486).
gtcaggtgaaccaccaaaa

SEQ ID NO: 537434 - DNA, 19 bp, Mus musculus
  siRNA target sequence for Mapt (NM_010838.2,730-748).
ggtggcaaggtgcagataa

SEQ ID NO: 537435 - DNA, 19 bp, Mus musculus
  siRNA target sequence for Mapt (NM_010838.2,731-749).
gtggcaaggtgcagataat

SEQ ID NO: 537436 - DNA, 19 bp, Mus musculus
  siRNA target sequence for Mapt (NM_010838.2,786-804).
gtgtggctcgaaggataat

SEQ ID NO: 537437 - DNA, 19 bp, Mus musculus
  siRNA target sequence for Mapt (NM_010838.2,788-806).
gtggctcgaaggataatat

SEQ ID NO: 537438 - DNA, 19 bp, Mus musculus
  siRNA target sequence for Mapt (NM_010838.2,790-808).
ggctcgaaggataatatca

SEQ ID NO: 537439 - DNA, 19 bp, Mus musculus
  siRNA target sequence for Mapt (NM_010838.2,791-809).
gctcgaaggataatatcaa

SEQ ID NO: 537440 - DNA, 19 bp, Mus musculus
  siRNA target sequence for Mapt (NM_010838.2,792-810).
ctcgaaggataatatcaaa

SEQ ID NO: 537441 - DNA, 19 bp, Mus musculus
  siRNA target sequence for Mapt (NM_010838.2,794-812).
cgaaggataatatcaaaca

SEQ ID NO: 537442 - DNA, 19 bp, Mus musculus
  siRNA target sequence for Mapt (NM_010838.2,824-842).
gaggcagtgtgcaaatagt

SEQ ID NO: 537443 - DNA, 19 bp, Mus musculus
  siRNA target sequence for Mapt (NM_010838.2,826-844).
ggcagtgtgcaaatagtct

SEQ ID NO: 537444 - DNA, 19 bp, Mus musculus
  siRNA target sequence for Mapt (NM_010838.2,827-845).
gcagtgtgcaaatagtcta

SEQ ID NO: 537445 - DNA, 19 bp, Mus musculus
  siRNA target sequence for Mapt (NM_010838.2,830-848).
gtgtgcaaatagtctacaa

SEQ ID NO: 537446 - DNA, 19 bp, Mus musculus
  siRNA target sequence for Mapt (NM_010838.2,979-997).
ggctccttggataatatca

SEQ ID NO: 537447 - DNA, 19 bp, Mus musculus
  siRNA target sequence for Mapt (NM_010838.2,1081-1099).
ggagcagaaattgtgtata

SEQ ID NO: 537448 - DNA, 19 bp, Mus musculus
  siRNA target sequence for Mapt (NM_010838.2,1082-1100).
gagcagaaattgtgtataa

SEQ ID NO: 537449 - DNA, 19 bp, Mus musculus
  siRNA target sequence for Mapt (NM_010838.2,1193-1211).
ccacactagccgatgaagt

SEQ ID NO: 537450 - DNA, 19 bp, Mus musculus
  siRNA target sequence for Mcpt6 (NM_010781.1,114-132).
gaggcttctgagagtaagt

SEQ ID NO: 537451 - DNA, 19 bp, Mus musculus
  siRNA target sequence for Mcpt6 (NM_010781.1,146-164).
gagcctgagatttaaatta

SEQ ID NO: 537452 - DNA, 19 bp, Mus musculus
  siRNA target sequence for Mcpt6 (NM_010781.1,232-250).
gtgtgggaccgcacatcaa

SEQ ID NO: 537453 - DNA, 19 bp, Mus musculus
  siRNA target sequence for Mcpt6 (NM_010781.1,234-252).
gtgggaccgcacatcaaaa

SEQ ID NO: 537454 - DNA, 19 bp, Mus musculus
  siRNA target sequence for Mcpt6 (NM_010781.1,276-294).
cttcgtgagcagtatctat

SEQ ID NO: 537455 - DNA, 19 bp, Mus musculus
  siRNA target sequence for Mcpt6 (NM_010781.1,279-297).
cgtgagcagtatctatact

SEQ ID NO: 537456 - DNA, 19 bp, Mus musculus
  siRNA target sequence for Mcpt6 (NM_010781.1,280-298).
gtgagcagtatctatacta

SEQ ID NO: 537457 - DNA, 19 bp, Mus musculus
  siRNA target sequence for Mcpt6 (NM_010781.1,330-348).
gtggtgcacccccactatt

SEQ ID NO: 537458 - DNA, 19 bp, Mus musculus
  siRNA target sequence for Mcpt6 (NM_010781.1,333-351).
gtgcacccccactattaca

SEQ ID NO: 537459 - DNA, 19 bp, Mus musculus
  siRNA target sequence for Mcpt6 (NM_010781.1,483-501).
ggctggggcgacattgata

SEQ ID NO: 537460 - DNA, 19 bp, Mus musculus
  siRNA target sequence for Mcpt6 (NM_010781.1,484-502).
gctggggcgacattgataa

SEQ ID NO: 537461 - DNA, 19 bp, Mus musculus
  siRNA target sequence for Mcpt6 (NM_010781.1,485-503).
ctggggcgacattgataat

SEQ ID NO: 537462 - DNA, 19 bp, Mus musculus
  siRNA target sequence for Mcpt6 (NM_010781.1,593-611).
cctctacacgggagatgat

SEQ ID NO: 537463 - DNA, 19 bp, Mus musculus
  siRNA target sequence for Mcpt6 (NM_010781.1,636-654).
ctgtgtgctggaaatacca

SEQ ID NO: 537464 - DNA, 19 bp, Mus musculus
  siRNA target sequence for Mcpt6 (NM_010781.1,668-686).
ccagccattctgtattgga

SEQ ID NO: 537465 - DNA, 19 bp, Mus musculus
  siRNA target sequence for Mdm2 (NM_010786.2,328-346).
gactctggttagaccaaaa

SEQ ID NO: 537466 - DNA, 19 bp, Mus musculus
  siRNA target sequence for Mdm2 (NM_010786.2,347-365).
ccattgcttttgaagttgt

SEQ ID NO: 537467 - DNA, 19 bp, Mus musculus
  siRNA target sequence for Mdm2 (NM_010786.2,372-390).
ccgttggagcgcaaaacga

SEQ ID NO: 537468 - DNA, 19 bp, Mus musculus
  siRNA target sequence for Mdm2 (NM_010786.2,380-398).
gcgcaaaacgacacttaca

SEQ ID NO: 537469 - DNA, 19 bp, Mus musculus
  siRNA target sequence for Mdm2 (NM_010786.2,388-406).
cgacacttacactatgaaa

SEQ ID NO: 537470 - DNA, 19 bp, Mus musculus
  siRNA target sequence for Mdm2 (NM_010786.2,393-411).
cttacactatgaaagagat

SEQ ID NO: 537471 - DNA, 19 bp, Mus musculus
  siRNA target sequence for Mdm2 (NM_010786.2,397-415).
cactatgaaagagattata

SEQ ID NO: 537472 - DNA, 19 bp, Mus musculus
  siRNA target sequence for Mdm2 (NM_010786.2,426-444).
gccagtatattatgactaa

SEQ ID NO: 537473 - DNA, 19 bp, Mus musculus
  siRNA target sequence for Mdm2 (NM_010786.2,1095-1113).
caggagaaagcgatacaga

SEQ ID NO: 537474 - DNA, 19 bp, Mus musculus
  siRNA target sequence for Mdm2 (NM_010786.2,1104-1122).
gcgatacagactcttttga

SEQ ID NO: 537475 - DNA, 19 bp, Mus musculus
  siRNA target sequence for Mdm2 (NM_010786.2,1105-1123).
cgatacagactcttttgaa

SEQ ID NO: 537476 - DNA, 19 bp, Mus musculus
  siRNA target sequence for Mdm2 (NM_010786.2,1140-1158).
ccttagctgactattggaa

SEQ ID NO: 537477 - DNA, 19 bp, Mus musculus
  siRNA target sequence for Mdm2 (NM_010786.2,1159-1177).
gtgtacctcatgcaatgaa

SEQ ID NO: 537478 - DNA, 19 bp, Mus musculus
  siRNA target sequence for Mdm2 (NM_010786.2,1161-1179).
gtacctcatgcaatgaaat

SEQ ID NO: 537479 - DNA, 19 bp, Mus musculus
  siRNA target sequence for Mdm2 (NM_010786.2,1164-1182).
cctcatgcaatgaaatgaa

SEQ ID NO: 537480 - DNA, 19 bp, Mus musculus
  siRNA target sequence for Mdm2 (NM_010786.2,1241-1259).
gacgataaggggaaagata

SEQ ID NO: 537481 - DNA, 19 bp, Mus musculus
  siRNA target sequence for Mdm2 (NM_010786.2,1243-1261).
cgataaggggaaagataaa

SEQ ID NO: 537482 - DNA, 19 bp, Mus musculus
  siRNA target sequence for Mdm2 (NM_010786.2,1415-1433).
caggagagtgacgactatt

SEQ ID NO: 537483 - DNA, 19 bp, Mus musculus
  siRNA target sequence for Mdm2 (NM_010786.2,1470-1488).
gccaagaaagcgtgaaaga

SEQ ID NO: 537484 - DNA, 19 bp, Mus musculus
  siRNA target sequence for Mdm2 (NM_010786.2,1514-1532).
gacgagagtgtggaatcta

SEQ ID NO: 537485 - DNA, 19 bp, Mus musculus
  siRNA target sequence for Mdm2 (NM_010786.2,1616-1634).
cacctcatgtcatgtttca

SEQ ID NO: 537486 - DNA, 19 bp, Mus musculus
  siRNA target sequence for Mdm2 (NM_010786.2,1680-1698).
gcagacagccaatccaaat

SEQ ID NO: 537487 - DNA, 19 bp, Mus musculus
  siRNA target sequence for Mdm2 (NM_010786.2,1683-1701).
gacagccaatccaaatgat

SEQ ID NO: 537488 - DNA, 19 bp, Mus musculus
  siRNA target sequence for Mdm2 (NM_010786.2,1694-1712).
caaatgattgtgctaactt

SEQ ID NO: 537489 - DNA, 19 bp, Mus musculus
  siRNA target sequence for Mfn1 (NM_024200.2,235-253).
ctccactgaagcactttgt

SEQ ID NO: 537490 - DNA, 19 bp, Mus musculus
  siRNA target sequence for Mfn1 (NM_024200.2,277-295).
caatcttcggccagttact

SEQ ID NO: 537491 - DNA, 19 bp, Mus musculus
  siRNA target sequence for Mfn1 (NM_024200.2,303-321).
gttactgagggctcacatt

SEQ ID NO: 537492 - DNA, 19 bp, Mus musculus
  siRNA target sequence for Mfn1 (NM_024200.2,307-325).
ctgagggctcacattttgt

SEQ ID NO: 537493 - DNA, 19 bp, Mus musculus
  siRNA target sequence for Mfn1 (NM_024200.2,311-329).
gggctcacattttgttgaa

SEQ ID NO: 537494 - DNA, 19 bp, Mus musculus
  siRNA target sequence for Mfn1 (NM_024200.2,426-444).
gtgctgtctcggagacata

SEQ ID NO: 537495 - DNA, 19 bp, Mus musculus
  siRNA target sequence for Mfn1 (NM_024200.2,429-447).
ctgtctcggagacatatga

SEQ ID NO: 537496 - DNA, 19 bp, Mus musculus
  siRNA target sequence for Mfn1 (NM_024200.2,577-595).
gagataaagcctaccttat

SEQ ID NO: 537497 - DNA, 19 bp, Mus musculus
  siRNA target sequence for Mfn1 (NM_024200.2,579-597).
gataaagcctaccttatga

SEQ ID NO: 537498 - DNA, 19 bp, Mus musculus
  siRNA target sequence for Mfn1 (NM_024200.2,622-640).
gtgtgaagactgttaatca

SEQ ID NO: 537499 - DNA, 19 bp, Mus musculus
  siRNA target sequence for Mfn1 (NM_024200.2,647-665).
ccatgccctccatatggat

SEQ ID NO: 537500 - DNA, 19 bp, Mus musculus
  siRNA target sequence for Mfn1 (NM_024200.2,652-670).
ccctccatatggataaaga

SEQ ID NO: 537501 - DNA, 19 bp, Mus musculus
  siRNA target sequence for Mfn1 (NM_024200.2,696-714).
gtattttggcccaaagcaa

SEQ ID NO: 537502 - DNA, 19 bp, Mus musculus
  siRNA target sequence for Mfn1 (NM_024200.2,728-746).
gagagatgacctggtttta

SEQ ID NO: 537503 - DNA, 19 bp, Mus musculus
  siRNA target sequence for Mfn1 (NM_024200.2,730-748).
gagatgacctggttttagt

SEQ ID NO: 537504 - DNA, 19 bp, Mus musculus
  siRNA target sequence for Mfn1 (NM_024200.2,1044-1062).
gctcggaatcggatctttt

SEQ ID NO: 537505 - DNA, 19 bp, Mus musculus
  siRNA target sequence for Mfn1 (NM_024200.2,1045-1063).
ctcggaatcggatcttttt

SEQ ID NO: 537506 - DNA, 19 bp, Mus musculus
  siRNA target sequence for Mfn1 (NM_024200.2,1048-1066).
ggaatcggatcttttttgt

SEQ ID NO: 537507 - DNA, 19 bp, Mus musculus
  siRNA target sequence for Mfn1 (NM_024200.2,1049-1067).
gaatcggatcttttttgtt

SEQ ID NO: 537508 - DNA, 19 bp, Mus musculus
  siRNA target sequence for Mfn1 (NM_024200.2,1144-1162).
gatttcaagcaagattaca

SEQ ID NO: 537509 - DNA, 19 bp, Mus musculus
  siRNA target sequence for Mfn1 (NM_024200.2,1156-1174).
gattacaggagtttcaaaa

SEQ ID NO: 537510 - DNA, 19 bp, Mus musculus
  siRNA target sequence for Mfn1 (NM_024200.2,1235-1253).
gcacactatcagagctaaa

SEQ ID NO: 537511 - DNA, 19 bp, Mus musculus
  siRNA target sequence for Mfn1 (NM_024200.2,1246-1264).
gagctaaacagatactaga

SEQ ID NO: 537512 - DNA, 19 bp, Mus musculus
  siRNA target sequence for Mfn1 (NM_024200.2,1256-1274).
gatactagacactgtgaaa

SEQ ID NO: 537513 - DNA, 19 bp, Mus musculus
  siRNA target sequence for Mfn1 (NM_024200.2,1368-1386).
cgaaaccagatgaaccttt

SEQ ID NO: 537514 - DNA, 19 bp, Mus musculus
  siRNA target sequence for Mfn1 (NM_024200.2,1433-1451).
ggcaaacaaggtttcttgt

SEQ ID NO: 537515 - DNA, 19 bp, Mus musculus
  siRNA target sequence for Mfn1 (NM_024200.2,1450-1468).
gtgcaatgacagatgaaat

SEQ ID NO: 537516 - DNA, 19 bp, Mus musculus
  siRNA target sequence for Mfn1 (NM_024200.2,1471-1489).
gtcgactatctgttttggt

SEQ ID NO: 537517 - DNA, 19 bp, Mus musculus
  siRNA target sequence for Mfn1 (NM_024200.2,1487-1505).
ggttgatgagttttgttct

SEQ ID NO: 537518 - DNA, 19 bp, Mus musculus
  siRNA target sequence for Mfn1 (NM_024200.2,1516-1534).
ctacccccagtgtactgaa

SEQ ID NO: 537519 - DNA, 19 bp, Mus musculus
  siRNA target sequence for Mfn1 (NM_024200.2,1521-1539).
cccagtgtactgaaagtgt

SEQ ID NO: 537520 - DNA, 19 bp, Mus musculus
  siRNA target sequence for Mfn1 (NM_024200.2,1522-1540).
ccagtgtactgaaagtgta

SEQ ID NO: 537521 - DNA, 19 bp, Mus musculus
  siRNA target sequence for Mfn1 (NM_024200.2,1523-1541).
cagtgtactgaaagtgtat

SEQ ID NO: 537522 - DNA, 19 bp, Mus musculus
  siRNA target sequence for Mfn1 (NM_024200.2,1598-1616).
gtgtaccaatgaagtcaat

SEQ ID NO: 537523 - DNA, 19 bp, Mus musculus
  siRNA target sequence for Mfn1 (NM_024200.2,1629-1647).
caatctcagcaagaaatca

SEQ ID NO: 537524 - DNA, 19 bp, Mus musculus
  siRNA target sequence for Mfn1 (NM_024200.2,1675-1693).
ctggtatacagaataaact

SEQ ID NO: 537525 - DNA, 19 bp, Mus musculus
  siRNA target sequence for Mfn1 (NM_024200.2,1685-1703).
gaataaacttcatacatta

SEQ ID NO: 537526 - DNA, 19 bp, Mus musculus
  siRNA target sequence for Mfn1 (NM_024200.2,1718-1736).
gtttgacctcagctatgat

SEQ ID NO: 537527 - DNA, 19 bp, Mus musculus
  siRNA target sequence for Mfn1 (NM_024200.2,1748-1766).
caagctgtgttcggatttt

SEQ ID NO: 537528 - DNA, 19 bp, Mus musculus
  siRNA target sequence for Mfn1 (NM_024200.2,1798-1816).
gctggtcttcccttgtaca

SEQ ID NO: 537529 - DNA, 19 bp, Mus musculus
  siRNA target sequence for Mfn1 (NM_024200.2,1874-1892).
ctttcaggtccctagatct

SEQ ID NO: 537530 - DNA, 19 bp, Mus musculus
  siRNA target sequence for Mfn1 (NM_024200.2,1880-1898).
ggtccctagatctttagct

SEQ ID NO: 537531 - DNA, 19 bp, Mus musculus
  siRNA target sequence for Mfn1 (NM_024200.2,1881-1899).
gtccctagatctttagctt

SEQ ID NO: 537532 - DNA, 19 bp, Mus musculus
  siRNA target sequence for Mfn1 (NM_024200.2,2029-2047).
gcgtgatttggaaaacagt

SEQ ID NO: 537533 - DNA, 19 bp, Mus musculus
  siRNA target sequence for Mfn1 (NM_024200.2,2046-2064).
gtgggctggaaactaatct

SEQ ID NO: 537534 - DNA, 19 bp, Mus musculus
  siRNA target sequence for Mfn1 (NM_024200.2,2128-2146).
cgaaagagagagcgtttaa

SEQ ID NO: 537535 - DNA, 19 bp, Mus musculus
  siRNA target sequence for Mfn1 (NM_024200.2,2147-2165).
gcagcagtttgtaaactat

SEQ ID NO: 537536 - DNA, 19 bp, Mus musculus
  siRNA target sequence for Mfn1 (NM_024200.2,2171-2189).
cgagaagctgcagatgatt

SEQ ID NO: 537537 - DNA, 19 bp, Mus musculus
  siRNA target sequence for Mfn1 (NM_024200.2,2229-2247).
caagaaatggccactactt

SEQ ID NO: 537538 - DNA, 19 bp, Mus musculus
  siRNA target sequence for Mfn1 (NM_024200.2,2308-2326).
gattatccaaagagataga

SEQ ID NO: 537539 - DNA, 19 bp, Mus musculus
  siRNA target sequence for Mfn2 (NM_133201.1,602-620).
ggaagagcaccgtgatcaa

SEQ ID NO: 537540 - DNA, 19 bp, Mus musculus
  siRNA target sequence for Mfn2 (NM_133201.1,603-621).
gaagagcaccgtgatcaat

SEQ ID NO: 537541 - DNA, 19 bp, Mus musculus
  siRNA target sequence for Mfn2 (NM_133201.1,658-676).
ggtcataccaccaattgct

SEQ ID NO: 537542 - DNA, 19 bp, Mus musculus
  siRNA target sequence for Mfn2 (NM_133201.1,1168-1186).
gctggggaccggatcttct

SEQ ID NO: 537543 - DNA, 19 bp, Mus musculus
  siRNA target sequence for Mfn2 (NM_133201.1,1253-1271).
gcgctctcgcagaaggttt

SEQ ID NO: 537544 - DNA, 19 bp, Mus musculus
  siRNA target sequence for Mfn2 (NM_133201.1,1254-1272).
cgctctcgcagaaggtttt

SEQ ID NO: 537545 - DNA, 19 bp, Mus musculus
  siRNA target sequence for Mfn2 (NM_133201.1,1334-1352).
ctgcagtaaagaccaaatt

SEQ ID NO: 537546 - DNA, 19 bp, Mus musculus
  siRNA target sequence for Mfn2 (NM_133201.1,1429-1447).
caggagcagcgggtttatt

SEQ ID NO: 537547 - DNA, 19 bp, Mus musculus
  siRNA target sequence for Mfn2 (NM_133201.1,1471-1489).
caagaccggctgaggttta

SEQ ID NO: 537548 - DNA, 19 bp, Mus musculus
  siRNA target sequence for Mfn2 (NM_133201.1,1519-1537).
gactacaagctgcgaatta

SEQ ID NO: 537549 - DNA, 19 bp, Mus musculus
  siRNA target sequence for Mfn2 (NM_133201.1,1528-1546).
ctgcgaattaagcagatta

SEQ ID NO: 537550 - DNA, 19 bp, Mus musculus
  siRNA target sequence for Mfn2 (NM_133201.1,1671-1689).
cgagctgcaccgccatata

SEQ ID NO: 537551 - DNA, 19 bp, Mus musculus
  siRNA target sequence for Mfn2 (NM_133201.1,1798-1816).
gtatctatgcggaatcaga

SEQ ID NO: 537552 - DNA, 19 bp, Mus musculus
  siRNA target sequence for Mfn2 (NM_133201.1,1828-1846).
gtccctcgacagtgtttct

SEQ ID NO: 537553 - DNA, 19 bp, Mus musculus
  siRNA target sequence for Mfn2 (NM_133201.1,1853-1871).
gctatgacctgaattgtga

SEQ ID NO: 537554 - DNA, 19 bp, Mus musculus
  siRNA target sequence for Mfn2 (NM_133201.1,1872-1890).
caagctgtgtgctgacttt

SEQ ID NO: 537555 - DNA, 19 bp, Mus musculus
  siRNA target sequence for Mfn2 (NM_133201.1,1917-1935).
ccttggatggactatgcta

SEQ ID NO: 537556 - DNA, 19 bp, Mus musculus
  siRNA target sequence for Mfn2 (NM_133201.1,1922-1940).
gatggactatgctagtgaa

SEQ ID NO: 537557 - DNA, 19 bp, Mus musculus
  siRNA target sequence for Mfn2 (NM_133201.1,2184-2202).
cctctcctttggactgtat

SEQ ID NO: 537558 - DNA, 19 bp, Mus musculus
  siRNA target sequence for Mfn2 (NM_133201.1,2349-2367).
ggaattgtctgggacattt

SEQ ID NO: 537559 - DNA, 19 bp, Mus musculus
  siRNA target sequence for Mfn2 (NM_133201.1,2498-2516).
ggttggacagcgaactcaa

SEQ ID NO: 537560 - DNA, 19 bp, Mus musculus
  siRNA target sequence for Mpdz (NM_010820.1,219-237).
cactcttcagtcagatctt

SEQ ID NO: 537561 - DNA, 19 bp, Mus musculus
  siRNA target sequence for Mpdz (NM_010820.1,221-239).
ctcttcagtcagatcttga

SEQ ID NO: 537562 - DNA, 19 bp, Mus musculus
  siRNA target sequence for Mpdz (NM_010820.1,249-267).
cttcactacagcagctaaa

SEQ ID NO: 537563 - DNA, 19 bp, Mus musculus
  siRNA target sequence for Mpdz (NM_010820.1,263-281).
ctaaaagaccaggtaaaca

SEQ ID NO: 537564 - DNA, 19 bp, Mus musculus
  siRNA target sequence for Mpdz (NM_010820.1,328-346).
gttcagctctgctgtcatt

SEQ ID NO: 537565 - DNA, 19 bp, Mus musculus
  siRNA target sequence for Mpdz (NM_010820.1,455-473).
gaacttgatcagctcatta

SEQ ID NO: 537566 - DNA, 19 bp, Mus musculus
  siRNA target sequence for Mpdz (NM_010820.1,461-479).
gatcagctcattaaaaata

SEQ ID NO: 537567 - DNA, 19 bp, Mus musculus
  siRNA target sequence for Mpdz (NM_010820.1,487-505).
gggtcgccatgtggaaata

SEQ ID NO: 537568 - DNA, 19 bp, Mus musculus
  siRNA target sequence for Mpdz (NM_010820.1,488-506).
ggtcgccatgtggaaatat

SEQ ID NO: 537569 - DNA, 19 bp, Mus musculus
  siRNA target sequence for Mpdz (NM_010820.1,489-507).
gtcgccatgtggaaatatt

SEQ ID NO: 537570 - DNA, 19 bp, Mus musculus
  siRNA target sequence for Mpdz (NM_010820.1,531-549).
gaggcctcggctttagtgt

SEQ ID NO: 537571 - DNA, 19 bp, Mus musculus
  siRNA target sequence for Mpdz (NM_010820.1,535-553).
cctcggctttagtgttgtt

SEQ ID NO: 537572 - DNA, 19 bp, Mus musculus
  siRNA target sequence for Mpdz (NM_010820.1,551-569).
gttgggctcagaagtgaaa

SEQ ID NO: 537573 - DNA, 19 bp, Mus musculus
  siRNA target sequence for Mpdz (NM_010820.1,573-591).
ggggcgagctggggatatt

SEQ ID NO: 537574 - DNA, 19 bp, Mus musculus
  siRNA target sequence for Mpdz (NM_010820.1,574-592).
gggcgagctggggatattt

SEQ ID NO: 537575 - DNA, 19 bp, Mus musculus
  siRNA target sequence for Mpdz (NM_010820.1,825-843).
cagcccactcgaatccaat

SEQ ID NO: 537576 - DNA, 19 bp, Mus musculus
  siRNA target sequence for Mpdz (NM_010820.1,864-882).
ccatagagctggtaaacga

SEQ ID NO: 537577 - DNA, 19 bp, Mus musculus
  siRNA target sequence for Mpdz (NM_010820.1,865-883).
catagagctggtaaacgat

SEQ ID NO: 537578 - DNA, 19 bp, Mus musculus
  siRNA target sequence for Mpdz (NM_010820.1,920-938).
gcgactggtgtcatagtga

SEQ ID NO: 537579 - DNA, 19 bp, Mus musculus
  siRNA target sequence for Mpdz (NM_010820.1,921-939).
cgactggtgtcatagtgaa

SEQ ID NO: 537580 - DNA, 19 bp, Mus musculus
  siRNA target sequence for Mpdz (NM_010820.1,927-945).
gtgtcatagtgaagacaat

SEQ ID NO: 537581 - DNA, 19 bp, Mus musculus
  siRNA target sequence for Mpdz (NM_010820.1,968-986).
cagcatgggcgattatgca

SEQ ID NO: 537582 - DNA, 19 bp, Mus musculus
  siRNA target sequence for Mpdz (NM_010820.1,1058-1076).
cttaggcagtgtggaaata

SEQ ID NO: 537583 - DNA, 19 bp, Mus musculus
  siRNA target sequence for Mpdz (NM_010820.1,1063-1081).
gcagtgtggaaatagagtt

SEQ ID NO: 537584 - DNA, 19 bp, Mus musculus
  siRNA target sequence for Mpdz (NM_010820.1,1068-1086).
gtggaaatagagttaagct

SEQ ID NO: 537585 - DNA, 19 bp, Mus musculus
  siRNA target sequence for Mpdz (NM_010820.1,1264-1282).
cattgctggttatattgga

SEQ ID NO: 537586 - DNA, 19 bp, Mus musculus
  siRNA target sequence for Mpdz (NM_010820.1,1269-1287).
ctggttatattggagataa

SEQ ID NO: 537587 - DNA, 19 bp, Mus musculus
  siRNA target sequence for Mpdz (NM_010820.1,1271-1289).
ggttatattggagataaaa

SEQ ID NO: 537588 - DNA, 19 bp, Mus musculus
  siRNA target sequence for Mpdz (NM_010820.1,1345-1363).
gcatgatggaagaatccaa

SEQ ID NO: 537589 - DNA, 19 bp, Mus musculus
  siRNA target sequence for Mpdz (NM_010820.1,1346-1364).
catgatggaagaatccaaa

SEQ ID NO: 537590 - DNA, 19 bp, Mus musculus
  siRNA target sequence for Mpdz (NM_010820.1,1534-1552).
ggacctcccagctgaaaat

SEQ ID NO: 537591 - DNA, 19 bp, Mus musculus
  siRNA target sequence for Mpdz (NM_010820.1,1565-1583).
gaagaatctttatcattga

SEQ ID NO: 537592 - DNA, 19 bp, Mus musculus
  siRNA target sequence for Mpdz (NM_010820.1,1585-1603).
gagaaataccagcatatta

SEQ ID NO: 537593 - DNA, 19 bp, Mus musculus
  siRNA target sequence for Mpdz (NM_010820.1,1594-1612).
cagcatattaccgattgaa

SEQ ID NO: 537594 - DNA, 19 bp, Mus musculus
  siRNA target sequence for Mpdz (NM_010820.1,1596-1614).
gcatattaccgattgaaga

SEQ ID NO: 537595 - DNA, 19 bp, Mus musculus
  siRNA target sequence for Mpdz (NM_010820.1,1597-1615).
catattaccgattgaagaa

SEQ ID NO: 537596 - DNA, 19 bp, Mus musculus
  siRNA target sequence for Mpdz (NM_010820.1,1686-1704).
ccaagtggcagaggattat

SEQ ID NO: 537597 - DNA, 19 bp, Mus musculus
  siRNA target sequence for Mpdz (NM_010820.1,1729-1747).
ggctcatgtgagcaagttt

SEQ ID NO: 537598 - DNA, 19 bp, Mus musculus
  siRNA target sequence for Mpdz (NM_010820.1,1730-1748).
gctcatgtgagcaagttta

SEQ ID NO: 537599 - DNA, 19 bp, Mus musculus
  siRNA target sequence for Mpdz (NM_010820.1,1758-1776).
gtgggctgggaataagtct

SEQ ID NO: 537600 - DNA, 19 bp, Mus musculus
  siRNA target sequence for Mpdz (NM_010820.1,1865-1883).
ctcttggaagtgaatggta

SEQ ID NO: 537601 - DNA, 19 bp, Mus musculus
  siRNA target sequence for Mpdz (NM_010820.1,1876-1894).
gaatggtataaatttgctt

SEQ ID NO: 537602 - DNA, 19 bp, Mus musculus
  siRNA target sequence for Mpdz (NM_010820.1,1907-1925).
caagatgtggtcaatattt

SEQ ID NO: 537603 - DNA, 19 bp, Mus musculus
  siRNA target sequence for Mpdz (NM_010820.1,1977-1995).
cacccattgccctatcaga

SEQ ID NO: 537604 - DNA, 19 bp, Mus musculus
  siRNA target sequence for Mpdz (NM_010820.1,1985-2003).
gccctatcagaaatggata

SEQ ID NO: 537605 - DNA, 19 bp, Mus musculus
  siRNA target sequence for Mpdz (NM_010820.1,2004-2022).
gcctggacataaatgatct

SEQ ID NO: 537606 - DNA, 19 bp, Mus musculus
  siRNA target sequence for Mpdz (NM_010820.1,2196-2214).
gccttggcttcagtatttt

SEQ ID NO: 537607 - DNA, 19 bp, Mus musculus
  siRNA target sequence for Mpdz (NM_010820.1,2201-2219).
ggcttcagtattttagact

SEQ ID NO: 537608 - DNA, 19 bp, Mus musculus
  siRNA target sequence for Mpdz (NM_010820.1,2230-2248).
gatcgatccagcaaacaca

SEQ ID NO: 537609 - DNA, 19 bp, Mus musculus
  siRNA target sequence for Mpdz (NM_010820.1,2241-2259).
caaacacagtaattgtcat

SEQ ID NO: 537610 - DNA, 19 bp, Mus musculus
  siRNA target sequence for Mpdz (NM_010820.1,2277-2295).
gtggcatagctgaaaagga

SEQ ID NO: 537611 - DNA, 19 bp, Mus musculus
  siRNA target sequence for Mpdz (NM_010820.1,2293-2311).
ggatggacggctttttcca

SEQ ID NO: 537612 - DNA, 19 bp, Mus musculus
  siRNA target sequence for Mpdz (NM_010820.1,2310-2328).
caggagacaggctcatgtt

SEQ ID NO: 537613 - DNA, 19 bp, Mus musculus
  siRNA target sequence for Mpdz (NM_010820.1,2317-2335).
caggctcatgtttgtcaat

SEQ ID NO: 537614 - DNA, 19 bp, Mus musculus
  siRNA target sequence for Mpdz (NM_010820.1,2319-2337).
ggctcatgtttgtcaatga

SEQ ID NO: 537615 - DNA, 19 bp, Mus musculus
  siRNA target sequence for Mpdz (NM_010820.1,2326-2344).
gtttgtcaatgacattaat

SEQ ID NO: 537616 - DNA, 19 bp, Mus musculus
  siRNA target sequence for Mpdz (NM_010820.1,2347-2365).
ggaaaacagcactcttgaa

SEQ ID NO: 537617 - DNA, 19 bp, Mus musculus
  siRNA target sequence for Mpdz (NM_010820.1,2441-2459).
ccagaagaagggtatgttt

SEQ ID NO: 537618 - DNA, 19 bp, Mus musculus
  siRNA target sequence for Mpdz (NM_010820.1,2536-2554).
ggctgacttggctctgata

SEQ ID NO: 537619 - DNA, 19 bp, Mus musculus
  siRNA target sequence for Mpdz (NM_010820.1,2575-2593).
catagctgaatcacgattt

SEQ ID NO: 537620 - DNA, 19 bp, Mus musculus
  siRNA target sequence for Mpdz (NM_010820.1,2579-2597).
gctgaatcacgatttgaat

SEQ ID NO: 537621 - DNA, 19 bp, Mus musculus
  siRNA target sequence for Mpdz (NM_010820.1,2924-2942).
cctcactcgcagttaccaa

SEQ ID NO: 537622 - DNA, 19 bp, Mus musculus
  siRNA target sequence for Mpdz (NM_010820.1,3051-3069).
gtatgtcccaggaagcttt

SEQ ID NO: 537623 - DNA, 19 bp, Mus musculus
  siRNA target sequence for Mpdz (NM_010820.1,3106-3124).
cctaggtatgacagtaagt

SEQ ID NO: 537624 - DNA, 19 bp, Mus musculus
  siRNA target sequence for Mpdz (NM_010820.1,3115-3133).
gacagtaagtgccaataaa

SEQ ID NO: 537625 - DNA, 19 bp, Mus musculus
  siRNA target sequence for Mpdz (NM_010820.1,3200-3218).
gctgtgggcgactgcattt

SEQ ID NO: 537626 - DNA, 19 bp, Mus musculus
  siRNA target sequence for Mpdz (NM_010820.1,3201-3219).
ctgtgggcgactgcatttt

SEQ ID NO: 537627 - DNA, 19 bp, Mus musculus
  siRNA target sequence for Mpdz (NM_010820.1,3203-3221).
gtgggcgactgcattttgt

SEQ ID NO: 537628 - DNA, 19 bp, Mus musculus
  siRNA target sequence for Mpdz (NM_010820.1,3209-3227).
gactgcattttgtccatta

SEQ ID NO: 537629 - DNA, 19 bp, Mus musculus
  siRNA target sequence for Mpdz (NM_010820.1,3290-3308).
ctaattggacctgatatca

SEQ ID NO: 537630 - DNA, 19 bp, Mus musculus
  siRNA target sequence for Mpdz (NM_010820.1,3362-3380).
caacaagctggaggaataa

SEQ ID NO: 537631 - DNA, 19 bp, Mus musculus
  siRNA target sequence for Mpdz (NM_010820.1,3375-3393).
gaataatggcactggatat

SEQ ID NO: 537632 - DNA, 19 bp, Mus musculus
  siRNA target sequence for Mpdz (NM_010820.1,3382-3400).
ggcactggatattttttct

SEQ ID NO: 537633 - DNA, 19 bp, Mus musculus
  siRNA target sequence for Mpdz (NM_010820.1,3500-3518).
ccacggagggtggaacttt

SEQ ID NO: 537634 - DNA, 19 bp, Mus musculus
  siRNA target sequence for Mpdz (NM_010820.1,3750-3768).
gcaaccctgtagtgtttat

SEQ ID NO: 537635 - DNA, 19 bp, Mus musculus
  siRNA target sequence for Mpdz (NM_010820.1,3754-3772).
ccctgtagtgtttatggta

SEQ ID NO: 537636 - DNA, 19 bp, Mus musculus
  siRNA target sequence for Mpdz (NM_010820.1,3770-3788).
gtacagagcattataaaca

SEQ ID NO: 537637 - DNA, 19 bp, Mus musculus
  siRNA target sequence for Mpdz (NM_010820.1,3850-3868).
cagcactaacccatttgca

SEQ ID NO: 537638 - DNA, 19 bp, Mus musculus
  siRNA target sequence for Mpdz (NM_010820.1,3928-3946).
gcctgcattgtgcaatgtt

SEQ ID NO: 537639 - DNA, 19 bp, Mus musculus
  siRNA target sequence for Mpdz (NM_010820.1,4008-4026).
ccgcagtctcagaagatga

SEQ ID NO: 537640 - DNA, 19 bp, Mus musculus
  siRNA target sequence for Mpdz (NM_010820.1,4047-4065).
gttacagctggaaaaatat

SEQ ID NO: 537641 - DNA, 19 bp, Mus musculus
  siRNA target sequence for Mpdz (NM_010820.1,4143-4161).
gtcttgctgggaacaaaga

SEQ ID NO: 537642 - DNA, 19 bp, Mus musculus
  siRNA target sequence for Mpdz (NM_010820.1,4218-4236).
gagatggccgactacagat

SEQ ID NO: 537643 - DNA, 19 bp, Mus musculus
  siRNA target sequence for Mpdz (NM_010820.1,4238-4256).
gccgacgagcttttagaga

SEQ ID NO: 537644 - DNA, 19 bp, Mus musculus
  siRNA target sequence for Mpdz (NM_010820.1,4239-4257).
ccgacgagcttttagagat

SEQ ID NO: 537645 - DNA, 19 bp, Mus musculus
  siRNA target sequence for Mpdz (NM_010820.1,4243-4261).
cgagcttttagagatcaat

SEQ ID NO: 537646 - DNA, 19 bp, Mus musculus
  siRNA target sequence for Mpdz (NM_010820.1,4258-4276).
caatggccaaatattgtat

SEQ ID NO: 537647 - DNA, 19 bp, Mus musculus
  siRNA target sequence for Mpdz (NM_010820.1,4289-4307).
cagaatgcttcatcaatta

SEQ ID NO: 537648 - DNA, 19 bp, Mus musculus
  siRNA target sequence for Mpdz (NM_010820.1,4316-4334).
gctccatctaaagtaaaaa

SEQ ID NO: 537649 - DNA, 19 bp, Mus musculus
  siRNA target sequence for Mpdz (NM_010820.1,4439-4457).
gtggaaccatgcagtacta

SEQ ID NO: 537650 - DNA, 19 bp, Mus musculus
  siRNA target sequence for Mpdz (NM_010820.1,4474-4492).
ggacctcagctcacttaca

SEQ ID NO: 537651 - DNA, 19 bp, Mus musculus
  siRNA target sequence for Mpdz (NM_010820.1,4477-4495).
cctcagctcacttacagat

SEQ ID NO: 537652 - DNA, 19 bp, Mus musculus
  siRNA target sequence for Mpdz (NM_010820.1,4504-4522).
gctggagcttcctaaggat

SEQ ID NO: 537653 - DNA, 19 bp, Mus musculus
  siRNA target sequence for Mpdz (NM_010820.1,4527-4545).
gaggtttaggcattgctat

SEQ ID NO: 537654 - DNA, 19 bp, Mus musculus
  siRNA target sequence for Mpdz (NM_010820.1,4560-4578).
caatcaacggagtcatgat

SEQ ID NO: 537655 - DNA, 19 bp, Mus musculus
  siRNA target sequence for Mpdz (NM_010820.1,4639-4657).
catcttggctgtagatgat

SEQ ID NO: 537656 - DNA, 19 bp, Mus musculus
  siRNA target sequence for Mpdz (NM_010820.1,4729-4747).
gactgttcgagctgagaat

SEQ ID NO: 537657 - DNA, 19 bp, Mus musculus
  siRNA target sequence for Mpdz (NM_010820.1,4920-4938).
gctgtgagacaacaattga

SEQ ID NO: 537658 - DNA, 19 bp, Mus musculus
  siRNA target sequence for Mpdz (NM_010820.1,4929-4947).
caacaattgagatttccaa

SEQ ID NO: 537659 - DNA, 19 bp, Mus musculus
  siRNA target sequence for Mpdz (NM_010820.1,5098-5116).
cttgcgaaaggctacacat

SEQ ID NO: 537660 - DNA, 19 bp, Mus musculus
  siRNA target sequence for Mpdz (NM_010820.1,5101-5119).
gcgaaaggctacacatgat

SEQ ID NO: 537661 - DNA, 19 bp, Mus musculus
  siRNA target sequence for Mpdz (NM_010820.1,5103-5121).
gaaaggctacacatgatga

SEQ ID NO: 537662 - DNA, 19 bp, Mus musculus
  siRNA target sequence for Mpdz (NM_010820.1,5262-5280).
gtattgttggcaaaagaaa

SEQ ID NO: 537663 - DNA, 19 bp, Mus musculus
  siRNA target sequence for Mpdz (NM_010820.1,5277-5295).
gaaatgacactggagtatt

SEQ ID NO: 537664 - DNA, 19 bp, Mus musculus
  siRNA target sequence for Mpdz (NM_010820.1,5347-5365).
gcaaggggaccagatttta

SEQ ID NO: 537665 - DNA, 19 bp, Mus musculus
  siRNA target sequence for Mpdz (NM_010820.1,5348-5366).
caaggggaccagattttaa

SEQ ID NO: 537666 - DNA, 19 bp, Mus musculus
  siRNA target sequence for Mpdz (NM_010820.1,5352-5370).
gggaccagattttaatggt

SEQ ID NO: 537667 - DNA, 19 bp, Mus musculus
  siRNA target sequence for Mpdz (NM_010820.1,5449-5467).
ggaggttggaagagtcaaa

SEQ ID NO: 537668 - DNA, 19 bp, Mus musculus
  siRNA target sequence for Mpdz (NM_010820.1,5486-5504).
gaacggaggccttctcaaa

SEQ ID NO: 537669 - DNA, 19 bp, Mus musculus
  siRNA target sequence for Mpdz (NM_010820.1,5519-5537).
gagagcagcctgtcatctt

SEQ ID NO: 537670 - DNA, 19 bp, Mus musculus
  siRNA target sequence for Mpdz (NM_010820.1,5546-5564).
ccactttctggaataaata

SEQ ID NO: 537671 - DNA, 19 bp, Mus musculus
  siRNA target sequence for Mpdz (NM_010820.1,5578-5596).
ggaaagtaactcgaagaaa

SEQ ID NO: 537672 - DNA, 19 bp, Mus musculus
  siRNA target sequence for Mpdz (NM_010820.1,5622-5640).
gactaagaacagtcgaaat

SEQ ID NO: 537673 - DNA, 19 bp, Mus musculus
  siRNA target sequence for Mpdz (NM_010820.1,5624-5642).
ctaagaacagtcgaaataa

SEQ ID NO: 537674 - DNA, 19 bp, Mus musculus
  siRNA target sequence for Mpdz (NM_010820.1,5699-5717).
ctcggagatgtccctatat

SEQ ID NO: 537675 - DNA, 19 bp, Mus musculus
  siRNA target sequence for Mpdz (NM_010820.1,5701-5719).
cggagatgtccctatattt

SEQ ID NO: 537676 - DNA, 19 bp, Mus musculus
  siRNA target sequence for Mpdz (NM_010820.1,5744-5762).
gttgcagctcaaacacaaa

SEQ ID NO: 537677 - DNA, 19 bp, Mus musculus
  siRNA target sequence for Mpdz (NM_010820.1,5771-5789).
gttggggataggattgtca

SEQ ID NO: 537678 - DNA, 19 bp, Mus musculus
  siRNA target sequence for Mpdz (NM_010820.1,5826-5844).
cacaggcggttaacttgat

SEQ ID NO: 537679 - DNA, 19 bp, Mus musculus
  siRNA target sequence for Mpdz (NM_010820.1,5828-5846).
caggcggttaacttgatga

SEQ ID NO: 537680 - DNA, 19 bp, Mus musculus
  siRNA target sequence for Mpdz (NM_010820.1,5830-5848).
ggcggttaacttgatgaaa

SEQ ID NO: 537681 - DNA, 19 bp, Mus musculus
  siRNA target sequence for Mpdz (NM_010820.1,5856-5874).
caggctccattgaagtaca

SEQ ID NO: 537682 - DNA, 19 bp, Mus musculus
  siRNA target sequence for Mpdz (NM_010820.1,5967-5985).
gtatatttccggatgattt

SEQ ID NO: 537683 - DNA, 19 bp, Mus musculus
  siRNA target sequence for Mpdz (NM_010820.1,6068-6086).
cctcatggagacttaccaa

SEQ ID NO: 537684 - DNA, 19 bp, Mus musculus
  siRNA target sequence for Mpdz (NM_010820.1,6069-6087).
ctcatggagacttaccaat

SEQ ID NO: 537685 - DNA, 19 bp, Mus musculus
  siRNA target sequence for Mpdz (NM_010820.1,6075-6093).
gagacttaccaatttatgt

SEQ ID NO: 537686 - DNA, 19 bp, Mus musculus
  siRNA target sequence for Mpdz (NM_010820.1,6077-6095).
gacttaccaatttatgtga

SEQ ID NO: 537687 - DNA, 19 bp, Mus musculus
  siRNA target sequence for Mpdz (NM_010820.1,6092-6110).
gtgaaaacagtgtttgcaa

SEQ ID NO: 537688 - DNA, 19 bp, Mus musculus
  siRNA target sequence for Mpdz (NM_010820.1,6125-6143).
gaagatgggcgtctaaaaa

SEQ ID NO: 537689 - DNA, 19 bp, Mus musculus
  siRNA target sequence for Mpp2 (NM_016695.1,482-500).
ggcctggatcccacgttta

SEQ ID NO: 537690 - DNA, 19 bp, Mus musculus
  siRNA target sequence for Mpp2 (NM_016695.1,787-805).
gccccgacaggtatttgtt

SEQ ID NO: 537691 - DNA, 19 bp, Mus musculus
  siRNA target sequence for Mpp2 (NM_016695.1,788-806).
ccccgacaggtatttgtta

SEQ ID NO: 537692 - DNA, 19 bp, Mus musculus
  siRNA target sequence for Mpp2 (NM_016695.1,789-807).
cccgacaggtatttgttaa

SEQ ID NO: 537693 - DNA, 19 bp, Mus musculus
  siRNA target sequence for Mpp2 (NM_016695.1,790-808).
ccgacaggtatttgttaaa

SEQ ID NO: 537694 - DNA, 19 bp, Mus musculus
  siRNA target sequence for Mpp2 (NM_016695.1,791-809).
cgacaggtatttgttaaat

SEQ ID NO: 537695 - DNA, 19 bp, Mus musculus
  siRNA target sequence for Mpp2 (NM_016695.1,882-900).
gggacttgctccagattgt

SEQ ID NO: 537696 - DNA, 19 bp, Mus musculus
  siRNA target sequence for Mpp2 (NM_016695.1,895-913).
gattgtaaaccaagatgat

SEQ ID NO: 537697 - DNA, 19 bp, Mus musculus
  siRNA target sequence for Mpp2 (NM_016695.1,1113-1131).
gccatgagctgctcattta

SEQ ID NO: 537698 - DNA, 19 bp, Mus musculus
  siRNA target sequence for Mpp2 (NM_016695.1,1114-1132).
ccatgagctgctcatttat

SEQ ID NO: 537699 - DNA, 19 bp, Mus musculus
  siRNA target sequence for Mpp2 (NM_016695.1,1501-1519).
cccttacgtggtgttcata

SEQ ID NO: 537700 - DNA, 19 bp, Mus musculus
  siRNA target sequence for Mpp2 (NM_016695.1,1503-1521).
cttacgtggtgttcataga

SEQ ID NO: 537701 - DNA, 19 bp, Mus musculus
  siRNA target sequence for Mpp2 (NM_016695.1,1714-1732).
gactgccatggagaaactt

SEQ ID NO: 537702 - DNA, 19 bp, Mus musculus
  siRNA target sequence for Mtbp (NM_134092.2,329-347).
cgatttgaccgcaaccaat

SEQ ID NO: 537703 - DNA, 19 bp, Mus musculus
  siRNA target sequence for Mtbp (NM_134092.2,330-348).
gatttgaccgcaaccaata

SEQ ID NO: 537704 - DNA, 19 bp, Mus musculus
  siRNA target sequence for Mtbp (NM_134092.2,337-355).
ccgcaaccaatatttatca

SEQ ID NO: 537705 - DNA, 19 bp, Mus musculus
  siRNA target sequence for Mtbp (NM_134092.2,367-385).
gaagcatcagcgattcaat

SEQ ID NO: 537706 - DNA, 19 bp, Mus musculus
  siRNA target sequence for Mtbp (NM_134092.2,452-470).
ctttgcggtgcaagcaata

SEQ ID NO: 537707 - DNA, 19 bp, Mus musculus
  siRNA target sequence for Mtbp (NM_134092.2,466-484).
caatatgcggattttacca

SEQ ID NO: 537708 - DNA, 19 bp, Mus musculus
  siRNA target sequence for Mtbp (NM_134092.2,473-491).
cggattttaccagttttgt

SEQ ID NO: 537709 - DNA, 19 bp, Mus musculus
  siRNA target sequence for Mtbp (NM_134092.2,474-492).
ggattttaccagttttgta

SEQ ID NO: 537710 - DNA, 19 bp, Mus musculus
  siRNA target sequence for Mtbp (NM_134092.2,482-500).
ccagttttgtagttctgat

SEQ ID NO: 537711 - DNA, 19 bp, Mus musculus
  siRNA target sequence for Mtbp (NM_134092.2,493-511).
gttctgattggcaagagat

SEQ ID NO: 537712 - DNA, 19 bp, Mus musculus
  siRNA target sequence for Mtbp (NM_134092.2,552-570).
caagcaaatatagaagaat

SEQ ID NO: 537713 - DNA, 19 bp, Mus musculus
  siRNA target sequence for Mtbp (NM_134092.2,607-625).
gtaatagcagggaatcctt

SEQ ID NO: 537714 - DNA, 19 bp, Mus musculus
  siRNA target sequence for Mtbp (NM_134092.2,628-646).
ccttggctgacctatatga

SEQ ID NO: 537715 - DNA, 19 bp, Mus musculus
  siRNA target sequence for Mtbp (NM_134092.2,629-647).
cttggctgacctatatgaa

SEQ ID NO: 537716 - DNA, 19 bp, Mus musculus
  siRNA target sequence for Mtbp (NM_134092.2,691-709).
ctcctggtagagcaatgat

SEQ ID NO: 537717 - DNA, 19 bp, Mus musculus
  siRNA target sequence for Mtbp (NM_134092.2,694-712).
ctggtagagcaatgataga

SEQ ID NO: 537718 - DNA, 19 bp, Mus musculus
  siRNA target sequence for Mtbp (NM_134092.2,696-714).
ggtagagcaatgatagaca

SEQ ID NO: 537719 - DNA, 19 bp, Mus musculus
  siRNA target sequence for Mtbp (NM_134092.2,697-715).
gtagagcaatgatagacat

SEQ ID NO: 537720 - DNA, 19 bp, Mus musculus
  siRNA target sequence for Mtbp (NM_134092.2,847-865).
gtcagaaaattgctgaata

SEQ ID NO: 537721 - DNA, 19 bp, Mus musculus
  siRNA target sequence for Mtbp (NM_134092.2,851-869).
gaaaattgctgaatacctt

SEQ ID NO: 537722 - DNA, 19 bp, Mus musculus
  siRNA target sequence for Mtbp (NM_134092.2,874-892).
ctagtgttgtgcctttaga

SEQ ID NO: 537723 - DNA, 19 bp, Mus musculus
  siRNA target sequence for Mtbp (NM_134092.2,884-902).
gcctttagaagaattcaga

SEQ ID NO: 537724 - DNA, 19 bp, Mus musculus
  siRNA target sequence for Mtbp (NM_134092.2,944-962).
gatgcgggaacgaaagttt

SEQ ID NO: 537725 - DNA, 19 bp, Mus musculus
  siRNA target sequence for Mtbp (NM_134092.2,948-966).
cgggaacgaaagtttggat

SEQ ID NO: 537726 - DNA, 19 bp, Mus musculus
  siRNA target sequence for Mtbp (NM_134092.2,949-967).
gggaacgaaagtttggatt

SEQ ID NO: 537727 - DNA, 19 bp, Mus musculus
  siRNA target sequence for Mtbp (NM_134092.2,950-968).
ggaacgaaagtttggattt

SEQ ID NO: 537728 - DNA, 19 bp, Mus musculus
  siRNA target sequence for Mtbp (NM_134092.2,959-977).
gtttggatttgaaattagt

SEQ ID NO: 537729 - DNA, 19 bp, Mus musculus
  siRNA target sequence for Mtbp (NM_134092.2,1002-1020).
gttacgcctacgaatgtta

SEQ ID NO: 537730 - DNA, 19 bp, Mus musculus
  siRNA target sequence for Mtbp (NM_134092.2,1012-1030).
cgaatgttagtgcgtataa

SEQ ID NO: 537731 - DNA, 19 bp, Mus musculus
  siRNA target sequence for Mtbp (NM_134092.2,1013-1031).
gaatgttagtgcgtataat

SEQ ID NO: 537732 - DNA, 19 bp, Mus musculus
  siRNA target sequence for Mtbp (NM_134092.2,1017-1035).
gttagtgcgtataatttaa

SEQ ID NO: 537733 - DNA, 19 bp, Mus musculus
  siRNA target sequence for Mtbp (NM_134092.2,1023-1041).
gcgtataatttaaatacct

SEQ ID NO: 537734 - DNA, 19 bp, Mus musculus
  siRNA target sequence for Mtbp (NM_134092.2,1058-1076).
gatagcatcttctaaggtt

SEQ ID NO: 537735 - DNA, 19 bp, Mus musculus
  siRNA target sequence for Mtbp (NM_134092.2,1063-1081).
catcttctaaggttttcca

SEQ ID NO: 537736 - DNA, 19 bp, Mus musculus
  siRNA target sequence for Mtbp (NM_134092.2,1073-1091).
ggttttccattattatggt

SEQ ID NO: 537737 - DNA, 19 bp, Mus musculus
  siRNA target sequence for Mtbp (NM_134092.2,1128-1146).
gatcttccctcctgttaca

SEQ ID NO: 537738 - DNA, 19 bp, Mus musculus
  siRNA target sequence for Mtbp (NM_134092.2,1141-1159).
gttacatgtcggatatcga

SEQ ID NO: 537739 - DNA, 19 bp, Mus musculus
  siRNA target sequence for Mtbp (NM_134092.2,1150-1168).
cggatatcgagtttgagtt

SEQ ID NO: 537740 - DNA, 19 bp, Mus musculus
  siRNA target sequence for Mtbp (NM_134092.2,1262-1280).
gccgtgtactgttagcaat

SEQ ID NO: 537741 - DNA, 19 bp, Mus musculus
  siRNA target sequence for Mtbp (NM_134092.2,1270-1288).
ctgttagcaatgtactcat

SEQ ID NO: 537742 - DNA, 19 bp, Mus musculus
  siRNA target sequence for Mtbp (NM_134092.2,1475-1493).
gtttgcactcagtgtcatt

SEQ ID NO: 537743 - DNA, 19 bp, Mus musculus
  siRNA target sequence for Mtbp (NM_134092.2,1488-1506).
gtcattcatgggaagatga

SEQ ID NO: 537744 - DNA, 19 bp, Mus musculus
  siRNA target sequence for Mtbp (NM_134092.2,1530-1548).
ccgagtttcccctttgact

SEQ ID NO: 537745 - DNA, 19 bp, Mus musculus
  siRNA target sequence for Mtbp (NM_134092.2,1531-1549).
cgagtttcccctttgactt

SEQ ID NO: 537746 - DNA, 19 bp, Mus musculus
  siRNA target sequence for Mtbp (NM_134092.2,1724-1742).
cctaggtcactttgatgtt

SEQ ID NO: 537747 - DNA, 19 bp, Mus musculus
  siRNA target sequence for Mtbp (NM_134092.2,1808-1826).
cggtacagttgaaccttat

SEQ ID NO: 537748 - DNA, 19 bp, Mus musculus
  siRNA target sequence for Mtbp (NM_134092.2,1809-1827).
ggtacagttgaaccttatt

SEQ ID NO: 537749 - DNA, 19 bp, Mus musculus
  siRNA target sequence for Mtbp (NM_134092.2,1870-1888).
gacatgttcttcagaattt

SEQ ID NO: 537750 - DNA, 19 bp, Mus musculus
  siRNA target sequence for Mtbp (NM_134092.2,1936-1954).
cgcgttcgtctgaacagtt

SEQ ID NO: 537751 - DNA, 19 bp, Mus musculus
  siRNA target sequence for Mtbp (NM_134092.2,1978-1996).
gggactcactcacattact

SEQ ID NO: 537752 - DNA, 19 bp, Mus musculus
  siRNA target sequence for Mtbp (NM_134092.2,2036-2054).
gttaccagtcggagatctt

SEQ ID NO: 537753 - DNA, 19 bp, Mus musculus
  siRNA target sequence for Mtbp (NM_134092.2,2156-2174).
ccattaccacgggattgaa

SEQ ID NO: 537754 - DNA, 19 bp, Mus musculus
  siRNA target sequence for Mtbp (NM_134092.2,2157-2175).
cattaccacgggattgaat

SEQ ID NO: 537755 - DNA, 19 bp, Mus musculus
  siRNA target sequence for Mtbp (NM_134092.2,2202-2220).
gaaagagatgggggatttt

SEQ ID NO: 537756 - DNA, 19 bp, Mus musculus
  siRNA target sequence for Mtbp (NM_134092.2,2229-2247).
cagtcgcgccttattcgtt

SEQ ID NO: 537757 - DNA, 19 bp, Mus musculus
  siRNA target sequence for Mtbp (NM_134092.2,2369-2387).
cgaactgaggactgaagtt

SEQ ID NO: 537758 - DNA, 19 bp, Mus musculus
  siRNA target sequence for Mtbp (NM_134092.2,2380-2398).
ctgaagtttctggattgaa

SEQ ID NO: 537759 - DNA, 19 bp, Mus musculus
  siRNA target sequence for Mtbp (NM_134092.2,2391-2409).
ggattgaagcggagatcta

SEQ ID NO: 537760 - DNA, 19 bp, Mus musculus
  siRNA target sequence for Mtbp (NM_134092.2,2392-2410).
gattgaagcggagatctaa

SEQ ID NO: 537761 - DNA, 19 bp, Mus musculus
  siRNA target sequence for Mtbp (NM_134092.2,2477-2495).
ccaagcgagttgcaatagt

SEQ ID NO: 537762 - DNA, 19 bp, Mus musculus
  siRNA target sequence for Mtbp (NM_134092.2,2478-2496).
caagcgagttgcaatagta

SEQ ID NO: 537763 - DNA, 19 bp, Mus musculus
  siRNA target sequence for Mtbp (NM_134092.2,2482-2500).
cgagttgcaatagtaatca

SEQ ID NO: 537764 - DNA, 19 bp, Mus musculus
  siRNA target sequence for Mtbp (NM_134092.2,2483-2501).
gagttgcaatagtaatcat

SEQ ID NO: 537765 - DNA, 19 bp, Mus musculus
  siRNA target sequence for Mtbp (NM_134092.2,2485-2503).
gttgcaatagtaatcatca

SEQ ID NO: 537766 - DNA, 19 bp, Mus musculus
  siRNA target sequence for Mtbp (NM_134092.2,2597-2615).
gaccagttcaggacaaaaa

SEQ ID NO: 537767 - DNA, 19 bp, Mus musculus
  siRNA target sequence for Mtbp (NM_134092.2,2681-2699).
gctgaaggaggtggtaaaa

SEQ ID NO: 537768 - DNA, 19 bp, Mus musculus
  siRNA target sequence for Mtbp (NM_134092.2,2694-2712).
gtaaaagacaccttgaaga

SEQ ID NO: 537769 - DNA, 19 bp, Mus musculus
  siRNA target sequence for Mtbp (NM_134092.2,2803-2821).
catcaaggggtctctttga

SEQ ID NO: 537770 - DNA, 19 bp, Mus musculus
  siRNA target sequence for Mtbp (NM_134092.2,2809-2827).
ggggtctctttgaagaaat

SEQ ID NO: 537771 - DNA, 19 bp, Mus musculus
  siRNA target sequence for Mtpn (NM_008098.2,312-330).
gtggacagcttgaaatcct

SEQ ID NO: 537772 - DNA, 19 bp, Mus musculus
  siRNA target sequence for Mtpn (NM_008098.2,319-337).
gcttgaaatcctggaattt

SEQ ID NO: 537773 - DNA, 19 bp, Mus musculus
  siRNA target sequence for Mtpn (NM_008098.2,366-384).
ctccagataaacatcatat

SEQ ID NO: 537774 - DNA, 19 bp, Mus musculus
  siRNA target sequence for Mtpn (NM_008098.2,404-422).
gtctatgagggtcatgttt

SEQ ID NO: 537775 - DNA, 19 bp, Mus musculus
  siRNA target sequence for Mtpn (NM_008098.2,416-434).
catgtttcctgcgtgaaat

SEQ ID NO: 537776 - DNA, 19 bp, Mus musculus
  siRNA target sequence for Mtpn (NM_008098.2,501-519).
ctgacaaccaggcaatcaa

SEQ ID NO: 537777 - DNA, 19 bp, Mus musculus
  siRNA target sequence for Muted (NM_139063.1,173-191).
ggatcttggagagattcat

SEQ ID NO: 537778 - DNA, 19 bp, Mus musculus
  siRNA target sequence for Muted (NM_139063.1,226-244).
gtgaaatccgttactttgt

SEQ ID NO: 537779 - DNA, 19 bp, Mus musculus
  siRNA target sequence for Muted (NM_139063.1,228-246).
gaaatccgttactttgtaa

SEQ ID NO: 537780 - DNA, 19 bp, Mus musculus
  siRNA target sequence for Muted (NM_139063.1,233-251).
ccgttactttgtaaaagaa

SEQ ID NO: 537781 - DNA, 19 bp, Mus musculus
  siRNA target sequence for Muted (NM_139063.1,234-252).
cgttactttgtaaaagaat

SEQ ID NO: 537782 - DNA, 19 bp, Mus musculus
  siRNA target sequence for Muted (NM_139063.1,273-291).
cgagaattgcgcgttctta

SEQ ID NO: 537783 - DNA, 19 bp, Mus musculus
  siRNA target sequence for Muted (NM_139063.1,274-292).
gagaattgcgcgttcttaa

SEQ ID NO: 537784 - DNA, 19 bp, Mus musculus
  siRNA target sequence for Muted (NM_139063.1,276-294).
gaattgcgcgttcttaaga

SEQ ID NO: 537785 - DNA, 19 bp, Mus musculus
  siRNA target sequence for Muted (NM_178054.2,408-426).
gacccagggctcgttgatt

SEQ ID NO: 537786 - DNA, 19 bp, Mus musculus
  siRNA target sequence for Muted (NM_178054.2,429-447).
ggtacattgctgacaatga

SEQ ID NO: 537787 - DNA, 19 bp, Mus musculus
  siRNA target sequence for Mynn (NM_030557.1,103-121).
gcgactgtaccgtagtgat

SEQ ID NO: 537788 - DNA, 19 bp, Mus musculus
  siRNA target sequence for Mynn (NM_030557.1,104-122).
cgactgtaccgtagtgatt

SEQ ID NO: 537789 - DNA, 19 bp, Mus musculus
  siRNA target sequence for Mynn (NM_030557.1,112-130).
ccgtagtgattggagaatt

SEQ ID NO: 537790 - DNA, 19 bp, Mus musculus
  siRNA target sequence for Mynn (NM_030557.1,159-177).
gcctcctttagtgagtatt

SEQ ID NO: 537791 - DNA, 19 bp, Mus musculus
  siRNA target sequence for Mynn (NM_030557.1,160-178).
cctcctttagtgagtattt

SEQ ID NO: 537792 - DNA, 19 bp, Mus musculus
  siRNA target sequence for Mynn (NM_030557.1,239-257).
ggctgacggatttcagaaa

SEQ ID NO: 537793 - DNA, 19 bp, Mus musculus
  siRNA target sequence for Mynn (NM_030557.1,241-259).
ctgacggatttcagaaact

SEQ ID NO: 537794 - DNA, 19 bp, Mus musculus
  siRNA target sequence for Mynn (NM_030557.1,243-261).
gacggatttcagaaactgt

SEQ ID NO: 537795 - DNA, 19 bp, Mus musculus
  siRNA target sequence for Mynn (NM_030557.1,258-276).
ctgttggagtttatatata

SEQ ID NO: 537796 - DNA, 19 bp, Mus musculus
  siRNA target sequence for Mynn (NM_030557.1,291-309).
ctcgacagttggaatgtta

SEQ ID NO: 537797 - DNA, 19 bp, Mus musculus
  siRNA target sequence for Mynn (NM_030557.1,298-316).
gttggaatgttaaagaaat

SEQ ID NO: 537798 - DNA, 19 bp, Mus musculus
  siRNA target sequence for Mynn (NM_030557.1,301-319).
ggaatgttaaagaaatcca

SEQ ID NO: 537799 - DNA, 19 bp, Mus musculus
  siRNA target sequence for Mynn (NM_030557.1,342-360).
gtagaagaggtagtaacta

SEQ ID NO: 537800 - DNA, 19 bp, Mus musculus
  siRNA target sequence for Mynn (NM_030557.1,348-366).
gaggtagtaactaaatgta

SEQ ID NO: 537801 - DNA, 19 bp, Mus musculus
  siRNA target sequence for Mynn (NM_030557.1,354-372).
gtaactaaatgtaaaataa

SEQ ID NO: 537802 - DNA, 19 bp, Mus musculus
  siRNA target sequence for Mynn (NM_030557.1,381-399).
gatttcgctttcattgcta

SEQ ID NO: 537803 - DNA, 19 bp, Mus musculus
  siRNA target sequence for Mynn (NM_030557.1,402-420).
ccctcttctaccgaaatat

SEQ ID NO: 537804 - DNA, 19 bp, Mus musculus
  siRNA target sequence for Mynn (NM_030557.1,404-422).
ctcttctaccgaaatatct

SEQ ID NO: 537805 - DNA, 19 bp, Mus musculus
  siRNA target sequence for Mynn (NM_030557.1,413-431).
cgaaatatctagtattact

SEQ ID NO: 537806 - DNA, 19 bp, Mus musculus
  siRNA target sequence for Mynn (NM_030557.1,421-439).
ctagtattactggaaacat

SEQ ID NO: 537807 - DNA, 19 bp, Mus musculus
  siRNA target sequence for Mynn (NM_030557.1,430-448).
ctggaaacatcgaattgaa

SEQ ID NO: 537808 - DNA, 19 bp, Mus musculus
  siRNA target sequence for Mynn (NM_030557.1,465-483).
cttaccctgcgagattata

SEQ ID NO: 537809 - DNA, 19 bp, Mus musculus
  siRNA target sequence for Mynn (NM_030557.1,469-487).
ccctgcgagattataacaa

SEQ ID NO: 537810 - DNA, 19 bp, Mus musculus
  siRNA target sequence for Mynn (NM_030557.1,470-488).
cctgcgagattataacaat

SEQ ID NO: 537811 - DNA, 19 bp, Mus musculus
  siRNA target sequence for Mynn (NM_030557.1,537-555).
ccacgggcattgacaaaga

SEQ ID NO: 537812 - DNA, 19 bp, Mus musculus
  siRNA target sequence for Mynn (NM_030557.1,538-556).
cacgggcattgacaaagaa

SEQ ID NO: 537813 - DNA, 19 bp, Mus musculus
  siRNA target sequence for Mynn (NM_030557.1,540-558).
cgggcattgacaaagaaat

SEQ ID NO: 537814 - DNA, 19 bp, Mus musculus
  siRNA target sequence for Mynn (NM_030557.1,543-561).
gcattgacaaagaaatcgt

SEQ ID NO: 537815 - DNA, 19 bp, Mus musculus
  siRNA target sequence for Mynn (NM_030557.1,647-665).
gagcgcgtctgtggaatta

SEQ ID NO: 537816 - DNA, 19 bp, Mus musculus
  siRNA target sequence for Mynn (NM_030557.1,649-667).
gcgcgtctgtggaattatt

SEQ ID NO: 537817 - DNA, 19 bp, Mus musculus
  siRNA target sequence for Mynn (NM_030557.1,669-687).
ctagagacgagcaagttgt

SEQ ID NO: 537818 - DNA, 19 bp, Mus musculus
  siRNA target sequence for Mynn (NM_030557.1,694-712).
ctgtagtagagcaaatcat

SEQ ID NO: 537819 - DNA, 19 bp, Mus musculus
  siRNA target sequence for Mynn (NM_030557.1,704-722).
gcaaatcattcaaggaaat

SEQ ID NO: 537820 - DNA, 19 bp, Mus musculus
  siRNA target sequence for Mynn (NM_030557.1,746-764).
ctcggttgtggaaaatact

SEQ ID NO: 537821 - DNA, 19 bp, Mus musculus
  siRNA target sequence for Mynn (NM_030557.1,748-766).
cggttgtggaaaatacttt

SEQ ID NO: 537822 - DNA, 19 bp, Mus musculus
  siRNA target sequence for Mynn (NM_030557.1,763-781).
cttttccaacccaagatat

SEQ ID NO: 537823 - DNA, 19 bp, Mus musculus
  siRNA target sequence for Mynn (NM_030557.1,777-795).
gatattgtgcaaactgtta

SEQ ID NO: 537824 - DNA, 19 bp, Mus musculus
  siRNA target sequence for Mynn (NM_030557.1,805-823).
ggaaacgtcggaaatcaca

SEQ ID NO: 537825 - DNA, 19 bp, Mus musculus
  siRNA target sequence for Mynn (NM_030557.1,843-861).
gaacactccatgtctaaca

SEQ ID NO: 537826 - DNA, 19 bp, Mus musculus
  siRNA target sequence for Mynn (NM_030557.1,909-927).
ctggatgcaaggttttcca

SEQ ID NO: 537827 - DNA, 19 bp, Mus musculus
  siRNA target sequence for Mynn (NM_030557.1,981-999).
ctgcgaaggcacatgagaa

SEQ ID NO: 537828 - DNA, 19 bp, Mus musculus
  siRNA target sequence for Mynn (NM_030557.1,983-1001).
gcgaaggcacatgagaata

SEQ ID NO: 537829 - DNA, 19 bp, Mus musculus
  siRNA target sequence for Mynn (NM_030557.1,988-1006).
ggcacatgagaatacacaa

SEQ ID NO: 537830 - DNA, 19 bp, Mus musculus
  siRNA target sequence for Mynn (NM_030557.1,1198-1216).
gtgatgtgtgcaatttaca

SEQ ID NO: 537831 - DNA, 19 bp, Mus musculus
  siRNA target sequence for Mynn (NM_030557.1,1315-1333).
gcacgctgacctatcatgt

SEQ ID NO: 537832 - DNA, 19 bp, Mus musculus
  siRNA target sequence for Mynn (NM_030557.1,1392-1410).
gtctctagctctcttatca

SEQ ID NO: 537833 - DNA, 19 bp, Mus musculus
  siRNA target sequence for Mynn (NM_030557.1,1394-1412).
ctctagctctcttatcact

SEQ ID NO: 537834 - DNA, 19 bp, Mus musculus
  siRNA target sequence for Mynn (NM_030557.1,1400-1418).
ctctcttatcactcattct

SEQ ID NO: 537835 - DNA, 19 bp, Mus musculus
  siRNA target sequence for Mynn (NM_030557.1,1440-1458).
ccatacatatgtggtattt

SEQ ID NO: 537836 - DNA, 19 bp, Mus musculus
  siRNA target sequence for Mynn (NM_030557.1,1478-1496).
ctcaggagagctcaacaaa

SEQ ID NO: 537837 - DNA, 19 bp, Mus musculus
  siRNA target sequence for Mynn (NM_030557.1,1515-1533).
ggagaacgaccatttatct

SEQ ID NO: 537838 - DNA, 19 bp, Mus musculus
  siRNA target sequence for Mynn (NM_030557.1,1593-1611).
gtccattctggtactgata

SEQ ID NO: 537839 - DNA, 19 bp, Mus musculus
  siRNA target sequence for Mynn (NM_030557.1,1595-1613).
ccattctggtactgataaa

SEQ ID NO: 537840 - DNA, 19 bp, Mus musculus
  siRNA target sequence for Mynn (NM_030557.1,1596-1614).
cattctggtactgataaaa

SEQ ID NO: 537841 - DNA, 19 bp, Mus musculus
  siRNA target sequence for Mynn (NM_030557.1,1672-1690).
gtcccttgtcagaaacact

SEQ ID NO: 537842 - DNA, 19 bp, Mus musculus
  siRNA target sequence for Mynn (NM_030557.1,1828-1846).
cggaaccgcagttgatttt

SEQ ID NO: 537843 - DNA, 19 bp, Mus musculus
  siRNA target sequence for Mynn (NM_030557.1,1829-1847).
ggaaccgcagttgattttt

SEQ ID NO: 537844 - DNA, 19 bp, Mus musculus
  siRNA target sequence for Mynn (NM_030557.1,1830-1848).
gaaccgcagttgatttttt

SEQ ID NO: 537845 - DNA, 19 bp, Mus musculus
  siRNA target sequence for Mynn (NM_030557.1,1834-1852).
cgcagttgatttttttaca

SEQ ID NO: 537846 - DNA, 19 bp, Mus musculus
  siRNA target sequence for Myoc (NM_010865.2,493-511).
gagataagtcggctttaga

SEQ ID NO: 537847 - DNA, 19 bp, Mus musculus
  siRNA target sequence for Myoc (NM_010865.2,679-697).
cgttggccttccaggaatt

SEQ ID NO: 537848 - DNA, 19 bp, Mus musculus
  siRNA target sequence for Myoc (NM_010865.2,755-773).
ccgacccaggagcaaagaa

SEQ ID NO: 537849 - DNA, 19 bp, Mus musculus
  siRNA target sequence for Myoc (NM_010865.2,1516-1534).
cctgggacaacttcaacat

SEQ ID NO: 537850 - DNA, 19 bp, Mus musculus
  siRNA target sequence for Myoz3 (NM_133363.1,674-692).
gacccccgtgccatttgga

SEQ ID NO: 537851 - DNA, 19 bp, Mus musculus
  siRNA target sequence for Myoz3 (NM_133363.1,771-789).
cgcctcagacccaatttca

SEQ ID NO: 537852 - DNA, 19 bp, Mus musculus
  siRNA target sequence for Myoz3 (NM_133363.1,774-792).
ctcagacccaatttcaaca

SEQ ID NO: 537853 - DNA, 19 bp, Mus musculus
  siRNA target sequence for Nedd4 (NM_010890.2,629-647).
cagcgtgcagacaaaaact

SEQ ID NO: 537854 - DNA, 19 bp, Mus musculus
  siRNA target sequence for Nedd4 (NM_010890.2,631-649).
gcgtgcagacaaaaactat

SEQ ID NO: 537855 - DNA, 19 bp, Mus musculus
  siRNA target sequence for Nedd4 (NM_010890.2,709-727).
gacaccgcattcttttcga

SEQ ID NO: 537856 - DNA, 19 bp, Mus musculus
  siRNA target sequence for Nedd4 (NM_010890.2,744-762).
cgtttgacaagagatgatt

SEQ ID NO: 537857 - DNA, 19 bp, Mus musculus
  siRNA target sequence for Nedd4 (NM_010890.2,749-767).
gacaagagatgatttccta

SEQ ID NO: 537858 - DNA, 19 bp, Mus musculus
  siRNA target sequence for Nedd4 (NM_010890.2,862-880).
gtcacaaatcaagagttaa

SEQ ID NO: 537859 - DNA, 19 bp, Mus musculus
  siRNA target sequence for Nedd4 (NM_010890.2,890-908).
gagattaaaaatgacttat

SEQ ID NO: 537860 - DNA, 19 bp, Mus musculus
  siRNA target sequence for Nedd4 (NM_010890.2,987-1005).
ccagatgctgccactcatt

SEQ ID NO: 537861 - DNA, 19 bp, Mus musculus
  siRNA target sequence for Nedd4 (NM_010890.2,1068-1086).
ggaaggacctactacgtaa

SEQ ID NO: 537862 - DNA, 19 bp, Mus musculus
  siRNA target sequence for Nedd4 (NM_010890.2,1069-1087).
gaaggacctactacgtaaa

SEQ ID NO: 537863 - DNA, 19 bp, Mus musculus
  siRNA target sequence for Nedd4 (NM_010890.2,1073-1091).
gacctactacgtaaaccat

SEQ ID NO: 537864 - DNA, 19 bp, Mus musculus
  siRNA target sequence for Nedd4 (NM_010890.2,1079-1097).
ctacgtaaaccatgaatct

SEQ ID NO: 537865 - DNA, 19 bp, Mus musculus
  siRNA target sequence for Nedd4 (NM_010890.2,1232-1250).
ccgggagtcccctgagaat

SEQ ID NO: 537866 - DNA, 19 bp, Mus musculus
  siRNA target sequence for Nedd4 (NM_010890.2,1233-1251).
cgggagtcccctgagaatt

SEQ ID NO: 537867 - DNA, 19 bp, Mus musculus
  siRNA target sequence for Nedd4 (NM_010890.2,1269-1287).
gatgaaaacaccgagtata

SEQ ID NO: 537868 - DNA, 19 bp, Mus musculus
  siRNA target sequence for Nedd4 (NM_010890.2,1309-1327).
ctccatcgggtcacattga

SEQ ID NO: 537869 - DNA, 19 bp, Mus musculus
  siRNA target sequence for Nedd4 (NM_010890.2,1397-1415).
gccggttaccagctcaaat

SEQ ID NO: 537870 - DNA, 19 bp, Mus musculus
  siRNA target sequence for Nedd4 (NM_010890.2,1399-1417).
cggttaccagctcaaatca

SEQ ID NO: 537871 - DNA, 19 bp, Mus musculus
  siRNA target sequence for Nedd4 (NM_010890.2,1401-1419).
gttaccagctcaaatcatt

SEQ ID NO: 537872 - DNA, 19 bp, Mus musculus
  siRNA target sequence for Nedd4 (NM_010890.2,1435-1453).
gcttgcagacctgtatctt

SEQ ID NO: 537873 - DNA, 19 bp, Mus musculus
  siRNA target sequence for Nedd4 (NM_010890.2,1436-1454).
cttgcagacctgtatcttt

SEQ ID NO: 537874 - DNA, 19 bp, Mus musculus
  siRNA target sequence for Nedd4 (NM_010890.2,1465-1483).
ctacacttcctgtgctttt

SEQ ID NO: 537875 - DNA, 19 bp, Mus musculus
  siRNA target sequence for Nedd4 (NM_010890.2,1476-1494).
gtgcttttgcctacttcat

SEQ ID NO: 537876 - DNA, 19 bp, Mus musculus
  siRNA target sequence for Nedd4 (NM_010890.2,1532-1550).
cagaggaagatcatactat

SEQ ID NO: 537877 - DNA, 19 bp, Mus musculus
  siRNA target sequence for Nedd4 (NM_010890.2,1534-1552).
gaggaagatcatactatgt

SEQ ID NO: 537878 - DNA, 19 bp, Mus musculus
  siRNA target sequence for Nedd4 (NM_010890.2,1598-1616).
ggatgatccaagatcgaaa

SEQ ID NO: 537879 - DNA, 19 bp, Mus musculus
  siRNA target sequence for Nedd4 (NM_010890.2,1599-1617).
gatgatccaagatcgaaaa

SEQ ID NO: 537880 - DNA, 19 bp, Mus musculus
  siRNA target sequence for Nedd4 (NM_010890.2,1701-1719).
gggcgagtcttcttcataa

SEQ ID NO: 537881 - DNA, 19 bp, Mus musculus
  siRNA target sequence for Nedd4 (NM_010890.2,1702-1720).
ggcgagtcttcttcataaa

SEQ ID NO: 537882 - DNA, 19 bp, Mus musculus
  siRNA target sequence for Nedd4 (NM_010890.2,1760-1778).
gcagaacgtggcaatcact

SEQ ID NO: 537883 - DNA, 19 bp, Mus musculus
  siRNA target sequence for Nedd4 (NM_010890.2,1791-1809).
ccctactccagagattaca

SEQ ID NO: 537884 - DNA, 19 bp, Mus musculus
  siRNA target sequence for Nedd4 (NM_010890.2,1905-1923).
gattcttaccggaggatta

SEQ ID NO: 537885 - DNA, 19 bp, Mus musculus
  siRNA target sequence for Nedd4 (NM_010890.2,2050-2068).
cttactacggcctgtttga

SEQ ID NO: 537886 - DNA, 19 bp, Mus musculus
  siRNA target sequence for Nedd4 (NM_010890.2,2054-2072).
ctacggcctgtttgaatat

SEQ ID NO: 537887 - DNA, 19 bp, Mus musculus
  siRNA target sequence for Nedd4 (NM_010890.2,2057-2075).
cggcctgtttgaatattct

SEQ ID NO: 537888 - DNA, 19 bp, Mus musculus
  siRNA target sequence for Nedd4 (NM_010890.2,2090-2108).
caccctacagataaatcct

SEQ ID NO: 537889 - DNA, 19 bp, Mus musculus
  siRNA target sequence for Nedd4 (NM_010890.2,2092-2110).
ccctacagataaatcctaa

SEQ ID NO: 537890 - DNA, 19 bp, Mus musculus
  siRNA target sequence for Nedd4 (NM_010890.2,2106-2124).
cctaactcgggcttgtgta

SEQ ID NO: 537891 - DNA, 19 bp, Mus musculus
  siRNA target sequence for Nedd4 (NM_010890.2,2107-2125).
ctaactcgggcttgtgtaa

SEQ ID NO: 537892 - DNA, 19 bp, Mus musculus
  siRNA target sequence for Nedd4 (NM_010890.2,2111-2129).
ctcgggcttgtgtaatgaa

SEQ ID NO: 537893 - DNA, 19 bp, Mus musculus
  siRNA target sequence for Nedd4 (NM_010890.2,2116-2134).
gcttgtgtaatgaagatca

SEQ ID NO: 537894 - DNA, 19 bp, Mus musculus
  siRNA target sequence for Nedd4 (NM_010890.2,2130-2148).
gatcacctctcatacttca

SEQ ID NO: 537895 - DNA, 19 bp, Mus musculus
  siRNA target sequence for Nedd4 (NM_010890.2,2133-2151).
cacctctcatacttcaagt

SEQ ID NO: 537896 - DNA, 19 bp, Mus musculus
  siRNA target sequence for Nedd4 (NM_010890.2,2138-2156).
ctcatacttcaagttcatt

SEQ ID NO: 537897 - DNA, 19 bp, Mus musculus
  siRNA target sequence for Nedd4 (NM_010890.2,2215-2233).
gtccgttttacaagatgat

SEQ ID NO: 537898 - DNA, 19 bp, Mus musculus
  siRNA target sequence for Nedd4 (NM_010890.2,2265-2283).
gagtccgtggatagtgaat

SEQ ID NO: 537899 - DNA, 19 bp, Mus musculus
  siRNA target sequence for Nedd4 (NM_010890.2,2267-2285).
gtccgtggatagtgaatat

SEQ ID NO: 537900 - DNA, 19 bp, Mus musculus
  siRNA target sequence for Nedd4 (NM_010890.2,2273-2291).
ggatagtgaatattacagt

SEQ ID NO: 537901 - DNA, 19 bp, Mus musculus
  siRNA target sequence for Nedd4 (NM_010890.2,2274-2292).
gatagtgaatattacagtt

SEQ ID NO: 537902 - DNA, 19 bp, Mus musculus
  siRNA target sequence for Nedd4 (NM_010890.2,2288-2306).
cagttctctgcgatggatt

SEQ ID NO: 537903 - DNA, 19 bp, Mus musculus
  siRNA target sequence for Nedd4 (NM_010890.2,2293-2311).
ctctgcgatggattcttga

SEQ ID NO: 537904 - DNA, 19 bp, Mus musculus
  siRNA target sequence for Nedd4 (NM_010890.2,2295-2313).
ctgcgatggattcttgaaa

SEQ ID NO: 537905 - DNA, 19 bp, Mus musculus
  siRNA target sequence for Nedd4 (NM_010890.2,2297-2315).
gcgatggattcttgaaaat

SEQ ID NO: 537906 - DNA, 19 bp, Mus musculus
  siRNA target sequence for Nedd4 (NM_010890.2,2323-2341).
cggagctggacctgagatt

SEQ ID NO: 537907 - DNA, 19 bp, Mus musculus
  siRNA target sequence for Nedd4 (NM_010890.2,2371-2389).
cacatcagcacgaactgaa

SEQ ID NO: 537908 - DNA, 19 bp, Mus musculus
  siRNA target sequence for Nedd4 (NM_010890.2,2395-2413).
gaggatcagagattgttgt

SEQ ID NO: 537909 - DNA, 19 bp, Mus musculus
  siRNA target sequence for Nedd4 (NM_010890.2,2433-2451).
gagtatatctaccttgtaa

SEQ ID NO: 537910 - DNA, 19 bp, Mus musculus
  siRNA target sequence for Nedd4 (NM_010890.2,2435-2453).
gtatatctaccttgtaata

SEQ ID NO: 537911 - DNA, 19 bp, Mus musculus
  siRNA target sequence for Nedd4 (NM_010890.2,2603-2621).
ctggcgggaacacacaaaa

SEQ ID NO: 537912 - DNA, 19 bp, Mus musculus
  siRNA target sequence for Nedd4 (NM_010890.2,2605-2623).
ggcgggaacacacaaaata

SEQ ID NO: 537913 - DNA, 19 bp, Mus musculus
  siRNA target sequence for Nedd4 (NM_010890.2,2607-2625).
cgggaacacacaaaataca

SEQ ID NO: 537914 - DNA, 19 bp, Mus musculus
  siRNA target sequence for Nedd4 (NM_010890.2,2608-2626).
gggaacacacaaaatacaa

SEQ ID NO: 537915 - DNA, 19 bp, Mus musculus
  siRNA target sequence for Nedd4 (NM_010890.2,2701-2719).
gaatacgcttacttcagtt

SEQ ID NO: 537916 - DNA, 19 bp, Mus musculus
  siRNA target sequence for Nedd4 (NM_010890.2,2773-2791).
cgaatggaccacaatcctt

SEQ ID NO: 537917 - DNA, 19 bp, Mus musculus
  siRNA target sequence for Nedd4 (NM_010890.2,2806-2824).
ggggcacccctgataagct

SEQ ID NO: 537918 - DNA, 19 bp, Mus musculus
  siRNA target sequence for Nedd4 (NM_010890.2,2856-2874).
gacctgccaccctacgaat

SEQ ID NO: 537919 - DNA, 19 bp, Mus musculus
  siRNA target sequence for Nedd4 (NM_010890.2,2861-2879).
gccaccctacgaatccttt

SEQ ID NO: 537920 - DNA, 19 bp, Mus musculus
  siRNA target sequence for Nedd4 (NM_010890.2,2882-2900).
cgaactctgggataaactt

SEQ ID NO: 537921 - DNA, 19 bp, Mus musculus
  siRNA target sequence for Nedd8 (NM_008683.1,228-246).
cagctgattacaagattct

SEQ ID NO: 537922 - DNA, 19 bp, Mus musculus
  siRNA target sequence for Nedd8 (NM_008683.1,265-283).
cctggtgttggctcttaga

SEQ ID NO: 537923 - DNA, 19 bp, Mus musculus
  siRNA target sequence for Nfatc2ip (NM_010900.1,399-417).
caacctcattccagataat

SEQ ID NO: 537924 - DNA, 19 bp, Mus musculus
  siRNA target sequence for Nfatc2ip (NM_010900.1,781-799).
cagagctctcgactcttta

SEQ ID NO: 537925 - DNA, 19 bp, Mus musculus
  siRNA target sequence for Nfatc2ip (NM_010900.1,783-801).
gagctctcgactctttaca

SEQ ID NO: 537926 - DNA, 19 bp, Mus musculus
  siRNA target sequence for Nfatc2ip (NM_010900.1,785-803).
gctctcgactctttacact

SEQ ID NO: 537927 - DNA, 19 bp, Mus musculus
  siRNA target sequence for Nfatc2ip (NM_010900.1,791-809).
gactctttacactcaagat

SEQ ID NO: 537928 - DNA, 19 bp, Mus musculus
  siRNA target sequence for Nfatc2ip (NM_010900.1,849-867).
gtcggagccccttcagaat

SEQ ID NO: 537929 - DNA, 19 bp, Mus musculus
  siRNA target sequence for Nfatc2ip (NM_010900.1,873-891).
ggatcacatggccaatcat

SEQ ID NO: 537930 - DNA, 19 bp, Mus musculus
  siRNA target sequence for Nfatc2ip (NM_010900.1,900-918).
gtctccaaacaggattctt

SEQ ID NO: 537931 - DNA, 19 bp, Mus musculus
  siRNA target sequence for Nfatc2ip (NM_010900.1,956-974).
cccctagtaccctaaagct

SEQ ID NO: 537932 - DNA, 19 bp, Mus musculus
  siRNA target sequence for Nfatc2ip (NM_010900.1,1100-1118).
ctcctgattctcctcttaa

SEQ ID NO: 537933 - DNA, 19 bp, Mus musculus
  siRNA target sequence for Ngfr (NM_033217.1,203-221).
ccctgcctggacagtgtta

SEQ ID NO: 537934 - DNA, 19 bp, Mus musculus
  siRNA target sequence for Ngfr (NM_033217.1,207-225).
gcctggacagtgttacgtt

SEQ ID NO: 537935 - DNA, 19 bp, Mus musculus
  siRNA target sequence for Ngfr (NM_033217.1,581-599).
cctggccgatggatcacaa

SEQ ID NO: 537936 - DNA, 19 bp, Mus musculus
  siRNA target sequence for Ngfr (NM_033217.1,1001-1019).
gatggcaacctctacagta

SEQ ID NO: 537937 - DNA, 19 bp, Mus musculus
  siRNA target sequence for Ngfr (NM_033217.1,1098-1116).
gctaccagccggagcatat

SEQ ID NO: 537938 - DNA, 19 bp, Mus musculus
  siRNA target sequence for Ngfr (NM_033217.1,1099-1117).
ctaccagccggagcatata

SEQ ID NO: 537939 - DNA, 19 bp, Mus musculus
  siRNA target sequence for Ngfr (NM_033217.1,1103-1121).
cagccggagcatatagact

SEQ ID NO: 537940 - DNA, 19 bp, Mus musculus
  siRNA target sequence for Ngfr (NM_033217.1,1186-1204).
gacgctcgatgccctttta

SEQ ID NO: 537941 - DNA, 19 bp, Mus musculus
  siRNA target sequence for Nid1 (NM_010917.1,18-36).
gacgcgagcggctgtagtt

SEQ ID NO: 537942 - DNA, 19 bp, Mus musculus
  siRNA target sequence for Nid1 (NM_010917.1,191-209).
cggagaactgagcttctat

SEQ ID NO: 537943 - DNA, 19 bp, Mus musculus
  siRNA target sequence for Nid1 (NM_010917.1,230-248).
ggtctatgtcaccacaaat

SEQ ID NO: 537944 - DNA, 19 bp, Mus musculus
  siRNA target sequence for Nid1 (NM_010917.1,358-376).
gcctggggaatgtgtatta

SEQ ID NO: 537945 - DNA, 19 bp, Mus musculus
  siRNA target sequence for Nid1 (NM_010917.1,359-377).
cctggggaatgtgtattat

SEQ ID NO: 537946 - DNA, 19 bp, Mus musculus
  siRNA target sequence for Nid1 (NM_010917.1,362-380).
ggggaatgtgtattatcga

SEQ ID NO: 537947 - DNA, 19 bp, Mus musculus
  siRNA target sequence for Nid1 (NM_010917.1,371-389).
gtattatcgagaagactta

SEQ ID NO: 537948 - DNA, 19 bp, Mus musculus
  siRNA target sequence for Nid1 (NM_010917.1,386-404).
cttatccccgttcattatt

SEQ ID NO: 537949 - DNA, 19 bp, Mus musculus
  siRNA target sequence for Nid1 (NM_010917.1,391-409).
ccccgttcattattcagat

SEQ ID NO: 537950 - DNA, 19 bp, Mus musculus
  siRNA target sequence for Nid1 (NM_010917.1,681-699).
ggtctagtaggatttctat

SEQ ID NO: 537951 - DNA, 19 bp, Mus musculus
  siRNA target sequence for Nid1 (NM_010917.1,706-724).
gcaacggagcctataacat

SEQ ID NO: 537952 - DNA, 19 bp, Mus musculus
  siRNA target sequence for Nid1 (NM_010917.1,707-725).
caacggagcctataacata

SEQ ID NO: 537953 - DNA, 19 bp, Mus musculus
  siRNA target sequence for Nid1 (NM_010917.1,710-728).
cggagcctataacatattt

SEQ ID NO: 537954 - DNA, 19 bp, Mus musculus
  siRNA target sequence for Nid1 (NM_010917.1,730-748).
ccaatgacagagaatcaat

SEQ ID NO: 537955 - DNA, 19 bp, Mus musculus
  siRNA target sequence for Nid1 (NM_010917.1,863-881).
cgacgatggagcagactat

SEQ ID NO: 537956 - DNA, 19 bp, Mus musculus
  siRNA target sequence for Nid1 (NM_010917.1,971-989).
ccctgacccacacaatgta

SEQ ID NO: 537957 - DNA, 19 bp, Mus musculus
  siRNA target sequence for Nid1 (NM_010917.1,1166-1184).
gcagacttgtgccaacaat

SEQ ID NO: 537958 - DNA, 19 bp, Mus musculus
  siRNA target sequence for Nid1 (NM_010917.1,1167-1185).
cagacttgtgccaacaata

SEQ ID NO: 537959 - DNA, 19 bp, Mus musculus
  siRNA target sequence for Nid1 (NM_010917.1,1169-1187).
gacttgtgccaacaataga

SEQ ID NO: 537960 - DNA, 19 bp, Mus musculus
  siRNA target sequence for Nid1 (NM_010917.1,1171-1189).
cttgtgccaacaatagaca

SEQ ID NO: 537961 - DNA, 19 bp, Mus musculus
  siRNA target sequence for Nid1 (NM_010917.1,1481-1499).
catcatcggatggatgttt

SEQ ID NO: 537962 - DNA, 19 bp, Mus musculus
  siRNA target sequence for Nid1 (NM_010917.1,1508-1526).
gcaggatgggttcaagaat

SEQ ID NO: 537963 - DNA, 19 bp, Mus musculus
  siRNA target sequence for Nid1 (NM_010917.1,1610-1628).
gcagttcagcggtattgat

SEQ ID NO: 537964 - DNA, 19 bp, Mus musculus
  siRNA target sequence for Nid1 (NM_010917.1,1690-1708).
gagcctcggtgcacattga

SEQ ID NO: 537965 - DNA, 19 bp, Mus musculus
  siRNA target sequence for Nid1 (NM_010917.1,1915-1933).
gcgtgtttgtcctgtacaa

SEQ ID NO: 537966 - DNA, 19 bp, Mus musculus
  siRNA target sequence for Nid1 (NM_010917.1,2117-2135).
cgggcagacttgctatgat

SEQ ID NO: 537967 - DNA, 19 bp, Mus musculus
  siRNA target sequence for Nid1 (NM_010917.1,2118-2136).
gggcagacttgctatgata

SEQ ID NO: 537968 - DNA, 19 bp, Mus musculus
  siRNA target sequence for Nid1 (NM_010917.1,2119-2137).
ggcagacttgctatgatat

SEQ ID NO: 537969 - DNA, 19 bp, Mus musculus
  siRNA target sequence for Nid1 (NM_010917.1,2120-2138).
gcagacttgctatgatatt

SEQ ID NO: 537970 - DNA, 19 bp, Mus musculus
  siRNA target sequence for Nid1 (NM_010917.1,2123-2141).
gacttgctatgatattgat

SEQ ID NO: 537971 - DNA, 19 bp, Mus musculus
  siRNA target sequence for Nid1 (NM_010917.1,2268-2286).
gaccaacgtcccatcaact

SEQ ID NO: 537972 - DNA, 19 bp, Mus musculus
  siRNA target sequence for Nid1 (NM_010917.1,2271-2289).
caacgtcccatcaactact

SEQ ID NO: 537973 - DNA, 19 bp, Mus musculus
  siRNA target sequence for Nid1 (NM_010917.1,2277-2295).
cccatcaactactgtgaaa

SEQ ID NO: 537974 - DNA, 19 bp, Mus musculus
  siRNA target sequence for Nid1 (NM_010917.1,2324-2342).
gcgagcccagtgcatctat

SEQ ID NO: 537975 - DNA, 19 bp, Mus musculus
  siRNA target sequence for Nid1 (NM_010917.1,2325-2343).
cgagcccagtgcatctata

SEQ ID NO: 537976 - DNA, 19 bp, Mus musculus
  siRNA target sequence for Nid1 (NM_010917.1,2326-2344).
gagcccagtgcatctatat

SEQ ID NO: 537977 - DNA, 19 bp, Mus musculus
  siRNA target sequence for Nid1 (NM_010917.1,2526-2544).
cccggagaggtgagcaaaa

SEQ ID NO: 537978 - DNA, 19 bp, Mus musculus
  siRNA target sequence for Nid1 (NM_010917.1,2967-2985).
gtggacaaggtggtttact

SEQ ID NO: 537979 - DNA, 19 bp, Mus musculus
  siRNA target sequence for Nid1 (NM_010917.1,3096-3114).
cttggtcgaaccatcttct

SEQ ID NO: 537980 - DNA, 19 bp, Mus musculus
  siRNA target sequence for Nid1 (NM_010917.1,3122-3140).
ctctcagttggatcgaata

SEQ ID NO: 537981 - DNA, 19 bp, Mus musculus
  siRNA target sequence for Nid1 (NM_010917.1,3124-3142).
ctcagttggatcgaataga

SEQ ID NO: 537982 - DNA, 19 bp, Mus musculus
  siRNA target sequence for Nid1 (NM_010917.1,3128-3146).
gttggatcgaatagaagtt

SEQ ID NO: 537983 - DNA, 19 bp, Mus musculus
  siRNA target sequence for Nid1 (NM_010917.1,3168-3186).
cgccgagtgctgtttgaca

SEQ ID NO: 537984 - DNA, 19 bp, Mus musculus
  siRNA target sequence for Nid1 (NM_010917.1,3222-3240).
cccgtaagagggaaccttt

SEQ ID NO: 537985 - DNA, 19 bp, Mus musculus
  siRNA target sequence for Nid1 (NM_010917.1,3223-3241).
ccgtaagagggaaccttta

SEQ ID NO: 537986 - DNA, 19 bp, Mus musculus
  siRNA target sequence for Nid1 (NM_010917.1,3347-3365).
gacctttgatgcattctca

SEQ ID NO: 537987 - DNA, 19 bp, Mus musculus
  siRNA target sequence for Nid1 (NM_010917.1,3447-3465).
gaagggctccagtatcctt

SEQ ID NO: 537988 - DNA, 19 bp, Mus musculus
  siRNA target sequence for Nid1 (NM_010917.1,3528-3546).
gccatggaccttgctatat

SEQ ID NO: 537989 - DNA, 19 bp, Mus musculus
  siRNA target sequence for Nid1 (NM_010917.1,3533-3551).
ggaccttgctatatccaaa

SEQ ID NO: 537990 - DNA, 19 bp, Mus musculus
  siRNA target sequence for Nid1 (NM_010917.1,3547-3565).
ccaaagagatggatacctt

SEQ ID NO: 537991 - DNA, 19 bp, Mus musculus
  siRNA target sequence for Nid1 (NM_010917.1,3621-3639).
ccccaaggccacaattact

SEQ ID NO: 537992 - DNA, 19 bp, Mus musculus
  siRNA target sequence for Nid2 (NM_008695.1,141-159).
ccgacgagctctttcctta

SEQ ID NO: 537993 - DNA, 19 bp, Mus musculus
  siRNA target sequence for Nid2 (NM_008695.1,307-325).
ccccagggagactcaatat

SEQ ID NO: 537994 - DNA, 19 bp, Mus musculus
  siRNA target sequence for Nid2 (NM_008695.1,309-327).
ccagggagactcaatatgt

SEQ ID NO: 537995 - DNA, 19 bp, Mus musculus
  siRNA target sequence for Nid2 (NM_008695.1,312-330).
gggagactcaatatgtaga

SEQ ID NO: 537996 - DNA, 19 bp, Mus musculus
  siRNA target sequence for Nid2 (NM_008695.1,573-591).
caggagagctgaacacttt

SEQ ID NO: 537997 - DNA, 19 bp, Mus musculus
  siRNA target sequence for Nid2 (NM_008695.1,599-617).
gttctggcatccgatgaat

SEQ ID NO: 537998 - DNA, 19 bp, Mus musculus
  siRNA target sequence for Nid2 (NM_008695.1,604-622).
ggcatccgatgaatctgat

SEQ ID NO: 537999 - DNA, 19 bp, Mus musculus
  siRNA target sequence for Nid2 (NM_008695.1,605-623).
gcatccgatgaatctgata

SEQ ID NO: 538000 - DNA, 19 bp, Mus musculus
  siRNA target sequence for Nid2 (NM_008695.1,609-627).
ccgatgaatctgataccta

SEQ ID NO: 538001 - DNA, 19 bp, Mus musculus
  siRNA target sequence for Nid2 (NM_008695.1,645-663).
ctgccaatggccttcagtt

SEQ ID NO: 538002 - DNA, 19 bp, Mus musculus
  siRNA target sequence for Nid2 (NM_008695.1,678-696).
ccaaagagtcctacaatgt

SEQ ID NO: 538003 - DNA, 19 bp, Mus musculus
  siRNA target sequence for Nid2 (NM_008695.1,969-987).
gctacaccgaggacagttt

SEQ ID NO: 538004 - DNA, 19 bp, Mus musculus
  siRNA target sequence for Nid2 (NM_008695.1,973-991).
caccgaggacagtttccat

SEQ ID NO: 538005 - DNA, 19 bp, Mus musculus
  siRNA target sequence for Nid2 (NM_008695.1,988-1006).
ccattactacgatgagaat

SEQ ID NO: 538006 - DNA, 19 bp, Mus musculus
  siRNA target sequence for Nid2 (NM_008695.1,1056-1074).
gccacagcagaattgatgt

SEQ ID NO: 538007 - DNA, 19 bp, Mus musculus
  siRNA target sequence for Nid2 (NM_008695.1,1206-1224).
ctttggaccctcaaaccaa

SEQ ID NO: 538008 - DNA, 19 bp, Mus musculus
  siRNA target sequence for Nid2 (NM_008695.1,1535-1553).
gatcaagtcttcacgtata

SEQ ID NO: 538009 - DNA, 19 bp, Mus musculus
  siRNA target sequence for Nid2 (NM_008695.1,1643-1661).
cactgccagtcgaggtttt

SEQ ID NO: 538010 - DNA, 19 bp, Mus musculus
  siRNA target sequence for Nid2 (NM_008695.1,1729-1747).
cctccgagtgggtcacatt

SEQ ID NO: 538011 - DNA, 19 bp, Mus musculus
  siRNA target sequence for Nid2 (NM_008695.1,1864-1882).
gcccattggaggtctgttt

SEQ ID NO: 538012 - DNA, 19 bp, Mus musculus
  siRNA target sequence for Nid2 (NM_008695.1,1930-1948).
cctcacaggtgctaccttt

SEQ ID NO: 538013 - DNA, 19 bp, Mus musculus
  siRNA target sequence for Nid2 (NM_008695.1,2070-2088).
ccttcatcccagcgaattt

SEQ ID NO: 538014 - DNA, 19 bp, Mus musculus
  siRNA target sequence for Nid2 (NM_008695.1,2074-2092).
catcccagcgaatttcaca

SEQ ID NO: 538015 - DNA, 19 bp, Mus musculus
  siRNA target sequence for Nid2 (NM_008695.1,2103-2121).
ctccgtacaaagagtttta

SEQ ID NO: 538016 - DNA, 19 bp, Mus musculus
  siRNA target sequence for Nid2 (NM_008695.1,2107-2125).
gtacaaagagttttatcat

SEQ ID NO: 538017 - DNA, 19 bp, Mus musculus
  siRNA target sequence for Nid2 (NM_008695.1,2445-2463).
cgggaacaggtgtagacta

SEQ ID NO: 538018 - DNA, 19 bp, Mus musculus
  siRNA target sequence for Nid2 (NM_008695.1,2879-2897).
cgaggggacgggtttcact

SEQ ID NO: 538019 - DNA, 19 bp, Mus musculus
  siRNA target sequence for Nid2 (NM_008695.1,2906-2924).
gacacggttccggaagatt

SEQ ID NO: 538020 - DNA, 19 bp, Mus musculus
  siRNA target sequence for Nid2 (NM_008695.1,2910-2928).
cggttccggaagattccat

SEQ ID NO: 538021 - DNA, 19 bp, Mus musculus
  siRNA target sequence for Nid2 (NM_008695.1,3228-3246).
ccagggatgaccagtatgt

SEQ ID NO: 538022 - DNA, 19 bp, Mus musculus
  siRNA target sequence for Nid2 (NM_008695.1,3652-3670).
cgaacccgagaccatcatt

SEQ ID NO: 538023 - DNA, 19 bp, Mus musculus
  siRNA target sequence for Nid2 (NM_008695.1,3656-3674).
cccgagaccatcattacct

SEQ ID NO: 538024 - DNA, 19 bp, Mus musculus
  siRNA target sequence for Nid2 (NM_008695.1,3706-3724).
cgaccacttccgtagaaca

SEQ ID NO: 538025 - DNA, 19 bp, Mus musculus
  siRNA target sequence for Nid2 (NM_008695.1,3707-3725).
gaccacttccgtagaacaa

SEQ ID NO: 538026 - DNA, 19 bp, Mus musculus
  siRNA target sequence for Nid2 (NM_008695.1,3710-3728).
cacttccgtagaacaatgt

SEQ ID NO: 538027 - DNA, 19 bp, Mus musculus
  siRNA target sequence for Nid2 (NM_008695.1,3737-3755).
gatagtggcctggataaga

SEQ ID NO: 538028 - DNA, 19 bp, Mus musculus
  siRNA target sequence for Nid2 (NM_008695.1,3839-3857).
ccaatccgaggcaacttgt

SEQ ID NO: 538029 - DNA, 19 bp, Mus musculus
  siRNA target sequence for Nid2 (NM_008695.1,3840-3858).
caatccgaggcaacttgta

SEQ ID NO: 538030 - DNA, 19 bp, Mus musculus
  siRNA target sequence for Nid2 (NM_008695.1,3884-3902).
cctaaaattgaaacatcat

SEQ ID NO: 538031 - DNA, 19 bp, Mus musculus
  siRNA target sequence for Nid2 (NM_008695.1,3925-3943).
gattctgatcaacaaagat

SEQ ID NO: 538032 - DNA, 19 bp, Mus musculus
  siRNA target sequence for Nid2 (NM_008695.1,3931-3949).
gatcaacaaagatattgga

SEQ ID NO: 538033 - DNA, 19 bp, Mus musculus
  siRNA target sequence for Nid2 (NM_008695.1,4046-4064).
ggacgacgtgtcatccaaa

SEQ ID NO: 538034 - DNA, 19 bp, Mus musculus
  siRNA target sequence for Nid2 (NM_008695.1,4047-4065).
gacgacgtgtcatccaaaa

SEQ ID NO: 538035 - DNA, 19 bp, Mus musculus
  siRNA target sequence for Nid2 (NM_008695.1,4125-4143).
ggcggagggatggtgttat

SEQ ID NO: 538036 - DNA, 19 bp, Mus musculus
  siRNA target sequence for Nid2 (NM_008695.1,4126-4144).
gcggagggatggtgttata

SEQ ID NO: 538037 - DNA, 19 bp, Mus musculus
  siRNA target sequence for Nid2 (NM_008695.1,4136-4154).
ggtgttatatcagtgaata

SEQ ID NO: 538038 - DNA, 19 bp, Mus musculus
  siRNA target sequence for Nid2 (NM_008695.1,4164-4182).
gccagtttactgatgagtt

SEQ ID NO: 538039 - DNA, 19 bp, Mus musculus
  siRNA target sequence for Notch1 (NM_008714.2,131-149).
gccgcaagaggcttgagat

SEQ ID NO: 538040 - DNA, 19 bp, Mus musculus
  siRNA target sequence for Notch1 (NM_008714.2,269-287).
ctcagcacaccgtgtaaga

SEQ ID NO: 538041 - DNA, 19 bp, Mus musculus
  siRNA target sequence for Notch1 (NM_008714.2,271-289).
cagcacaccgtgtaagaat

SEQ ID NO: 538042 - DNA, 19 bp, Mus musculus
  siRNA target sequence for Notch1 (NM_008714.2,473-491).
gggtggtcaggaaaatcat

SEQ ID NO: 538043 - DNA, 19 bp, Mus musculus
  siRNA target sequence for Notch1 (NM_008714.2,475-493).
gtggtcaggaaaatcatgt

SEQ ID NO: 538044 - DNA, 19 bp, Mus musculus
  siRNA target sequence for Notch1 (NM_008714.2,549-567).
cctttgagtcttcatacat

SEQ ID NO: 538045 - DNA, 19 bp, Mus musculus
  siRNA target sequence for Notch1 (NM_008714.2,600-618).
cctgcaggcaagatgttaa

SEQ ID NO: 538046 - DNA, 19 bp, Mus musculus
  siRNA target sequence for Notch1 (NM_008714.2,601-619).
ctgcaggcaagatgttaat

SEQ ID NO: 538047 - DNA, 19 bp, Mus musculus
  siRNA target sequence for Notch1 (NM_008714.2,657-675).
gcacctgccacaatgagat

SEQ ID NO: 538048 - DNA, 19 bp, Mus musculus
  siRNA target sequence for Notch1 (NM_008714.2,896-914).
gtggacggcgtgaatacct

SEQ ID NO: 538049 - DNA, 19 bp, Mus musculus
  siRNA target sequence for Notch1 (NM_008714.2,901-919).
cggcgtgaatacctacaat

SEQ ID NO: 538050 - DNA, 19 bp, Mus musculus
  siRNA target sequence for Notch1 (NM_008714.2,1420-1438).
ccgctgtgagattgatgtt

SEQ ID NO: 538051 - DNA, 19 bp, Mus musculus
  siRNA target sequence for Notch1 (NM_008714.2,1452-1470).
ccaacccatgtcagaatga

SEQ ID NO: 538052 - DNA, 19 bp, Mus musculus
  siRNA target sequence for Notch1 (NM_008714.2,1487-1505).
cagattggggagttccaat

SEQ ID NO: 538053 - DNA, 19 bp, Mus musculus
  siRNA target sequence for Notch1 (NM_008714.2,1493-1511).
ggggagttccaatgcatat

SEQ ID NO: 538054 - DNA, 19 bp, Mus musculus
  siRNA target sequence for Notch1 (NM_008714.2,1495-1513).
ggagttccaatgcatatgt

SEQ ID NO: 538055 - DNA, 19 bp, Mus musculus
  siRNA target sequence for Notch1 (NM_008714.2,1496-1514).
gagttccaatgcatatgta

SEQ ID NO: 538056 - DNA, 19 bp, Mus musculus
  siRNA target sequence for Notch1 (NM_008714.2,1518-1536).
caggttatgaaggtgtata

SEQ ID NO: 538057 - DNA, 19 bp, Mus musculus
  siRNA target sequence for Notch1 (NM_008714.2,1526-1544).
gaaggtgtatactgtgaaa

SEQ ID NO: 538058 - DNA, 19 bp, Mus musculus
  siRNA target sequence for Notch1 (NM_008714.2,1532-1550).
gtatactgtgaaatcaaca

SEQ ID NO: 538059 - DNA, 19 bp, Mus musculus
  siRNA target sequence for Notch1 (NM_008714.2,1645-1663).
gcacctgtgccagtatgat

SEQ ID NO: 538060 - DNA, 19 bp, Mus musculus
  siRNA target sequence for Notch1 (NM_008714.2,1712-1730).
gatgggcccaacacctata

SEQ ID NO: 538061 - DNA, 19 bp, Mus musculus
  siRNA target sequence for Notch1 (NM_008714.2,1738-1756).
gtgtacagaaggttacaca

SEQ ID NO: 538062 - DNA, 19 bp, Mus musculus
  siRNA target sequence for Notch1 (NM_008714.2,1796-1814).
gacccctgccactatggtt

SEQ ID NO: 538063 - DNA, 19 bp, Mus musculus
  siRNA target sequence for Notch1 (NM_008714.2,1983-2001).
ggcccaactgtgagatcaa

SEQ ID NO: 538064 - DNA, 19 bp, Mus musculus
  siRNA target sequence for Notch1 (NM_008714.2,2037-2055).
gcacctgtctggacaagat

SEQ ID NO: 538065 - DNA, 19 bp, Mus musculus
  siRNA target sequence for Notch1 (NM_008714.2,2097-2115).
gcatgtgtaacgtcaacat

SEQ ID NO: 538066 - DNA, 19 bp, Mus musculus
  siRNA target sequence for Notch1 (NM_008714.2,2098-2116).
catgtgtaacgtcaacatt

SEQ ID NO: 538067 - DNA, 19 bp, Mus musculus
  siRNA target sequence for Notch1 (NM_008714.2,2228-2246).
gtcaacgagtgcaacagta

SEQ ID NO: 538068 - DNA, 19 bp, Mus musculus
  siRNA target sequence for Notch1 (NM_008714.2,2276-2294).
ggcctcaatgggtacaagt

SEQ ID NO: 538069 - DNA, 19 bp, Mus musculus
  siRNA target sequence for Notch1 (NM_008714.2,2444-2462).
cagaccaacatcaacgaat

SEQ ID NO: 538070 - DNA, 19 bp, Mus musculus
  siRNA target sequence for Notch1 (NM_008714.2,2488-2506).
ggggacctgcattgatgat

SEQ ID NO: 538071 - DNA, 19 bp, Mus musculus
  siRNA target sequence for Notch1 (NM_008714.2,2504-2522).
gatgtcgctggatacaagt

SEQ ID NO: 538072 - DNA, 19 bp, Mus musculus
  siRNA target sequence for Notch1 (NM_008714.2,2624-2642).
gactatgagagtttttcct

SEQ ID NO: 538073 - DNA, 19 bp, Mus musculus
  siRNA target sequence for Notch1 (NM_008714.2,2673-2691).
cctgcgaggttgacatcaa

SEQ ID NO: 538074 - DNA, 19 bp, Mus musculus
  siRNA target sequence for Notch1 (NM_008714.2,2674-2692).
ctgcgaggttgacatcaat

SEQ ID NO: 538075 - DNA, 19 bp, Mus musculus
  siRNA target sequence for Notch1 (NM_008714.2,2815-2833).
ccccaacccgtgtcacaat

SEQ ID NO: 538076 - DNA, 19 bp, Mus musculus
  siRNA target sequence for Notch1 (NM_008714.2,2989-3007).
ctgccccgtgggcttcaat

SEQ ID NO: 538077 - DNA, 19 bp, Mus musculus
  siRNA target sequence for Notch1 (NM_008714.2,3196-3214).
ctatggtacttataagtgt

SEQ ID NO: 538078 - DNA, 19 bp, Mus musculus
  siRNA target sequence for Notch1 (NM_008714.2,3449-3467).
gatgagggagataaacatt

SEQ ID NO: 538079 - DNA, 19 bp, Mus musculus
  siRNA target sequence for Notch1 (NM_008714.2,3599-3617).
ggctaccatgggtctaact

SEQ ID NO: 538080 - DNA, 19 bp, Mus musculus
  siRNA target sequence for Notch1 (NM_008714.2,3663-3681).
ggggtacctgcattgatct

SEQ ID NO: 538081 - DNA, 19 bp, Mus musculus
  siRNA target sequence for Notch1 (NM_008714.2,3730-3748).
ctgtgagatcaatgttgat

SEQ ID NO: 538082 - DNA, 19 bp, Mus musculus
  siRNA target sequence for Notch1 (NM_008714.2,3867-3885).
ggtgtgagggtgatgtcaa

SEQ ID NO: 538083 - DNA, 19 bp, Mus musculus
  siRNA target sequence for Notch1 (NM_008714.2,3868-3886).
gtgtgagggtgatgtcaat

SEQ ID NO: 538084 - DNA, 19 bp, Mus musculus
  siRNA target sequence for Notch1 (NM_008714.2,3928-3946).
ctgtgtgcagcgtgttaat

SEQ ID NO: 538085 - DNA, 19 bp, Mus musculus
  siRNA target sequence for Notch1 (NM_008714.2,3930-3948).
gtgtgcagcgtgttaatga

SEQ ID NO: 538086 - DNA, 19 bp, Mus musculus
  siRNA target sequence for Notch1 (NM_008714.2,4007-4025).
ggctgcaggggcaaacctt

SEQ ID NO: 538087 - DNA, 19 bp, Mus musculus
  siRNA target sequence for Notch1 (NM_008714.2,4296-4314).
catccgagaaccctttcta

SEQ ID NO: 538088 - DNA, 19 bp, Mus musculus
  siRNA target sequence for Notch1 (NM_008714.2,4307-4325).
cctttctaccgctgtctat

SEQ ID NO: 538089 - DNA, 19 bp, Mus musculus
  siRNA target sequence for Notch1 (NM_008714.2,4320-4338).
gtctatgccctgccaaatt

SEQ ID NO: 538090 - DNA, 19 bp, Mus musculus
  siRNA target sequence for Notch1 (NM_008714.2,4467-4485).
gcaacctgcagtgtaataa

SEQ ID NO: 538091 - DNA, 19 bp, Mus musculus
  siRNA target sequence for Notch1 (NM_008714.2,4714-4732).
cgaccagggctgtaacagt

SEQ ID NO: 538092 - DNA, 19 bp, Mus musculus
  siRNA target sequence for Notch1 (NM_008714.2,4725-4743).
gtaacagtgccgaatgtga

SEQ ID NO: 538093 - DNA, 19 bp, Mus musculus
  siRNA target sequence for Notch1 (NM_008714.2,4826-4844).
gaccagctacggaacaact

SEQ ID NO: 538094 - DNA, 19 bp, Mus musculus
  siRNA target sequence for Notch1 (NM_008714.2,4921-4939).
gatgatcttcccgtactat

SEQ ID NO: 538095 - DNA, 19 bp, Mus musculus
  siRNA target sequence for Notch1 (NM_008714.2,5172-5190).
cacttggcagcctcaatat

SEQ ID NO: 538096 - DNA, 19 bp, Mus musculus
  siRNA target sequence for Notch1 (NM_008714.2,5177-5195).
ggcagcctcaatattcctt

SEQ ID NO: 538097 - DNA, 19 bp, Mus musculus
  siRNA target sequence for Notch1 (NM_008714.2,5181-5199).
gcctcaatattccttacaa

SEQ ID NO: 538098 - DNA, 19 bp, Mus musculus
  siRNA target sequence for Notch1 (NM_008714.2,5183-5201).
ctcaatattccttacaaga

SEQ ID NO: 538099 - DNA, 19 bp, Mus musculus
  siRNA target sequence for Notch1 (NM_008714.2,5185-5203).
caatattccttacaagatt

SEQ ID NO: 538100 - DNA, 19 bp, Mus musculus
  siRNA target sequence for Notch1 (NM_008714.2,5244-5262).
cgcagctgcacctcatgta

SEQ ID NO: 538101 - DNA, 19 bp, Mus musculus
  siRNA target sequence for Notch1 (NM_008714.2,5357-5375).
cctgagggtttcaaagtgt

SEQ ID NO: 538102 - DNA, 19 bp, Mus musculus
  siRNA target sequence for Notch1 (NM_008714.2,5460-5478).
ctctgatggacgacaatca

SEQ ID NO: 538103 - DNA, 19 bp, Mus musculus
  siRNA target sequence for Notch1 (NM_008714.2,5462-5480).
ctgatggacgacaatcaga

SEQ ID NO: 538104 - DNA, 19 bp, Mus musculus
  siRNA target sequence for Notch1 (NM_008714.2,5521-5539).
gtttgaggagccagtagtt

SEQ ID NO: 538105 - DNA, 19 bp, Mus musculus
  siRNA target sequence for Notch1 (NM_008714.2,5692-5710).
cttcacacccctcatgatt

SEQ ID NO: 538106 - DNA, 19 bp, Mus musculus
  siRNA target sequence for Notch1 (NM_008714.2,5848-5866).
cttggctgcccgatactct

SEQ ID NO: 538107 - DNA, 19 bp, Mus musculus
  siRNA target sequence for Notch1 (NM_008714.2,5857-5875).
ccgatactctcgttcagat

SEQ ID NO: 538108 - DNA, 19 bp, Mus musculus
  siRNA target sequence for Notch1 (NM_008714.2,5929-5947).
gggccgtactccgttacat

SEQ ID NO: 538109 - DNA, 19 bp, Mus musculus
  siRNA target sequence for Notch1 (NM_008714.2,6360-6378).
gtatgcaccacgatatcgt

SEQ ID NO: 538110 - DNA, 19 bp, Mus musculus
  siRNA target sequence for Notch1 (NM_008714.2,6552-6570).
gtggtagcaaggaagctaa

SEQ ID NO: 538111 - DNA, 19 bp, Mus musculus
  siRNA target sequence for Notch1 (NM_008714.2,6777-6795).
gcatcagccacttgaatgt

SEQ ID NO: 538112 - DNA, 19 bp, Mus musculus
  siRNA target sequence for Notch1 (NM_008714.2,7122-7140).
ccttgtccccgattattta

SEQ ID NO: 538113 - DNA, 19 bp, Mus musculus
  siRNA target sequence for Notch1 (NM_008714.2,7198-7216).
ggtgcagccacagaactta

SEQ ID NO: 538114 - DNA, 19 bp, Mus musculus
  siRNA target sequence for Notch1 (NM_008714.2,7318-7336).
cagtcaggcagatgtacaa

SEQ ID NO: 538115 - DNA, 19 bp, Mus musculus
  siRNA target sequence for Notch1 (NM_008714.2,7652-7670).
cacattccagaggcattta

SEQ ID NO: 538116 - DNA, 19 bp, Mus musculus
  siRNA target sequence for Notch2 (NM_010928.1,1338-1356).
ctgaacgggcagtacattt

SEQ ID NO: 538117 - DNA, 19 bp, Mus musculus
  siRNA target sequence for Notch2 (NM_010928.1,1411-1429).
gtgctatggccaacagtaa

SEQ ID NO: 538118 - DNA, 19 bp, Mus musculus
  siRNA target sequence for Notch2 (NM_010928.1,1561-1579).
ccacctgcctggataagat

SEQ ID NO: 538119 - DNA, 19 bp, Mus musculus
  siRNA target sequence for Notch2 (NM_010928.1,1629-1647).
gagctggaggtaaatgaat

SEQ ID NO: 538120 - DNA, 19 bp, Mus musculus
  siRNA target sequence for Notch2 (NM_010928.1,1739-1757).
gtgccagatcgacattgat

SEQ ID NO: 538121 - DNA, 19 bp, Mus musculus
  siRNA target sequence for Notch2 (NM_010928.1,1803-1821).
cacccgaatggctatgaat

SEQ ID NO: 538122 - DNA, 19 bp, Mus musculus
  siRNA target sequence for Notch2 (NM_010928.1,1834-1852).
caggtttcactggcatatt

SEQ ID NO: 538123 - DNA, 19 bp, Mus musculus
  siRNA target sequence for Notch2 (NM_010928.1,1836-1854).
ggtttcactggcatattgt

SEQ ID NO: 538124 - DNA, 19 bp, Mus musculus
  siRNA target sequence for Notch2 (NM_010928.1,1846-1864).
gcatattgtgtgatgagaa

SEQ ID NO: 538125 - DNA, 19 bp, Mus musculus
  siRNA target sequence for Notch2 (NM_010928.1,1966-1984).
gtagtgaccagattgatga

SEQ ID NO: 538126 - DNA, 19 bp, Mus musculus
  siRNA target sequence for Notch2 (NM_010928.1,2061-2079).
ggcacatcaggccttaatt

SEQ ID NO: 538127 - DNA, 19 bp, Mus musculus
  siRNA target sequence for Notch2 (NM_010928.1,2063-2081).
cacatcaggccttaattgt

SEQ ID NO: 538128 - DNA, 19 bp, Mus musculus
  siRNA target sequence for Notch2 (NM_010928.1,2068-2086).
caggccttaattgtgaaat

SEQ ID NO: 538129 - DNA, 19 bp, Mus musculus
  siRNA target sequence for Notch2 (NM_010928.1,2070-2088).
ggccttaattgtgaaatta

SEQ ID NO: 538130 - DNA, 19 bp, Mus musculus
  siRNA target sequence for Notch2 (NM_010928.1,2239-2257).
cgacgtgcatcaatgatgt

SEQ ID NO: 538131 - DNA, 19 bp, Mus musculus
  siRNA target sequence for Notch2 (NM_010928.1,2242-2260).
cgtgcatcaatgatgtgaa

SEQ ID NO: 538132 - DNA, 19 bp, Mus musculus
  siRNA target sequence for Notch2 (NM_010928.1,2258-2276).
gaatggtttccggtgtata

SEQ ID NO: 538133 - DNA, 19 bp, Mus musculus
  siRNA target sequence for Notch2 (NM_010928.1,2364-2382).
ggtctcagtggctataagt

SEQ ID NO: 538134 - DNA, 19 bp, Mus musculus
  siRNA target sequence for Notch2 (NM_010928.1,2461-2479).
gaggaacgtgcaataacct

SEQ ID NO: 538135 - DNA, 19 bp, Mus musculus
  siRNA target sequence for Notch2 (NM_010928.1,2501-2519).
ctgcaagaaggggttcaaa

SEQ ID NO: 538136 - DNA, 19 bp, Mus musculus
  siRNA target sequence for Notch2 (NM_010928.1,2525-2543).
caactgccaggtgaatata

SEQ ID NO: 538137 - DNA, 19 bp, Mus musculus
  siRNA target sequence for Notch2 (NM_010928.1,2528-2546).
ctgccaggtgaatatagat

SEQ ID NO: 538138 - DNA, 19 bp, Mus musculus
  siRNA target sequence for Notch2 (NM_010928.1,2573-2591).
ccaaggaacctgctttgat

SEQ ID NO: 538139 - DNA, 19 bp, Mus musculus
  siRNA target sequence for Notch2 (NM_010928.1,2592-2610).
gacgtcagtggctacactt

SEQ ID NO: 538140 - DNA, 19 bp, Mus musculus
  siRNA target sequence for Notch2 (NM_010928.1,2625-2643).
ccttacacaggcaagaact

SEQ ID NO: 538141 - DNA, 19 bp, Mus musculus
  siRNA target sequence for Notch2 (NM_010928.1,2635-2653).
gcaagaactgtcaaacagt

SEQ ID NO: 538142 - DNA, 19 bp, Mus musculus
  siRNA target sequence for Notch2 (NM_010928.1,2669-2687).
cccaaacccgtgtgagaat

SEQ ID NO: 538143 - DNA, 19 bp, Mus musculus
  siRNA target sequence for Notch2 (NM_010928.1,2703-2721).
gaggcacccaattttgaga

SEQ ID NO: 538144 - DNA, 19 bp, Mus musculus
  siRNA target sequence for Notch2 (NM_010928.1,2750-2768).
gcaaggtaaacgatgtaca

SEQ ID NO: 538145 - DNA, 19 bp, Mus musculus
  siRNA target sequence for Notch2 (NM_010928.1,2764-2782).
gtacagttgacgttgatga

SEQ ID NO: 538146 - DNA, 19 bp, Mus musculus
  siRNA target sequence for Notch2 (NM_010928.1,2791-2809).
ccaagccgtgtatgaacaa

SEQ ID NO: 538147 - DNA, 19 bp, Mus musculus
  siRNA target sequence for Notch2 (NM_010928.1,2792-2810).
caagccgtgtatgaacaat

SEQ ID NO: 538148 - DNA, 19 bp, Mus musculus
  siRNA target sequence for Notch2 (NM_010928.1,3040-3058).
ggacctgctccgactatgt

SEQ ID NO: 538149 - DNA, 19 bp, Mus musculus
  siRNA target sequence for Notch2 (NM_010928.1,3043-3061).
cctgctccgactatgtcaa

SEQ ID NO: 538150 - DNA, 19 bp, Mus musculus
  siRNA target sequence for Notch2 (NM_010928.1,3049-3067).
ccgactatgtcaacagtta

SEQ ID NO: 538151 - DNA, 19 bp, Mus musculus
  siRNA target sequence for Notch2 (NM_010928.1,3154-3172).
gcacgtgtgttgatggaat

SEQ ID NO: 538152 - DNA, 19 bp, Mus musculus
  siRNA target sequence for Notch2 (NM_010928.1,3168-3186).
ggaatcaactctttctctt

SEQ ID NO: 538153 - DNA, 19 bp, Mus musculus
  siRNA target sequence for Notch2 (NM_010928.1,3191-3209).
gtgccccgtgggtttcact

SEQ ID NO: 538154 - DNA, 19 bp, Mus musculus
  siRNA target sequence for Notch2 (NM_010928.1,3218-3236).
ctgcctccatgatatcaat

SEQ ID NO: 538155 - DNA, 19 bp, Mus musculus
  siRNA target sequence for Notch2 (NM_010928.1,3220-3238).
gcctccatgatatcaatga

SEQ ID NO: 538156 - DNA, 19 bp, Mus musculus
  siRNA target sequence for Notch2 (NM_010928.1,3222-3240).
ctccatgatatcaatgagt

SEQ ID NO: 538157 - DNA, 19 bp, Mus musculus
  siRNA target sequence for Notch2 (NM_010928.1,3356-3374).
cagccggtctccgtgtaaa

SEQ ID NO: 538158 - DNA, 19 bp, Mus musculus
  siRNA target sequence for Notch2 (NM_010928.1,3358-3376).
gccggtctccgtgtaaaaa

SEQ ID NO: 538159 - DNA, 19 bp, Mus musculus
  siRNA target sequence for Notch2 (NM_010928.1,3360-3378).
cggtctccgtgtaaaaaca

SEQ ID NO: 538160 - DNA, 19 bp, Mus musculus
  siRNA target sequence for Notch2 (NM_010928.1,3382-3400).
gaacttgtgttcaggaaaa

SEQ ID NO: 538161 - DNA, 19 bp, Mus musculus
  siRNA target sequence for Notch2 (NM_010928.1,3493-3511).
gagtacctgttgaacactt

SEQ ID NO: 538162 - DNA, 19 bp, Mus musculus
  siRNA target sequence for Notch2 (NM_010928.1,3519-3537).
cactcgggcatctgtatca

SEQ ID NO: 538163 - DNA, 19 bp, Mus musculus
  siRNA target sequence for Notch2 (NM_010928.1,3521-3539).
ctcgggcatctgtatcaat

SEQ ID NO: 538164 - DNA, 19 bp, Mus musculus
  siRNA target sequence for Notch2 (NM_010928.1,3592-3610).
gcgaggagcagcttgatga

SEQ ID NO: 538165 - DNA, 19 bp, Mus musculus
  siRNA target sequence for Notch2 (NM_010928.1,3695-3713).
gggtgtcaactgtgagtat

SEQ ID NO: 538166 - DNA, 19 bp, Mus musculus
  siRNA target sequence for Notch2 (NM_010928.1,3768-3786).
cttgtgaaccatttcaagt

SEQ ID NO: 538167 - DNA, 19 bp, Mus musculus
  siRNA target sequence for Notch2 (NM_010928.1,4331-4349).
gcgccagcctcctcactat

SEQ ID NO: 538168 - DNA, 19 bp, Mus musculus
  siRNA target sequence for Notch2 (NM_010928.1,4378-4396).
gcagccactgcgaactcta

SEQ ID NO: 538169 - DNA, 19 bp, Mus musculus
  siRNA target sequence for Notch2 (NM_010928.1,4475-4493).
cgaggcctgcaatagtcat

SEQ ID NO: 538170 - DNA, 19 bp, Mus musculus
  siRNA target sequence for Notch2 (NM_010928.1,4513-4531).
gtgactgttccctcactat

SEQ ID NO: 538171 - DNA, 19 bp, Mus musculus
  siRNA target sequence for Notch2 (NM_010928.1,4566-4584).
cgctgctgggaatacatca

SEQ ID NO: 538172 - DNA, 19 bp, Mus musculus
  siRNA target sequence for Notch2 (NM_010928.1,4567-4585).
gctgctgggaatacatcaa

SEQ ID NO: 538173 - DNA, 19 bp, Mus musculus
  siRNA target sequence for Notch2 (NM_010928.1,4570-4588).
gctgggaatacatcaacaa

SEQ ID NO: 538174 - DNA, 19 bp, Mus musculus
  siRNA target sequence for Notch2 (NM_010928.1,4612-4630).
ccgcagagtgcctgtttga

SEQ ID NO: 538175 - DNA, 19 bp, Mus musculus
  siRNA target sequence for Notch2 (NM_010928.1,4615-4633).
cagagtgcctgtttgacaa

SEQ ID NO: 538176 - DNA, 19 bp, Mus musculus
  siRNA target sequence for Notch2 (NM_010928.1,4654-4672).
gcaagacgtgcaagtatga

SEQ ID NO: 538177 - DNA, 19 bp, Mus musculus
  siRNA target sequence for Notch2 (NM_010928.1,4658-4676).
gacgtgcaagtatgacaaa

SEQ ID NO: 538178 - DNA, 19 bp, Mus musculus
  siRNA target sequence for Notch2 (NM_010928.1,4783-4801).
cagagggcaccctgatcat

SEQ ID NO: 538179 - DNA, 19 bp, Mus musculus
  siRNA target sequence for Notch2 (NM_010928.1,4836-4854).
gattcgcgaagcttcttga

SEQ ID NO: 538180 - DNA, 19 bp, Mus musculus
  siRNA target sequence for Notch2 (NM_010928.1,4877-4895).
caccaacttgcgcattaaa

SEQ ID NO: 538181 - DNA, 19 bp, Mus musculus
  siRNA target sequence for Notch2 (NM_010928.1,4879-4897).
ccaacttgcgcattaaaca

SEQ ID NO: 538182 - DNA, 19 bp, Mus musculus
  siRNA target sequence for Notch2 (NM_010928.1,4883-4901).
cttgcgcattaaacaagat

SEQ ID NO: 538183 - DNA, 19 bp, Mus musculus
  siRNA target sequence for Notch2 (NM_010928.1,4886-4904).
gcgcattaaacaagattct

SEQ ID NO: 538184 - DNA, 19 bp, Mus musculus
  siRNA target sequence for Notch2 (NM_010928.1,5010-5028).
gaggtgataggctctaaga

SEQ ID NO: 538185 - DNA, 19 bp, Mus musculus
  siRNA target sequence for Notch2 (NM_010928.1,5012-5030).
ggtgataggctctaagata

SEQ ID NO: 538186 - DNA, 19 bp, Mus musculus
  siRNA target sequence for Notch2 (NM_010928.1,5015-5033).
gataggctctaagatattt

SEQ ID NO: 538187 - DNA, 19 bp, Mus musculus
  siRNA target sequence for Notch2 (NM_010928.1,5045-5063).
caaccgacagtgtgttcaa

SEQ ID NO: 538188 - DNA, 19 bp, Mus musculus
  siRNA target sequence for Notch2 (NM_010928.1,5049-5067).
cgacagtgtgttcaagatt

SEQ ID NO: 538189 - DNA, 19 bp, Mus musculus
  siRNA target sequence for Notch2 (NM_010928.1,5209-5227).
cggtcgctgttgtcatcat

SEQ ID NO: 538190 - DNA, 19 bp, Mus musculus
  siRNA target sequence for Notch2 (NM_010928.1,5309-5327).
ccgccgagactctagcaat

SEQ ID NO: 538191 - DNA, 19 bp, Mus musculus
  siRNA target sequence for Notch2 (NM_010928.1,5361-5379).
gtggggctgaaaaatctct

SEQ ID NO: 538192 - DNA, 19 bp, Mus musculus
  siRNA target sequence for Notch2 (NM_010928.1,5394-5412).
gaggctaacctgattggtt

SEQ ID NO: 538193 - DNA, 19 bp, Mus musculus
  siRNA target sequence for Notch2 (NM_010928.1,5422-5440).
gtgaacattgggttgatga

SEQ ID NO: 538194 - DNA, 19 bp, Mus musculus
  siRNA target sequence for Notch2 (NM_010928.1,5802-5820).
cttgcagcccgctattcga

SEQ ID NO: 538195 - DNA, 19 bp, Mus musculus
  siRNA target sequence for Notch2 (NM_010928.1,6130-6148).
cgactcttctgctgttgaa

SEQ ID NO: 538196 - DNA, 19 bp, Mus musculus
  siRNA target sequence for Notch2 (NM_010928.1,6133-6151).
ctcttctgctgttgaagaa

SEQ ID NO: 538197 - DNA, 19 bp, Mus musculus
  siRNA target sequence for Notch2 (NM_010928.1,6154-6172).
gggccaacagagatatgca

SEQ ID NO: 538198 - DNA, 19 bp, Mus musculus
  siRNA target sequence for Notch2 (NM_010928.1,6163-6181).
gagatatgcaggacaataa

SEQ ID NO: 538199 - DNA, 19 bp, Mus musculus
  siRNA target sequence for Notch2 (NM_010928.1,6205-6223).
ctgcccgagagggaagtta

SEQ ID NO: 538200 - DNA, 19 bp, Mus musculus
  siRNA target sequence for Notch2 (NM_010928.1,6209-6227).
ccgagagggaagttatgaa

SEQ ID NO: 538201 - DNA, 19 bp, Mus musculus
  siRNA target sequence for Notch2 (NM_010928.1,6220-6238).
gttatgaagcggccaaaat

SEQ ID NO: 538202 - DNA, 19 bp, Mus musculus
  siRNA target sequence for Notch2 (NM_010928.1,6229-6247).
cggccaaaatcctgttaga

SEQ ID NO: 538203 - DNA, 19 bp, Mus musculus
  siRNA target sequence for Notch2 (NM_010928.1,6333-6351).
cgcctcctggacgagtata

SEQ ID NO: 538204 - DNA, 19 bp, Mus musculus
  siRNA target sequence for Notch2 (NM_010928.1,6334-6352).
gcctcctggacgagtataa

SEQ ID NO: 538205 - DNA, 19 bp, Mus musculus
  siRNA target sequence for Notch2 (NM_010928.1,6494-6512).
cacgagcctgcctaacctt

SEQ ID NO: 538206 - DNA, 19 bp, Mus musculus
  siRNA target sequence for Notch2 (NM_010928.1,6743-6761).
gcatgcgctgtctttctct

SEQ ID NO: 538207 - DNA, 19 bp, Mus musculus
  siRNA target sequence for Notch2 (NM_010928.1,6744-6762).
catgcgctgtctttctcta

SEQ ID NO: 538208 - DNA, 19 bp, Mus musculus
  siRNA target sequence for Notch2 (NM_010928.1,6754-6772).
ctttctctaaccttcatga

SEQ ID NO: 538209 - DNA, 19 bp, Mus musculus
  siRNA target sequence for Notch2 (NM_010928.1,7158-7176).
ggccccttgccctctatgt

SEQ ID NO: 538210 - DNA, 19 bp, Mus musculus
  siRNA target sequence for Notch2 (NM_010928.1,7159-7177).
gccccttgccctctatgta

SEQ ID NO: 538211 - DNA, 19 bp, Mus musculus
  siRNA target sequence for Notch2 (NM_010928.1,7259-7277).
gaccattgtgccaacctat

SEQ ID NO: 538212 - DNA, 19 bp, Mus musculus
  siRNA target sequence for Notch2 (NM_010928.1,7262-7280).
cattgtgccaacctatcat

SEQ ID NO: 538213 - DNA, 19 bp, Mus musculus
  siRNA target sequence for Notch2 (NM_010928.1,7328-7346).
cagttacgcctcctcaaat

SEQ ID NO: 538214 - DNA, 19 bp, Mus musculus
  siRNA target sequence for Notch3 (NM_008716.1,545-563).
gtgccgatctggtacaact

SEQ ID NO: 538215 - DNA, 19 bp, Mus musculus
  siRNA target sequence for Notch3 (NM_008716.1,573-591).
ggtggtacctgtctcaata

SEQ ID NO: 538216 - DNA, 19 bp, Mus musculus
  siRNA target sequence for Notch3 (NM_008716.1,668-686).
cccttccccgtgtcgtaat

SEQ ID NO: 538217 - DNA, 19 bp, Mus musculus
  siRNA target sequence for Notch3 (NM_008716.1,812-830).
gtgtgtagacggtgtcaat

SEQ ID NO: 538218 - DNA, 19 bp, Mus musculus
  siRNA target sequence for Notch3 (NM_008716.1,816-834).
gtagacggtgtcaatactt

SEQ ID NO: 538219 - DNA, 19 bp, Mus musculus
  siRNA target sequence for Notch3 (NM_008716.1,991-1009).
gctgcagtcagaatatcga

SEQ ID NO: 538220 - DNA, 19 bp, Mus musculus
  siRNA target sequence for Notch3 (NM_008716.1,1015-1033).
gtgctacagccgtgtgttt

SEQ ID NO: 538221 - DNA, 19 bp, Mus musculus
  siRNA target sequence for Notch3 (NM_008716.1,1142-1160).
ccatgaggatgctatctgt

SEQ ID NO: 538222 - DNA, 19 bp, Mus musculus
  siRNA target sequence for Notch3 (NM_008716.1,1257-1275).
gccaacccctgtgaacatt

SEQ ID NO: 538223 - DNA, 19 bp, Mus musculus
  siRNA target sequence for Notch3 (NM_008716.1,1277-1295).
gggtcggtgtgtgaataca

SEQ ID NO: 538224 - DNA, 19 bp, Mus musculus
  siRNA target sequence for Notch3 (NM_008716.1,1404-1422).
gaccgaattggccagttta

SEQ ID NO: 538225 - DNA, 19 bp, Mus musculus
  siRNA target sequence for Notch3 (NM_008716.1,1635-1653).
cagcctgacggctatgagt

SEQ ID NO: 538226 - DNA, 19 bp, Mus musculus
  siRNA target sequence for Notch3 (NM_008716.1,1843-1861).
ggggcaaatgtctagactt

SEQ ID NO: 538227 - DNA, 19 bp, Mus musculus
  siRNA target sequence for Notch3 (NM_008716.1,1971-1989).
ggcatcaaccgttatgact

SEQ ID NO: 538228 - DNA, 19 bp, Mus musculus
  siRNA target sequence for Notch3 (NM_008716.1,2162-2180).
ccacaagccctgtagtcat

SEQ ID NO: 538229 - DNA, 19 bp, Mus musculus
  siRNA target sequence for Notch3 (NM_008716.1,2204-2222).
cgggttccgctgtgtttgt

SEQ ID NO: 538230 - DNA, 19 bp, Mus musculus
  siRNA target sequence for Notch3 (NM_008716.1,2593-2611).
ccttctgtgatcaagacat

SEQ ID NO: 538231 - DNA, 19 bp, Mus musculus
  siRNA target sequence for Notch3 (NM_008716.1,2661-2679).
ggcgtgggctccttttcct

SEQ ID NO: 538232 - DNA, 19 bp, Mus musculus
  siRNA target sequence for Notch3 (NM_008716.1,2929-2947).
gcacacactgccaatacga

SEQ ID NO: 538233 - DNA, 19 bp, Mus musculus
  siRNA target sequence for Notch3 (NM_008716.1,2999-3017).
cacccacccaggatttgaa

SEQ ID NO: 538234 - DNA, 19 bp, Mus musculus
  siRNA target sequence for Notch3 (NM_008716.1,3235-3253).
gtggaaagtgcatagacaa

SEQ ID NO: 538235 - DNA, 19 bp, Mus musculus
  siRNA target sequence for Notch3 (NM_008716.1,3352-3370).
gcacttgccgtggttacat

SEQ ID NO: 538236 - DNA, 19 bp, Mus musculus
  siRNA target sequence for Notch3 (NM_008716.1,3413-3431).
cagttgtgaggataatata

SEQ ID NO: 538237 - DNA, 19 bp, Mus musculus
  siRNA target sequence for Notch3 (NM_008716.1,3461-3479).
cggaggctcctgtatcgat

SEQ ID NO: 538238 - DNA, 19 bp, Mus musculus
  siRNA target sequence for Notch3 (NM_008716.1,3466-3484).
gctcctgtatcgatcttgt

SEQ ID NO: 538239 - DNA, 19 bp, Mus musculus
  siRNA target sequence for Notch3 (NM_008716.1,3580-3598).
gcgttcagtgcctacacaa

SEQ ID NO: 538240 - DNA, 19 bp, Mus musculus
  siRNA target sequence for Notch3 (NM_008716.1,3581-3599).
cgttcagtgcctacacaat

SEQ ID NO: 538241 - DNA, 19 bp, Mus musculus
  siRNA target sequence for Notch3 (NM_008716.1,3638-3656).
ctgtcccccaggatacaca

SEQ ID NO: 538242 - DNA, 19 bp, Mus musculus
  siRNA target sequence for Notch3 (NM_008716.1,4457-4475).
cacctgcaaccctgtttat

SEQ ID NO: 538243 - DNA, 19 bp, Mus musculus
  siRNA target sequence for Notch3 (NM_008716.1,4639-4657).
gctccagtgccgactttct

SEQ ID NO: 538244 - DNA, 19 bp, Mus musculus
  siRNA target sequence for Notch3 (NM_008716.1,4909-4927).
cagtggagcgacttgattt

SEQ ID NO: 538245 - DNA, 19 bp, Mus musculus
  siRNA target sequence for Notch3 (NM_008716.1,5011-5029).
gggctgtctttctactcat

SEQ ID NO: 538246 - DNA, 19 bp, Mus musculus
  siRNA target sequence for Notch3 (NM_008716.1,5014-5032).
ctgtctttctactcatcat

SEQ ID NO: 538247 - DNA, 19 bp, Mus musculus
  siRNA target sequence for Notch3 (NM_008716.1,5087-5105).
gttccctgagggttttgca

SEQ ID NO: 538248 - DNA, 19 bp, Mus musculus
  siRNA target sequence for Notch3 (NM_008716.1,5094-5112).
gagggttttgcattacaca

SEQ ID NO: 538249 - DNA, 19 bp, Mus musculus
  siRNA target sequence for Notch3 (NM_008716.1,5210-5228).
ggtggtcacagacttgaat

SEQ ID NO: 538250 - DNA, 19 bp, Mus musculus
  siRNA target sequence for Notch3 (NM_008716.1,5392-5410).
cagacggagtggatgtcaa

SEQ ID NO: 538251 - DNA, 19 bp, Mus musculus
  siRNA target sequence for Notch3 (NM_008716.1,5578-5596).
gcgagaccgccctgcattt

SEQ ID NO: 538252 - DNA, 19 bp, Mus musculus
  siRNA target sequence for Notch3 (NM_008716.1,5877-5895).
gggaaatctgccttacact

SEQ ID NO: 538253 - DNA, 19 bp, Mus musculus
  siRNA target sequence for Notch3 (NM_008716.1,6055-6073).
gggagatcacagatcactt

SEQ ID NO: 538254 - DNA, 19 bp, Mus musculus
  siRNA target sequence for Notch3 (NM_008716.1,6774-6792).
cccagcgagcatccttatt

SEQ ID NO: 538255 - DNA, 19 bp, Mus musculus
  siRNA target sequence for Notch3 (NM_008716.1,6775-6793).
ccagcgagcatccttattt

SEQ ID NO: 538256 - DNA, 19 bp, Mus musculus
  siRNA target sequence for Notch3 (NM_008716.1,6875-6893).
cccagcaactgctaccaat

SEQ ID NO: 538257 - DNA, 19 bp, Mus musculus
  siRNA target sequence for Notch3 (NM_008716.1,6971-6989).
gggaccccaaccagaagtt

SEQ ID NO: 538258 - DNA, 19 bp, Mus musculus
  siRNA target sequence for Notch3 (NM_008716.1,6972-6990).
ggaccccaaccagaagtta

SEQ ID NO: 538259 - DNA, 19 bp, Mus musculus
  siRNA target sequence for Nphp4 (NM_153424.1,409-427).
gcttgacgggccactcatt

SEQ ID NO: 538260 - DNA, 19 bp, Mus musculus
  siRNA target sequence for Nphp4 (NM_153424.1,410-428).
cttgacgggccactcatta

SEQ ID NO: 538261 - DNA, 19 bp, Mus musculus
  siRNA target sequence for Nphp4 (NM_153424.1,424-442).
cattaagcagggaatccta

SEQ ID NO: 538262 - DNA, 19 bp, Mus musculus
  siRNA target sequence for Nphp4 (NM_153424.1,488-506).
gatgtcacctacaaacatt

SEQ ID NO: 538263 - DNA, 19 bp, Mus musculus
  siRNA target sequence for Nphp4 (NM_153424.1,567-585).
ctaggatcaccttcaatga

SEQ ID NO: 538264 - DNA, 19 bp, Mus musculus
  siRNA target sequence for Nphp4 (NM_153424.1,683-701).
ctgtcctgtgggtttggaa

SEQ ID NO: 538265 - DNA, 19 bp, Mus musculus
  siRNA target sequence for Nphp4 (NM_153424.1,815-833).
cccatagaacagaacaagt

SEQ ID NO: 538266 - DNA, 19 bp, Mus musculus
  siRNA target sequence for Nphp4 (NM_153424.1,1393-1411).
cagctcgcccacctcaata

SEQ ID NO: 538267 - DNA, 19 bp, Mus musculus
  siRNA target sequence for Nphp4 (NM_153424.1,1524-1542).
cacgctgtctggtctataa

SEQ ID NO: 538268 - DNA, 19 bp, Mus musculus
  siRNA target sequence for Nphp4 (NM_153424.1,1527-1545).
gctgtctggtctataaggt

SEQ ID NO: 538269 - DNA, 19 bp, Mus musculus
  siRNA target sequence for Nphp4 (NM_153424.1,1776-1794).
ctgctgtcgagcatctaca

SEQ ID NO: 538270 - DNA, 19 bp, Mus musculus
  siRNA target sequence for Nphp4 (NM_153424.1,1998-2016).
gtcttcgagggaatgagat

SEQ ID NO: 538271 - DNA, 19 bp, Mus musculus
  siRNA target sequence for Nphp4 (NM_153424.1,2014-2032).
gattgtgctgcagtttctt

SEQ ID NO: 538272 - DNA, 19 bp, Mus musculus
  siRNA target sequence for Nphp4 (NM_153424.1,2191-2209).
catcctcgtccccattaat

SEQ ID NO: 538273 - DNA, 19 bp, Mus musculus
  siRNA target sequence for Nphp4 (NM_153424.1,2194-2212).
cctcgtccccattaataaa

SEQ ID NO: 538274 - DNA, 19 bp, Mus musculus
  siRNA target sequence for Nphp4 (NM_153424.1,2197-2215).
cgtccccattaataaagat

SEQ ID NO: 538275 - DNA, 19 bp, Mus musculus
  siRNA target sequence for Nphp4 (NM_153424.1,2456-2474).
gagtacgaacaggaaatga

SEQ ID NO: 538276 - DNA, 19 bp, Mus musculus
  siRNA target sequence for Nphp4 (NM_153424.1,2625-2643).
ggtctcgggtcatctcaaa

SEQ ID NO: 538277 - DNA, 19 bp, Mus musculus
  siRNA target sequence for Nphp4 (NM_153424.1,2645-2663).
gatggagccagcttcttct

SEQ ID NO: 538278 - DNA, 19 bp, Mus musculus
  siRNA target sequence for Nphp4 (NM_153424.1,2937-2955).
gggacttgcaggtcattga

SEQ ID NO: 538279 - DNA, 19 bp, Mus musculus
  siRNA target sequence for Nphp4 (NM_153424.1,3263-3281).
gcccacatcccccttaagt

SEQ ID NO: 538280 - DNA, 19 bp, Mus musculus
  siRNA target sequence for Nphp4 (NM_153424.1,3609-3627).
gcagtgatccaaatgtcat

SEQ ID NO: 538281 - DNA, 19 bp, Mus musculus
  siRNA target sequence for Nphp4 (NM_153424.1,3654-3672).
gtgagccgagagatgtgtt

SEQ ID NO: 538282 - DNA, 19 bp, Mus musculus
  siRNA target sequence for Nphp4 (NM_153424.1,3659-3677).
ccgagagatgtgttcctta

SEQ ID NO: 538283 - DNA, 19 bp, Mus musculus
  siRNA target sequence for Nphp4 (NM_153424.1,3660-3678).
cgagagatgtgttccttaa

SEQ ID NO: 538284 - DNA, 19 bp, Mus musculus
  siRNA target sequence for Nphp4 (NM_153424.1,3690-3708).
gtccaagcccggagatcaa

SEQ ID NO: 538285 - DNA, 19 bp, Mus musculus
  siRNA target sequence for Nphp4 (NM_153424.1,3849-3867).
ggacacagaccgttaggaa

SEQ ID NO: 538286 - DNA, 19 bp, Mus musculus
  siRNA target sequence for Nphp4 (NM_153424.1,3850-3868).
gacacagaccgttaggaaa

SEQ ID NO: 538287 - DNA, 19 bp, Mus musculus
  siRNA target sequence for Nphp4 (NM_153424.1,3987-4005).
gccgctttgtccatctcaa

SEQ ID NO: 538288 - DNA, 19 bp, Mus musculus
  siRNA target sequence for Nphs1 (NM_019459.1,129-147).
ggtggaagggtcgacaatt

SEQ ID NO: 538289 - DNA, 19 bp, Mus musculus
  siRNA target sequence for Nphs1 (NM_019459.1,130-148).
gtggaagggtcgacaatta

SEQ ID NO: 538290 - DNA, 19 bp, Mus musculus
  siRNA target sequence for Nphs1 (NM_019459.1,213-231).
gggtccaaaccctaagatt

SEQ ID NO: 538291 - DNA, 19 bp, Mus musculus
  siRNA target sequence for Nphs1 (NM_019459.1,402-420).
ccccaaggtgcttcagtta

SEQ ID NO: 538292 - DNA, 19 bp, Mus musculus
  siRNA target sequence for Nphs1 (NM_019459.1,449-467).
gggtagctggacaggaata

SEQ ID NO: 538293 - DNA, 19 bp, Mus musculus
  siRNA target sequence for Nphs1 (NM_019459.1,687-705).
ggcttcgttcaccatgaat

SEQ ID NO: 538294 - DNA, 19 bp, Mus musculus
  siRNA target sequence for Nphs1 (NM_019459.1,688-706).
gcttcgttcaccatgaata

SEQ ID NO: 538295 - DNA, 19 bp, Mus musculus
  siRNA target sequence for Nphs1 (NM_019459.1,834-852).
gctgaagaatggtaaacca

SEQ ID NO: 538296 - DNA, 19 bp, Mus musculus
  siRNA target sequence for Nphs1 (NM_019459.1,1290-1308).
gaagtcactcaccttgaat

SEQ ID NO: 538297 - DNA, 19 bp, Mus musculus
  siRNA target sequence for Nphs1 (NM_019459.1,1297-1315).
ctcaccttgaatgtaaaat

SEQ ID NO: 538298 - DNA, 19 bp, Mus musculus
  siRNA target sequence for Nphs1 (NM_019459.1,1379-1397).
gggtgaggctggtatgctt

SEQ ID NO: 538299 - DNA, 19 bp, Mus musculus
  siRNA target sequence for Nphs1 (NM_019459.1,1426-1444).
ctcacctggcttaaggatt

SEQ ID NO: 538300 - DNA, 19 bp, Mus musculus
  siRNA target sequence for Nphs1 (NM_019459.1,1675-1693).
ccaggcgacgccttgaact

SEQ ID NO: 538301 - DNA, 19 bp, Mus musculus
  siRNA target sequence for Nphs1 (NM_019459.1,1676-1694).
caggcgacgccttgaactt

SEQ ID NO: 538302 - DNA, 19 bp, Mus musculus
  siRNA target sequence for Nphs1 (NM_019459.1,1678-1696).
ggcgacgccttgaacttga

SEQ ID NO: 538303 - DNA, 19 bp, Mus musculus
  siRNA target sequence for Nphs1 (NM_019459.1,1715-1733).
gcaaccctccagttaactt

SEQ ID NO: 538304 - DNA, 19 bp, Mus musculus
  siRNA target sequence for Nphs1 (NM_019459.1,1761-1779).
ggacgacgtggctgcaaaa

SEQ ID NO: 538305 - DNA, 19 bp, Mus musculus
  siRNA target sequence for Nphs1 (NM_019459.1,1894-1912).
gaaaccgtgagctctttct

SEQ ID NO: 538306 - DNA, 19 bp, Mus musculus
  siRNA target sequence for Nphs1 (NM_019459.1,2135-2153).
ctgacgatggcttttatca

SEQ ID NO: 538307 - DNA, 19 bp, Mus musculus
  siRNA target sequence for Nphs1 (NM_019459.1,2180-2198).
ccgccgaggcgctgttgaa

SEQ ID NO: 538308 - DNA, 19 bp, Mus musculus
  siRNA target sequence for Nphs1 (NM_019459.1,2196-2214).
gaagctggacgtgcattat

SEQ ID NO: 538309 - DNA, 19 bp, Mus musculus
  siRNA target sequence for Nphs1 (NM_019459.1,2705-2723).
gcctcctgaccattgctaa

SEQ ID NO: 538310 - DNA, 19 bp, Mus musculus
  siRNA target sequence for Nphs1 (NM_019459.1,2905-2923).
ctgcctcagaggttccaaa

SEQ ID NO: 538311 - DNA, 19 bp, Mus musculus
  siRNA target sequence for Nphs1 (NM_019459.1,2908-2926).
cctcagaggttccaaatca

SEQ ID NO: 538312 - DNA, 19 bp, Mus musculus
  siRNA target sequence for Nphs1 (NM_019459.1,3311-3329).
ggtcggaggaggatcgaat

SEQ ID NO: 538313 - DNA, 19 bp, Mus musculus
  siRNA target sequence for Nphs1 (NM_019459.1,3403-3421).
gtggacccacactactact

SEQ ID NO: 538314 - DNA, 19 bp, Mus musculus
  siRNA target sequence for Nphs1 (NM_019459.1,3477-3495).
ccaagccttcacaggtatt

SEQ ID NO: 538315 - DNA, 19 bp, Mus musculus
  siRNA target sequence for Nphs1 (NM_019459.1,3482-3500).
ccttcacaggtattgaaga

SEQ ID NO: 538316 - DNA, 19 bp, Mus musculus
  siRNA target sequence for Nphs1 (NM_019459.1,3534-3552).
cgaggtggagagagtctat

SEQ ID NO: 538317 - DNA, 19 bp, Mus musculus
  siRNA target sequence for Nphs1 (NM_019459.1,3567-3585).
ctggggacccctctatgat

SEQ ID NO: 538318 - DNA, 19 bp, Mus musculus
  siRNA target sequence for Nphs1 (NM_019459.1,3569-3587).
ggggacccctctatgatga

SEQ ID NO: 538319 - DNA, 19 bp, Mus musculus
  siRNA target sequence for Nphs1 (NM_019459.1,3570-3588).
gggacccctctatgatgaa

SEQ ID NO: 538320 - DNA, 19 bp, Mus musculus
  siRNA target sequence for Nphs1 (NM_019459.1,3572-3590).
gacccctctatgatgaagt

SEQ ID NO: 538321 - DNA, 19 bp, Mus musculus
  siRNA target sequence for Nphs2 (NM_130456.1,132-150).
cctcctctagggatgacaa

SEQ ID NO: 538322 - DNA, 19 bp, Mus musculus
  siRNA target sequence for Nphs2 (NM_130456.1,358-376).
catcaagccctctggatta

SEQ ID NO: 538323 - DNA, 19 bp, Mus musculus
  siRNA target sequence for Nphs2 (NM_130456.1,470-488).
gagtatgaaagagtaatta

SEQ ID NO: 538324 - DNA, 19 bp, Mus musculus
  siRNA target sequence for Nphs2 (NM_130456.1,472-490).
gtatgaaagagtaattata

SEQ ID NO: 538325 - DNA, 19 bp, Mus musculus
  siRNA target sequence for Nphs2 (NM_130456.1,555-573).
gtctggacacctatcacaa

SEQ ID NO: 538326 - DNA, 19 bp, Mus musculus
  siRNA target sequence for Nphs2 (NM_130456.1,564-582).
cctatcacaaggttgatct

SEQ ID NO: 538327 - DNA, 19 bp, Mus musculus
  siRNA target sequence for Nphs2 (NM_130456.1,589-607).
ccagaccttggaaatacct

SEQ ID NO: 538328 - DNA, 19 bp, Mus musculus
  siRNA target sequence for Nphs2 (NM_130456.1,660-678).
gctactaccgcatggaaaa

SEQ ID NO: 538329 - DNA, 19 bp, Mus musculus
  siRNA target sequence for Nphs2 (NM_130456.1,764-782).
catcgatccctcactgaaa

SEQ ID NO: 538330 - DNA, 19 bp, Mus musculus
  siRNA target sequence for Nphs2 (NM_130456.1,830-848).
gatgcagtgacctgtattt

SEQ ID NO: 538331 - DNA, 19 bp, Mus musculus
  siRNA target sequence for Nphs2 (NM_130456.1,860-878).
gtggagagaactgaaatta

SEQ ID NO: 538332 - DNA, 19 bp, Mus musculus
  siRNA target sequence for Nphs2 (NM_130456.1,1032-1050).
ccgctgtccagcttcgata

SEQ ID NO: 538333 - DNA, 19 bp, Mus musculus
  siRNA target sequence for Nphs2 (NM_130456.1,1151-1169).
gcacaagggagcatcaact

SEQ ID NO: 538334 - DNA, 19 bp, Mus musculus
  siRNA target sequence for Nphs2 (NM_130456.1,1152-1170).
cacaagggagcatcaacta

SEQ ID NO: 538335 - DNA, 19 bp, Mus musculus
  siRNA target sequence for Nrg3 (NM_008734.1,961-979).
cccactgcggcgtatgcta

SEQ ID NO: 538336 - DNA, 19 bp, Mus musculus
  siRNA target sequence for Nrg3 (NM_008734.1,1107-1125).
ccccaaatttcatactaca

SEQ ID NO: 538337 - DNA, 19 bp, Mus musculus
  siRNA target sequence for Nrg3 (NM_008734.1,1170-1188).
caaggacctggcgtattgt

SEQ ID NO: 538338 - DNA, 19 bp, Mus musculus
  siRNA target sequence for Nrg3 (NM_008734.1,1176-1194).
cctggcgtattgtctcaat

SEQ ID NO: 538339 - DNA, 19 bp, Mus musculus
  siRNA target sequence for Nrg3 (NM_008734.1,1179-1197).
ggcgtattgtctcaatgat

SEQ ID NO: 538340 - DNA, 19 bp, Mus musculus
  siRNA target sequence for Nrg3 (NM_008734.1,1199-1217).
gtgaatgctttgtgattga

SEQ ID NO: 538341 - DNA, 19 bp, Mus musculus
  siRNA target sequence for Nrg3 (NM_008734.1,1201-1219).
gaatgctttgtgattgaga

SEQ ID NO: 538342 - DNA, 19 bp, Mus musculus
  siRNA target sequence for Nrg3 (NM_008734.1,1263-1281).
ccaaggagtccgttgtgat

SEQ ID NO: 538343 - DNA, 19 bp, Mus musculus
  siRNA target sequence for Nrg3 (NM_008734.1,1267-1285).
ggagtccgttgtgatcaat

SEQ ID NO: 538344 - DNA, 19 bp, Mus musculus
  siRNA target sequence for Nrg3 (NM_008734.1,1268-1286).
gagtccgttgtgatcaatt

SEQ ID NO: 538345 - DNA, 19 bp, Mus musculus
  siRNA target sequence for Nrg3 (NM_008734.1,1324-1342).
gaccacttggggattgaat

SEQ ID NO: 538346 - DNA, 19 bp, Mus musculus
  siRNA target sequence for Nrg3 (NM_008734.1,1350-1368).
gagtgaagacgtttatcaa

SEQ ID NO: 538347 - DNA, 19 bp, Mus musculus
  siRNA target sequence for Nrg3 (NM_008734.1,1374-1392).
ggtgctgtcaatttcatgt

SEQ ID NO: 538348 - DNA, 19 bp, Mus musculus
  siRNA target sequence for Nrg3 (NM_008734.1,1408-1426).
gtcatcgtgggcatgttct

SEQ ID NO: 538349 - DNA, 19 bp, Mus musculus
  siRNA target sequence for Nrg3 (NM_008734.1,1427-1445).
gtgcagcattctacttcaa

SEQ ID NO: 538350 - DNA, 19 bp, Mus musculus
  siRNA target sequence for Nrg3 (NM_008734.1,1518-1536).
ggcatccagcacaaagtct

SEQ ID NO: 538351 - DNA, 19 bp, Mus musculus
  siRNA target sequence for Nrg3 (NM_008734.1,1599-1617).
gactgcgctggagaaaata

SEQ ID NO: 538352 - DNA, 19 bp, Mus musculus
  siRNA target sequence for Nrg3 (NM_008734.1,1601-1619).
ctgcgctggagaaaataat

SEQ ID NO: 538353 - DNA, 19 bp, Mus musculus
  siRNA target sequence for Nrg3 (NM_008734.1,1673-1691).
gaggaagccagcctatcaa

SEQ ID NO: 538354 - DNA, 19 bp, Mus musculus
  siRNA target sequence for Nrg3 (NM_008734.1,1719-1737).
gatgttgcataggaatact

SEQ ID NO: 538355 - DNA, 19 bp, Mus musculus
  siRNA target sequence for Nrg3 (NM_008734.1,1766-1784).
gtcgactgggtggtattgt

SEQ ID NO: 538356 - DNA, 19 bp, Mus musculus
  siRNA target sequence for Nrg3 (NM_008734.1,1907-1925).
gacccctggacttaaagta

SEQ ID NO: 538357 - DNA, 19 bp, Mus musculus
  siRNA target sequence for Nrg3 (NM_008734.1,1936-1954).
ggcttaagaacccaacaaa

SEQ ID NO: 538358 - DNA, 19 bp, Mus musculus
  siRNA target sequence for Nrg3 (NM_008734.1,1938-1956).
cttaagaacccaacaaaat

SEQ ID NO: 538359 - DNA, 19 bp, Mus musculus
  siRNA target sequence for Nrg3 (NM_008734.1,1946-1964).
cccaacaaaatgcatcaat

SEQ ID NO: 538360 - DNA, 19 bp, Mus musculus
  siRNA target sequence for Nrg3 (NM_008734.1,1947-1965).
ccaacaaaatgcatcaata

SEQ ID NO: 538361 - DNA, 19 bp, Mus musculus
  siRNA target sequence for Nrg3 (NM_008734.1,1948-1966).
caacaaaatgcatcaataa

SEQ ID NO: 538362 - DNA, 19 bp, Mus musculus
  siRNA target sequence for Nrg3 (NM_008734.1,1989-2007).
gacaaacccctattttaat

SEQ ID NO: 538363 - DNA, 19 bp, Mus musculus
  siRNA target sequence for Nrg3 (NM_008734.1,2070-2088).
cccgtcgatgggtctagaa

SEQ ID NO: 538364 - DNA, 19 bp, Mus musculus
  siRNA target sequence for Nrg3 (NM_008734.1,2110-2128).
gggatttctgacgtcaaaa

SEQ ID NO: 538365 - DNA, 19 bp, Mus musculus
  siRNA target sequence for Nrg3 (NM_008734.1,2117-2135).
ctgacgtcaaaagcattaa

SEQ ID NO: 538366 - DNA, 19 bp, Mus musculus
  siRNA target sequence for Nrg3 (NM_008734.1,2122-2140).
gtcaaaagcattaaatggt

SEQ ID NO: 538367 - DNA, 19 bp, Mus musculus
  siRNA target sequence for Nrg3 (NM_008734.1,2148-2166).
ctcctactccgctgacatt

SEQ ID NO: 538368 - DNA, 19 bp, Mus musculus
  siRNA target sequence for Nrg3 (NM_008734.1,2150-2168).
cctactccgctgacattgt

SEQ ID NO: 538369 - DNA, 19 bp, Mus musculus
  siRNA target sequence for Nrg3 (NM_008734.1,2189-2207).
gtgattgtcttctagaaga

SEQ ID NO: 538370 - DNA, 19 bp, Mus musculus
  siRNA target sequence for Nrg3 (NM_008734.1,2245-2263).
gaacagatccggattctga

SEQ ID NO: 538371 - DNA, 19 bp, Mus musculus
  siRNA target sequence for Nrg3 (NM_008734.1,2314-2332).
gacagtgcgagcgaaaaca

SEQ ID NO: 538372 - DNA, 19 bp, Mus musculus
  siRNA target sequence for Nrg3 (NM_008734.1,2316-2334).
cagtgcgagcgaaaacaca

SEQ ID NO: 538373 - DNA, 19 bp, Mus musculus
  siRNA target sequence for Nrg3 (NM_008734.1,2349-2367).
gagtcccacggccaaatca

SEQ ID NO: 538374 - DNA, 19 bp, Mus musculus
  siRNA target sequence for Nrg3 (NM_008734.1,2351-2369).
gtcccacggccaaatcaga

SEQ ID NO: 538375 - DNA, 19 bp, Mus musculus
  siRNA target sequence for Nrg3 (NM_008734.1,2372-2390).
gagaggcacaatttgtctt

SEQ ID NO: 538376 - DNA, 19 bp, Mus musculus
  siRNA target sequence for Nrg3 (NM_008734.1,2376-2394).
ggcacaatttgtcttaaga

SEQ ID NO: 538377 - DNA, 19 bp, Mus musculus
  siRNA target sequence for Nrip2 (NM_021717.1,894-912).
gtggacagccctgaatttt

SEQ ID NO: 538378 - DNA, 19 bp, Mus musculus
  siRNA target sequence for Ntf3 (NM_008742.1,52-70).
ggcaacagcatggatcaaa

SEQ ID NO: 538379 - DNA, 19 bp, Mus musculus
  siRNA target sequence for Ntf3 (NM_008742.1,79-97).
ccggaagactctctcaatt

SEQ ID NO: 538380 - DNA, 19 bp, Mus musculus
  siRNA target sequence for Ntf3 (NM_008742.1,112-130).
ctgatccaggcggatatct

SEQ ID NO: 538381 - DNA, 19 bp, Mus musculus
  siRNA target sequence for Ntf3 (NM_008742.1,118-136).
caggcggatatcttgaaaa

SEQ ID NO: 538382 - DNA, 19 bp, Mus musculus
  siRNA target sequence for Ntf3 (NM_008742.1,121-139).
gcggatatcttgaaaaaca

SEQ ID NO: 538383 - DNA, 19 bp, Mus musculus
  siRNA target sequence for Ntf3 (NM_008742.1,283-301).
caacagagacgctacaatt

SEQ ID NO: 538384 - DNA, 19 bp, Mus musculus
  siRNA target sequence for Ntf3 (NM_008742.1,339-357).
gccccctcccttataccta

SEQ ID NO: 538385 - DNA, 19 bp, Mus musculus
  siRNA target sequence for Ntf3 (NM_008742.1,344-362).
ctcccttatacctaatgga

SEQ ID NO: 538386 - DNA, 19 bp, Mus musculus
  siRNA target sequence for Ntf3 (NM_008742.1,378-396).
cccggtggtagccaataga

SEQ ID NO: 538387 - DNA, 19 bp, Mus musculus
  siRNA target sequence for Ntf3 (NM_008742.1,379-397).
ccggtggtagccaatagaa

SEQ ID NO: 538388 - DNA, 19 bp, Mus musculus
  siRNA target sequence for Ntf3 (NM_008742.1,415-433).
cgctatgcagaacataaga

SEQ ID NO: 538389 - DNA, 19 bp, Mus musculus
  siRNA target sequence for Ntf3 (NM_008742.1,546-564).
cggtaactctcctgtgaaa

SEQ ID NO: 538390 - DNA, 19 bp, Mus musculus
  siRNA target sequence for Ntf3 (NM_008742.1,548-566).
gtaactctcctgtgaaaca

SEQ ID NO: 538391 - DNA, 19 bp, Mus musculus
  siRNA target sequence for Ntf3 (NM_008742.1,592-610).
gaagccaggccggtcaaaa

SEQ ID NO: 538392 - DNA, 19 bp, Mus musculus
  siRNA target sequence for Ntf3 (NM_008742.1,617-635).
gcagggggattgatgacaa

SEQ ID NO: 538393 - DNA, 19 bp, Mus musculus
  siRNA target sequence for Ntf3 (NM_008742.1,618-636).
cagggggattgatgacaaa

SEQ ID NO: 538394 - DNA, 19 bp, Mus musculus
  siRNA target sequence for Ntf3 (NM_008742.1,620-638).
gggggattgatgacaaaca

SEQ ID NO: 538395 - DNA, 19 bp, Mus musculus
  siRNA target sequence for Ntf3 (NM_008742.1,676-694).
cgagcactgacttcagaaa

SEQ ID NO: 538396 - DNA, 19 bp, Mus musculus
  siRNA target sequence for Ntf3 (NM_008742.1,686-704).
cttcagaaaacaacaaact

SEQ ID NO: 538397 - DNA, 19 bp, Mus musculus
  siRNA target sequence for Ntf3 (NM_008742.1,711-729).
ctggcgctggatacgaata

SEQ ID NO: 538398 - DNA, 19 bp, Mus musculus
  siRNA target sequence for Ntf3 (NM_008742.1,713-731).
ggcgctggatacgaataga

SEQ ID NO: 538399 - DNA, 19 bp, Mus musculus
  siRNA target sequence for Ntf3 (NM_008742.1,715-733).
cgctggatacgaatagaca

SEQ ID NO: 538400 - DNA, 19 bp, Mus musculus
  siRNA target sequence for Ntf3 (NM_008742.1,750-768).
cttgtcgagaaaaattgga

SEQ ID NO: 538401 - DNA, 19 bp, Mus musculus
  siRNA target sequence for Ntn1 (NM_008744.1,405-423).
gtcgctcggcaagaagttt

SEQ ID NO: 538402 - DNA, 19 bp, Mus musculus
  siRNA target sequence for Ntn1 (NM_008744.1,407-425).
cgctcggcaagaagtttga

SEQ ID NO: 538403 - DNA, 19 bp, Mus musculus
  siRNA target sequence for Ntn1 (NM_008744.1,431-449).
cctatgtgagcctgcaatt

SEQ ID NO: 538404 - DNA, 19 bp, Mus musculus
  siRNA target sequence for Ntn1 (NM_008744.1,530-548).
ccacgcagtgccgcaaaat

SEQ ID NO: 538405 - DNA, 19 bp, Mus musculus
  siRNA target sequence for Ntn1 (NM_008744.1,533-551).
cgcagtgccgcaaaatgta

SEQ ID NO: 538406 - DNA, 19 bp, Mus musculus
  siRNA target sequence for Ntn1 (NM_008744.1,535-553).
cagtgccgcaaaatgtaca

SEQ ID NO: 538407 - DNA, 19 bp, Mus musculus
  siRNA target sequence for Ntn1 (NM_008744.1,569-587).
cgcctatcaccaaacagaa

SEQ ID NO: 538408 - DNA, 19 bp, Mus musculus
  siRNA target sequence for Ntn1 (NM_008744.1,1036-1054).
gctcggcgctgcagattca

SEQ ID NO: 538409 - DNA, 19 bp, Mus musculus
  siRNA target sequence for Ntn1 (NM_008744.1,1037-1055).
ctcggcgctgcagattcaa

SEQ ID NO: 538410 - DNA, 19 bp, Mus musculus
  siRNA target sequence for Ntn1 (NM_008744.1,1039-1057).
cggcgctgcagattcaaca

SEQ ID NO: 538411 - DNA, 19 bp, Mus musculus
  siRNA target sequence for Ntn1 (NM_008744.1,1040-1058).
ggcgctgcagattcaacat

SEQ ID NO: 538412 - DNA, 19 bp, Mus musculus
  siRNA target sequence for Ntn1 (NM_008744.1,1195-1213).
gcttgcaaagcctgtgatt

SEQ ID NO: 538413 - DNA, 19 bp, Mus musculus
  siRNA target sequence for Ntn1 (NM_008744.1,1341-1359).
cgccccttgcatcaagatt

SEQ ID NO: 538414 - DNA, 19 bp, Mus musculus
  siRNA target sequence for Ntn1 (NM_008744.1,1585-1603).
cgtggtgaccagagtttgt

SEQ ID NO: 538415 - DNA, 19 bp, Mus musculus
  siRNA target sequence for Ntn1 (NM_008744.1,1628-1646).
gcaagtgtcccaaaatcaa

SEQ ID NO: 538416 - DNA, 19 bp, Mus musculus
  siRNA target sequence for Obrgrp (NM_175036.2,225-243).
gtcgggaactggcgtattt

SEQ ID NO: 538417 - DNA, 19 bp, Mus musculus
  siRNA target sequence for Obrgrp (NM_175036.2,227-245).
cgggaactggcgtatttct

SEQ ID NO: 538418 - DNA, 19 bp, Mus musculus
  siRNA target sequence for Obrgrp (NM_175036.2,228-246).
gggaactggcgtatttctt

SEQ ID NO: 538419 - DNA, 19 bp, Mus musculus
  siRNA target sequence for Ocln (NM_008756.2,182-200).
gtccgtgaggccttttgaa

SEQ ID NO: 538420 - DNA, 19 bp, Mus musculus
  siRNA target sequence for Ocln (NM_008756.2,185-203).
cgtgaggccttttgaaagt

SEQ ID NO: 538421 - DNA, 19 bp, Mus musculus
  siRNA target sequence for Ocln (NM_008756.2,300-318).
cagccagcgtactcttttt

SEQ ID NO: 538422 - DNA, 19 bp, Mus musculus
  siRNA target sequence for Ocln (NM_008756.2,302-320).
gccagcgtactctttttat

SEQ ID NO: 538423 - DNA, 19 bp, Mus musculus
  siRNA target sequence for Ocln (NM_008756.2,313-331).
ctttttatccggaagatga

SEQ ID NO: 538424 - DNA, 19 bp, Mus musculus
  siRNA target sequence for Ocln (NM_008756.2,330-348).
gaaattcttcacttctaca

SEQ ID NO: 538425 - DNA, 19 bp, Mus musculus
  siRNA target sequence for Ocln (NM_008756.2,401-419).
gatgtgcatcgccatattt

SEQ ID NO: 538426 - DNA, 19 bp, Mus musculus
  siRNA target sequence for Ocln (NM_008756.2,482-500).
cctaaactacccttatagt

SEQ ID NO: 538427 - DNA, 19 bp, Mus musculus
  siRNA target sequence for Ocln (NM_008756.2,617-635).
cttcatcgcttccttagta

SEQ ID NO: 538428 - DNA, 19 bp, Mus musculus
  siRNA target sequence for Ocln (NM_008756.2,620-638).
catcgcttccttagtaata

SEQ ID NO: 538429 - DNA, 19 bp, Mus musculus
  siRNA target sequence for Ocln (NM_008756.2,623-641).
cgcttccttagtaatattt

SEQ ID NO: 538430 - DNA, 19 bp, Mus musculus
  siRNA target sequence for Ocln (NM_008756.2,670-688).
ccaggacaagaagatatta

SEQ ID NO: 538431 - DNA, 19 bp, Mus musculus
  siRNA target sequence for Ocln (NM_008756.2,676-694).
caagaagatattacttgat

SEQ ID NO: 538432 - DNA, 19 bp, Mus musculus
  siRNA target sequence for Ocln (NM_008756.2,719-737).
gggcatcatggtgtttatt

SEQ ID NO: 538433 - DNA, 19 bp, Mus musculus
  siRNA target sequence for Ocln (NM_008756.2,739-757).
ccacgatcgtgtacataat

SEQ ID NO: 538434 - DNA, 19 bp, Mus musculus
  siRNA target sequence for Ocln (NM_008756.2,849-867).
ggtctctacgtggatcaat

SEQ ID NO: 538435 - DNA, 19 bp, Mus musculus
  siRNA target sequence for Ocln (NM_008756.2,850-868).
gtctctacgtggatcaata

SEQ ID NO: 538436 - DNA, 19 bp, Mus musculus
  siRNA target sequence for Ocln (NM_008756.2,852-870).
ctctacgtggatcaatatt

SEQ ID NO: 538437 - DNA, 19 bp, Mus musculus
  siRNA target sequence for Ocln (NM_008756.2,857-875).
cgtggatcaatatttgtat

SEQ ID NO: 538438 - DNA, 19 bp, Mus musculus
  siRNA target sequence for Ocln (NM_008756.2,940-958).
cttttgctttaatcatctt

SEQ ID NO: 538439 - DNA, 19 bp, Mus musculus
  siRNA target sequence for Ocln (NM_008756.2,990-1008).
cggtatgataagtccaata

SEQ ID NO: 538440 - DNA, 19 bp, Mus musculus
  siRNA target sequence for Ocln (NM_008756.2,991-1009).
ggtatgataagtccaatat

SEQ ID NO: 538441 - DNA, 19 bp, Mus musculus
  siRNA target sequence for Ocln (NM_008756.2,996-1014).
gataagtccaatattttgt

SEQ ID NO: 538442 - DNA, 19 bp, Mus musculus
  siRNA target sequence for Ocln (NM_008756.2,1053-1071).
gttgaagagtgggttaaaa

SEQ ID NO: 538443 - DNA, 19 bp, Mus musculus
  siRNA target sequence for Ocln (NM_008756.2,1059-1077).
gagtgggttaaaaatgtgt

SEQ ID NO: 538444 - DNA, 19 bp, Mus musculus
  siRNA target sequence for Ocln (NM_008756.2,1150-1168).
cctccaatggcaaagtgaa

SEQ ID NO: 538445 - DNA, 19 bp, Mus musculus
  siRNA target sequence for Ocln (NM_008756.2,1180-1198).
catacccagagtctttcta

SEQ ID NO: 538446 - DNA, 19 bp, Mus musculus
  siRNA target sequence for Ocln (NM_008756.2,1188-1206).
gagtctttctataagtcaa

SEQ ID NO: 538447 - DNA, 19 bp, Mus musculus
  siRNA target sequence for Ocln (NM_008756.2,1275-1293).
cggtacagcagcaatggta

SEQ ID NO: 538448 - DNA, 19 bp, Mus musculus
  siRNA target sequence for Ocln (NM_008756.2,1354-1372).
cggaccctgaccactatga

SEQ ID NO: 538449 - DNA, 19 bp, Mus musculus
  siRNA target sequence for Ocln (NM_008756.2,1355-1373).
ggaccctgaccactatgaa

SEQ ID NO: 538450 - DNA, 19 bp, Mus musculus
  siRNA target sequence for Ocln (NM_008756.2,1418-1436).
ggactgggtcagggaatat

SEQ ID NO: 538451 - DNA, 19 bp, Mus musculus
  siRNA target sequence for Ocln (NM_008756.2,1421-1439).
ctgggtcagggaatatcca

SEQ ID NO: 538452 - DNA, 19 bp, Mus musculus
  siRNA target sequence for Ocln (NM_008756.2,1445-1463).
cacttcagatcaacaaaga

SEQ ID NO: 538453 - DNA, 19 bp, Mus musculus
  siRNA target sequence for Ocln (NM_008756.2,1464-1482).
caactctacaagagaaatt

SEQ ID NO: 538454 - DNA, 19 bp, Mus musculus
  siRNA target sequence for Ocln (NM_008756.2,1488-1506).
gcaggtctgcaggagtata

SEQ ID NO: 538455 - DNA, 19 bp, Mus musculus
  siRNA target sequence for Ocln (NM_008756.2,1521-1539).
gaactagacgacgtcaata

SEQ ID NO: 538456 - DNA, 19 bp, Mus musculus
  siRNA target sequence for Ocln (NM_008756.2,1542-1560).
gagctctctcgtctagata

SEQ ID NO: 538457 - DNA, 19 bp, Mus musculus
  siRNA target sequence for Ocln (NM_008756.2,1544-1562).
gctctctcgtctagataaa

SEQ ID NO: 538458 - DNA, 19 bp, Mus musculus
  siRNA target sequence for Ocln (NM_008756.2,1609-1627).
ctgatgaatataatagact

SEQ ID NO: 538459 - DNA, 19 bp, Mus musculus
  siRNA target sequence for Ocln (NM_008756.2,1611-1629).
gatgaatataatagactaa

SEQ ID NO: 538460 - DNA, 19 bp, Mus musculus
  siRNA target sequence for Ocln (NM_008756.2,1640-1658).
gggatctgcagattataaa

SEQ ID NO: 538461 - DNA, 19 bp, Mus musculus
  siRNA target sequence for Ocln (NM_008756.2,1641-1659).
ggatctgcagattataaaa

SEQ ID NO: 538462 - DNA, 19 bp, Mus musculus
  siRNA target sequence for Ocln (NM_008756.2,1645-1663).
ctgcagattataaaagtaa

SEQ ID NO: 538463 - DNA, 19 bp, Mus musculus
  siRNA target sequence for Ocln (NM_008756.2,1680-1698).
cagttgaagagcaaattat

SEQ ID NO: 538464 - DNA, 19 bp, Mus musculus
  siRNA target sequence for Ocln (NM_008756.2,1690-1708).
gcaaattatcgcacatcaa

SEQ ID NO: 538465 - DNA, 19 bp, Mus musculus
  siRNA target sequence for P4ha2 (NM_011031.1,239-257).
ggcacatgaccgatctgat

SEQ ID NO: 538466 - DNA, 19 bp, Mus musculus
  siRNA target sequence for P4ha2 (NM_011031.1,240-258).
gcacatgaccgatctgatt

SEQ ID NO: 538467 - DNA, 19 bp, Mus musculus
  siRNA target sequence for P4ha2 (NM_011031.1,241-259).
cacatgaccgatctgattt

SEQ ID NO: 538468 - DNA, 19 bp, Mus musculus
  siRNA target sequence for P4ha2 (NM_011031.1,313-331).
gccaagctcgccaagatta

SEQ ID NO: 538469 - DNA, 19 bp, Mus musculus
  siRNA target sequence for P4ha2 (NM_011031.1,421-439).
ctggtgaagcggttgaaca

SEQ ID NO: 538470 - DNA, 19 bp, Mus musculus
  siRNA target sequence for P4ha2 (NM_011031.1,589-607).
ctggatccggacacgattt

SEQ ID NO: 538471 - DNA, 19 bp, Mus musculus
  siRNA target sequence for P4ha2 (NM_011031.1,691-709).
gaaggagactattaccata

SEQ ID NO: 538472 - DNA, 19 bp, Mus musculus
  siRNA target sequence for P4ha2 (NM_011031.1,891-909).
gaatctgcggtactttgaa

SEQ ID NO: 538473 - DNA, 19 bp, Mus musculus
  siRNA target sequence for P4ha2 (NM_011031.1,967-985).
gccacccaggaaaacttgt

SEQ ID NO: 538474 - DNA, 19 bp, Mus musculus
  siRNA target sequence for P4ha2 (NM_011031.1,1040-1058).
gaggggagggcgtgaaact

SEQ ID NO: 538475 - DNA, 19 bp, Mus musculus
  siRNA target sequence for P4ha2 (NM_011031.1,1042-1060).
ggggagggcgtgaaactga

SEQ ID NO: 538476 - DNA, 19 bp, Mus musculus
  siRNA target sequence for P4ha2 (NM_011031.1,1088-1106).
gtaggtaccatcatggaaa

SEQ ID NO: 538477 - DNA, 19 bp, Mus musculus
  siRNA target sequence for P4ha2 (NM_011031.1,1507-1525).
gtggccacgtttctaaact

SEQ ID NO: 538478 - DNA, 19 bp, Mus musculus
  siRNA target sequence for P4ha2 (NM_011031.1,1510-1528).
gccacgtttctaaactaca

SEQ ID NO: 538479 - DNA, 19 bp, Mus musculus
  siRNA target sequence for P4ha2 (NM_011031.1,1511-1529).
ccacgtttctaaactacat

SEQ ID NO: 538480 - DNA, 19 bp, Mus musculus
  siRNA target sequence for P4ha2 (NM_011031.1,1742-1760).
gtggaacaacggaagttga

SEQ ID NO: 538481 - DNA, 19 bp, Mus musculus
  siRNA target sequence for Pard3 (NM_033620.1,157-175).
cggagatggccgcatgaaa

SEQ ID NO: 538482 - DNA, 19 bp, Mus musculus
  siRNA target sequence for Pard3 (NM_033620.1,159-177).
gagatggccgcatgaaagt

SEQ ID NO: 538483 - DNA, 19 bp, Mus musculus
  siRNA target sequence for Pard3 (NM_033620.1,161-179).
gatggccgcatgaaagttt

SEQ ID NO: 538484 - DNA, 19 bp, Mus musculus
  siRNA target sequence for Pard3 (NM_033620.1,164-182).
ggccgcatgaaagttttca

SEQ ID NO: 538485 - DNA, 19 bp, Mus musculus
  siRNA target sequence for Pard3 (NM_033620.1,219-237).
ccgtggccaaggatccaaa

SEQ ID NO: 538486 - DNA, 19 bp, Mus musculus
  siRNA target sequence for Pard3 (NM_033620.1,224-242).
gccaaggatccaaactact

SEQ ID NO: 538487 - DNA, 19 bp, Mus musculus
  siRNA target sequence for Pard3 (NM_033620.1,328-346).
cagactggtagcagtattt

SEQ ID NO: 538488 - DNA, 19 bp, Mus musculus
  siRNA target sequence for Pard3 (NM_033620.1,498-516).
cagttcttcgggcaaatat

SEQ ID NO: 538489 - DNA, 19 bp, Mus musculus
  siRNA target sequence for Pard3 (NM_033620.1,508-526).
ggcaaatatgcctcttcat

SEQ ID NO: 538490 - DNA, 19 bp, Mus musculus
  siRNA target sequence for Pard3 (NM_033620.1,564-582).
ccacttctgtcagtgataa

SEQ ID NO: 538491 - DNA, 19 bp, Mus musculus
  siRNA target sequence for Pard3 (NM_033620.1,633-651).
cgacagctggctttctcaa

SEQ ID NO: 538492 - DNA, 19 bp, Mus musculus
  siRNA target sequence for Pard3 (NM_033620.1,778-796).
cgccagccacccaatggta

SEQ ID NO: 538493 - DNA, 19 bp, Mus musculus
  siRNA target sequence for Pard3 (NM_033620.1,889-907).
ggagaacatgcccaacttt

SEQ ID NO: 538494 - DNA, 19 bp, Mus musculus
  siRNA target sequence for Pard3 (NM_033620.1,909-927).
ccctcgatgatatggtaaa

SEQ ID NO: 538495 - DNA, 19 bp, Mus musculus
  siRNA target sequence for Pard3 (NM_033620.1,967-985).
ccatgtagtgcctttcagt

SEQ ID NO: 538496 - DNA, 19 bp, Mus musculus
  siRNA target sequence for Pard3 (NM_033620.1,986-1004).
gctcgaggcggcagaacat

SEQ ID NO: 538497 - DNA, 19 bp, Mus musculus
  siRNA target sequence for Pard3 (NM_033620.1,987-1005).
ctcgaggcggcagaacatt

SEQ ID NO: 538498 - DNA, 19 bp, Mus musculus
  siRNA target sequence for Pard3 (NM_033620.1,1073-1091).
gactgcattgtgaggatta

SEQ ID NO: 538499 - DNA, 19 bp, Mus musculus
  siRNA target sequence for Pard3 (NM_033620.1,1077-1095).
gcattgtgaggattaacga

SEQ ID NO: 538500 - DNA, 19 bp, Mus musculus
  siRNA target sequence for Pard3 (NM_033620.1,1078-1096).
cattgtgaggattaacgat

SEQ ID NO: 538501 - DNA, 19 bp, Mus musculus
  siRNA target sequence for Pard3 (NM_033620.1,1154-1172).
cgtgcgcgtgtcatttggt

SEQ ID NO: 538502 - DNA, 19 bp, Mus musculus
  siRNA target sequence for Pard3 (NM_033620.1,1155-1173).
gtgcgcgtgtcatttggtt

SEQ ID NO: 538503 - DNA, 19 bp, Mus musculus
  siRNA target sequence for Pard3 (NM_033620.1,1218-1236).
cccaacgcgagaagaacaa

SEQ ID NO: 538504 - DNA, 19 bp, Mus musculus
  siRNA target sequence for Pard3 (NM_033620.1,1223-1241).
cgcgagaagaacaactact

SEQ ID NO: 538505 - DNA, 19 bp, Mus musculus
  siRNA target sequence for Pard3 (NM_033620.1,1363-1381).
cccccgactacctcatagt

SEQ ID NO: 538506 - DNA, 19 bp, Mus musculus
  siRNA target sequence for Pard3 (NM_033620.1,1448-1466).
gtaggcagtgtgtacaaca

SEQ ID NO: 538507 - DNA, 19 bp, Mus musculus
  siRNA target sequence for Pard3 (NM_033620.1,1459-1477).
gtacaacacgaagaaagta

SEQ ID NO: 538508 - DNA, 19 bp, Mus musculus
  siRNA target sequence for Pard3 (NM_033620.1,1485-1503).
ggctcaacatccagcttaa

SEQ ID NO: 538509 - DNA, 19 bp, Mus musculus
  siRNA target sequence for Pard3 (NM_033620.1,1487-1505).
ctcaacatccagcttaaga

SEQ ID NO: 538510 - DNA, 19 bp, Mus musculus
  siRNA target sequence for Pard3 (NM_033620.1,1557-1575).
gtggctcagctcccattta

SEQ ID NO: 538511 - DNA, 19 bp, Mus musculus
  siRNA target sequence for Pard3 (NM_033620.1,1560-1578).
gctcagctcccatttatgt

SEQ ID NO: 538512 - DNA, 19 bp, Mus musculus
  siRNA target sequence for Pard3 (NM_033620.1,1563-1581).
cagctcccatttatgtcaa

SEQ ID NO: 538513 - DNA, 19 bp, Mus musculus
  siRNA target sequence for Pard3 (NM_033620.1,1566-1584).
ctcccatttatgtcaagaa

SEQ ID NO: 538514 - DNA, 19 bp, Mus musculus
  siRNA target sequence for Pard3 (NM_033620.1,1568-1586).
cccatttatgtcaagaata

SEQ ID NO: 538515 - DNA, 19 bp, Mus musculus
  siRNA target sequence for Pard3 (NM_033620.1,1569-1587).
ccatttatgtcaagaatat

SEQ ID NO: 538516 - DNA, 19 bp, Mus musculus
  siRNA target sequence for Pard3 (NM_033620.1,1629-1647).
caggagaccggctaataga

SEQ ID NO: 538517 - DNA, 19 bp, Mus musculus
  siRNA target sequence for Pard3 (NM_033620.1,1646-1664).
gaggtcaatggagtagatt

SEQ ID NO: 538518 - DNA, 19 bp, Mus musculus
  siRNA target sequence for Pard3 (NM_033620.1,1762-1780).
ccacccaagggaaatgaat

SEQ ID NO: 538519 - DNA, 19 bp, Mus musculus
  siRNA target sequence for Pard3 (NM_033620.1,1955-1973).
gatttggggatcttcgtta

SEQ ID NO: 538520 - DNA, 19 bp, Mus musculus
  siRNA target sequence for Pard3 (NM_033620.1,1961-1979).
gggatcttcgttaaatcca

SEQ ID NO: 538521 - DNA, 19 bp, Mus musculus
  siRNA target sequence for Pard3 (NM_033620.1,1962-1980).
ggatcttcgttaaatccat

SEQ ID NO: 538522 - DNA, 19 bp, Mus musculus
  siRNA target sequence for Pard3 (NM_033620.1,1969-1987).
cgttaaatccattatcaat

SEQ ID NO: 538523 - DNA, 19 bp, Mus musculus
  siRNA target sequence for Pard3 (NM_033620.1,1989-2007).
gtggagctgcatctaaaga

SEQ ID NO: 538524 - DNA, 19 bp, Mus musculus
  siRNA target sequence for Pard3 (NM_033620.1,2154-2172).
ggcggatcagcagatgtaa

SEQ ID NO: 538525 - DNA, 19 bp, Mus musculus
  siRNA target sequence for Pard3 (NM_033620.1,2306-2324).
gcagcactgagcaggataa

SEQ ID NO: 538526 - DNA, 19 bp, Mus musculus
  siRNA target sequence for Pard3 (NM_033620.1,2307-2325).
cagcactgagcaggataat

SEQ ID NO: 538527 - DNA, 19 bp, Mus musculus
  siRNA target sequence for Pard3 (NM_033620.1,2371-2389).
cactgtcatgattgaagat

SEQ ID NO: 538528 - DNA, 19 bp, Mus musculus
  siRNA target sequence for Pard3 (NM_033620.1,2373-2391).
ctgtcatgattgaagatga

SEQ ID NO: 538529 - DNA, 19 bp, Mus musculus
  siRNA target sequence for Pard3 (NM_033620.1,2442-2460).
cccatgatgacgttggatt

SEQ ID NO: 538530 - DNA, 19 bp, Mus musculus
  siRNA target sequence for Pard3 (NM_033620.1,2447-2465).
gatgacgttggattcataa

SEQ ID NO: 538531 - DNA, 19 bp, Mus musculus
  siRNA target sequence for Pard3 (NM_033620.1,2452-2470).
cgttggattcataatgaca

SEQ ID NO: 538532 - DNA, 19 bp, Mus musculus
  siRNA target sequence for Pard3 (NM_033620.1,2518-2536).
ctcattgagtccagatgtt

SEQ ID NO: 538533 - DNA, 19 bp, Mus musculus
  siRNA target sequence for Pard3 (NM_033620.1,2520-2538).
cattgagtccagatgttga

SEQ ID NO: 538534 - DNA, 19 bp, Mus musculus
  siRNA target sequence for Pard3 (NM_033620.1,2550-2568).
cttttcaacgggaaggatt

SEQ ID NO: 538535 - DNA, 19 bp, Mus musculus
  siRNA target sequence for Pard3 (NM_033620.1,2573-2591).
cgccagagtatgtcagaaa

SEQ ID NO: 538536 - DNA, 19 bp, Mus musculus
  siRNA target sequence for Pard3 (NM_033620.1,2588-2606).
gaaaaacgcacaaagcaat

SEQ ID NO: 538537 - DNA, 19 bp, Mus musculus
  siRNA target sequence for Pard3 (NM_033620.1,2616-2634).
ccagtcaattggatttcgt

SEQ ID NO: 538538 - DNA, 19 bp, Mus musculus
  siRNA target sequence for Pard3 (NM_033620.1,2617-2635).
cagtcaattggatttcgtt

SEQ ID NO: 538539 - DNA, 19 bp, Mus musculus
  siRNA target sequence for Pard3 (NM_033620.1,2619-2637).
gtcaattggatttcgttaa

SEQ ID NO: 538540 - DNA, 19 bp, Mus musculus
  siRNA target sequence for Pard3 (NM_033620.1,2632-2650).
cgttaaaacacgaaaatca

SEQ ID NO: 538541 - DNA, 19 bp, Mus musculus
  siRNA target sequence for Pard3 (NM_033620.1,2669-2687).
gctgacgagactaaactca

SEQ ID NO: 538542 - DNA, 19 bp, Mus musculus
  siRNA target sequence for Pard3 (NM_033620.1,2670-2688).
ctgacgagactaaactcaa

SEQ ID NO: 538543 - DNA, 19 bp, Mus musculus
  siRNA target sequence for Pard3 (NM_033620.1,2672-2690).
gacgagactaaactcaata

SEQ ID NO: 538544 - DNA, 19 bp, Mus musculus
  siRNA target sequence for Pard3 (NM_033620.1,2674-2692).
cgagactaaactcaataca

SEQ ID NO: 538545 - DNA, 19 bp, Mus musculus
  siRNA target sequence for Pard3 (NM_033620.1,2736-2754).
cctccttaggtctgaagaa

SEQ ID NO: 538546 - DNA, 19 bp, Mus musculus
  siRNA target sequence for Pard3 (NM_033620.1,2737-2755).
ctccttaggtctgaagaaa

SEQ ID NO: 538547 - DNA, 19 bp, Mus musculus
  siRNA target sequence for Pard3 (NM_033620.1,2740-2758).
cttaggtctgaagaaatct

SEQ ID NO: 538548 - DNA, 19 bp, Mus musculus
  siRNA target sequence for Pard3 (NM_033620.1,2752-2770).
gaaatctagctccttagaa

SEQ ID NO: 538549 - DNA, 19 bp, Mus musculus
  siRNA target sequence for Pard3 (NM_033620.1,2826-2844).
gccctcggccacgaatcat

SEQ ID NO: 538550 - DNA, 19 bp, Mus musculus
  siRNA target sequence for Pard3 (NM_033620.1,2998-3016).
cgatcagccttcctattct

SEQ ID NO: 538551 - DNA, 19 bp, Mus musculus
  siRNA target sequence for Pard3 (NM_033620.1,3074-3092).
gacaaagccggaaaggata

SEQ ID NO: 538552 - DNA, 19 bp, Mus musculus
  siRNA target sequence for Pard3 (NM_033620.1,3080-3098).
gccggaaaggataagaaga

SEQ ID NO: 538553 - DNA, 19 bp, Mus musculus
  siRNA target sequence for Pard3 (NM_033620.1,3386-3404).
ctgtatgggggcatgtcat

SEQ ID NO: 538554 - DNA, 19 bp, Mus musculus
  siRNA target sequence for Pard3 (NM_033620.1,3394-3412).
gggcatgtcatcctatgaa

SEQ ID NO: 538555 - DNA, 19 bp, Mus musculus
  siRNA target sequence for Pard3 (NM_033620.1,3682-3700).
gtccgtggaggttcaagta

SEQ ID NO: 538556 - DNA, 19 bp, Mus musculus
  siRNA target sequence for Pard3 (NM_033620.1,3685-3703).
cgtggaggttcaagtacaa

SEQ ID NO: 538557 - DNA, 19 bp, Mus musculus
  siRNA target sequence for Pard3 (NM_033620.1,3781-3799).
gaatgccagctccatatca

SEQ ID NO: 538558 - DNA, 19 bp, Mus musculus
  siRNA target sequence for Pcaf (NM_020005.1,1978-1996).
gcccagattcgaaaagtct

SEQ ID NO: 538559 - DNA, 19 bp, Mus musculus
  siRNA target sequence for Pcaf (NM_020005.1,1979-1997).
cccagattcgaaaagtcta

SEQ ID NO: 538560 - DNA, 19 bp, Mus musculus
  siRNA target sequence for Pcaf (NM_020005.1,2160-2178).
gaagaaccatccaaatgct

SEQ ID NO: 538561 - DNA, 19 bp, Mus musculus
  siRNA target sequence for Pcaf (NM_020005.1,2354-2372).
ctcccgagagcgagtacta

SEQ ID NO: 538562 - DNA, 19 bp, Mus musculus
  siRNA target sequence for Pdhx (NM_175094.2,216-234).
ctgcaggcggatcctatta

SEQ ID NO: 538563 - DNA, 19 bp, Mus musculus
  siRNA target sequence for Pdhx (NM_175094.2,263-281).
gatggagcaagggaacatt

SEQ ID NO: 538564 - DNA, 19 bp, Mus musculus
  siRNA target sequence for Pdhx (NM_175094.2,269-287).
gcaagggaacattgtgaaa

SEQ ID NO: 538565 - DNA, 19 bp, Mus musculus
  siRNA target sequence for Pdhx (NM_175094.2,270-288).
caagggaacattgtgaaat

SEQ ID NO: 538566 - DNA, 19 bp, Mus musculus
  siRNA target sequence for Pdhx (NM_175094.2,319-337).
ctggagactcgttatgtga

SEQ ID NO: 538567 - DNA, 19 bp, Mus musculus
  siRNA target sequence for Pdhx (NM_175094.2,321-339).
ggagactcgttatgtgaaa

SEQ ID NO: 538568 - DNA, 19 bp, Mus musculus
  siRNA target sequence for Pdhx (NM_175094.2,322-340).
gagactcgttatgtgaaat

SEQ ID NO: 538569 - DNA, 19 bp, Mus musculus
  siRNA target sequence for Pdhx (NM_175094.2,353-371).
ggctgtggtcaccttagat

SEQ ID NO: 538570 - DNA, 19 bp, Mus musculus
  siRNA target sequence for Pdhx (NM_175094.2,385-403).
gcatcttagccaagatagt

SEQ ID NO: 538571 - DNA, 19 bp, Mus musculus
  siRNA target sequence for Pdhx (NM_175094.2,410-428).
ggaaggtgctaaaaatata

SEQ ID NO: 538572 - DNA, 19 bp, Mus musculus
  siRNA target sequence for Pdhx (NM_175094.2,432-450).
ctgggttcactcattgctt

SEQ ID NO: 538573 - DNA, 19 bp, Mus musculus
  siRNA target sequence for Pdhx (NM_175094.2,552-570).
ccacagccgcagattcctt

SEQ ID NO: 538574 - DNA, 19 bp, Mus musculus
  siRNA target sequence for Pdhx (NM_175094.2,599-617).
ggcacggttccgcttaagt

SEQ ID NO: 538575 - DNA, 19 bp, Mus musculus
  siRNA target sequence for Pdhx (NM_175094.2,625-643).
cccgcaacattctggaaaa

SEQ ID NO: 538576 - DNA, 19 bp, Mus musculus
  siRNA target sequence for Pdhx (NM_175094.2,626-644).
ccgcaacattctggaaaaa

SEQ ID NO: 538577 - DNA, 19 bp, Mus musculus
  siRNA target sequence for Pdhx (NM_175094.2,628-646).
gcaacattctggaaaaaca

SEQ ID NO: 538578 - DNA, 19 bp, Mus musculus
  siRNA target sequence for Pdhx (NM_175094.2,629-647).
caacattctggaaaaacat

SEQ ID NO: 538579 - DNA, 19 bp, Mus musculus
  siRNA target sequence for Pdhx (NM_175094.2,678-696).
ggccctcgcgggatcttca

SEQ ID NO: 538580 - DNA, 19 bp, Mus musculus
  siRNA target sequence for Pdhx (NM_175094.2,681-699).
cctcgcgggatcttcacta

SEQ ID NO: 538581 - DNA, 19 bp, Mus musculus
  siRNA target sequence for Pdhx (NM_175094.2,682-700).
ctcgcgggatcttcactaa

SEQ ID NO: 538582 - DNA, 19 bp, Mus musculus
  siRNA target sequence for Pdhx (NM_175094.2,685-703).
gcgggatcttcactaaaga

SEQ ID NO: 538583 - DNA, 19 bp, Mus musculus
  siRNA target sequence for Pdhx (NM_175094.2,686-704).
cgggatcttcactaaagaa

SEQ ID NO: 538584 - DNA, 19 bp, Mus musculus
  siRNA target sequence for Pdhx (NM_175094.2,868-886).
cgaatgcagcgggtacatt

SEQ ID NO: 538585 - DNA, 19 bp, Mus musculus
  siRNA target sequence for Pdhx (NM_175094.2,890-908).
cgaaattcctgctagcaat

SEQ ID NO: 538586 - DNA, 19 bp, Mus musculus
  siRNA target sequence for Pdhx (NM_175094.2,897-915).
cctgctagcaatattcgaa

SEQ ID NO: 538587 - DNA, 19 bp, Mus musculus
  siRNA target sequence for Pdhx (NM_175094.2,918-936).
gttatcgctaagaggttaa

SEQ ID NO: 538588 - DNA, 19 bp, Mus musculus
  siRNA target sequence for Pdhx (NM_175094.2,923-941).
cgctaagaggttaactgaa

SEQ ID NO: 538589 - DNA, 19 bp, Mus musculus
  siRNA target sequence for Pdhx (NM_175094.2,924-942).
gctaagaggttaactgaat

SEQ ID NO: 538590 - DNA, 19 bp, Mus musculus
  siRNA target sequence for Pdhx (NM_175094.2,929-947).
gaggttaactgaatcaaaa

SEQ ID NO: 538591 - DNA, 19 bp, Mus musculus
  siRNA target sequence for Pdhx (NM_175094.2,990-1008).
ggcgcagttctaaaggtta

SEQ ID NO: 538592 - DNA, 19 bp, Mus musculus
  siRNA target sequence for Pdhx (NM_175094.2,1012-1030).
gagatctggtcaaagatga

SEQ ID NO: 538593 - DNA, 19 bp, Mus musculus
  siRNA target sequence for Pdhx (NM_175094.2,1038-1056).
gtctcagtaaatgacttta

SEQ ID NO: 538594 - DNA, 19 bp, Mus musculus
  siRNA target sequence for Pdhx (NM_175094.2,1044-1062).
gtaaatgactttatcatca

SEQ ID NO: 538595 - DNA, 19 bp, Mus musculus
  siRNA target sequence for Pdhx (NM_175094.2,1065-1083).
gcagcagctgttactctta

SEQ ID NO: 538596 - DNA, 19 bp, Mus musculus
  siRNA target sequence for Pdhx (NM_175094.2,1069-1087).
cagctgttactcttaaaca

SEQ ID NO: 538597 - DNA, 19 bp, Mus musculus
  siRNA target sequence for Pdhx (NM_175094.2,1071-1089).
gctgttactcttaaacaaa

SEQ ID NO: 538598 - DNA, 19 bp, Mus musculus
  siRNA target sequence for Pdhx (NM_175094.2,1133-1151).
gctgccctctgttgacatt

SEQ ID NO: 538599 - DNA, 19 bp, Mus musculus
  siRNA target sequence for Pdhx (NM_175094.2,1134-1152).
ctgccctctgttgacattt

SEQ ID NO: 538600 - DNA, 19 bp, Mus musculus
  siRNA target sequence for Pdhx (NM_175094.2,1161-1179).
gtggcaacagataaaggtt

SEQ ID NO: 538601 - DNA, 19 bp, Mus musculus
  siRNA target sequence for Pdhx (NM_175094.2,1163-1181).
ggcaacagataaaggttta

SEQ ID NO: 538602 - DNA, 19 bp, Mus musculus
  siRNA target sequence for Pdhx (NM_175094.2,1164-1182).
gcaacagataaaggtttaa

SEQ ID NO: 538603 - DNA, 19 bp, Mus musculus
  siRNA target sequence for Pdhx (NM_175094.2,1165-1183).
caacagataaaggtttaat

SEQ ID NO: 538604 - DNA, 19 bp, Mus musculus
  siRNA target sequence for Pdhx (NM_175094.2,1177-1195).
gtttaattacaccaatcat

SEQ ID NO: 538605 - DNA, 19 bp, Mus musculus
  siRNA target sequence for Pdhx (NM_175094.2,1229-1247).
cgctgactctgtaaaggtt

SEQ ID NO: 538606 - DNA, 19 bp, Mus musculus
  siRNA target sequence for Pdhx (NM_175094.2,1261-1279).
cacgggatgggaaattgat

SEQ ID NO: 538607 - DNA, 19 bp, Mus musculus
  siRNA target sequence for Pdhx (NM_175094.2,1289-1307).
gtaccaaggaggatctttt

SEQ ID NO: 538608 - DNA, 19 bp, Mus musculus
  siRNA target sequence for Pdhx (NM_175094.2,1292-1310).
ccaaggaggatcttttagt

SEQ ID NO: 538609 - DNA, 19 bp, Mus musculus
  siRNA target sequence for Pdhx (NM_175094.2,1293-1311).
caaggaggatcttttagta

SEQ ID NO: 538610 - DNA, 19 bp, Mus musculus
  siRNA target sequence for Pdhx (NM_175094.2,1341-1359).
gagttcgctgcagtgatta

SEQ ID NO: 538611 - DNA, 19 bp, Mus musculus
  siRNA target sequence for Pdhx (NM_175094.2,1362-1380).
ccgcctcaggcctgtatct

SEQ ID NO: 538612 - DNA, 19 bp, Mus musculus
  siRNA target sequence for Pdhx (NM_175094.2,1363-1381).
cgcctcaggcctgtatctt

SEQ ID NO: 538613 - DNA, 19 bp, Mus musculus
  siRNA target sequence for Pdhx (NM_175094.2,1458-1476).
cttataacggtcacaatgt

SEQ ID NO: 538614 - DNA, 19 bp, Mus musculus
  siRNA target sequence for Pdhx (NM_175094.2,1484-1502).
cagccgagtggttgatgat

SEQ ID NO: 538615 - DNA, 19 bp, Mus musculus
  siRNA target sequence for Pdhx (NM_175094.2,1489-1507).
gagtggttgatgatgaact

SEQ ID NO: 538616 - DNA, 19 bp, Mus musculus
  siRNA target sequence for Pea15 (NM_008556.1,1001-1019).
gtggtttttagcattaact

SEQ ID NO: 538617 - DNA, 19 bp, Mus musculus
  siRNA target sequence for Pea15 (NM_008556.1,1065-1083).
gaagtggcagagccaaatt

SEQ ID NO: 538618 - DNA, 19 bp, Mus musculus
  siRNA target sequence for Pea15 (NM_008556.1,1116-1134).
ctaaccacaacaaatgtta

SEQ ID NO: 538619 - DNA, 19 bp, Mus musculus
  siRNA target sequence for Pea15 (NM_011063.1,215-233).
gtcctgacctcctcactat

SEQ ID NO: 538620 - DNA, 19 bp, Mus musculus
  siRNA target sequence for Pea15 (NM_011063.1,336-354).
ccggcagccctctgaagaa

SEQ ID NO: 538621 - DNA, 19 bp, Mus musculus
  siRNA target sequence for Peli2 (NM_033602.1,292-310).
ggggtacaatggtgcttta

SEQ ID NO: 538622 - DNA, 19 bp, Mus musculus
  siRNA target sequence for Peli2 (NM_033602.1,364-382).
ctacgccagtggtgtcaaa

SEQ ID NO: 538623 - DNA, 19 bp, Mus musculus
  siRNA target sequence for Peli2 (NM_033602.1,440-458).
ggacatcacagcatatcgt

SEQ ID NO: 538624 - DNA, 19 bp, Mus musculus
  siRNA target sequence for Peli2 (NM_033602.1,441-459).
gacatcacagcatatcgta

SEQ ID NO: 538625 - DNA, 19 bp, Mus musculus
  siRNA target sequence for Peli2 (NM_033602.1,490-508).
ggagtacacacacgataaa

SEQ ID NO: 538626 - DNA, 19 bp, Mus musculus
  siRNA target sequence for Peli2 (NM_033602.1,683-701).
gcggcaggattcgattctt

SEQ ID NO: 538627 - DNA, 19 bp, Mus musculus
  siRNA target sequence for Peli2 (NM_033602.1,689-707).
ggattcgattcttccaaaa

SEQ ID NO: 538628 - DNA, 19 bp, Mus musculus
  siRNA target sequence for Peli2 (NM_033602.1,849-867).
ctgtctgtggggatgtata

SEQ ID NO: 538629 - DNA, 19 bp, Mus musculus
  siRNA target sequence for Peli2 (NM_033602.1,984-1002).
ccgcagatggcctttttca

SEQ ID NO: 538630 - DNA, 19 bp, Mus musculus
  siRNA target sequence for Peli2 (NM_033602.1,1029-1047).
ccctccggcaggagatcaa

SEQ ID NO: 538631 - DNA, 19 bp, Mus musculus
  siRNA target sequence for Peli2 (NM_033602.1,1030-1048).
cctccggcaggagatcaat

SEQ ID NO: 538632 - DNA, 19 bp, Mus musculus
  siRNA target sequence for Peli2 (NM_033602.1,1264-1282).
ctgtgaggcaggattttat

SEQ ID NO: 538633 - DNA, 19 bp, Mus musculus
  siRNA target sequence for Peli2 (NM_033602.1,1443-1461).
gcatcaaattgattttcca

SEQ ID NO: 538634 - DNA, 19 bp, Mus musculus
  siRNA target sequence for Phc2 (NM_018774.1,116-134).
caccagtgggaccaatagt

SEQ ID NO: 538635 - DNA, 19 bp, Mus musculus
  siRNA target sequence for Phc2 (NM_018774.1,522-540).
cgggcacagagtgtcaatt

SEQ ID NO: 538636 - DNA, 19 bp, Mus musculus
  siRNA target sequence for Phc2 (NM_018774.1,524-542).
ggcacagagtgtcaattca

SEQ ID NO: 538637 - DNA, 19 bp, Mus musculus
  siRNA target sequence for Phc2 (NM_018774.1,634-652).
gggcgcagatgctcatctt

SEQ ID NO: 538638 - DNA, 19 bp, Mus musculus
  siRNA target sequence for Phc2 (NM_018774.1,636-654).
gcgcagatgctcatcttca

SEQ ID NO: 538639 - DNA, 19 bp, Mus musculus
  siRNA target sequence for Phc2 (NM_018774.1,662-680).
ggccaccgtcgctactgtt

SEQ ID NO: 538640 - DNA, 19 bp, Mus musculus
  siRNA target sequence for Phc2 (NM_018774.1,908-926).
gcctagtgggactgacaat

SEQ ID NO: 538641 - DNA, 19 bp, Mus musculus
  siRNA target sequence for Phc2 (NM_018774.1,1592-1610).
gacagggcagggcattgtt

SEQ ID NO: 538642 - DNA, 19 bp, Mus musculus
  siRNA target sequence for Phc2 (NM_018774.1,1689-1707).
ccccagaatggtgagaata

SEQ ID NO: 538643 - DNA, 19 bp, Mus musculus
  siRNA target sequence for Phc2 (NM_018774.1,1734-1752).
caaatcctgacgcatgtta

SEQ ID NO: 538644 - DNA, 19 bp, Mus musculus
  siRNA target sequence for Phc2 (NM_018774.1,1739-1757).
cctgacgcatgttatcgaa

SEQ ID NO: 538645 - DNA, 19 bp, Mus musculus
  siRNA target sequence for Phc2 (NM_018774.1,1938-1956).
ggcactcccctcaaactca

SEQ ID NO: 538646 - DNA, 19 bp, Mus musculus
  siRNA target sequence for Phc2 (NM_018774.1,2056-2074).
ccaaacgagtgggactttt

SEQ ID NO: 538647 - DNA, 19 bp, Mus musculus
  siRNA target sequence for Phc2 (NM_018774.1,2057-2075).
caaacgagtgggacttttt

SEQ ID NO: 538648 - DNA, 19 bp, Mus musculus
  siRNA target sequence for Phc2 (NM_018774.1,2061-2079).
cgagtgggactttttcact

SEQ ID NO: 538649 - DNA, 19 bp, Mus musculus
  siRNA target sequence for Phc2 (NM_018774.1,2189-2207).
cactgtacccctttcagtt

SEQ ID NO: 538650 - DNA, 19 bp, Mus musculus
  siRNA target sequence for Phc2 (NM_018774.1,2396-2414).
gccgagcgagcccacaaaa

SEQ ID NO: 538651 - DNA, 19 bp, Mus musculus
  siRNA target sequence for Phc2 (NM_018774.1,2397-2415).
ccgagcgagcccacaaaat

SEQ ID NO: 538652 - DNA, 19 bp, Mus musculus
  siRNA target sequence for Phc2 (NM_018774.1,2483-2501).
ccgtgcgcaggagattgat

SEQ ID NO: 538653 - DNA, 19 bp, Mus musculus
  siRNA target sequence for Phyhip (NM_145981.1,330-348).
gcatcgagatcaacaatat

SEQ ID NO: 538654 - DNA, 19 bp, Mus musculus
  siRNA target sequence for Phyhip (NM_145981.1,402-420).
gggtcacccattattttat

SEQ ID NO: 538655 - DNA, 19 bp, Mus musculus
  siRNA target sequence for Phyhip (NM_145981.1,403-421).
ggtcacccattattttatt

SEQ ID NO: 538656 - DNA, 19 bp, Mus musculus
  siRNA target sequence for Phyhip (NM_145981.1,930-948).
ctgcccagcgcctcttcaa

SEQ ID NO: 538657 - DNA, 19 bp, Mus musculus
  siRNA target sequence for Phyhip (NM_145981.1,1076-1094).
gacattgcctgcaacaagt

SEQ ID NO: 538658 - DNA, 19 bp, Mus musculus
  siRNA target sequence for Phyhip (NM_145981.1,1237-1255).
cactgctgacgccaagaaa

SEQ ID NO: 538659 - DNA, 19 bp, Mus musculus
  siRNA target sequence for Pik3ap1 (NM_031376.1,127-145).
gatgcgacatcctcatctt

SEQ ID NO: 538660 - DNA, 19 bp, Mus musculus
  siRNA target sequence for Pik3ap1 (NM_031376.1,174-192).
cagtacctacaggatcttt

SEQ ID NO: 538661 - DNA, 19 bp, Mus musculus
  siRNA target sequence for Pik3ap1 (NM_031376.1,243-261).
gtcccggatgcctctttct

SEQ ID NO: 538662 - DNA, 19 bp, Mus musculus
  siRNA target sequence for Pik3ap1 (NM_031376.1,671-689).
ggcagaaaccactgtgtat

SEQ ID NO: 538663 - DNA, 19 bp, Mus musculus
  siRNA target sequence for Pik3ap1 (NM_031376.1,672-690).
gcagaaaccactgtgtata

SEQ ID NO: 538664 - DNA, 19 bp, Mus musculus
  siRNA target sequence for Pik3ap1 (NM_031376.1,818-836).
cctctcctcggggaatgtt

SEQ ID NO: 538665 - DNA, 19 bp, Mus musculus
  siRNA target sequence for Pik3ap1 (NM_031376.1,819-837).
ctctcctcggggaatgttt

SEQ ID NO: 538666 - DNA, 19 bp, Mus musculus
  siRNA target sequence for Pik3ap1 (NM_031376.1,873-891).
gaaaccaccgtcagctatt

SEQ ID NO: 538667 - DNA, 19 bp, Mus musculus
  siRNA target sequence for Pik3ap1 (NM_031376.1,902-920).
ggaggaaattgggaactta

SEQ ID NO: 538668 - DNA, 19 bp, Mus musculus
  siRNA target sequence for Pik3ap1 (NM_031376.1,923-941).
gtcgagtgctgcaaatcct

SEQ ID NO: 538669 - DNA, 19 bp, Mus musculus
  siRNA target sequence for Pik3ap1 (NM_031376.1,933-951).
gcaaatcctgtggagttta

SEQ ID NO: 538670 - DNA, 19 bp, Mus musculus
  siRNA target sequence for Pik3ap1 (NM_031376.1,983-1001).
cacagagactctcgataaa

SEQ ID NO: 538671 - DNA, 19 bp, Mus musculus
  siRNA target sequence for Pik3ap1 (NM_031376.1,985-1003).
cagagactctcgataaact

SEQ ID NO: 538672 - DNA, 19 bp, Mus musculus
  siRNA target sequence for Pik3ap1 (NM_031376.1,1068-1086).
ctggaagaagacgatatga

SEQ ID NO: 538673 - DNA, 19 bp, Mus musculus
  siRNA target sequence for Pik3ap1 (NM_031376.1,1110-1128).
ctgcccacgctgttgcatt

SEQ ID NO: 538674 - DNA, 19 bp, Mus musculus
  siRNA target sequence for Pik3ap1 (NM_031376.1,1124-1142).
gcattttgctgccaagtat

SEQ ID NO: 538675 - DNA, 19 bp, Mus musculus
  siRNA target sequence for Pik3ap1 (NM_031376.1,1475-1493).
cctctatgttgaaatgctt

SEQ ID NO: 538676 - DNA, 19 bp, Mus musculus
  siRNA target sequence for Pik3ap1 (NM_031376.1,1550-1568).
ctcgatgatccgcaagttt

SEQ ID NO: 538677 - DNA, 19 bp, Mus musculus
  siRNA target sequence for Pik3ap1 (NM_031376.1,1552-1570).
cgatgatccgcaagtttct

SEQ ID NO: 538678 - DNA, 19 bp, Mus musculus
  siRNA target sequence for Pik3ap1 (NM_031376.1,1553-1571).
gatgatccgcaagtttcta

SEQ ID NO: 538679 - DNA, 19 bp, Mus musculus
  siRNA target sequence for Pik3ap1 (NM_031376.1,1565-1583).
gtttctagaaggtaacagt

SEQ ID NO: 538680 - DNA, 19 bp, Mus musculus
  siRNA target sequence for Pik3ap1 (NM_031376.1,1620-1638).
ccctatggggaggaacttt

SEQ ID NO: 538681 - DNA, 19 bp, Mus musculus
  siRNA target sequence for Pik3ap1 (NM_031376.1,1746-1764).
gacaatgagccatacattt

SEQ ID NO: 538682 - DNA, 19 bp, Mus musculus
  siRNA target sequence for Pik3ap1 (NM_031376.1,1748-1766).
caatgagccatacatttct

SEQ ID NO: 538683 - DNA, 19 bp, Mus musculus
  siRNA target sequence for Pik3ap1 (NM_031376.1,1791-1809).
gagcggctcgggaatttct

SEQ ID NO: 538684 - DNA, 19 bp, Mus musculus
  siRNA target sequence for Pik3ap1 (NM_031376.1,1797-1815).
ctcgggaatttctacgttt

SEQ ID NO: 538685 - DNA, 19 bp, Mus musculus
  siRNA target sequence for Pik3ap1 (NM_031376.1,1877-1895).
catctacgacccatttgct

SEQ ID NO: 538686 - DNA, 19 bp, Mus musculus
  siRNA target sequence for Pik3ap1 (NM_031376.1,1973-1991).
ggccgtgctgcatttcaaa

SEQ ID NO: 538687 - DNA, 19 bp, Mus musculus
  siRNA target sequence for Pik3ap1 (NM_031376.1,1992-2010).
gagtggcaactcaatcaga

SEQ ID NO: 538688 - DNA, 19 bp, Mus musculus
  siRNA target sequence for Pik3ap1 (NM_031376.1,2334-2352).
gacaacgaggacaacgaaa

SEQ ID NO: 538689 - DNA, 19 bp, Mus musculus
  siRNA target sequence for Pik3ap1 (NM_031376.1,2345-2363).
caacgaaatccccgaaatt

SEQ ID NO: 538690 - DNA, 19 bp, Mus musculus
  siRNA target sequence for Pik3r1 (NM_011085.1,51-69).
cacggtttggactatggaa

SEQ ID NO: 538691 - DNA, 19 bp, Mus musculus
  siRNA target sequence for Pik3r1 (NM_011085.1,84-102).
gtgtgccaagacagatata

SEQ ID NO: 538692 - DNA, 19 bp, Mus musculus
  siRNA target sequence for Pik3r1 (NM_011085.1,113-131).
cagacttggtgttttatat

SEQ ID NO: 538693 - DNA, 19 bp, Mus musculus
  siRNA target sequence for Pik3r1 (NM_011085.1,300-318).
ggtacgagacgcatctact

SEQ ID NO: 538694 - DNA, 19 bp, Mus musculus
  siRNA target sequence for Pik3r1 (NM_011085.1,301-319).
gtacgagacgcatctacta

SEQ ID NO: 538695 - DNA, 19 bp, Mus musculus
  siRNA target sequence for Pik3r1 (NM_011085.1,304-322).
cgagacgcatctactaaaa

SEQ ID NO: 538696 - DNA, 19 bp, Mus musculus
  siRNA target sequence for Pik3r1 (NM_011085.1,305-323).
gagacgcatctactaaaat

SEQ ID NO: 538697 - DNA, 19 bp, Mus musculus
  siRNA target sequence for Pik3r1 (NM_011085.1,325-343).
cacggcgattacactctta

SEQ ID NO: 538698 - DNA, 19 bp, Mus musculus
  siRNA target sequence for Pik3r1 (NM_011085.1,327-345).
cggcgattacactcttaca

SEQ ID NO: 538699 - DNA, 19 bp, Mus musculus
  siRNA target sequence for Pik3r1 (NM_011085.1,329-347).
gcgattacactcttacact

SEQ ID NO: 538700 - DNA, 19 bp, Mus musculus
  siRNA target sequence for Pik3r1 (NM_011085.1,330-348).
cgattacactcttacacta

SEQ ID NO: 538701 - DNA, 19 bp, Mus musculus
  siRNA target sequence for Pik3r1 (NM_011085.1,331-349).
gattacactcttacactaa

SEQ ID NO: 538702 - DNA, 19 bp, Mus musculus
  siRNA target sequence for Pik3r1 (NM_011085.1,366-384).
caaattaatcaaaatcttt

SEQ ID NO: 538703 - DNA, 19 bp, Mus musculus
  siRNA target sequence for Pik3r1 (NM_011085.1,381-399).
ctttcaccgtgatggaaaa

SEQ ID NO: 538704 - DNA, 19 bp, Mus musculus
  siRNA target sequence for Pik3r1 (NM_011085.1,412-430).
gatccattaaccttcaact

SEQ ID NO: 538705 - DNA, 19 bp, Mus musculus
  siRNA target sequence for Pik3r1 (NM_011085.1,453-471).
ctaccggaatgagtcttta

SEQ ID NO: 538706 - DNA, 19 bp, Mus musculus
  siRNA target sequence for Pik3r1 (NM_011085.1,456-474).
ccggaatgagtctttagct

SEQ ID NO: 538707 - DNA, 19 bp, Mus musculus
  siRNA target sequence for Pik3r1 (NM_011085.1,580-598).
catgaatataatactcaat

SEQ ID NO: 538708 - DNA, 19 bp, Mus musculus
  siRNA target sequence for Pik3r1 (NM_011085.1,611-629).
gtcgggaatatgatagatt

SEQ ID NO: 538709 - DNA, 19 bp, Mus musculus
  siRNA target sequence for Pik3r1 (NM_011085.1,613-631).
cgggaatatgatagattat

SEQ ID NO: 538710 - DNA, 19 bp, Mus musculus
  siRNA target sequence for Pik3r1 (NM_011085.1,614-632).
gggaatatgatagattata

SEQ ID NO: 538711 - DNA, 19 bp, Mus musculus
  siRNA target sequence for Pik3r1 (NM_011085.1,669-687).
gaaaagaacggctatcgaa

SEQ ID NO: 538712 - DNA, 19 bp, Mus musculus
  siRNA target sequence for Pik3r1 (NM_011085.1,677-695).
cggctatcgaagcatttaa

SEQ ID NO: 538713 - DNA, 19 bp, Mus musculus
  siRNA target sequence for Pik3r1 (NM_011085.1,678-696).
ggctatcgaagcatttaat

SEQ ID NO: 538714 - DNA, 19 bp, Mus musculus
  siRNA target sequence for Pik3r1 (NM_011085.1,688-706).
gcatttaatgaaaccataa

SEQ ID NO: 538715 - DNA, 19 bp, Mus musculus
  siRNA target sequence for Pik3r1 (NM_011085.1,746-764).
gcaaagaatacatagagaa

SEQ ID NO: 538716 - DNA, 19 bp, Mus musculus
  siRNA target sequence for Pik3r1 (NM_011085.1,773-791).
gcgaaggcaacgagaaaga

SEQ ID NO: 538717 - DNA, 19 bp, Mus musculus
  siRNA target sequence for Pik3r1 (NM_011085.1,774-792).
cgaaggcaacgagaaagaa

SEQ ID NO: 538718 - DNA, 19 bp, Mus musculus
  siRNA target sequence for Pik3r1 (NM_011085.1,822-840).
gctgaagtcgcgtatcagt

SEQ ID NO: 538719 - DNA, 19 bp, Mus musculus
  siRNA target sequence for Pik3r1 (NM_011085.1,830-848).
cgcgtatcagtgagatcat

SEQ ID NO: 538720 - DNA, 19 bp, Mus musculus
  siRNA target sequence for Pik3r1 (NM_011085.1,831-849).
gcgtatcagtgagatcatt

SEQ ID NO: 538721 - DNA, 19 bp, Mus musculus
  siRNA target sequence for Pik3r1 (NM_011085.1,910-928).
gacaaacgcatgaacagta

SEQ ID NO: 538722 - DNA, 19 bp, Mus musculus
  siRNA target sequence for Pik3r1 (NM_011085.1,1017-1035).
cgagtggctggggaatgaa

SEQ ID NO: 538723 - DNA, 19 bp, Mus musculus
  siRNA target sequence for Pik3r1 (NM_011085.1,1112-1130).
ggagcagcaaccgaaacaa

SEQ ID NO: 538724 - DNA, 19 bp, Mus musculus
  siRNA target sequence for Pik3r1 (NM_011085.1,1155-1173).
gcgagacggcactttcctt

SEQ ID NO: 538725 - DNA, 19 bp, Mus musculus
  siRNA target sequence for Pik3r1 (NM_011085.1,1222-1240).
gacggcgaagtcaagcatt

SEQ ID NO: 538726 - DNA, 19 bp, Mus musculus
  siRNA target sequence for Pik3r1 (NM_011085.1,1231-1249).
gtcaagcattgcgtcatta

SEQ ID NO: 538727 - DNA, 19 bp, Mus musculus
  siRNA target sequence for Pik3r1 (NM_011085.1,1237-1255).
cattgcgtcattaacaaga

SEQ ID NO: 538728 - DNA, 19 bp, Mus musculus
  siRNA target sequence for Pik3r1 (NM_011085.1,1370-1388).
cactagcatacccagtata

SEQ ID NO: 538729 - DNA, 19 bp, Mus musculus
  siRNA target sequence for Pik3r3 (NM_181585.3,1423-1441).
gtgatgatgccctattcga

SEQ ID NO: 538730 - DNA, 19 bp, Mus musculus
  siRNA target sequence for Pik3r3 (NM_181585.3,1433-1451).
cctattcgacagaactgat

SEQ ID NO: 538731 - DNA, 19 bp, Mus musculus
  siRNA target sequence for Pik3r3 (NM_181585.3,1434-1452).
ctattcgacagaactgata

SEQ ID NO: 538732 - DNA, 19 bp, Mus musculus
  siRNA target sequence for Pik3r3 (NM_181585.3,1439-1457).
cgacagaactgatatttta

SEQ ID NO: 538733 - DNA, 19 bp, Mus musculus
  siRNA target sequence for Pik3r3 (NM_181585.3,1491-1509).
gccacctaagccaatgact

SEQ ID NO: 538734 - DNA, 19 bp, Mus musculus
  siRNA target sequence for Pik3r3 (NM_181585.3,1525-1543).
ggaatgaaggacagtttca

SEQ ID NO: 538735 - DNA, 19 bp, Mus musculus
  siRNA target sequence for Pik3r3 (NM_181585.3,1530-1548).
gaaggacagtttcatttct

SEQ ID NO: 538736 - DNA, 19 bp, Mus musculus
  siRNA target sequence for Pik3r3 (NM_181585.3,1639-1657).
cgtgatgcctcaacgaaaa

SEQ ID NO: 538737 - DNA, 19 bp, Mus musculus
  siRNA target sequence for Pik3r3 (NM_181585.3,1640-1658).
gtgatgcctcaacgaaaat

SEQ ID NO: 538738 - DNA, 19 bp, Mus musculus
  siRNA target sequence for Pik3r3 (NM_181585.3,1660-1678).
cagggggattatacattga

SEQ ID NO: 538739 - DNA, 19 bp, Mus musculus
  siRNA target sequence for Pik3r3 (NM_181585.3,1662-1680).
gggggattatacattgact

SEQ ID NO: 538740 - DNA, 19 bp, Mus musculus
  siRNA target sequence for Pik3r3 (NM_181585.3,1716-1734).
ctatcatcgggatggtaaa

SEQ ID NO: 538741 - DNA, 19 bp, Mus musculus
  siRNA target sequence for Pik3r3 (NM_181585.3,1747-1765).
gagcccctgacgtttactt

SEQ ID NO: 538742 - DNA, 19 bp, Mus musculus
  siRNA target sequence for Pik3r3 (NM_181585.3,1749-1767).
gcccctgacgtttacttct

SEQ ID NO: 538743 - DNA, 19 bp, Mus musculus
  siRNA target sequence for Pik3r3 (NM_181585.3,1856-1874).
gattccaacaggatcagtt

SEQ ID NO: 538744 - DNA, 19 bp, Mus musculus
  siRNA target sequence for Pik3r3 (NM_181585.3,1861-1879).
caacaggatcagttggtaa

SEQ ID NO: 538745 - DNA, 19 bp, Mus musculus
  siRNA target sequence for Pik3r3 (NM_181585.3,1870-1888).
cagttggtaaaagaagata

SEQ ID NO: 538746 - DNA, 19 bp, Mus musculus
  siRNA target sequence for Pik3r3 (NM_181585.3,1890-1908).
cattgatgcagtaggtaaa

SEQ ID NO: 538747 - DNA, 19 bp, Mus musculus
  siRNA target sequence for Pik3r3 (NM_181585.3,1953-1971).
gtatgacaggctgtatgaa

SEQ ID NO: 538748 - DNA, 19 bp, Mus musculus
  siRNA target sequence for Pik3r3 (NM_181585.3,1979-1997).
caaggacatcacaggaaat

SEQ ID NO: 538749 - DNA, 19 bp, Mus musculus
  siRNA target sequence for Pik3r3 (NM_181585.3,2104-2122).
cgcagagaggggaatgaga

SEQ ID NO: 538750 - DNA, 19 bp, Mus musculus
  siRNA target sequence for Pik3r3 (NM_181585.3,2130-2148).
cgagcgaattatgatgaat

SEQ ID NO: 538751 - DNA, 19 bp, Mus musculus
  siRNA target sequence for Pik3r3 (NM_181585.3,2131-2149).
gagcgaattatgatgaatt

SEQ ID NO: 538752 - DNA, 19 bp, Mus musculus
  siRNA target sequence for Pik3r3 (NM_181585.3,2133-2151).
gcgaattatgatgaattat

SEQ ID NO: 538753 - DNA, 19 bp, Mus musculus
  siRNA target sequence for Pik3r3 (NM_181585.3,2165-2183).
cacgtcttggtgagattca

SEQ ID NO: 538754 - DNA, 19 bp, Mus musculus
  siRNA target sequence for Pik3r3 (NM_181585.3,2168-2186).
gtcttggtgagattcatga

SEQ ID NO: 538755 - DNA, 19 bp, Mus musculus
  siRNA target sequence for Pik3r3 (NM_181585.3,2170-2188).
cttggtgagattcatgata

SEQ ID NO: 538756 - DNA, 19 bp, Mus musculus
  siRNA target sequence for Pik3r3 (NM_181585.3,2174-2192).
gtgagattcatgatagcaa

SEQ ID NO: 538757 - DNA, 19 bp, Mus musculus
  siRNA target sequence for Pik3r3 (NM_181585.3,2198-2216).
gtcttgagcaggacttgaa

SEQ ID NO: 538758 - DNA, 19 bp, Mus musculus
  siRNA target sequence for Pik3r3 (NM_181585.3,2230-2248).
gacaaccgggaaatagata

SEQ ID NO: 538759 - DNA, 19 bp, Mus musculus
  siRNA target sequence for Pik3r3 (NM_181585.3,2261-2279).
gcatcaaacccgacttgat

SEQ ID NO: 538760 - DNA, 19 bp, Mus musculus
  siRNA target sequence for Pik3r3 (NM_181585.3,2296-2314).
cgggatcagcaccttgtat

SEQ ID NO: 538761 - DNA, 19 bp, Mus musculus
  siRNA target sequence for Pik3r3 (NM_181585.3,2308-2326).
cttgtatggctcaatcaca

SEQ ID NO: 538762 - DNA, 19 bp, Mus musculus
  siRNA target sequence for Pik3r3 (NM_181585.3,2354-2372).
cctggctggggatcaagaa

SEQ ID NO: 538763 - DNA, 19 bp, Mus musculus
  siRNA target sequence for Pik3r3 (NM_181585.3,2355-2373).
ctggctggggatcaagaat

SEQ ID NO: 538764 - DNA, 19 bp, Mus musculus
  siRNA target sequence for Pik3r3 (NM_181585.3,2377-2395).
gactcagatgaaagctatt

SEQ ID NO: 538765 - DNA, 19 bp, Mus musculus
  siRNA target sequence for Pik3r3 (NM_181585.3,2379-2397).
ctcagatgaaagctatttt

SEQ ID NO: 538766 - DNA, 19 bp, Mus musculus
  siRNA target sequence for Pik3r3 (NM_181585.3,2415-2433).
gaacctgccgcattatgat

SEQ ID NO: 538767 - DNA, 19 bp, Mus musculus
  siRNA target sequence for Pik3r3 (NM_181585.3,2441-2459).
cctggtttgtggaggatat

SEQ ID NO: 538768 - DNA, 19 bp, Mus musculus
  siRNA target sequence for Pik3r3 (NM_181585.3,2454-2472).
ggatatcaaccgagtacaa

SEQ ID NO: 538769 - DNA, 19 bp, Mus musculus
  siRNA target sequence for Pik3r3 (NM_181585.3,2592-2610).
cagcacggctcgaggatat

SEQ ID NO: 538770 - DNA, 19 bp, Mus musculus
  siRNA target sequence for Pja2 (NM_144859.1,175-193).
caggaggatatcagactat

SEQ ID NO: 538771 - DNA, 19 bp, Mus musculus
  siRNA target sequence for Pja2 (NM_144859.1,177-195).
ggaggatatcagactatca

SEQ ID NO: 538772 - DNA, 19 bp, Mus musculus
  siRNA target sequence for Pja2 (NM_144859.1,194-212).
cacaggcaggagatatgga

SEQ ID NO: 538773 - DNA, 19 bp, Mus musculus
  siRNA target sequence for Pja2 (NM_144859.1,217-235).
gacatgcgtatgtcagttt

SEQ ID NO: 538774 - DNA, 19 bp, Mus musculus
  siRNA target sequence for Pja2 (NM_144859.1,219-237).
catgcgtatgtcagtttta

SEQ ID NO: 538775 - DNA, 19 bp, Mus musculus
  siRNA target sequence for Pja2 (NM_144859.1,271-289).
gtcgggctggtgatgacta

SEQ ID NO: 538776 - DNA, 19 bp, Mus musculus
  siRNA target sequence for Pja2 (NM_144859.1,280-298).
gtgatgactatgaagtgtt

SEQ ID NO: 538777 - DNA, 19 bp, Mus musculus
  siRNA target sequence for Pja2 (NM_144859.1,415-433).
gtggtccagcactgaatca

SEQ ID NO: 538778 - DNA, 19 bp, Mus musculus
  siRNA target sequence for Pja2 (NM_144859.1,450-468).
ccatccattgccacagtat

SEQ ID NO: 538779 - DNA, 19 bp, Mus musculus
  siRNA target sequence for Pja2 (NM_144859.1,491-509).
gaccttagaaagcaataca

SEQ ID NO: 538780 - DNA, 19 bp, Mus musculus
  siRNA target sequence for Pja2 (NM_144859.1,503-521).
caatacaaaccttcataat

SEQ ID NO: 538781 - DNA, 19 bp, Mus musculus
  siRNA target sequence for Pja2 (NM_144859.1,541-559).
ctccagcagtttgtaatgt

SEQ ID NO: 538782 - DNA, 19 bp, Mus musculus
  siRNA target sequence for Pja2 (NM_144859.1,576-594).
ggaattatgttggttcata

SEQ ID NO: 538783 - DNA, 19 bp, Mus musculus
  siRNA target sequence for Pja2 (NM_144859.1,587-605).
ggttcatactgactcttat

SEQ ID NO: 538784 - DNA, 19 bp, Mus musculus
  siRNA target sequence for Pja2 (NM_144859.1,614-632).
cagcaagcatgatgagaat

SEQ ID NO: 538785 - DNA, 19 bp, Mus musculus
  siRNA target sequence for Pja2 (NM_144859.1,686-704).
gttaggccgtgcagtcttt

SEQ ID NO: 538786 - DNA, 19 bp, Mus musculus
  siRNA target sequence for Pja2 (NM_144859.1,758-776).
ctctctcaacggtgaaata

SEQ ID NO: 538787 - DNA, 19 bp, Mus musculus
  siRNA target sequence for Pja2 (NM_144859.1,794-812).
gctagattcagcaccttta

SEQ ID NO: 538788 - DNA, 19 bp, Mus musculus
  siRNA target sequence for Pja2 (NM_144859.1,798-816).
gattcagcacctttagaga

SEQ ID NO: 538789 - DNA, 19 bp, Mus musculus
  siRNA target sequence for Pja2 (NM_144859.1,804-822).
gcacctttagagaaaagtt

SEQ ID NO: 538790 - DNA, 19 bp, Mus musculus
  siRNA target sequence for Pja2 (NM_144859.1,882-900).
gatggcgttgttagaaaga

SEQ ID NO: 538791 - DNA, 19 bp, Mus musculus
  siRNA target sequence for Pja2 (NM_144859.1,901-919).
ggcgacaagacgatactga

SEQ ID NO: 538792 - DNA, 19 bp, Mus musculus
  siRNA target sequence for Pja2 (NM_144859.1,902-920).
gcgacaagacgatactgat

SEQ ID NO: 538793 - DNA, 19 bp, Mus musculus
  siRNA target sequence for Pja2 (NM_144859.1,971-989).
ccatgttgagcaaaatact

SEQ ID NO: 538794 - DNA, 19 bp, Mus musculus
  siRNA target sequence for Pja2 (NM_144859.1,972-990).
catgttgagcaaaatacta

SEQ ID NO: 538795 - DNA, 19 bp, Mus musculus
  siRNA target sequence for Pja2 (NM_144859.1,978-996).
gagcaaaatactagtgata

SEQ ID NO: 538796 - DNA, 19 bp, Mus musculus
  siRNA target sequence for Pja2 (NM_144859.1,1001-1019).
caaccaccatggaagttct

SEQ ID NO: 538797 - DNA, 19 bp, Mus musculus
  siRNA target sequence for Pja2 (NM_144859.1,1028-1046).
ggtagtaaggcccaaagtt

SEQ ID NO: 538798 - DNA, 19 bp, Mus musculus
  siRNA target sequence for Pja2 (NM_144859.1,1029-1047).
gtagtaaggcccaaagtta

SEQ ID NO: 538799 - DNA, 19 bp, Mus musculus
  siRNA target sequence for Pja2 (NM_144859.1,1038-1056).
cccaaagttagaaaagtga

SEQ ID NO: 538800 - DNA, 19 bp, Mus musculus
  siRNA target sequence for Pja2 (NM_144859.1,1040-1058).
caaagttagaaaagtgata

SEQ ID NO: 538801 - DNA, 19 bp, Mus musculus
  siRNA target sequence for Pja2 (NM_144859.1,1071-1089).
gtggaccaagaaattggtt

SEQ ID NO: 538802 - DNA, 19 bp, Mus musculus
  siRNA target sequence for Pja2 (NM_144859.1,1073-1091).
ggaccaagaaattggtttt

SEQ ID NO: 538803 - DNA, 19 bp, Mus musculus
  siRNA target sequence for Pja2 (NM_144859.1,1159-1177).
gttcagatgaccctataat

SEQ ID NO: 538804 - DNA, 19 bp, Mus musculus
  siRNA target sequence for Pja2 (NM_144859.1,1217-1235).
cctaactccaacttactca

SEQ ID NO: 538805 - DNA, 19 bp, Mus musculus
  siRNA target sequence for Pja2 (NM_144859.1,1218-1236).
ctaactccaacttactcaa

SEQ ID NO: 538806 - DNA, 19 bp, Mus musculus
  siRNA target sequence for Pja2 (NM_144859.1,1224-1242).
ccaacttactcaagagtta

SEQ ID NO: 538807 - DNA, 19 bp, Mus musculus
  siRNA target sequence for Pja2 (NM_144859.1,1257-1275).
gaacggaatcgtgtaacat

SEQ ID NO: 538808 - DNA, 19 bp, Mus musculus
  siRNA target sequence for Pja2 (NM_144859.1,1293-1311).
gcttcaggacggcaagaat

SEQ ID NO: 538809 - DNA, 19 bp, Mus musculus
  siRNA target sequence for Pja2 (NM_144859.1,1331-1349).
gaatgcctgcggagagtat

SEQ ID NO: 538810 - DNA, 19 bp, Mus musculus
  siRNA target sequence for Pja2 (NM_144859.1,1337-1355).
ctgcggagagtattaccaa

SEQ ID NO: 538811 - DNA, 19 bp, Mus musculus
  siRNA target sequence for Pja2 (NM_144859.1,1342-1360).
gagagtattaccaactctt

SEQ ID NO: 538812 - DNA, 19 bp, Mus musculus
  siRNA target sequence for Pja2 (NM_144859.1,1409-1427).
cccttggttacagtacaat

SEQ ID NO: 538813 - DNA, 19 bp, Mus musculus
  siRNA target sequence for Pja2 (NM_144859.1,1411-1429).
cttggttacagtacaatga

SEQ ID NO: 538814 - DNA, 19 bp, Mus musculus
  siRNA target sequence for Pja2 (NM_144859.1,1480-1498).
cacagccggaagctttcat

SEQ ID NO: 538815 - DNA, 19 bp, Mus musculus
  siRNA target sequence for Pja2 (NM_144859.1,1482-1500).
cagccggaagctttcatgt

SEQ ID NO: 538816 - DNA, 19 bp, Mus musculus
  siRNA target sequence for Pja2 (NM_144859.1,1531-1549).
cgagcgtgagtgaagactt

SEQ ID NO: 538817 - DNA, 19 bp, Mus musculus
  siRNA target sequence for Pja2 (NM_144859.1,1596-1614).
gttgctgaagctatttctt

SEQ ID NO: 538818 - DNA, 19 bp, Mus musculus
  siRNA target sequence for Pja2 (NM_144859.1,1676-1694).
gactgcgctggcacattta

SEQ ID NO: 538819 - DNA, 19 bp, Mus musculus
  siRNA target sequence for Pja2 (NM_144859.1,1678-1696).
ctgcgctggcacatttaga

SEQ ID NO: 538820 - DNA, 19 bp, Mus musculus
  siRNA target sequence for Pja2 (NM_144859.1,1680-1698).
gcgctggcacatttagagt

SEQ ID NO: 538821 - DNA, 19 bp, Mus musculus
  siRNA target sequence for Pja2 (NM_144859.1,1862-1880).
gccttgccatcacttcttt

SEQ ID NO: 538822 - DNA, 19 bp, Mus musculus
  siRNA target sequence for Pja2 (NM_144859.1,1867-1885).
gccatcacttctttcataa

SEQ ID NO: 538823 - DNA, 19 bp, Mus musculus
  siRNA target sequence for Pja2 (NM_144859.1,2001-2019).
gcctcgcctgcaaatgaca

SEQ ID NO: 538824 - DNA, 19 bp, Mus musculus
  siRNA target sequence for Pkd1 (NM_013630.1,451-469).
gcctgccgcgtcaattgct

SEQ ID NO: 538825 - DNA, 19 bp, Mus musculus
  siRNA target sequence for Pkd1 (NM_013630.1,620-638).
ggatttctacattagaaga

SEQ ID NO: 538826 - DNA, 19 bp, Mus musculus
  siRNA target sequence for Pkd1 (NM_013630.1,621-639).
gatttctacattagaagaa

SEQ ID NO: 538827 - DNA, 19 bp, Mus musculus
  siRNA target sequence for Pkd1 (NM_013630.1,640-658).
ggcgtgtttgctaatttat

SEQ ID NO: 538828 - DNA, 19 bp, Mus musculus
  siRNA target sequence for Pkd1 (NM_013630.1,641-659).
gcgtgtttgctaatttatt

SEQ ID NO: 538829 - DNA, 19 bp, Mus musculus
  siRNA target sequence for Pkd1 (NM_013630.1,642-660).
cgtgtttgctaatttattt

SEQ ID NO: 538830 - DNA, 19 bp, Mus musculus
  siRNA target sequence for Pkd1 (NM_013630.1,728-746).
gctgggcaaaggaacatca

SEQ ID NO: 538831 - DNA, 19 bp, Mus musculus
  siRNA target sequence for Pkd1 (NM_013630.1,892-910).
gcagcagtacccttctact

SEQ ID NO: 538832 - DNA, 19 bp, Mus musculus
  siRNA target sequence for Pkd1 (NM_013630.1,893-911).
cagcagtacccttctactt

SEQ ID NO: 538833 - DNA, 19 bp, Mus musculus
  siRNA target sequence for Pkd1 (NM_013630.1,985-1003).
ctctcggagcagaatcaat

SEQ ID NO: 538834 - DNA, 19 bp, Mus musculus
  siRNA target sequence for Pkd1 (NM_013630.1,1015-1033).
gcaggccaggcctctaact

SEQ ID NO: 538835 - DNA, 19 bp, Mus musculus
  siRNA target sequence for Pkd1 (NM_013630.1,1177-1195).
cagccagcagacttccata

SEQ ID NO: 538836 - DNA, 19 bp, Mus musculus
  siRNA target sequence for Pkd1 (NM_013630.1,1183-1201).
gcagacttccatattactt

SEQ ID NO: 538837 - DNA, 19 bp, Mus musculus
  siRNA target sequence for Pkd1 (NM_013630.1,1294-1312).
ctacctgggagctatcaca

SEQ ID NO: 538838 - DNA, 19 bp, Mus musculus
  siRNA target sequence for Pkd1 (NM_013630.1,1406-1424).
catcctttgtgcacagtaa

SEQ ID NO: 538839 - DNA, 19 bp, Mus musculus
  siRNA target sequence for Pkd1 (NM_013630.1,1465-1483).
gcccttgaggtcacctata

SEQ ID NO: 538840 - DNA, 19 bp, Mus musculus
  siRNA target sequence for Pkd1 (NM_013630.1,1711-1729).
gtgtggatcggcttctcat

SEQ ID NO: 538841 - DNA, 19 bp, Mus musculus
  siRNA target sequence for Pkd1 (NM_013630.1,1875-1893).
gtgttcagcaccacatagt

SEQ ID NO: 538842 - DNA, 19 bp, Mus musculus
  siRNA target sequence for Pkd1 (NM_013630.1,1877-1895).
gttcagcaccacatagtta

SEQ ID NO: 538843 - DNA, 19 bp, Mus musculus
  siRNA target sequence for Pkd1 (NM_013630.1,1882-1900).
gcaccacatagttatgtct

SEQ ID NO: 538844 - DNA, 19 bp, Mus musculus
  siRNA target sequence for Pkd1 (NM_013630.1,1919-1937).
ggcctgtgtgggatactga

SEQ ID NO: 538845 - DNA, 19 bp, Mus musculus
  siRNA target sequence for Pkd1 (NM_013630.1,1926-1944).
gtgggatactgagaacttt

SEQ ID NO: 538846 - DNA, 19 bp, Mus musculus
  siRNA target sequence for Pkd1 (NM_013630.1,2333-2351).
ccagctacacactatggaa

SEQ ID NO: 538847 - DNA, 19 bp, Mus musculus
  siRNA target sequence for Pkd1 (NM_013630.1,2711-2729).
gcgtatccaggcaaaacct

SEQ ID NO: 538848 - DNA, 19 bp, Mus musculus
  siRNA target sequence for Pkd1 (NM_013630.1,2742-2760).
cagtgtggtctctccaata

SEQ ID NO: 538849 - DNA, 19 bp, Mus musculus
  siRNA target sequence for Pkd1 (NM_013630.1,2832-2850).
ggtgcttcaggtagattct

SEQ ID NO: 538850 - DNA, 19 bp, Mus musculus
  siRNA target sequence for Pkd1 (NM_013630.1,2877-2895).
gtggtttgggggcaatatt

SEQ ID NO: 538851 - DNA, 19 bp, Mus musculus
  siRNA target sequence for Pkd1 (NM_013630.1,2974-2992).
ctgttctcagtgttgatgt

SEQ ID NO: 538852 - DNA, 19 bp, Mus musculus
  siRNA target sequence for Pkd1 (NM_013630.1,3189-3207).
cttccggtggaccattgat

SEQ ID NO: 538853 - DNA, 19 bp, Mus musculus
  siRNA target sequence for Pkd1 (NM_013630.1,3192-3210).
ccggtggaccattgatgat

SEQ ID NO: 538854 - DNA, 19 bp, Mus musculus
  siRNA target sequence for Pkd1 (NM_013630.1,3231-3249).
caacactgtcttcaatgta

SEQ ID NO: 538855 - DNA, 19 bp, Mus musculus
  siRNA target sequence for Pkd1 (NM_013630.1,3236-3254).
ctgtcttcaatgtaatata

SEQ ID NO: 538856 - DNA, 19 bp, Mus musculus
  siRNA target sequence for Pkd1 (NM_013630.1,3282-3300).
gctgacagcctctaaccat

SEQ ID NO: 538857 - DNA, 19 bp, Mus musculus
  siRNA target sequence for Pkd1 (NM_013630.1,3305-3323).
gcaacatcaccgtgaacta

SEQ ID NO: 538858 - DNA, 19 bp, Mus musculus
  siRNA target sequence for Pkd1 (NM_013630.1,3562-3580).
cacaataccacgcatattt

SEQ ID NO: 538859 - DNA, 19 bp, Mus musculus
  siRNA target sequence for Pkd1 (NM_013630.1,3584-3602).
ctaccccaggtgagtacaa

SEQ ID NO: 538860 - DNA, 19 bp, Mus musculus
  siRNA target sequence for Pkd1 (NM_013630.1,3610-3628).
gtccttgtgtccaatacct

SEQ ID NO: 538861 - DNA, 19 bp, Mus musculus
  siRNA target sequence for Pkd1 (NM_013630.1,3618-3636).
gtccaatacctatgagaat

SEQ ID NO: 538862 - DNA, 19 bp, Mus musculus
  siRNA target sequence for Pkd1 (NM_013630.1,3755-3773).
caactgatggtgtcctata

SEQ ID NO: 538863 - DNA, 19 bp, Mus musculus
  siRNA target sequence for Pkd1 (NM_013630.1,3933-3951).
gcatggcctgactgtgtat

SEQ ID NO: 538864 - DNA, 19 bp, Mus musculus
  siRNA target sequence for Pkd1 (NM_013630.1,4062-4080).
ccctgaggctacagtacaa

SEQ ID NO: 538865 - DNA, 19 bp, Mus musculus
  siRNA target sequence for Pkd1 (NM_013630.1,4064-4082).
ctgaggctacagtacaaca

SEQ ID NO: 538866 - DNA, 19 bp, Mus musculus
  siRNA target sequence for Pkd1 (NM_013630.1,4068-4086).
ggctacagtacaacatgta

SEQ ID NO: 538867 - DNA, 19 bp, Mus musculus
  siRNA target sequence for Pkd1 (NM_013630.1,4170-4188).
gtttgtcctggaggtatta

SEQ ID NO: 538868 - DNA, 19 bp, Mus musculus
  siRNA target sequence for Pkd1 (NM_013630.1,4253-4271).
gggaccctgtccattacct

SEQ ID NO: 538869 - DNA, 19 bp, Mus musculus
  siRNA target sequence for Pkd1 (NM_013630.1,4363-4381).
ccactggcattggttttgt

SEQ ID NO: 538870 - DNA, 19 bp, Mus musculus
  siRNA target sequence for Pkd1 (NM_013630.1,4429-4447).
cctgagatacgtaacatca

SEQ ID NO: 538871 - DNA, 19 bp, Mus musculus
  siRNA target sequence for Pkd1 (NM_013630.1,4516-4534).
ccattcccgtaccgatata

SEQ ID NO: 538872 - DNA, 19 bp, Mus musculus
  siRNA target sequence for Pkd1 (NM_013630.1,4583-4601).
ctgaagtgaaatttatcta

SEQ ID NO: 538873 - DNA, 19 bp, Mus musculus
  siRNA target sequence for Pkd1 (NM_013630.1,4613-4631).
gctcctacttggtgatagt

SEQ ID NO: 538874 - DNA, 19 bp, Mus musculus
  siRNA target sequence for Pkd1 (NM_013630.1,4716-4734).
caatggctcccatgtgtta

SEQ ID NO: 538875 - DNA, 19 bp, Mus musculus
  siRNA target sequence for Pkd1 (NM_013630.1,4829-4847).
ctgaggtcacccatatcta

SEQ ID NO: 538876 - DNA, 19 bp, Mus musculus
  siRNA target sequence for Pkd1 (NM_013630.1,4831-4849).
gaggtcacccatatctaca

SEQ ID NO: 538877 - DNA, 19 bp, Mus musculus
  siRNA target sequence for Pkd1 (NM_013630.1,4851-4869).
cagcaccggtgatttcact

SEQ ID NO: 538878 - DNA, 19 bp, Mus musculus
  siRNA target sequence for Pkd1 (NM_013630.1,4901-4919).
gtagtgaggcccaactcaa

SEQ ID NO: 538879 - DNA, 19 bp, Mus musculus
  siRNA target sequence for Pkd1 (NM_013630.1,4904-4922).
gtgaggcccaactcaacat

SEQ ID NO: 538880 - DNA, 19 bp, Mus musculus
  siRNA target sequence for Pkd1 (NM_013630.1,4987-5005).
ggcagtgtgagctttagta

SEQ ID NO: 538881 - DNA, 19 bp, Mus musculus
  siRNA target sequence for Pkd1 (NM_013630.1,5071-5089).
ccaggcggacccactattt

SEQ ID NO: 538882 - DNA, 19 bp, Mus musculus
  siRNA target sequence for Pkd1 (NM_013630.1,5074-5092).
ggcggacccactatttcct

SEQ ID NO: 538883 - DNA, 19 bp, Mus musculus
  siRNA target sequence for Pkd1 (NM_013630.1,5075-5093).
gcggacccactatttccta

SEQ ID NO: 538884 - DNA, 19 bp, Mus musculus
  siRNA target sequence for Pkd1 (NM_013630.1,5105-5123).
ctgtgggcaccttcaatat

SEQ ID NO: 538885 - DNA, 19 bp, Mus musculus
  siRNA target sequence for Pkd1 (NM_013630.1,5107-5125).
gtgggcaccttcaatatta

SEQ ID NO: 538886 - DNA, 19 bp, Mus musculus
  siRNA target sequence for Pkd1 (NM_013630.1,5109-5127).
gggcaccttcaatattatt

SEQ ID NO: 538887 - DNA, 19 bp, Mus musculus
  siRNA target sequence for Pkd1 (NM_013630.1,5160-5178).
ggacagcatcttcatctat

SEQ ID NO: 538888 - DNA, 19 bp, Mus musculus
  siRNA target sequence for Pkd1 (NM_013630.1,5370-5388).
caaagctagcacctactat

SEQ ID NO: 538889 - DNA, 19 bp, Mus musculus
  siRNA target sequence for Pkd1 (NM_013630.1,5395-5413).
cttagggccactaacatgt

SEQ ID NO: 538890 - DNA, 19 bp, Mus musculus
  siRNA target sequence for Pkd1 (NM_013630.1,5423-5441).
ccgcagccaaccgtactat

SEQ ID NO: 538891 - DNA, 19 bp, Mus musculus
  siRNA target sequence for Pkd1 (NM_013630.1,5424-5442).
cgcagccaaccgtactata

SEQ ID NO: 538892 - DNA, 19 bp, Mus musculus
  siRNA target sequence for Pkd1 (NM_013630.1,5426-5444).
cagccaaccgtactataga

SEQ ID NO: 538893 - DNA, 19 bp, Mus musculus
  siRNA target sequence for Pkd1 (NM_013630.1,5452-5470).
gaacctgtggagagtctaa

SEQ ID NO: 538894 - DNA, 19 bp, Mus musculus
  siRNA target sequence for Pkd1 (NM_013630.1,5456-5474).
ctgtggagagtctaatcct

SEQ ID NO: 538895 - DNA, 19 bp, Mus musculus
  siRNA target sequence for Pkd1 (NM_013630.1,5458-5476).
gtggagagtctaatcctat

SEQ ID NO: 538896 - DNA, 19 bp, Mus musculus
  siRNA target sequence for Pkd1 (NM_013630.1,5541-5559).
cagtggtgttgtttacact

SEQ ID NO: 538897 - DNA, 19 bp, Mus musculus
  siRNA target sequence for Pkd1 (NM_013630.1,5661-5679).
ccagttgggctcagtcaat

SEQ ID NO: 538898 - DNA, 19 bp, Mus musculus
  siRNA target sequence for Pkd1 (NM_013630.1,5790-5808).
gctggctgaaggtaccaat

SEQ ID NO: 538899 - DNA, 19 bp, Mus musculus
  siRNA target sequence for Pkd1 (NM_013630.1,5895-5913).
gcagctcaatgcttccaat

SEQ ID NO: 538900 - DNA, 19 bp, Mus musculus
  siRNA target sequence for Pkd1 (NM_013630.1,5950-5968).
gtagaggaacccattgtga

SEQ ID NO: 538901 - DNA, 19 bp, Mus musculus
  siRNA target sequence for Pkd1 (NM_013630.1,6041-6059).
ctggctctgctcttacttt

SEQ ID NO: 538902 - DNA, 19 bp, Mus musculus
  siRNA target sequence for Pkd1 (NM_013630.1,6345-6363).
gggtgactcattggttatt

SEQ ID NO: 538903 - DNA, 19 bp, Mus musculus
  siRNA target sequence for Pkd1 (NM_013630.1,6502-6520).
cagagtggccgctgcttta

SEQ ID NO: 538904 - DNA, 19 bp, Mus musculus
  siRNA target sequence for Pkd1 (NM_013630.1,6664-6682).
catgtagaggtgaatgcta

SEQ ID NO: 538905 - DNA, 19 bp, Mus musculus
  siRNA target sequence for Pkd1 (NM_013630.1,6680-6698).
ctacaaacctagtgagttt

SEQ ID NO: 538906 - DNA, 19 bp, Mus musculus
  siRNA target sequence for Pkd1 (NM_013630.1,6853-6871).
gaatatcggtgggagatat

SEQ ID NO: 538907 - DNA, 19 bp, Mus musculus
  siRNA target sequence for Pkd1 (NM_013630.1,6859-6877).
cggtgggagatatatcgta

SEQ ID NO: 538908 - DNA, 19 bp, Mus musculus
  siRNA target sequence for Pkd1 (NM_013630.1,6896-6914).
caggacgtatggctcaaat

SEQ ID NO: 538909 - DNA, 19 bp, Mus musculus
  siRNA target sequence for Pkd1 (NM_013630.1,6899-6917).
gacgtatggctcaaatggt

SEQ ID NO: 538910 - DNA, 19 bp, Mus musculus
  siRNA target sequence for Pkd1 (NM_013630.1,7143-7161).
gtcctatgaccctaattta

SEQ ID NO: 538911 - DNA, 19 bp, Mus musculus
  siRNA target sequence for Pkd1 (NM_013630.1,7294-7312).
gaagctggtgtagaatata

SEQ ID NO: 538912 - DNA, 19 bp, Mus musculus
  siRNA target sequence for Pkd1 (NM_013630.1,7384-7402).
gggcgagtccccattgtgt

SEQ ID NO: 538913 - DNA, 19 bp, Mus musculus
  siRNA target sequence for Pkd1 (NM_013630.1,7422-7440).
caaggcacaagcagtgtat

SEQ ID NO: 538914 - DNA, 19 bp, Mus musculus
  siRNA target sequence for Pkd1 (NM_013630.1,7448-7466).
gccgaagttcctatgtgta

SEQ ID NO: 538915 - DNA, 19 bp, Mus musculus
  siRNA target sequence for Pkd1 (NM_013630.1,7451-7469).
gaagttcctatgtgtactt

SEQ ID NO: 538916 - DNA, 19 bp, Mus musculus
  siRNA target sequence for Pkd1 (NM_013630.1,7522-7540).
gctcgcactttcagcaata

SEQ ID NO: 538917 - DNA, 19 bp, Mus musculus
  siRNA target sequence for Pkd1 (NM_013630.1,7525-7543).
cgcactttcagcaataaga

SEQ ID NO: 538918 - DNA, 19 bp, Mus musculus
  siRNA target sequence for Pkd1 (NM_013630.1,7552-7570).
ctgaacgagacgacaacat

SEQ ID NO: 538919 - DNA, 19 bp, Mus musculus
  siRNA target sequence for Pkd1 (NM_013630.1,7577-7595).
gtagcaccggcatgaatct

SEQ ID NO: 538920 - DNA, 19 bp, Mus musculus
  siRNA target sequence for Pkd1 (NM_013630.1,7732-7750).
cgcctattcccattggatt

SEQ ID NO: 538921 - DNA, 19 bp, Mus musculus
  siRNA target sequence for Pkd1 (NM_013630.1,8122-8140).
catgtcatcgagtactctt

SEQ ID NO: 538922 - DNA, 19 bp, Mus musculus
  siRNA target sequence for Pkd1 (NM_013630.1,8136-8154).
ctctttagccctcattact

SEQ ID NO: 538923 - DNA, 19 bp, Mus musculus
  siRNA target sequence for Pkd1 (NM_013630.1,8216-8234).
gagcccaaatgcgtaagaa

SEQ ID NO: 538924 - DNA, 19 bp, Mus musculus
  siRNA target sequence for Pkd1 (NM_013630.1,8218-8236).
gcccaaatgcgtaagaaca

SEQ ID NO: 538925 - DNA, 19 bp, Mus musculus
  siRNA target sequence for Pkd1 (NM_013630.1,8219-8237).
cccaaatgcgtaagaacat

SEQ ID NO: 538926 - DNA, 19 bp, Mus musculus
  siRNA target sequence for Pkd1 (NM_013630.1,8221-8239).
caaatgcgtaagaacatca

SEQ ID NO: 538927 - DNA, 19 bp, Mus musculus
  siRNA target sequence for Pkd1 (NM_013630.1,8339-8357).
gccgctcctgcctgaagaa

SEQ ID NO: 538928 - DNA, 19 bp, Mus musculus
  siRNA target sequence for Pkd1 (NM_013630.1,8438-8456).
ctgacagcattctcaatat

SEQ ID NO: 538929 - DNA, 19 bp, Mus musculus
  siRNA target sequence for Pkd1 (NM_013630.1,8594-8612).
gttcccgagtgctcaatga

SEQ ID NO: 538930 - DNA, 19 bp, Mus musculus
  siRNA target sequence for Pkd1 (NM_013630.1,8804-8822).
cctttggctacattagcaa

SEQ ID NO: 538931 - DNA, 19 bp, Mus musculus
  siRNA target sequence for Pkd1 (NM_013630.1,9076-9094).
cttaatgagcgctatctgt

SEQ ID NO: 538932 - DNA, 19 bp, Mus musculus
  siRNA target sequence for Pkd1 (NM_013630.1,9142-9160).
cagcccaatgagtacaact

SEQ ID NO: 538933 - DNA, 19 bp, Mus musculus
  siRNA target sequence for Pkd1 (NM_013630.1,9213-9231).
gctctacaccttcttcatt

SEQ ID NO: 538934 - DNA, 19 bp, Mus musculus
  siRNA target sequence for Pkd1 (NM_013630.1,9309-9327).
gtctgtgggcctctataca

SEQ ID NO: 538935 - DNA, 19 bp, Mus musculus
  siRNA target sequence for Pkd1 (NM_013630.1,9326-9344).
catccctgtgccagtactt

SEQ ID NO: 538936 - DNA, 19 bp, Mus musculus
  siRNA target sequence for Pkd1 (NM_013630.1,9471-9489).
ccatgtccagttcatcttt

SEQ ID NO: 538937 - DNA, 19 bp, Mus musculus
  siRNA target sequence for Pkd1 (NM_013630.1,9496-9514).
ccatctgcaagcatcaact

SEQ ID NO: 538938 - DNA, 19 bp, Mus musculus
  siRNA target sequence for Pkd1 (NM_013630.1,9500-9518).
ctgcaagcatcaactacat

SEQ ID NO: 538939 - DNA, 19 bp, Mus musculus
  siRNA target sequence for Pkd1 (NM_013630.1,9503-9521).
caagcatcaactacattgt

SEQ ID NO: 538940 - DNA, 19 bp, Mus musculus
  siRNA target sequence for Pkd1 (NM_013630.1,9522-9540).
cctcctgacgtgtgtcata

SEQ ID NO: 538941 - DNA, 19 bp, Mus musculus
  siRNA target sequence for Pkd1 (NM_013630.1,9523-9541).
ctcctgacgtgtgtcatat

SEQ ID NO: 538942 - DNA, 19 bp, Mus musculus
  siRNA target sequence for Pkd1 (NM_013630.1,9737-9755).
gtggtcaccggcacttaga

SEQ ID NO: 538943 - DNA, 19 bp, Mus musculus
  siRNA target sequence for Pkd1 (NM_013630.1,9782-9800).
gcctggacatcttccaaat

SEQ ID NO: 538944 - DNA, 19 bp, Mus musculus
  siRNA target sequence for Pkd1 (NM_013630.1,9783-9801).
cctggacatcttccaaatt

SEQ ID NO: 538945 - DNA, 19 bp, Mus musculus
  siRNA target sequence for Pkd1 (NM_013630.1,9875-9893).
ggttcctgcaacacattat

SEQ ID NO: 538946 - DNA, 19 bp, Mus musculus
  siRNA target sequence for Pkd1 (NM_013630.1,9917-9935).
gcagcaccttctttttggt

SEQ ID NO: 538947 - DNA, 19 bp, Mus musculus
  siRNA target sequence for Pkd1 (NM_013630.1,9990-10008).
ggtgcttgcagcaaatgaa

SEQ ID NO: 538948 - DNA, 19 bp, Mus musculus
  siRNA target sequence for Pkd1 (NM_013630.1,10101-10119).
gcctcgtagccgctttact

SEQ ID NO: 538949 - DNA, 19 bp, Mus musculus
  siRNA target sequence for Pkd1 (NM_013630.1,10102-10120).
cctcgtagccgctttacta

SEQ ID NO: 538950 - DNA, 19 bp, Mus musculus
  siRNA target sequence for Pkd1 (NM_013630.1,10284-10302).
ggtagtctaccctgtctat

SEQ ID NO: 538951 - DNA, 19 bp, Mus musculus
  siRNA target sequence for Pkd1 (NM_013630.1,10285-10303).
gtagtctaccctgtctatt

SEQ ID NO: 538952 - DNA, 19 bp, Mus musculus
  siRNA target sequence for Pkd1 (NM_013630.1,10524-10542).
cagtgagggtactcttagt

SEQ ID NO: 538953 - DNA, 19 bp, Mus musculus
  siRNA target sequence for Pkd1 (NM_013630.1,10661-10679).
ccttgcctgccaaatactt

SEQ ID NO: 538954 - DNA, 19 bp, Mus musculus
  siRNA target sequence for Pkd1 (NM_013630.1,10762-10780).
gaaacagacctgcttacta

SEQ ID NO: 538955 - DNA, 19 bp, Mus musculus
  siRNA target sequence for Pkd1 (NM_013630.1,11189-11207).
ctgtaacccctgtaagtga

SEQ ID NO: 538956 - DNA, 19 bp, Mus musculus
  siRNA target sequence for Pkd1 (NM_013630.1,11310-11328).
ggtgtacatgcttttctta

SEQ ID NO: 538957 - DNA, 19 bp, Mus musculus
  siRNA target sequence for Pkd1 (NM_013630.1,11607-11625).
cttgagcaccagtgactat

SEQ ID NO: 538958 - DNA, 19 bp, Mus musculus
  siRNA target sequence for Pkd1 (NM_013630.1,11636-11654).
ggcagagtgtggtgcaaaa

SEQ ID NO: 538959 - DNA, 19 bp, Mus musculus
  siRNA target sequence for Pkd1 (NM_013630.1,11820-11838).
caggagccgtgcagtgttt

SEQ ID NO: 538960 - DNA, 19 bp, Mus musculus
  siRNA target sequence for Pkd1 (NM_013630.1,11823-11841).
gagccgtgcagtgtttgta

SEQ ID NO: 538961 - DNA, 19 bp, Mus musculus
  siRNA target sequence for Pkd1 (NM_013630.1,12310-12328).
gtgcgccagtggtctgttt

SEQ ID NO: 538962 - DNA, 19 bp, Mus musculus
  siRNA target sequence for Pkd1 (NM_013630.1,12312-12330).
gcgccagtggtctgttttt

SEQ ID NO: 538963 - DNA, 19 bp, Mus musculus
  siRNA target sequence for Pkd1 (NM_013630.1,12411-12429).
gatggccatcctgcttatt

SEQ ID NO: 538964 - DNA, 19 bp, Mus musculus
  siRNA target sequence for Pkd1 (NM_013630.1,12735-12753).
ccacaaagtccgctttgaa

SEQ ID NO: 538965 - DNA, 19 bp, Mus musculus
  siRNA target sequence for Pkd1 (NM_013630.1,12744-12762).
ccgctttgaaggaatggat

SEQ ID NO: 538966 - DNA, 19 bp, Mus musculus
  siRNA target sequence for Pkd1 (NM_013630.1,13157-13175).
ccctgtggcctaataacaa

SEQ ID NO: 538967 - DNA, 19 bp, Mus musculus
  siRNA target sequence for Pkd2 (NM_008861.2,400-418).
gagggatggtggtagagat

SEQ ID NO: 538968 - DNA, 19 bp, Mus musculus
  siRNA target sequence for Pkd2 (NM_008861.2,722-740).
gtacctgaaaagtgtgtta

SEQ ID NO: 538969 - DNA, 19 bp, Mus musculus
  siRNA target sequence for Pkd2 (NM_008861.2,771-789).
gtagtcttgtgcatcttga

SEQ ID NO: 538970 - DNA, 19 bp, Mus musculus
  siRNA target sequence for Pkd2 (NM_008861.2,805-823).
gctccaatgtgtactacta

SEQ ID NO: 538971 - DNA, 19 bp, Mus musculus
  siRNA target sequence for Pkd2 (NM_008861.2,852-870).
gacaccccagtgtcgaaaa

SEQ ID NO: 538972 - DNA, 19 bp, Mus musculus
  siRNA target sequence for Pkd2 (NM_008861.2,984-1002).
gctgacaaccgaagcttta

SEQ ID NO: 538973 - DNA, 19 bp, Mus musculus
  siRNA target sequence for Pkd2 (NM_008861.2,992-1010).
ccgaagctttatcttctat

SEQ ID NO: 538974 - DNA, 19 bp, Mus musculus
  siRNA target sequence for Pkd2 (NM_008861.2,994-1012).
gaagctttatcttctatga

SEQ ID NO: 538975 - DNA, 19 bp, Mus musculus
  siRNA target sequence for Pkd2 (NM_008861.2,997-1015).
gctttatcttctatgagaa

SEQ ID NO: 538976 - DNA, 19 bp, Mus musculus
  siRNA target sequence for Pkd2 (NM_008861.2,1082-1100).
ggacctgcgagatgaaatt

SEQ ID NO: 538977 - DNA, 19 bp, Mus musculus
  siRNA target sequence for Pkd2 (NM_008861.2,1083-1101).
gacctgcgagatgaaatta

SEQ ID NO: 538978 - DNA, 19 bp, Mus musculus
  siRNA target sequence for Pkd2 (NM_008861.2,1089-1107).
cgagatgaaattaaagagt

SEQ ID NO: 538979 - DNA, 19 bp, Mus musculus
  siRNA target sequence for Pkd2 (NM_008861.2,1208-1226).
cagtcactgggggatcatt

SEQ ID NO: 538980 - DNA, 19 bp, Mus musculus
  siRNA target sequence for Pkd2 (NM_008861.2,1358-1376).
ggtgtataacgcaaacatt

SEQ ID NO: 538981 - DNA, 19 bp, Mus musculus
  siRNA target sequence for Pkd2 (NM_008861.2,1359-1377).
gtgtataacgcaaacatta

SEQ ID NO: 538982 - DNA, 19 bp, Mus musculus
  siRNA target sequence for Pkd2 (NM_008861.2,1502-1520).
ctgtgagatcatcttttgt

SEQ ID NO: 538983 - DNA, 19 bp, Mus musculus
  siRNA target sequence for Pkd2 (NM_008861.2,1635-1653).
gtagctatggtgattaaca

SEQ ID NO: 538984 - DNA, 19 bp, Mus musculus
  siRNA target sequence for Pkd2 (NM_008861.2,1652-1670).
catttaccgaatgtcaaat

SEQ ID NO: 538985 - DNA, 19 bp, Mus musculus
  siRNA target sequence for Pkd2 (NM_008861.2,1738-1756).
ggcaaatacagttcaacaa

SEQ ID NO: 538986 - DNA, 19 bp, Mus musculus
  siRNA target sequence for Pkd2 (NM_008861.2,1740-1758).
caaatacagttcaacaata

SEQ ID NO: 538987 - DNA, 19 bp, Mus musculus
  siRNA target sequence for Pkd2 (NM_008861.2,1773-1791).
gtatttttggtctggatta

SEQ ID NO: 538988 - DNA, 19 bp, Mus musculus
  siRNA target sequence for Pkd2 (NM_008861.2,1866-1884).
ctcttcggcttcaccataa

SEQ ID NO: 538989 - DNA, 19 bp, Mus musculus
  siRNA target sequence for Pkd2 (NM_008861.2,1910-1928).
cgcacagctggcatacctt

SEQ ID NO: 538990 - DNA, 19 bp, Mus musculus
  siRNA target sequence for Pkd2 (NM_008861.2,1936-1954).
gcacccaggtcgatgactt

SEQ ID NO: 538991 - DNA, 19 bp, Mus musculus
  siRNA target sequence for Pkd2 (NM_008861.2,1955-1973).
cagcactttccaagaatgt

SEQ ID NO: 538992 - DNA, 19 bp, Mus musculus
  siRNA target sequence for Pkd2 (NM_008861.2,1957-1975).
gcactttccaagaatgtat

SEQ ID NO: 538993 - DNA, 19 bp, Mus musculus
  siRNA target sequence for Pkd2 (NM_008861.2,2046-2064).
gggccactttattttacta

SEQ ID NO: 538994 - DNA, 19 bp, Mus musculus
  siRNA target sequence for Pkd2 (NM_008861.2,2106-2124).
ctggcgatcatcaatgatt

SEQ ID NO: 538995 - DNA, 19 bp, Mus musculus
  siRNA target sequence for Pkd2 (NM_008861.2,2110-2128).
cgatcatcaatgattcgta

SEQ ID NO: 538996 - DNA, 19 bp, Mus musculus
  siRNA target sequence for Pkd2 (NM_008861.2,2213-2231).
ggtcaaactaaaactgaaa

SEQ ID NO: 538997 - DNA, 19 bp, Mus musculus
  siRNA target sequence for Pkd2 (NM_008861.2,2268-2286).
caaggtggtggcaaactga

SEQ ID NO: 538998 - DNA, 19 bp, Mus musculus
  siRNA target sequence for Pkd2 (NM_008861.2,2339-2357).
gattgaggccatattcact

SEQ ID NO: 538999 - DNA, 19 bp, Mus musculus
  siRNA target sequence for Pkd2 (NM_008861.2,2343-2361).
gaggccatattcactaaat

SEQ ID NO: 539000 - DNA, 19 bp, Mus musculus
  siRNA target sequence for Pkd2 (NM_008861.2,2345-2363).
ggccatattcactaaatat

SEQ ID NO: 539001 - DNA, 19 bp, Mus musculus
  siRNA target sequence for Pkd2 (NM_008861.2,2567-2585).
ctccagtggggtttcctat

SEQ ID NO: 539002 - DNA, 19 bp, Mus musculus
  siRNA target sequence for Plaa (NM_172695.1,306-324).
ctaacaggggctttacaga

SEQ ID NO: 539003 - DNA, 19 bp, Mus musculus
  siRNA target sequence for Plaa (NM_172695.1,337-355).
gagcggccactctaatttt

SEQ ID NO: 539004 - DNA, 19 bp, Mus musculus
  siRNA target sequence for Plaa (NM_172695.1,339-357).
gcggccactctaattttgt

SEQ ID NO: 539005 - DNA, 19 bp, Mus musculus
  siRNA target sequence for Plaa (NM_172695.1,341-359).
ggccactctaattttgtgt

SEQ ID NO: 539006 - DNA, 19 bp, Mus musculus
  siRNA target sequence for Plaa (NM_172695.1,373-391).
cataccctcaagtgacata

SEQ ID NO: 539007 - DNA, 19 bp, Mus musculus
  siRNA target sequence for Plaa (NM_172695.1,379-397).
ctcaagtgacatatatcct

SEQ ID NO: 539008 - DNA, 19 bp, Mus musculus
  siRNA target sequence for Plaa (NM_172695.1,454-472).
cagtccaatgccactttat

SEQ ID NO: 539009 - DNA, 19 bp, Mus musculus
  siRNA target sequence for Plaa (NM_172695.1,487-505).
caaagatactgtttgtagt

SEQ ID NO: 539010 - DNA, 19 bp, Mus musculus
  siRNA target sequence for Plaa (NM_172695.1,546-564).
gggacaccactgctaaagt

SEQ ID NO: 539011 - DNA, 19 bp, Mus musculus
  siRNA target sequence for Plaa (NM_172695.1,548-566).
gacaccactgctaaagtct

SEQ ID NO: 539012 - DNA, 19 bp, Mus musculus
  siRNA target sequence for Plaa (NM_172695.1,558-576).
ctaaagtctggctgaatga

SEQ ID NO: 539013 - DNA, 19 bp, Mus musculus
  siRNA target sequence for Plaa (NM_172695.1,609-627).
ccgcagtatgggcagtaaa

SEQ ID NO: 539014 - DNA, 19 bp, Mus musculus
  siRNA target sequence for Plaa (NM_172695.1,668-686).
gacaagaccattaaactat

SEQ ID NO: 539015 - DNA, 19 bp, Mus musculus
  siRNA target sequence for Plaa (NM_172695.1,721-739).
gcatgaagactgtgtaaga

SEQ ID NO: 539016 - DNA, 19 bp, Mus musculus
  siRNA target sequence for Plaa (NM_172695.1,751-769).
cttgagtgagacagaattt

SEQ ID NO: 539017 - DNA, 19 bp, Mus musculus
  siRNA target sequence for Plaa (NM_172695.1,754-772).
gagtgagacagaatttctt

SEQ ID NO: 539018 - DNA, 19 bp, Mus musculus
  siRNA target sequence for Plaa (NM_172695.1,777-795).
gtgcaaacgatgctagtat

SEQ ID NO: 539019 - DNA, 19 bp, Mus musculus
  siRNA target sequence for Plaa (NM_172695.1,779-797).
gcaaacgatgctagtatta

SEQ ID NO: 539020 - DNA, 19 bp, Mus musculus
  siRNA target sequence for Plaa (NM_172695.1,818-836).
gagtgtctggaagtatact

SEQ ID NO: 539021 - DNA, 19 bp, Mus musculus
  siRNA target sequence for Plaa (NM_172695.1,830-848).
gtatactttggacatacaa

SEQ ID NO: 539022 - DNA, 19 bp, Mus musculus
  siRNA target sequence for Plaa (NM_172695.1,935-953).
ggtgaatgcgcccaaacaa

SEQ ID NO: 539023 - DNA, 19 bp, Mus musculus
  siRNA target sequence for Plaa (NM_172695.1,957-975).
gacttccagctcagtctat

SEQ ID NO: 539024 - DNA, 19 bp, Mus musculus
  siRNA target sequence for Plaa (NM_172695.1,981-999).
gttgctgcgtactggaaaa

SEQ ID NO: 539025 - DNA, 19 bp, Mus musculus
  siRNA target sequence for Plaa (NM_172695.1,1016-1034).
ggtgcgagtgatggtatta

SEQ ID NO: 539026 - DNA, 19 bp, Mus musculus
  siRNA target sequence for Plaa (NM_172695.1,1017-1035).
gtgcgagtgatggtattat

SEQ ID NO: 539027 - DNA, 19 bp, Mus musculus
  siRNA target sequence for Plaa (NM_172695.1,1019-1037).
gcgagtgatggtattatta

SEQ ID NO: 539028 - DNA, 19 bp, Mus musculus
  siRNA target sequence for Plaa (NM_172695.1,1067-1085).
gcaagtgctgaggaaatca

SEQ ID NO: 539029 - DNA, 19 bp, Mus musculus
  siRNA target sequence for Plaa (NM_172695.1,1111-1129).
ggcaactatcgattccaaa

SEQ ID NO: 539030 - DNA, 19 bp, Mus musculus
  siRNA target sequence for Plaa (NM_172695.1,1112-1130).
gcaactatcgattccaaaa

SEQ ID NO: 539031 - DNA, 19 bp, Mus musculus
  siRNA target sequence for Plaa (NM_172695.1,1205-1223).
ggacagactcgtctaatca

SEQ ID NO: 539032 - DNA, 19 bp, Mus musculus
  siRNA target sequence for Plaa (NM_172695.1,1244-1262).
gcctatcagtggagtgtta

SEQ ID NO: 539033 - DNA, 19 bp, Mus musculus
  siRNA target sequence for Plaa (NM_172695.1,1246-1264).
ctatcagtggagtgttagt

SEQ ID NO: 539034 - DNA, 19 bp, Mus musculus
  siRNA target sequence for Plaa (NM_172695.1,1265-1283).
gacgggaggtggataaaaa

SEQ ID NO: 539035 - DNA, 19 bp, Mus musculus
  siRNA target sequence for Plaa (NM_172695.1,1267-1285).
cgggaggtggataaaaatt

SEQ ID NO: 539036 - DNA, 19 bp, Mus musculus
  siRNA target sequence for Plaa (NM_172695.1,1270-1288).
gaggtggataaaaattggt

SEQ ID NO: 539037 - DNA, 19 bp, Mus musculus
  siRNA target sequence for Plaa (NM_172695.1,1307-1325).
ggtgctaatcagcaaacat

SEQ ID NO: 539038 - DNA, 19 bp, Mus musculus
  siRNA target sequence for Plaa (NM_172695.1,1318-1336).
gcaaacatctggaaaagtt

SEQ ID NO: 539039 - DNA, 19 bp, Mus musculus
  siRNA target sequence for Plaa (NM_172695.1,1388-1406).
ggtggaccatcgtataaat

SEQ ID NO: 539040 - DNA, 19 bp, Mus musculus
  siRNA target sequence for Plaa (NM_172695.1,1389-1407).
gtggaccatcgtataaatt

SEQ ID NO: 539041 - DNA, 19 bp, Mus musculus
  siRNA target sequence for Plaa (NM_172695.1,1434-1452).
ggctagttgcatacaactt

SEQ ID NO: 539042 - DNA, 19 bp, Mus musculus
  siRNA target sequence for Plaa (NM_172695.1,1484-1502).
ctggatcaggtggctaaat

SEQ ID NO: 539043 - DNA, 19 bp, Mus musculus
  siRNA target sequence for Plaa (NM_172695.1,1486-1504).
ggatcaggtggctaaattt

SEQ ID NO: 539044 - DNA, 19 bp, Mus musculus
  siRNA target sequence for Plaa (NM_172695.1,1487-1505).
gatcaggtggctaaattta

SEQ ID NO: 539045 - DNA, 19 bp, Mus musculus
  siRNA target sequence for Plaa (NM_172695.1,1495-1513).
ggctaaatttattattgat

SEQ ID NO: 539046 - DNA, 19 bp, Mus musculus
  siRNA target sequence for Plaa (NM_172695.1,1532-1550).
ctgggacttgggaatacca

SEQ ID NO: 539047 - DNA, 19 bp, Mus musculus
  siRNA target sequence for Plaa (NM_172695.1,1543-1561).
gaataccagtttttcagat

SEQ ID NO: 539048 - DNA, 19 bp, Mus musculus
  siRNA target sequence for Plaa (NM_172695.1,1638-1656).
caggtgctgggcgttacat

SEQ ID NO: 539049 - DNA, 19 bp, Mus musculus
  siRNA target sequence for Plaa (NM_172695.1,1681-1699).
caccatgactggagttgat

SEQ ID NO: 539050 - DNA, 19 bp, Mus musculus
  siRNA target sequence for Plaa (NM_172695.1,1687-1705).
gactggagttgatccattt

SEQ ID NO: 539051 - DNA, 19 bp, Mus musculus
  siRNA target sequence for Plaa (NM_172695.1,1787-1805).
caagcaaaccctacacaaa

SEQ ID NO: 539052 - DNA, 19 bp, Mus musculus
  siRNA target sequence for Plaa (NM_172695.1,1795-1813).
ccctacacaaatattagga

SEQ ID NO: 539053 - DNA, 19 bp, Mus musculus
  siRNA target sequence for Plaa (NM_172695.1,1796-1814).
cctacacaaatattaggaa

SEQ ID NO: 539054 - DNA, 19 bp, Mus musculus
  siRNA target sequence for Plaa (NM_172695.1,1797-1815).
ctacacaaatattaggaaa

SEQ ID NO: 539055 - DNA, 19 bp, Mus musculus
  siRNA target sequence for Plaa (NM_172695.1,1811-1829).
ggaaaactgaaggaactta

SEQ ID NO: 539056 - DNA, 19 bp, Mus musculus
  siRNA target sequence for Plaa (NM_172695.1,1860-1878).
ctgaagacgacttagtact

SEQ ID NO: 539057 - DNA, 19 bp, Mus musculus
  siRNA target sequence for Plaa (NM_172695.1,1877-1895).
cttcttgaaaagatactgt

SEQ ID NO: 539058 - DNA, 19 bp, Mus musculus
  siRNA target sequence for Plaa (NM_172695.1,1888-1906).
gatactgtccctgatttgt

SEQ ID NO: 539059 - DNA, 19 bp, Mus musculus
  siRNA target sequence for Plaa (NM_172695.1,1929-1947).
cggcccagcaacttcagat

SEQ ID NO: 539060 - DNA, 19 bp, Mus musculus
  siRNA target sequence for Plaa (NM_172695.1,1932-1950).
cccagcaacttcagatttt

SEQ ID NO: 539061 - DNA, 19 bp, Mus musculus
  siRNA target sequence for Plaa (NM_172695.1,1999-2017).
cattcttcgcctatcgatt

SEQ ID NO: 539062 - DNA, 19 bp, Mus musculus
  siRNA target sequence for Plaa (NM_172695.1,2021-2039).
catcccaatgtgaatgaga

SEQ ID NO: 539063 - DNA, 19 bp, Mus musculus
  siRNA target sequence for Plaa (NM_172695.1,2024-2042).
cccaatgtgaatgagaatt

SEQ ID NO: 539064 - DNA, 19 bp, Mus musculus
  siRNA target sequence for Plaa (NM_172695.1,2122-2140).
gcttgctcttaggactttt

SEQ ID NO: 539065 - DNA, 19 bp, Mus musculus
  siRNA target sequence for Plaa (NM_172695.1,2126-2144).
gctcttaggactttttgca

SEQ ID NO: 539066 - DNA, 19 bp, Mus musculus
  siRNA target sequence for Plaa (NM_172695.1,2129-2147).
cttaggactttttgcaatt

SEQ ID NO: 539067 - DNA, 19 bp, Mus musculus
  siRNA target sequence for Plaa (NM_172695.1,2142-2160).
gcaattgctttgttagtca

SEQ ID NO: 539068 - DNA, 19 bp, Mus musculus
  siRNA target sequence for Plaa (NM_172695.1,2196-2214).
cactgatgtcacatgcaat

SEQ ID NO: 539069 - DNA, 19 bp, Mus musculus
  siRNA target sequence for Plaa (NM_172695.1,2200-2218).
gatgtcacatgcaatagaa

SEQ ID NO: 539070 - DNA, 19 bp, Mus musculus
  siRNA target sequence for Plaa (NM_172695.1,2219-2237).
ctgaaatccgggagtaata

SEQ ID NO: 539071 - DNA, 19 bp, Mus musculus
  siRNA target sequence for Plaa (NM_172695.1,2226-2244).
ccgggagtaataagaacat

SEQ ID NO: 539072 - DNA, 19 bp, Mus musculus
  siRNA target sequence for Plaa (NM_172695.1,2229-2247).
ggagtaataagaacattca

SEQ ID NO: 539073 - DNA, 19 bp, Mus musculus
  siRNA target sequence for Plaa (NM_172695.1,2269-2287).
cttgaactattctgtttgt

SEQ ID NO: 539074 - DNA, 19 bp, Mus musculus
  siRNA target sequence for Plaa (NM_172695.1,2286-2304).
gtttccataaagaccataa

SEQ ID NO: 539075 - DNA, 19 bp, Mus musculus
  siRNA target sequence for Plaa (NM_172695.1,2290-2308).
ccataaagaccataacatt

SEQ ID NO: 539076 - DNA, 19 bp, Mus musculus
  siRNA target sequence for Plaa (NM_172695.1,2318-2336).
gctcaatgcctctcagtaa

SEQ ID NO: 539077 - DNA, 19 bp, Mus musculus
  siRNA target sequence for Plaa (NM_172695.1,2319-2337).
ctcaatgcctctcagtaat

SEQ ID NO: 539078 - DNA, 19 bp, Mus musculus
  siRNA target sequence for Plaa (NM_172695.1,2321-2339).
caatgcctctcagtaatta

SEQ ID NO: 539079 - DNA, 19 bp, Mus musculus
  siRNA target sequence for Plaa (NM_172695.1,2340-2358).
gcacaatcttggaagttgt

SEQ ID NO: 539080 - DNA, 19 bp, Mus musculus
  siRNA target sequence for Plaa (NM_172695.1,2390-2408).
gtggctcttgggacactta

SEQ ID NO: 539081 - DNA, 19 bp, Mus musculus
  siRNA target sequence for Plaa (NM_172695.1,2405-2423).
cttatcagtgatgattcaa

SEQ ID NO: 539082 - DNA, 19 bp, Mus musculus
  siRNA target sequence for Plaa (NM_172695.1,2450-2468).
ggtgttgattctcaaataa

SEQ ID NO: 539083 - DNA, 19 bp, Mus musculus
  siRNA target sequence for Plaa (NM_172695.1,2503-2521).
gagtgaatgctgtagactt

SEQ ID NO: 539084 - DNA, 19 bp, Mus musculus
  siRNA target sequence for Plaa (NM_172695.1,2511-2529).
gctgtagacttgtcttaca

SEQ ID NO: 539085 - DNA, 19 bp, Mus musculus
  siRNA target sequence for Plaa (NM_172695.1,2512-2530).
ctgtagacttgtcttacat

SEQ ID NO: 539086 - DNA, 19 bp, Mus musculus
  siRNA target sequence for Plaa (NM_172695.1,2514-2532).
gtagacttgtcttacattt

SEQ ID NO: 539087 - DNA, 19 bp, Mus musculus
  siRNA target sequence for Pldn (NM_019788.2,672-690).
cgacacgtctccagatgaa

SEQ ID NO: 539088 - DNA, 19 bp, Mus musculus
  siRNA target sequence for Pldn (NM_019788.2,746-764).
gcctgctgtcccactactt

SEQ ID NO: 539089 - DNA, 19 bp, Mus musculus
  siRNA target sequence for Pldn (NM_019788.2,747-765).
cctgctgtcccactactta

SEQ ID NO: 539090 - DNA, 19 bp, Mus musculus
  siRNA target sequence for Pldn (NM_019788.2,806-824).
cacagaaccaagttgtgtt

SEQ ID NO: 539091 - DNA, 19 bp, Mus musculus
  siRNA target sequence for Pldn (NM_019788.2,810-828).
gaaccaagttgtgttacta

SEQ ID NO: 539092 - DNA, 19 bp, Mus musculus
  siRNA target sequence for Pldn (NM_019788.2,899-917).
cagaggcgaagcactatca

SEQ ID NO: 539093 - DNA, 19 bp, Mus musculus
  siRNA target sequence for Pldn (NM_019788.2,918-936).
cgccaagctggtgactata

SEQ ID NO: 539094 - DNA, 19 bp, Mus musculus
  siRNA target sequence for Pldn (NM_019788.2,919-937).
gccaagctggtgactataa

SEQ ID NO: 539095 - DNA, 19 bp, Mus musculus
  siRNA target sequence for Pldn (NM_019788.2,952-970).
ctgctccatgagaaaacgt

SEQ ID NO: 539096 - DNA, 19 bp, Mus musculus
  siRNA target sequence for Pldn (NM_019788.2,961-979).
gagaaaacgtccaagttga

SEQ ID NO: 539097 - DNA, 19 bp, Mus musculus
  siRNA target sequence for Pldn (NM_019788.2,1038-1056).
gcaacgcgaaaaggaattt

SEQ ID NO: 539098 - DNA, 19 bp, Mus musculus
  siRNA target sequence for Pldn (NM_019788.2,1042-1060).
cgcgaaaaggaatttgaaa

SEQ ID NO: 539099 - DNA, 19 bp, Mus musculus
  siRNA target sequence for Plekhb1 (NM_013746.1,297-315).
catcctggaaagtcctttt

SEQ ID NO: 539100 - DNA, 19 bp, Mus musculus
  siRNA target sequence for Plekhb1 (NM_013746.1,458-476).
gagtagtcatccacttcaa

SEQ ID NO: 539101 - DNA, 19 bp, Mus musculus
  siRNA target sequence for Plekhb1 (NM_013746.1,471-489).
cttcaatgtccgagacata

SEQ ID NO: 539102 - DNA, 19 bp, Mus musculus
  siRNA target sequence for Plekhb1 (NM_013746.1,601-619).
cgggatgatgccatagcat

SEQ ID NO: 539103 - DNA, 19 bp, Mus musculus
  siRNA target sequence for Plekhb1 (NM_013746.1,774-792).
cccgtatcaggactactat

SEQ ID NO: 539104 - DNA, 19 bp, Mus musculus
  siRNA target sequence for Plekhb1 (NM_013746.1,801-819).
gccacccaacgcacatgaa

SEQ ID NO: 539105 - DNA, 19 bp, Mus musculus
  siRNA target sequence for Plekhb1 (NM_013746.1,840-858).
ctatgggccaccttatgca

SEQ ID NO: 539106 - DNA, 19 bp, Mus musculus
  siRNA target sequence for Plekhb1 (NM_013746.1,866-884).
gtgtgacacacgtgatagt

SEQ ID NO: 539107 - DNA, 19 bp, Mus musculus
  siRNA target sequence for Plekhb1 (NM_013746.1,955-973).
gctgctcttggttcactta

SEQ ID NO: 539108 - DNA, 19 bp, Mus musculus
  siRNA target sequence for Plekhb1 (NM_013746.1,958-976).
gctcttggttcacttatgt

SEQ ID NO: 539109 - DNA, 19 bp, Mus musculus
  siRNA target sequence for Porcn (NM_016913.1,181-199).
ccttcagccgccaggaatt

SEQ ID NO: 539110 - DNA, 19 bp, Mus musculus
  siRNA target sequence for Porcn (NM_016913.1,182-200).
cttcagccgccaggaattt

SEQ ID NO: 539111 - DNA, 19 bp, Mus musculus
  siRNA target sequence for Porcn (NM_016913.1,187-205).
gccgccaggaatttttcca

SEQ ID NO: 539112 - DNA, 19 bp, Mus musculus
  siRNA target sequence for Porcn (NM_016913.1,255-273).
cagatctggctgcttctta

SEQ ID NO: 539113 - DNA, 19 bp, Mus musculus
  siRNA target sequence for Porcn (NM_016913.1,342-360).
gtggcaggtggcttcttca

SEQ ID NO: 539114 - DNA, 19 bp, Mus musculus
  siRNA target sequence for Porcn (NM_016913.1,890-908).
cttccacttcagcaactat

SEQ ID NO: 539115 - DNA, 19 bp, Mus musculus
  siRNA target sequence for Porcn (NM_016913.1,1055-1073).
gaacctgcccatgtcttat

SEQ ID NO: 539116 - DNA, 19 bp, Mus musculus
  siRNA target sequence for Porcn (NM_016913.1,1059-1077).
ctgcccatgtcttattggt

SEQ ID NO: 539117 - DNA, 19 bp, Mus musculus
  siRNA target sequence for Porcn (NM_016913.1,1061-1079).
gcccatgtcttattggtta

SEQ ID NO: 539118 - DNA, 19 bp, Mus musculus
  siRNA target sequence for Porcn (NM_016913.1,1062-1080).
cccatgtcttattggttaa

SEQ ID NO: 539119 - DNA, 19 bp, Mus musculus
  siRNA target sequence for Porcn (NM_016913.1,1067-1085).
gtcttattggttaaataat

SEQ ID NO: 539120 - DNA, 19 bp, Mus musculus
  siRNA target sequence for Porcn (NM_016913.1,1069-1087).
cttattggttaaataatta

SEQ ID NO: 539121 - DNA, 19 bp, Mus musculus
  siRNA target sequence for Porcn (NM_016913.1,1199-1217).
cctggcattcatcacttat

SEQ ID NO: 539122 - DNA, 19 bp, Mus musculus
  siRNA target sequence for Porcn (NM_016913.1,1320-1338).
ggggtacgagccttaaact

SEQ ID NO: 539123 - DNA, 19 bp, Mus musculus
  siRNA target sequence for Porcn (NM_016913.1,1321-1339).
gggtacgagccttaaactt

SEQ ID NO: 539124 - DNA, 19 bp, Mus musculus
  siRNA target sequence for Porcn (NM_016913.1,1502-1520).
gatcttctaccgtctcata

SEQ ID NO: 539125 - DNA, 19 bp, Mus musculus
  siRNA target sequence for Porcn (NM_023638.1,846-864).
cgactccttcgcaacaaga

SEQ ID NO: 539126 - DNA, 19 bp, Mus musculus
  siRNA target sequence for Ppicap (NM_011150.1,213-231).
gactcaaggtacagaagat

SEQ ID NO: 539127 - DNA, 19 bp, Mus musculus
  siRNA target sequence for Ppicap (NM_011150.1,232-250).
ggagacatgcgcttggtta

SEQ ID NO: 539128 - DNA, 19 bp, Mus musculus
  siRNA target sequence for Ppicap (NM_011150.1,316-334).
gacaacctctggaaccttt

SEQ ID NO: 539129 - DNA, 19 bp, Mus musculus
  siRNA target sequence for Ppicap (NM_011150.1,321-339).
cctctggaaccttttggat

SEQ ID NO: 539130 - DNA, 19 bp, Mus musculus
  siRNA target sequence for Ppicap (NM_011150.1,430-448).
ctggatgaggtggaatgta

SEQ ID NO: 539131 - DNA, 19 bp, Mus musculus
  siRNA target sequence for Ppicap (NM_011150.1,529-547).
gtggtctgctccaacgata

SEQ ID NO: 539132 - DNA, 19 bp, Mus musculus
  siRNA target sequence for Ppicap (NM_011150.1,619-637).
cagggctgcgacctattca

SEQ ID NO: 539133 - DNA, 19 bp, Mus musculus
  siRNA target sequence for Ppicap (NM_011150.1,787-805).
gacttcctcaggtactttt

SEQ ID NO: 539134 - DNA, 19 bp, Mus musculus
  siRNA target sequence for Ppicap (NM_011150.1,891-909).
ctactgtggacggcttttt

SEQ ID NO: 539135 - DNA, 19 bp, Mus musculus
  siRNA target sequence for Ppicap (NM_011150.1,971-989).
gggccaccggggactctat

SEQ ID NO: 539136 - DNA, 19 bp, Mus musculus
  siRNA target sequence for Ppicap (NM_011150.1,1169-1187).
cctcacacgaggatataga

SEQ ID NO: 539137 - DNA, 19 bp, Mus musculus
  siRNA target sequence for Ppicap (NM_011150.1,1433-1451).
cctggagggcacaaagata

SEQ ID NO: 539138 - DNA, 19 bp, Mus musculus
  siRNA target sequence for Ppicap (NM_011150.1,1462-1480).
cgatacaatcagctctata

SEQ ID NO: 539139 - DNA, 19 bp, Mus musculus
  siRNA target sequence for Ppicap (NM_011150.1,1467-1485).
caatcagctctatacatat

SEQ ID NO: 539140 - DNA, 19 bp, Mus musculus
  siRNA target sequence for Ppicap (NM_011150.1,1494-1512).
ctcagtagcccggtacaat

SEQ ID NO: 539141 - DNA, 19 bp, Mus musculus
  siRNA target sequence for Ppicap (NM_011150.1,1498-1516).
gtagcccggtacaatagct

SEQ ID NO: 539142 - DNA, 19 bp, Mus musculus
  siRNA target sequence for Ppicap (NM_011150.1,1674-1692).
ctactccaatccgacaatt

SEQ ID NO: 539143 - DNA, 19 bp, Mus musculus
  siRNA target sequence for Ppicap (NM_011150.1,1684-1702).
ccgacaattggctatgaga

SEQ ID NO: 539144 - DNA, 19 bp, Mus musculus
  siRNA target sequence for Ppicap (NM_011150.1,1685-1703).
cgacaattggctatgagaa

SEQ ID NO: 539145 - DNA, 19 bp, Mus musculus
  siRNA target sequence for Prkar1a (NM_021880.1,179-197).
gggaatgcgagctctatgt

SEQ ID NO: 539146 - DNA, 19 bp, Mus musculus
  siRNA target sequence for Prkar1a (NM_021880.1,274-292).
gcattccttcgggaatact

SEQ ID NO: 539147 - DNA, 19 bp, Mus musculus
  siRNA target sequence for Prkar1a (NM_021880.1,275-293).
cattccttcgggaatactt

SEQ ID NO: 539148 - DNA, 19 bp, Mus musculus
  siRNA target sequence for Prkar1a (NM_021880.1,313-331).
gaggcaagacagattcagt

SEQ ID NO: 539149 - DNA, 19 bp, Mus musculus
  siRNA target sequence for Prkar1a (NM_021880.1,460-478).
gctgcctcctacgttagaa

SEQ ID NO: 539150 - DNA, 19 bp, Mus musculus
  siRNA target sequence for Prkar1a (NM_021880.1,461-479).
ctgcctcctacgttagaaa

SEQ ID NO: 539151 - DNA, 19 bp, Mus musculus
  siRNA target sequence for Prkar1a (NM_021880.1,465-483).
ctcctacgttagaaaggtt

SEQ ID NO: 539152 - DNA, 19 bp, Mus musculus
  siRNA target sequence for Prkar1a (NM_021880.1,471-489).
cgttagaaaggttattcca

SEQ ID NO: 539153 - DNA, 19 bp, Mus musculus
  siRNA target sequence for Prkar1a (NM_021880.1,472-490).
gttagaaaggttattccaa

SEQ ID NO: 539154 - DNA, 19 bp, Mus musculus
  siRNA target sequence for Prkar1a (NM_021880.1,476-494).
gaaaggttattccaaaaga

SEQ ID NO: 539155 - DNA, 19 bp, Mus musculus
  siRNA target sequence for Prkar1a (NM_021880.1,480-498).
ggttattccaaaagattat

SEQ ID NO: 539156 - DNA, 19 bp, Mus musculus
  siRNA target sequence for Prkar1a (NM_021880.1,635-653).
gtgatgaaggggataactt

SEQ ID NO: 539157 - DNA, 19 bp, Mus musculus
  siRNA target sequence for Prkar1a (NM_021880.1,637-655).
gatgaaggggataacttct

SEQ ID NO: 539158 - DNA, 19 bp, Mus musculus
  siRNA target sequence for Prkar1a (NM_021880.1,782-800).
caaagacaaacgtgaaact

SEQ ID NO: 539159 - DNA, 19 bp, Mus musculus
  siRNA target sequence for Prkar1a (NM_021880.1,852-870).
gcgaaagaggaagatgtat

SEQ ID NO: 539160 - DNA, 19 bp, Mus musculus
  siRNA target sequence for Prkar1a (NM_021880.1,874-892).
gaattccttagtaaagtgt

SEQ ID NO: 539161 - DNA, 19 bp, Mus musculus
  siRNA target sequence for Prkar1a (NM_021880.1,1039-1057).
ctgcagcgtcggtcagaaa

SEQ ID NO: 539162 - DNA, 19 bp, Mus musculus
  siRNA target sequence for Prkar1a (NM_021880.1,1044-1062).
gcgtcggtcagaaaacgaa

SEQ ID NO: 539163 - DNA, 19 bp, Mus musculus
  siRNA target sequence for Prkar1a (NM_021880.1,1048-1066).
cggtcagaaaacgaagaat

SEQ ID NO: 539164 - DNA, 19 bp, Mus musculus
  siRNA target sequence for Prkar1a (NM_021880.1,1049-1067).
ggtcagaaaacgaagaatt

SEQ ID NO: 539165 - DNA, 19 bp, Mus musculus
  siRNA target sequence for Prkar1a (NM_021880.1,1082-1100).
gactggggccttctgatta

SEQ ID NO: 539166 - DNA, 19 bp, Mus musculus
  siRNA target sequence for Prkar1a (NM_021880.1,1086-1104).
ggggccttctgattatttt

SEQ ID NO: 539167 - DNA, 19 bp, Mus musculus
  siRNA target sequence for Prkar1a (NM_021880.1,1162-1180).
cctttgaagtgcgttaagt

SEQ ID NO: 539168 - DNA, 19 bp, Mus musculus
  siRNA target sequence for Prkcsh (NM_008925.1,149-167).
gttgggctgtagaagttaa

SEQ ID NO: 539169 - DNA, 19 bp, Mus musculus
  siRNA target sequence for Prkcsh (NM_008925.1,189-207).
cagcaaccatcacttctat

SEQ ID NO: 539170 - DNA, 19 bp, Mus musculus
  siRNA target sequence for Prkcsh (NM_008925.1,191-209).
gcaaccatcacttctatga

SEQ ID NO: 539171 - DNA, 19 bp, Mus musculus
  siRNA target sequence for Prkcsh (NM_008925.1,285-303).
ctgtaaggacggttcagat

SEQ ID NO: 539172 - DNA, 19 bp, Mus musculus
  siRNA target sequence for Prkcsh (NM_008925.1,355-373).
gggtacaagcccttgtaca

SEQ ID NO: 539173 - DNA, 19 bp, Mus musculus
  siRNA target sequence for Prkcsh (NM_008925.1,378-396).
ctccagccgggtcaatgat

SEQ ID NO: 539174 - DNA, 19 bp, Mus musculus
  siRNA target sequence for Prkcsh (NM_008925.1,418-436).
ggcacagacgagtacaaca

SEQ ID NO: 539175 - DNA, 19 bp, Mus musculus
  siRNA target sequence for Prkcsh (NM_008925.1,472-490).
ggtcgcaaggaaaaagagt

SEQ ID NO: 539176 - DNA, 19 bp, Mus musculus
  siRNA target sequence for Prkcsh (NM_008925.1,598-616).
cttcaggctggaaagaagt

SEQ ID NO: 539177 - DNA, 19 bp, Mus musculus
  siRNA target sequence for Prkcsh (NM_008925.1,798-816).
ggtctcgctggctgagtta

SEQ ID NO: 539178 - DNA, 19 bp, Mus musculus
  siRNA target sequence for Prkcsh (NM_008925.1,1234-1252).
gaacggtccttgaaagaga

SEQ ID NO: 539179 - DNA, 19 bp, Mus musculus
  siRNA target sequence for Prkcsh (NM_008925.1,1279-1297).
caagagatctcctttgatt

SEQ ID NO: 539180 - DNA, 19 bp, Mus musculus
  siRNA target sequence for Prkcsh (NM_008925.1,1303-1321).
ccctctggagagtttgcat

SEQ ID NO: 539181 - DNA, 19 bp, Mus musculus
  siRNA target sequence for Prkcsh (NM_008925.1,1304-1322).
cctctggagagtttgcata

SEQ ID NO: 539182 - DNA, 19 bp, Mus musculus
  siRNA target sequence for Prkcsh (NM_008925.1,1309-1327).
ggagagtttgcatatctct

SEQ ID NO: 539183 - DNA, 19 bp, Mus musculus
  siRNA target sequence for Prkcsh (NM_008925.1,1451-1469).
ctggccctgatcatgacaa

SEQ ID NO: 539184 - DNA, 19 bp, Mus musculus
  siRNA target sequence for Prkcsh (NM_008925.1,1454-1472).
gccctgatcatgacaagtt

SEQ ID NO: 539185 - DNA, 19 bp, Mus musculus
  siRNA target sequence for Prnpip1 (NM_080469.2,358-376).
ggagcggctcggttctctt

SEQ ID NO: 539186 - DNA, 19 bp, Mus musculus
  siRNA target sequence for Prnpip1 (NM_080469.2,361-379).
gcggctcggttctcttcat

SEQ ID NO: 539187 - DNA, 19 bp, Mus musculus
  siRNA target sequence for Prnpip1 (NM_080469.2,362-380).
cggctcggttctcttcata

SEQ ID NO: 539188 - DNA, 19 bp, Mus musculus
  siRNA target sequence for Prnpip1 (NM_080469.2,363-381).
ggctcggttctcttcatat

SEQ ID NO: 539189 - DNA, 19 bp, Mus musculus
  siRNA target sequence for Prnpip1 (NM_080469.2,364-382).
gctcggttctcttcatatt

SEQ ID NO: 539190 - DNA, 19 bp, Mus musculus
  siRNA target sequence for Prnpip1 (NM_080469.2,368-386).
ggttctcttcatatttact

SEQ ID NO: 539191 - DNA, 19 bp, Mus musculus
  siRNA target sequence for Prnpip1 (NM_080469.2,408-426).
gggctcccacttgttatct

SEQ ID NO: 539192 - DNA, 19 bp, Mus musculus
  siRNA target sequence for Prnpip1 (NM_080469.2,442-460).
gagctctgttccatatcca

SEQ ID NO: 539193 - DNA, 19 bp, Mus musculus
  siRNA target sequence for Prnpip1 (NM_080469.2,517-535).
cctccccagaggtatcact

SEQ ID NO: 539194 - DNA, 19 bp, Mus musculus
  siRNA target sequence for Prnpip1 (NM_080469.2,518-536).
ctccccagaggtatcacta

SEQ ID NO: 539195 - DNA, 19 bp, Mus musculus
  siRNA target sequence for Prnpip1 (NM_080469.2,521-539).
cccagaggtatcactactt

SEQ ID NO: 539196 - DNA, 19 bp, Mus musculus
  siRNA target sequence for Prnpip1 (NM_080469.2,522-540).
ccagaggtatcactacttt

SEQ ID NO: 539197 - DNA, 19 bp, Mus musculus
  siRNA target sequence for Prnpip1 (NM_080469.2,523-541).
cagaggtatcactactttt

SEQ ID NO: 539198 - DNA, 19 bp, Mus musculus
  siRNA target sequence for Prnpip1 (NM_080469.2,525-543).
gaggtatcactacttttta

SEQ ID NO: 539199 - DNA, 19 bp, Mus musculus
  siRNA target sequence for Prnpip1 (NM_080469.2,527-545).
ggtatcactactttttagt

SEQ ID NO: 539200 - DNA, 19 bp, Mus musculus
  siRNA target sequence for Prnpip1 (NM_080469.2,586-604).
cctcaggaaatcattgagt

SEQ ID NO: 539201 - DNA, 19 bp, Mus musculus
  siRNA target sequence for Prnpip1 (NM_080469.2,603-621).
gttccccatcctgaagtta

SEQ ID NO: 539202 - DNA, 19 bp, Mus musculus
  siRNA target sequence for Prnpip1 (NM_080469.2,606-624).
ccccatcctgaagttaaat

SEQ ID NO: 539203 - DNA, 19 bp, Mus musculus
  siRNA target sequence for Prnpip1 (NM_080469.2,626-644).
gccggaccatggaaatcga

SEQ ID NO: 539204 - DNA, 19 bp, Mus musculus
  siRNA target sequence for Prnpip1 (NM_080469.2,645-663).
gtctacctttcacatgtat

SEQ ID NO: 539205 - DNA, 19 bp, Mus musculus
  siRNA target sequence for Prnpip1 (NM_080469.2,647-665).
ctacctttcacatgtatgt

SEQ ID NO: 539206 - DNA, 19 bp, Mus musculus
  siRNA target sequence for Prnpip1 (NM_080469.2,708-726).
gctcaccgggatcattcaa

SEQ ID NO: 539207 - DNA, 19 bp, Mus musculus
  siRNA target sequence for Prnpip1 (NM_080469.2,789-807).
gaaggaaggcctcttagat

SEQ ID NO: 539208 - DNA, 19 bp, Mus musculus
  siRNA target sequence for Prnpip1 (NM_080469.2,805-823).
gatccaaacgtcaagtcaa

SEQ ID NO: 539209 - DNA, 19 bp, Mus musculus
  siRNA target sequence for Prnpip1 (NM_080469.2,808-826).
ccaaacgtcaagtcaatct

SEQ ID NO: 539210 - DNA, 19 bp, Mus musculus
  siRNA target sequence for Prnpip1 (NM_080469.2,809-827).
caaacgtcaagtcaatctt

SEQ ID NO: 539211 - DNA, 19 bp, Mus musculus
  siRNA target sequence for Prnpip1 (NM_080469.2,814-832).
gtcaagtcaatctttgtca

SEQ ID NO: 539212 - DNA, 19 bp, Mus musculus
  siRNA target sequence for Prnpip1 (NM_080469.2,839-857).
gagactgggacctgaaagt

SEQ ID NO: 539213 - DNA, 19 bp, Mus musculus
  siRNA target sequence for Prnpip1 (NM_080469.2,906-924).
cttcaagcagtggattaat

SEQ ID NO: 539214 - DNA, 19 bp, Mus musculus
  siRNA target sequence for Prnpip1 (NM_080469.2,912-930).
gcagtggattaatctaaaa

SEQ ID NO: 539215 - DNA, 19 bp, Mus musculus
  siRNA target sequence for Prnpip1 (NM_080469.2,951-969).
gggctgctggcccaagaat

SEQ ID NO: 539216 - DNA, 19 bp, Mus musculus
  siRNA target sequence for Prnpip1 (NM_080469.2,960-978).
gcccaagaatggactacta

SEQ ID NO: 539217 - DNA, 19 bp, Mus musculus
  siRNA target sequence for Prnpip1 (NM_080469.2,970-988).
ggactactagacatgaaca

SEQ ID NO: 539218 - DNA, 19 bp, Mus musculus
  siRNA target sequence for Prnpip1 (NM_080469.2,971-989).
gactactagacatgaacaa

SEQ ID NO: 539219 - DNA, 19 bp, Mus musculus
  siRNA target sequence for Prnpip1 (NM_080469.2,1072-1090).
gcataccgaggcttcatct

SEQ ID NO: 539220 - DNA, 19 bp, Mus musculus
  siRNA target sequence for Prnpip1 (NM_080469.2,1073-1091).
cataccgaggcttcatctt

SEQ ID NO: 539221 - DNA, 19 bp, Mus musculus
  siRNA target sequence for Prrg2 (NM_022999.1,146-164).
cttccctgctcttagtcta

SEQ ID NO: 539222 - DNA, 19 bp, Mus musculus
  siRNA target sequence for Prrg2 (NM_022999.1,402-420).
gcgcttctgggaaagctat

SEQ ID NO: 539223 - DNA, 19 bp, Mus musculus
  siRNA target sequence for Prrg2 (NM_022999.1,403-421).
cgcttctgggaaagctata

SEQ ID NO: 539224 - DNA, 19 bp, Mus musculus
  siRNA target sequence for Prrg2 (NM_022999.1,487-505).
gggatcctcctcattgtct

SEQ ID NO: 539225 - DNA, 19 bp, Mus musculus
  siRNA target sequence for Prrg2 (NM_022999.1,512-530).
gcttgggagccttttggta

SEQ ID NO: 539226 - DNA, 19 bp, Mus musculus
  siRNA target sequence for Prrg2 (NM_022999.1,513-531).
cttgggagccttttggtat

SEQ ID NO: 539227 - DNA, 19 bp, Mus musculus
  siRNA target sequence for Psen1 (NM_008943.1,626-644).
caaccctgagccaatatct

SEQ ID NO: 539228 - DNA, 19 bp, Mus musculus
  siRNA target sequence for Psen1 (NM_008943.1,699-717).
gacgaagagctgacattga

SEQ ID NO: 539229 - DNA, 19 bp, Mus musculus
  siRNA target sequence for Psen1 (NM_008943.1,779-797).
cgtggccaccatcaaatca

SEQ ID NO: 539230 - DNA, 19 bp, Mus musculus
  siRNA target sequence for Psen1 (NM_008943.1,791-809).
caaatcagtcagcttctat

SEQ ID NO: 539231 - DNA, 19 bp, Mus musculus
  siRNA target sequence for Psen1 (NM_008943.1,819-837).
gacggtcagctaatctaca

SEQ ID NO: 539232 - DNA, 19 bp, Mus musculus
  siRNA target sequence for Psen1 (NM_008943.1,980-998).
cgcctggcttattatttca

SEQ ID NO: 539233 - DNA, 19 bp, Mus musculus
  siRNA target sequence for Psen1 (NM_008943.1,1062-1080).
gtcgccgtggactacgtta

SEQ ID NO: 539234 - DNA, 19 bp, Mus musculus
  siRNA target sequence for Psen1 (NM_008943.1,1066-1084).
ccgtggactacgttacagt

SEQ ID NO: 539235 - DNA, 19 bp, Mus musculus
  siRNA target sequence for Psen1 (NM_008943.1,1067-1085).
cgtggactacgttacagta

SEQ ID NO: 539236 - DNA, 19 bp, Mus musculus
  siRNA target sequence for Psen1 (NM_008943.1,1091-1109).
cctaatctggaattttggt

SEQ ID NO: 539237 - DNA, 19 bp, Mus musculus
  siRNA target sequence for Psen1 (NM_008943.1,1152-1170).
ctgcagcaggcgtatctca

SEQ ID NO: 539238 - DNA, 19 bp, Mus musculus
  siRNA target sequence for Psen1 (NM_008943.1,1154-1172).
gcagcaggcgtatctcatt

SEQ ID NO: 539239 - DNA, 19 bp, Mus musculus
  siRNA target sequence for Psen1 (NM_008943.1,1155-1173).
cagcaggcgtatctcatta

SEQ ID NO: 539240 - DNA, 19 bp, Mus musculus
  siRNA target sequence for Psen1 (NM_008943.1,1158-1176).
caggcgtatctcattatga

SEQ ID NO: 539241 - DNA, 19 bp, Mus musculus
  siRNA target sequence for Psen1 (NM_008943.1,1161-1179).
gcgtatctcattatgatca

SEQ ID NO: 539242 - DNA, 19 bp, Mus musculus
  siRNA target sequence for Psen1 (NM_008943.1,1222-1240).
ggaccgcatggctcatctt

SEQ ID NO: 539243 - DNA, 19 bp, Mus musculus
  siRNA target sequence for Psen1 (NM_008943.1,1245-1263).
gtgatttcagtatatgatt

SEQ ID NO: 539244 - DNA, 19 bp, Mus musculus
  siRNA target sequence for Psen1 (NM_008943.1,1282-1300).
ccaaaggcccacttcgtat

SEQ ID NO: 539245 - DNA, 19 bp, Mus musculus
  siRNA target sequence for Psen1 (NM_008943.1,1293-1311).
cttcgtatgctggttgaaa

SEQ ID NO: 539246 - DNA, 19 bp, Mus musculus
  siRNA target sequence for Psen1 (NM_008943.1,1341-1359).
ccagctcttatctattcct

SEQ ID NO: 539247 - DNA, 19 bp, Mus musculus
  siRNA target sequence for Psen1 (NM_008943.1,1420-1438).
ccaagaaccccaagtataa

SEQ ID NO: 539248 - DNA, 19 bp, Mus musculus
  siRNA target sequence for Psen1 (NM_008943.1,1581-1599).
ctttctgggagcattctaa

SEQ ID NO: 539249 - DNA, 19 bp, Mus musculus
  siRNA target sequence for Psen1 (NM_008943.1,1612-1630).
cggaggaaagaggagtaaa

SEQ ID NO: 539250 - DNA, 19 bp, Mus musculus
  siRNA target sequence for Psen1 (NM_008943.1,1635-1653).
ggactgggagatttcattt

SEQ ID NO: 539251 - DNA, 19 bp, Mus musculus
  siRNA target sequence for Psen1 (NM_008943.1,1720-1738).
gctttgtagccatactgat

SEQ ID NO: 539252 - DNA, 19 bp, Mus musculus
  siRNA target sequence for Psen1 (NM_008943.1,1741-1759).
gcctgtgccttacattact

SEQ ID NO: 539253 - DNA, 19 bp, Mus musculus
  siRNA target sequence for Psen1 (NM_008943.1,1829-1847).
cttcgccacggattacctt

SEQ ID NO: 539254 - DNA, 19 bp, Mus musculus
  siRNA target sequence for Psen1 (NM_008943.1,1862-1880).
ggaccaacttgcattccat

SEQ ID NO: 539255 - DNA, 19 bp, Mus musculus
  siRNA target sequence for Psen1 (NM_008943.1,1872-1890).
gcattccatcagttttata

SEQ ID NO: 539256 - DNA, 19 bp, Mus musculus
  siRNA target sequence for Psg17 (NM_007677.1,648-666).
ccttgtacctcccactatt

SEQ ID NO: 539257 - DNA, 19 bp, Mus musculus
  siRNA target sequence for Psg17 (NM_007677.1,724-742).
ctaccagagtatcttatat

SEQ ID NO: 539258 - DNA, 19 bp, Mus musculus
  siRNA target sequence for Psg17 (NM_007677.1,1120-1138).
ggcgtgtatagcactatat

SEQ ID NO: 539259 - DNA, 19 bp, Mus musculus
  siRNA target sequence for Psg17 (NM_007677.1,1121-1139).
gcgtgtatagcactatatt

SEQ ID NO: 539260 - DNA, 19 bp, Mus musculus
  siRNA target sequence for Psg17 (NM_007677.1,1122-1140).
cgtgtatagcactatatta

SEQ ID NO: 539261 - DNA, 19 bp, Mus musculus
  siRNA target sequence for Psg17 (NM_007677.1,1123-1141).
gtgtatagcactatattat

SEQ ID NO: 539262 - DNA, 19 bp, Mus musculus
  siRNA target sequence for Psg17 (NM_007677.1,1130-1148).
gcactatattatttcaaat

SEQ ID NO: 539263 - DNA, 19 bp, Mus musculus
  siRNA target sequence for Psg17 (NM_007677.1,1186-1204).
ggctatgcacggagtagaa

SEQ ID NO: 539264 - DNA, 19 bp, Mus musculus
  siRNA target sequence for Psg17 (NM_007677.1,1188-1206).
ctatgcacggagtagaaga

SEQ ID NO: 539265 - DNA, 19 bp, Mus musculus
  siRNA target sequence for Ptger3 (NM_011196.1,160-178).
cagcaacctgtcaagtact

SEQ ID NO: 539266 - DNA, 19 bp, Mus musculus
  siRNA target sequence for Ptger3 (NM_011196.1,294-312).
gcaagcgcaagaagtcttt

SEQ ID NO: 539267 - DNA, 19 bp, Mus musculus
  siRNA target sequence for Ptger3 (NM_011196.1,441-459).
ccttcttcgggctaaccat

SEQ ID NO: 539268 - DNA, 19 bp, Mus musculus
  siRNA target sequence for Ptger3 (NM_011196.1,927-945).
gttggtcgccgctattgat

SEQ ID NO: 539269 - DNA, 19 bp, Mus musculus
  siRNA target sequence for Ptger3 (NM_011196.1,930-948).
ggtcgccgctattgataat

SEQ ID NO: 539270 - DNA, 19 bp, Mus musculus
  siRNA target sequence for Ptger3 (NM_011196.1,933-951).
cgccgctattgataatgat

SEQ ID NO: 539271 - DNA, 19 bp, Mus musculus
  siRNA target sequence for Ptger3 (NM_011196.1,935-953).
ccgctattgataatgatgt

SEQ ID NO: 539272 - DNA, 19 bp, Mus musculus
  siRNA target sequence for Ptger3 (NM_011196.1,936-954).
cgctattgataatgatgtt

SEQ ID NO: 539273 - DNA, 19 bp, Mus musculus
  siRNA target sequence for Ptger3 (NM_011196.1,1012-1030).
gaaggagtgcaattccttt

SEQ ID NO: 539274 - DNA, 19 bp, Mus musculus
  siRNA target sequence for Ptger3 (NM_011196.1,1050-1068).
cttcgctgaaccagatctt

SEQ ID NO: 539275 - DNA, 19 bp, Mus musculus
  siRNA target sequence for Ptger3 (NM_011196.1,1079-1097).
gtttatctgctgctaagaa

SEQ ID NO: 539276 - DNA, 19 bp, Mus musculus
  siRNA target sequence for Ptgfrn (NM_011197.1,144-162).
gtgatcccctgcaatgtca

SEQ ID NO: 539277 - DNA, 19 bp, Mus musculus
  siRNA target sequence for Ptgfrn (NM_011197.1,154-172).
gcaatgtcagcgactatga

SEQ ID NO: 539278 - DNA, 19 bp, Mus musculus
  siRNA target sequence for Ptgfrn (NM_011197.1,283-301).
ggctgcagcggggtgatat

SEQ ID NO: 539279 - DNA, 19 bp, Mus musculus
  siRNA target sequence for Ptgfrn (NM_011197.1,744-762).
gcggaccagggttcctata

SEQ ID NO: 539280 - DNA, 19 bp, Mus musculus
  siRNA target sequence for Ptgfrn (NM_011197.1,746-764).
ggaccagggttcctataga

SEQ ID NO: 539281 - DNA, 19 bp, Mus musculus
  siRNA target sequence for Ptgfrn (NM_011197.1,963-981).
gtgacatggtacttcaaaa

SEQ ID NO: 539282 - DNA, 19 bp, Mus musculus
  siRNA target sequence for Ptgfrn (NM_011197.1,983-1001).
gacacccgatacctcttta

SEQ ID NO: 539283 - DNA, 19 bp, Mus musculus
  siRNA target sequence for Ptgfrn (NM_011197.1,985-1003).
cacccgatacctctttact

SEQ ID NO: 539284 - DNA, 19 bp, Mus musculus
  siRNA target sequence for Ptgfrn (NM_011197.1,1079-1097).
ggatacccgctcttaccat

SEQ ID NO: 539285 - DNA, 19 bp, Mus musculus
  siRNA target sequence for Ptgfrn (NM_011197.1,1098-1116).
ctactggtgcgagatgtta

SEQ ID NO: 539286 - DNA, 19 bp, Mus musculus
  siRNA target sequence for Ptgfrn (NM_011197.1,1103-1121).
ggtgcgagatgttagcaaa

SEQ ID NO: 539287 - DNA, 19 bp, Mus musculus
  siRNA target sequence for Ptgfrn (NM_011197.1,1234-1252).
ggctagaaccagaatacca

SEQ ID NO: 539288 - DNA, 19 bp, Mus musculus
  siRNA target sequence for Ptgfrn (NM_011197.1,1308-1326).
cagtgccgggtgatagaca

SEQ ID NO: 539289 - DNA, 19 bp, Mus musculus
  siRNA target sequence for Ptgfrn (NM_011197.1,1358-1376).
cgtgtcgtggtactataga

SEQ ID NO: 539290 - DNA, 19 bp, Mus musculus
  siRNA target sequence for Ptgfrn (NM_011197.1,1359-1377).
gtgtcgtggtactatagaa

SEQ ID NO: 539291 - DNA, 19 bp, Mus musculus
  siRNA target sequence for Ptgfrn (NM_011197.1,1473-1491).
gcccaggacggagagttta

SEQ ID NO: 539292 - DNA, 19 bp, Mus musculus
  siRNA target sequence for Ptgfrn (NM_011197.1,1474-1492).
cccaggacggagagtttat

SEQ ID NO: 539293 - DNA, 19 bp, Mus musculus
  siRNA target sequence for Ptgfrn (NM_011197.1,1475-1493).
ccaggacggagagtttatt

SEQ ID NO: 539294 - DNA, 19 bp, Mus musculus
  siRNA target sequence for Ptgfrn (NM_011197.1,1476-1494).
caggacggagagtttattt

SEQ ID NO: 539295 - DNA, 19 bp, Mus musculus
  siRNA target sequence for Ptgfrn (NM_011197.1,1478-1496).
ggacggagagtttattttt

SEQ ID NO: 539296 - DNA, 19 bp, Mus musculus
  siRNA target sequence for Ptgfrn (NM_011197.1,1547-1565).
ggaagacaggggcaattat

SEQ ID NO: 539297 - DNA, 19 bp, Mus musculus
  siRNA target sequence for Ptgfrn (NM_011197.1,1548-1566).
gaagacaggggcaattatt

SEQ ID NO: 539298 - DNA, 19 bp, Mus musculus
  siRNA target sequence for Ptgfrn (NM_011197.1,1711-1729).
ctgcagggaatacatttga

SEQ ID NO: 539299 - DNA, 19 bp, Mus musculus
  siRNA target sequence for Ptgfrn (NM_011197.1,1728-1746).
gagatgacttgcaaagtgt

SEQ ID NO: 539300 - DNA, 19 bp, Mus musculus
  siRNA target sequence for Ptgfrn (NM_011197.1,1768-1786).
cacgatactcagttctcat

SEQ ID NO: 539301 - DNA, 19 bp, Mus musculus
  siRNA target sequence for Ptgfrn (NM_011197.1,1997-2015).
gacagcctggtctcctatt

SEQ ID NO: 539302 - DNA, 19 bp, Mus musculus
  siRNA target sequence for Ptgfrn (NM_011197.1,2045-2063).
cagtctctccaatcctatt

SEQ ID NO: 539303 - DNA, 19 bp, Mus musculus
  siRNA target sequence for Ptgfrn (NM_011197.1,2047-2065).
gtctctccaatcctattga

SEQ ID NO: 539304 - DNA, 19 bp, Mus musculus
  siRNA target sequence for Ptgfrn (NM_011197.1,2080-2098).
cctcaggtcccacatttaa

SEQ ID NO: 539305 - DNA, 19 bp, Mus musculus
  siRNA target sequence for Ptgfrn (NM_011197.1,2134-2152).
ggggagatctcatcaaatt

SEQ ID NO: 539306 - DNA, 19 bp, Mus musculus
  siRNA target sequence for Ptgfrn (NM_011197.1,2136-2154).
ggagatctcatcaaattgt

SEQ ID NO: 539307 - DNA, 19 bp, Mus musculus
  siRNA target sequence for Ptgfrn (NM_011197.1,2139-2157).
gatctcatcaaattgttct

SEQ ID NO: 539308 - DNA, 19 bp, Mus musculus
  siRNA target sequence for Ptgfrn (NM_011197.1,2218-2236).
ggtttgcggtacactcttt

SEQ ID NO: 539309 - DNA, 19 bp, Mus musculus
  siRNA target sequence for Ptgfrn (NM_011197.1,2219-2237).
gtttgcggtacactctttt

SEQ ID NO: 539310 - DNA, 19 bp, Mus musculus
  siRNA target sequence for Ptgfrn (NM_011197.1,2463-2481).
cactccaggcccatcttta

SEQ ID NO: 539311 - DNA, 19 bp, Mus musculus
  siRNA target sequence for Ptgfrn (NM_011197.1,2468-2486).
caggcccatctttataact

SEQ ID NO: 539312 - DNA, 19 bp, Mus musculus
  siRNA target sequence for Ptgfrn (NM_011197.1,2470-2488).
ggcccatctttataactgt

SEQ ID NO: 539313 - DNA, 19 bp, Mus musculus
  siRNA target sequence for Ptgfrn (NM_011197.1,2590-2608).
cccattggtgctgtaagaa

SEQ ID NO: 539314 - DNA, 19 bp, Mus musculus
  siRNA target sequence for Ptpn11 (NM_011202.2,117-135).
gacatcgcggagatggttt

SEQ ID NO: 539315 - DNA, 19 bp, Mus musculus
  siRNA target sequence for Ptpn11 (NM_011202.2,189-207).
cgatggcagttttttagca

SEQ ID NO: 539316 - DNA, 19 bp, Mus musculus
  siRNA target sequence for Ptpn11 (NM_011202.2,190-208).
gatggcagttttttagcaa

SEQ ID NO: 539317 - DNA, 19 bp, Mus musculus
  siRNA target sequence for Ptpn11 (NM_011202.2,232-250).
gacttcactctgtctgtta

SEQ ID NO: 539318 - DNA, 19 bp, Mus musculus
  siRNA target sequence for Ptpn11 (NM_011202.2,234-252).
cttcactctgtctgttaga

SEQ ID NO: 539319 - DNA, 19 bp, Mus musculus
  siRNA target sequence for Ptpn11 (NM_011202.2,285-303).
gaacactggggactactat

SEQ ID NO: 539320 - DNA, 19 bp, Mus musculus
  siRNA target sequence for Ptpn11 (NM_011202.2,336-354).
ggctgaactggttcagtat

SEQ ID NO: 539321 - DNA, 19 bp, Mus musculus
  siRNA target sequence for Ptpn11 (NM_011202.2,337-355).
gctgaactggttcagtatt

SEQ ID NO: 539322 - DNA, 19 bp, Mus musculus
  siRNA target sequence for Ptpn11 (NM_011202.2,338-356).
ctgaactggttcagtatta

SEQ ID NO: 539323 - DNA, 19 bp, Mus musculus
  siRNA target sequence for Ptpn11 (NM_011202.2,661-679).
gggggagagcgctttgact

SEQ ID NO: 539324 - DNA, 19 bp, Mus musculus
  siRNA target sequence for Ptpn11 (NM_011202.2,799-817).
cgggttcgagagttaagca

SEQ ID NO: 539325 - DNA, 19 bp, Mus musculus
  siRNA target sequence for Ptpn11 (NM_011202.2,800-818).
gggttcgagagttaagcaa

SEQ ID NO: 539326 - DNA, 19 bp, Mus musculus
  siRNA target sequence for Ptpn11 (NM_011202.2,879-897).
gcaacaggaatgcaaactt

SEQ ID NO: 539327 - DNA, 19 bp, Mus musculus
  siRNA target sequence for Ptpn11 (NM_011202.2,1013-1031).
ctgtttctgattacattaa

SEQ ID NO: 539328 - DNA, 19 bp, Mus musculus
  siRNA target sequence for Ptpn11 (NM_011202.2,1117-1135).
cagaacacggtgaatgact

SEQ ID NO: 539329 - DNA, 19 bp, Mus musculus
  siRNA target sequence for Ptpn11 (NM_011202.2,1155-1173).
ggagaactctcgagtcatt

SEQ ID NO: 539330 - DNA, 19 bp, Mus musculus
  siRNA target sequence for Ptpn11 (NM_011202.2,1234-1252).
gagtatgcgctcaaagaat

SEQ ID NO: 539331 - DNA, 19 bp, Mus musculus
  siRNA target sequence for Ptpn11 (NM_011202.2,1256-1274).
gggtcatgcgtgttaggaa

SEQ ID NO: 539332 - DNA, 19 bp, Mus musculus
  siRNA target sequence for Ptpn11 (NM_011202.2,1267-1285).
gttaggaacgtcaaagaaa

SEQ ID NO: 539333 - DNA, 19 bp, Mus musculus
  siRNA target sequence for Ptpn11 (NM_011202.2,1293-1311).
ccatgactacactttacga

SEQ ID NO: 539334 - DNA, 19 bp, Mus musculus
  siRNA target sequence for Ptpn11 (NM_011202.2,1304-1322).
ctttacgagagctcaaact

SEQ ID NO: 539335 - DNA, 19 bp, Mus musculus
  siRNA target sequence for Ptpn11 (NM_011202.2,1310-1328).
gagagctcaaactctctaa

SEQ ID NO: 539336 - DNA, 19 bp, Mus musculus
  siRNA target sequence for Ptpn11 (NM_011202.2,1529-1547).
ccttcattgtgattgacat

SEQ ID NO: 539337 - DNA, 19 bp, Mus musculus
  siRNA target sequence for Ptpn11 (NM_011202.2,1583-1601).
gtgacatcgacgttcctaa

SEQ ID NO: 539338 - DNA, 19 bp, Mus musculus
  siRNA target sequence for Ptpn11 (NM_011202.2,1585-1603).
gacatcgacgttcctaaaa

SEQ ID NO: 539339 - DNA, 19 bp, Mus musculus
  siRNA target sequence for Ptpn11 (NM_011202.2,1590-1608).
cgacgttcctaaaaccatt

SEQ ID NO: 539340 - DNA, 19 bp, Mus musculus
  siRNA target sequence for Ptpn11 (NM_011202.2,1651-1669).
gcacagtaccggtttatct

SEQ ID NO: 539341 - DNA, 19 bp, Mus musculus
  siRNA target sequence for Ptpn11 (NM_011202.2,1652-1670).
cacagtaccggtttatcta

SEQ ID NO: 539342 - DNA, 19 bp, Mus musculus
  siRNA target sequence for Ptpn11 (NM_011202.2,1747-1765).
gaatataccaatattaagt

SEQ ID NO: 539343 - DNA, 19 bp, Mus musculus
  siRNA target sequence for Ptpn11 (NM_011202.2,1823-1841).
cgccaccctgtgcagaaat

SEQ ID NO: 539344 - DNA, 19 bp, Mus musculus
  siRNA target sequence for Ptprc (NM_011210.1,268-286).
gctaccacaacgaagcaaa

SEQ ID NO: 539345 - DNA, 19 bp, Mus musculus
  siRNA target sequence for Ptprc (NM_011210.1,273-291).
cacaacgaagcaaacatgt

SEQ ID NO: 539346 - DNA, 19 bp, Mus musculus
  siRNA target sequence for Ptprc (NM_011210.1,295-313).
gccatgtttgggaacatta

SEQ ID NO: 539347 - DNA, 19 bp, Mus musculus
  siRNA target sequence for Ptprc (NM_011210.1,304-322).
gggaacattactgtgaatt

SEQ ID NO: 539348 - DNA, 19 bp, Mus musculus
  siRNA target sequence for Ptprc (NM_011210.1,305-323).
ggaacattactgtgaatta

SEQ ID NO: 539349 - DNA, 19 bp, Mus musculus
  siRNA target sequence for Ptprc (NM_011210.1,318-336).
gaattacacctatgaatct

SEQ ID NO: 539350 - DNA, 19 bp, Mus musculus
  siRNA target sequence for Ptprc (NM_011210.1,401-419).
gtgaaaacgtgttaaataa

SEQ ID NO: 539351 - DNA, 19 bp, Mus musculus
  siRNA target sequence for Ptprc (NM_011210.1,408-426).
cgtgttaaataatctagaa

SEQ ID NO: 539352 - DNA, 19 bp, Mus musculus
  siRNA target sequence for Ptprc (NM_011210.1,470-488).
gtgctccagctacaactat

SEQ ID NO: 539353 - DNA, 19 bp, Mus musculus
  siRNA target sequence for Ptprc (NM_011210.1,473-491).
ctccagctacaactataga

SEQ ID NO: 539354 - DNA, 19 bp, Mus musculus
  siRNA target sequence for Ptprc (NM_011210.1,475-493).
ccagctacaactatagatt

SEQ ID NO: 539355 - DNA, 19 bp, Mus musculus
  siRNA target sequence for Ptprc (NM_011210.1,476-494).
cagctacaactatagattt

SEQ ID NO: 539356 - DNA, 19 bp, Mus musculus
  siRNA target sequence for Ptprc (NM_011210.1,505-523).
ccagggactgacaagtttt

SEQ ID NO: 539357 - DNA, 19 bp, Mus musculus
  siRNA target sequence for Ptprc (NM_011210.1,547-565).
gaaaaggctaatacttcaa

SEQ ID NO: 539358 - DNA, 19 bp, Mus musculus
  siRNA target sequence for Ptprc (NM_011210.1,554-572).
ctaatacttcaatttgttt

SEQ ID NO: 539359 - DNA, 19 bp, Mus musculus
  siRNA target sequence for Ptprc (NM_011210.1,614-632).
gtgacaatatttcatatgt

SEQ ID NO: 539360 - DNA, 19 bp, Mus musculus
  siRNA target sequence for Ptprc (NM_011210.1,636-654).
ccactgtgagccagaaaat

SEQ ID NO: 539361 - DNA, 19 bp, Mus musculus
  siRNA target sequence for Ptprc (NM_011210.1,643-661).
gagccagaaaataatacaa

SEQ ID NO: 539362 - DNA, 19 bp, Mus musculus
  siRNA target sequence for Ptprc (NM_011210.1,715-733).
cgtgcccaaacaaattaca

SEQ ID NO: 539363 - DNA, 19 bp, Mus musculus
  siRNA target sequence for Ptprc (NM_011210.1,718-736).
gcccaaacaaattacacat

SEQ ID NO: 539364 - DNA, 19 bp, Mus musculus
  siRNA target sequence for Ptprc (NM_011210.1,734-752).
catgtgtagcagaaatctt

SEQ ID NO: 539365 - DNA, 19 bp, Mus musculus
  siRNA target sequence for Ptprc (NM_011210.1,737-755).
gtgtagcagaaatcttata

SEQ ID NO: 539366 - DNA, 19 bp, Mus musculus
  siRNA target sequence for Ptprc (NM_011210.1,750-768).
cttatatcgcggtgtaaaa

SEQ ID NO: 539367 - DNA, 19 bp, Mus musculus
  siRNA target sequence for Ptprc (NM_011210.1,760-778).
ggtgtaaaactcgtcaaaa

SEQ ID NO: 539368 - DNA, 19 bp, Mus musculus
  siRNA target sequence for Ptprc (NM_011210.1,761-779).
gtgtaaaactcgtcaaaaa

SEQ ID NO: 539369 - DNA, 19 bp, Mus musculus
  siRNA target sequence for Ptprc (NM_011210.1,771-789).
cgtcaaaaatgttataaat

SEQ ID NO: 539370 - DNA, 19 bp, Mus musculus
  siRNA target sequence for Ptprc (NM_011210.1,841-859).
ccagctgcaagaaaaacgt

SEQ ID NO: 539371 - DNA, 19 bp, Mus musculus
  siRNA target sequence for Ptprc (NM_011210.1,842-860).
cagctgcaagaaaaacgtt

SEQ ID NO: 539372 - DNA, 19 bp, Mus musculus
  siRNA target sequence for Ptprc (NM_011210.1,847-865).
gcaagaaaaacgttagtct

SEQ ID NO: 539373 - DNA, 19 bp, Mus musculus
  siRNA target sequence for Ptprc (NM_011210.1,869-887).
ggcctgagcctgtatctaa

SEQ ID NO: 539374 - DNA, 19 bp, Mus musculus
  siRNA target sequence for Ptprc (NM_011210.1,899-917).
catctaaaccccatggata

SEQ ID NO: 539375 - DNA, 19 bp, Mus musculus
  siRNA target sequence for Ptprc (NM_011210.1,902-920).
ctaaaccccatggatatgt

SEQ ID NO: 539376 - DNA, 19 bp, Mus musculus
  siRNA target sequence for Ptprc (NM_011210.1,907-925).
ccccatggatatgttttat

SEQ ID NO: 539377 - DNA, 19 bp, Mus musculus
  siRNA target sequence for Ptprc (NM_011210.1,913-931).
ggatatgttttatgctata

SEQ ID NO: 539378 - DNA, 19 bp, Mus musculus
  siRNA target sequence for Ptprc (NM_011210.1,914-932).
gatatgttttatgctataa

SEQ ID NO: 539379 - DNA, 19 bp, Mus musculus
  siRNA target sequence for Ptprc (NM_011210.1,926-944).
gctataagaacaattcaga

SEQ ID NO: 539380 - DNA, 19 bp, Mus musculus
  siRNA target sequence for Ptprc (NM_011210.1,987-1005).
ggaaagcttgaaaccttat

SEQ ID NO: 539381 - DNA, 19 bp, Mus musculus
  siRNA target sequence for Ptprc (NM_011210.1,988-1006).
gaaagcttgaaaccttata

SEQ ID NO: 539382 - DNA, 19 bp, Mus musculus
  siRNA target sequence for Ptprc (NM_011210.1,1036-1054).
gtcaatgggaagattcaaa

SEQ ID NO: 539383 - DNA, 19 bp, Mus musculus
  siRNA target sequence for Ptprc (NM_011210.1,1064-1082).
ctgctgagaagtgcaattt

SEQ ID NO: 539384 - DNA, 19 bp, Mus musculus
  siRNA target sequence for Ptprc (NM_011210.1,1102-1120).
ccggacaaggtcaatggaa

SEQ ID NO: 539385 - DNA, 19 bp, Mus musculus
  siRNA target sequence for Ptprc (NM_011210.1,1103-1121).
cggacaaggtcaatggaat

SEQ ID NO: 539386 - DNA, 19 bp, Mus musculus
  siRNA target sequence for Ptprc (NM_011210.1,1134-1152).
gccgacagacaatagtata

SEQ ID NO: 539387 - DNA, 19 bp, Mus musculus
  siRNA target sequence for Ptprc (NM_011210.1,1135-1153).
ccgacagacaatagtataa

SEQ ID NO: 539388 - DNA, 19 bp, Mus musculus
  siRNA target sequence for Ptprc (NM_011210.1,1136-1154).
cgacagacaatagtataaa

SEQ ID NO: 539389 - DNA, 19 bp, Mus musculus
  siRNA target sequence for Ptprc (NM_011210.1,1165-1183).
ggtcctccttatgaaacta

SEQ ID NO: 539390 - DNA, 19 bp, Mus musculus
  siRNA target sequence for Ptprc (NM_011210.1,1166-1184).
gtcctccttatgaaactaa

SEQ ID NO: 539391 - DNA, 19 bp, Mus musculus
  siRNA target sequence for Ptprc (NM_011210.1,1177-1195).
gaaactaatggccctaaaa

SEQ ID NO: 539392 - DNA, 19 bp, Mus musculus
  siRNA target sequence for Ptprc (NM_011210.1,1181-1199).
ctaatggccctaaaacctt

SEQ ID NO: 539393 - DNA, 19 bp, Mus musculus
  siRNA target sequence for Ptprc (NM_011210.1,1186-1204).
ggccctaaaaccttttaca

SEQ ID NO: 539394 - DNA, 19 bp, Mus musculus
  siRNA target sequence for Ptprc (NM_011210.1,1187-1205).
gccctaaaaccttttacat

SEQ ID NO: 539395 - DNA, 19 bp, Mus musculus
  siRNA target sequence for Ptprc (NM_011210.1,1215-1233).
cagaagtggaggttctttt

SEQ ID NO: 539396 - DNA, 19 bp, Mus musculus
  siRNA target sequence for Ptprc (NM_011210.1,1217-1235).
gaagtggaggttcttttgt

SEQ ID NO: 539397 - DNA, 19 bp, Mus musculus
  siRNA target sequence for Ptprc (NM_011210.1,1222-1240).
ggaggttcttttgttacaa

SEQ ID NO: 539398 - DNA, 19 bp, Mus musculus
  siRNA target sequence for Ptprc (NM_011210.1,1223-1241).
gaggttcttttgttacaaa

SEQ ID NO: 539399 - DNA, 19 bp, Mus musculus
  siRNA target sequence for Ptprc (NM_011210.1,1329-1347).
gtacgagggagattcagtt

SEQ ID NO: 539400 - DNA, 19 bp, Mus musculus
  siRNA target sequence for Ptprc (NM_011210.1,1332-1350).
cgagggagattcagttata

SEQ ID NO: 539401 - DNA, 19 bp, Mus musculus
  siRNA target sequence for Ptprc (NM_011210.1,1335-1353).
gggagattcagttataaga

SEQ ID NO: 539402 - DNA, 19 bp, Mus musculus
  siRNA target sequence for Ptprc (NM_011210.1,1359-1377).
gtcaacaaattttaatgct

SEQ ID NO: 539403 - DNA, 19 bp, Mus musculus
  siRNA target sequence for Ptprc (NM_011210.1,1421-1439).
caatagccttgcttgttgt

SEQ ID NO: 539404 - DNA, 19 bp, Mus musculus
  siRNA target sequence for Ptprc (NM_011210.1,1431-1449).
gcttgttgttttgtataaa

SEQ ID NO: 539405 - DNA, 19 bp, Mus musculus
  siRNA target sequence for Ptprc (NM_011210.1,1472-1490).
gatccagcaatttagatga

SEQ ID NO: 539406 - DNA, 19 bp, Mus musculus
  siRNA target sequence for Ptprc (NM_011210.1,1475-1493).
ccagcaatttagatgaaca

SEQ ID NO: 539407 - DNA, 19 bp, Mus musculus
  siRNA target sequence for Ptprc (NM_011210.1,1478-1496).
gcaatttagatgaacaaca

SEQ ID NO: 539408 - DNA, 19 bp, Mus musculus
  siRNA target sequence for Ptprc (NM_011210.1,1503-1521).
cgttgaaagggatgatgaa

SEQ ID NO: 539409 - DNA, 19 bp, Mus musculus
  siRNA target sequence for Ptprc (NM_011210.1,1534-1552).
gatgtggagccaatccatt

SEQ ID NO: 539410 - DNA, 19 bp, Mus musculus
  siRNA target sequence for Ptprc (NM_011210.1,1644-1662).
caagtttcccatcaaagat

SEQ ID NO: 539411 - DNA, 19 bp, Mus musculus
  siRNA target sequence for Ptprc (NM_011210.1,1664-1682).
cccgaaagccccacaatca

SEQ ID NO: 539412 - DNA, 19 bp, Mus musculus
  siRNA target sequence for Ptprc (NM_011210.1,1666-1684).
cgaaagccccacaatcaga

SEQ ID NO: 539413 - DNA, 19 bp, Mus musculus
  siRNA target sequence for Ptprc (NM_011210.1,1756-1774).
gcagggtccacctacataa

SEQ ID NO: 539414 - DNA, 19 bp, Mus musculus
  siRNA target sequence for Ptprc (NM_011210.1,1757-1775).
cagggtccacctacataaa

SEQ ID NO: 539415 - DNA, 19 bp, Mus musculus
  siRNA target sequence for Ptprc (NM_011210.1,1873-1891).
gagcaaaaggccacagtta

SEQ ID NO: 539416 - DNA, 19 bp, Mus musculus
  siRNA target sequence for Ptprc (NM_011210.1,1896-1914).
catggtcacacgatgtgaa

SEQ ID NO: 539417 - DNA, 19 bp, Mus musculus
  siRNA target sequence for Ptprc (NM_011210.1,1915-1933).
gaaggaaacaggaacaagt

SEQ ID NO: 539418 - DNA, 19 bp, Mus musculus
  siRNA target sequence for Ptprc (NM_011210.1,1925-1943).
ggaacaagtgcgcagaata

SEQ ID NO: 539419 - DNA, 19 bp, Mus musculus
  siRNA target sequence for Ptprc (NM_011210.1,1965-1983).
cactcgggctttcaaagat

SEQ ID NO: 539420 - DNA, 19 bp, Mus musculus
  siRNA target sequence for Ptprc (NM_011210.1,1967-1985).
ctcgggctttcaaagatat

SEQ ID NO: 539421 - DNA, 19 bp, Mus musculus
  siRNA target sequence for Ptprc (NM_011210.1,2011-2029).
cgatgtcctgattacatca

SEQ ID NO: 539422 - DNA, 19 bp, Mus musculus
  siRNA target sequence for Ptprc (NM_011210.1,2012-2030).
gatgtcctgattacatcat

SEQ ID NO: 539423 - DNA, 19 bp, Mus musculus
  siRNA target sequence for Ptprc (NM_011210.1,2015-2033).
gtcctgattacatcattca

SEQ ID NO: 539424 - DNA, 19 bp, Mus musculus
  siRNA target sequence for Ptprc (NM_011210.1,2037-2055).
gctgaacgttgcacataaa

SEQ ID NO: 539425 - DNA, 19 bp, Mus musculus
  siRNA target sequence for Ptprc (NM_011210.1,2038-2056).
ctgaacgttgcacataaaa

SEQ ID NO: 539426 - DNA, 19 bp, Mus musculus
  siRNA target sequence for Ptprc (NM_011210.1,2071-2089).
ggaagagaagtgactcata

SEQ ID NO: 539427 - DNA, 19 bp, Mus musculus
  siRNA target sequence for Ptprc (NM_011210.1,2077-2095).
gaagtgactcatatccaat

SEQ ID NO: 539428 - DNA, 19 bp, Mus musculus
  siRNA target sequence for Ptprc (NM_011210.1,2152-2170).
cgacggagagttaatgctt

SEQ ID NO: 539429 - DNA, 19 bp, Mus musculus
  siRNA target sequence for Ptprc (NM_011210.1,2167-2185).
gcttttagcaacttcttca

SEQ ID NO: 539430 - DNA, 19 bp, Mus musculus
  siRNA target sequence for Ptprc (NM_011210.1,2223-2241).
gcgtacaggtacctacatt

SEQ ID NO: 539431 - DNA, 19 bp, Mus musculus
  siRNA target sequence for Ptprc (NM_011210.1,2231-2249).
gtacctacattggaattga

SEQ ID NO: 539432 - DNA, 19 bp, Mus musculus
  siRNA target sequence for Ptprc (NM_011210.1,2296-2314).
ggttatgttgtcaagctaa

SEQ ID NO: 539433 - DNA, 19 bp, Mus musculus
  siRNA target sequence for Ptprc (NM_011210.1,2338-2356).
caagtggaggcacagtata

SEQ ID NO: 539434 - DNA, 19 bp, Mus musculus
  siRNA target sequence for Ptprc (NM_011210.1,2368-2386).
caggctttagtggaataca

SEQ ID NO: 539435 - DNA, 19 bp, Mus musculus
  siRNA target sequence for Ptprc (NM_011210.1,2372-2390).
ctttagtggaatacaatca

SEQ ID NO: 539436 - DNA, 19 bp, Mus musculus
  siRNA target sequence for Ptprc (NM_011210.1,2409-2427).
gaacttgtctgagttacat

SEQ ID NO: 539437 - DNA, 19 bp, Mus musculus
  siRNA target sequence for Ptprc (NM_011210.1,2412-2430).
cttgtctgagttacattca

SEQ ID NO: 539438 - DNA, 19 bp, Mus musculus
  siRNA target sequence for Ptprc (NM_011210.1,2429-2447).
catgcctacacaacatgaa

SEQ ID NO: 539439 - DNA, 19 bp, Mus musculus
  siRNA target sequence for Ptprc (NM_011210.1,2522-2540).
ggacacagcacattggaaa

SEQ ID NO: 539440 - DNA, 19 bp, Mus musculus
  siRNA target sequence for Ptprc (NM_011210.1,2598-2616).
cagagtgccacttaagcat

SEQ ID NO: 539441 - DNA, 19 bp, Mus musculus
  siRNA target sequence for Ptprc (NM_011210.1,2807-2825).
gaaaagtcaaagttattgt

SEQ ID NO: 539442 - DNA, 19 bp, Mus musculus
  siRNA target sequence for Ptprc (NM_011210.1,2829-2847).
gttgacagagttagtgaat

SEQ ID NO: 539443 - DNA, 19 bp, Mus musculus
  siRNA target sequence for Ptprc (NM_011210.1,2879-2897).
gcgaaggaaagcagactta

SEQ ID NO: 539444 - DNA, 19 bp, Mus musculus
  siRNA target sequence for Ptprc (NM_011210.1,2942-2960).
cctacactctccgaacttt

SEQ ID NO: 539445 - DNA, 19 bp, Mus musculus
  siRNA target sequence for Ptprc (NM_011210.1,2943-2961).
ctacactctccgaactttt

SEQ ID NO: 539446 - DNA, 19 bp, Mus musculus
  siRNA target sequence for Ptprc (NM_011210.1,3104-3122).
ccccagaagggatgaagta

SEQ ID NO: 539447 - DNA, 19 bp, Mus musculus
  siRNA target sequence for Ptprc (NM_011210.1,3107-3125).
cagaagggatgaagtatca

SEQ ID NO: 539448 - DNA, 19 bp, Mus musculus
  siRNA target sequence for Ptprc (NM_011210.1,3185-3203).
gtgccttgttcaatctctt

SEQ ID NO: 539449 - DNA, 19 bp, Mus musculus
  siRNA target sequence for Ptprc (NM_011210.1,3315-3333).
catcatcgccagcatctat

SEQ ID NO: 539450 - DNA, 19 bp, Mus musculus
  siRNA target sequence for Ptprc (NM_011210.1,3408-3426).
caagcaggatgctaactgt

SEQ ID NO: 539451 - DNA, 19 bp, Mus musculus
  siRNA target sequence for Ptprc (NM_011210.1,3433-3451).
ccagatggtcctctgaata

SEQ ID NO: 539452 - DNA, 19 bp, Mus musculus
  siRNA target sequence for Ptprc (NM_011210.1,3483-3501).
cccggagcctaccaatagt

SEQ ID NO: 539453 - DNA, 19 bp, Mus musculus
  siRNA target sequence for Pvrl1 (NM_021424.2,736-754).
cgctggcctgcattgtcaa

SEQ ID NO: 539454 - DNA, 19 bp, Mus musculus
  siRNA target sequence for Pvrl1 (NM_021424.2,740-758).
ggcctgcattgtcaactat

SEQ ID NO: 539455 - DNA, 19 bp, Mus musculus
  siRNA target sequence for Pvrl1 (NM_021424.2,742-760).
cctgcattgtcaactatca

SEQ ID NO: 539456 - DNA, 19 bp, Mus musculus
  siRNA target sequence for Pvrl1 (NM_021424.2,787-805).
cgctcaacgtgcagtatga

SEQ ID NO: 539457 - DNA, 19 bp, Mus musculus
  siRNA target sequence for Pvrl1 (NM_021424.2,788-806).
gctcaacgtgcagtatgaa

SEQ ID NO: 539458 - DNA, 19 bp, Mus musculus
  siRNA target sequence for Pvrl1 (NM_021424.2,871-889).
cgtgcaaagcggatgctaa

SEQ ID NO: 539459 - DNA, 19 bp, Mus musculus
  siRNA target sequence for Pvrl1 (NM_021424.2,1047-1065).
ggccaggtggaggtcaata

SEQ ID NO: 539460 - DNA, 19 bp, Mus musculus
  siRNA target sequence for Pvrl1 (NM_021424.2,1048-1066).
gccaggtggaggtcaatat

SEQ ID NO: 539461 - DNA, 19 bp, Mus musculus
  siRNA target sequence for Pvrl1 (NM_021424.2,1050-1068).
caggtggaggtcaatatca

SEQ ID NO: 539462 - DNA, 19 bp, Mus musculus
  siRNA target sequence for Pvrl1 (NM_021424.2,1052-1070).
ggtggaggtcaatatcaca

SEQ ID NO: 539463 - DNA, 19 bp, Mus musculus
  siRNA target sequence for Pvrl1 (NM_021424.2,1118-1136).
gatgcccacagccatcatt

SEQ ID NO: 539464 - DNA, 19 bp, Mus musculus
  siRNA target sequence for Pvrl1 (NM_021424.2,1399-1417).
gtggaggaggcgaacgtaa

SEQ ID NO: 539465 - DNA, 19 bp, Mus musculus
  siRNA target sequence for Pvrl1 (NM_021424.2,1452-1470).
gccaaacggccctacttca

SEQ ID NO: 539466 - DNA, 19 bp, Mus musculus
  siRNA target sequence for Pvrl1 (NM_021424.2,1578-1596).
gacgggtctttcatttcca

SEQ ID NO: 539467 - DNA, 19 bp, Mus musculus
  siRNA target sequence for Pvrl3 (NM_021495.1,353-371).
gccttagctggatcaatta

SEQ ID NO: 539468 - DNA, 19 bp, Mus musculus
  siRNA target sequence for Pvrl3 (NM_021495.1,355-373).
cttagctggatcaattatt

SEQ ID NO: 539469 - DNA, 19 bp, Mus musculus
  siRNA target sequence for Pvrl3 (NM_021495.1,399-417).
ggggaaagaatgtttcatt

SEQ ID NO: 539470 - DNA, 19 bp, Mus musculus
  siRNA target sequence for Pvrl3 (NM_021495.1,466-484).
gaagatacatggcaaaagt

SEQ ID NO: 539471 - DNA, 19 bp, Mus musculus
  siRNA target sequence for Pvrl3 (NM_021495.1,582-600).
caacaattactctgcataa

SEQ ID NO: 539472 - DNA, 19 bp, Mus musculus
  siRNA target sequence for Pvrl3 (NM_021495.1,678-696).
cagtgactgtgttagttga

SEQ ID NO: 539473 - DNA, 19 bp, Mus musculus
  siRNA target sequence for Pvrl3 (NM_021495.1,699-717).
ccacagtgagcctgataaa

SEQ ID NO: 539474 - DNA, 19 bp, Mus musculus
  siRNA target sequence for Pvrl3 (NM_021495.1,700-718).
cacagtgagcctgataaaa

SEQ ID NO: 539475 - DNA, 19 bp, Mus musculus
  siRNA target sequence for Pvrl3 (NM_021495.1,753-771).
cagtagcagccgtttgtgt

SEQ ID NO: 539476 - DNA, 19 bp, Mus musculus
  siRNA target sequence for Pvrl3 (NM_021495.1,788-806).
ccagtcgcacagattgact

SEQ ID NO: 539477 - DNA, 19 bp, Mus musculus
  siRNA target sequence for Pvrl3 (NM_021495.1,813-831).
gtgatcttggtgaaatgga

SEQ ID NO: 539478 - DNA, 19 bp, Mus musculus
  siRNA target sequence for Pvrl3 (NM_021495.1,821-839).
ggtgaaatggaatctagta

SEQ ID NO: 539479 - DNA, 19 bp, Mus musculus
  siRNA target sequence for Pvrl3 (NM_021495.1,829-847).
ggaatctagtacaacttct

SEQ ID NO: 539480 - DNA, 19 bp, Mus musculus
  siRNA target sequence for Pvrl3 (NM_021495.1,857-875).
gaaacagcaacgattgtca

SEQ ID NO: 539481 - DNA, 19 bp, Mus musculus
  siRNA target sequence for Pvrl3 (NM_021495.1,886-904).
gctgtttcccacaagattt

SEQ ID NO: 539482 - DNA, 19 bp, Mus musculus
  siRNA target sequence for Pvrl3 (NM_021495.1,889-907).
gtttcccacaagatttgct

SEQ ID NO: 539483 - DNA, 19 bp, Mus musculus
  siRNA target sequence for Pvrl3 (NM_021495.1,908-926).
cgaggaaggcgaattactt

SEQ ID NO: 539484 - DNA, 19 bp, Mus musculus
  siRNA target sequence for Pvrl3 (NM_021495.1,916-934).
gcgaattacttgtgttgta

SEQ ID NO: 539485 - DNA, 19 bp, Mus musculus
  siRNA target sequence for Pvrl3 (NM_021495.1,917-935).
cgaattacttgtgttgtaa

SEQ ID NO: 539486 - DNA, 19 bp, Mus musculus
  siRNA target sequence for Pvrl3 (NM_021495.1,918-936).
gaattacttgtgttgtaaa

SEQ ID NO: 539487 - DNA, 19 bp, Mus musculus
  siRNA target sequence for Pvrl3 (NM_021495.1,973-991).
catactagacatacagtat

SEQ ID NO: 539488 - DNA, 19 bp, Mus musculus
  siRNA target sequence for Pvrl3 (NM_021495.1,1030-1048).
gttcgtgggaagaaaaggt

SEQ ID NO: 539489 - DNA, 19 bp, Mus musculus
  siRNA target sequence for Pvrl3 (NM_021495.1,1046-1064).
ggtgttaacctcaagtgta

SEQ ID NO: 539490 - DNA, 19 bp, Mus musculus
  siRNA target sequence for Pvrl3 (NM_021495.1,1047-1065).
gtgttaacctcaagtgtaa

SEQ ID NO: 539491 - DNA, 19 bp, Mus musculus
  siRNA target sequence for Pvrl3 (NM_021495.1,1138-1156).
ggcgtcagataatactctt

SEQ ID NO: 539492 - DNA, 19 bp, Mus musculus
  siRNA target sequence for Pvrl3 (NM_021495.1,1166-1184).
catccattgactgtcaatt

SEQ ID NO: 539493 - DNA, 19 bp, Mus musculus
  siRNA target sequence for Pvrl3 (NM_021495.1,1180-1198).
caattattctggcgtttat

SEQ ID NO: 539494 - DNA, 19 bp, Mus musculus
  siRNA target sequence for Pvrl3 (NM_021495.1,1188-1206).
ctggcgtttatgtctgtaa

SEQ ID NO: 539495 - DNA, 19 bp, Mus musculus
  siRNA target sequence for Pvrl3 (NM_021495.1,1191-1209).
gcgtttatgtctgtaaagt

SEQ ID NO: 539496 - DNA, 19 bp, Mus musculus
  siRNA target sequence for Pvrl3 (NM_021495.1,1192-1210).
cgtttatgtctgtaaagta

SEQ ID NO: 539497 - DNA, 19 bp, Mus musculus
  siRNA target sequence for Pvrl3 (NM_021495.1,1230-1248).
gaagtgatcaaaaggttat

SEQ ID NO: 539498 - DNA, 19 bp, Mus musculus
  siRNA target sequence for Pvrl3 (NM_021495.1,1235-1253).
gatcaaaaggttatctaca

SEQ ID NO: 539499 - DNA, 19 bp, Mus musculus
  siRNA target sequence for Pvrl3 (NM_021495.1,1238-1256).
caaaaggttatctacattt

SEQ ID NO: 539500 - DNA, 19 bp, Mus musculus
  siRNA target sequence for Pvrl3 (NM_021495.1,1365-1383).
caactttggcaacacttaa

SEQ ID NO: 539501 - DNA, 19 bp, Mus musculus
  siRNA target sequence for Pvrl3 (NM_021495.1,1377-1395).
cacttaaggatgacacaat

SEQ ID NO: 539502 - DNA, 19 bp, Mus musculus
  siRNA target sequence for Pvrl3 (NM_021495.1,1420-1438).
gggtggggctctcttctta

SEQ ID NO: 539503 - DNA, 19 bp, Mus musculus
  siRNA target sequence for Pvrl3 (NM_021495.1,1441-1459).
gcttgtgagcattttagct

SEQ ID NO: 539504 - DNA, 19 bp, Mus musculus
  siRNA target sequence for Pvrl3 (NM_021495.1,1460-1478).
ggggtattctgctatagga

SEQ ID NO: 539505 - DNA, 19 bp, Mus musculus
  siRNA target sequence for Pvrl3 (NM_021495.1,1488-1506).
cgtttcgtggagactactt

SEQ ID NO: 539506 - DNA, 19 bp, Mus musculus
  siRNA target sequence for Pvrl3 (NM_021495.1,1584-1602).
cttacccagacagtgtaaa

SEQ ID NO: 539507 - DNA, 19 bp, Mus musculus
  siRNA target sequence for Pvrl3 (NM_021495.1,1668-1686).
ctcagtggaataatgtaga

SEQ ID NO: 539508 - DNA, 19 bp, Mus musculus
  siRNA target sequence for Pvrl3 (NM_021495.1,1687-1705).
gaacctcactaggtttgaa

SEQ ID NO: 539509 - DNA, 19 bp, Mus musculus
  siRNA target sequence for Pvrl3 (NM_021495.1,1690-1708).
cctcactaggtttgaaaga

SEQ ID NO: 539510 - DNA, 19 bp, Mus musculus
  siRNA target sequence for Pvrl3 (NM_021495.1,1707-1725).
gaccgatggattactatga

SEQ ID NO: 539511 - DNA, 19 bp, Mus musculus
  siRNA target sequence for Pvrl3 (NM_021495.1,1714-1732).
ggattactatgaagatcta

SEQ ID NO: 539512 - DNA, 19 bp, Mus musculus
  siRNA target sequence for Pvrl3 (NM_021495.1,1755-1773).
gtgatgaacgctacaatga

SEQ ID NO: 539513 - DNA, 19 bp, Mus musculus
  siRNA target sequence for Pvrl3 (NM_021495.1,1785-1803).
gtttggtttctcatgtaga

SEQ ID NO: 539514 - DNA, 19 bp, Mus musculus
  siRNA target sequence for Pvrl3 (NM_021495.1,1802-1820).
gatggctccgtaatttcca

SEQ ID NO: 539515 - DNA, 19 bp, Mus musculus
  siRNA target sequence for Pvrl3 (NM_021496.1,1187-1205).
gaccgtcctatcttgacaa

SEQ ID NO: 539516 - DNA, 19 bp, Mus musculus
  siRNA target sequence for Pvrl3 (NM_021496.1,1190-1208).
cgtcctatcttgacaaagt

SEQ ID NO: 539517 - DNA, 19 bp, Mus musculus
  siRNA target sequence for Pvrl3 (NM_021496.1,1233-1251).
gccaccccctgtatatgaa

SEQ ID NO: 539518 - DNA, 19 bp, Mus musculus
  siRNA target sequence for Pvrl3 (NM_021496.1,1235-1253).
caccccctgtatatgaaga

SEQ ID NO: 539519 - DNA, 19 bp, Mus musculus
  siRNA target sequence for Pvrl3 (NM_021496.1,1364-1382).
caattagcaggagatttga

SEQ ID NO: 539520 - DNA, 19 bp, Mus musculus
  siRNA target sequence for Pvrl3 (NM_021496.1,1389-1407).
ggatgagagcacaatgcaa

SEQ ID NO: 539521 - DNA, 19 bp, Mus musculus
  siRNA target sequence for Pvrl3 (NM_021496.1,1423-1441).
cgcatgtgccccctttata

SEQ ID NO: 539522 - DNA, 19 bp, Mus musculus
  siRNA target sequence for Pvrl3 (NM_021496.1,1463-1481).
gaagccctcgccaacatca

SEQ ID NO: 539523 - DNA, 19 bp, Mus musculus
  siRNA target sequence for Pvrl3 (NM_021496.1,1493-1511).
ccgagagactctacatcaa

SEQ ID NO: 539524 - DNA, 19 bp, Mus musculus
  siRNA target sequence for Pvrl3 (NM_021496.1,1506-1524).
catcaacccacgagaacat

SEQ ID NO: 539525 - DNA, 19 bp, Mus musculus
  siRNA target sequence for Pvrl3 (NM_021496.1,1509-1527).
caacccacgagaacattat

SEQ ID NO: 539526 - DNA, 19 bp, Mus musculus
  siRNA target sequence for Rab6ip1 (NM_021494.1,278-296).
gtcgcttcgccgactattt

SEQ ID NO: 539527 - DNA, 19 bp, Mus musculus
  siRNA target sequence for Rab6ip1 (NM_021494.1,281-299).
gcttcgccgactattttgt

SEQ ID NO: 539528 - DNA, 19 bp, Mus musculus
  siRNA target sequence for Rab6ip1 (NM_021494.1,337-355).
gacgagctgtcggcattat

SEQ ID NO: 539529 - DNA, 19 bp, Mus musculus
  siRNA target sequence for Rab6ip1 (NM_021494.1,347-365).
cggcattatgccagtacat

SEQ ID NO: 539530 - DNA, 19 bp, Mus musculus
  siRNA target sequence for Rab6ip1 (NM_021494.1,348-366).
ggcattatgccagtacatt

SEQ ID NO: 539531 - DNA, 19 bp, Mus musculus
  siRNA target sequence for Rab6ip1 (NM_021494.1,388-406).
ggtgccagccctttcattt

SEQ ID NO: 539532 - DNA, 19 bp, Mus musculus
  siRNA target sequence for Rab6ip1 (NM_021494.1,440-458).
cgccattgagacgaacatt

SEQ ID NO: 539533 - DNA, 19 bp, Mus musculus
  siRNA target sequence for Rab6ip1 (NM_021494.1,476-494).
cccgataccctgagaatgt

SEQ ID NO: 539534 - DNA, 19 bp, Mus musculus
  siRNA target sequence for Rab6ip1 (NM_021494.1,477-495).
ccgataccctgagaatgta

SEQ ID NO: 539535 - DNA, 19 bp, Mus musculus
  siRNA target sequence for Rab6ip1 (NM_021494.1,807-825).
gcgcttcaactcctatgat

SEQ ID NO: 539536 - DNA, 19 bp, Mus musculus
  siRNA target sequence for Rab6ip1 (NM_021494.1,808-826).
cgcttcaactcctatgata

SEQ ID NO: 539537 - DNA, 19 bp, Mus musculus
  siRNA target sequence for Rab6ip1 (NM_021494.1,809-827).
gcttcaactcctatgatat

SEQ ID NO: 539538 - DNA, 19 bp, Mus musculus
  siRNA target sequence for Rab6ip1 (NM_021494.1,810-828).
cttcaactcctatgatatt

SEQ ID NO: 539539 - DNA, 19 bp, Mus musculus
  siRNA target sequence for Rab6ip1 (NM_021494.1,830-848).
gcagggacacactctatgt

SEQ ID NO: 539540 - DNA, 19 bp, Mus musculus
  siRNA target sequence for Rab6ip1 (NM_021494.1,865-883).
ctcattacacccatgtctt

SEQ ID NO: 539541 - DNA, 19 bp, Mus musculus
  siRNA target sequence for Rab6ip1 (NM_021494.1,954-972).
gccccttgagagctacata

SEQ ID NO: 539542 - DNA, 19 bp, Mus musculus
  siRNA target sequence for Rab6ip1 (NM_021494.1,955-973).
ccccttgagagctacatat

SEQ ID NO: 539543 - DNA, 19 bp, Mus musculus
  siRNA target sequence for Rab6ip1 (NM_021494.1,956-974).
cccttgagagctacatata

SEQ ID NO: 539544 - DNA, 19 bp, Mus musculus
  siRNA target sequence for Rab6ip1 (NM_021494.1,969-987).
catatacaacgtactctat

SEQ ID NO: 539545 - DNA, 19 bp, Mus musculus
  siRNA target sequence for Rab6ip1 (NM_021494.1,1030-1048).
ggggtctatgggccaataa

SEQ ID NO: 539546 - DNA, 19 bp, Mus musculus
  siRNA target sequence for Rab6ip1 (NM_021494.1,1031-1049).
gggtctatgggccaataat

SEQ ID NO: 539547 - DNA, 19 bp, Mus musculus
  siRNA target sequence for Rab6ip1 (NM_021494.1,1033-1051).
gtctatgggccaataatct

SEQ ID NO: 539548 - DNA, 19 bp, Mus musculus
  siRNA target sequence for Rab6ip1 (NM_021494.1,1094-1112).
ccgtcaaagaggtctttga

SEQ ID NO: 539549 - DNA, 19 bp, Mus musculus
  siRNA target sequence for Rab6ip1 (NM_021494.1,1095-1113).
cgtcaaagaggtctttgaa

SEQ ID NO: 539550 - DNA, 19 bp, Mus musculus
  siRNA target sequence for Rab6ip1 (NM_021494.1,1151-1169).
gtgcccttctggagtttca

SEQ ID NO: 539551 - DNA, 19 bp, Mus musculus
  siRNA target sequence for Rab6ip1 (NM_021494.1,1245-1263).
ccagtggcagcatgtctat

SEQ ID NO: 539552 - DNA, 19 bp, Mus musculus
  siRNA target sequence for Rab6ip1 (NM_021494.1,1283-1301).
ctctcctgcatttcttaga

SEQ ID NO: 539553 - DNA, 19 bp, Mus musculus
  siRNA target sequence for Rab6ip1 (NM_021494.1,1424-1442).
cagaggacttgcctcaatt

SEQ ID NO: 539554 - DNA, 19 bp, Mus musculus
  siRNA target sequence for Rab6ip1 (NM_021494.1,1626-1644).
cctcaaggaaaatgaaact

SEQ ID NO: 539555 - DNA, 19 bp, Mus musculus
  siRNA target sequence for Rab6ip1 (NM_021494.1,1763-1781).
ggatttaccagctaaacat

SEQ ID NO: 539556 - DNA, 19 bp, Mus musculus
  siRNA target sequence for Rab6ip1 (NM_021494.1,1764-1782).
gatttaccagctaaacatt

SEQ ID NO: 539557 - DNA, 19 bp, Mus musculus
  siRNA target sequence for Rab6ip1 (NM_021494.1,1973-1991).
cccagatgtttgcatcttt

SEQ ID NO: 539558 - DNA, 19 bp, Mus musculus
  siRNA target sequence for Rab6ip1 (NM_021494.1,1975-1993).
cagatgtttgcatctttta

SEQ ID NO: 539559 - DNA, 19 bp, Mus musculus
  siRNA target sequence for Rab6ip1 (NM_021494.1,2001-2019).
caagatcatgtgtcatgat

SEQ ID NO: 539560 - DNA, 19 bp, Mus musculus
  siRNA target sequence for Rab6ip1 (NM_021494.1,2086-2104).
gttcgaacacctactctta

SEQ ID NO: 539561 - DNA, 19 bp, Mus musculus
  siRNA target sequence for Rab6ip1 (NM_021494.1,2095-2113).
cctactcttaggacatcta

SEQ ID NO: 539562 - DNA, 19 bp, Mus musculus
  siRNA target sequence for Rab6ip1 (NM_021494.1,2158-2176).
gaactacgtctggcaaaaa

SEQ ID NO: 539563 - DNA, 19 bp, Mus musculus
  siRNA target sequence for Rab6ip1 (NM_021494.1,2359-2377).
gaacacttgcgcttagaca

SEQ ID NO: 539564 - DNA, 19 bp, Mus musculus
  siRNA target sequence for Rab6ip1 (NM_021494.1,2575-2593).
catggggaggtgaacatca

SEQ ID NO: 539565 - DNA, 19 bp, Mus musculus
  siRNA target sequence for Rab6ip1 (NM_021494.1,2654-2672).
gccatgggctacaagtgaa

SEQ ID NO: 539566 - DNA, 19 bp, Mus musculus
  siRNA target sequence for Rab6ip1 (NM_021494.1,2687-2705).
ctttgtggtcccatctgtt

SEQ ID NO: 539567 - DNA, 19 bp, Mus musculus
  siRNA target sequence for Rab6ip1 (NM_021494.1,2691-2709).
gtggtcccatctgttacat

SEQ ID NO: 539568 - DNA, 19 bp, Mus musculus
  siRNA target sequence for Rab6ip1 (NM_021494.1,2715-2733).
ggaaaaccggcagagaaaa

SEQ ID NO: 539569 - DNA, 19 bp, Mus musculus
  siRNA target sequence for Rab6ip1 (NM_021494.1,2748-2766).
ccttagtacctcaggaata

SEQ ID NO: 539570 - DNA, 19 bp, Mus musculus
  siRNA target sequence for Rab6ip1 (NM_021494.1,2756-2774).
cctcaggaatacttcttga

SEQ ID NO: 539571 - DNA, 19 bp, Mus musculus
  siRNA target sequence for Rab6ip1 (NM_021494.1,2762-2780).
gaatacttcttgattcaga

SEQ ID NO: 539572 - DNA, 19 bp, Mus musculus
  siRNA target sequence for Rab6ip1 (NM_021494.1,2817-2835).
cctgaggatttccctaatt

SEQ ID NO: 539573 - DNA, 19 bp, Mus musculus
  siRNA target sequence for Rab6ip1 (NM_021494.1,3072-3090).
cttcaccaacgtctttaca

SEQ ID NO: 539574 - DNA, 19 bp, Mus musculus
  siRNA target sequence for Rab6ip1 (NM_021494.1,3157-3175).
gccaacccgtggatctgta

SEQ ID NO: 539575 - DNA, 19 bp, Mus musculus
  siRNA target sequence for Rab6ip1 (NM_021494.1,3159-3177).
caacccgtggatctgtata

SEQ ID NO: 539576 - DNA, 19 bp, Mus musculus
  siRNA target sequence for Rab6ip1 (NM_021494.1,3273-3291).
ccagattggccatgataat

SEQ ID NO: 539577 - DNA, 19 bp, Mus musculus
  siRNA target sequence for Rab6ip1 (NM_021494.1,3274-3292).
cagattggccatgataatt

SEQ ID NO: 539578 - DNA, 19 bp, Mus musculus
  siRNA target sequence for Rab6ip1 (NM_021494.1,3347-3365).
caggacacacctacaagtt

SEQ ID NO: 539579 - DNA, 19 bp, Mus musculus
  siRNA target sequence for Rab6ip1 (NM_021494.1,3519-3537).
gaccatctcgcccaacaat

SEQ ID NO: 539580 - DNA, 19 bp, Mus musculus
  siRNA target sequence for Rab6ip1 (NM_021494.1,3573-3591).
cattggggaggcagtcaat

SEQ ID NO: 539581 - DNA, 19 bp, Mus musculus
  siRNA target sequence for Rab6ip1 (NM_021494.1,3583-3601).
gcagtcaatggcattgtga

SEQ ID NO: 539582 - DNA, 19 bp, Mus musculus
  siRNA target sequence for Rab6ip1 (NM_021494.1,3600-3618).
gaagcacttccataaacct

SEQ ID NO: 539583 - DNA, 19 bp, Mus musculus
  siRNA target sequence for Rab6ip1 (NM_021494.1,3715-3733).
cggctcttcaaaaatgtct

SEQ ID NO: 539584 - DNA, 19 bp, Mus musculus
  siRNA target sequence for Rab6ip1 (NM_021494.1,3750-3768).
ggagaaagcacaaacctat

SEQ ID NO: 539585 - DNA, 19 bp, Mus musculus
  siRNA target sequence for Rab6ip1 (NM_021494.1,3757-3775).
gcacaaacctattatgaga

SEQ ID NO: 539586 - DNA, 19 bp, Mus musculus
  siRNA target sequence for Rab6ip1 (NM_021494.1,3965-3983).
ccatcactgcgcacatgta

SEQ ID NO: 539587 - DNA, 19 bp, Mus musculus
  siRNA target sequence for Rab6ip1 (NM_021494.1,3966-3984).
catcactgcgcacatgtat

SEQ ID NO: 539588 - DNA, 19 bp, Mus musculus
  siRNA target sequence for Rab6ip1 (NM_021494.1,4006-4024).
gaccacacactcgtcaatt

SEQ ID NO: 539589 - DNA, 19 bp, Mus musculus
  siRNA target sequence for Rab6ip1 (NM_021494.1,4081-4099).
ctcgttaagggcattgaca

SEQ ID NO: 539590 - DNA, 19 bp, Mus musculus
  siRNA target sequence for Rassf5 (NM_018750.1,457-475).
gcgctgcgctgcgctaatt

SEQ ID NO: 539591 - DNA, 19 bp, Mus musculus
  siRNA target sequence for Rassf5 (NM_018750.1,459-477).
gctgcgctgcgctaattgt

SEQ ID NO: 539592 - DNA, 19 bp, Mus musculus
  siRNA target sequence for Rassf5 (NM_018750.1,460-478).
ctgcgctgcgctaattgta

SEQ ID NO: 539593 - DNA, 19 bp, Mus musculus
  siRNA target sequence for Rassf5 (NM_018750.1,462-480).
gcgctgcgctaattgtaaa

SEQ ID NO: 539594 - DNA, 19 bp, Mus musculus
  siRNA target sequence for Rassf5 (NM_018750.1,463-481).
cgctgcgctaattgtaaat

SEQ ID NO: 539595 - DNA, 19 bp, Mus musculus
  siRNA target sequence for Rassf5 (NM_018750.1,464-482).
gctgcgctaattgtaaatt

SEQ ID NO: 539596 - DNA, 19 bp, Mus musculus
  siRNA target sequence for Rassf5 (NM_018750.1,632-650).
ccacgatacaggagatcaa

SEQ ID NO: 539597 - DNA, 19 bp, Mus musculus
  siRNA target sequence for Rassf5 (NM_018750.1,871-889).
gccatcaagcagctacata

SEQ ID NO: 539598 - DNA, 19 bp, Mus musculus
  siRNA target sequence for Rassf5 (NM_018750.1,872-890).
ccatcaagcagctacatat

SEQ ID NO: 539599 - DNA, 19 bp, Mus musculus
  siRNA target sequence for Rassf5 (NM_018750.1,896-914).
gcaccaccacggttagtga

SEQ ID NO: 539600 - DNA, 19 bp, Mus musculus
  siRNA target sequence for Rassf5 (NM_018750.1,959-977).
cacagaagtttgcactttt

SEQ ID NO: 539601 - DNA, 19 bp, Mus musculus
  siRNA target sequence for Rassf5 (NM_018750.1,973-991).
ctttttaagcggatacaca

SEQ ID NO: 539602 - DNA, 19 bp, Mus musculus
  siRNA target sequence for Rassf5 (NM_018750.1,1087-1105).
gtgctaaaggagaatgaaa

SEQ ID NO: 539603 - DNA, 19 bp, Mus musculus
  siRNA target sequence for Rassf5 (NM_018750.1,1089-1107).
gctaaaggagaatgaaact

SEQ ID NO: 539604 - DNA, 19 bp, Mus musculus
  siRNA target sequence for Rassf5 (NM_018750.1,1117-1135).
gagtgggatgccttttcca

SEQ ID NO: 539605 - DNA, 19 bp, Mus musculus
  siRNA target sequence for Rassf5 (NM_018750.1,1138-1156).
cctgaactccagaactttt

SEQ ID NO: 539606 - DNA, 19 bp, Mus musculus
  siRNA target sequence for Rassf5 (NM_018750.1,1201-1219).
caaaagaagtacaacaaat

SEQ ID NO: 539607 - DNA, 19 bp, Mus musculus
  siRNA target sequence for Rassf5 (NM_018750.1,1212-1230).
caacaaattccgtcagaaa

SEQ ID NO: 539608 - DNA, 19 bp, Mus musculus
  siRNA target sequence for Rbl1 (NM_011249.1,170-188).
ccgaagccctggatgactt

SEQ ID NO: 539609 - DNA, 19 bp, Mus musculus
  siRNA target sequence for Rbl1 (NM_011249.1,212-230).
gcctagagggagaagttat

SEQ ID NO: 539610 - DNA, 19 bp, Mus musculus
  siRNA target sequence for Rbl1 (NM_011249.1,213-231).
cctagagggagaagttata

SEQ ID NO: 539611 - DNA, 19 bp, Mus musculus
  siRNA target sequence for Rbl1 (NM_011249.1,217-235).
gagggagaagttatacact

SEQ ID NO: 539612 - DNA, 19 bp, Mus musculus
  siRNA target sequence for Rbl1 (NM_011249.1,240-258).
ggcatgctctttatatgtt

SEQ ID NO: 539613 - DNA, 19 bp, Mus musculus
  siRNA target sequence for Rbl1 (NM_011249.1,265-283).
cgcaagagcatcattccta

SEQ ID NO: 539614 - DNA, 19 bp, Mus musculus
  siRNA target sequence for Rbl1 (NM_011249.1,297-315).
cgtcatggaaggaaactgt

SEQ ID NO: 539615 - DNA, 19 bp, Mus musculus
  siRNA target sequence for Rbl1 (NM_011249.1,334-352).
ctgcgctcagctaagttaa

SEQ ID NO: 539616 - DNA, 19 bp, Mus musculus
  siRNA target sequence for Rbl1 (NM_011249.1,337-355).
cgctcagctaagttaagct

SEQ ID NO: 539617 - DNA, 19 bp, Mus musculus
  siRNA target sequence for Rbl1 (NM_011249.1,338-356).
gctcagctaagttaagctt

SEQ ID NO: 539618 - DNA, 19 bp, Mus musculus
  siRNA target sequence for Rbl1 (NM_011249.1,341-359).
cagctaagttaagcttaat

SEQ ID NO: 539619 - DNA, 19 bp, Mus musculus
  siRNA target sequence for Rbl1 (NM_011249.1,348-366).
gttaagcttaatacagttt

SEQ ID NO: 539620 - DNA, 19 bp, Mus musculus
  siRNA target sequence for Rbl1 (NM_011249.1,387-405).
gatggacatgtcaaaccta

SEQ ID NO: 539621 - DNA, 19 bp, Mus musculus
  siRNA target sequence for Rbl1 (NM_011249.1,424-442).
cggatagaaaggctagaaa

SEQ ID NO: 539622 - DNA, 19 bp, Mus musculus
  siRNA target sequence for Rbl1 (NM_011249.1,451-469).
gaagtatctactgtaattt

SEQ ID NO: 539623 - DNA, 19 bp, Mus musculus
  siRNA target sequence for Rbl1 (NM_011249.1,496-514).
gatatctttcaaaatccat

SEQ ID NO: 539624 - DNA, 19 bp, Mus musculus
  siRNA target sequence for Rbl1 (NM_011249.1,557-575).
ggatcccctgcagtgttaa

SEQ ID NO: 539625 - DNA, 19 bp, Mus musculus
  siRNA target sequence for Rbl1 (NM_011249.1,569-587).
gtgttaaggacctctttaa

SEQ ID NO: 539626 - DNA, 19 bp, Mus musculus
  siRNA target sequence for Rbl1 (NM_011249.1,571-589).
gttaaggacctctttaact

SEQ ID NO: 539627 - DNA, 19 bp, Mus musculus
  siRNA target sequence for Rbl1 (NM_011249.1,591-609).
ctgctggacactctttgtt

SEQ ID NO: 539628 - DNA, 19 bp, Mus musculus
  siRNA target sequence for Rbl1 (NM_011249.1,627-645).
ccgtatgattggtgatgat

SEQ ID NO: 539629 - DNA, 19 bp, Mus musculus
  siRNA target sequence for Rbl1 (NM_011249.1,628-646).
cgtatgattggtgatgatt

SEQ ID NO: 539630 - DNA, 19 bp, Mus musculus
  siRNA target sequence for Rbl1 (NM_011249.1,637-655).
ggtgatgatttagtaaact

SEQ ID NO: 539631 - DNA, 19 bp, Mus musculus
  siRNA target sequence for Rbl1 (NM_011249.1,674-692).
gctgcttggacctgatctt

SEQ ID NO: 539632 - DNA, 19 bp, Mus musculus
  siRNA target sequence for Rbl1 (NM_011249.1,713-731).
caaatagacgagacttgtt

SEQ ID NO: 539633 - DNA, 19 bp, Mus musculus
  siRNA target sequence for Rbl1 (NM_011249.1,721-739).
cgagacttgttaaatccat

SEQ ID NO: 539634 - DNA, 19 bp, Mus musculus
  siRNA target sequence for Rbl1 (NM_011249.1,765-783).
ccatgctccggacttcaaa

SEQ ID NO: 539635 - DNA, 19 bp, Mus musculus
  siRNA target sequence for Rbl1 (NM_011249.1,828-846).
gcatgacggacttctagta

SEQ ID NO: 539636 - DNA, 19 bp, Mus musculus
  siRNA target sequence for Rbl1 (NM_011249.1,868-886).
cattactttaagccatata

SEQ ID NO: 539637 - DNA, 19 bp, Mus musculus
  siRNA target sequence for Rbl1 (NM_011249.1,873-891).
ctttaagccatatatttca

SEQ ID NO: 539638 - DNA, 19 bp, Mus musculus
  siRNA target sequence for Rbl1 (NM_011249.1,922-940).
gaatgcctcttggatcttt

SEQ ID NO: 539639 - DNA, 19 bp, Mus musculus
  siRNA target sequence for Rbl1 (NM_011249.1,965-983).
ccgtgaacaaggaatatga

SEQ ID NO: 539640 - DNA, 19 bp, Mus musculus
  siRNA target sequence for Rbl1 (NM_011249.1,966-984).
cgtgaacaaggaatatgaa

SEQ ID NO: 539641 - DNA, 19 bp, Mus musculus
  siRNA target sequence for Rbl1 (NM_011249.1,1008-1026).
cttcgatgagaggatcttt

SEQ ID NO: 539642 - DNA, 19 bp, Mus musculus
  siRNA target sequence for Rbl1 (NM_011249.1,1054-1072).
ggaacacctcgaaagttca

SEQ ID NO: 539643 - DNA, 19 bp, Mus musculus
  siRNA target sequence for Rbl1 (NM_011249.1,1116-1134).
ggaatgcaaccttcaacaa

SEQ ID NO: 539644 - DNA, 19 bp, Mus musculus
  siRNA target sequence for Rbl1 (NM_011249.1,1121-1139).
gcaaccttcaacaacactt

SEQ ID NO: 539645 - DNA, 19 bp, Mus musculus
  siRNA target sequence for Rbl1 (NM_011249.1,1122-1140).
caaccttcaacaacacttt

SEQ ID NO: 539646 - DNA, 19 bp, Mus musculus
  siRNA target sequence for Rbl1 (NM_011249.1,1178-1196).
ctggacggcggtatttaca

SEQ ID NO: 539647 - DNA, 19 bp, Mus musculus
  siRNA target sequence for Rbl1 (NM_011249.1,1181-1199).
gacggcggtatttacaaga

SEQ ID NO: 539648 - DNA, 19 bp, Mus musculus
  siRNA target sequence for Rbl1 (NM_011249.1,1183-1201).
cggcggtatttacaagaaa

SEQ ID NO: 539649 - DNA, 19 bp, Mus musculus
  siRNA target sequence for Rbl1 (NM_011249.1,1222-1240).
gtagcttcagccactcaaa

SEQ ID NO: 539650 - DNA, 19 bp, Mus musculus
  siRNA target sequence for Rbl1 (NM_011249.1,1257-1275).
gagcatcgtcgctggatta

SEQ ID NO: 539651 - DNA, 19 bp, Mus musculus
  siRNA target sequence for Rbl1 (NM_011249.1,1259-1277).
gcatcgtcgctggattaaa

SEQ ID NO: 539652 - DNA, 19 bp, Mus musculus
  siRNA target sequence for Rbl1 (NM_011249.1,1260-1278).
catcgtcgctggattaaaa

SEQ ID NO: 539653 - DNA, 19 bp, Mus musculus
  siRNA target sequence for Rbl1 (NM_011249.1,1316-1334).
cttgtatgcggaatcctat

SEQ ID NO: 539654 - DNA, 19 bp, Mus musculus
  siRNA target sequence for Rbl1 (NM_011249.1,1360-1378).
ggaataggagagactttct

SEQ ID NO: 539655 - DNA, 19 bp, Mus musculus
  siRNA target sequence for Rbl1 (NM_011249.1,1371-1389).
gactttctgccaacactat

SEQ ID NO: 539656 - DNA, 19 bp, Mus musculus
  siRNA target sequence for Rbl1 (NM_011249.1,1411-1429).
ccaggatctcacatagact

SEQ ID NO: 539657 - DNA, 19 bp, Mus musculus
  siRNA target sequence for Rbl1 (NM_011249.1,1412-1430).
caggatctcacatagactt

SEQ ID NO: 539658 - DNA, 19 bp, Mus musculus
  siRNA target sequence for Rbl1 (NM_011249.1,1502-1520).
cacgacggcttcatggaat

SEQ ID NO: 539659 - DNA, 19 bp, Mus musculus
  siRNA target sequence for Rbl1 (NM_011249.1,1534-1552).
cttttagagcaagatatat

SEQ ID NO: 539660 - DNA, 19 bp, Mus musculus
  siRNA target sequence for Rbl1 (NM_011249.1,1540-1558).
gagcaagatatatttcata

SEQ ID NO: 539661 - DNA, 19 bp, Mus musculus
  siRNA target sequence for Rbl1 (NM_011249.1,1562-1580).
ccttgatggcttgttgttt

SEQ ID NO: 539662 - DNA, 19 bp, Mus musculus
  siRNA target sequence for Rbl1 (NM_011249.1,1566-1584).
gatggcttgttgtttggaa

SEQ ID NO: 539663 - DNA, 19 bp, Mus musculus
  siRNA target sequence for Rbl1 (NM_011249.1,1588-1606).
gtgctctttgcatatagct

SEQ ID NO: 539664 - DNA, 19 bp, Mus musculus
  siRNA target sequence for Rbl1 (NM_011249.1,1612-1630).
cgtactttcccgtggatta

SEQ ID NO: 539665 - DNA, 19 bp, Mus musculus
  siRNA target sequence for Rbl1 (NM_011249.1,1613-1631).
gtactttcccgtggattat

SEQ ID NO: 539666 - DNA, 19 bp, Mus musculus
  siRNA target sequence for Rbl1 (NM_011249.1,1616-1634).
ctttcccgtggattattga

SEQ ID NO: 539667 - DNA, 19 bp, Mus musculus
  siRNA target sequence for Rbl1 (NM_011249.1,1620-1638).
cccgtggattattgaagtt

SEQ ID NO: 539668 - DNA, 19 bp, Mus musculus
  siRNA target sequence for Rbl1 (NM_011249.1,1622-1640).
cgtggattattgaagttct

SEQ ID NO: 539669 - DNA, 19 bp, Mus musculus
  siRNA target sequence for Rbl1 (NM_011249.1,1639-1657).
ctcgatttgcagccatttt

SEQ ID NO: 539670 - DNA, 19 bp, Mus musculus
  siRNA target sequence for Rbl1 (NM_011249.1,1761-1779).
ggcttggactaataattct

SEQ ID NO: 539671 - DNA, 19 bp, Mus musculus
  siRNA target sequence for Rbl1 (NM_011249.1,1823-1841).
cctgtgaagaagttatatt

SEQ ID NO: 539672 - DNA, 19 bp, Mus musculus
  siRNA target sequence for Rbl1 (NM_011249.1,1831-1849).
gaagttatattccctaata

SEQ ID NO: 539673 - DNA, 19 bp, Mus musculus
  siRNA target sequence for Rbl1 (NM_011249.1,1834-1852).
gttatattccctaataact

SEQ ID NO: 539674 - DNA, 19 bp, Mus musculus
  siRNA target sequence for Rbl1 (NM_011249.1,1842-1860).
ccctaataactttgaaata

SEQ ID NO: 539675 - DNA, 19 bp, Mus musculus
  siRNA target sequence for Rbl1 (NM_011249.1,1890-1908).
ccccatgatgccaatgtct

SEQ ID NO: 539676 - DNA, 19 bp, Mus musculus
  siRNA target sequence for Rbl1 (NM_011249.1,1896-1914).
gatgccaatgtctccaata

SEQ ID NO: 539677 - DNA, 19 bp, Mus musculus
  siRNA target sequence for Rbl1 (NM_011249.1,1899-1917).
gccaatgtctccaataata

SEQ ID NO: 539678 - DNA, 19 bp, Mus musculus
  siRNA target sequence for Rbl1 (NM_011249.1,1952-1970).
ggagccttcgacaggatat

SEQ ID NO: 539679 - DNA, 19 bp, Mus musculus
  siRNA target sequence for Rbl1 (NM_011249.1,1956-1974).
ccttcgacaggatatgcaa

SEQ ID NO: 539680 - DNA, 19 bp, Mus musculus
  siRNA target sequence for Rbl1 (NM_011249.1,2092-2110).
gaaggaacaaagctgaaaa

SEQ ID NO: 539681 - DNA, 19 bp, Mus musculus
  siRNA target sequence for Rbl1 (NM_011249.1,2196-2214).
gacgacgggacggaaagtt

SEQ ID NO: 539682 - DNA, 19 bp, Mus musculus
  siRNA target sequence for Rbl1 (NM_011249.1,2199-2217).
gacgggacggaaagttaca

SEQ ID NO: 539683 - DNA, 19 bp, Mus musculus
  siRNA target sequence for Rbl1 (NM_011249.1,2201-2219).
cgggacggaaagttacagt

SEQ ID NO: 539684 - DNA, 19 bp, Mus musculus
  siRNA target sequence for Rbl1 (NM_011249.1,2262-2280).
ggttcctatctccatgaat

SEQ ID NO: 539685 - DNA, 19 bp, Mus musculus
  siRNA target sequence for Rbl1 (NM_011249.1,2266-2284).
cctatctccatgaatccaa

SEQ ID NO: 539686 - DNA, 19 bp, Mus musculus
  siRNA target sequence for Rbl1 (NM_011249.1,2319-2337).
gactgcccagtcactaatt

SEQ ID NO: 539687 - DNA, 19 bp, Mus musculus
  siRNA target sequence for Rbl1 (NM_011249.1,2323-2341).
gcccagtcactaattggta

SEQ ID NO: 539688 - DNA, 19 bp, Mus musculus
  siRNA target sequence for Rbl1 (NM_011249.1,2328-2346).
gtcactaattggtacttct

SEQ ID NO: 539689 - DNA, 19 bp, Mus musculus
  siRNA target sequence for Rbl1 (NM_011249.1,2417-2435).
ggtccttagcactgttcta

SEQ ID NO: 539690 - DNA, 19 bp, Mus musculus
  siRNA target sequence for Rbl1 (NM_011249.1,2433-2451).
ctataggaaggtctatcat

SEQ ID NO: 539691 - DNA, 19 bp, Mus musculus
  siRNA target sequence for Rbl1 (NM_011249.1,2461-2479).
gtgcgcctacgtgacttat

SEQ ID NO: 539692 - DNA, 19 bp, Mus musculus
  siRNA target sequence for Rbl1 (NM_011249.1,2463-2481).
gcgcctacgtgacttatgt

SEQ ID NO: 539693 - DNA, 19 bp, Mus musculus
  siRNA target sequence for Rbl1 (NM_011249.1,2465-2483).
gcctacgtgacttatgtct

SEQ ID NO: 539694 - DNA, 19 bp, Mus musculus
  siRNA target sequence for Rbl1 (NM_011249.1,2466-2484).
cctacgtgacttatgtcta

SEQ ID NO: 539695 - DNA, 19 bp, Mus musculus
  siRNA target sequence for Rbl1 (NM_011249.1,2467-2485).
ctacgtgacttatgtctaa

SEQ ID NO: 539696 - DNA, 19 bp, Mus musculus
  siRNA target sequence for Rbl1 (NM_011249.1,2514-2532).
gaagatctggacatgtttt

SEQ ID NO: 539697 - DNA, 19 bp, Mus musculus
  siRNA target sequence for Rbl1 (NM_011249.1,2552-2570).
gccctgatttaatgaaaga

SEQ ID NO: 539698 - DNA, 19 bp, Mus musculus
  siRNA target sequence for Rbl1 (NM_011249.1,2553-2571).
ccctgatttaatgaaagat

SEQ ID NO: 539699 - DNA, 19 bp, Mus musculus
  siRNA target sequence for Rbl1 (NM_011249.1,2554-2572).
cctgatttaatgaaagata

SEQ ID NO: 539700 - DNA, 19 bp, Mus musculus
  siRNA target sequence for Rbl1 (NM_011249.1,2667-2685).
gaatcagccccaagctaat

SEQ ID NO: 539701 - DNA, 19 bp, Mus musculus
  siRNA target sequence for Rbl1 (NM_011249.1,2680-2698).
gctaatagtcacgtataca

SEQ ID NO: 539702 - DNA, 19 bp, Mus musculus
  siRNA target sequence for Rbl1 (NM_011249.1,2760-2778).
gaccgatggtgacatagaa

SEQ ID NO: 539703 - DNA, 19 bp, Mus musculus
  siRNA target sequence for Rbl1 (NM_011249.1,2762-2780).
ccgatggtgacatagaaga

SEQ ID NO: 539704 - DNA, 19 bp, Mus musculus
  siRNA target sequence for Rbl1 (NM_011249.1,2828-2846).
gaggtgatcttatcaaatt

SEQ ID NO: 539705 - DNA, 19 bp, Mus musculus
  siRNA target sequence for Rbl1 (NM_011249.1,2830-2848).
ggtgatcttatcaaatttt

SEQ ID NO: 539706 - DNA, 19 bp, Mus musculus
  siRNA target sequence for Rbl1 (NM_011249.1,2833-2851).
gatcttatcaaattttaca

SEQ ID NO: 539707 - DNA, 19 bp, Mus musculus
  siRNA target sequence for Rbl1 (NM_011249.1,2889-2907).
gaagtatgatttatccaat

SEQ ID NO: 539708 - DNA, 19 bp, Mus musculus
  siRNA target sequence for Rbl1 (NM_011249.1,2992-3010).
cagcattccctctatgtgt

SEQ ID NO: 539709 - DNA, 19 bp, Mus musculus
  siRNA target sequence for Rbl1 (NM_011249.1,3047-3065).
gcgcactgctgtacaagtt

SEQ ID NO: 539710 - DNA, 19 bp, Mus musculus
  siRNA target sequence for Rbl1 (NM_011249.1,3050-3068).
cactgctgtacaagttcaa

SEQ ID NO: 539711 - DNA, 19 bp, Mus musculus
  siRNA target sequence for Rbl1 (NM_011249.1,3069-3087).
cggcagcccttctaagagt

SEQ ID NO: 539712 - DNA, 19 bp, Mus musculus
  siRNA target sequence for Rbl1 (NM_011249.1,3071-3089).
gcagcccttctaagagttt

SEQ ID NO: 539713 - DNA, 19 bp, Mus musculus
  siRNA target sequence for Rbl1 (NM_011249.1,3115-3133).
caaggcgagcagaaaacca

SEQ ID NO: 539714 - DNA, 19 bp, Mus musculus
  siRNA target sequence for Rbl1 (NM_011249.1,3188-3206).
gccaagagaacgatgatgt

SEQ ID NO: 539715 - DNA, 19 bp, Mus musculus
  siRNA target sequence for Rbl1 (NM_011249.1,3195-3213).
gaacgatgatgttttactt

SEQ ID NO: 539716 - DNA, 19 bp, Mus musculus
  siRNA target sequence for Rbl1 (NM_011249.1,3234-3252).
cagtgagagagcaaatcat

SEQ ID NO: 539717 - DNA, 19 bp, Mus musculus
  siRNA target sequence for Rfpl4 (NM_138954.1,376-394).
cttgactcactagagaaaa

SEQ ID NO: 539718 - DNA, 19 bp, Mus musculus
  siRNA target sequence for Rfpl4 (NM_138954.1,429-447).
ctctgttgtctctttgaaa

SEQ ID NO: 539719 - DNA, 19 bp, Mus musculus
  siRNA target sequence for Rfpl4 (NM_138954.1,530-548).
caatggaccaaggtatgaa

SEQ ID NO: 539720 - DNA, 19 bp, Mus musculus
  siRNA target sequence for Rfpl4 (NM_138954.1,535-553).
gaccaaggtatgaagatat

SEQ ID NO: 539721 - DNA, 19 bp, Mus musculus
  siRNA target sequence for Rfpl4 (NM_138954.1,616-634).
ctgctgagtgtctactata

SEQ ID NO: 539722 - DNA, 19 bp, Mus musculus
  siRNA target sequence for Rfpl4 (NM_138954.1,645-663).
gcaagcccgaaagaaatgt

SEQ ID NO: 539723 - DNA, 19 bp, Mus musculus
  siRNA target sequence for Rfpl4 (NM_138954.1,697-715).
ggctcttcccggttcactt

SEQ ID NO: 539724 - DNA, 19 bp, Mus musculus
  siRNA target sequence for Rfpl4 (NM_138954.1,742-760).
gtgggaaccagcaaagaat

SEQ ID NO: 539725 - DNA, 19 bp, Mus musculus
  siRNA target sequence for Rfpl4 (NM_138954.1,750-768).
cagcaaagaatgggatata

SEQ ID NO: 539726 - DNA, 19 bp, Mus musculus
  siRNA target sequence for Rfpl4 (NM_138954.1,777-795).
caaagagtccattaatcga

SEQ ID NO: 539727 - DNA, 19 bp, Mus musculus
  siRNA target sequence for Rfpl4 (NM_138954.1,781-799).
gagtccattaatcgaaaaa

SEQ ID NO: 539728 - DNA, 19 bp, Mus musculus
  siRNA target sequence for Rfpl4 (NM_138954.1,849-867).
ggcaaaaaaggtctattct

SEQ ID NO: 539729 - DNA, 19 bp, Mus musculus
  siRNA target sequence for Rfpl4 (NM_138954.1,971-989).
gcgatggctcccatatcta

SEQ ID NO: 539730 - DNA, 19 bp, Mus musculus
  siRNA target sequence for Rfpl4 (NM_138954.1,977-995).
gctcccatatctatacatt

SEQ ID NO: 539731 - DNA, 19 bp, Mus musculus
  siRNA target sequence for Rfpl4 (NM_138954.1,1050-1068).
ctatccagatggtgatcaa

SEQ ID NO: 539732 - DNA, 19 bp, Mus musculus
  siRNA target sequence for Rgs19 (NM_026446.2,359-377).
caagccctaaggaagtaca

SEQ ID NO: 539733 - DNA, 19 bp, Mus musculus
  siRNA target sequence for Rgs19 (NM_026446.2,440-458).
cattcctgcgcacagaata

SEQ ID NO: 539734 - DNA, 19 bp, Mus musculus
  siRNA target sequence for Rgs19 (NM_026446.2,486-504).
ggcttgtgaggagttgaaa

SEQ ID NO: 539735 - DNA, 19 bp, Mus musculus
  siRNA target sequence for Rgs19 (NM_026446.2,534-552).
gaaggcgcgacttatctat

SEQ ID NO: 539736 - DNA, 19 bp, Mus musculus
  siRNA target sequence for Rgs19 (NM_026446.2,636-654).
gccatcgccacacacattt

SEQ ID NO: 539737 - DNA, 19 bp, Mus musculus
  siRNA target sequence for Rgs19 (NM_026446.2,638-656).
catcgccacacacatttga

SEQ ID NO: 539738 - DNA, 19 bp, Mus musculus
  siRNA target sequence for Rgs19 (NM_026446.2,721-739).
cccacctaccgctctctat

SEQ ID NO: 539739 - DNA, 19 bp, Mus musculus
  siRNA target sequence for Rgs19 (NM_026446.2,722-740).
ccacctaccgctctctatt

SEQ ID NO: 539740 - DNA, 19 bp, Mus musculus
  siRNA target sequence for Rgs19 (NM_026446.2,723-741).
cacctaccgctctctatta

SEQ ID NO: 539741 - DNA, 19 bp, Mus musculus
  siRNA target sequence for Rgs19ip1 (NM_018771.3,260-278).
cctcgcctcgtgttccata

SEQ ID NO: 539742 - DNA, 19 bp, Mus musculus
  siRNA target sequence for Rgs19ip1 (NM_018771.3,308-326).
cgcatcgagggcttcacta

SEQ ID NO: 539743 - DNA, 19 bp, Mus musculus
  siRNA target sequence for Rgs19ip1 (NM_018771.3,610-628).
cagcgtgggggacatgatt

SEQ ID NO: 539744 - DNA, 19 bp, Mus musculus
  siRNA target sequence for Rgs19ip1 (NM_018771.3,612-630).
gcgtgggggacatgattga

SEQ ID NO: 539745 - DNA, 19 bp, Mus musculus
  siRNA target sequence for Rgs19ip1 (NM_018771.3,613-631).
cgtgggggacatgattgaa

SEQ ID NO: 539746 - DNA, 19 bp, Mus musculus
  siRNA target sequence for Rgs19ip1 (NM_018771.3,735-753).
ctcgaaaggcctttgatat

SEQ ID NO: 539747 - DNA, 19 bp, Mus musculus
  siRNA target sequence for Rgs19ip1 (NM_018771.3,1024-1042).
cttcgcattcccagatgaa

SEQ ID NO: 539748 - DNA, 19 bp, Mus musculus
  siRNA target sequence for Rgs19ip1 (NM_018771.3,1027-1045).
cgcattcccagatgaattt

SEQ ID NO: 539749 - DNA, 19 bp, Mus musculus
  siRNA target sequence for Rgs19ip1 (NM_018771.3,1029-1047).
cattcccagatgaatttgt

SEQ ID NO: 539750 - DNA, 19 bp, Mus musculus
  siRNA target sequence for Rhobtb3 (NM_028493.1,513-531).
ccgtctgggacatttttga

SEQ ID NO: 539751 - DNA, 19 bp, Mus musculus
  siRNA target sequence for Rhobtb3 (NM_028493.1,541-559).
gtacacctcccgaaaccta

SEQ ID NO: 539752 - DNA, 19 bp, Mus musculus
  siRNA target sequence for Rhobtb3 (NM_028493.1,544-562).
cacctcccgaaacctaatt

SEQ ID NO: 539753 - DNA, 19 bp, Mus musculus
  siRNA target sequence for Rhobtb3 (NM_028493.1,564-582).
ggggtgccgacatcattgt

SEQ ID NO: 539754 - DNA, 19 bp, Mus musculus
  siRNA target sequence for Rhobtb3 (NM_028493.1,566-584).
ggtgccgacatcattgtga

SEQ ID NO: 539755 - DNA, 19 bp, Mus musculus
  siRNA target sequence for Rhobtb3 (NM_028493.1,567-585).
gtgccgacatcattgtgat

SEQ ID NO: 539756 - DNA, 19 bp, Mus musculus
  siRNA target sequence for Rhobtb3 (NM_028493.1,612-630).
cattccatgaagtaaagga

SEQ ID NO: 539757 - DNA, 19 bp, Mus musculus
  siRNA target sequence for Rhobtb3 (NM_028493.1,664-682).
ctcagttccggtaatcatt

SEQ ID NO: 539758 - DNA, 19 bp, Mus musculus
  siRNA target sequence for Rhobtb3 (NM_028493.1,707-725).
gaagaattaccttgtacat

SEQ ID NO: 539759 - DNA, 19 bp, Mus musculus
  siRNA target sequence for Rhobtb3 (NM_028493.1,743-761).
gaccgagggagctgtgtta

SEQ ID NO: 539760 - DNA, 19 bp, Mus musculus
  siRNA target sequence for Rhobtb3 (NM_028493.1,775-793).
gatccaacttgccaaagaa

SEQ ID NO: 539761 - DNA, 19 bp, Mus musculus
  siRNA target sequence for Rhobtb3 (NM_028493.1,822-840).
gccttgatgatttctacat

SEQ ID NO: 539762 - DNA, 19 bp, Mus musculus
  siRNA target sequence for Rhobtb3 (NM_028493.1,823-841).
ccttgatgatttctacatt

SEQ ID NO: 539763 - DNA, 19 bp, Mus musculus
  siRNA target sequence for Rhobtb3 (NM_028493.1,827-845).
gatgatttctacattggaa

SEQ ID NO: 539764 - DNA, 19 bp, Mus musculus
  siRNA target sequence for Rhobtb3 (NM_028493.1,854-872).
ggaggagtgctggagtatt

SEQ ID NO: 539765 - DNA, 19 bp, Mus musculus
  siRNA target sequence for Rhobtb3 (NM_028493.1,855-873).
gaggagtgctggagtattt

SEQ ID NO: 539766 - DNA, 19 bp, Mus musculus
  siRNA target sequence for Rhobtb3 (NM_028493.1,857-875).
ggagtgctggagtatttta

SEQ ID NO: 539767 - DNA, 19 bp, Mus musculus
  siRNA target sequence for Rhobtb3 (NM_028493.1,865-883).
ggagtattttatgattcaa

SEQ ID NO: 539768 - DNA, 19 bp, Mus musculus
  siRNA target sequence for Rhobtb3 (NM_028493.1,996-1014).
ctgaggcatcacactatca

SEQ ID NO: 539769 - DNA, 19 bp, Mus musculus
  siRNA target sequence for Rhobtb3 (NM_028493.1,998-1016).
gaggcatcacactatcact

SEQ ID NO: 539770 - DNA, 19 bp, Mus musculus
  siRNA target sequence for Rhobtb3 (NM_028493.1,1009-1027).
ctatcactccgacttgaat

SEQ ID NO: 539771 - DNA, 19 bp, Mus musculus
  siRNA target sequence for Rhobtb3 (NM_028493.1,1013-1031).
cactccgacttgaataact

SEQ ID NO: 539772 - DNA, 19 bp, Mus musculus
  siRNA target sequence for Rhobtb3 (NM_028493.1,1116-1134).
gctctgtaagccatgtttt

SEQ ID NO: 539773 - DNA, 19 bp, Mus musculus
  siRNA target sequence for Rhobtb3 (NM_028493.1,1268-1286).
ccattgcctgttattgtta

SEQ ID NO: 539774 - DNA, 19 bp, Mus musculus
  siRNA target sequence for Rhobtb3 (NM_028493.1,1297-1315).
cttctgctcctgtttatca

SEQ ID NO: 539775 - DNA, 19 bp, Mus musculus
  siRNA target sequence for Rhobtb3 (NM_028493.1,1316-1334).
gacattctgcgcttcattt

SEQ ID NO: 539776 - DNA, 19 bp, Mus musculus
  siRNA target sequence for Rhobtb3 (NM_028493.1,1318-1336).
cattctgcgcttcatttat

SEQ ID NO: 539777 - DNA, 19 bp, Mus musculus
  siRNA target sequence for Rhobtb3 (NM_028493.1,1395-1413).
ccggggatgtttctgatat

SEQ ID NO: 539778 - DNA, 19 bp, Mus musculus
  siRNA target sequence for Rhobtb3 (NM_028493.1,1396-1414).
cggggatgtttctgatata

SEQ ID NO: 539779 - DNA, 19 bp, Mus musculus
  siRNA target sequence for Rhobtb3 (NM_028493.1,1398-1416).
gggatgtttctgatataat

SEQ ID NO: 539780 - DNA, 19 bp, Mus musculus
  siRNA target sequence for Rhobtb3 (NM_028493.1,1495-1513).
gcctctgtggttttataat

SEQ ID NO: 539781 - DNA, 19 bp, Mus musculus
  siRNA target sequence for Rhobtb3 (NM_028493.1,1499-1517).
ctgtggttttataatacgt

SEQ ID NO: 539782 - DNA, 19 bp, Mus musculus
  siRNA target sequence for Rhobtb3 (NM_028493.1,1516-1534).
gtctctcaagtttttcctt

SEQ ID NO: 539783 - DNA, 19 bp, Mus musculus
  siRNA target sequence for Rhobtb3 (NM_028493.1,1542-1560).
cgatgcttgccgatgttgt

SEQ ID NO: 539784 - DNA, 19 bp, Mus musculus
  siRNA target sequence for Rhobtb3 (NM_028493.1,1550-1568).
gccgatgttgtctttgaaa

SEQ ID NO: 539785 - DNA, 19 bp, Mus musculus
  siRNA target sequence for Rhobtb3 (NM_028493.1,1551-1569).
ccgatgttgtctttgaaat

SEQ ID NO: 539786 - DNA, 19 bp, Mus musculus
  siRNA target sequence for Rhobtb3 (NM_028493.1,1603-1621).
cttggtggcacgatgtgaa

SEQ ID NO: 539787 - DNA, 19 bp, Mus musculus
  siRNA target sequence for Rhobtb3 (NM_028493.1,1624-1642).
gatggctgccatgtttaat

SEQ ID NO: 539788 - DNA, 19 bp, Mus musculus
  siRNA target sequence for Rhobtb3 (NM_028493.1,1629-1647).
ctgccatgtttaatggtaa

SEQ ID NO: 539789 - DNA, 19 bp, Mus musculus
  siRNA target sequence for Rhobtb3 (NM_028493.1,1631-1649).
gccatgtttaatggtaatt

SEQ ID NO: 539790 - DNA, 19 bp, Mus musculus
  siRNA target sequence for Rhobtb3 (NM_028493.1,1633-1651).
catgtttaatggtaattat

SEQ ID NO: 539791 - DNA, 19 bp, Mus musculus
  siRNA target sequence for Rhobtb3 (NM_028493.1,1665-1683).
gtgtactgattccagttta

SEQ ID NO: 539792 - DNA, 19 bp, Mus musculus
  siRNA target sequence for Rhobtb3 (NM_028493.1,1677-1695).
cagtttatggcgtttccaa

SEQ ID NO: 539793 - DNA, 19 bp, Mus musculus
  siRNA target sequence for Rhobtb3 (NM_028493.1,1875-1893).
ccatgaacctcgacattgt

SEQ ID NO: 539794 - DNA, 19 bp, Mus musculus
  siRNA target sequence for Rhobtb3 (NM_028493.1,1876-1894).
catgaacctcgacattgta

SEQ ID NO: 539795 - DNA, 19 bp, Mus musculus
  siRNA target sequence for Rhobtb3 (NM_028493.1,1952-1970).
catttcatcgccactaact

SEQ ID NO: 539796 - DNA, 19 bp, Mus musculus
  siRNA target sequence for Rhobtb3 (NM_028493.1,1961-1979).
gccactaactacctcatat

SEQ ID NO: 539797 - DNA, 19 bp, Mus musculus
  siRNA target sequence for Rhobtb3 (NM_028493.1,1962-1980).
ccactaactacctcatatt

SEQ ID NO: 539798 - DNA, 19 bp, Mus musculus
  siRNA target sequence for Rhobtb3 (NM_028493.1,1981-1999).
cagccaaaagcctgaattt

SEQ ID NO: 539799 - DNA, 19 bp, Mus musculus
  siRNA target sequence for Rhobtb3 (NM_028493.1,2014-2032).
ggaagaacgaagttttgtt

SEQ ID NO: 539800 - DNA, 19 bp, Mus musculus
  siRNA target sequence for Rhobtb3 (NM_028493.1,2018-2036).
gaacgaagttttgttgaaa

SEQ ID NO: 539801 - DNA, 19 bp, Mus musculus
  siRNA target sequence for Rhobtb3 (NM_028493.1,2043-2061).
gatggccatcaaacatgta

SEQ ID NO: 539802 - DNA, 19 bp, Mus musculus
  siRNA target sequence for Rhobtb3 (NM_028493.1,2101-2119).
ccggaaatgtcgctgttta

SEQ ID NO: 539803 - DNA, 19 bp, Mus musculus
  siRNA target sequence for Rhobtb3 (NM_028493.1,2103-2121).
ggaaatgtcgctgtttagt

SEQ ID NO: 539804 - DNA, 19 bp, Mus musculus
  siRNA target sequence for Rims2 (NM_053271.1,264-282).
ctgaactggtaaataacgt

SEQ ID NO: 539805 - DNA, 19 bp, Mus musculus
  siRNA target sequence for Rims2 (NM_053271.1,428-446).
ggcatctgccacaagacaa

SEQ ID NO: 539806 - DNA, 19 bp, Mus musculus
  siRNA target sequence for Rims2 (NM_053271.1,527-545).
cgctcaaacaaggttatgt

SEQ ID NO: 539807 - DNA, 19 bp, Mus musculus
  siRNA target sequence for Rims2 (NM_053271.1,538-556).
ggttatgtgggtgtgtaat

SEQ ID NO: 539808 - DNA, 19 bp, Mus musculus
  siRNA target sequence for Rims2 (NM_053271.1,561-579).
gccgaaaacaacaagaaat

SEQ ID NO: 539809 - DNA, 19 bp, Mus musculus
  siRNA target sequence for Rims2 (NM_053271.1,593-611).
ggagcatggttttataata

SEQ ID NO: 539810 - DNA, 19 bp, Mus musculus
  siRNA target sequence for Rims2 (NM_053271.1,631-649).
gcaacctgatcaaaaggtt

SEQ ID NO: 539811 - DNA, 19 bp, Mus musculus
  siRNA target sequence for Rims2 (NM_053271.1,651-669).
ctcgagggcttcgaaatga

SEQ ID NO: 539812 - DNA, 19 bp, Mus musculus
  siRNA target sequence for Rims2 (NM_053271.1,726-744).
ccccaggtgacttatcagt

SEQ ID NO: 539813 - DNA, 19 bp, Mus musculus
  siRNA target sequence for Rims2 (NM_053271.1,727-745).
cccaggtgacttatcagta

SEQ ID NO: 539814 - DNA, 19 bp, Mus musculus
  siRNA target sequence for Rims2 (NM_053271.1,780-798).
caagacaggatactattaa

SEQ ID NO: 539815 - DNA, 19 bp, Mus musculus
  siRNA target sequence for Rims2 (NM_053271.1,868-886).
gtccagggatcaaaatcga

SEQ ID NO: 539816 - DNA, 19 bp, Mus musculus
  siRNA target sequence for Rims2 (NM_053271.1,885-903).
gaagatacgagcaaagtga

SEQ ID NO: 539817 - DNA, 19 bp, Mus musculus
  siRNA target sequence for Rims2 (NM_053271.1,913-931).
ggactactcacagtatgtt

SEQ ID NO: 539818 - DNA, 19 bp, Mus musculus
  siRNA target sequence for Rims2 (NM_053271.1,984-1002).
ctcagcgtgagcctcaatt

SEQ ID NO: 539819 - DNA, 19 bp, Mus musculus
  siRNA target sequence for Rims2 (NM_053271.1,986-1004).
cagcgtgagcctcaatttt

SEQ ID NO: 539820 - DNA, 19 bp, Mus musculus
  siRNA target sequence for Rims2 (NM_053271.1,988-1006).
gcgtgagcctcaattttat

SEQ ID NO: 539821 - DNA, 19 bp, Mus musculus
  siRNA target sequence for Rims2 (NM_053271.1,990-1008).
gtgagcctcaattttatga

SEQ ID NO: 539822 - DNA, 19 bp, Mus musculus
  siRNA target sequence for Rims2 (NM_053271.1,994-1012).
gcctcaattttatgaagaa

SEQ ID NO: 539823 - DNA, 19 bp, Mus musculus
  siRNA target sequence for Rims2 (NM_053271.1,1010-1028).
gaacctggtcatttaaatt

SEQ ID NO: 539824 - DNA, 19 bp, Mus musculus
  siRNA target sequence for Rims2 (NM_053271.1,1056-1074).
gacattccaaagagtatat

SEQ ID NO: 539825 - DNA, 19 bp, Mus musculus
  siRNA target sequence for Rims2 (NM_053271.1,1093-1111).
ggagagcagagatgaatat

SEQ ID NO: 539826 - DNA, 19 bp, Mus musculus
  siRNA target sequence for Rims2 (NM_053271.1,1141-1159).
ggcacgctacagaagtgat

SEQ ID NO: 539827 - DNA, 19 bp, Mus musculus
  siRNA target sequence for Rims2 (NM_053271.1,1272-1290).
caaacgctgaactagaaga

SEQ ID NO: 539828 - DNA, 19 bp, Mus musculus
  siRNA target sequence for Rims2 (NM_053271.1,1353-1371).
gagctgcaatggaaaacca

SEQ ID NO: 539829 - DNA, 19 bp, Mus musculus
  siRNA target sequence for Rims2 (NM_053271.1,1363-1381).
ggaaaaccaacgatcgtat

SEQ ID NO: 539830 - DNA, 19 bp, Mus musculus
  siRNA target sequence for Rims2 (NM_053271.1,1364-1382).
gaaaaccaacgatcgtatt

SEQ ID NO: 539831 - DNA, 19 bp, Mus musculus
  siRNA target sequence for Rims2 (NM_053271.1,1373-1391).
cgatcgtattcaatggaaa

SEQ ID NO: 539832 - DNA, 19 bp, Mus musculus
  siRNA target sequence for Rims2 (NM_053271.1,1408-1426).
gggacaaagttcttatcca

SEQ ID NO: 539833 - DNA, 19 bp, Mus musculus
  siRNA target sequence for Rims2 (NM_053271.1,1468-1486).
ccctataccgcttgataga

SEQ ID NO: 539834 - DNA, 19 bp, Mus musculus
  siRNA target sequence for Rims2 (NM_053271.1,1515-1533).
ggaaacagcaccacttaga

SEQ ID NO: 539835 - DNA, 19 bp, Mus musculus
  siRNA target sequence for Rims2 (NM_053271.1,1542-1560).
ctgctgtgaggaaaacgaa

SEQ ID NO: 539836 - DNA, 19 bp, Mus musculus
  siRNA target sequence for Rims2 (NM_053271.1,1573-1591).
ggaaaccatgttaaggaat

SEQ ID NO: 539837 - DNA, 19 bp, Mus musculus
  siRNA target sequence for Rims2 (NM_053271.1,1637-1655).
ccaaggcctcataaatcca

SEQ ID NO: 539838 - DNA, 19 bp, Mus musculus
  siRNA target sequence for Rims2 (NM_053271.1,1803-1821).
ctagtgagcagggagtttt

SEQ ID NO: 539839 - DNA, 19 bp, Mus musculus
  siRNA target sequence for Rims2 (NM_053271.1,1817-1835).
gttttgtcggattctaaca

SEQ ID NO: 539840 - DNA, 19 bp, Mus musculus
  siRNA target sequence for Rims2 (NM_053271.1,1836-1854).
ccaggtctgagagacaaaa

SEQ ID NO: 539841 - DNA, 19 bp, Mus musculus
  siRNA target sequence for Rims2 (NM_053271.1,1928-1946).
ggggtagatacctgtagta

SEQ ID NO: 539842 - DNA, 19 bp, Mus musculus
  siRNA target sequence for Rims2 (NM_053271.1,2021-2039).
cgcctaattggtcgtattt

SEQ ID NO: 539843 - DNA, 19 bp, Mus musculus
  siRNA target sequence for Rims2 (NM_053271.1,2022-2040).
gcctaattggtcgtatttt

SEQ ID NO: 539844 - DNA, 19 bp, Mus musculus
  siRNA target sequence for Rims2 (NM_053271.1,2023-2041).
cctaattggtcgtatttta

SEQ ID NO: 539845 - DNA, 19 bp, Mus musculus
  siRNA target sequence for Rims2 (NM_053271.1,2024-2042).
ctaattggtcgtattttat

SEQ ID NO: 539846 - DNA, 19 bp, Mus musculus
  siRNA target sequence for Rims2 (NM_053271.1,2132-2150).
ggtcgactttgtgcattta

SEQ ID NO: 539847 - DNA, 19 bp, Mus musculus
  siRNA target sequence for Rims2 (NM_053271.1,2133-2151).
gtcgactttgtgcatttat

SEQ ID NO: 539848 - DNA, 19 bp, Mus musculus
  siRNA target sequence for Rims2 (NM_053271.1,2180-2198).
gatactgtaggacatctta

SEQ ID NO: 539849 - DNA, 19 bp, Mus musculus
  siRNA target sequence for Rims2 (NM_053271.1,2247-2265).
ccacatttgaggaagttta

SEQ ID NO: 539850 - DNA, 19 bp, Mus musculus
  siRNA target sequence for Rims2 (NM_053271.1,2295-2313).
cacaagttgagcttgttgt

SEQ ID NO: 539851 - DNA, 19 bp, Mus musculus
  siRNA target sequence for Rims2 (NM_053271.1,2297-2315).
caagttgagcttgttgttt

SEQ ID NO: 539852 - DNA, 19 bp, Mus musculus
  siRNA target sequence for Rims2 (NM_053271.1,2363-2381).
caactggaatccagttcta

SEQ ID NO: 539853 - DNA, 19 bp, Mus musculus
  siRNA target sequence for Rims2 (NM_053271.1,2374-2392).
cagttctagctcatttgaa

SEQ ID NO: 539854 - DNA, 19 bp, Mus musculus
  siRNA target sequence for Rims2 (NM_053271.1,2379-2397).
ctagctcatttgaatctca

SEQ ID NO: 539855 - DNA, 19 bp, Mus musculus
  siRNA target sequence for Rims2 (NM_053271.1,2455-2473).
ggatgtcccgcagttctta

SEQ ID NO: 539856 - DNA, 19 bp, Mus musculus
  siRNA target sequence for Rims2 (NM_053271.1,2456-2474).
gatgtcccgcagttcttat

SEQ ID NO: 539857 - DNA, 19 bp, Mus musculus
  siRNA target sequence for Rims2 (NM_053271.1,2518-2536).
ccagttgatagttacaatt

SEQ ID NO: 539858 - DNA, 19 bp, Mus musculus
  siRNA target sequence for Rims2 (NM_053271.1,2519-2537).
cagttgatagttacaattt

SEQ ID NO: 539859 - DNA, 19 bp, Mus musculus
  siRNA target sequence for Rims2 (NM_053271.1,2572-2590).
gaggccaaggaatccttat

SEQ ID NO: 539860 - DNA, 19 bp, Mus musculus
  siRNA target sequence for Rims2 (NM_053271.1,2576-2594).
ccaaggaatccttatgtta

SEQ ID NO: 539861 - DNA, 19 bp, Mus musculus
  siRNA target sequence for Rims2 (NM_053271.1,2577-2595).
caaggaatccttatgttaa

SEQ ID NO: 539862 - DNA, 19 bp, Mus musculus
  siRNA target sequence for Rims2 (NM_053271.1,2667-2685).
ccaaatggaaccagacttt

SEQ ID NO: 539863 - DNA, 19 bp, Mus musculus
  siRNA target sequence for Rims2 (NM_053271.1,2677-2695).
ccagactttcatttattct

SEQ ID NO: 539864 - DNA, 19 bp, Mus musculus
  siRNA target sequence for Rims2 (NM_053271.1,2718-2736).
gtgaacgaatgctggaaat

SEQ ID NO: 539865 - DNA, 19 bp, Mus musculus
  siRNA target sequence for Rims2 (NM_053271.1,2720-2738).
gaacgaatgctggaaatta

SEQ ID NO: 539866 - DNA, 19 bp, Mus musculus
  siRNA target sequence for Rims2 (NM_053271.1,2825-2843).
gatgagccgcactggtata

SEQ ID NO: 539867 - DNA, 19 bp, Mus musculus
  siRNA target sequence for Rims2 (NM_053271.1,2880-2898).
ctcgcccttccccatatct

SEQ ID NO: 539868 - DNA, 19 bp, Mus musculus
  siRNA target sequence for Rims2 (NM_053271.1,2942-2960).
caaaggtcgaagagaataa

SEQ ID NO: 539869 - DNA, 19 bp, Mus musculus
  siRNA target sequence for Rims2 (NM_053271.1,3001-3019).
gggagtagtgtcagattat

SEQ ID NO: 539870 - DNA, 19 bp, Mus musculus
  siRNA target sequence for Rims2 (NM_053271.1,3010-3028).
gtcagattatcgacacaat

SEQ ID NO: 539871 - DNA, 19 bp, Mus musculus
  siRNA target sequence for Rims2 (NM_053271.1,3052-3070).
gttgtcggtgccagaacaa

SEQ ID NO: 539872 - DNA, 19 bp, Mus musculus
  siRNA target sequence for Rims2 (NM_053271.1,3057-3075).
cggtgccagaacaagtcat

SEQ ID NO: 539873 - DNA, 19 bp, Mus musculus
  siRNA target sequence for Rims2 (NM_053271.1,3071-3089).
gtcatgtcatcaaatcatt

SEQ ID NO: 539874 - DNA, 19 bp, Mus musculus
  siRNA target sequence for Rims2 (NM_053271.1,3103-3121).
gtctcctcatcgagtagat

SEQ ID NO: 539875 - DNA, 19 bp, Mus musculus
  siRNA target sequence for Rims2 (NM_053271.1,3105-3123).
ctcctcatcgagtagatgt

SEQ ID NO: 539876 - DNA, 19 bp, Mus musculus
  siRNA target sequence for Rims2 (NM_053271.1,3107-3125).
cctcatcgagtagatgtta

SEQ ID NO: 539877 - DNA, 19 bp, Mus musculus
  siRNA target sequence for Rims2 (NM_053271.1,3108-3126).
ctcatcgagtagatgttat

SEQ ID NO: 539878 - DNA, 19 bp, Mus musculus
  siRNA target sequence for Rims2 (NM_053271.1,3113-3131).
cgagtagatgttataggaa

SEQ ID NO: 539879 - DNA, 19 bp, Mus musculus
  siRNA target sequence for Rims2 (NM_053271.1,3257-3275).
gaccactactcttcagata

SEQ ID NO: 539880 - DNA, 19 bp, Mus musculus
  siRNA target sequence for Rims2 (NM_053271.1,3308-3326).
cagacaagcccatcaagta

SEQ ID NO: 539881 - DNA, 19 bp, Mus musculus
  siRNA target sequence for Rims2 (NM_053271.1,3390-3408).
gaagtgctatggatataga

SEQ ID NO: 539882 - DNA, 19 bp, Mus musculus
  siRNA target sequence for Rims2 (NM_053271.1,3410-3428).
gagagaaatcgccaaatga

SEQ ID NO: 539883 - DNA, 19 bp, Mus musculus
  siRNA target sequence for Rims2 (NM_053271.1,3412-3430).
gagaaatcgccaaatgaaa

SEQ ID NO: 539884 - DNA, 19 bp, Mus musculus
  siRNA target sequence for Rims2 (NM_053271.1,3419-3437).
cgccaaatgaaacttaaca

SEQ ID NO: 539885 - DNA, 19 bp, Mus musculus
  siRNA target sequence for Rims2 (NM_053271.1,3420-3438).
gccaaatgaaacttaacaa

SEQ ID NO: 539886 - DNA, 19 bp, Mus musculus
  siRNA target sequence for Rims2 (NM_053271.1,3468-3486).
gactggagcaagattacca

SEQ ID NO: 539887 - DNA, 19 bp, Mus musculus
  siRNA target sequence for Rims2 (NM_053271.1,3470-3488).
ctggagcaagattaccatt

SEQ ID NO: 539888 - DNA, 19 bp, Mus musculus
  siRNA target sequence for Rims2 (NM_053271.1,3566-3584).
gatgtatctgcggtttcaa

SEQ ID NO: 539889 - DNA, 19 bp, Mus musculus
  siRNA target sequence for Rims2 (NM_053271.1,3575-3593).
gcggtttcaaggactagta

SEQ ID NO: 539890 - DNA, 19 bp, Mus musculus
  siRNA target sequence for Rims2 (NM_053271.1,3577-3595).
ggtttcaaggactagtagt

SEQ ID NO: 539891 - DNA, 19 bp, Mus musculus
  siRNA target sequence for Rims2 (NM_053271.1,3701-3719).
ggcgtgtcggggaagaact

SEQ ID NO: 539892 - DNA, 19 bp, Mus musculus
  siRNA target sequence for Rims2 (NM_053271.1,3702-3720).
gcgtgtcggggaagaactt

SEQ ID NO: 539893 - DNA, 19 bp, Mus musculus
  siRNA target sequence for Rims2 (NM_053271.1,3704-3722).
gtgtcggggaagaacttga

SEQ ID NO: 539894 - DNA, 19 bp, Mus musculus
  siRNA target sequence for Rims2 (NM_053271.1,3831-3849).
ctagcattggggccaaaat

SEQ ID NO: 539895 - DNA, 19 bp, Mus musculus
  siRNA target sequence for Rims2 (NM_053271.1,3834-3852).
gcattggggccaaaatggt

SEQ ID NO: 539896 - DNA, 19 bp, Mus musculus
  siRNA target sequence for Rims2 (NM_053271.1,3841-3859).
ggccaaaatggtagctatt

SEQ ID NO: 539897 - DNA, 19 bp, Mus musculus
  siRNA target sequence for Rims2 (NM_053271.1,4033-4051).
ctatagctcggaaggaaat

SEQ ID NO: 539898 - DNA, 19 bp, Mus musculus
  siRNA target sequence for Rims2 (NM_053271.1,4041-4059).
cggaaggaaatctgatctt

SEQ ID NO: 539899 - DNA, 19 bp, Mus musculus
  siRNA target sequence for Rims2 (NM_053271.1,4155-4173).
ctgcaatgggtgacattca

SEQ ID NO: 539900 - DNA, 19 bp, Mus musculus
  siRNA target sequence for Rims2 (NM_053271.1,4196-4214).
ggacagctggaggtagaaa

SEQ ID NO: 539901 - DNA, 19 bp, Mus musculus
  siRNA target sequence for Rims2 (NM_053271.1,4269-4287).
cgtatgtcaaggtgtatct

SEQ ID NO: 539902 - DNA, 19 bp, Mus musculus
  siRNA target sequence for Rims2 (NM_053271.1,4299-4317).
gagtctgcatagccaaaaa

SEQ ID NO: 539903 - DNA, 19 bp, Mus musculus
  siRNA target sequence for Rims2 (NM_053271.1,4392-4410).
ggagggtgttacagatcat

SEQ ID NO: 539904 - DNA, 19 bp, Mus musculus
  siRNA target sequence for Rims2 (NM_053271.1,4408-4426).
cattgtctggggagattat

SEQ ID NO: 539905 - DNA, 19 bp, Mus musculus
  siRNA target sequence for Rims2 (NM_053271.1,4430-4448).
cgtatggatcacaaatcct

SEQ ID NO: 539906 - DNA, 19 bp, Mus musculus
  siRNA target sequence for Rims2 (NM_053271.1,4431-4449).
gtatggatcacaaatcctt

SEQ ID NO: 539907 - DNA, 19 bp, Mus musculus
  siRNA target sequence for Rims2 (NM_053271.1,4459-4477).
ggcccagatactcttagat

SEQ ID NO: 539908 - DNA, 19 bp, Mus musculus
  siRNA target sequence for Rims2 (NM_053271.1,4461-4479).
cccagatactcttagatga

SEQ ID NO: 539909 - DNA, 19 bp, Mus musculus
  siRNA target sequence for Rims2 (NM_053271.1,4593-4611).
gttctaccggaccttctta

SEQ ID NO: 539910 - DNA, 19 bp, Mus musculus
  siRNA target sequence for Ring1 (NM_009066.2,302-320).
ctcggtcactgcattctga

SEQ ID NO: 539911 - DNA, 19 bp, Mus musculus
  siRNA target sequence for Ring1 (NM_009066.2,496-514).
gacgccctgatctccaaaa

SEQ ID NO: 539912 - DNA, 19 bp, Mus musculus
  siRNA target sequence for Ring1 (NM_009066.2,660-678).
gccgatgcctggatctgat

SEQ ID NO: 539913 - DNA, 19 bp, Mus musculus
  siRNA target sequence for Ring1 (NM_009066.2,676-694).
gatcagaccgccacaatga

SEQ ID NO: 539914 - DNA, 19 bp, Mus musculus
  siRNA target sequence for Ring1 (NM_009066.2,1325-1343).
ccttggagcttgtaaacga

SEQ ID NO: 539915 - DNA, 19 bp, Mus musculus
  siRNA target sequence for Ring1 (NM_009066.2,1333-1351).
cttgtaaacgagaagttct

SEQ ID NO: 539916 - DNA, 19 bp, Mus musculus
  siRNA target sequence for Ring1 (NM_009066.2,1387-1405).
cccacgaaggacccaaaat

SEQ ID NO: 539917 - DNA, 19 bp, Mus musculus
  siRNA target sequence for Rnf11 (NM_013876.2,293-311).
ccccgacttcggatgacat

SEQ ID NO: 539918 - DNA, 19 bp, Mus musculus
  siRNA target sequence for Rnf11 (NM_013876.2,333-351).
gtccgaccgggctagcttt

SEQ ID NO: 539919 - DNA, 19 bp, Mus musculus
  siRNA target sequence for Rnf11 (NM_013876.2,386-404).
cgccatatcaggaacaagt

SEQ ID NO: 539920 - DNA, 19 bp, Mus musculus
  siRNA target sequence for Rnf11 (NM_013876.2,562-580).
cgagagtgtgtgatctgta

SEQ ID NO: 539921 - DNA, 19 bp, Mus musculus
  siRNA target sequence for Rnf11 (NM_013876.2,563-581).
gagagtgtgtgatctgtat

SEQ ID NO: 539922 - DNA, 19 bp, Mus musculus
  siRNA target sequence for Rnf11 (NM_013876.2,599-617).
gggacccaattcgatttct

SEQ ID NO: 539923 - DNA, 19 bp, Mus musculus
  siRNA target sequence for Rnf11 (NM_013876.2,652-670).
gatgactggttgatgagat

SEQ ID NO: 539924 - DNA, 19 bp, Mus musculus
  siRNA target sequence for Rnf11 (NM_013876.2,712-730).
ctgctttcatcctatgaga

SEQ ID NO: 539925 - DNA, 19 bp, Mus musculus
  siRNA target sequence for Rpgr (NM_011285.1,79-97).
gagtcgcccctgctatctt

SEQ ID NO: 539926 - DNA, 19 bp, Mus musculus
  siRNA target sequence for Rpgr (NM_011285.1,161-179).
cgatacaggtgctgtgttt

SEQ ID NO: 539927 - DNA, 19 bp, Mus musculus
  siRNA target sequence for Rpgr (NM_011285.1,166-184).
caggtgctgtgtttacgtt

SEQ ID NO: 539928 - DNA, 19 bp, Mus musculus
  siRNA target sequence for Rpgr (NM_011285.1,176-194).
gtttacgtttggaaaaact

SEQ ID NO: 539929 - DNA, 19 bp, Mus musculus
  siRNA target sequence for Rpgr (NM_011285.1,181-199).
cgtttggaaaaactaaatt

SEQ ID NO: 539930 - DNA, 19 bp, Mus musculus
  siRNA target sequence for Rpgr (NM_011285.1,193-211).
ctaaatttgccgaaaatat

SEQ ID NO: 539931 - DNA, 19 bp, Mus musculus
  siRNA target sequence for Rpgr (NM_011285.1,237-255).
gacatacccatatgtcttt

SEQ ID NO: 539932 - DNA, 19 bp, Mus musculus
  siRNA target sequence for Rpgr (NM_011285.1,267-285).
gaacatactgctattgtta

SEQ ID NO: 539933 - DNA, 19 bp, Mus musculus
  siRNA target sequence for Rpgr (NM_011285.1,327-345).
ggtcagttaggattaggat

SEQ ID NO: 539934 - DNA, 19 bp, Mus musculus
  siRNA target sequence for Rpgr (NM_011285.1,332-350).
gttaggattaggatcaaaa

SEQ ID NO: 539935 - DNA, 19 bp, Mus musculus
  siRNA target sequence for Rpgr (NM_011285.1,370-388).
catgtatcaaagctcttaa

SEQ ID NO: 539936 - DNA, 19 bp, Mus musculus
  siRNA target sequence for Rpgr (NM_011285.1,422-440).
gaaccacaccttagtttca

SEQ ID NO: 539937 - DNA, 19 bp, Mus musculus
  siRNA target sequence for Rpgr (NM_011285.1,425-443).
ccacaccttagtttcaaca

SEQ ID NO: 539938 - DNA, 19 bp, Mus musculus
  siRNA target sequence for Rpgr (NM_011285.1,499-517).
gtgacactgacgatagaga

SEQ ID NO: 539939 - DNA, 19 bp, Mus musculus
  siRNA target sequence for Rpgr (NM_011285.1,569-587).
ctctgctggcgccaataca

SEQ ID NO: 539940 - DNA, 19 bp, Mus musculus
  siRNA target sequence for Rpgr (NM_011285.1,651-669).
ggtctagaagataaaagta

SEQ ID NO: 539941 - DNA, 19 bp, Mus musculus
  siRNA target sequence for Rpgr (NM_011285.1,705-723).
ccaatttcctggatctctt

SEQ ID NO: 539942 - DNA, 19 bp, Mus musculus
  siRNA target sequence for Rpgr (NM_011285.1,715-733).
ggatctcttgtggatatta

SEQ ID NO: 539943 - DNA, 19 bp, Mus musculus
  siRNA target sequence for Rpgr (NM_011285.1,734-752).
ccattcagcttttgtaaca

SEQ ID NO: 539944 - DNA, 19 bp, Mus musculus
  siRNA target sequence for Rpgr (NM_011285.1,756-774).
gatggggagctctacacat

SEQ ID NO: 539945 - DNA, 19 bp, Mus musculus
  siRNA target sequence for Rpgr (NM_011285.1,761-779).
ggagctctacacatttgga

SEQ ID NO: 539946 - DNA, 19 bp, Mus musculus
  siRNA target sequence for Rpgr (NM_011285.1,859-877).
ctgagagggtcattcaagt

SEQ ID NO: 539947 - DNA, 19 bp, Mus musculus
  siRNA target sequence for Rpgr (NM_011285.1,902-920).
ggttctcacagagaaagtt

SEQ ID NO: 539948 - DNA, 19 bp, Mus musculus
  siRNA target sequence for Rpgr (NM_011285.1,1004-1022).
gcgtattaaggatcagaaa

SEQ ID NO: 539949 - DNA, 19 bp, Mus musculus
  siRNA target sequence for Rpgr (NM_011285.1,1006-1024).
gtattaaggatcagaaaat

SEQ ID NO: 539950 - DNA, 19 bp, Mus musculus
  siRNA target sequence for Rpgr (NM_011285.1,1014-1032).
gatcagaaaatatgtcata

SEQ ID NO: 539951 - DNA, 19 bp, Mus musculus
  siRNA target sequence for Rpgr (NM_011285.1,1071-1089).
ctaggcctcctgtatactt

SEQ ID NO: 539952 - DNA, 19 bp, Mus musculus
  siRNA target sequence for Rpgr (NM_011285.1,1076-1094).
cctcctgtatacttttgga

SEQ ID NO: 539953 - DNA, 19 bp, Mus musculus
  siRNA target sequence for Rpgr (NM_011285.1,1097-1115).
cggccgacatggaaagtta

SEQ ID NO: 539954 - DNA, 19 bp, Mus musculus
  siRNA target sequence for Rpgr (NM_011285.1,1128-1146).
gagaatttcaccaatcagt

SEQ ID NO: 539955 - DNA, 19 bp, Mus musculus
  siRNA target sequence for Rpgr (NM_011285.1,1162-1180).
gctctaactttttgagatt

SEQ ID NO: 539956 - DNA, 19 bp, Mus musculus
  siRNA target sequence for Rpgr (NM_011285.1,1197-1215).
gcctgtggtggatgtcata

SEQ ID NO: 539957 - DNA, 19 bp, Mus musculus
  siRNA target sequence for Rpgr (NM_011285.1,1201-1219).
gtggtggatgtcatatgct

SEQ ID NO: 539958 - DNA, 19 bp, Mus musculus
  siRNA target sequence for Rpgr (NM_011285.1,1206-1224).
ggatgtcatatgctagttt

SEQ ID NO: 539959 - DNA, 19 bp, Mus musculus
  siRNA target sequence for Rpgr (NM_011285.1,1231-1249).
ctccacgacttggtacaat

SEQ ID NO: 539960 - DNA, 19 bp, Mus musculus
  siRNA target sequence for Rpgr (NM_011285.1,1234-1252).
cacgacttggtacaataga

SEQ ID NO: 539961 - DNA, 19 bp, Mus musculus
  siRNA target sequence for Rpgr (NM_011285.1,1243-1261).
gtacaatagatgaacctaa

SEQ ID NO: 539962 - DNA, 19 bp, Mus musculus
  siRNA target sequence for Rpgr (NM_011285.1,1246-1264).
caatagatgaacctaaatt

SEQ ID NO: 539963 - DNA, 19 bp, Mus musculus
  siRNA target sequence for Rpgr (NM_011285.1,1269-1287).
gacgtatatgagccttata

SEQ ID NO: 539964 - DNA, 19 bp, Mus musculus
  siRNA target sequence for Rpgr (NM_011285.1,1272-1290).
gtatatgagccttatataa

SEQ ID NO: 539965 - DNA, 19 bp, Mus musculus
  siRNA target sequence for Rpgr (NM_011285.1,1291-1309).
gtacaggttctttttccat

SEQ ID NO: 539966 - DNA, 19 bp, Mus musculus
  siRNA target sequence for Rpgr (NM_011285.1,1314-1332).
gacctctccccaagaagtt

SEQ ID NO: 539967 - DNA, 19 bp, Mus musculus
  siRNA target sequence for Rpgr (NM_011285.1,1316-1334).
cctctccccaagaagttca

SEQ ID NO: 539968 - DNA, 19 bp, Mus musculus
  siRNA target sequence for Rpgr (NM_011285.1,1330-1348).
gttcactgaatagatcttt

SEQ ID NO: 539969 - DNA, 19 bp, Mus musculus
  siRNA target sequence for Rpgr (NM_011285.1,1406-1424).
gggaacactgcctccatta

SEQ ID NO: 539970 - DNA, 19 bp, Mus musculus
  siRNA target sequence for Rpgr (NM_011285.1,1465-1483).
gttcaccccccttccattt

SEQ ID NO: 539971 - DNA, 19 bp, Mus musculus
  siRNA target sequence for Rpgr (NM_011285.1,1479-1497).
catttgtctgtgaataact

SEQ ID NO: 539972 - DNA, 19 bp, Mus musculus
  siRNA target sequence for Rpgr (NM_011285.1,1530-1548).
ccactggactcagattatt

SEQ ID NO: 539973 - DNA, 19 bp, Mus musculus
  siRNA target sequence for Rpgr (NM_011285.1,1593-1611).
gcagtggattcagaaaact

SEQ ID NO: 539974 - DNA, 19 bp, Mus musculus
  siRNA target sequence for Rpgr (NM_011285.1,1605-1623).
gaaaactttggtgaaacta

SEQ ID NO: 539975 - DNA, 19 bp, Mus musculus
  siRNA target sequence for Rpgr (NM_011285.1,1617-1635).
gaaactaatgatatcttaa

SEQ ID NO: 539976 - DNA, 19 bp, Mus musculus
  siRNA target sequence for Rpgr (NM_011285.1,1621-1639).
ctaatgatatcttaaatat

SEQ ID NO: 539977 - DNA, 19 bp, Mus musculus
  siRNA target sequence for Rpgr (NM_011285.1,1649-1667).
gatgactacgagttccaat

SEQ ID NO: 539978 - DNA, 19 bp, Mus musculus
  siRNA target sequence for Rpgr (NM_011285.1,1654-1672).
ctacgagttccaatgagaa

SEQ ID NO: 539979 - DNA, 19 bp, Mus musculus
  siRNA target sequence for Rpgr (NM_011285.1,1657-1675).
cgagttccaatgagaagtt

SEQ ID NO: 539980 - DNA, 19 bp, Mus musculus
  siRNA target sequence for Rpgr (NM_011285.1,1670-1688).
gaagttattagatttttca

SEQ ID NO: 539981 - DNA, 19 bp, Mus musculus
  siRNA target sequence for Rpgr (NM_011285.1,1687-1705).
caccaattcaaaaacaaca

SEQ ID NO: 539982 - DNA, 19 bp, Mus musculus
  siRNA target sequence for Rpgr (NM_011285.1,1706-1724).
ggctcctcaactttcagaa

SEQ ID NO: 539983 - DNA, 19 bp, Mus musculus
  siRNA target sequence for Rpgr (NM_011285.1,1854-1872).
ggctcagaaactattgata

SEQ ID NO: 539984 - DNA, 19 bp, Mus musculus
  siRNA target sequence for Rpgr (NM_011285.1,1886-1904).
gctagatgaagtccttaaa

SEQ ID NO: 539985 - DNA, 19 bp, Mus musculus
  siRNA target sequence for Rpgr (NM_011285.1,1936-1954).
cccttcgtgagtacaatga

SEQ ID NO: 539986 - DNA, 19 bp, Mus musculus
  siRNA target sequence for Rpgr (NM_011285.1,1937-1955).
ccttcgtgagtacaatgaa

SEQ ID NO: 539987 - DNA, 19 bp, Mus musculus
  siRNA target sequence for Rpgr (NM_011285.1,1944-1962).
gagtacaatgaaaatccaa

SEQ ID NO: 539988 - DNA, 19 bp, Mus musculus
  siRNA target sequence for Rpgr (NM_011285.1,2013-2031).
ggtaatgatccaacaagta

SEQ ID NO: 539989 - DNA, 19 bp, Mus musculus
  siRNA target sequence for Rpgr (NM_011285.1,2014-2032).
gtaatgatccaacaagtaa

SEQ ID NO: 539990 - DNA, 19 bp, Mus musculus
  siRNA target sequence for Rpgr (NM_011285.1,2019-2037).
gatccaacaagtaaagaca

SEQ ID NO: 539991 - DNA, 19 bp, Mus musculus
  siRNA target sequence for Rpgr (NM_011285.1,2075-2093).
gtcattgacaggtcagaaa

SEQ ID NO: 539992 - DNA, 19 bp, Mus musculus
  siRNA target sequence for Rpgr (NM_011285.1,2090-2108).
gaaactgatgcagaatact

SEQ ID NO: 539993 - DNA, 19 bp, Mus musculus
  siRNA target sequence for Rpgr (NM_011285.1,2112-2130).
gatccactcccagagataa

SEQ ID NO: 539994 - DNA, 19 bp, Mus musculus
  siRNA target sequence for Rpgr (NM_011285.1,2142-2160).
gatcagatagccttacaaa

SEQ ID NO: 539995 - DNA, 19 bp, Mus musculus
  siRNA target sequence for Rpgr (NM_011285.1,2151-2169).
gccttacaaagtgataaga

SEQ ID NO: 539996 - DNA, 19 bp, Mus musculus
  siRNA target sequence for Rpgr (NM_011285.1,2183-2201).
gaaccacatgggtcaaaat

SEQ ID NO: 539997 - DNA, 19 bp, Mus musculus
  siRNA target sequence for Rpgr (NM_011285.1,2186-2204).
ccacatgggtcaaaatctt

SEQ ID NO: 539998 - DNA, 19 bp, Mus musculus
  siRNA target sequence for Rpgr (NM_011285.1,2208-2226).
gattcgacaacaccaaata

SEQ ID NO: 539999 - DNA, 19 bp, Mus musculus
  siRNA target sequence for Rpgr (NM_011285.1,2237-2255).
gtccaaatcctgtacaatt

SEQ ID NO: 540000 - DNA, 19 bp, Mus musculus
  siRNA target sequence for Rpgr (NM_011285.1,2239-2257).
ccaaatcctgtacaattct

SEQ ID NO: 540001 - DNA, 19 bp, Mus musculus
  siRNA target sequence for Rpgr (NM_011285.1,2240-2258).
caaatcctgtacaattcta

SEQ ID NO: 540002 - DNA, 19 bp, Mus musculus
  siRNA target sequence for Rpgrip1 (NM_023879.1,152-170).
ggacgtcgggtaagaatgt

SEQ ID NO: 540003 - DNA, 19 bp, Mus musculus
  siRNA target sequence for Rpgrip1 (NM_023879.1,153-171).
gacgtcgggtaagaatgta

SEQ ID NO: 540004 - DNA, 19 bp, Mus musculus
  siRNA target sequence for Rpgrip1 (NM_023879.1,269-287).
caaagcaacgagataaaaa

SEQ ID NO: 540005 - DNA, 19 bp, Mus musculus
  siRNA target sequence for Rpgrip1 (NM_023879.1,307-325).
gtgcagcgatccacaacta

SEQ ID NO: 540006 - DNA, 19 bp, Mus musculus
  siRNA target sequence for Rpgrip1 (NM_023879.1,566-584).
ccgcatttaaagactatgt

SEQ ID NO: 540007 - DNA, 19 bp, Mus musculus
  siRNA target sequence for Rpgrip1 (NM_023879.1,594-612).
gaacaccagaatcgaaata

SEQ ID NO: 540008 - DNA, 19 bp, Mus musculus
  siRNA target sequence for Rpgrip1 (NM_023879.1,618-636).
ggagcccagccaacttact

SEQ ID NO: 540009 - DNA, 19 bp, Mus musculus
  siRNA target sequence for Rpgrip1 (NM_023879.1,754-772).
gagcttcgagcttccatta

SEQ ID NO: 540010 - DNA, 19 bp, Mus musculus
  siRNA target sequence for Rpgrip1 (NM_023879.1,857-875).
gagttcaagaggcatatga

SEQ ID NO: 540011 - DNA, 19 bp, Mus musculus
  siRNA target sequence for Rpgrip1 (NM_023879.1,886-904).
caaaagaatcagggaatat

SEQ ID NO: 540012 - DNA, 19 bp, Mus musculus
  siRNA target sequence for Rpgrip1 (NM_023879.1,891-909).
gaatcagggaatattggat

SEQ ID NO: 540013 - DNA, 19 bp, Mus musculus
  siRNA target sequence for Rpgrip1 (NM_023879.1,1009-1027).
gtgtctatcttgcagataa

SEQ ID NO: 540014 - DNA, 19 bp, Mus musculus
  siRNA target sequence for Rpgrip1 (NM_023879.1,1011-1029).
gtctatcttgcagataact

SEQ ID NO: 540015 - DNA, 19 bp, Mus musculus
  siRNA target sequence for Rpgrip1 (NM_023879.1,1042-1060).
caggtcagagttgaagatt

SEQ ID NO: 540016 - DNA, 19 bp, Mus musculus
  siRNA target sequence for Rpgrip1 (NM_023879.1,1049-1067).
gagttgaagatttggaaaa

SEQ ID NO: 540017 - DNA, 19 bp, Mus musculus
  siRNA target sequence for Rpgrip1 (NM_023879.1,1113-1131).
catgctggatagtagtcat

SEQ ID NO: 540018 - DNA, 19 bp, Mus musculus
  siRNA target sequence for Rpgrip1 (NM_023879.1,1300-1318).
caagacaccgacatccttt

SEQ ID NO: 540019 - DNA, 19 bp, Mus musculus
  siRNA target sequence for Rpgrip1 (NM_023879.1,1453-1471).
gctcaagacgagaatgact

SEQ ID NO: 540020 - DNA, 19 bp, Mus musculus
  siRNA target sequence for Rpgrip1 (NM_023879.1,1454-1472).
ctcaagacgagaatgactt

SEQ ID NO: 540021 - DNA, 19 bp, Mus musculus
  siRNA target sequence for Rpgrip1 (NM_023879.1,1593-1611).
ggcaacactgacaaaagct

SEQ ID NO: 540022 - DNA, 19 bp, Mus musculus
  siRNA target sequence for Rpgrip1 (NM_023879.1,1686-1704).
caaacagctggaaggtatt

SEQ ID NO: 540023 - DNA, 19 bp, Mus musculus
  siRNA target sequence for Rpgrip1 (NM_023879.1,1690-1708).
cagctggaaggtattttaa

SEQ ID NO: 540024 - DNA, 19 bp, Mus musculus
  siRNA target sequence for Rpgrip1 (NM_023879.1,1730-1748).
ctgagcagctcaaagatgt

SEQ ID NO: 540025 - DNA, 19 bp, Mus musculus
  siRNA target sequence for Rpgrip1 (NM_023879.1,1833-1851).
gcatccaagcgagaatctt

SEQ ID NO: 540026 - DNA, 19 bp, Mus musculus
  siRNA target sequence for Rpgrip1 (NM_023879.1,1834-1852).
catccaagcgagaatcttt

SEQ ID NO: 540027 - DNA, 19 bp, Mus musculus
  siRNA target sequence for Rpgrip1 (NM_023879.1,1838-1856).
caagcgagaatctttttga

SEQ ID NO: 540028 - DNA, 19 bp, Mus musculus
  siRNA target sequence for Rpgrip1 (NM_023879.1,1931-1949).
gcacttattccttctatga

SEQ ID NO: 540029 - DNA, 19 bp, Mus musculus
  siRNA target sequence for Rpgrip1 (NM_023879.1,2049-2067).
ccttcaaggaacttcagta

SEQ ID NO: 540030 - DNA, 19 bp, Mus musculus
  siRNA target sequence for Rpgrip1 (NM_023879.1,2083-2101).
caggccatggctagtgaat

SEQ ID NO: 540031 - DNA, 19 bp, Mus musculus
  siRNA target sequence for Rpgrip1 (NM_023879.1,2087-2105).
ccatggctagtgaatacca

SEQ ID NO: 540032 - DNA, 19 bp, Mus musculus
  siRNA target sequence for Rpgrip1 (NM_023879.1,2252-2270).
gcctccaggcatgcaataa

SEQ ID NO: 540033 - DNA, 19 bp, Mus musculus
  siRNA target sequence for Rpgrip1 (NM_023879.1,2261-2279).
catgcaataagcgaaagaa

SEQ ID NO: 540034 - DNA, 19 bp, Mus musculus
  siRNA target sequence for Rpgrip1 (NM_023879.1,2425-2443).
cagcccagtccgtatgtca

SEQ ID NO: 540035 - DNA, 19 bp, Mus musculus
  siRNA target sequence for Rpgrip1 (NM_023879.1,2429-2447).
ccagtccgtatgtcatgta

SEQ ID NO: 540036 - DNA, 19 bp, Mus musculus
  siRNA target sequence for Rpgrip1 (NM_023879.1,2440-2458).
gtcatgtaccgcttcttca

SEQ ID NO: 540037 - DNA, 19 bp, Mus musculus
  siRNA target sequence for Rpgrip1 (NM_023879.1,2489-2507).
cagccagcagcaatccata

SEQ ID NO: 540038 - DNA, 19 bp, Mus musculus
  siRNA target sequence for Rpgrip1 (NM_023879.1,2495-2513).
gcagcaatccatactttaa

SEQ ID NO: 540039 - DNA, 19 bp, Mus musculus
  siRNA target sequence for Rpgrip1 (NM_023879.1,2656-2674).
cttgcacaaaacaaatcta

SEQ ID NO: 540040 - DNA, 19 bp, Mus musculus
  siRNA target sequence for Rpgrip1 (NM_023879.1,2704-2722).
ggggagaagtccaatggat

SEQ ID NO: 540041 - DNA, 19 bp, Mus musculus
  siRNA target sequence for Rpgrip1 (NM_023879.1,2712-2730).
gtccaatggatccatcaaa

SEQ ID NO: 540042 - DNA, 19 bp, Mus musculus
  siRNA target sequence for Rpgrip1 (NM_023879.1,2714-2732).
ccaatggatccatcaaagt

SEQ ID NO: 540043 - DNA, 19 bp, Mus musculus
  siRNA target sequence for Rpgrip1 (NM_023879.1,2723-2741).
ccatcaaagtgcaactaga

SEQ ID NO: 540044 - DNA, 19 bp, Mus musculus
  siRNA target sequence for Rpgrip1 (NM_023879.1,3058-3076).
gcctcattcacggaagaat

SEQ ID NO: 540045 - DNA, 19 bp, Mus musculus
  siRNA target sequence for Rpgrip1 (NM_023879.1,3096-3114).
ggaccagatagcatctaca

SEQ ID NO: 540046 - DNA, 19 bp, Mus musculus
  siRNA target sequence for Rpgrip1 (NM_023879.1,3102-3120).
gatagcatctacagagatt

SEQ ID NO: 540047 - DNA, 19 bp, Mus musculus
  siRNA target sequence for Rpgrip1 (NM_023879.1,3138-3156).
gtacccagagaagagaaaa

SEQ ID NO: 540048 - DNA, 19 bp, Mus musculus
  siRNA target sequence for Rpgrip1 (NM_023879.1,3158-3176).
ctcctgtaatagcagaaaa

SEQ ID NO: 540049 - DNA, 19 bp, Mus musculus
  siRNA target sequence for Rpgrip1 (NM_023879.1,3200-3218).
caagctactcacgaagaaa

SEQ ID NO: 540050 - DNA, 19 bp, Mus musculus
  siRNA target sequence for Rpgrip1 (NM_023879.1,3203-3221).
gctactcacgaagaaaaca

SEQ ID NO: 540051 - DNA, 19 bp, Mus musculus
  siRNA target sequence for Rpgrip1 (NM_023879.1,3259-3277).
gaatatctgagctgtaaca

SEQ ID NO: 540052 - DNA, 19 bp, Mus musculus
  siRNA target sequence for Rpgrip1 (NM_023879.1,3341-3359).
ccgaggatggtggcttaaa

SEQ ID NO: 540053 - DNA, 19 bp, Mus musculus
  siRNA target sequence for Rpgrip1 (NM_023879.1,3497-3515).
ctaccgacagcgatgacat

SEQ ID NO: 540054 - DNA, 19 bp, Mus musculus
  siRNA target sequence for Rpgrip1 (NM_023879.1,3501-3519).
cgacagcgatgacatcata

SEQ ID NO: 540055 - DNA, 19 bp, Mus musculus
  siRNA target sequence for Rpgrip1 (NM_023879.1,3531-3549).
ggctcagacggttcctaaa

SEQ ID NO: 540056 - DNA, 19 bp, Mus musculus
  siRNA target sequence for Rpgrip1 (NM_023879.1,3550-3568).
gccgattcagagaagatgt

SEQ ID NO: 540057 - DNA, 19 bp, Mus musculus
  siRNA target sequence for Rpgrip1 (NM_023879.1,3624-3642).
gactatccagcaggtatat

SEQ ID NO: 540058 - DNA, 19 bp, Mus musculus
  siRNA target sequence for Rpgrip1 (NM_023879.1,3626-3644).
ctatccagcaggtatatgt

SEQ ID NO: 540059 - DNA, 19 bp, Mus musculus
  siRNA target sequence for Rpgrip1 (NM_023879.1,3636-3654).
ggtatatgtggagtacaaa

SEQ ID NO: 540060 - DNA, 19 bp, Mus musculus
  siRNA target sequence for Rpgrip1 (NM_023879.1,3735-3753).
ctttagcaaggtgatagat

SEQ ID NO: 540061 - DNA, 19 bp, Mus musculus
  siRNA target sequence for Rpgrip1 (NM_023879.1,3776-3794).
gccgaaggcagtttttgtt

SEQ ID NO: 540062 - DNA, 19 bp, Mus musculus
  siRNA target sequence for Rpgrip1 (NM_023879.1,3801-3819).
gctacatgctcaagattct

SEQ ID NO: 540063 - DNA, 19 bp, Mus musculus
  siRNA target sequence for Rpgrip1 (NM_023879.1,3818-3836).
ctgatgagggacgtttcaa

SEQ ID NO: 540064 - DNA, 19 bp, Mus musculus
  siRNA target sequence for Rpgrip1 (NM_023879.1,3820-3838).
gatgagggacgtttcaagt

SEQ ID NO: 540065 - DNA, 19 bp, Mus musculus
  siRNA target sequence for Rpgrip1 (NM_023879.1,3823-3841).
gagggacgtttcaagttta

SEQ ID NO: 540066 - DNA, 19 bp, Mus musculus
  siRNA target sequence for Rpgrip1 (NM_023879.1,3825-3843).
gggacgtttcaagtttaca

SEQ ID NO: 540067 - DNA, 19 bp, Mus musculus
  siRNA target sequence for Rpgrip1 (NM_023879.1,3827-3845).
gacgtttcaagtttacagt

SEQ ID NO: 540068 - DNA, 19 bp, Mus musculus
  siRNA target sequence for Rpgrip1 (NM_023879.1,3893-3911).
gctatgcataccttgaact

SEQ ID NO: 540069 - DNA, 19 bp, Mus musculus
  siRNA target sequence for Rpgrip1 (NM_023879.1,3910-3928).
ctgtggcagatatttcaat

SEQ ID NO: 540070 - DNA, 19 bp, Mus musculus
  siRNA target sequence for Rpgrip1 (NM_023879.1,4027-4045).
gccctccatggcatttata

SEQ ID NO: 540071 - DNA, 19 bp, Mus musculus
  siRNA target sequence for Rpgrip1 (NM_023879.1,4053-4071).
gactgaagatctgttttca

SEQ ID NO: 540072 - DNA, 19 bp, Mus musculus
  siRNA target sequence for Rph3a (NM_011286.2,864-882).
caggagcatggttcttcaa

SEQ ID NO: 540073 - DNA, 19 bp, Mus musculus
  siRNA target sequence for Rph3a (NM_011286.2,905-923).
ccacagcccatgcctataa

SEQ ID NO: 540074 - DNA, 19 bp, Mus musculus
  siRNA target sequence for Rph3a (NM_011286.2,908-926).
cagcccatgcctataaaga

SEQ ID NO: 540075 - DNA, 19 bp, Mus musculus
  siRNA target sequence for Rph3a (NM_011286.2,911-929).
cccatgcctataaagaaga

SEQ ID NO: 540076 - DNA, 19 bp, Mus musculus
  siRNA target sequence for Rph3a (NM_011286.2,1517-1535).
gaagccaatagttatgact

SEQ ID NO: 540077 - DNA, 19 bp, Mus musculus
  siRNA target sequence for Rph3a (NM_011286.2,1866-1884).
ccaggttctcgctcaagaa

SEQ ID NO: 540078 - DNA, 19 bp, Mus musculus
  siRNA target sequence for Rph3a (NM_011286.2,1892-1910).
gctaaccagaggaaaaact

SEQ ID NO: 540079 - DNA, 19 bp, Mus musculus
  siRNA target sequence for Rph3a (NM_011286.2,1969-1987).
ccgtggcatggctctctat

SEQ ID NO: 540080 - DNA, 19 bp, Mus musculus
  siRNA target sequence for Rph3a (NM_011286.2,2231-2249).
gaggagttcttttatgata

SEQ ID NO: 540081 - DNA, 19 bp, Mus musculus
  siRNA target sequence for Rph3a (NM_011286.2,2309-2327).
ggcaagtctaatgattaca

SEQ ID NO: 540082 - DNA, 19 bp, Mus musculus
  siRNA target sequence for Rph3a (NM_011286.2,2310-2328).
gcaagtctaatgattacat

SEQ ID NO: 540083 - DNA, 19 bp, Mus musculus
  siRNA target sequence for Rph3a (NM_011286.2,2365-2383).
gcgcttgaaacattggtat

SEQ ID NO: 540084 - DNA, 19 bp, Mus musculus
  siRNA target sequence for Rph3a (NM_011286.2,2375-2393).
cattggtatgagtgtttga

SEQ ID NO: 540085 - DNA, 19 bp, Mus musculus
  siRNA target sequence for Rph3a (NM_011286.2,2379-2397).
ggtatgagtgtttgaagaa

SEQ ID NO: 540086 - DNA, 19 bp, Mus musculus
  siRNA target sequence for Rtn4 (NM_024226.2,283-301).
gacgatcagaagaaacgtt

SEQ ID NO: 540087 - DNA, 19 bp, Mus musculus
  siRNA target sequence for Rtn4 (NM_024226.2,411-429).
cagtgtaacggcctacatt

SEQ ID NO: 540088 - DNA, 19 bp, Mus musculus
  siRNA target sequence for Rtn4 (NM_024226.2,448-466).
gtgactatcagctttagga

SEQ ID NO: 540089 - DNA, 19 bp, Mus musculus
  siRNA target sequence for Rtn4 (NM_024226.2,450-468).
gactatcagctttaggata

SEQ ID NO: 540090 - DNA, 19 bp, Mus musculus
  siRNA target sequence for Rtn4 (NM_024226.2,546-564).
catatcagaggaattggtt

SEQ ID NO: 540091 - DNA, 19 bp, Mus musculus
  siRNA target sequence for Rtn4 (NM_024226.2,618-636).
gaggcgtctcttcttagtt

SEQ ID NO: 540092 - DNA, 19 bp, Mus musculus
  siRNA target sequence for Rtn4 (NM_024226.2,620-638).
ggcgtctcttcttagttga

SEQ ID NO: 540093 - DNA, 19 bp, Mus musculus
  siRNA target sequence for Rtn4 (NM_024226.2,621-639).
gcgtctcttcttagttgat

SEQ ID NO: 540094 - DNA, 19 bp, Mus musculus
  siRNA target sequence for Rtn4 (NM_024226.2,627-645).
cttcttagttgatgattta

SEQ ID NO: 540095 - DNA, 19 bp, Mus musculus
  siRNA target sequence for Rtn4 (NM_024226.2,669-687).
gttgatgtgggtatttact

SEQ ID NO: 540096 - DNA, 19 bp, Mus musculus
  siRNA target sequence for Rtn4 (NM_024226.2,690-708).
cgttggtgccttgttcaat

SEQ ID NO: 540097 - DNA, 19 bp, Mus musculus
  siRNA target sequence for Rtn4 (NM_024226.2,699-717).
cttgttcaatggtttgaca

SEQ ID NO: 540098 - DNA, 19 bp, Mus musculus
  siRNA target sequence for Rtn4 (NM_024226.2,714-732).
gacactactgattttagct

SEQ ID NO: 540099 - DNA, 19 bp, Mus musculus
  siRNA target sequence for Rtn4 (NM_024226.2,747-765).
cagtattcctgttatatat

SEQ ID NO: 540100 - DNA, 19 bp, Mus musculus
  siRNA target sequence for Rtn4 (NM_024226.2,770-788).
ggcatcaggcgcagataga

SEQ ID NO: 540101 - DNA, 19 bp, Mus musculus
  siRNA target sequence for Rtn4 (NM_024226.2,771-789).
gcatcaggcgcagatagat

SEQ ID NO: 540102 - DNA, 19 bp, Mus musculus
  siRNA target sequence for Rtn4 (NM_024226.2,775-793).
caggcgcagatagatcatt

SEQ ID NO: 540103 - DNA, 19 bp, Mus musculus
  siRNA target sequence for Rtn4 (NM_024226.2,777-795).
ggcgcagatagatcattat

SEQ ID NO: 540104 - DNA, 19 bp, Mus musculus
  siRNA target sequence for Rtn4 (NM_024226.2,780-798).
gcagatagatcattatcta

SEQ ID NO: 540105 - DNA, 19 bp, Mus musculus
  siRNA target sequence for Rtn4 (NM_024226.2,845-863).
caaaaatccctggattgaa

SEQ ID NO: 540106 - DNA, 19 bp, Mus musculus
  siRNA target sequence for Rtn4 (NM_194051.1,86-104).
ctgggtgccttcattgttt

SEQ ID NO: 540107 - DNA, 19 bp, Mus musculus
  siRNA target sequence for Rtn4 (NM_194051.1,88-106).
gggtgccttcattgtttgt

SEQ ID NO: 540108 - DNA, 19 bp, Mus musculus
  siRNA target sequence for Rtn4 (NM_194051.1,289-307).
cgtctggtcaagaggattt

SEQ ID NO: 540109 - DNA, 19 bp, Mus musculus
  siRNA target sequence for Rtn4 (NM_194051.1,383-401).
cggataccttggtaactta

SEQ ID NO: 540110 - DNA, 19 bp, Mus musculus
  siRNA target sequence for Rtn4 (NM_194051.1,384-402).
ggataccttggtaacttat

SEQ ID NO: 540111 - DNA, 19 bp, Mus musculus
  siRNA target sequence for Rtn4 (NM_194051.1,412-430).
catccacagaaggaactat

SEQ ID NO: 540112 - DNA, 19 bp, Mus musculus
  siRNA target sequence for Rtn4 (NM_194051.1,472-490).
gggcaacaaatccatttgt

SEQ ID NO: 540113 - DNA, 19 bp, Mus musculus
  siRNA target sequence for Rtn4 (NM_194051.1,473-491).
ggcaacaaatccatttgta

SEQ ID NO: 540114 - DNA, 19 bp, Mus musculus
  siRNA target sequence for Rtn4 (NM_194051.1,474-492).
gcaacaaatccatttgtaa

SEQ ID NO: 540115 - DNA, 19 bp, Mus musculus
  siRNA target sequence for Rtn4 (NM_194051.1,500-518).
gtcagcagagttttcagta

SEQ ID NO: 540116 - DNA, 19 bp, Mus musculus
  siRNA target sequence for Rtn4 (NM_194051.1,507-525).
gagttttcagtattagaat

SEQ ID NO: 540117 - DNA, 19 bp, Mus musculus
  siRNA target sequence for Rtn4 (NM_194051.1,516-534).
gtattagaatactcagaaa

SEQ ID NO: 540118 - DNA, 19 bp, Mus musculus
  siRNA target sequence for Rtn4 (NM_194051.1,565-583).
gagagtcagccatgttagt

SEQ ID NO: 540119 - DNA, 19 bp, Mus musculus
  siRNA target sequence for Rtn4 (NM_194051.1,571-589).
cagccatgttagtagaaaa

SEQ ID NO: 540120 - DNA, 19 bp, Mus musculus
  siRNA target sequence for Rtn4 (NM_194051.1,623-641).
caaagaggatttagtttgt

SEQ ID NO: 540121 - DNA, 19 bp, Mus musculus
  siRNA target sequence for Rtn4 (NM_194051.1,679-697).
cccttactaaagtggttaa

SEQ ID NO: 540122 - DNA, 19 bp, Mus musculus
  siRNA target sequence for Rtn4 (NM_194051.1,680-698).
ccttactaaagtggttaaa

SEQ ID NO: 540123 - DNA, 19 bp, Mus musculus
  siRNA target sequence for Rtn4 (NM_194051.1,775-793).
gggaagagtatgcagattt

SEQ ID NO: 540124 - DNA, 19 bp, Mus musculus
  siRNA target sequence for Rtn4 (NM_194051.1,814-832).
gggaagtgaaagatactta

SEQ ID NO: 540125 - DNA, 19 bp, Mus musculus
  siRNA target sequence for Rtn4 (NM_194051.1,851-869).
gctggctgctagagctaat

SEQ ID NO: 540126 - DNA, 19 bp, Mus musculus
  siRNA target sequence for Rtn4 (NM_194051.1,865-883).
ctaatatggaaagtaaagt

SEQ ID NO: 540127 - DNA, 19 bp, Mus musculus
  siRNA target sequence for Rtn4 (NM_194051.1,1002-1020).
gcgtacatcacctgtgatt

SEQ ID NO: 540128 - DNA, 19 bp, Mus musculus
  siRNA target sequence for Rtn4 (NM_194051.1,1007-1025).
catcacctgtgattccttt

SEQ ID NO: 540129 - DNA, 19 bp, Mus musculus
  siRNA target sequence for Rtn4 (NM_194051.1,1172-1190).
ccttgtagcaatacatgat

SEQ ID NO: 540130 - DNA, 19 bp, Mus musculus
  siRNA target sequence for Rtn4 (NM_194051.1,1173-1191).
cttgtagcaatacatgatt

SEQ ID NO: 540131 - DNA, 19 bp, Mus musculus
  siRNA target sequence for Rtn4 (NM_194051.1,1200-1218).
gattatgtcacaacagata

SEQ ID NO: 540132 - DNA, 19 bp, Mus musculus
  siRNA target sequence for Rtn4 (NM_194051.1,1264-1282).
gtctaacgccagatttagt

SEQ ID NO: 540133 - DNA, 19 bp, Mus musculus
  siRNA target sequence for Rtn4 (NM_194051.1,1371-1389).
gctatacaagagtcaattt

SEQ ID NO: 540134 - DNA, 19 bp, Mus musculus
  siRNA target sequence for Rtn4 (NM_194051.1,1372-1390).
ctatacaagagtcaattta

SEQ ID NO: 540135 - DNA, 19 bp, Mus musculus
  siRNA target sequence for Rtn4 (NM_194051.1,1432-1450).
caactccgtcaccagtttt

SEQ ID NO: 540136 - DNA, 19 bp, Mus musculus
  siRNA target sequence for Rtn4 (NM_194051.1,1446-1464).
gttttgcctgatattgtta

SEQ ID NO: 540137 - DNA, 19 bp, Mus musculus
  siRNA target sequence for Rtn4 (NM_194051.1,1451-1469).
gcctgatattgttatggaa

SEQ ID NO: 540138 - DNA, 19 bp, Mus musculus
  siRNA target sequence for Rtn4 (NM_194051.1,1461-1479).
gttatggaagcgccattaa

SEQ ID NO: 540139 - DNA, 19 bp, Mus musculus
  siRNA target sequence for Rtn4 (NM_194051.1,1466-1484).
ggaagcgccattaaattct

SEQ ID NO: 540140 - DNA, 19 bp, Mus musculus
  siRNA target sequence for Rtn4 (NM_194051.1,1539-1557).
gtaccgtctccagttagtt

SEQ ID NO: 540141 - DNA, 19 bp, Mus musculus
  siRNA target sequence for Rtn4 (NM_194051.1,1543-1561).
cgtctccagttagttatga

SEQ ID NO: 540142 - DNA, 19 bp, Mus musculus
  siRNA target sequence for Rtn4 (NM_194051.1,1551-1569).
gttagttatgacggtataa

SEQ ID NO: 540143 - DNA, 19 bp, Mus musculus
  siRNA target sequence for Rtn4 (NM_194051.1,1555-1573).
gttatgacggtataaagct

SEQ ID NO: 540144 - DNA, 19 bp, Mus musculus
  siRNA target sequence for Rtn4 (NM_194051.1,1607-1625).
catgagtgtagcactaaaa

SEQ ID NO: 540145 - DNA, 19 bp, Mus musculus
  siRNA target sequence for Rtn4 (NM_194051.1,1631-1649).
ggactcaaaggaagaaatt

SEQ ID NO: 540146 - DNA, 19 bp, Mus musculus
  siRNA target sequence for Rtn4 (NM_194051.1,1686-1704).
gcagaagctccttatatat

SEQ ID NO: 540147 - DNA, 19 bp, Mus musculus
  siRNA target sequence for Rtn4 (NM_194051.1,1750-1768).
caagtccagagttctctaa

SEQ ID NO: 540148 - DNA, 19 bp, Mus musculus
  siRNA target sequence for Rtn4 (NM_194051.1,1753-1771).
gtccagagttctctaatta

SEQ ID NO: 540149 - DNA, 19 bp, Mus musculus
  siRNA target sequence for Rtn4 (NM_194051.1,1760-1778).
gttctctaattattcagaa

SEQ ID NO: 540150 - DNA, 19 bp, Mus musculus
  siRNA target sequence for Rtn4 (NM_194051.1,1843-1861).
ctgaaccagttgacttatt

SEQ ID NO: 540151 - DNA, 19 bp, Mus musculus
  siRNA target sequence for Rtn4 (NM_194051.1,1845-1863).
gaaccagttgacttattta

SEQ ID NO: 540152 - DNA, 19 bp, Mus musculus
  siRNA target sequence for Rtn4 (NM_194051.1,1849-1867).
cagttgacttatttagtga

SEQ ID NO: 540153 - DNA, 19 bp, Mus musculus
  siRNA target sequence for Rtn4 (NM_194051.1,1854-1872).
gacttatttagtgatgatt

SEQ ID NO: 540154 - DNA, 19 bp, Mus musculus
  siRNA target sequence for Rtn4 (NM_194051.1,1935-1953).
gaagtgtctgagacagtaa

SEQ ID NO: 540155 - DNA, 19 bp, Mus musculus
  siRNA target sequence for Rtn4 (NM_194051.1,2006-2024).
gccatatttagagtctttt

SEQ ID NO: 540156 - DNA, 19 bp, Mus musculus
  siRNA target sequence for Rtn4 (NM_194051.1,2018-2036).
gtcttttcagcccaattta

SEQ ID NO: 540157 - DNA, 19 bp, Mus musculus
  siRNA target sequence for Rtn4 (NM_194051.1,2027-2045).
gcccaatttacatattaca

SEQ ID NO: 540158 - DNA, 19 bp, Mus musculus
  siRNA target sequence for Rtn4 (NM_194051.1,2028-2046).
cccaatttacatattacaa

SEQ ID NO: 540159 - DNA, 19 bp, Mus musculus
  siRNA target sequence for Rtn4 (NM_194051.1,2029-2047).
ccaatttacatattacaaa

SEQ ID NO: 540160 - DNA, 19 bp, Mus musculus
  siRNA target sequence for Rtn4 (NM_194051.1,2055-2073).
gcatctaatgaaattccaa

SEQ ID NO: 540161 - DNA, 19 bp, Mus musculus
  siRNA target sequence for Rtn4 (NM_194051.1,2071-2089).
caacattgaccaaaaagga

SEQ ID NO: 540162 - DNA, 19 bp, Mus musculus
  siRNA target sequence for Rtn4 (NM_194051.1,2112-2130).
gagtttaatactgcaattt

SEQ ID NO: 540163 - DNA, 19 bp, Mus musculus
  siRNA target sequence for Rtn4 (NM_194051.1,2181-2199).
gaaacattttccgattcat

SEQ ID NO: 540164 - DNA, 19 bp, Mus musculus
  siRNA target sequence for Rtn4 (NM_194051.1,2197-2215).
catctcccattgagataat

SEQ ID NO: 540165 - DNA, 19 bp, Mus musculus
  siRNA target sequence for Rtn4 (NM_194051.1,2230-2248).
catttgtcagtgctaaaga

SEQ ID NO: 540166 - DNA, 19 bp, Mus musculus
  siRNA target sequence for Rtn4 (NM_194051.1,2269-2287).
ctgacctagaagtatccaa

SEQ ID NO: 540167 - DNA, 19 bp, Mus musculus
  siRNA target sequence for Rtn4 (NM_194051.1,2280-2298).
gtatccaacaaaagtgaaa

SEQ ID NO: 540168 - DNA, 19 bp, Mus musculus
  siRNA target sequence for Rtn4 (NM_194051.1,2326-2344).
cgttgccttgctcagaatt

SEQ ID NO: 540169 - DNA, 19 bp, Mus musculus
  siRNA target sequence for Rtn4 (NM_194051.1,2346-2364).
ccctgtgacctttctttca

SEQ ID NO: 540170 - DNA, 19 bp, Mus musculus
  siRNA target sequence for Rtn4 (NM_194051.1,2366-2384).
gaatacatatcctaaagat

SEQ ID NO: 540171 - DNA, 19 bp, Mus musculus
  siRNA target sequence for Rtn4 (NM_194051.1,2400-2418).
gatgaattctccaaaagta

SEQ ID NO: 540172 - DNA, 19 bp, Mus musculus
  siRNA target sequence for Rtn4 (NM_194051.1,2431-2449).
ctaaggtgcccttattgct

SEQ ID NO: 540173 - DNA, 19 bp, Mus musculus
  siRNA target sequence for Rtn4 (NM_194051.1,2438-2456).
gcccttattgcttccaaat

SEQ ID NO: 540174 - DNA, 19 bp, Mus musculus
  siRNA target sequence for Rtn4 (NM_194051.1,2440-2458).
ccttattgcttccaaatgt

SEQ ID NO: 540175 - DNA, 19 bp, Mus musculus
  siRNA target sequence for Rtn4 (NM_194051.1,2496-2514).
gttaaacccaaagtactta

SEQ ID NO: 540176 - DNA, 19 bp, Mus musculus
  siRNA target sequence for Rtn4 (NM_194051.1,2504-2522).
caaagtacttacgaaagaa

SEQ ID NO: 540177 - DNA, 19 bp, Mus musculus
  siRNA target sequence for Rtn4 (NM_194052.1,742-760).
cgggctcagtggttgttga

SEQ ID NO: 540178 - DNA, 19 bp, Mus musculus
  siRNA target sequence for Rufy1 (NM_172557.1,330-348).
cttccaaaggccagatgat

SEQ ID NO: 540179 - DNA, 19 bp, Mus musculus
  siRNA target sequence for Rufy1 (NM_172557.1,360-378).
ccaacctaatgcacatgat

SEQ ID NO: 540180 - DNA, 19 bp, Mus musculus
  siRNA target sequence for Rufy1 (NM_172557.1,427-445).
cagtctggatgcagactat

SEQ ID NO: 540181 - DNA, 19 bp, Mus musculus
  siRNA target sequence for Rufy1 (NM_172557.1,447-465).
cccccttgcagcagttctt

SEQ ID NO: 540182 - DNA, 19 bp, Mus musculus
  siRNA target sequence for Rufy1 (NM_172557.1,575-593).
gaagcatcagatatagcta

SEQ ID NO: 540183 - DNA, 19 bp, Mus musculus
  siRNA target sequence for Rufy1 (NM_172557.1,640-658).
cagagcgtggctttatctt

SEQ ID NO: 540184 - DNA, 19 bp, Mus musculus
  siRNA target sequence for Rufy1 (NM_172557.1,689-707).
ctgaaagtcctcatagaca

SEQ ID NO: 540185 - DNA, 19 bp, Mus musculus
  siRNA target sequence for Rufy1 (NM_172557.1,901-919).
cggcagagagcatgaaaga

SEQ ID NO: 540186 - DNA, 19 bp, Mus musculus
  siRNA target sequence for Rufy1 (NM_172557.1,925-943).
cgatgtccttgatcagaaa

SEQ ID NO: 540187 - DNA, 19 bp, Mus musculus
  siRNA target sequence for Rufy1 (NM_172557.1,978-996).
gcacagttggggatcttca

SEQ ID NO: 540188 - DNA, 19 bp, Mus musculus
  siRNA target sequence for Rufy1 (NM_172557.1,988-1006).
ggatcttcagacgaagata

SEQ ID NO: 540189 - DNA, 19 bp, Mus musculus
  siRNA target sequence for Rufy1 (NM_172557.1,1023-1041).
cgaactcaaagcttcaaga

SEQ ID NO: 540190 - DNA, 19 bp, Mus musculus
  siRNA target sequence for Rufy1 (NM_172557.1,1052-1070).
gctgcaacagaccgaattt

SEQ ID NO: 540191 - DNA, 19 bp, Mus musculus
  siRNA target sequence for Rufy1 (NM_172557.1,1055-1073).
gcaacagaccgaatttgtt

SEQ ID NO: 540192 - DNA, 19 bp, Mus musculus
  siRNA target sequence for Rufy1 (NM_172557.1,1064-1082).
cgaatttgttccctacaaa

SEQ ID NO: 540193 - DNA, 19 bp, Mus musculus
  siRNA target sequence for Rufy1 (NM_172557.1,1111-1129).
cgaagtaattcgagaaaga

SEQ ID NO: 540194 - DNA, 19 bp, Mus musculus
  siRNA target sequence for Rufy1 (NM_172557.1,1133-1151).
gagaagagcgtggagataa

SEQ ID NO: 540195 - DNA, 19 bp, Mus musculus
  siRNA target sequence for Rufy1 (NM_172557.1,1140-1158).
gcgtggagataacaaaaca

SEQ ID NO: 540196 - DNA, 19 bp, Mus musculus
  siRNA target sequence for Rufy1 (NM_172557.1,1471-1489).
cgcatcttttgaaggaaaa

SEQ ID NO: 540197 - DNA, 19 bp, Mus musculus
  siRNA target sequence for Rufy1 (NM_172557.1,1868-1886).
cttagccagtccaaactga

SEQ ID NO: 540198 - DNA, 19 bp, Mus musculus
  siRNA target sequence for Rufy1 (NM_172557.1,1946-1964).
gacgaggcaacacattgta

SEQ ID NO: 540199 - DNA, 19 bp, Mus musculus
  siRNA target sequence for Rufy1 (NM_172557.1,1973-1991).
gagaaggacttctccattt

SEQ ID NO: 540200 - DNA, 19 bp, Mus musculus
  siRNA target sequence for Rufy1 (NM_172557.1,2012-2030).
cgaaactgtggccacattt

SEQ ID NO: 540201 - DNA, 19 bp, Mus musculus
  siRNA target sequence for S100a6 (NM_011313.1,396-414).
cttggctttgatctacaat

SEQ ID NO: 540202 - DNA, 19 bp, Mus musculus
  siRNA target sequence for Scgb3a2 (NM_054038.1,163-181).
caaccgtctccctgttgtt

SEQ ID NO: 540203 - DNA, 19 bp, Mus musculus
  siRNA target sequence for Scgb3a2 (NM_054038.1,168-186).
gtctccctgttgttgacaa

SEQ ID NO: 540204 - DNA, 19 bp, Mus musculus
  siRNA target sequence for Scgb3a2 (NM_054038.1,170-188).
ctccctgttgttgacaaat

SEQ ID NO: 540205 - DNA, 19 bp, Mus musculus
  siRNA target sequence for Scgb3a2 (NM_054038.1,172-190).
ccctgttgttgacaaatta

SEQ ID NO: 540206 - DNA, 19 bp, Mus musculus
  siRNA target sequence for Scgb3a2 (NM_054038.1,194-212).
gtacctttggacgacatta

SEQ ID NO: 540207 - DNA, 19 bp, Mus musculus
  siRNA target sequence for Scgb3a2 (NM_054038.1,205-223).
cgacattattccctcattt

SEQ ID NO: 540208 - DNA, 19 bp, Mus musculus
  siRNA target sequence for Scgb3a2 (NM_054038.1,208-226).
cattattccctcatttgat

SEQ ID NO: 540209 - DNA, 19 bp, Mus musculus
  siRNA target sequence for Scgb3a2 (NM_054038.1,219-237).
catttgatcccttgaagat

SEQ ID NO: 540210 - DNA, 19 bp, Mus musculus
  siRNA target sequence for Scgb3a2 (NM_054038.1,253-271).
gggcatttctgtagaacat

SEQ ID NO: 540211 - DNA, 19 bp, Mus musculus
  siRNA target sequence for Scgb3a2 (NM_054038.1,341-359).
ctggtaattataatttgtt

SEQ ID NO: 540212 - DNA, 19 bp, Mus musculus
  siRNA target sequence for Scgb3a2 (NM_054038.1,343-361).
ggtaattataatttgttct

SEQ ID NO: 540213 - DNA, 19 bp, Mus musculus
  siRNA target sequence for Scgb3a2 (NM_054038.1,391-409).
gaacaacctcccatcattt

SEQ ID NO: 540214 - DNA, 19 bp, Mus musculus
  siRNA target sequence for Scgb3a2 (NM_054038.1,394-412).
caacctcccatcatttgta

SEQ ID NO: 540215 - DNA, 19 bp, Mus musculus
  siRNA target sequence for Sema6a (NM_018744.1,140-158).
gattccgagccaatcagta

SEQ ID NO: 540216 - DNA, 19 bp, Mus musculus
  siRNA target sequence for Sema6a (NM_018744.1,162-180).
cgcatggcaactatacaaa

SEQ ID NO: 540217 - DNA, 19 bp, Mus musculus
  siRNA target sequence for Sema6a (NM_018744.1,163-181).
gcatggcaactatacaaaa

SEQ ID NO: 540218 - DNA, 19 bp, Mus musculus
  siRNA target sequence for Sema6a (NM_018744.1,168-186).
gcaactatacaaaacagta

SEQ ID NO: 540219 - DNA, 19 bp, Mus musculus
  siRNA target sequence for Sema6a (NM_018744.1,169-187).
caactatacaaaacagtat

SEQ ID NO: 540220 - DNA, 19 bp, Mus musculus
  siRNA target sequence for Sema6a (NM_018744.1,237-255).
ggctggacatccagatgat

SEQ ID NO: 540221 - DNA, 19 bp, Mus musculus
  siRNA target sequence for Sema6a (NM_018744.1,239-257).
ctggacatccagatgatca

SEQ ID NO: 540222 - DNA, 19 bp, Mus musculus
  siRNA target sequence for Sema6a (NM_018744.1,284-302).
gctgctcgagaccatattt

SEQ ID NO: 540223 - DNA, 19 bp, Mus musculus
  siRNA target sequence for Sema6a (NM_018744.1,394-412).
caggatgaaggggaaacat

SEQ ID NO: 540224 - DNA, 19 bp, Mus musculus
  siRNA target sequence for Sema6a (NM_018744.1,404-422).
gggaaacataaggatgaat

SEQ ID NO: 540225 - DNA, 19 bp, Mus musculus
  siRNA target sequence for Sema6a (NM_018744.1,518-536).
gtcgataccttggaaactt

SEQ ID NO: 540226 - DNA, 19 bp, Mus musculus
  siRNA target sequence for Sema6a (NM_018744.1,520-538).
cgataccttggaaactttt

SEQ ID NO: 540227 - DNA, 19 bp, Mus musculus
  siRNA target sequence for Sema6a (NM_018744.1,559-577).
ggccagatgcccttatgat

SEQ ID NO: 540228 - DNA, 19 bp, Mus musculus
  siRNA target sequence for Sema6a (NM_018744.1,568-586).
cccttatgatgccaaacat

SEQ ID NO: 540229 - DNA, 19 bp, Mus musculus
  siRNA target sequence for Sema6a (NM_018744.1,625-643).
ggctacagtgactgacttt

SEQ ID NO: 540230 - DNA, 19 bp, Mus musculus
  siRNA target sequence for Sema6a (NM_018744.1,749-767).
gtggattatggggactata

SEQ ID NO: 540231 - DNA, 19 bp, Mus musculus
  siRNA target sequence for Sema6a (NM_018744.1,758-776).
ggggactatatctacttct

SEQ ID NO: 540232 - DNA, 19 bp, Mus musculus
  siRNA target sequence for Sema6a (NM_018744.1,785-803).
gaaattgcagtagaataca

SEQ ID NO: 540233 - DNA, 19 bp, Mus musculus
  siRNA target sequence for Sema6a (NM_018744.1,791-809).
gcagtagaatacaacacta

SEQ ID NO: 540234 - DNA, 19 bp, Mus musculus
  siRNA target sequence for Sema6a (NM_018744.1,972-990).
cagatgtgattcgcattaa

SEQ ID NO: 540235 - DNA, 19 bp, Mus musculus
  siRNA target sequence for Sema6a (NM_018744.1,985-1003).
cattaatggccgtgatgtt

SEQ ID NO: 540236 - DNA, 19 bp, Mus musculus
  siRNA target sequence for Sema6a (NM_018744.1,1001-1019).
gttgtcttggcaacctttt

SEQ ID NO: 540237 - DNA, 19 bp, Mus musculus
  siRNA target sequence for Sema6a (NM_018744.1,1059-1077).
cctatgacatgcttgacat

SEQ ID NO: 540238 - DNA, 19 bp, Mus musculus
  siRNA target sequence for Sema6a (NM_018744.1,1060-1078).
ctatgacatgcttgacatt

SEQ ID NO: 540239 - DNA, 19 bp, Mus musculus
  siRNA target sequence for Sema6a (NM_018744.1,1064-1082).
gacatgcttgacattgcta

SEQ ID NO: 540240 - DNA, 19 bp, Mus musculus
  siRNA target sequence for Sema6a (NM_018744.1,1066-1084).
catgcttgacattgctaat

SEQ ID NO: 540241 - DNA, 19 bp, Mus musculus
  siRNA target sequence for Sema6a (NM_018744.1,1184-1202).
ggatcatcctctttagaaa

SEQ ID NO: 540242 - DNA, 19 bp, Mus musculus
  siRNA target sequence for Sema6a (NM_018744.1,1227-1245).
ccgatgataccctgaactt

SEQ ID NO: 540243 - DNA, 19 bp, Mus musculus
  siRNA target sequence for Sema6a (NM_018744.1,1323-1341).
gataccgcctgaccaaaat

SEQ ID NO: 540244 - DNA, 19 bp, Mus musculus
  siRNA target sequence for Sema6a (NM_018744.1,1327-1345).
ccgcctgaccaaaattgca

SEQ ID NO: 540245 - DNA, 19 bp, Mus musculus
  siRNA target sequence for Sema6a (NM_018744.1,1384-1402).
ggttttcctgggatcagaa

SEQ ID NO: 540246 - DNA, 19 bp, Mus musculus
  siRNA target sequence for Sema6a (NM_018744.1,1385-1403).
gttttcctgggatcagaaa

SEQ ID NO: 540247 - DNA, 19 bp, Mus musculus
  siRNA target sequence for Sema6a (NM_018744.1,1395-1413).
gatcagaaaagggaatcat

SEQ ID NO: 540248 - DNA, 19 bp, Mus musculus
  siRNA target sequence for Sema6a (NM_018744.1,1472-1490).
gaggagatgaatgtttaca

SEQ ID NO: 540249 - DNA, 19 bp, Mus musculus
  siRNA target sequence for Sema6a (NM_018744.1,1514-1532).
ggtgtagaagacaaaagga

SEQ ID NO: 540250 - DNA, 19 bp, Mus musculus
  siRNA target sequence for Sema6a (NM_018744.1,1557-1575).
cgagtggctcactctatgt

SEQ ID NO: 540251 - DNA, 19 bp, Mus musculus
  siRNA target sequence for Sema6a (NM_018744.1,1558-1576).
gagtggctcactctatgtt

SEQ ID NO: 540252 - DNA, 19 bp, Mus musculus
  siRNA target sequence for Sema6a (NM_018744.1,1563-1581).
gctcactctatgttgcatt

SEQ ID NO: 540253 - DNA, 19 bp, Mus musculus
  siRNA target sequence for Sema6a (NM_018744.1,1568-1586).
ctctatgttgcattctcta

SEQ ID NO: 540254 - DNA, 19 bp, Mus musculus
  siRNA target sequence for Sema6a (NM_018744.1,1621-1639).
gcgacatgggaagtgtaaa

SEQ ID NO: 540255 - DNA, 19 bp, Mus musculus
  siRNA target sequence for Sema6a (NM_018744.1,1622-1640).
cgacatgggaagtgtaaaa

SEQ ID NO: 540256 - DNA, 19 bp, Mus musculus
  siRNA target sequence for Sema6a (NM_018744.1,1628-1646).
gggaagtgtaaaaaaacct

SEQ ID NO: 540257 - DNA, 19 bp, Mus musculus
  siRNA target sequence for Sema6a (NM_018744.1,1654-1672).
ctccagagacccgtattgt

SEQ ID NO: 540258 - DNA, 19 bp, Mus musculus
  siRNA target sequence for Sema6a (NM_018744.1,1713-1731).
cccttagcagactgacatt

SEQ ID NO: 540259 - DNA, 19 bp, Mus musculus
  siRNA target sequence for Sema6a (NM_018744.1,1932-1950).
gggcagtgtcctctcataa

SEQ ID NO: 540260 - DNA, 19 bp, Mus musculus
  siRNA target sequence for Sema6a (NM_018744.1,1935-1953).
cagtgtcctctcataacca

SEQ ID NO: 540261 - DNA, 19 bp, Mus musculus
  siRNA target sequence for Sema6a (NM_018744.1,1967-1985).
ggagtgattcgggaaagtt

SEQ ID NO: 540262 - DNA, 19 bp, Mus musculus
  siRNA target sequence for Sema6a (NM_018744.1,1968-1986).
gagtgattcgggaaagtta

SEQ ID NO: 540263 - DNA, 19 bp, Mus musculus
  siRNA target sequence for Sema6a (NM_018744.1,1979-1997).
gaaagttacctcaaaagca

SEQ ID NO: 540264 - DNA, 19 bp, Mus musculus
  siRNA target sequence for Sema6a (NM_018744.1,2071-2089).
gggcatcatcgtgtattgt

SEQ ID NO: 540265 - DNA, 19 bp, Mus musculus
  siRNA target sequence for Sema6a (NM_018744.1,2073-2091).
gcatcatcgtgtattgtgt

SEQ ID NO: 540266 - DNA, 19 bp, Mus musculus
  siRNA target sequence for Sema6a (NM_018744.1,2409-2427).
ggaaccagaacatcatcaa

SEQ ID NO: 540267 - DNA, 19 bp, Mus musculus
  siRNA target sequence for Sema6a (NM_018744.1,2452-2470).
catgggttcccctgtgatt

SEQ ID NO: 540268 - DNA, 19 bp, Mus musculus
  siRNA target sequence for Sema6a (NM_018744.1,2626-2644).
ggagtataagaccatcaaa

SEQ ID NO: 540269 - DNA, 19 bp, Mus musculus
  siRNA target sequence for Serpine1 (NM_008871.1,235-253).
ccaccgacttcggagtaaa

SEQ ID NO: 540270 - DNA, 19 bp, Mus musculus
  siRNA target sequence for Serpine1 (NM_008871.1,236-254).
caccgacttcggagtaaaa

SEQ ID NO: 540271 - DNA, 19 bp, Mus musculus
  siRNA target sequence for Serpine1 (NM_008871.1,238-256).
ccgacttcggagtaaaagt

SEQ ID NO: 540272 - DNA, 19 bp, Mus musculus
  siRNA target sequence for Serpine1 (NM_008871.1,240-258).
gacttcggagtaaaagtgt

SEQ ID NO: 540273 - DNA, 19 bp, Mus musculus
  siRNA target sequence for Serpine1 (NM_008871.1,242-260).
cttcggagtaaaagtgttt

SEQ ID NO: 540274 - DNA, 19 bp, Mus musculus
  siRNA target sequence for Serpine1 (NM_008871.1,381-399).
gctatgggattcaaagtca

SEQ ID NO: 540275 - DNA, 19 bp, Mus musculus
  siRNA target sequence for Serpine1 (NM_008871.1,382-400).
ctatgggattcaaagtcaa

SEQ ID NO: 540276 - DNA, 19 bp, Mus musculus
  siRNA target sequence for Serpine1 (NM_008871.1,616-634).
gggtggaaaggcataccaa

SEQ ID NO: 540277 - DNA, 19 bp, Mus musculus
  siRNA target sequence for Serpine1 (NM_008871.1,621-639).
gaaaggcataccaaaggta

SEQ ID NO: 540278 - DNA, 19 bp, Mus musculus
  siRNA target sequence for Serpine1 (NM_008871.1,625-643).
ggcataccaaaggtatgat

SEQ ID NO: 540279 - DNA, 19 bp, Mus musculus
  siRNA target sequence for Serpine1 (NM_008871.1,627-645).
cataccaaaggtatgatca

SEQ ID NO: 540280 - DNA, 19 bp, Mus musculus
  siRNA target sequence for Serpine1 (NM_008871.1,847-865).
ccgatgggctcgagtatga

SEQ ID NO: 540281 - DNA, 19 bp, Mus musculus
  siRNA target sequence for Serpine1 (NM_008871.1,916-934).
caccctttgagaaagatgt

SEQ ID NO: 540282 - DNA, 19 bp, Mus musculus
  siRNA target sequence for Serpine1 (NM_008871.1,943-961).
ccgccctcaccaacatctt

SEQ ID NO: 540283 - DNA, 19 bp, Mus musculus
  siRNA target sequence for Serpine1 (NM_008871.1,966-984).
gctgaactcatcagacaat

SEQ ID NO: 540284 - DNA, 19 bp, Mus musculus
  siRNA target sequence for Serpine1 (NM_008871.1,1109-1127).
ggccgacttcacaagtctt

SEQ ID NO: 540285 - DNA, 19 bp, Mus musculus
  siRNA target sequence for Serpine1 (NM_008871.1,1110-1128).
gccgacttcacaagtcttt

SEQ ID NO: 540286 - DNA, 19 bp, Mus musculus
  siRNA target sequence for Serpine1 (NM_008871.1,1244-1262).
ccccacggagatggttata

SEQ ID NO: 540287 - DNA, 19 bp, Mus musculus
  siRNA target sequence for Serpine1 (NM_008871.1,1246-1264).
ccacggagatggttataga

SEQ ID NO: 540288 - DNA, 19 bp, Mus musculus
  siRNA target sequence for Serpine1 (NM_008871.1,1256-1274).
ggttatagaccgatccttt

SEQ ID NO: 540289 - DNA, 19 bp, Mus musculus
  siRNA target sequence for Sgcd (NM_011891.2,168-186).
gctcctcatgattttaata

SEQ ID NO: 540290 - DNA, 19 bp, Mus musculus
  siRNA target sequence for Sgcd (NM_011891.2,212-230).
ggattctcaaggtcatgaa

SEQ ID NO: 540291 - DNA, 19 bp, Mus musculus
  siRNA target sequence for Sgcd (NM_011891.2,217-235).
ctcaaggtcatgaacttca

SEQ ID NO: 540292 - DNA, 19 bp, Mus musculus
  siRNA target sequence for Sgcd (NM_011891.2,241-259).
gatggaatgggaaacttaa

SEQ ID NO: 540293 - DNA, 19 bp, Mus musculus
  siRNA target sequence for Sgcd (NM_011891.2,290-308).
gagactcagaattcttaca

SEQ ID NO: 540294 - DNA, 19 bp, Mus musculus
  siRNA target sequence for Sgcd (NM_011891.2,330-348).
caagtcccgaccaggtaat

SEQ ID NO: 540295 - DNA, 19 bp, Mus musculus
  siRNA target sequence for Sgcd (NM_011891.2,340-358).
ccaggtaatgccctatact

SEQ ID NO: 540296 - DNA, 19 bp, Mus musculus
  siRNA target sequence for Sgcd (NM_011891.2,341-359).
caggtaatgccctatactt

SEQ ID NO: 540297 - DNA, 19 bp, Mus musculus
  siRNA target sequence for Sgcd (NM_011891.2,343-361).
ggtaatgccctatacttca

SEQ ID NO: 540298 - DNA, 19 bp, Mus musculus
  siRNA target sequence for Sgcd (NM_011891.2,344-362).
gtaatgccctatacttcaa

SEQ ID NO: 540299 - DNA, 19 bp, Mus musculus
  siRNA target sequence for Sgcd (NM_011891.2,371-389).
ggaacgtgacagtgaacat

SEQ ID NO: 540300 - DNA, 19 bp, Mus musculus
  siRNA target sequence for Sgcd (NM_011891.2,372-390).
gaacgtgacagtgaacatt

SEQ ID NO: 540301 - DNA, 19 bp, Mus musculus
  siRNA target sequence for Sgcd (NM_011891.2,434-452).
cgaaggctgtggaagcata

SEQ ID NO: 540302 - DNA, 19 bp, Mus musculus
  siRNA target sequence for Sgcd (NM_011891.2,435-453).
gaaggctgtggaagcatat

SEQ ID NO: 540303 - DNA, 19 bp, Mus musculus
  siRNA target sequence for Sgcd (NM_011891.2,578-596).
ccatagaaacacctaatgt

SEQ ID NO: 540304 - DNA, 19 bp, Mus musculus
  siRNA target sequence for Sgcd (NM_011891.2,630-648).
gtccccaacccgatctcta

SEQ ID NO: 540305 - DNA, 19 bp, Mus musculus
  siRNA target sequence for Sgcd (NM_011891.2,635-653).
caacccgatctctagtgat

SEQ ID NO: 540306 - DNA, 19 bp, Mus musculus
  siRNA target sequence for Sgcd (NM_011891.2,683-701).
cagaagctggcaatatgga

SEQ ID NO: 540307 - DNA, 19 bp, Mus musculus
  siRNA target sequence for Sgcd (NM_011891.2,732-750).
gtccaaggatggagagatt

SEQ ID NO: 540308 - DNA, 19 bp, Mus musculus
  siRNA target sequence for Sgcd (NM_011891.2,845-863).
gcgccaatgggaggttatt

SEQ ID NO: 540309 - DNA, 19 bp, Mus musculus
  siRNA target sequence for Sgcg (NM_011892.1,283-301).
caccgagggcactcacata

SEQ ID NO: 540310 - DNA, 19 bp, Mus musculus
  siRNA target sequence for Sgcg (NM_011892.1,285-303).
ccgagggcactcacataga

SEQ ID NO: 540311 - DNA, 19 bp, Mus musculus
  siRNA target sequence for Sgcg (NM_011892.1,351-369).
ggaagcgctgcctatacct

SEQ ID NO: 540312 - DNA, 19 bp, Mus musculus
  siRNA target sequence for Sgcg (NM_011892.1,352-370).
gaagcgctgcctataccta

SEQ ID NO: 540313 - DNA, 19 bp, Mus musculus
  siRNA target sequence for Sgcg (NM_011892.1,357-375).
gctgcctatacctattcgt

SEQ ID NO: 540314 - DNA, 19 bp, Mus musculus
  siRNA target sequence for Sgcg (NM_011892.1,358-376).
ctgcctatacctattcgtt

SEQ ID NO: 540315 - DNA, 19 bp, Mus musculus
  siRNA target sequence for Sgcg (NM_011892.1,413-431).
ctcactatctggattctga

SEQ ID NO: 540316 - DNA, 19 bp, Mus musculus
  siRNA target sequence for Sgcg (NM_011892.1,496-514).
ggaaggagagtcggaattt

SEQ ID NO: 540317 - DNA, 19 bp, Mus musculus
  siRNA target sequence for Sgcg (NM_011892.1,497-515).
gaaggagagtcggaatttt

SEQ ID NO: 540318 - DNA, 19 bp, Mus musculus
  siRNA target sequence for Sgcg (NM_011892.1,846-864).
caactcggagtctaagcat

SEQ ID NO: 540319 - DNA, 19 bp, Mus musculus
  siRNA target sequence for Sgcg (NM_011892.1,871-889).
cccaaggggggttcatgtt

SEQ ID NO: 540320 - DNA, 19 bp, Mus musculus
  siRNA target sequence for Sgcg (NM_011892.1,873-891).
caaggggggttcatgttaa

SEQ ID NO: 540321 - DNA, 19 bp, Mus musculus
  siRNA target sequence for Sgcg (NM_011892.1,877-895).
gggggttcatgttaaagct

SEQ ID NO: 540322 - DNA, 19 bp, Mus musculus
  siRNA target sequence for Sgcg (NM_011892.1,878-896).
ggggttcatgttaaagcta

SEQ ID NO: 540323 - DNA, 19 bp, Mus musculus
  siRNA target sequence for Sgcg (NM_011892.1,879-897).
gggttcatgttaaagctaa

SEQ ID NO: 540324 - DNA, 19 bp, Mus musculus
  siRNA target sequence for Sgcg (NM_011892.1,894-912).
ctaacgctgggaaattgga

SEQ ID NO: 540325 - DNA, 19 bp, Mus musculus
  siRNA target sequence for Sgcg (NM_011892.1,1026-1044).
gctctaatggattctatga

SEQ ID NO: 540326 - DNA, 19 bp, Mus musculus
  siRNA target sequence for Sgcz (NM_145841.1,5-23).
ctcgagaacaatacatact

SEQ ID NO: 540327 - DNA, 19 bp, Mus musculus
  siRNA target sequence for Sgcz (NM_145841.1,53-71).
ctgaaaacgcacaactcta

SEQ ID NO: 540328 - DNA, 19 bp, Mus musculus
  siRNA target sequence for Sgcz (NM_145841.1,69-87).
ctaccctgtggggatttat

SEQ ID NO: 540329 - DNA, 19 bp, Mus musculus
  siRNA target sequence for Sgcz (NM_145841.1,72-90).
ccctgtggggatttatgga

SEQ ID NO: 540330 - DNA, 19 bp, Mus musculus
  siRNA target sequence for Sgcz (NM_145841.1,73-91).
cctgtggggatttatggat

SEQ ID NO: 540331 - DNA, 19 bp, Mus musculus
  siRNA target sequence for Sgcz (NM_145841.1,92-110).
ggcgaaagaggtgcttata

SEQ ID NO: 540332 - DNA, 19 bp, Mus musculus
  siRNA target sequence for Sgcz (NM_145841.1,94-112).
cgaaagaggtgcttatact

SEQ ID NO: 540333 - DNA, 19 bp, Mus musculus
  siRNA target sequence for Sgcz (NM_145841.1,95-113).
gaaagaggtgcttatactt

SEQ ID NO: 540334 - DNA, 19 bp, Mus musculus
  siRNA target sequence for Sgcz (NM_145841.1,99-117).
gaggtgcttatacttcttt

SEQ ID NO: 540335 - DNA, 19 bp, Mus musculus
  siRNA target sequence for Sgcz (NM_145841.1,101-119).
ggtgcttatacttctttgt

SEQ ID NO: 540336 - DNA, 19 bp, Mus musculus
  siRNA target sequence for Sgcz (NM_145841.1,126-144).
gctgttggttaccatgata

SEQ ID NO: 540337 - DNA, 19 bp, Mus musculus
  siRNA target sequence for Sgcz (NM_145841.1,129-147).
gttggttaccatgatagtt

SEQ ID NO: 540338 - DNA, 19 bp, Mus musculus
  siRNA target sequence for Sgcz (NM_145841.1,145-163).
gttaacttagccatgacaa

SEQ ID NO: 540339 - DNA, 19 bp, Mus musculus
  siRNA target sequence for Sgcz (NM_145841.1,155-173).
ccatgacaatatggatatt

SEQ ID NO: 540340 - DNA, 19 bp, Mus musculus
  siRNA target sequence for Sgcz (NM_145841.1,196-214).
gatggtatggggaatctga

SEQ ID NO: 540341 - DNA, 19 bp, Mus musculus
  siRNA target sequence for Sgcz (NM_145841.1,225-243).
gaagggaatccgacttgaa

SEQ ID NO: 540342 - DNA, 19 bp, Mus musculus
  siRNA target sequence for Sgcz (NM_145841.1,230-248).
gaatccgacttgaaggtat

SEQ ID NO: 540343 - DNA, 19 bp, Mus musculus
  siRNA target sequence for Sgcz (NM_145841.1,234-252).
ccgacttgaaggtatatct

SEQ ID NO: 540344 - DNA, 19 bp, Mus musculus
  siRNA target sequence for Sgcz (NM_145841.1,236-254).
gacttgaaggtatatctga

SEQ ID NO: 540345 - DNA, 19 bp, Mus musculus
  siRNA target sequence for Sgcz (NM_145841.1,259-277).
ctactaccattgtatgtga

SEQ ID NO: 540346 - DNA, 19 bp, Mus musculus
  siRNA target sequence for Sgcz (NM_145841.1,316-334).
cagtctgacagaaatgtaa

SEQ ID NO: 540347 - DNA, 19 bp, Mus musculus
  siRNA target sequence for Sgcz (NM_145841.1,318-336).
gtctgacagaaatgtaaca

SEQ ID NO: 540348 - DNA, 19 bp, Mus musculus
  siRNA target sequence for Sgcz (NM_145841.1,324-342).
cagaaatgtaacagtgaat

SEQ ID NO: 540349 - DNA, 19 bp, Mus musculus
  siRNA target sequence for Sgcz (NM_145841.1,397-415).
gttgaggcacagtgcaaaa

SEQ ID NO: 540350 - DNA, 19 bp, Mus musculus
  siRNA target sequence for Sgcz (NM_145841.1,592-610).
ccaaccagatccttgaaaa

SEQ ID NO: 540351 - DNA, 19 bp, Mus musculus
  siRNA target sequence for Sgcz (NM_145841.1,865-883).
cagtccagtagtagcattt

SEQ ID NO: 540352 - DNA, 19 bp, Mus musculus
  siRNA target sequence for Sh2bpsm1 (NM_011363.1,68-86).
ccccaagttggcaagagtt

SEQ ID NO: 540353 - DNA, 19 bp, Mus musculus
  siRNA target sequence for Sh2bpsm1 (NM_011363.1,117-135).
ggatcttgcccgacgtttt

SEQ ID NO: 540354 - DNA, 19 bp, Mus musculus
  siRNA target sequence for Sh2bpsm1 (NM_011363.1,175-193).
ggagcagaggccgcttttt

SEQ ID NO: 540355 - DNA, 19 bp, Mus musculus
  siRNA target sequence for Sh2bpsm1 (NM_011363.1,629-647).
gtagggcattggctaatga

SEQ ID NO: 540356 - DNA, 19 bp, Mus musculus
  siRNA target sequence for Sh2bpsm1 (NM_011363.1,666-684).
gagatggactcatcgattt

SEQ ID NO: 540357 - DNA, 19 bp, Mus musculus
  siRNA target sequence for Sh2bpsm1 (NM_011363.1,668-686).
gatggactcatcgatttga

SEQ ID NO: 540358 - DNA, 19 bp, Mus musculus
  siRNA target sequence for Sh2bpsm1 (NM_011363.1,908-926).
gaagtcgcttggagttctt

SEQ ID NO: 540359 - DNA, 19 bp, Mus musculus
  siRNA target sequence for Sh2bpsm1 (NM_011363.1,960-978).
cattccctgctctactatt

SEQ ID NO: 540360 - DNA, 19 bp, Mus musculus
  siRNA target sequence for Sh2bpsm1 (NM_011363.1,965-983).
cctgctctactattactga

SEQ ID NO: 540361 - DNA, 19 bp, Mus musculus
  siRNA target sequence for Sh2bpsm1 (NM_011363.1,966-984).
ctgctctactattactgat

SEQ ID NO: 540362 - DNA, 19 bp, Mus musculus
  siRNA target sequence for Sh2bpsm1 (NM_011363.1,1026-1044).
cacgtttgtggttaaggta

SEQ ID NO: 540363 - DNA, 19 bp, Mus musculus
  siRNA target sequence for Sh2bpsm1 (NM_011363.1,1062-1080).
catcctggagacaagtgat

SEQ ID NO: 540364 - DNA, 19 bp, Mus musculus
  siRNA target sequence for Sh2bpsm1 (NM_011363.1,1073-1091).
caagtgatgcgcttcatgt

SEQ ID NO: 540365 - DNA, 19 bp, Mus musculus
  siRNA target sequence for Sh2bpsm1 (NM_011363.1,1076-1094).
gtgatgcgcttcatgtgaa

SEQ ID NO: 540366 - DNA, 19 bp, Mus musculus
  siRNA target sequence for Sh2bpsm1 (NM_011363.1,1180-1198).
cctgggacctccttcttca

SEQ ID NO: 540367 - DNA, 19 bp, Mus musculus
  siRNA target sequence for Sh2bpsm1 (NM_011363.1,1183-1201).
gggacctccttcttcacaa

SEQ ID NO: 540368 - DNA, 19 bp, Mus musculus
  siRNA target sequence for Sh2bpsm1 (NM_011363.1,1184-1202).
ggacctccttcttcacaaa

SEQ ID NO: 540369 - DNA, 19 bp, Mus musculus
  siRNA target sequence for Sh2bpsm1 (NM_011363.1,1530-1548).
catgctctctcgactcaaa

SEQ ID NO: 540370 - DNA, 19 bp, Mus musculus
  siRNA target sequence for Sh2bpsm1 (NM_011363.1,1550-1568).
ctgcccagttagtgttaga

SEQ ID NO: 540371 - DNA, 19 bp, Mus musculus
  siRNA target sequence for Sh2bpsm1 (NM_011363.1,1666-1684).
cacctgcgcttgtcactaa

SEQ ID NO: 540372 - DNA, 19 bp, Mus musculus
  siRNA target sequence for Sh2bpsm1 (NM_011363.1,1668-1686).
cctgcgcttgtcactaaat

SEQ ID NO: 540373 - DNA, 19 bp, Mus musculus
  siRNA target sequence for Sh2bpsm1 (NM_011363.1,1719-1737).
gttccagtccattttcgat

SEQ ID NO: 540374 - DNA, 19 bp, Mus musculus
  siRNA target sequence for Sh2bpsm1 (NM_011363.1,1725-1743).
gtccattttcgatatgctt

SEQ ID NO: 540375 - DNA, 19 bp, Mus musculus
  siRNA target sequence for Sh3d3 (NM_017375.1,181-199).
gtcaaaccagggcaagtta

SEQ ID NO: 540376 - DNA, 19 bp, Mus musculus
  siRNA target sequence for Sh3d3 (NM_017375.1,187-205).
ccagggcaagttaaagtct

SEQ ID NO: 540377 - DNA, 19 bp, Mus musculus
  siRNA target sequence for Sh3d3 (NM_017375.1,207-225).
cagagctctatatacattt

SEQ ID NO: 540378 - DNA, 19 bp, Mus musculus
  siRNA target sequence for Sh3d3 (NM_017375.1,209-227).
gagctctatatacatttga

SEQ ID NO: 540379 - DNA, 19 bp, Mus musculus
  siRNA target sequence for Sh3d3 (NM_017375.1,372-390).
cattgacaatccattgcat

SEQ ID NO: 540380 - DNA, 19 bp, Mus musculus
  siRNA target sequence for Sh3d3 (NM_017375.1,603-621).
gaagggttatgcagacatt

SEQ ID NO: 540381 - DNA, 19 bp, Mus musculus
  siRNA target sequence for Sh3d3 (NM_017375.1,646-664).
gcgaggacagacttgagaa

SEQ ID NO: 540382 - DNA, 19 bp, Mus musculus
  siRNA target sequence for Sh3d3 (NM_017375.1,745-763).
gatggggctcgaacgttaa

SEQ ID NO: 540383 - DNA, 19 bp, Mus musculus
  siRNA target sequence for Sh3d3 (NM_017375.1,748-766).
ggggctcgaacgttaagca

SEQ ID NO: 540384 - DNA, 19 bp, Mus musculus
  siRNA target sequence for Sh3d4 (NM_011366.1,23-41).
cttggagtgggaagatctt

SEQ ID NO: 540385 - DNA, 19 bp, Mus musculus
  siRNA target sequence for Sh3d4 (NM_011366.1,188-206).
gggctcagcctggatgatt

SEQ ID NO: 540386 - DNA, 19 bp, Mus musculus
  siRNA target sequence for Sh3d4 (NM_011366.1,189-207).
ggctcagcctggatgattt

SEQ ID NO: 540387 - DNA, 19 bp, Mus musculus
  siRNA target sequence for Sh3d4 (NM_011366.1,782-800).
cactctgaagagacatcta

SEQ ID NO: 540388 - DNA, 19 bp, Mus musculus
  siRNA target sequence for Sh3d4 (NM_011366.1,862-880).
gcctagacatcgagagaaa

SEQ ID NO: 540389 - DNA, 19 bp, Mus musculus
  siRNA target sequence for Sh3d4 (NM_011366.1,1257-1275).
gacgtagagattttgtcta

SEQ ID NO: 540390 - DNA, 19 bp, Mus musculus
  siRNA target sequence for Sh3d4 (NM_011366.1,1408-1426).
gaagggtgacattgtctat

SEQ ID NO: 540391 - DNA, 19 bp, Mus musculus
  siRNA target sequence for Sh3d4 (NM_011366.1,1413-1431).
gtgacattgtctatatcca

SEQ ID NO: 540392 - DNA, 19 bp, Mus musculus
  siRNA target sequence for Sh3d4 (NM_011366.1,1415-1433).
gacattgtctatatccata

SEQ ID NO: 540393 - DNA, 19 bp, Mus musculus
  siRNA target sequence for Sh3d4 (NM_011366.1,1574-1592).
gatgcagtagcccagtata

SEQ ID NO: 540394 - DNA, 19 bp, Mus musculus
  siRNA target sequence for Sh3d4 (NM_011366.1,1577-1595).
gcagtagcccagtatacct

SEQ ID NO: 540395 - DNA, 19 bp, Mus musculus
  siRNA target sequence for Sh3d4 (NM_011366.1,1578-1596).
cagtagcccagtatacctt

SEQ ID NO: 540396 - DNA, 19 bp, Mus musculus
  siRNA target sequence for Sh3d4 (NM_011366.1,1655-1673).
cgcaaggtgaacgaacatt

SEQ ID NO: 540397 - DNA, 19 bp, Mus musculus
  siRNA target sequence for Sh3d4 (NM_011366.1,1660-1678).
ggtgaacgaacattggtat

SEQ ID NO: 540398 - DNA, 19 bp, Mus musculus
  siRNA target sequence for Sh3d4 (NM_011366.1,2177-2195).
gggacattccctggaaatt

SEQ ID NO: 540399 - DNA, 19 bp, Mus musculus
  siRNA target sequence for Sh3d4 (NM_011366.1,2179-2197).
gacattccctggaaattat

SEQ ID NO: 540400 - DNA, 19 bp, Mus musculus
  siRNA target sequence for Sh3gl1 (NM_013664.1,264-282).
ggtgctggtcagaaccata

SEQ ID NO: 540401 - DNA, 19 bp, Mus musculus
  siRNA target sequence for Sh3gl1 (NM_013664.1,611-629).
gccttgactttgactacaa

SEQ ID NO: 540402 - DNA, 19 bp, Mus musculus
  siRNA target sequence for Sh3gl1 (NM_013664.1,726-744).
cctcctggagactgatata

SEQ ID NO: 540403 - DNA, 19 bp, Mus musculus
  siRNA target sequence for Sh3gl1 (NM_013664.1,947-965).
gtgccccagcacctaagat

SEQ ID NO: 540404 - DNA, 19 bp, Mus musculus
  siRNA target sequence for Sh3gl1 (NM_013664.1,949-967).
gccccagcacctaagatca

SEQ ID NO: 540405 - DNA, 19 bp, Mus musculus
  siRNA target sequence for Sh3gl1 (NM_013664.1,970-988).
gcctcctcatcatttagat

SEQ ID NO: 540406 - DNA, 19 bp, Mus musculus
  siRNA target sequence for Sh3gl2 (NM_019535.2,198-216).
gcaccaagctcgatgatga

SEQ ID NO: 540407 - DNA, 19 bp, Mus musculus
  siRNA target sequence for Sh3gl2 (NM_019535.2,205-223).
gctcgatgatgacttcaaa

SEQ ID NO: 540408 - DNA, 19 bp, Mus musculus
  siRNA target sequence for Sh3gl2 (NM_019535.2,276-294).
caaaaacgattgaatacct

SEQ ID NO: 540409 - DNA, 19 bp, Mus musculus
  siRNA target sequence for Sh3gl2 (NM_019535.2,580-598).
gattcagcatcatctgaaa

SEQ ID NO: 540410 - DNA, 19 bp, Mus musculus
  siRNA target sequence for Sh3gl2 (NM_019535.2,605-623).
gaaggccgacgcttagact

SEQ ID NO: 540411 - DNA, 19 bp, Mus musculus
  siRNA target sequence for Sh3gl2 (NM_019535.2,609-627).
gccgacgcttagactttga

SEQ ID NO: 540412 - DNA, 19 bp, Mus musculus
  siRNA target sequence for Sh3gl2 (NM_019535.2,610-628).
ccgacgcttagactttgat

SEQ ID NO: 540413 - DNA, 19 bp, Mus musculus
  siRNA target sequence for Sh3gl2 (NM_019535.2,611-629).
cgacgcttagactttgatt

SEQ ID NO: 540414 - DNA, 19 bp, Mus musculus
  siRNA target sequence for Sh3gl2 (NM_019535.2,671-689).
cgccaagctctggagaaat

SEQ ID NO: 540415 - DNA, 19 bp, Mus musculus
  siRNA target sequence for Sh3gl2 (NM_019535.2,672-690).
gccaagctctggagaaatt

SEQ ID NO: 540416 - DNA, 19 bp, Mus musculus
  siRNA target sequence for Sh3gl2 (NM_019535.2,685-703).
gaaattcgatgagtctaaa

SEQ ID NO: 540417 - DNA, 19 bp, Mus musculus
  siRNA target sequence for Sh3gl2 (NM_019535.2,710-728).
gccgagtcgagcatgttca

SEQ ID NO: 540418 - DNA, 19 bp, Mus musculus
  siRNA target sequence for Sh3gl2 (NM_019535.2,897-915).
cacggatgagcctagagtt

SEQ ID NO: 540419 - DNA, 19 bp, Mus musculus
  siRNA target sequence for Sh3gl2 (NM_019535.2,1002-1020).
gctgccgagctctgtatga

SEQ ID NO: 540420 - DNA, 19 bp, Mus musculus
  siRNA target sequence for Sh3gl2 (NM_019535.2,1006-1024).
ccgagctctgtatgacttt

SEQ ID NO: 540421 - DNA, 19 bp, Mus musculus
  siRNA target sequence for Sh3gl2 (NM_019535.2,1072-1090).
cacactcactaatcagatt

SEQ ID NO: 540422 - DNA, 19 bp, Mus musculus
  siRNA target sequence for Sh3gl2 (NM_019535.2,1132-1150).
ctttttccccatcaactat

SEQ ID NO: 540423 - DNA, 19 bp, Mus musculus
  siRNA target sequence for Sh3gl3 (NM_017400.1,201-219).
ccagctgtttagtgaaaaa

SEQ ID NO: 540424 - DNA, 19 bp, Mus musculus
  siRNA target sequence for Sh3gl3 (NM_017400.1,236-254).
gaacgaagctagatgaaga

SEQ ID NO: 540425 - DNA, 19 bp, Mus musculus
  siRNA target sequence for Sh3gl3 (NM_017400.1,491-509).
gcaactcgttggtagatgt

SEQ ID NO: 540426 - DNA, 19 bp, Mus musculus
  siRNA target sequence for Sh3gl3 (NM_017400.1,511-529).
ggtgaggccctgaaactca

SEQ ID NO: 540427 - DNA, 19 bp, Mus musculus
  siRNA target sequence for Sh3gl3 (NM_017400.1,512-530).
gtgaggccctgaaactcat

SEQ ID NO: 540428 - DNA, 19 bp, Mus musculus
  siRNA target sequence for Sh3gl3 (NM_017400.1,653-671).
gcctggattatgattataa

SEQ ID NO: 540429 - DNA, 19 bp, Mus musculus
  siRNA target sequence for Sh3gl3 (NM_017400.1,655-673).
ctggattatgattataaaa

SEQ ID NO: 540430 - DNA, 19 bp, Mus musculus
  siRNA target sequence for Sh3gl3 (NM_017400.1,747-765).
ggccgaaaggagcatgttt

SEQ ID NO: 540431 - DNA, 19 bp, Mus musculus
  siRNA target sequence for Sh3gl3 (NM_017400.1,748-766).
gccgaaaggagcatgttta

SEQ ID NO: 540432 - DNA, 19 bp, Mus musculus
  siRNA target sequence for Sh3gl3 (NM_017400.1,749-767).
ccgaaaggagcatgtttaa

SEQ ID NO: 540433 - DNA, 19 bp, Mus musculus
  siRNA target sequence for Sh3gl3 (NM_017400.1,750-768).
cgaaaggagcatgtttaat

SEQ ID NO: 540434 - DNA, 19 bp, Mus musculus
  siRNA target sequence for Sh3gl3 (NM_017400.1,814-832).
gtagaggcggcattagact

SEQ ID NO: 540435 - DNA, 19 bp, Mus musculus
  siRNA target sequence for Sh3gl3 (NM_017400.1,820-838).
gcggcattagactatcaca

SEQ ID NO: 540436 - DNA, 19 bp, Mus musculus
  siRNA target sequence for Sh3gl3 (NM_017400.1,876-894).
gctggagttgcgaatatct

SEQ ID NO: 540437 - DNA, 19 bp, Mus musculus
  siRNA target sequence for Sh3gl3 (NM_017400.1,879-897).
ggagttgcgaatatctctt

SEQ ID NO: 540438 - DNA, 19 bp, Mus musculus
  siRNA target sequence for Sh3gl3 (NM_017400.1,907-925).
gtccccaagcgagaattca

SEQ ID NO: 540439 - DNA, 19 bp, Mus musculus
  siRNA target sequence for Sh3gl3 (NM_017400.1,967-985).
gtcggacccagctcttcat

SEQ ID NO: 540440 - DNA, 19 bp, Mus musculus
  siRNA target sequence for Sh3gl3 (NM_017400.1,1023-1041).
ctgctgtcgtggtctctat

SEQ ID NO: 540441 - DNA, 19 bp, Mus musculus
  siRNA target sequence for Sh3gl3 (NM_017400.1,1025-1043).
gctgtcgtggtctctatga

SEQ ID NO: 540442 - DNA, 19 bp, Mus musculus
  siRNA target sequence for Sh3gl3 (NM_017400.1,1028-1046).
gtcgtggtctctatgactt

SEQ ID NO: 540443 - DNA, 19 bp, Mus musculus
  siRNA target sequence for Sh3gl3 (NM_017400.1,1089-1107).
catcattacattaaccaat

SEQ ID NO: 540444 - DNA, 19 bp, Mus musculus
  siRNA target sequence for Sh3gl3 (NM_017400.1,1097-1115).
cattaaccaatcagataga

SEQ ID NO: 540445 - DNA, 19 bp, Mus musculus
  siRNA target sequence for Sh3gl3 (NM_017400.1,1152-1170).
cggcttcttccccattaat

SEQ ID NO: 540446 - DNA, 19 bp, Mus musculus
  siRNA target sequence for Sh3gl3 (NM_017400.1,1153-1171).
ggcttcttccccattaatt

SEQ ID NO: 540447 - DNA, 19 bp, Mus musculus
  siRNA target sequence for Sh3gl3 (NM_017400.1,1154-1172).
gcttcttccccattaatta

SEQ ID NO: 540448 - DNA, 19 bp, Mus musculus
  siRNA target sequence for Shc1 (NM_011368.3,190-208).
gacacgggagctttgtcaa

SEQ ID NO: 540449 - DNA, 19 bp, Mus musculus
  siRNA target sequence for Shc1 (NM_011368.3,192-210).
cacgggagctttgtcaata

SEQ ID NO: 540450 - DNA, 19 bp, Mus musculus
  siRNA target sequence for Shc1 (NM_011368.3,286-304).
gctgtgtggaggtcttaca

SEQ ID NO: 540451 - DNA, 19 bp, Mus musculus
  siRNA target sequence for Shc1 (NM_011368.3,445-463).
ggaggagtaacctgaagtt

SEQ ID NO: 540452 - DNA, 19 bp, Mus musculus
  siRNA target sequence for Shc1 (NM_011368.3,516-534).
gcagccgactgcaaacaga

SEQ ID NO: 540453 - DNA, 19 bp, Mus musculus
  siRNA target sequence for Shc1 (NM_011368.3,517-535).
cagccgactgcaaacagat

SEQ ID NO: 540454 - DNA, 19 bp, Mus musculus
  siRNA target sequence for Shc1 (NM_011368.3,521-539).
cgactgcaaacagatcatt

SEQ ID NO: 540455 - DNA, 19 bp, Mus musculus
  siRNA target sequence for Shc1 (NM_011368.3,546-564).
catcacatgcaatctatct

SEQ ID NO: 540456 - DNA, 19 bp, Mus musculus
  siRNA target sequence for Shc1 (NM_011368.3,586-604).
cggacacagctgagtatgt

SEQ ID NO: 540457 - DNA, 19 bp, Mus musculus
  siRNA target sequence for Shc3 (NM_009167.1,133-151).
gaagttctgcgctcaatga

SEQ ID NO: 540458 - DNA, 19 bp, Mus musculus
  siRNA target sequence for Shc3 (NM_009167.1,388-406).
catatgcggtctatctctt

SEQ ID NO: 540459 - DNA, 19 bp, Mus musculus
  siRNA target sequence for Shc3 (NM_009167.1,425-443).
cggacacaacggactatgt

SEQ ID NO: 540460 - DNA, 19 bp, Mus musculus
  siRNA target sequence for Shc3 (NM_009167.1,426-444).
ggacacaacggactatgtt

SEQ ID NO: 540461 - DNA, 19 bp, Mus musculus
  siRNA target sequence for Shc3 (NM_009167.1,453-471).
cgctaaggaccctgtcaat

SEQ ID NO: 540462 - DNA, 19 bp, Mus musculus
  siRNA target sequence for Shc3 (NM_009167.1,506-524).
ggctagcccaagatgtcat

SEQ ID NO: 540463 - DNA, 19 bp, Mus musculus
  siRNA target sequence for Shc3 (NM_009167.1,507-525).
gctagcccaagatgtcatt

SEQ ID NO: 540464 - DNA, 19 bp, Mus musculus
  siRNA target sequence for Shc3 (NM_009167.1,650-668).
gccctgatcacccatacta

SEQ ID NO: 540465 - DNA, 19 bp, Mus musculus
  siRNA target sequence for Shc3 (NM_009167.1,653-671).
ctgatcacccatactacaa

SEQ ID NO: 540466 - DNA, 19 bp, Mus musculus
  siRNA target sequence for Shc3 (NM_009167.1,763-781).
ggaaaagagcaaacttatt

SEQ ID NO: 540467 - DNA, 19 bp, Mus musculus
  siRNA target sequence for Shc3 (NM_009167.1,791-809).
gacacttaggagatacatt

SEQ ID NO: 540468 - DNA, 19 bp, Mus musculus
  siRNA target sequence for Shc3 (NM_009167.1,795-813).
cttaggagatacatttggt

SEQ ID NO: 540469 - DNA, 19 bp, Mus musculus
  siRNA target sequence for Shkbp1 (NM_138676.1,134-152).
gggggcaagcggttcagta

SEQ ID NO: 540470 - DNA, 19 bp, Mus musculus
  siRNA target sequence for Shkbp1 (NM_138676.1,213-231).
gcatctcaaccctgaaaga

SEQ ID NO: 540471 - DNA, 19 bp, Mus musculus
  siRNA target sequence for Shkbp1 (NM_138676.1,233-251).
gagaccggagctatcttca

SEQ ID NO: 540472 - DNA, 19 bp, Mus musculus
  siRNA target sequence for Shkbp1 (NM_138676.1,269-287).
gtctttgcccccatcctta

SEQ ID NO: 540473 - DNA, 19 bp, Mus musculus
  siRNA target sequence for Shkbp1 (NM_138676.1,295-313).
gcggaccaaagagttagat

SEQ ID NO: 540474 - DNA, 19 bp, Mus musculus
  siRNA target sequence for Shkbp1 (NM_138676.1,553-571).
ccccaacttgggtaatgca

SEQ ID NO: 540475 - DNA, 19 bp, Mus musculus
  siRNA target sequence for Shkbp1 (NM_138676.1,577-595).
gctgggccgaatgttagat

SEQ ID NO: 540476 - DNA, 19 bp, Mus musculus
  siRNA target sequence for Shkbp1 (NM_138676.1,726-744).
cgggctggcagcttgcatt

SEQ ID NO: 540477 - DNA, 19 bp, Mus musculus
  siRNA target sequence for Shkbp1 (NM_138676.1,810-828).
ctccgggtgagcatgacaa

SEQ ID NO: 540478 - DNA, 19 bp, Mus musculus
  siRNA target sequence for Shkbp1 (NM_138676.1,1346-1364).
cgcagcccggtcactaaga

SEQ ID NO: 540479 - DNA, 19 bp, Mus musculus
  siRNA target sequence for Shkbp1 (NM_138676.1,1347-1365).
gcagcccggtcactaagat

SEQ ID NO: 540480 - DNA, 19 bp, Mus musculus
  siRNA target sequence for Shkbp1 (NM_138676.1,1350-1368).
gcccggtcactaagatcat

SEQ ID NO: 540481 - DNA, 19 bp, Mus musculus
  siRNA target sequence for Shkbp1 (NM_138676.1,1436-1454).
cgctttcgaggcatgatct

SEQ ID NO: 540482 - DNA, 19 bp, Mus musculus
  siRNA target sequence for Shkbp1 (NM_138676.1,1475-1493).
ccgctggcatccttcaaga

SEQ ID NO: 540483 - DNA, 19 bp, Mus musculus
  siRNA target sequence for Shkbp1 (NM_138676.1,1476-1494).
cgctggcatccttcaagat

SEQ ID NO: 540484 - DNA, 19 bp, Mus musculus
  siRNA target sequence for Shkbp1 (NM_138676.1,1495-1513).
cctggcgctggaatctgtt

SEQ ID NO: 540485 - DNA, 19 bp, Mus musculus
  siRNA target sequence for Shkbp1 (NM_138676.1,1498-1516).
ggcgctggaatctgttgat

SEQ ID NO: 540486 - DNA, 19 bp, Mus musculus
  siRNA target sequence for Shkbp1 (NM_138676.1,2132-2150).
ctgacagctctcaagaaaa

SEQ ID NO: 540487 - DNA, 19 bp, Mus musculus
  siRNA target sequence for Shkbp1 (NM_138676.1,2143-2161).
caagaaaactcttaacgaa

SEQ ID NO: 540488 - DNA, 19 bp, Mus musculus
  siRNA target sequence for Ski (NM_011385.1,313-331).
ggggagaccatctcttgtt

SEQ ID NO: 540489 - DNA, 19 bp, Mus musculus
  siRNA target sequence for Ski (NM_011385.1,761-779).
cgcacaagttcgttgtaca

SEQ ID NO: 540490 - DNA, 19 bp, Mus musculus
  siRNA target sequence for Ski (NM_011385.1,1069-1087).
gctggttcctccaataaga

SEQ ID NO: 540491 - DNA, 19 bp, Mus musculus
  siRNA target sequence for Ski (NM_011385.1,1256-1274).
caccaccaacccagcaaaa

SEQ ID NO: 540492 - DNA, 19 bp, Mus musculus
  siRNA target sequence for Ski (NM_011385.1,1315-1333).
gcaccagagcctcttacta

SEQ ID NO: 540493 - DNA, 19 bp, Mus musculus
  siRNA target sequence for Ski (NM_011385.1,1321-1339).
gagcctcttactacttgta

SEQ ID NO: 540494 - DNA, 19 bp, Mus musculus
  siRNA target sequence for Ski (NM_011385.1,1434-1452).
ggccgaggttgaagttgaa

SEQ ID NO: 540495 - DNA, 19 bp, Mus musculus
  siRNA target sequence for Ski (NM_011385.1,1486-1504).
ctgtcctctccgtccttta

SEQ ID NO: 540496 - DNA, 19 bp, Mus musculus
  siRNA target sequence for Ski (NM_011385.1,1692-1710).
caaaatgcgagttaagcaa

SEQ ID NO: 540497 - DNA, 19 bp, Mus musculus
  siRNA target sequence for Ski (NM_011385.1,1844-1862).
ggctccgagctgaaaacga

SEQ ID NO: 540498 - DNA, 19 bp, Mus musculus
  siRNA target sequence for Ski (NM_011385.1,1963-1981).
cgcctgcgtgccaagtact

SEQ ID NO: 540499 - DNA, 19 bp, Mus musculus
  siRNA target sequence for Slc3a2 (NM_008577.2,491-509).
cgaccttcaggcctttgta

SEQ ID NO: 540500 - DNA, 19 bp, Mus musculus
  siRNA target sequence for Slc3a2 (NM_008577.2,585-603).
gtgttaggcccaattcaca

SEQ ID NO: 540501 - DNA, 19 bp, Mus musculus
  siRNA target sequence for Slc3a2 (NM_008577.2,631-649).
ccgacctgaaacagattaa

SEQ ID NO: 540502 - DNA, 19 bp, Mus musculus
  siRNA target sequence for Slc3a2 (NM_008577.2,632-650).
cgacctgaaacagattaat

SEQ ID NO: 540503 - DNA, 19 bp, Mus musculus
  siRNA target sequence for Slc3a2 (NM_008577.2,661-679).
gctcccaggaagattttaa

SEQ ID NO: 540504 - DNA, 19 bp, Mus musculus
  siRNA target sequence for Slc3a2 (NM_008577.2,664-682).
cccaggaagattttaaaga

SEQ ID NO: 540505 - DNA, 19 bp, Mus musculus
  siRNA target sequence for Slc3a2 (NM_008577.2,902-920).
gaatatcaccaagaactta

SEQ ID NO: 540506 - DNA, 19 bp, Mus musculus
  siRNA target sequence for Slc3a2 (NM_008577.2,960-978).
gacctgcagcaaattgtca

SEQ ID NO: 540507 - DNA, 19 bp, Mus musculus
  siRNA target sequence for Slc3a2 (NM_008577.2,1013-1031).
cagctcctacctgtcaaat

SEQ ID NO: 540508 - DNA, 19 bp, Mus musculus
  siRNA target sequence for Slc3a2 (NM_008577.2,1025-1043).
gtcaaattccactttcact

SEQ ID NO: 540509 - DNA, 19 bp, Mus musculus
  siRNA target sequence for Slc3a2 (NM_008577.2,1040-1058).
cactggggagcgtactgaa

SEQ ID NO: 540510 - DNA, 19 bp, Mus musculus
  siRNA target sequence for Slc3a2 (NM_008577.2,1062-1080).
ctagtcactaggtttttga

SEQ ID NO: 540511 - DNA, 19 bp, Mus musculus
  siRNA target sequence for Slc3a2 (NM_008577.2,1126-1144).
gactcctcgcagactttat

SEQ ID NO: 540512 - DNA, 19 bp, Mus musculus
  siRNA target sequence for Slc3a2 (NM_008577.2,1190-1208).
gccagggactcctgttttt

SEQ ID NO: 540513 - DNA, 19 bp, Mus musculus
  siRNA target sequence for Slc3a2 (NM_008577.2,1194-1212).
gggactcctgtttttagct

SEQ ID NO: 540514 - DNA, 19 bp, Mus musculus
  siRNA target sequence for Slc3a2 (NM_008577.2,1195-1213).
ggactcctgtttttagcta

SEQ ID NO: 540515 - DNA, 19 bp, Mus musculus
  siRNA target sequence for Slc3a2 (NM_008577.2,1265-1283).
cccactcatgccatggaat

SEQ ID NO: 540516 - DNA, 19 bp, Mus musculus
  siRNA target sequence for Slc3a2 (NM_008577.2,1269-1287).
ctcatgccatggaatgagt

SEQ ID NO: 540517 - DNA, 19 bp, Mus musculus
  siRNA target sequence for Slc3a2 (NM_008577.2,1309-1327).
gacctgtaagcctcaacat

SEQ ID NO: 540518 - DNA, 19 bp, Mus musculus
  siRNA target sequence for Slc3a2 (NM_008577.2,1579-1597).
ccagcgctaaacttttgct

SEQ ID NO: 540519 - DNA, 19 bp, Mus musculus
  siRNA target sequence for Slc3a2 (NM_008577.2,1580-1598).
cagcgctaaacttttgctt

SEQ ID NO: 540520 - DNA, 19 bp, Mus musculus
  siRNA target sequence for Slc7a10 (NM_017394.2,83-101).
catggcaagccacatacaa

SEQ ID NO: 540521 - DNA, 19 bp, Mus musculus
  siRNA target sequence for Slc7a10 (NM_017394.2,179-197).
gcgggtggcactcaagaaa

SEQ ID NO: 540522 - DNA, 19 bp, Mus musculus
  siRNA target sequence for Slc7a10 (NM_017394.2,181-199).
gggtggcactcaagaaaga

SEQ ID NO: 540523 - DNA, 19 bp, Mus musculus
  siRNA target sequence for Slc7a10 (NM_017394.2,214-232).
gcgcttgcaccatcatcat

SEQ ID NO: 540524 - DNA, 19 bp, Mus musculus
  siRNA target sequence for Slc7a10 (NM_017394.2,396-414).
ggggactacgcctatgtca

SEQ ID NO: 540525 - DNA, 19 bp, Mus musculus
  siRNA target sequence for Slc7a10 (NM_017394.2,406-424).
cctatgtcactgagatctt

SEQ ID NO: 540526 - DNA, 19 bp, Mus musculus
  siRNA target sequence for Slc7a10 (NM_017394.2,457-475).
gtgctgtcctcatcatgta

SEQ ID NO: 540527 - DNA, 19 bp, Mus musculus
  siRNA target sequence for Slc7a10 (NM_017394.2,528-546).
cctgtctttcccaactgta

SEQ ID NO: 540528 - DNA, 19 bp, Mus musculus
  siRNA target sequence for Slc7a10 (NM_017394.2,631-649).
ccacgcgcatccaggttat

SEQ ID NO: 540529 - DNA, 19 bp, Mus musculus
  siRNA target sequence for Slc7a10 (NM_017394.2,634-652).
cgcgcatccaggttatctt

SEQ ID NO: 540530 - DNA, 19 bp, Mus musculus
  siRNA target sequence for Slc7a10 (NM_017394.2,636-654).
cgcatccaggttatcttca

SEQ ID NO: 540531 - DNA, 19 bp, Mus musculus
  siRNA target sequence for Slc7a10 (NM_017394.2,1090-1108).
cctcatccaggctatgctt

SEQ ID NO: 540532 - DNA, 19 bp, Mus musculus
  siRNA target sequence for Slc7a10 (NM_017394.2,1221-1239).
ctcgtgggtgacacataca

SEQ ID NO: 540533 - DNA, 19 bp, Mus musculus
  siRNA target sequence for Slc7a10 (NM_017394.2,1223-1241).
cgtgggtgacacatacaca

SEQ ID NO: 540534 - DNA, 19 bp, Mus musculus
  siRNA target sequence for Socs1 (NM_009896.1,354-372).
ggacgcctgcggcttctat

SEQ ID NO: 540535 - DNA, 19 bp, Mus musculus
  siRNA target sequence for Socs1 (NM_009896.1,355-373).
gacgcctgcggcttctatt

SEQ ID NO: 540536 - DNA, 19 bp, Mus musculus
  siRNA target sequence for Socs4 (NM_018821.2,722-740).
gaggagacgtgcatcaaga

SEQ ID NO: 540537 - DNA, 19 bp, Mus musculus
  siRNA target sequence for Socs4 (NM_018821.2,739-757).
gatggagatgcgagtgaaa

SEQ ID NO: 540538 - DNA, 19 bp, Mus musculus
  siRNA target sequence for Socs4 (NM_018821.2,913-931).
ggaacacgtgcctgtagta

SEQ ID NO: 540539 - DNA, 19 bp, Mus musculus
  siRNA target sequence for Socs4 (NM_018821.2,914-932).
gaacacgtgcctgtagtaa

SEQ ID NO: 540540 - DNA, 19 bp, Mus musculus
  siRNA target sequence for Socs4 (NM_018821.2,961-979).
gtacaccgtgcctttagat

SEQ ID NO: 540541 - DNA, 19 bp, Mus musculus
  siRNA target sequence for Socs4 (NM_018821.2,982-1000).
cgggatgtgccctcttgaa

SEQ ID NO: 540542 - DNA, 19 bp, Mus musculus
  siRNA target sequence for Socs4 (NM_018821.2,1138-1156).
ggattcatcagtgaacaat

SEQ ID NO: 540543 - DNA, 19 bp, Mus musculus
  siRNA target sequence for Socs4 (NM_018821.2,1235-1253).
ctacctccaatgcagaata

SEQ ID NO: 540544 - DNA, 19 bp, Mus musculus
  siRNA target sequence for Socs4 (NM_018821.2,1297-1315).
gcacatggccgaaagtgtt

SEQ ID NO: 540545 - DNA, 19 bp, Mus musculus
  siRNA target sequence for Socs4 (NM_018821.2,1311-1329).
gtgttcgctgtcatttgaa

SEQ ID NO: 540546 - DNA, 19 bp, Mus musculus
  siRNA target sequence for Socs4 (NM_018821.2,1317-1335).
gctgtcatttgaatttcga

SEQ ID NO: 540547 - DNA, 19 bp, Mus musculus
  siRNA target sequence for Socs4 (NM_018821.2,1348-1366).
gcctggggttgctagagtt

SEQ ID NO: 540548 - DNA, 19 bp, Mus musculus
  siRNA target sequence for Socs4 (NM_018821.2,1349-1367).
cctggggttgctagagttt

SEQ ID NO: 540549 - DNA, 19 bp, Mus musculus
  siRNA target sequence for Socs4 (NM_018821.2,1350-1368).
ctggggttgctagagttta

SEQ ID NO: 540550 - DNA, 19 bp, Mus musculus
  siRNA target sequence for Socs4 (NM_018821.2,1353-1371).
gggttgctagagtttatga

SEQ ID NO: 540551 - DNA, 19 bp, Mus musculus
  siRNA target sequence for Socs4 (NM_018821.2,1355-1373).
gttgctagagtttatgact

SEQ ID NO: 540552 - DNA, 19 bp, Mus musculus
  siRNA target sequence for Socs4 (NM_018821.2,1388-1406).
ggccccatggttgttacaa

SEQ ID NO: 540553 - DNA, 19 bp, Mus musculus
  siRNA target sequence for Socs4 (NM_018821.2,1433-1451).
gcaaaacaggggtggtatt

SEQ ID NO: 540554 - DNA, 19 bp, Mus musculus
  siRNA target sequence for Socs4 (NM_018821.2,1502-1520).
gatggttcttttcttgtaa

SEQ ID NO: 540555 - DNA, 19 bp, Mus musculus
  siRNA target sequence for Socs4 (NM_018821.2,1532-1550).
gatgaccgttaccttttaa

SEQ ID NO: 540556 - DNA, 19 bp, Mus musculus
  siRNA target sequence for Socs4 (NM_018821.2,1558-1576).
ctttcgttcccatggtaaa

SEQ ID NO: 540557 - DNA, 19 bp, Mus musculus
  siRNA target sequence for Socs4 (NM_018821.2,1587-1605).
ctagaattgagcactcaaa

SEQ ID NO: 540558 - DNA, 19 bp, Mus musculus
  siRNA target sequence for Socs4 (NM_018821.2,1598-1616).
cactcaaatggtagattca

SEQ ID NO: 540559 - DNA, 19 bp, Mus musculus
  siRNA target sequence for Socs4 (NM_018821.2,1634-1652).
gatgtggaagggcatacat

SEQ ID NO: 540560 - DNA, 19 bp, Mus musculus
  siRNA target sequence for Socs4 (NM_018821.2,1637-1655).
gtggaagggcatacatcta

SEQ ID NO: 540561 - DNA, 19 bp, Mus musculus
  siRNA target sequence for Socs4 (NM_018821.2,1639-1657).
ggaagggcatacatctata

SEQ ID NO: 540562 - DNA, 19 bp, Mus musculus
  siRNA target sequence for Socs4 (NM_018821.2,1644-1662).
ggcatacatctatagttga

SEQ ID NO: 540563 - DNA, 19 bp, Mus musculus
  siRNA target sequence for Socs4 (NM_018821.2,1650-1668).
catctatagttgacttaat

SEQ ID NO: 540564 - DNA, 19 bp, Mus musculus
  siRNA target sequence for Socs4 (NM_018821.2,1653-1671).
ctatagttgacttaatcga

SEQ ID NO: 540565 - DNA, 19 bp, Mus musculus
  siRNA target sequence for Socs4 (NM_018821.2,1661-1679).
gacttaatcgagcattcaa

SEQ ID NO: 540566 - DNA, 19 bp, Mus musculus
  siRNA target sequence for Socs4 (NM_018821.2,1798-1816).
gtacctgtgccgctttgtt

SEQ ID NO: 540567 - DNA, 19 bp, Mus musculus
  siRNA target sequence for Socs4 (NM_018821.2,1819-1837).
ccgtcagtacaccagaata

SEQ ID NO: 540568 - DNA, 19 bp, Mus musculus
  siRNA target sequence for Socs4 (NM_018821.2,1821-1839).
gtcagtacaccagaataga

SEQ ID NO: 540569 - DNA, 19 bp, Mus musculus
  siRNA target sequence for Socs4 (NM_018821.2,1823-1841).
cagtacaccagaatagact

SEQ ID NO: 540570 - DNA, 19 bp, Mus musculus
  siRNA target sequence for Socs4 (NM_018821.2,1825-1843).
gtacaccagaatagactta

SEQ ID NO: 540571 - DNA, 19 bp, Mus musculus
  siRNA target sequence for Socs4 (NM_018821.2,1828-1846).
caccagaatagacttaatt

SEQ ID NO: 540572 - DNA, 19 bp, Mus musculus
  siRNA target sequence for Socs4 (NM_018821.2,1830-1848).
ccagaatagacttaattca

SEQ ID NO: 540573 - DNA, 19 bp, Mus musculus
  siRNA target sequence for Socs4 (NM_018821.2,1853-1871).
ctgcctttgccaaacaaaa

SEQ ID NO: 540574 - DNA, 19 bp, Mus musculus
  siRNA target sequence for Socs4 (NM_018821.2,1862-1880).
ccaaacaaaatgaaggatt

SEQ ID NO: 540575 - DNA, 19 bp, Mus musculus
  siRNA target sequence for Socs5 (NM_019654.2,455-473).
gggaaaatgtggaacaact

SEQ ID NO: 540576 - DNA, 19 bp, Mus musculus
  siRNA target sequence for Socs5 (NM_019654.2,547-565).
cagatgtccgtctgtcaaa

SEQ ID NO: 540577 - DNA, 19 bp, Mus musculus
  siRNA target sequence for Socs5 (NM_019654.2,549-567).
gatgtccgtctgtcaaaga

SEQ ID NO: 540578 - DNA, 19 bp, Mus musculus
  siRNA target sequence for Socs5 (NM_019654.2,701-719).
cctcaagtggttgaaatca

SEQ ID NO: 540579 - DNA, 19 bp, Mus musculus
  siRNA target sequence for Socs5 (NM_019654.2,846-864).
cattggataccgagaaaaa

SEQ ID NO: 540580 - DNA, 19 bp, Mus musculus
  siRNA target sequence for Socs5 (NM_019654.2,850-868).
ggataccgagaaaaagttt

SEQ ID NO: 540581 - DNA, 19 bp, Mus musculus
  siRNA target sequence for Socs5 (NM_019654.2,929-947).
gacatggacagcgtttcta

SEQ ID NO: 540582 - DNA, 19 bp, Mus musculus
  siRNA target sequence for Socs5 (NM_019654.2,988-1006).
ggacacggtgggtttgtgt

SEQ ID NO: 540583 - DNA, 19 bp, Mus musculus
  siRNA target sequence for Socs5 (NM_019654.2,989-1007).
gacacggtgggtttgtgtt

SEQ ID NO: 540584 - DNA, 19 bp, Mus musculus
  siRNA target sequence for Socs5 (NM_019654.2,1110-1128).
gctcggatttagcacaaaa

SEQ ID NO: 540585 - DNA, 19 bp, Mus musculus
  siRNA target sequence for Socs5 (NM_019654.2,1124-1142).
caaaagtggcatttgatta

SEQ ID NO: 540586 - DNA, 19 bp, Mus musculus
  siRNA target sequence for Socs5 (NM_019654.2,1160-1178).
gtgagcccacactcaacat

SEQ ID NO: 540587 - DNA, 19 bp, Mus musculus
  siRNA target sequence for Socs5 (NM_019654.2,1162-1180).
gagcccacactcaacattt

SEQ ID NO: 540588 - DNA, 19 bp, Mus musculus
  siRNA target sequence for Socs5 (NM_019654.2,1164-1182).
gcccacactcaacattttt

SEQ ID NO: 540589 - DNA, 19 bp, Mus musculus
  siRNA target sequence for Socs5 (NM_019654.2,1165-1183).
cccacactcaacatttttt

SEQ ID NO: 540590 - DNA, 19 bp, Mus musculus
  siRNA target sequence for Socs5 (NM_019654.2,1173-1191).
caacattttttgatacatt

SEQ ID NO: 540591 - DNA, 19 bp, Mus musculus
  siRNA target sequence for Socs5 (NM_019654.2,1316-1334).
caggtcaacccattgtata

SEQ ID NO: 540592 - DNA, 19 bp, Mus musculus
  siRNA target sequence for Socs5 (NM_019654.2,1504-1522).
gggagcttggaaagttcat

SEQ ID NO: 540593 - DNA, 19 bp, Mus musculus
  siRNA target sequence for Socs5 (NM_019654.2,1505-1523).
ggagcttggaaagttcata

SEQ ID NO: 540594 - DNA, 19 bp, Mus musculus
  siRNA target sequence for Socs5 (NM_019654.2,1517-1535).
gttcatacgcagatcgatt

SEQ ID NO: 540595 - DNA, 19 bp, Mus musculus
  siRNA target sequence for Socs5 (NM_019654.2,1520-1538).
catacgcagatcgattaca

SEQ ID NO: 540596 - DNA, 19 bp, Mus musculus
  siRNA target sequence for Socs5 (NM_019654.2,1524-1542).
cgcagatcgattacataca

SEQ ID NO: 540597 - DNA, 19 bp, Mus musculus
  siRNA target sequence for Socs5 (NM_019654.2,1526-1544).
cagatcgattacatacact

SEQ ID NO: 540598 - DNA, 19 bp, Mus musculus
  siRNA target sequence for Socs5 (NM_019654.2,1545-1563).
gcctcgtgccagatttgct

SEQ ID NO: 540599 - DNA, 19 bp, Mus musculus
  siRNA target sequence for Socs5 (NM_019654.2,1546-1564).
cctcgtgccagatttgctt

SEQ ID NO: 540600 - DNA, 19 bp, Mus musculus
  siRNA target sequence for Socs5 (NM_019654.2,1769-1787).
gacccctgcgtgtttcact

SEQ ID NO: 540601 - DNA, 19 bp, Mus musculus
  siRNA target sequence for Socs5 (NM_019654.2,1800-1818).
cggggcttctcgaacacta

SEQ ID NO: 540602 - DNA, 19 bp, Mus musculus
  siRNA target sequence for Socs5 (NM_019654.2,1801-1819).
ggggcttctcgaacactat

SEQ ID NO: 540603 - DNA, 19 bp, Mus musculus
  siRNA target sequence for Socs5 (NM_019654.2,1804-1822).
gcttctcgaacactataaa

SEQ ID NO: 540604 - DNA, 19 bp, Mus musculus
  siRNA target sequence for Socs5 (NM_019654.2,1847-1865).
gaaccgttgctaacgatat

SEQ ID NO: 540605 - DNA, 19 bp, Mus musculus
  siRNA target sequence for Socs5 (NM_019654.2,1851-1869).
cgttgctaacgatatcact

SEQ ID NO: 540606 - DNA, 19 bp, Mus musculus
  siRNA target sequence for Socs5 (NM_019654.2,1855-1873).
gctaacgatatcactgaat

SEQ ID NO: 540607 - DNA, 19 bp, Mus musculus
  siRNA target sequence for Socs5 (NM_019654.2,1856-1874).
ctaacgatatcactgaata

SEQ ID NO: 540608 - DNA, 19 bp, Mus musculus
  siRNA target sequence for Socs5 (NM_019654.2,1883-1901).
cctttcagcctgcagtata

SEQ ID NO: 540609 - DNA, 19 bp, Mus musculus
  siRNA target sequence for Socs5 (NM_019654.2,1884-1902).
ctttcagcctgcagtatat

SEQ ID NO: 540610 - DNA, 19 bp, Mus musculus
  siRNA target sequence for Socs5 (NM_019654.2,1921-1939).
cagatgcactacgtatgat

SEQ ID NO: 540611 - DNA, 19 bp, Mus musculus
  siRNA target sequence for Socs5 (NM_019654.2,1954-1972).
cccgctaccgtcgatgtta

SEQ ID NO: 540612 - DNA, 19 bp, Mus musculus
  siRNA target sequence for Socs5 (NM_019654.2,1956-1974).
cgctaccgtcgatgttaca

SEQ ID NO: 540613 - DNA, 19 bp, Mus musculus
  siRNA target sequence for Socs5 (NM_019654.2,1962-1980).
cgtcgatgttacaggattt

SEQ ID NO: 540614 - DNA, 19 bp, Mus musculus
  siRNA target sequence for Spop (NM_025287.1,178-196).
ctccacctccggcagaaat

SEQ ID NO: 540615 - DNA, 19 bp, Mus musculus
  siRNA target sequence for Spop (NM_025287.1,232-250).
cacagatcaaggtagtgaa

SEQ ID NO: 540616 - DNA, 19 bp, Mus musculus
  siRNA target sequence for Spop (NM_025287.1,263-281).
gtggaccatcaataacttt

SEQ ID NO: 540617 - DNA, 19 bp, Mus musculus
  siRNA target sequence for Spop (NM_025287.1,266-284).
gaccatcaataactttagt

SEQ ID NO: 540618 - DNA, 19 bp, Mus musculus
  siRNA target sequence for Spop (NM_025287.1,303-321).
ggtgaagtcataaaaagtt

SEQ ID NO: 540619 - DNA, 19 bp, Mus musculus
  siRNA target sequence for Spop (NM_025287.1,331-349).
catcaggagccaatgataa

SEQ ID NO: 540620 - DNA, 19 bp, Mus musculus
  siRNA target sequence for Spop (NM_025287.1,334-352).
caggagccaatgataaact

SEQ ID NO: 540621 - DNA, 19 bp, Mus musculus
  siRNA target sequence for Spop (NM_025287.1,336-354).
ggagccaatgataaactga

SEQ ID NO: 540622 - DNA, 19 bp, Mus musculus
  siRNA target sequence for Spop (NM_025287.1,374-392).
cccgaaagggctagatgaa

SEQ ID NO: 540623 - DNA, 19 bp, Mus musculus
  siRNA target sequence for Spop (NM_025287.1,428-446).
ggtcagctgtccaaagagt

SEQ ID NO: 540624 - DNA, 19 bp, Mus musculus
  siRNA target sequence for Spop (NM_025287.1,434-452).
ctgtccaaagagtgaagtt

SEQ ID NO: 540625 - DNA, 19 bp, Mus musculus
  siRNA target sequence for Spop (NM_025287.1,445-463).
gtgaagttcgggcaaagtt

SEQ ID NO: 540626 - DNA, 19 bp, Mus musculus
  siRNA target sequence for Spop (NM_025287.1,447-465).
gaagttcgggcaaagttca

SEQ ID NO: 540627 - DNA, 19 bp, Mus musculus
  siRNA target sequence for Spop (NM_025287.1,514-532).
gtcagcgagcttataggtt

SEQ ID NO: 540628 - DNA, 19 bp, Mus musculus
  siRNA target sequence for Spop (NM_025287.1,648-666).
gtacaagactctgtcaata

SEQ ID NO: 540629 - DNA, 19 bp, Mus musculus
  siRNA target sequence for Spop (NM_025287.1,670-688).
ctgggcagaatactatgaa

SEQ ID NO: 540630 - DNA, 19 bp, Mus musculus
  siRNA target sequence for Spop (NM_025287.1,672-690).
gggcagaatactatgaaca

SEQ ID NO: 540631 - DNA, 19 bp, Mus musculus
  siRNA target sequence for Spop (NM_025287.1,682-700).
ctatgaacatggtaaaggt

SEQ ID NO: 540632 - DNA, 19 bp, Mus musculus
  siRNA target sequence for Spop (NM_025287.1,709-727).
gccggttggcagatgagtt

SEQ ID NO: 540633 - DNA, 19 bp, Mus musculus
  siRNA target sequence for Spop (NM_025287.1,710-728).
ccggttggcagatgagtta

SEQ ID NO: 540634 - DNA, 19 bp, Mus musculus
  siRNA target sequence for Spop (NM_025287.1,1364-1382).
cgcaatctgtggagctttt

SEQ ID NO: 540635 - DNA, 19 bp, Mus musculus
  siRNA target sequence for Spop (NM_025287.1,1365-1383).
gcaatctgtggagctttta

SEQ ID NO: 540636 - DNA, 19 bp, Mus musculus
  siRNA target sequence for Spop (NM_025287.1,1405-1423).
gcacgatgacccagacttt

SEQ ID NO: 540637 - DNA, 19 bp, Mus musculus
  siRNA target sequence for Spopl1 (NM_148949.1,618-636).
gcctagtcaaaacataaca

SEQ ID NO: 540638 - DNA, 19 bp, Mus musculus
  siRNA target sequence for Spopl1 (NM_148949.1,822-840).
gacccccattaagattcat

SEQ ID NO: 540639 - DNA, 19 bp, Mus musculus
  siRNA target sequence for Spopl1 (NM_148949.1,824-842).
cccccattaagattcataa

SEQ ID NO: 540640 - DNA, 19 bp, Mus musculus
  siRNA target sequence for Spopl1 (NM_148949.1,827-845).
ccattaagattcataacct

SEQ ID NO: 540641 - DNA, 19 bp, Mus musculus
  siRNA target sequence for Spopl1 (NM_148949.1,1121-1139).
cagagtggaagtcgatatt

SEQ ID NO: 540642 - DNA, 19 bp, Mus musculus
  siRNA target sequence for Ssx2ip (NM_138744.1,356-374).
gtgctcttcagtaccttta

SEQ ID NO: 540643 - DNA, 19 bp, Mus musculus
  siRNA target sequence for Ssx2ip (NM_138744.1,467-485).
cgggtttccttccttgtat

SEQ ID NO: 540644 - DNA, 19 bp, Mus musculus
  siRNA target sequence for Ssx2ip (NM_138744.1,644-662).
gagctgctacgccaaactt

SEQ ID NO: 540645 - DNA, 19 bp, Mus musculus
  siRNA target sequence for Ssx2ip (NM_138744.1,646-664).
gctgctacgccaaacttaa

SEQ ID NO: 540646 - DNA, 19 bp, Mus musculus
  siRNA target sequence for Ssx2ip (NM_138744.1,649-667).
gctacgccaaacttaagga

SEQ ID NO: 540647 - DNA, 19 bp, Mus musculus
  siRNA target sequence for Ssx2ip (NM_138744.1,808-826).
gggctactcagtataatca

SEQ ID NO: 540648 - DNA, 19 bp, Mus musculus
  siRNA target sequence for Ssx2ip (NM_138744.1,809-827).
ggctactcagtataatcat

SEQ ID NO: 540649 - DNA, 19 bp, Mus musculus
  siRNA target sequence for Ssx2ip (NM_138744.1,814-832).
ctcagtataatcatgatgt

SEQ ID NO: 540650 - DNA, 19 bp, Mus musculus
  siRNA target sequence for Ssx2ip (NM_138744.1,836-854).
gaggaaggagcgtgaatat

SEQ ID NO: 540651 - DNA, 19 bp, Mus musculus
  siRNA target sequence for Ssx2ip (NM_138744.1,838-856).
ggaaggagcgtgaatataa

SEQ ID NO: 540652 - DNA, 19 bp, Mus musculus
  siRNA target sequence for Ssx2ip (NM_138744.1,839-857).
gaaggagcgtgaatataat

SEQ ID NO: 540653 - DNA, 19 bp, Mus musculus
  siRNA target sequence for Ssx2ip (NM_138744.1,845-863).
gcgtgaatataataagcta

SEQ ID NO: 540654 - DNA, 19 bp, Mus musculus
  siRNA target sequence for Ssx2ip (NM_138744.1,846-864).
cgtgaatataataagctaa

SEQ ID NO: 540655 - DNA, 19 bp, Mus musculus
  siRNA target sequence for Ssx2ip (NM_138744.1,873-891).
ctgcatcagctcgttatga

SEQ ID NO: 540656 - DNA, 19 bp, Mus musculus
  siRNA target sequence for Ssx2ip (NM_138744.1,876-894).
catcagctcgttatgaaca

SEQ ID NO: 540657 - DNA, 19 bp, Mus musculus
  siRNA target sequence for Ssx2ip (NM_138744.1,885-903).
gttatgaacaagaaggata

SEQ ID NO: 540658 - DNA, 19 bp, Mus musculus
  siRNA target sequence for Ssx2ip (NM_138744.1,959-977).
ctcatggaggactgacaaa

SEQ ID NO: 540659 - DNA, 19 bp, Mus musculus
  siRNA target sequence for Ssx2ip (NM_138744.1,1156-1174).
gcacaggcactgttgctat

SEQ ID NO: 540660 - DNA, 19 bp, Mus musculus
  siRNA target sequence for Ssx2ip (NM_138744.1,1171-1189).
ctatctccgatatagaaga

SEQ ID NO: 540661 - DNA, 19 bp, Mus musculus
  siRNA target sequence for Ssx2ip (NM_138744.1,1270-1288).
ggaaacagtggagaatttt

SEQ ID NO: 540662 - DNA, 19 bp, Mus musculus
  siRNA target sequence for Ssx2ip (NM_138744.1,1406-1424).
ggagattgagcggtgtaaa

SEQ ID NO: 540663 - DNA, 19 bp, Mus musculus
  siRNA target sequence for Ssx2ip (NM_138744.1,1495-1513).
cactgttgcgagactgtta

SEQ ID NO: 540664 - DNA, 19 bp, Mus musculus
  siRNA target sequence for Ssx2ip (NM_138744.1,1497-1515).
ctgttgcgagactgttact

SEQ ID NO: 540665 - DNA, 19 bp, Mus musculus
  siRNA target sequence for Ssx2ip (NM_138744.1,1664-1682).
ggtaaagcagcagttttta

SEQ ID NO: 540666 - DNA, 19 bp, Mus musculus
  siRNA target sequence for Ssx2ip (NM_138744.1,1665-1683).
gtaaagcagcagtttttaa

SEQ ID NO: 540667 - DNA, 19 bp, Mus musculus
  siRNA target sequence for Ssx2ip (NM_138744.1,1750-1768).
ctgatccagacaatcttat

SEQ ID NO: 540668 - DNA, 19 bp, Mus musculus
  siRNA target sequence for Ssx2ip (NM_138744.1,1828-1846).
gcacatcaaaactgactaa

SEQ ID NO: 540669 - DNA, 19 bp, Mus musculus
  siRNA target sequence for Ssx2ip (NM_138744.1,1829-1847).
cacatcaaaactgactaaa

SEQ ID NO: 540670 - DNA, 19 bp, Mus musculus
  siRNA target sequence for Ssx2ip (NM_138744.1,1854-1872).
cctgcctcaccttctactt

SEQ ID NO: 540671 - DNA, 19 bp, Mus musculus
  siRNA target sequence for Ssx2ip (NM_138744.1,1875-1893).
gactttcgccagacacatt

SEQ ID NO: 540672 - DNA, 19 bp, Mus musculus
  siRNA target sequence for Ssx2ip (NM_138744.1,1877-1895).
ctttcgccagacacattca

SEQ ID NO: 540673 - DNA, 19 bp, Mus musculus
  siRNA target sequence for Ssx2ip (NM_138744.1,2063-2081).
cggggaccgagatgactta

SEQ ID NO: 540674 - DNA, 19 bp, Mus musculus
  siRNA target sequence for Ssx2ip (NM_138744.1,2067-2085).
gaccgagatgacttacctt

SEQ ID NO: 540675 - DNA, 19 bp, Mus musculus
  siRNA target sequence for Stim1 (NM_009287.2,792-810).
gccgtccgaaacatccata

SEQ ID NO: 540676 - DNA, 19 bp, Mus musculus
  siRNA target sequence for Stim1 (NM_009287.2,793-811).
ccgtccgaaacatccataa

SEQ ID NO: 540677 - DNA, 19 bp, Mus musculus
  siRNA target sequence for Stim1 (NM_009287.2,867-885).
ctaagggaagacctcaatt

SEQ ID NO: 540678 - DNA, 19 bp, Mus musculus
  siRNA target sequence for Stim1 (NM_009287.2,871-889).
gggaagacctcaattacca

SEQ ID NO: 540679 - DNA, 19 bp, Mus musculus
  siRNA target sequence for Stim1 (NM_009287.2,872-890).
ggaagacctcaattaccat

SEQ ID NO: 540680 - DNA, 19 bp, Mus musculus
  siRNA target sequence for Stim1 (NM_009287.2,891-909).
gacccaacagtgaaacata

SEQ ID NO: 540681 - DNA, 19 bp, Mus musculus
  siRNA target sequence for Stim1 (NM_009287.2,918-936).
catggtgaggataagctta

SEQ ID NO: 540682 - DNA, 19 bp, Mus musculus
  siRNA target sequence for Stim1 (NM_009287.2,921-939).
ggtgaggataagcttatca

SEQ ID NO: 540683 - DNA, 19 bp, Mus musculus
  siRNA target sequence for Stim1 (NM_009287.2,1239-1257).
ctggtggtgtctatcgtta

SEQ ID NO: 540684 - DNA, 19 bp, Mus musculus
  siRNA target sequence for Stim1 (NM_009287.2,1241-1259).
ggtggtgtctatcgttatt

SEQ ID NO: 540685 - DNA, 19 bp, Mus musculus
  siRNA target sequence for Stim1 (NM_009287.2,1244-1262).
ggtgtctatcgttattggt

SEQ ID NO: 540686 - DNA, 19 bp, Mus musculus
  siRNA target sequence for Stim1 (NM_009287.2,1270-1288).
gctgctggtttgcctatat

SEQ ID NO: 540687 - DNA, 19 bp, Mus musculus
  siRNA target sequence for Stim1 (NM_009287.2,1273-1291).
gctggtttgcctatatcca

SEQ ID NO: 540688 - DNA, 19 bp, Mus musculus
  siRNA target sequence for Stim1 (NM_009287.2,1504-1522).
gggagggtactgagaatga

SEQ ID NO: 540689 - DNA, 19 bp, Mus musculus
  siRNA target sequence for Stim1 (NM_009287.2,1526-1544).
gagccgtcaaaaatatgct

SEQ ID NO: 540690 - DNA, 19 bp, Mus musculus
  siRNA target sequence for Stim1 (NM_009287.2,1668-1686).
gtgcagtactacaacatca

SEQ ID NO: 540691 - DNA, 19 bp, Mus musculus
  siRNA target sequence for Stim1 (NM_009287.2,1727-1745).
gggggctgagaaaataaaa

SEQ ID NO: 540692 - DNA, 19 bp, Mus musculus
  siRNA target sequence for Stim1 (NM_009287.2,1748-1766).
gaagagaaacacgcttttt

SEQ ID NO: 540693 - DNA, 19 bp, Mus musculus
  siRNA target sequence for Stim1 (NM_009287.2,1799-1817).
ggatgatgtggatcataaa

SEQ ID NO: 540694 - DNA, 19 bp, Mus musculus
  siRNA target sequence for Stim1 (NM_009287.2,2014-2032).
ctgacgatgtggatgacat

SEQ ID NO: 540695 - DNA, 19 bp, Mus musculus
  siRNA target sequence for Stim1 (NM_009287.2,2237-2255).
caatgccatgccttccaat

SEQ ID NO: 540696 - DNA, 19 bp, Mus musculus
  siRNA target sequence for Stim1 (NM_009287.2,2325-2343).
ctggccaagaagacattta

SEQ ID NO: 540697 - DNA, 19 bp, Mus musculus
  siRNA target sequence for Stim1 (NM_009287.2,2410-2428).
gtggctccccacttttgga

SEQ ID NO: 540698 - DNA, 19 bp, Mus musculus
  siRNA target sequence for Stim1 (NM_009287.2,2426-2444).
ggattcttcccattctctt

SEQ ID NO: 540699 - DNA, 19 bp, Mus musculus
  siRNA target sequence for Stim1 (NM_009287.2,2427-2445).
gattcttcccattctctta

SEQ ID NO: 540700 - DNA, 19 bp, Mus musculus
  siRNA target sequence for Stim1 (NM_009287.2,2501-2519).
gcagggtagccgaaacaca

SEQ ID NO: 540701 - DNA, 19 bp, Mus musculus
  siRNA target sequence for Stim1 (NM_009287.2,2548-2566).
caatggctgaggaggataa

SEQ ID NO: 540702 - DNA, 19 bp, Mus musculus
  siRNA target sequence for Stim1 (NM_009287.2,2552-2570).
ggctgaggaggataatggt

SEQ ID NO: 540703 - DNA, 19 bp, Mus musculus
  siRNA target sequence for Stim1 (NM_009287.2,2553-2571).
gctgaggaggataatggtt

SEQ ID NO: 540704 - DNA, 19 bp, Mus musculus
  siRNA target sequence for Stim1 (NM_009287.2,2612-2630).
gtttcctctcaaaattttt

SEQ ID NO: 540705 - DNA, 19 bp, Mus musculus
  siRNA target sequence for Stoml3 (NM_153156.1,68-86).
gcggctggatcctgttttt

SEQ ID NO: 540706 - DNA, 19 bp, Mus musculus
  siRNA target sequence for Stoml3 (NM_153156.1,108-126).
cgttaccttcccaatctca

SEQ ID NO: 540707 - DNA, 19 bp, Mus musculus
  siRNA target sequence for Stoml3 (NM_153156.1,127-145).
gtatggatgtgcttgaaga

SEQ ID NO: 540708 - DNA, 19 bp, Mus musculus
  siRNA target sequence for Stoml3 (NM_153156.1,131-149).
ggatgtgcttgaagatcat

SEQ ID NO: 540709 - DNA, 19 bp, Mus musculus
  siRNA target sequence for Stoml3 (NM_153156.1,236-254).
cttgcattgacgtgtttgt

SEQ ID NO: 540710 - DNA, 19 bp, Mus musculus
  siRNA target sequence for Stoml3 (NM_153156.1,239-257).
gcattgacgtgtttgtcaa

SEQ ID NO: 540711 - DNA, 19 bp, Mus musculus
  siRNA target sequence for Stoml3 (NM_153156.1,240-258).
cattgacgtgtttgtcaaa

SEQ ID NO: 540712 - DNA, 19 bp, Mus musculus
  siRNA target sequence for Stoml3 (NM_153156.1,262-280).
gatcttcgaacggttactt

SEQ ID NO: 540713 - DNA, 19 bp, Mus musculus
  siRNA target sequence for Stoml3 (NM_153156.1,265-283).
cttcgaacggttacttgta

SEQ ID NO: 540714 - DNA, 19 bp, Mus musculus
  siRNA target sequence for Stoml3 (NM_153156.1,268-286).
cgaacggttacttgtaaca

SEQ ID NO: 540715 - DNA, 19 bp, Mus musculus
  siRNA target sequence for Stoml3 (NM_153156.1,269-287).
gaacggttacttgtaacat

SEQ ID NO: 540716 - DNA, 19 bp, Mus musculus
  siRNA target sequence for Stoml3 (NM_153156.1,331-349).
gtggatggagtcgtctatt

SEQ ID NO: 540717 - DNA, 19 bp, Mus musculus
  siRNA target sequence for Stoml3 (NM_153156.1,337-355).
ggagtcgtctattacagaa

SEQ ID NO: 540718 - DNA, 19 bp, Mus musculus
  siRNA target sequence for Stoml3 (NM_153156.1,340-358).
gtcgtctattacagaatct

SEQ ID NO: 540719 - DNA, 19 bp, Mus musculus
  siRNA target sequence for Stoml3 (NM_153156.1,380-398).
ccaatgtgaacgatgttca

SEQ ID NO: 540720 - DNA, 19 bp, Mus musculus
  siRNA target sequence for Stoml3 (NM_153156.1,757-775).
gccacggagaaaaattcca

SEQ ID NO: 540721 - DNA, 19 bp, Mus musculus
  siRNA target sequence for Stoml3 (NM_153156.1,788-806).
ccttgccgatgaacatact

SEQ ID NO: 540722 - DNA, 19 bp, Mus musculus
  siRNA target sequence for Stoml3 (NM_153156.1,789-807).
cttgccgatgaacatactt

SEQ ID NO: 540723 - DNA, 19 bp, Mus musculus
  siRNA target sequence for Strap (NM_011499.1,165-183).
cttacggctactttctgat

SEQ ID NO: 540724 - DNA, 19 bp, Mus musculus
  siRNA target sequence for Strap (NM_011499.1,267-285).
ctgtttggggtgcaacatt

SEQ ID NO: 540725 - DNA, 19 bp, Mus musculus
  siRNA target sequence for Strap (NM_011499.1,269-287).
gtttggggtgcaacattga

SEQ ID NO: 540726 - DNA, 19 bp, Mus musculus
  siRNA target sequence for Strap (NM_011499.1,348-366).
cggtctcaggagatgaatt

SEQ ID NO: 540727 - DNA, 19 bp, Mus musculus
  siRNA target sequence for Strap (NM_011499.1,350-368).
gtctcaggagatgaattga

SEQ ID NO: 540728 - DNA, 19 bp, Mus musculus
  siRNA target sequence for Strap (NM_011499.1,378-396).
ctcataagcacattgtcaa

SEQ ID NO: 540729 - DNA, 19 bp, Mus musculus
  siRNA target sequence for Strap (NM_011499.1,394-412).
caagactgtggatttcaca

SEQ ID NO: 540730 - DNA, 19 bp, Mus musculus
  siRNA target sequence for Strap (NM_011499.1,411-429).
cacaggatagcaattacct

SEQ ID NO: 540731 - DNA, 19 bp, Mus musculus
  siRNA target sequence for Strap (NM_011499.1,452-470).
ctgctgcgcatatatgact

SEQ ID NO: 540732 - DNA, 19 bp, Mus musculus
  siRNA target sequence for Strap (NM_011499.1,458-476).
cgcatatatgacttgaaca

SEQ ID NO: 540733 - DNA, 19 bp, Mus musculus
  siRNA target sequence for Strap (NM_011499.1,545-563).
gacgataaacagatccttt

SEQ ID NO: 540734 - DNA, 19 bp, Mus musculus
  siRNA target sequence for Strap (NM_011499.1,560-578).
ctttcagcggatgataaaa

SEQ ID NO: 540735 - DNA, 19 bp, Mus musculus
  siRNA target sequence for Strap (NM_011499.1,564-582).
cagcggatgataaaactgt

SEQ ID NO: 540736 - DNA, 19 bp, Mus musculus
  siRNA target sequence for Strap (NM_011499.1,592-610).
ggatcatgccacaatgaca

SEQ ID NO: 540737 - DNA, 19 bp, Mus musculus
  siRNA target sequence for Strap (NM_011499.1,663-681).
ctgaaggagagattttggt

SEQ ID NO: 540738 - DNA, 19 bp, Mus musculus
  siRNA target sequence for Strap (NM_011499.1,665-683).
gaaggagagattttggtta

SEQ ID NO: 540739 - DNA, 19 bp, Mus musculus
  siRNA target sequence for Strap (NM_011499.1,695-713).
cgatctattgcttttcata

SEQ ID NO: 540740 - DNA, 19 bp, Mus musculus
  siRNA target sequence for Strap (NM_011499.1,749-767).
gctcctgcgaccatcaatt

SEQ ID NO: 540741 - DNA, 19 bp, Mus musculus
  siRNA target sequence for Strap (NM_011499.1,763-781).
caattctgcgtctcttcat

SEQ ID NO: 540742 - DNA, 19 bp, Mus musculus
  siRNA target sequence for Strap (NM_011499.1,803-821).
gcgggtggagaagacttta

SEQ ID NO: 540743 - DNA, 19 bp, Mus musculus
  siRNA target sequence for Strap (NM_011499.1,804-822).
cgggtggagaagactttaa

SEQ ID NO: 540744 - DNA, 19 bp, Mus musculus
  siRNA target sequence for Strap (NM_011499.1,815-833).
gactttaaactgtacaagt

SEQ ID NO: 540745 - DNA, 19 bp, Mus musculus
  siRNA target sequence for Strap (NM_011499.1,824-842).
ctgtacaagtatgattata

SEQ ID NO: 540746 - DNA, 19 bp, Mus musculus
  siRNA target sequence for Strap (NM_011499.1,906-924).
gtcctgatggggaactcta

SEQ ID NO: 540747 - DNA, 19 bp, Mus musculus
  siRNA target sequence for Strap (NM_011499.1,1036-1054).
gccaaagatcggatttcca

SEQ ID NO: 540748 - DNA, 19 bp, Mus musculus
  siRNA target sequence for Strap (NM_011499.1,1096-1114).
gaattcagattccatctat

SEQ ID NO: 540749 - DNA, 19 bp, Mus musculus
  siRNA target sequence for Stx4a (NM_009294.2,357-375).
ccagaaggtgcagacaatt

SEQ ID NO: 540750 - DNA, 19 bp, Mus musculus
  siRNA target sequence for Stx4a (NM_009294.2,614-632).
gagtcctgtcccagcaatt

SEQ ID NO: 540751 - DNA, 19 bp, Mus musculus
  siRNA target sequence for Stx4a (NM_009294.2,669-687).
cgaataccgagagaagaat

SEQ ID NO: 540752 - DNA, 19 bp, Mus musculus
  siRNA target sequence for Stx4a (NM_009294.2,889-907).
ctccatgagatctttacgt

SEQ ID NO: 540753 - DNA, 19 bp, Mus musculus
  siRNA target sequence for Stxbp1 (NM_009295.1,202-220).
caattgtggaggatatcaa

SEQ ID NO: 540754 - DNA, 19 bp, Mus musculus
  siRNA target sequence for Stxbp1 (NM_009295.1,441-459).
gcgtttctcccctatgagt

SEQ ID NO: 540755 - DNA, 19 bp, Mus musculus
  siRNA target sequence for Stxbp1 (NM_009295.1,479-497).
ctccgctgactctttccaa

SEQ ID NO: 540756 - DNA, 19 bp, Mus musculus
  siRNA target sequence for Stxbp1 (NM_009295.1,656-674).
caagctggatgcctataaa

SEQ ID NO: 540757 - DNA, 19 bp, Mus musculus
  siRNA target sequence for Stxbp1 (NM_009295.1,798-816).
gacctgctgcctatcgaaa

SEQ ID NO: 540758 - DNA, 19 bp, Mus musculus
  siRNA target sequence for Stxbp1 (NM_009295.1,800-818).
cctgctgcctatcgaaaat

SEQ ID NO: 540759 - DNA, 19 bp, Mus musculus
  siRNA target sequence for Stxbp1 (NM_009295.1,803-821).
gctgcctatcgaaaatgat

SEQ ID NO: 540760 - DNA, 19 bp, Mus musculus
  siRNA target sequence for Stxbp1 (NM_009295.1,807-825).
cctatcgaaaatgatgttt

SEQ ID NO: 540761 - DNA, 19 bp, Mus musculus
  siRNA target sequence for Stxbp1 (NM_009295.1,948-966).
cggtctctgaaggactttt

SEQ ID NO: 540762 - DNA, 19 bp, Mus musculus
  siRNA target sequence for Stxbp1 (NM_009295.1,1094-1112).
ctgcatgaagcattaccaa

SEQ ID NO: 540763 - DNA, 19 bp, Mus musculus
  siRNA target sequence for Stxbp1 (NM_009295.1,1230-1248).
gtcagcacttacgacaaaa

SEQ ID NO: 540764 - DNA, 19 bp, Mus musculus
  siRNA target sequence for Stxbp1 (NM_009295.1,1313-1331).
catccagcacgctcagata

SEQ ID NO: 540765 - DNA, 19 bp, Mus musculus
  siRNA target sequence for Stxbp1 (NM_009295.1,1338-1356).
gaggacagcgagatcatca

SEQ ID NO: 540766 - DNA, 19 bp, Mus musculus
  siRNA target sequence for Stxbp1 (NM_009295.1,1424-1442).
gcggaaggagcgtatcagt

SEQ ID NO: 540767 - DNA, 19 bp, Mus musculus
  siRNA target sequence for Stxbp1 (NM_009295.1,1464-1482).
cgatggaccccgatcatta

SEQ ID NO: 540768 - DNA, 19 bp, Mus musculus
  siRNA target sequence for Stxbp1 (NM_009295.1,1465-1483).
gatggaccccgatcattaa

SEQ ID NO: 540769 - DNA, 19 bp, Mus musculus
  siRNA target sequence for Stxbp1 (NM_009295.1,1468-1486).
ggaccccgatcattaaaga

SEQ ID NO: 540770 - DNA, 19 bp, Mus musculus
  siRNA target sequence for Stxbp1 (NM_009295.1,1472-1490).
cccgatcattaaagacatt

SEQ ID NO: 540771 - DNA, 19 bp, Mus musculus
  siRNA target sequence for Stxbp1 (NM_009295.1,1527-1545).
cactacccatacatctcta

SEQ ID NO: 540772 - DNA, 19 bp, Mus musculus
  siRNA target sequence for Stxbp1 (NM_009295.1,1665-1683).
ggtgtgagcctgaatgaga

SEQ ID NO: 540773 - DNA, 19 bp, Mus musculus
  siRNA target sequence for Stxbp4 (NM_011505.1,269-287).
cctgcctttcgggtgatta

SEQ ID NO: 540774 - DNA, 19 bp, Mus musculus
  siRNA target sequence for Stxbp4 (NM_011505.1,273-291).
cctttcgggtgattacagt

SEQ ID NO: 540775 - DNA, 19 bp, Mus musculus
  siRNA target sequence for Stxbp4 (NM_011505.1,274-292).
ctttcgggtgattacagtt

SEQ ID NO: 540776 - DNA, 19 bp, Mus musculus
  siRNA target sequence for Stxbp4 (NM_011505.1,278-296).
cgggtgattacagttacta

SEQ ID NO: 540777 - DNA, 19 bp, Mus musculus
  siRNA target sequence for Stxbp4 (NM_011505.1,279-297).
gggtgattacagttactaa

SEQ ID NO: 540778 - DNA, 19 bp, Mus musculus
  siRNA target sequence for Stxbp4 (NM_011505.1,303-321).
caggtctaggtctgaagat

SEQ ID NO: 540779 - DNA, 19 bp, Mus musculus
  siRNA target sequence for Stxbp4 (NM_011505.1,344-362).
gaaggaccgctggtgtata

SEQ ID NO: 540780 - DNA, 19 bp, Mus musculus
  siRNA target sequence for Stxbp4 (NM_011505.1,348-366).
gaccgctggtgtatattca

SEQ ID NO: 540781 - DNA, 19 bp, Mus musculus
  siRNA target sequence for Stxbp4 (NM_011505.1,417-435).
gagatcaacttgtctcaat

SEQ ID NO: 540782 - DNA, 19 bp, Mus musculus
  siRNA target sequence for Stxbp4 (NM_011505.1,419-437).
gatcaacttgtctcaataa

SEQ ID NO: 540783 - DNA, 19 bp, Mus musculus
  siRNA target sequence for Stxbp4 (NM_011505.1,447-465).
ctatgattggtgtatcatt

SEQ ID NO: 540784 - DNA, 19 bp, Mus musculus
  siRNA target sequence for Stxbp4 (NM_011505.1,473-491).
gcaaaaagcataattacca

SEQ ID NO: 540785 - DNA, 19 bp, Mus musculus
  siRNA target sequence for Stxbp4 (NM_011505.1,496-514).
caagttgaggtcagaatct

SEQ ID NO: 540786 - DNA, 19 bp, Mus musculus
  siRNA target sequence for Stxbp4 (NM_011505.1,513-531).
ctccctgggagatagcatt

SEQ ID NO: 540787 - DNA, 19 bp, Mus musculus
  siRNA target sequence for Stxbp4 (NM_011505.1,608-626).
cctcaaacctcaacattta

SEQ ID NO: 540788 - DNA, 19 bp, Mus musculus
  siRNA target sequence for Stxbp4 (NM_011505.1,616-634).
ctcaacatttactcttctt

SEQ ID NO: 540789 - DNA, 19 bp, Mus musculus
  siRNA target sequence for Stxbp4 (NM_011505.1,746-764).
gaacatagtccaattactt

SEQ ID NO: 540790 - DNA, 19 bp, Mus musculus
  siRNA target sequence for Stxbp4 (NM_011505.1,772-790).
caacagccctgcagataca

SEQ ID NO: 540791 - DNA, 19 bp, Mus musculus
  siRNA target sequence for Stxbp4 (NM_011505.1,777-795).
gccctgcagatacatctaa

SEQ ID NO: 540792 - DNA, 19 bp, Mus musculus
  siRNA target sequence for Stxbp4 (NM_011505.1,998-1016).
gtccaggttgccagaagtt

SEQ ID NO: 540793 - DNA, 19 bp, Mus musculus
  siRNA target sequence for Stxbp4 (NM_011505.1,1023-1041).
gcttgcagttggatgaagt

SEQ ID NO: 540794 - DNA, 19 bp, Mus musculus
  siRNA target sequence for Stxbp4 (NM_011505.1,1024-1042).
cttgcagttggatgaagta

SEQ ID NO: 540795 - DNA, 19 bp, Mus musculus
  siRNA target sequence for Stxbp4 (NM_011505.1,1030-1048).
gttggatgaagtaaatgtt

SEQ ID NO: 540796 - DNA, 19 bp, Mus musculus
  siRNA target sequence for Stxbp4 (NM_011505.1,1090-1108).
cccctgtgattctctagaa

SEQ ID NO: 540797 - DNA, 19 bp, Mus musculus
  siRNA target sequence for Stxbp4 (NM_011505.1,1110-1128).
cagatgaagtgggaaaact

SEQ ID NO: 540798 - DNA, 19 bp, Mus musculus
  siRNA target sequence for Stxbp4 (NM_011505.1,1112-1130).
gatgaagtgggaaaactta

SEQ ID NO: 540799 - DNA, 19 bp, Mus musculus
  siRNA target sequence for Stxbp4 (NM_011505.1,1317-1335).
cacacgggatggaaatgga

SEQ ID NO: 540800 - DNA, 19 bp, Mus musculus
  siRNA target sequence for Stxbp4 (NM_011505.1,1424-1442).
gtccaggacttgagaaaaa

SEQ ID NO: 540801 - DNA, 19 bp, Mus musculus
  siRNA target sequence for Stxbp4 (NM_011505.1,1459-1477).
ctgccaattgcgaaaatca

SEQ ID NO: 540802 - DNA, 19 bp, Mus musculus
  siRNA target sequence for Stxbp4 (NM_011505.1,1462-1480).
ccaattgcgaaaatcagaa

SEQ ID NO: 540803 - DNA, 19 bp, Mus musculus
  siRNA target sequence for Stxbp4 (NM_011505.1,1478-1496).
gaaatggctcggaaagcat

SEQ ID NO: 540804 - DNA, 19 bp, Mus musculus
  siRNA target sequence for Stxbp4 (NM_011505.1,1515-1533).
ggctccttggtttcataga

SEQ ID NO: 540805 - DNA, 19 bp, Mus musculus
  siRNA target sequence for Stxbp4 (NM_011505.1,1556-1574).
gatagttctgctcctttat

SEQ ID NO: 540806 - DNA, 19 bp, Mus musculus
  siRNA target sequence for Stxbp4 (NM_011505.1,1692-1710).
ctgtccgtgccatacttga

SEQ ID NO: 540807 - DNA, 19 bp, Mus musculus
  siRNA target sequence for Stxbp4 (NM_011505.1,1698-1716).
gtgccatacttgatatgga

SEQ ID NO: 540808 - DNA, 19 bp, Mus musculus
  siRNA target sequence for Stxbp4 (NM_011505.1,1709-1727).
gatatggactgcttacctt

SEQ ID NO: 540809 - DNA, 19 bp, Mus musculus
  siRNA target sequence for Stxbp4 (NM_011505.1,1732-1750).
gtgggaggaagcttacaca

SEQ ID NO: 540810 - DNA, 19 bp, Mus musculus
  siRNA target sequence for Stxbp4 (NM_011505.1,1743-1761).
cttacacagcagatggaat

SEQ ID NO: 540811 - DNA, 19 bp, Mus musculus
  siRNA target sequence for Stxbp4 (NM_011505.1,1751-1769).
gcagatggaatcaagtact

SEQ ID NO: 540812 - DNA, 19 bp, Mus musculus
  siRNA target sequence for Styx (NM_019637.1,829-847).
gcattcaagactagtaaaa

SEQ ID NO: 540813 - DNA, 19 bp, Mus musculus
  siRNA target sequence for Synj2bp (NM_025292.2,255-273).
ctacgtcagccgtatcaaa

SEQ ID NO: 540814 - DNA, 19 bp, Mus musculus
  siRNA target sequence for Synj2bp (NM_025292.2,304-322).
ctccaggagggtgataaga

SEQ ID NO: 540815 - DNA, 19 bp, Mus musculus
  siRNA target sequence for Synj2bp (NM_025292.2,438-456).
gaatggacctatagtacat

SEQ ID NO: 540816 - DNA, 19 bp, Mus musculus
  siRNA target sequence for Synj2bp (NM_025292.2,476-494).
gtggagttcctgtagctat

SEQ ID NO: 540817 - DNA, 19 bp, Mus musculus
  siRNA target sequence for Synj2bp (NM_025292.2,495-513).
ggtgctgctaccagtgttt

SEQ ID NO: 540818 - DNA, 19 bp, Mus musculus
  siRNA target sequence for Sytl2 (NM_031394.1,196-214).
catctgcctgaaaaaatta

SEQ ID NO: 540819 - DNA, 19 bp, Mus musculus
  siRNA target sequence for Sytl2 (NM_031394.1,217-235).
gatgaccaacaactaaaga

SEQ ID NO: 540820 - DNA, 19 bp, Mus musculus
  siRNA target sequence for Sytl2 (NM_031394.1,340-358).
gcggcagctgagcagaata

SEQ ID NO: 540821 - DNA, 19 bp, Mus musculus
  siRNA target sequence for Sytl2 (NM_031394.1,341-359).
cggcagctgagcagaataa

SEQ ID NO: 540822 - DNA, 19 bp, Mus musculus
  siRNA target sequence for Sytl2 (NM_031394.1,384-402).
gagctgggtgaataatgtt

SEQ ID NO: 540823 - DNA, 19 bp, Mus musculus
  siRNA target sequence for Sytl2 (NM_031394.1,386-404).
gctgggtgaataatgttaa

SEQ ID NO: 540824 - DNA, 19 bp, Mus musculus
  siRNA target sequence for Sytl2 (NM_031394.1,389-407).
gggtgaataatgttaacaa

SEQ ID NO: 540825 - DNA, 19 bp, Mus musculus
  siRNA target sequence for Sytl2 (NM_031394.1,499-517).
gcttccagtgtgattgata

SEQ ID NO: 540826 - DNA, 19 bp, Mus musculus
  siRNA target sequence for Sytl2 (NM_031394.1,514-532).
gatatgtcccaggaaagta

SEQ ID NO: 540827 - DNA, 19 bp, Mus musculus
  siRNA target sequence for Sytl2 (NM_031394.1,547-565).
gtgtctctgcccaagcaaa

SEQ ID NO: 540828 - DNA, 19 bp, Mus musculus
  siRNA target sequence for Sytl2 (NM_031394.1,555-573).
gcccaagcaaaggaagaat

SEQ ID NO: 540829 - DNA, 19 bp, Mus musculus
  siRNA target sequence for Sytl2 (NM_031394.1,601-619).
gatcactccttgcaacaaa

SEQ ID NO: 540830 - DNA, 19 bp, Mus musculus
  siRNA target sequence for Sytl2 (NM_031394.1,606-624).
ctccttgcaacaaaccaaa

SEQ ID NO: 540831 - DNA, 19 bp, Mus musculus
  siRNA target sequence for Sytl2 (NM_031394.1,676-694).
ggtgagttgtcagaatcaa

SEQ ID NO: 540832 - DNA, 19 bp, Mus musculus
  siRNA target sequence for Sytl2 (NM_031394.1,721-739).
ccacgtcagcagttagaga

SEQ ID NO: 540833 - DNA, 19 bp, Mus musculus
  siRNA target sequence for Sytl2 (NM_031394.1,722-740).
cacgtcagcagttagagaa

SEQ ID NO: 540834 - DNA, 19 bp, Mus musculus
  siRNA target sequence for Sytl2 (NM_031394.1,727-745).
cagcagttagagaaaccaa

SEQ ID NO: 540835 - DNA, 19 bp, Mus musculus
  siRNA target sequence for Sytl2 (NM_031394.1,766-784).
cctgaaaatgcgtctcata

SEQ ID NO: 540836 - DNA, 19 bp, Mus musculus
  siRNA target sequence for Sytl2 (NM_031394.1,819-837).
ctacaaatcaaatgactta

SEQ ID NO: 540837 - DNA, 19 bp, Mus musculus
  siRNA target sequence for Sytl2 (NM_031394.1,898-916).
gctccaagagggatcctaa

SEQ ID NO: 540838 - DNA, 19 bp, Mus musculus
  siRNA target sequence for Sytl2 (NM_031394.1,899-917).
ctccaagagggatcctaaa

SEQ ID NO: 540839 - DNA, 19 bp, Mus musculus
  siRNA target sequence for Sytl2 (NM_031394.1,947-965).
cagagaccctccgtttaaa

SEQ ID NO: 540840 - DNA, 19 bp, Mus musculus
  siRNA target sequence for Sytl2 (NM_031394.1,953-971).
ccctccgtttaaattacaa

SEQ ID NO: 540841 - DNA, 19 bp, Mus musculus
  siRNA target sequence for Sytl2 (NM_031394.1,1067-1085).
gctcactagagccgttaaa

SEQ ID NO: 540842 - DNA, 19 bp, Mus musculus
  siRNA target sequence for Sytl2 (NM_031394.1,1079-1097).
cgttaaagcacgtgagatt

SEQ ID NO: 540843 - DNA, 19 bp, Mus musculus
  siRNA target sequence for Sytl2 (NM_031394.1,1110-1128).
gaatgagcttccacaaagt

SEQ ID NO: 540844 - DNA, 19 bp, Mus musculus
  siRNA target sequence for Sytl2 (NM_031394.1,1149-1167).
ggaagtgggagaatttact

SEQ ID NO: 540845 - DNA, 19 bp, Mus musculus
  siRNA target sequence for Sytl2 (NM_031394.1,1155-1173).
gggagaatttactgtttta

SEQ ID NO: 540846 - DNA, 19 bp, Mus musculus
  siRNA target sequence for Sytl2 (NM_031394.1,1174-1192).
gaatctgaccagttgcaaa

SEQ ID NO: 540847 - DNA, 19 bp, Mus musculus
  siRNA target sequence for Sytl2 (NM_031394.1,1185-1203).
gttgcaaaatggaactgaa

SEQ ID NO: 540848 - DNA, 19 bp, Mus musculus
  siRNA target sequence for Sytl2 (NM_031394.1,1188-1206).
gcaaaatggaactgaagat

SEQ ID NO: 540849 - DNA, 19 bp, Mus musculus
  siRNA target sequence for Sytl2 (NM_031394.1,1259-1277).
ctttgtctcattatcagtt

SEQ ID NO: 540850 - DNA, 19 bp, Mus musculus
  siRNA target sequence for Sytl2 (NM_031394.1,1398-1416).
gagttcatccgtcatcaat

SEQ ID NO: 540851 - DNA, 19 bp, Mus musculus
  siRNA target sequence for Sytl2 (NM_031394.1,1413-1431).
caatgggcaacaagagaaa

SEQ ID NO: 540852 - DNA, 19 bp, Mus musculus
  siRNA target sequence for Sytl2 (NM_031394.1,1453-1471).
ccatcagaattgtccaaaa

SEQ ID NO: 540853 - DNA, 19 bp, Mus musculus
  siRNA target sequence for Sytl2 (NM_031394.1,1614-1632).
gccttccaaaagtctagaa

SEQ ID NO: 540854 - DNA, 19 bp, Mus musculus
  siRNA target sequence for Sytl2 (NM_031394.1,1616-1634).
cttccaaaagtctagaaga

SEQ ID NO: 540855 - DNA, 19 bp, Mus musculus
  siRNA target sequence for Sytl2 (NM_031394.1,1633-1651).
gacattccatcagattcat

SEQ ID NO: 540856 - DNA, 19 bp, Mus musculus
  siRNA target sequence for Sytl2 (NM_031394.1,1694-1712).
gtagtgctgaagatgatca

SEQ ID NO: 540857 - DNA, 19 bp, Mus musculus
  siRNA target sequence for Sytl2 (NM_031394.1,1741-1759).
gaatgtataccaggaattt

SEQ ID NO: 540858 - DNA, 19 bp, Mus musculus
  siRNA target sequence for Sytl2 (NM_031394.1,1767-1785).
gccttcactgcctgataat

SEQ ID NO: 540859 - DNA, 19 bp, Mus musculus
  siRNA target sequence for Sytl2 (NM_031394.1,1774-1792).
ctgcctgataatcagtttt

SEQ ID NO: 540860 - DNA, 19 bp, Mus musculus
  siRNA target sequence for Sytl2 (NM_031394.1,1788-1806).
gttttcccaccctgacaaa

SEQ ID NO: 540861 - DNA, 19 bp, Mus musculus
  siRNA target sequence for Sytl2 (NM_031394.1,1798-1816).
cctgacaaactcaaaagga

SEQ ID NO: 540862 - DNA, 19 bp, Mus musculus
  siRNA target sequence for Sytl2 (NM_031394.1,1851-1869).
gagcgatgacagagaaaca

SEQ ID NO: 540863 - DNA, 19 bp, Mus musculus
  siRNA target sequence for Sytl2 (NM_031394.1,1916-1934).
gccccagctcattaaccaa

SEQ ID NO: 540864 - DNA, 19 bp, Mus musculus
  siRNA target sequence for Sytl2 (NM_031394.1,1920-1938).
cagctcattaaccaatctt

SEQ ID NO: 540865 - DNA, 19 bp, Mus musculus
  siRNA target sequence for Sytl2 (NM_031394.1,1992-2010).
cgtttacagtggagacttt

SEQ ID NO: 540866 - DNA, 19 bp, Mus musculus
  siRNA target sequence for Sytl2 (NM_031394.1,2131-2149).
cgctcagatccgtatgtaa

SEQ ID NO: 540867 - DNA, 19 bp, Mus musculus
  siRNA target sequence for Sytl2 (NM_031394.1,2132-2150).
gctcagatccgtatgtaaa

SEQ ID NO: 540868 - DNA, 19 bp, Mus musculus
  siRNA target sequence for Sytl2 (NM_031394.1,2213-2231).
ccttgaatcctgtatacaa

SEQ ID NO: 540869 - DNA, 19 bp, Mus musculus
  siRNA target sequence for Sytl2 (NM_031394.1,2221-2239).
cctgtatacaacgagatat

SEQ ID NO: 540870 - DNA, 19 bp, Mus musculus
  siRNA target sequence for Sytl2 (NM_031394.1,2222-2240).
ctgtatacaacgagatatt

SEQ ID NO: 540871 - DNA, 19 bp, Mus musculus
  siRNA target sequence for Sytl2 (NM_031394.1,2232-2250).
cgagatattgcggtataaa

SEQ ID NO: 540872 - DNA, 19 bp, Mus musculus
  siRNA target sequence for Sytl2 (NM_031394.1,2233-2251).
gagatattgcggtataaaa

SEQ ID NO: 540873 - DNA, 19 bp, Mus musculus
  siRNA target sequence for Sytl2 (NM_031394.1,2235-2253).
gatattgcggtataaaatt

SEQ ID NO: 540874 - DNA, 19 bp, Mus musculus
  siRNA target sequence for Sytl2 (NM_031394.1,2293-2311).
gtttggcatcgggatacat

SEQ ID NO: 540875 - DNA, 19 bp, Mus musculus
  siRNA target sequence for Sytl2 (NM_031394.1,2297-2315).
ggcatcgggatacatttaa

SEQ ID NO: 540876 - DNA, 19 bp, Mus musculus
  siRNA target sequence for Sytl2 (NM_031394.1,2524-2542).
cacatctgggtgaaggaat

SEQ ID NO: 540877 - DNA, 19 bp, Mus musculus
  siRNA target sequence for Sytl2 (NM_031394.1,2566-2584).
ggcagccacctaaattctt

SEQ ID NO: 540878 - DNA, 19 bp, Mus musculus
  siRNA target sequence for Sytl2 (NM_031394.1,2567-2585).
gcagccacctaaattcttt

SEQ ID NO: 540879 - DNA, 19 bp, Mus musculus
  siRNA target sequence for Sytl2 (NM_031394.1,2654-2672).
ccaccaaccccgtcttcaa

SEQ ID NO: 540880 - DNA, 19 bp, Mus musculus
  siRNA target sequence for Sytl2 (NM_031394.1,2673-2691).
ccataccatggtgtatgat

SEQ ID NO: 540881 - DNA, 19 bp, Mus musculus
  siRNA target sequence for Sytl2 (NM_031394.1,2693-2711).
ggttcaggcctgaagatct

SEQ ID NO: 540882 - DNA, 19 bp, Mus musculus
  siRNA target sequence for Sytl2 (NM_031394.1,2733-2751).
cacagtctgggaccattat

SEQ ID NO: 540883 - DNA, 19 bp, Mus musculus
  siRNA target sequence for Sytl2 (NM_031394.1,2779-2797).
ctccggatcggctttggaa

SEQ ID NO: 540884 - DNA, 19 bp, Mus musculus
  siRNA target sequence for Sytl2 (NM_031394.1,2824-2842).
gattggatggattctactt

SEQ ID NO: 540885 - DNA, 19 bp, Mus musculus
  siRNA target sequence for Sytl3 (NM_031395.1,578-596).
ggaagtgcacggtttgctt

SEQ ID NO: 540886 - DNA, 19 bp, Mus musculus
  siRNA target sequence for Sytl3 (NM_031395.1,579-597).
gaagtgcacggtttgcttt

SEQ ID NO: 540887 - DNA, 19 bp, Mus musculus
  siRNA target sequence for Sytl3 (NM_031395.1,623-641).
ccggagaatggttctttga

SEQ ID NO: 540888 - DNA, 19 bp, Mus musculus
  siRNA target sequence for Sytl3 (NM_031395.1,646-664).
cgagccaggaaatttccaa

SEQ ID NO: 540889 - DNA, 19 bp, Mus musculus
  siRNA target sequence for Sytl3 (NM_031395.1,712-730).
cagaggctgagcaaaatct

SEQ ID NO: 540890 - DNA, 19 bp, Mus musculus
  siRNA target sequence for Sytl3 (NM_031395.1,802-820).
ggccacttcagaggattta

SEQ ID NO: 540891 - DNA, 19 bp, Mus musculus
  siRNA target sequence for Sytl3 (NM_031395.1,803-821).
gccacttcagaggatttaa

SEQ ID NO: 540892 - DNA, 19 bp, Mus musculus
  siRNA target sequence for Sytl3 (NM_031395.1,810-828).
cagaggatttaataagtct

SEQ ID NO: 540893 - DNA, 19 bp, Mus musculus
  siRNA target sequence for Sytl3 (NM_031395.1,875-893).
ccaagtcccagaatgacat

SEQ ID NO: 540894 - DNA, 19 bp, Mus musculus
  siRNA target sequence for Sytl3 (NM_031395.1,1001-1019).
gcacacccgatattctgaa

SEQ ID NO: 540895 - DNA, 19 bp, Mus musculus
  siRNA target sequence for Sytl3 (NM_031395.1,1002-1020).
cacacccgatattctgaaa

SEQ ID NO: 540896 - DNA, 19 bp, Mus musculus
  siRNA target sequence for Sytl3 (NM_031395.1,1048-1066).
cctcccgaccctgttttga

SEQ ID NO: 540897 - DNA, 19 bp, Mus musculus
  siRNA target sequence for Sytl3 (NM_031395.1,1119-1137).
cttgagacacggaagctta

SEQ ID NO: 540898 - DNA, 19 bp, Mus musculus
  siRNA target sequence for Sytl3 (NM_031395.1,1122-1140).
gagacacggaagcttaatt

SEQ ID NO: 540899 - DNA, 19 bp, Mus musculus
  siRNA target sequence for Sytl3 (NM_031395.1,1126-1144).
cacggaagcttaattagca

SEQ ID NO: 540900 - DNA, 19 bp, Mus musculus
  siRNA target sequence for Sytl3 (NM_031395.1,1162-1180).
gagatgggtaattttgaca

SEQ ID NO: 540901 - DNA, 19 bp, Mus musculus
  siRNA target sequence for Sytl3 (NM_031395.1,1164-1182).
gatgggtaattttgacaat

SEQ ID NO: 540902 - DNA, 19 bp, Mus musculus
  siRNA target sequence for Sytl3 (NM_031395.1,1189-1207).
gtcactggagaaatagaat

SEQ ID NO: 540903 - DNA, 19 bp, Mus musculus
  siRNA target sequence for Sytl3 (NM_031395.1,1212-1230).
cattcattactgcgttaaa

SEQ ID NO: 540904 - DNA, 19 bp, Mus musculus
  siRNA target sequence for Sytl3 (NM_031395.1,1216-1234).
cattactgcgttaaaagct

SEQ ID NO: 540905 - DNA, 19 bp, Mus musculus
  siRNA target sequence for Sytl3 (NM_031395.1,1355-1373).
gcaagacacgagtccaaaa

SEQ ID NO: 540906 - DNA, 19 bp, Mus musculus
  siRNA target sequence for Sytl3 (NM_031395.1,1388-1406).
cgactttcgaggaaacctt

SEQ ID NO: 540907 - DNA, 19 bp, Mus musculus
  siRNA target sequence for Sytl3 (NM_031395.1,1395-1413).
cgaggaaaccttgaagtat

SEQ ID NO: 540908 - DNA, 19 bp, Mus musculus
  siRNA target sequence for Sytl3 (NM_031395.1,1536-1554).
ggacagtacggcacagaat

SEQ ID NO: 540909 - DNA, 19 bp, Mus musculus
  siRNA target sequence for Sytl3 (NM_031395.1,1725-1743).
gttgggagccaagaattta

SEQ ID NO: 540910 - DNA, 19 bp, Mus musculus
  siRNA target sequence for Sytl3 (NM_031395.1,1756-1774).
gatggcaccttaaactcat

SEQ ID NO: 540911 - DNA, 19 bp, Mus musculus
  siRNA target sequence for Sytl3 (NM_031395.1,1761-1779).
caccttaaactcatttgtt

SEQ ID NO: 540912 - DNA, 19 bp, Mus musculus
  siRNA target sequence for Sytl3 (NM_031395.1,1933-1951).
gaccaggccatctttggta

SEQ ID NO: 540913 - DNA, 19 bp, Mus musculus
  siRNA target sequence for Sytl4 (NM_013757.1,194-212).
gatactagacctctctttt

SEQ ID NO: 540914 - DNA, 19 bp, Mus musculus
  siRNA target sequence for Sytl4 (NM_013757.1,289-307).
ggattcggcgactgaagaa

SEQ ID NO: 540915 - DNA, 19 bp, Mus musculus
  siRNA target sequence for Sytl4 (NM_013757.1,290-308).
gattcggcgactgaagaat

SEQ ID NO: 540916 - DNA, 19 bp, Mus musculus
  siRNA target sequence for Sytl4 (NM_013757.1,309-327).
gagctcctggagatcaaaa

SEQ ID NO: 540917 - DNA, 19 bp, Mus musculus
  siRNA target sequence for Sytl4 (NM_013757.1,311-329).
gctcctggagatcaaaaga

SEQ ID NO: 540918 - DNA, 19 bp, Mus musculus
  siRNA target sequence for Sytl4 (NM_013757.1,346-364).
gcagccaacactatagtga

SEQ ID NO: 540919 - DNA, 19 bp, Mus musculus
  siRNA target sequence for Sytl4 (NM_013757.1,399-417).
cgcttaattcccaaaagca

SEQ ID NO: 540920 - DNA, 19 bp, Mus musculus
  siRNA target sequence for Sytl4 (NM_013757.1,429-447).
ggctgcaatcatttagtgt

SEQ ID NO: 540921 - DNA, 19 bp, Mus musculus
  siRNA target sequence for Sytl4 (NM_013757.1,551-569).
gaaagtaaatcgctttgat

SEQ ID NO: 540922 - DNA, 19 bp, Mus musculus
  siRNA target sequence for Sytl4 (NM_013757.1,573-591).
cgaacaggcagcgagataa

SEQ ID NO: 540923 - DNA, 19 bp, Mus musculus
  siRNA target sequence for Sytl4 (NM_013757.1,616-634).
ctgcagtgaataaaagaga

SEQ ID NO: 540924 - DNA, 19 bp, Mus musculus
  siRNA target sequence for Sytl4 (NM_013757.1,685-703).
caggaagaaggatcattca

SEQ ID NO: 540925 - DNA, 19 bp, Mus musculus
  siRNA target sequence for Sytl4 (NM_013757.1,691-709).
gaaggatcattcaagaaca

SEQ ID NO: 540926 - DNA, 19 bp, Mus musculus
  siRNA target sequence for Sytl4 (NM_013757.1,695-713).
gatcattcaagaacaacaa

SEQ ID NO: 540927 - DNA, 19 bp, Mus musculus
  siRNA target sequence for Sytl4 (NM_013757.1,784-802).
gcgagagtctggatagcta

SEQ ID NO: 540928 - DNA, 19 bp, Mus musculus
  siRNA target sequence for Sytl4 (NM_013757.1,830-848).
gagagattctctggataaa

SEQ ID NO: 540929 - DNA, 19 bp, Mus musculus
  siRNA target sequence for Sytl4 (NM_013757.1,878-896).
gtccgctcccaaatctcaa

SEQ ID NO: 540930 - DNA, 19 bp, Mus musculus
  siRNA target sequence for Sytl4 (NM_013757.1,948-966).
ggtgacatggtattcaaga

SEQ ID NO: 540931 - DNA, 19 bp, Mus musculus
  siRNA target sequence for Sytl4 (NM_013757.1,949-967).
gtgacatggtattcaagaa

SEQ ID NO: 540932 - DNA, 19 bp, Mus musculus
  siRNA target sequence for Sytl4 (NM_013757.1,990-1008).
ccttcagaatacactaagt

SEQ ID NO: 540933 - DNA, 19 bp, Mus musculus
  siRNA target sequence for Sytl4 (NM_013757.1,1198-1216).
gtacccttggcagcattat

SEQ ID NO: 540934 - DNA, 19 bp, Mus musculus
  siRNA target sequence for Sytl4 (NM_013757.1,1202-1220).
ccttggcagcattatgagt

SEQ ID NO: 540935 - DNA, 19 bp, Mus musculus
  siRNA target sequence for Sytl4 (NM_013757.1,1208-1226).
cagcattatgagtatctat

SEQ ID NO: 540936 - DNA, 19 bp, Mus musculus
  siRNA target sequence for Sytl4 (NM_013757.1,1273-1291).
ccttttcactgaagtttga

SEQ ID NO: 540937 - DNA, 19 bp, Mus musculus
  siRNA target sequence for Sytl4 (NM_013757.1,1365-1383).
cgttctaacccatatgtga

SEQ ID NO: 540938 - DNA, 19 bp, Mus musculus
  siRNA target sequence for Sytl4 (NM_013757.1,1373-1391).
cccatatgtgaagacttat

SEQ ID NO: 540939 - DNA, 19 bp, Mus musculus
  siRNA target sequence for Sytl4 (NM_013757.1,1375-1393).
catatgtgaagacttatct

SEQ ID NO: 540940 - DNA, 19 bp, Mus musculus
  siRNA target sequence for Sytl4 (NM_013757.1,1445-1463).
caccatcaatccactatat

SEQ ID NO: 540941 - DNA, 19 bp, Mus musculus
  siRNA target sequence for Sytl4 (NM_013757.1,1448-1466).
catcaatccactatatgat

SEQ ID NO: 540942 - DNA, 19 bp, Mus musculus
  siRNA target sequence for Sytl4 (NM_013757.1,1542-1560).
cgttttggcagaaacactt

SEQ ID NO: 540943 - DNA, 19 bp, Mus musculus
  siRNA target sequence for Sytl4 (NM_013757.1,1621-1639).
gcctccctttacatggaaa

SEQ ID NO: 540944 - DNA, 19 bp, Mus musculus
  siRNA target sequence for Sytl4 (NM_013757.1,1734-1752).
ggtgaccggaaaaagagta

SEQ ID NO: 540945 - DNA, 19 bp, Mus musculus
  siRNA target sequence for Sytl4 (NM_013757.1,1735-1753).
gtgaccggaaaaagagtaa

SEQ ID NO: 540946 - DNA, 19 bp, Mus musculus
  siRNA target sequence for Sytl4 (NM_013757.1,1802-1820).
cctgacggctgccaaatca

SEQ ID NO: 540947 - DNA, 19 bp, Mus musculus
  siRNA target sequence for Sytl4 (NM_013757.1,1874-1892).
ggccagtaagcgtaaaact

SEQ ID NO: 540948 - DNA, 19 bp, Mus musculus
  siRNA target sequence for Sytl4 (NM_013757.1,1885-1903).
gtaaaactcctgtgatgaa

SEQ ID NO: 540949 - DNA, 19 bp, Mus musculus
  siRNA target sequence for Sytl4 (NM_013757.1,1917-1935).
ccccactacaaccatacat

SEQ ID NO: 540950 - DNA, 19 bp, Mus musculus
  siRNA target sequence for Sytl4 (NM_013757.1,1918-1936).
cccactacaaccatacatt

SEQ ID NO: 540951 - DNA, 19 bp, Mus musculus
  siRNA target sequence for Sytl4 (NM_013757.1,1919-1937).
ccactacaaccatacattt

SEQ ID NO: 540952 - DNA, 19 bp, Mus musculus
  siRNA target sequence for Sytl4 (NM_013757.1,1954-1972).
ggctggaagatctacaaca

SEQ ID NO: 540953 - DNA, 19 bp, Mus musculus
  siRNA target sequence for Sytl4 (NM_013757.1,2049-2067).
gttggcactgggatcagta

SEQ ID NO: 540954 - DNA, 19 bp, Mus musculus
  siRNA target sequence for T2bp (NM_145133.1,172-190).
ctttgaagacgctgataca

SEQ ID NO: 540955 - DNA, 19 bp, Mus musculus
  siRNA target sequence for T2bp (NM_145133.1,211-229).
ccagatgaccatttaccat

SEQ ID NO: 540956 - DNA, 19 bp, Mus musculus
  siRNA target sequence for T2bp (NM_145133.1,243-261).
gtgggatatttaaatcaat

SEQ ID NO: 540957 - DNA, 19 bp, Mus musculus
  siRNA target sequence for T2bp (NM_145133.1,311-329).
ggacgcaattccaacatgt

SEQ ID NO: 540958 - DNA, 19 bp, Mus musculus
  siRNA target sequence for T2bp (NM_145133.1,325-343).
catgtgccagtatacgttt

SEQ ID NO: 540959 - DNA, 19 bp, Mus musculus
  siRNA target sequence for T2bp (NM_145133.1,353-371).
caggtgtcccgaattcagt

SEQ ID NO: 540960 - DNA, 19 bp, Mus musculus
  siRNA target sequence for T2bp (NM_145133.1,355-373).
ggtgtcccgaattcagttt

SEQ ID NO: 540961 - DNA, 19 bp, Mus musculus
  siRNA target sequence for T2bp (NM_145133.1,358-376).
gtcccgaattcagtttgtt

SEQ ID NO: 540962 - DNA, 19 bp, Mus musculus
  siRNA target sequence for T2bp (NM_145133.1,405-423).
ccgttctctcgtttgaaat

SEQ ID NO: 540963 - DNA, 19 bp, Mus musculus
  siRNA target sequence for T2bp (NM_145133.1,407-425).
gttctctcgtttgaaataa

SEQ ID NO: 540964 - DNA, 19 bp, Mus musculus
  siRNA target sequence for T2bp (NM_145133.1,435-453).
gcaagaaaaccagtttgat

SEQ ID NO: 540965 - DNA, 19 bp, Mus musculus
  siRNA target sequence for T2bp (NM_145133.1,444-462).
ccagtttgatggtagacaa

SEQ ID NO: 540966 - DNA, 19 bp, Mus musculus
  siRNA target sequence for T2bp (NM_145133.1,467-485).
gagctcggctacctcaata

SEQ ID NO: 540967 - DNA, 19 bp, Mus musculus
  siRNA target sequence for T2bp (NM_145133.1,491-509).
gacctgccttacaagtgta

SEQ ID NO: 540968 - DNA, 19 bp, Mus musculus
  siRNA target sequence for T2bp (NM_145133.1,516-534).
ggttcggagagtatcagtt

SEQ ID NO: 540969 - DNA, 19 bp, Mus musculus
  siRNA target sequence for T2bp (NM_145133.1,554-572).
ggagagtcggtggaatctt

SEQ ID NO: 540970 - DNA, 19 bp, Mus musculus
  siRNA target sequence for T2bp (NM_145133.1,555-573).
gagagtcggtggaatcttt

SEQ ID NO: 540971 - DNA, 19 bp, Mus musculus
  siRNA target sequence for T2bp (NM_145133.1,600-618).
gacctctcttgcaagaaaa

SEQ ID NO: 540972 - DNA, 19 bp, Mus musculus
  siRNA target sequence for T2bp (NM_145133.1,650-668).
gatgggatgtattcttcat

SEQ ID NO: 540973 - DNA, 19 bp, Mus musculus
  siRNA target sequence for Taf1a (NM_021466.1,116-134).
gtgatttcggtgaagagtt

SEQ ID NO: 540974 - DNA, 19 bp, Mus musculus
  siRNA target sequence for Taf1a (NM_021466.1,182-200).
ctaaaacgggaatgcattt

SEQ ID NO: 540975 - DNA, 19 bp, Mus musculus
  siRNA target sequence for Taf1a (NM_021466.1,267-285).
gacgacaagtgcttgttta

SEQ ID NO: 540976 - DNA, 19 bp, Mus musculus
  siRNA target sequence for Taf1a (NM_021466.1,275-293).
gtgcttgtttaagctttat

SEQ ID NO: 540977 - DNA, 19 bp, Mus musculus
  siRNA target sequence for Taf1a (NM_021466.1,322-340).
cagcaagctgcagagtata

SEQ ID NO: 540978 - DNA, 19 bp, Mus musculus
  siRNA target sequence for Taf1a (NM_021466.1,419-437).
gaagtgaaattctatttta

SEQ ID NO: 540979 - DNA, 19 bp, Mus musculus
  siRNA target sequence for Taf1a (NM_021466.1,471-489).
cttcgctgaccggatgaaa

SEQ ID NO: 540980 - DNA, 19 bp, Mus musculus
  siRNA target sequence for Taf1a (NM_021466.1,474-492).
cgctgaccggatgaaaaat

SEQ ID NO: 540981 - DNA, 19 bp, Mus musculus
  siRNA target sequence for Taf1a (NM_021466.1,475-493).
gctgaccggatgaaaaata

SEQ ID NO: 540982 - DNA, 19 bp, Mus musculus
  siRNA target sequence for Taf1a (NM_021466.1,476-494).
ctgaccggatgaaaaatat

SEQ ID NO: 540983 - DNA, 19 bp, Mus musculus
  siRNA target sequence for Taf1a (NM_021466.1,480-498).
ccggatgaaaaatattggt

SEQ ID NO: 540984 - DNA, 19 bp, Mus musculus
  siRNA target sequence for Taf1a (NM_021466.1,522-540).
cttacaacacgccttgtat

SEQ ID NO: 540985 - DNA, 19 bp, Mus musculus
  siRNA target sequence for Taf1a (NM_021466.1,526-544).
caacacgccttgtatcttt

SEQ ID NO: 540986 - DNA, 19 bp, Mus musculus
  siRNA target sequence for Taf1a (NM_021466.1,531-549).
cgccttgtatcttttacat

SEQ ID NO: 540987 - DNA, 19 bp, Mus musculus
  siRNA target sequence for Taf1a (NM_021466.1,534-552).
cttgtatcttttacatcat

SEQ ID NO: 540988 - DNA, 19 bp, Mus musculus
  siRNA target sequence for Taf1a (NM_021466.1,768-786).
ctgcaagacgtctacaaat

SEQ ID NO: 540989 - DNA, 19 bp, Mus musculus
  siRNA target sequence for Taf1a (NM_021466.1,770-788).
gcaagacgtctacaaatat

SEQ ID NO: 540990 - DNA, 19 bp, Mus musculus
  siRNA target sequence for Taf1a (NM_021466.1,774-792).
gacgtctacaaatatctgt

SEQ ID NO: 540991 - DNA, 19 bp, Mus musculus
  siRNA target sequence for Taf1a (NM_021466.1,843-861).
ggagatgctggagttctat

SEQ ID NO: 540992 - DNA, 19 bp, Mus musculus
  siRNA target sequence for Taf1a (NM_021466.1,852-870).
ggagttctatggtgatcaa

SEQ ID NO: 540993 - DNA, 19 bp, Mus musculus
  siRNA target sequence for Taf1a (NM_021466.1,855-873).
gttctatggtgatcaagat

SEQ ID NO: 540994 - DNA, 19 bp, Mus musculus
  siRNA target sequence for Taf1a (NM_021466.1,885-903).
gatgctcaccaattatgca

SEQ ID NO: 540995 - DNA, 19 bp, Mus musculus
  siRNA target sequence for Taf1a (NM_021466.1,929-947).
ccaacgcccacgtctactt

SEQ ID NO: 540996 - DNA, 19 bp, Mus musculus
  siRNA target sequence for Taf1a (NM_021466.1,930-948).
caacgcccacgtctactta

SEQ ID NO: 540997 - DNA, 19 bp, Mus musculus
  siRNA target sequence for Taf1a (NM_021466.1,935-953).
cccacgtctacttatacga

SEQ ID NO: 540998 - DNA, 19 bp, Mus musculus
  siRNA target sequence for Taf1a (NM_021466.1,976-994).
ccgagggcgaagctcataa

SEQ ID NO: 540999 - DNA, 19 bp, Mus musculus
  siRNA target sequence for Taf1a (NM_021466.1,980-998).
gggcgaagctcataagtgt

SEQ ID NO: 541000 - DNA, 19 bp, Mus musculus
  siRNA target sequence for Taf1a (NM_021466.1,981-999).
ggcgaagctcataagtgtt

SEQ ID NO: 541001 - DNA, 19 bp, Mus musculus
  siRNA target sequence for Taf1a (NM_021466.1,1021-1039).
gtgccatcccatacactaa

SEQ ID NO: 541002 - DNA, 19 bp, Mus musculus
  siRNA target sequence for Taf1a (NM_021466.1,1029-1047).
ccatacactaatgttagaa

SEQ ID NO: 541003 - DNA, 19 bp, Mus musculus
  siRNA target sequence for Taf1a (NM_021466.1,1030-1048).
catacactaatgttagaat

SEQ ID NO: 541004 - DNA, 19 bp, Mus musculus
  siRNA target sequence for Taf1a (NM_021466.1,1034-1052).
cactaatgttagaattcca

SEQ ID NO: 541005 - DNA, 19 bp, Mus musculus
  siRNA target sequence for Taf1a (NM_021466.1,1036-1054).
ctaatgttagaattccata

SEQ ID NO: 541006 - DNA, 19 bp, Mus musculus
  siRNA target sequence for Taf1a (NM_021466.1,1045-1063).
gaattccatacattgctta

SEQ ID NO: 541007 - DNA, 19 bp, Mus musculus
  siRNA target sequence for Taf1a (NM_021466.1,1123-1141).
gacttcgctggatgcaata

SEQ ID NO: 541008 - DNA, 19 bp, Mus musculus
  siRNA target sequence for Taf1a (NM_021466.1,1130-1148).
ctggatgcaataagaacat

SEQ ID NO: 541009 - DNA, 19 bp, Mus musculus
  siRNA target sequence for Taf1a (NM_021466.1,1157-1175).
ggaaatacttggcaaagta

SEQ ID NO: 541010 - DNA, 19 bp, Mus musculus
  siRNA target sequence for Taf1a (NM_021466.1,1158-1176).
gaaatacttggcaaagtat

SEQ ID NO: 541011 - DNA, 19 bp, Mus musculus
  siRNA target sequence for Taf1a (NM_021466.1,1216-1234).
gaagaagagtggaagtcta

SEQ ID NO: 541012 - DNA, 19 bp, Mus musculus
  siRNA target sequence for Taf1a (NM_021466.1,1308-1326).
ggcttgtgagaaagctttt

SEQ ID NO: 541013 - DNA, 19 bp, Mus musculus
  siRNA target sequence for Taf1a (NM_021466.1,1329-1347).
ggcaggggtccttttagga

SEQ ID NO: 541014 - DNA, 19 bp, Mus musculus
  siRNA target sequence for Taf1a (NM_021466.1,1384-1402).
gatcatgaaaccttgaaga

SEQ ID NO: 541015 - DNA, 19 bp, Mus musculus
  siRNA target sequence for Taf1a (NM_021466.1,1425-1443).
gtctgtgaaaaaatacact

SEQ ID NO: 541016 - DNA, 19 bp, Mus musculus
  siRNA target sequence for Taf1b (NM_020614.1,822-840).
catctataaaaacatgatt

SEQ ID NO: 541017 - DNA, 19 bp, Mus musculus
  siRNA target sequence for Taf1b (NM_020614.1,936-954).
ggtcaatctccctgatgaa

SEQ ID NO: 541018 - DNA, 19 bp, Mus musculus
  siRNA target sequence for Taf1b (NM_020614.1,937-955).
gtcaatctccctgatgaaa

SEQ ID NO: 541019 - DNA, 19 bp, Mus musculus
  siRNA target sequence for Taf1b (NM_020614.1,949-967).
gatgaaatgcacactttaa

SEQ ID NO: 541020 - DNA, 19 bp, Mus musculus
  siRNA target sequence for Taf1b (NM_020614.1,968-986).
cctgtcaagtagtaaagtt

SEQ ID NO: 541021 - DNA, 19 bp, Mus musculus
  siRNA target sequence for Taf1b (NM_020614.1,1024-1042).
cctatagctaaaacgaaaa

SEQ ID NO: 541022 - DNA, 19 bp, Mus musculus
  siRNA target sequence for Taf1b (NM_020614.1,1043-1061).
ggacagttaaatatgatgt

SEQ ID NO: 541023 - DNA, 19 bp, Mus musculus
  siRNA target sequence for Taf1b (NM_020614.1,1179-1197).
gccccagtttgatttcaga

SEQ ID NO: 541024 - DNA, 19 bp, Mus musculus
  siRNA target sequence for Taf1b (NM_020614.1,1180-1198).
ccccagtttgatttcagaa

SEQ ID NO: 541025 - DNA, 19 bp, Mus musculus
  siRNA target sequence for Taf1b (NM_020614.1,1183-1201).
cagtttgatttcagaaaat

SEQ ID NO: 541026 - DNA, 19 bp, Mus musculus
  siRNA target sequence for Taf1b (NM_020614.1,1202-1220).
ggtaccaagttatgaagaa

SEQ ID NO: 541027 - DNA, 19 bp, Mus musculus
  siRNA target sequence for Taf1b (NM_020614.1,1206-1224).
ccaagttatgaagaaaact

SEQ ID NO: 541028 - DNA, 19 bp, Mus musculus
  siRNA target sequence for Taf1b (NM_020614.1,1207-1225).
caagttatgaagaaaactt

SEQ ID NO: 541029 - DNA, 19 bp, Mus musculus
  siRNA target sequence for Taf1b (NM_020614.1,1265-1283).
ggtatgcttggaaaaccaa

SEQ ID NO: 541030 - DNA, 19 bp, Mus musculus
  siRNA target sequence for Taf1b (NM_020614.1,1297-1315).
cgttcacacatcgataagt

SEQ ID NO: 541031 - DNA, 19 bp, Mus musculus
  siRNA target sequence for Taf1b (NM_020614.1,1309-1327).
gataagtccgtcgcatata

SEQ ID NO: 541032 - DNA, 19 bp, Mus musculus
  siRNA target sequence for Taf1b (NM_020614.1,1314-1332).
gtccgtcgcatataagaga

SEQ ID NO: 541033 - DNA, 19 bp, Mus musculus
  siRNA target sequence for Taf1b (NM_020614.1,1320-1338).
cgcatataagagaagaaaa

SEQ ID NO: 541034 - DNA, 19 bp, Mus musculus
  siRNA target sequence for Taf1b (NM_020614.1,1401-1419).
gcaggccccttcaagtttt

SEQ ID NO: 541035 - DNA, 19 bp, Mus musculus
  siRNA target sequence for Taf1b (NM_020614.1,1405-1423).
gccccttcaagttttcagt

SEQ ID NO: 541036 - DNA, 19 bp, Mus musculus
  siRNA target sequence for Taf1b (NM_020614.1,1494-1512).
gaaaggccagtccatgata

SEQ ID NO: 541037 - DNA, 19 bp, Mus musculus
  siRNA target sequence for Taf1b (NM_020614.1,1498-1516).
ggccagtccatgataacca

SEQ ID NO: 541038 - DNA, 19 bp, Mus musculus
  siRNA target sequence for Taf1b (NM_020614.1,1499-1517).
gccagtccatgataaccaa

SEQ ID NO: 541039 - DNA, 19 bp, Mus musculus
  siRNA target sequence for Taf1b (NM_020614.1,1532-1550).
ggctcagtacccagaagtt

SEQ ID NO: 541040 - DNA, 19 bp, Mus musculus
  siRNA target sequence for Taf1b (NM_020614.1,1575-1593).
gacaacttacgaagaatca

SEQ ID NO: 541041 - DNA, 19 bp, Mus musculus
  siRNA target sequence for Taf1b (NM_020614.1,1605-1623).
gagttaccagtttatacta

SEQ ID NO: 541042 - DNA, 19 bp, Mus musculus
  siRNA target sequence for Taf1b (NM_020614.1,1612-1630).
cagtttatactaaacatct

SEQ ID NO: 541043 - DNA, 19 bp, Mus musculus
  siRNA target sequence for Taf1b (NM_020614.1,1632-1650).
ctccttcttactgagaata

SEQ ID NO: 541044 - DNA, 19 bp, Mus musculus
  siRNA target sequence for Taf1b (NM_020614.1,1634-1652).
ccttcttactgagaataaa

SEQ ID NO: 541045 - DNA, 19 bp, Mus musculus
  siRNA target sequence for Taf1c (NM_021441.1,251-269).
ccctgcgcccttcattgtt

SEQ ID NO: 541046 - DNA, 19 bp, Mus musculus
  siRNA target sequence for Taf1c (NM_021441.1,646-664).
ggctactcgaaaaagatga

SEQ ID NO: 541047 - DNA, 19 bp, Mus musculus
  siRNA target sequence for Taf1c (NM_021441.1,653-671).
cgaaaaagatgactatagt

SEQ ID NO: 541048 - DNA, 19 bp, Mus musculus
  siRNA target sequence for Taf1c (NM_021441.1,788-806).
ggtcagtgtcactactcat

SEQ ID NO: 541049 - DNA, 19 bp, Mus musculus
  siRNA target sequence for Taf1c (NM_021441.1,1083-1101).
ggccgtccgctctgactat

SEQ ID NO: 541050 - DNA, 19 bp, Mus musculus
  siRNA target sequence for Taf1c (NM_021441.1,1085-1103).
ccgtccgctctgactatca

SEQ ID NO: 541051 - DNA, 19 bp, Mus musculus
  siRNA target sequence for Taf1c (NM_021441.1,1109-1127).
ccacgtggaagattgataa

SEQ ID NO: 541052 - DNA, 19 bp, Mus musculus
  siRNA target sequence for Taf1c (NM_021441.1,1227-1245).
ccgttccggagctgtttgt

SEQ ID NO: 541053 - DNA, 19 bp, Mus musculus
  siRNA target sequence for Taf1c (NM_021441.1,1264-1282).
gggctgcagacgatctaca

SEQ ID NO: 541054 - DNA, 19 bp, Mus musculus
  siRNA target sequence for Taf1c (NM_021441.1,1379-1397).
gtgtgaaaatggttgacat

SEQ ID NO: 541055 - DNA, 19 bp, Mus musculus
  siRNA target sequence for Taf1c (NM_021441.1,1695-1713).
gcagctgcttcatataaca

SEQ ID NO: 541056 - DNA, 19 bp, Mus musculus
  siRNA target sequence for Tank (NM_011529.1,133-151).
ctaccatcctttatagtga

SEQ ID NO: 541057 - DNA, 19 bp, Mus musculus
  siRNA target sequence for Tank (NM_011529.1,219-237).
cgacaggcatgcatggata

SEQ ID NO: 541058 - DNA, 19 bp, Mus musculus
  siRNA target sequence for Tank (NM_011529.1,225-243).
gcatgcatggatagagatt

SEQ ID NO: 541059 - DNA, 19 bp, Mus musculus
  siRNA target sequence for Tank (NM_011529.1,373-391).
ctagtcgagataacagtta

SEQ ID NO: 541060 - DNA, 19 bp, Mus musculus
  siRNA target sequence for Tank (NM_011529.1,450-468).
gaaccacatgataaagtga

SEQ ID NO: 541061 - DNA, 19 bp, Mus musculus
  siRNA target sequence for Tank (NM_011529.1,471-489).
ctaggaacactgagagata

SEQ ID NO: 541062 - DNA, 19 bp, Mus musculus
  siRNA target sequence for Tank (NM_011529.1,500-518).
ggtgagacgacaagaagtt

SEQ ID NO: 541063 - DNA, 19 bp, Mus musculus
  siRNA target sequence for Tank (NM_011529.1,501-519).
gtgagacgacaagaagttt

SEQ ID NO: 541064 - DNA, 19 bp, Mus musculus
  siRNA target sequence for Tank (NM_011529.1,503-521).
gagacgacaagaagtttct

SEQ ID NO: 541065 - DNA, 19 bp, Mus musculus
  siRNA target sequence for Tank (NM_011529.1,561-579).
catcacgaaagggataata

SEQ ID NO: 541066 - DNA, 19 bp, Mus musculus
  siRNA target sequence for Tank (NM_011529.1,593-611).
ctgggaccttaaagaagaa

SEQ ID NO: 541067 - DNA, 19 bp, Mus musculus
  siRNA target sequence for Tank (NM_011529.1,609-627).
gaatttcataggatttgct

SEQ ID NO: 541068 - DNA, 19 bp, Mus musculus
  siRNA target sequence for Tank (NM_011529.1,620-638).
gatttgcttgctagcaaaa

SEQ ID NO: 541069 - DNA, 19 bp, Mus musculus
  siRNA target sequence for Tank (NM_011529.1,648-666).
gatcacttaagcaaactta

SEQ ID NO: 541070 - DNA, 19 bp, Mus musculus
  siRNA target sequence for Tank (NM_011529.1,753-771).
ccccaggctaaagatgata

SEQ ID NO: 541071 - DNA, 19 bp, Mus musculus
  siRNA target sequence for Tank (NM_011529.1,759-777).
gctaaagatgatataaata

SEQ ID NO: 541072 - DNA, 19 bp, Mus musculus
  siRNA target sequence for Tank (NM_011529.1,830-848).
ggaagatacctcttttgaa

SEQ ID NO: 541073 - DNA, 19 bp, Mus musculus
  siRNA target sequence for Tank (NM_011529.1,876-894).
ccgcctatggacaatgact

SEQ ID NO: 541074 - DNA, 19 bp, Mus musculus
  siRNA target sequence for Tank (NM_011529.1,880-898).
ctatggacaatgactctat

SEQ ID NO: 541075 - DNA, 19 bp, Mus musculus
  siRNA target sequence for Tank (NM_011529.1,884-902).
ggacaatgactctattttt

SEQ ID NO: 541076 - DNA, 19 bp, Mus musculus
  siRNA target sequence for Tank (NM_011529.1,957-975).
gtgtgccaggaccgattta

SEQ ID NO: 541077 - DNA, 19 bp, Mus musculus
  siRNA target sequence for Tank (NM_011529.1,959-977).
gtgccaggaccgatttaat

SEQ ID NO: 541078 - DNA, 19 bp, Mus musculus
  siRNA target sequence for Tank (NM_011529.1,961-979).
gccaggaccgatttaatat

SEQ ID NO: 541079 - DNA, 19 bp, Mus musculus
  siRNA target sequence for Tank (NM_011529.1,992-1010).
caacccaggaaactttgtt

SEQ ID NO: 541080 - DNA, 19 bp, Mus musculus
  siRNA target sequence for Tank (NM_011529.1,1049-1067).
ccccataacttcagctata

SEQ ID NO: 541081 - DNA, 19 bp, Mus musculus
  siRNA target sequence for Tank (NM_011529.1,1057-1075).
cttcagctatacaaaacct

SEQ ID NO: 541082 - DNA, 19 bp, Mus musculus
  siRNA target sequence for Tank (NM_011529.1,1060-1078).
cagctatacaaaaccttaa

SEQ ID NO: 541083 - DNA, 19 bp, Mus musculus
  siRNA target sequence for Tank (NM_011529.1,1062-1080).
gctatacaaaaccttaaaa

SEQ ID NO: 541084 - DNA, 19 bp, Mus musculus
  siRNA target sequence for Tank (NM_011529.1,1129-1147).
ctggagaccacaatgtgtt

SEQ ID NO: 541085 - DNA, 19 bp, Mus musculus
  siRNA target sequence for Tank (NM_011529.1,1143-1161).
gtgttctatgtaaatacgt

SEQ ID NO: 541086 - DNA, 19 bp, Mus musculus
  siRNA target sequence for Tank (NM_011529.1,1175-1193).
cccgcctgacgcacctttt

SEQ ID NO: 541087 - DNA, 19 bp, Mus musculus
  siRNA target sequence for Tank (NM_011529.1,1247-1265).
gaagccttttcttaaccaa

SEQ ID NO: 541088 - DNA, 19 bp, Mus musculus
  siRNA target sequence for Tank (NM_011529.1,1274-1292).
cttagtggtaccaagtgat

SEQ ID NO: 541089 - DNA, 19 bp, Mus musculus
  siRNA target sequence for Tank (NM_011529.1,1314-1332).
cctctagtgtgtgaattct

SEQ ID NO: 541090 - DNA, 19 bp, Mus musculus
  siRNA target sequence for Tank (NM_011529.1,1341-1359).
cttttcccaccatccatta

SEQ ID NO: 541091 - DNA, 19 bp, Mus musculus
  siRNA target sequence for Tank (NM_011529.1,1371-1389).
gatttcctccggcatctta

SEQ ID NO: 541092 - DNA, 19 bp, Mus musculus
  siRNA target sequence for Tank (NM_011529.1,1376-1394).
cctccggcatcttaataca

SEQ ID NO: 541093 - DNA, 19 bp, Mus musculus
  siRNA target sequence for Tcfl5 (NM_178254.2,489-507).
cgggcgtggcgctcaacaa

SEQ ID NO: 541094 - DNA, 19 bp, Mus musculus
  siRNA target sequence for Tcfl5 (NM_178254.2,491-509).
ggcgtggcgctcaacaatt

SEQ ID NO: 541095 - DNA, 19 bp, Mus musculus
  siRNA target sequence for Tcfl5 (NM_178254.2,496-514).
ggcgctcaacaatttggta

SEQ ID NO: 541096 - DNA, 19 bp, Mus musculus
  siRNA target sequence for Tcfl5 (NM_178254.2,497-515).
gcgctcaacaatttggtaa

SEQ ID NO: 541097 - DNA, 19 bp, Mus musculus
  siRNA target sequence for Tcfl5 (NM_178254.2,502-520).
caacaatttggtaactctt

SEQ ID NO: 541098 - DNA, 19 bp, Mus musculus
  siRNA target sequence for Tcfl5 (NM_178254.2,524-542).
cgacatccatctgaattaa

SEQ ID NO: 541099 - DNA, 19 bp, Mus musculus
  siRNA target sequence for Tcfl5 (NM_178254.2,576-594).
gtacgaccttagtgaaaaa

SEQ ID NO: 541100 - DNA, 19 bp, Mus musculus
  siRNA target sequence for Tcfl5 (NM_178254.2,631-649).
ctacccactgtttacaagt

SEQ ID NO: 541101 - DNA, 19 bp, Mus musculus
  siRNA target sequence for Tcfl5 (NM_178254.2,680-698).
gcacagacgcagagttcta

SEQ ID NO: 541102 - DNA, 19 bp, Mus musculus
  siRNA target sequence for Tcfl5 (NM_178254.2,699-717).
gtaactcatgctctatact

SEQ ID NO: 541103 - DNA, 19 bp, Mus musculus
  siRNA target sequence for Tcfl5 (NM_178254.2,768-786).
gttaccagcaagagattga

SEQ ID NO: 541104 - DNA, 19 bp, Mus musculus
  siRNA target sequence for Tcfl5 (NM_178254.2,826-844).
gccggagcaggtttggatt

SEQ ID NO: 541105 - DNA, 19 bp, Mus musculus
  siRNA target sequence for Tcfl5 (NM_178254.2,827-845).
ccggagcaggtttggatta

SEQ ID NO: 541106 - DNA, 19 bp, Mus musculus
  siRNA target sequence for Tcfl5 (NM_178254.2,828-846).
cggagcaggtttggattaa

SEQ ID NO: 541107 - DNA, 19 bp, Mus musculus
  siRNA target sequence for Tcfl5 (NM_178254.2,851-869).
ggagaagaagcgctatgta

SEQ ID NO: 541108 - DNA, 19 bp, Mus musculus
  siRNA target sequence for Tcfl5 (NM_178254.2,852-870).
gagaagaagcgctatgtaa

SEQ ID NO: 541109 - DNA, 19 bp, Mus musculus
  siRNA target sequence for Tcfl5 (NM_178254.2,959-977).
ggtgaaggctcttcaacat

SEQ ID NO: 541110 - DNA, 19 bp, Mus musculus
  siRNA target sequence for Tcfl5 (NM_178254.2,999-1017).
cagagtcctcacagtcaaa

SEQ ID NO: 541111 - DNA, 19 bp, Mus musculus
  siRNA target sequence for Tcfl5 (NM_178254.2,1072-1090).
gaggcataaccgaatggaa

SEQ ID NO: 541112 - DNA, 19 bp, Mus musculus
  siRNA target sequence for Tcfl5 (NM_178254.2,1103-1121).
cgcagaatccgcatttgct

SEQ ID NO: 541113 - DNA, 19 bp, Mus musculus
  siRNA target sequence for Tcfl5 (NM_178254.2,1152-1170).
gcaatgcggagacagataa

SEQ ID NO: 541114 - DNA, 19 bp, Mus musculus
  siRNA target sequence for Tcfl5 (NM_178254.2,1157-1175).
gcggagacagataaagcaa

SEQ ID NO: 541115 - DNA, 19 bp, Mus musculus
  siRNA target sequence for Tcfl5 (NM_178254.2,1194-1212).
cagcattcctgaagtacat

SEQ ID NO: 541116 - DNA, 19 bp, Mus musculus
  siRNA target sequence for Tcfl5 (NM_178254.2,1221-1239).
gacatggggactctcttaa

SEQ ID NO: 541117 - DNA, 19 bp, Mus musculus
  siRNA target sequence for Tcfl5 (NM_178254.2,1223-1241).
catggggactctcttaaaa

SEQ ID NO: 541118 - DNA, 19 bp, Mus musculus
  siRNA target sequence for Tcfl5 (NM_178254.2,1228-1246).
ggactctcttaaaaaggaa

SEQ ID NO: 541119 - DNA, 19 bp, Mus musculus
  siRNA target sequence for Tcfl5 (NM_178254.2,1244-1262).
gaatttgagagcgtgtttt

SEQ ID NO: 541120 - DNA, 19 bp, Mus musculus
  siRNA target sequence for Tcfl5 (NM_178254.2,1344-1362).
gccctgccatggagatcaa

SEQ ID NO: 541121 - DNA, 19 bp, Mus musculus
  siRNA target sequence for Tcfl5 (NM_178254.2,1346-1364).
cctgccatggagatcaagt

SEQ ID NO: 541122 - DNA, 19 bp, Mus musculus
  siRNA target sequence for Theg (NM_011583.2,127-145).
caagactttgggagagtta

SEQ ID NO: 541123 - DNA, 19 bp, Mus musculus
  siRNA target sequence for Theg (NM_011583.2,564-582).
ggaccgagcgatttatcga

SEQ ID NO: 541124 - DNA, 19 bp, Mus musculus
  siRNA target sequence for Theg (NM_011583.2,650-668).
cggttctaccaggaatatt

SEQ ID NO: 541125 - DNA, 19 bp, Mus musculus
  siRNA target sequence for Theg (NM_011583.2,756-774).
ccccgaaggttcgcaataa

SEQ ID NO: 541126 - DNA, 19 bp, Mus musculus
  siRNA target sequence for Theg (NM_011583.2,758-776).
ccgaaggttcgcaataaca

SEQ ID NO: 541127 - DNA, 19 bp, Mus musculus
  siRNA target sequence for Theg (NM_011583.2,759-777).
cgaaggttcgcaataacat

SEQ ID NO: 541128 - DNA, 19 bp, Mus musculus
  siRNA target sequence for Theg (NM_011583.2,919-937).
gccttacgtgtcagactat

SEQ ID NO: 541129 - DNA, 19 bp, Mus musculus
  siRNA target sequence for Theg (NM_011583.2,921-939).
cttacgtgtcagactataa

SEQ ID NO: 541130 - DNA, 19 bp, Mus musculus
  siRNA target sequence for Theg (NM_011583.2,1040-1058).
gccagttcacggatcatct

SEQ ID NO: 541131 - DNA, 19 bp, Mus musculus
  siRNA target sequence for Theg (NM_011583.2,1063-1081).
ggcccagcccaaaattcga

SEQ ID NO: 541132 - DNA, 19 bp, Mus musculus
  siRNA target sequence for Theg (NM_011583.2,1064-1082).
gcccagcccaaaattcgaa

SEQ ID NO: 541133 - DNA, 19 bp, Mus musculus
  siRNA target sequence for Theg (NM_011583.2,1065-1083).
cccagcccaaaattcgaaa

SEQ ID NO: 541134 - DNA, 19 bp, Mus musculus
  siRNA target sequence for Theg (NM_011583.2,1097-1115).
ggctacaacccatactaca

SEQ ID NO: 541135 - DNA, 19 bp, Mus musculus
  siRNA target sequence for Theg (NM_011583.2,1141-1159).
ggcatctcctcgaatttat

SEQ ID NO: 541136 - DNA, 19 bp, Mus musculus
  siRNA target sequence for Theg (NM_011583.2,1143-1161).
catctcctcgaatttatga

SEQ ID NO: 541137 - DNA, 19 bp, Mus musculus
  siRNA target sequence for Tiam2 (NM_011878.1,315-333).
gggaactccgagagtcaat

SEQ ID NO: 541138 - DNA, 19 bp, Mus musculus
  siRNA target sequence for Tiam2 (NM_011878.1,316-334).
ggaactccgagagtcaata

SEQ ID NO: 541139 - DNA, 19 bp, Mus musculus
  siRNA target sequence for Tiam2 (NM_011878.1,317-335).
gaactccgagagtcaatat

SEQ ID NO: 541140 - DNA, 19 bp, Mus musculus
  siRNA target sequence for Tiam2 (NM_011878.1,322-340).
ccgagagtcaatatacctt

SEQ ID NO: 541141 - DNA, 19 bp, Mus musculus
  siRNA target sequence for Tiam2 (NM_011878.1,338-356).
cttccaaggatccaagaat

SEQ ID NO: 541142 - DNA, 19 bp, Mus musculus
  siRNA target sequence for Tiam2 (NM_011878.1,342-360).
caaggatccaagaatcata

SEQ ID NO: 541143 - DNA, 19 bp, Mus musculus
  siRNA target sequence for Tiam2 (NM_011878.1,345-363).
ggatccaagaatcatagta

SEQ ID NO: 541144 - DNA, 19 bp, Mus musculus
  siRNA target sequence for Tiam2 (NM_011878.1,346-364).
gatccaagaatcatagtaa

SEQ ID NO: 541145 - DNA, 19 bp, Mus musculus
  siRNA target sequence for Tiam2 (NM_011878.1,369-387).
gtcactggtgctaagcaaa

SEQ ID NO: 541146 - DNA, 19 bp, Mus musculus
  siRNA target sequence for Tiam2 (NM_011878.1,543-561).
ctcagtggacccacatgta

SEQ ID NO: 541147 - DNA, 19 bp, Mus musculus
  siRNA target sequence for Tiam2 (NM_011878.1,549-567).
ggacccacatgtaaagtct

SEQ ID NO: 541148 - DNA, 19 bp, Mus musculus
  siRNA target sequence for Tiam2 (NM_011878.1,584-602).
ctctaagcacagagcaaat

SEQ ID NO: 541149 - DNA, 19 bp, Mus musculus
  siRNA target sequence for Tiam2 (NM_011878.1,719-737).
ctgctatgggagaaaggaa

SEQ ID NO: 541150 - DNA, 19 bp, Mus musculus
  siRNA target sequence for Tiam2 (NM_011878.1,883-901).
ctgtacggctgctgagata

SEQ ID NO: 541151 - DNA, 19 bp, Mus musculus
  siRNA target sequence for Tiam2 (NM_011878.1,885-903).
gtacggctgctgagatact

SEQ ID NO: 541152 - DNA, 19 bp, Mus musculus
  siRNA target sequence for Tiam2 (NM_011878.1,896-914).
gagatactcccctacctta

SEQ ID NO: 541153 - DNA, 19 bp, Mus musculus
  siRNA target sequence for Tiam2 (NM_011878.1,1146-1164).
ccacccagtgacaccaaaa

SEQ ID NO: 541154 - DNA, 19 bp, Mus musculus
  siRNA target sequence for Tiam2 (NM_011878.1,1192-1210).
cctccctccgggaattgta

SEQ ID NO: 541155 - DNA, 19 bp, Mus musculus
  siRNA target sequence for Tiam2 (NM_011878.1,1195-1213).
ccctccgggaattgtacaa

SEQ ID NO: 541156 - DNA, 19 bp, Mus musculus
  siRNA target sequence for Tiam2 (NM_011878.1,1196-1214).
cctccgggaattgtacaaa

SEQ ID NO: 541157 - DNA, 19 bp, Mus musculus
  siRNA target sequence for Tiam2 (NM_011878.1,1252-1270).
gcctttcttccaatgagta

SEQ ID NO: 541158 - DNA, 19 bp, Mus musculus
  siRNA target sequence for Tiam2 (NM_011878.1,1388-1406).
caagtccaaagccttaact

SEQ ID NO: 541159 - DNA, 19 bp, Mus musculus
  siRNA target sequence for Tiam2 (NM_011878.1,1391-1409).
gtccaaagccttaactgaa

SEQ ID NO: 541160 - DNA, 19 bp, Mus musculus
  siRNA target sequence for Tiam2 (NM_011878.1,1514-1532).
ggagggcagtgagtacttt

SEQ ID NO: 541161 - DNA, 19 bp, Mus musculus
  siRNA target sequence for Tiam2 (NM_011878.1,1517-1535).
gggcagtgagtactttgat

SEQ ID NO: 541162 - DNA, 19 bp, Mus musculus
  siRNA target sequence for Tiam2 (NM_011878.1,1538-1556).
ccactcagatggactgaat

SEQ ID NO: 541163 - DNA, 19 bp, Mus musculus
  siRNA target sequence for Tiam2 (NM_011878.1,1578-1596).
cagacatcttccttactgt

SEQ ID NO: 541164 - DNA, 19 bp, Mus musculus
  siRNA target sequence for Tiam2 (NM_011878.1,1668-1686).
cgacagaacatctatgaga

SEQ ID NO: 541165 - DNA, 19 bp, Mus musculus
  siRNA target sequence for Tiam2 (NM_011878.1,1834-1852).
ccgggtggctcttcttcaa

SEQ ID NO: 541166 - DNA, 19 bp, Mus musculus
  siRNA target sequence for Tiam2 (NM_011878.1,1835-1853).
cgggtggctcttcttcaaa

SEQ ID NO: 541167 - DNA, 19 bp, Mus musculus
  siRNA target sequence for Tiam2 (NM_011878.1,2086-2104).
gtggggacgtctacctatt

SEQ ID NO: 541168 - DNA, 19 bp, Mus musculus
  siRNA target sequence for Tiam2 (NM_011878.1,2089-2107).
gggacgtctacctattcca

SEQ ID NO: 541169 - DNA, 19 bp, Mus musculus
  siRNA target sequence for Tiam2 (NM_011878.1,2314-2332).
ggaaggccatcgagaatca

SEQ ID NO: 541170 - DNA, 19 bp, Mus musculus
  siRNA target sequence for Tiam2 (NM_011878.1,2409-2427).
caaggtggggagttaccaa

SEQ ID NO: 541171 - DNA, 19 bp, Mus musculus
  siRNA target sequence for Tiam2 (NM_011878.1,2656-2674).
ccataactcagatgtttga

SEQ ID NO: 541172 - DNA, 19 bp, Mus musculus
  siRNA target sequence for Tiam2 (NM_011878.1,2797-2815).
gggaagtccagacttatgt

SEQ ID NO: 541173 - DNA, 19 bp, Mus musculus
  siRNA target sequence for Tiam2 (NM_011878.1,2816-2834).
ccacttccaggataacgaa

SEQ ID NO: 541174 - DNA, 19 bp, Mus musculus
  siRNA target sequence for Tiam2 (NM_011878.1,2825-2843).
ggataacgaaggagttact

SEQ ID NO: 541175 - DNA, 19 bp, Mus musculus
  siRNA target sequence for Tiam2 (NM_011878.1,2936-2954).
ccgaaaggtggtcgataaa

SEQ ID NO: 541176 - DNA, 19 bp, Mus musculus
  siRNA target sequence for Tiam2 (NM_011878.1,2937-2955).
cgaaaggtggtcgataaaa

SEQ ID NO: 541177 - DNA, 19 bp, Mus musculus
  siRNA target sequence for Tiam2 (NM_011878.1,2990-3008).
catgcaagagcaggtttat

SEQ ID NO: 541178 - DNA, 19 bp, Mus musculus
  siRNA target sequence for Tiam2 (NM_011878.1,2993-3011).
gcaagagcaggtttatgat

SEQ ID NO: 541179 - DNA, 19 bp, Mus musculus
  siRNA target sequence for Tiam2 (NM_011878.1,3002-3020).
ggtttatgatgaaatcgaa

SEQ ID NO: 541180 - DNA, 19 bp, Mus musculus
  siRNA target sequence for Tiam2 (NM_011878.1,3116-3134).
gcatctcaaccggatattt

SEQ ID NO: 541181 - DNA, 19 bp, Mus musculus
  siRNA target sequence for Tiam2 (NM_011878.1,3117-3135).
catctcaaccggatattta

SEQ ID NO: 541182 - DNA, 19 bp, Mus musculus
  siRNA target sequence for Tiam2 (NM_011878.1,3122-3140).
caaccggatatttatcagt

SEQ ID NO: 541183 - DNA, 19 bp, Mus musculus
  siRNA target sequence for Tiam2 (NM_011878.1,3188-3206).
caacgaaatcacaagctta

SEQ ID NO: 541184 - DNA, 19 bp, Mus musculus
  siRNA target sequence for Tiam2 (NM_011878.1,3191-3209).
cgaaatcacaagcttaaat

SEQ ID NO: 541185 - DNA, 19 bp, Mus musculus
  siRNA target sequence for Tiam2 (NM_011878.1,3240-3258).
cagatggaggctttgtttt

SEQ ID NO: 541186 - DNA, 19 bp, Mus musculus
  siRNA target sequence for Tiam2 (NM_011878.1,3347-3365).
ctccagggaccagaaaagt

SEQ ID NO: 541187 - DNA, 19 bp, Mus musculus
  siRNA target sequence for Tiam2 (NM_011878.1,3402-3420).
gaattcctggataacttta

SEQ ID NO: 541188 - DNA, 19 bp, Mus musculus
  siRNA target sequence for Tiam2 (NM_011878.1,3564-3582).
ctctgcagggacttgaaca

SEQ ID NO: 541189 - DNA, 19 bp, Mus musculus
  siRNA target sequence for Tiam2 (NM_011878.1,3666-3684).
gatcgcctccggaaagtca

SEQ ID NO: 541190 - DNA, 19 bp, Mus musculus
  siRNA target sequence for Tiam2 (NM_011878.1,3696-3714).
gtagacacagagaagtctt

SEQ ID NO: 541191 - DNA, 19 bp, Mus musculus
  siRNA target sequence for Tiam2 (NM_011878.1,3728-3746).
gagctgcctctttgaacta

SEQ ID NO: 541192 - DNA, 19 bp, Mus musculus
  siRNA target sequence for Tiam2 (NM_011878.1,3730-3748).
gctgcctctttgaactata

SEQ ID NO: 541193 - DNA, 19 bp, Mus musculus
  siRNA target sequence for Tiam2 (NM_011878.1,3749-3767).
cttggagccacttcagaat

SEQ ID NO: 541194 - DNA, 19 bp, Mus musculus
  siRNA target sequence for Tiam2 (NM_011878.1,3872-3890).
cgcttcctcggactttagt

SEQ ID NO: 541195 - DNA, 19 bp, Mus musculus
  siRNA target sequence for Tiam2 (NM_011878.1,3874-3892).
cttcctcggactttagtgt

SEQ ID NO: 541196 - DNA, 19 bp, Mus musculus
  siRNA target sequence for Tiam2 (NM_011878.1,3903-3921).
ccctcacagtttcgaaaat

SEQ ID NO: 541197 - DNA, 19 bp, Mus musculus
  siRNA target sequence for Tiam2 (NM_011878.1,3904-3922).
cctcacagtttcgaaaatt

SEQ ID NO: 541198 - DNA, 19 bp, Mus musculus
  siRNA target sequence for Tiam2 (NM_011878.1,3950-3968).
ctactatgcggatcacttt

SEQ ID NO: 541199 - DNA, 19 bp, Mus musculus
  siRNA target sequence for Tiam2 (NM_011878.1,3958-3976).
cggatcactttaagctata

SEQ ID NO: 541200 - DNA, 19 bp, Mus musculus
  siRNA target sequence for Tiam2 (NM_011878.1,3991-4009).
ccaaccacattaaagtaca

SEQ ID NO: 541201 - DNA, 19 bp, Mus musculus
  siRNA target sequence for Tiam2 (NM_011878.1,4209-4227).
gcactaaaggccatggaaa

SEQ ID NO: 541202 - DNA, 19 bp, Mus musculus
  siRNA target sequence for Tiam2 (NM_011878.1,4210-4228).
cactaaaggccatggaaaa

SEQ ID NO: 541203 - DNA, 19 bp, Mus musculus
  siRNA target sequence for Tiam2 (NM_011878.1,4384-4402).
cgttcctgtctctaggaaa

SEQ ID NO: 541204 - DNA, 19 bp, Mus musculus
  siRNA target sequence for Tiam2 (NM_011878.1,4413-4431).
gacattgagctcacagtat

SEQ ID NO: 541205 - DNA, 19 bp, Mus musculus
  siRNA target sequence for Tiam2 (NM_011878.1,4415-4433).
cattgagctcacagtattt

SEQ ID NO: 541206 - DNA, 19 bp, Mus musculus
  siRNA target sequence for Tiam2 (NM_011878.1,4446-4464).
gctgtcatactggtttata

SEQ ID NO: 541207 - DNA, 19 bp, Mus musculus
  siRNA target sequence for Tiam2 (NM_011878.1,4525-4543).
ctgacttggatccatttaa

SEQ ID NO: 541208 - DNA, 19 bp, Mus musculus
  siRNA target sequence for Tiam2 (NM_011878.1,4550-4568).
ctggttgattcccatatct

SEQ ID NO: 541209 - DNA, 19 bp, Mus musculus
  siRNA target sequence for Tiam2 (NM_011878.1,4561-4579).
ccatatctgcgcttcaagt

SEQ ID NO: 541210 - DNA, 19 bp, Mus musculus
  siRNA target sequence for Tiam2 (NM_011878.1,4562-4580).
catatctgcgcttcaagtt

SEQ ID NO: 541211 - DNA, 19 bp, Mus musculus
  siRNA target sequence for Tiam2 (NM_011878.1,4567-4585).
ctgcgcttcaagttagact

SEQ ID NO: 541212 - DNA, 19 bp, Mus musculus
  siRNA target sequence for Tiam2 (NM_011878.1,4592-4610).
cacggcagggactgaaaat

SEQ ID NO: 541213 - DNA, 19 bp, Mus musculus
  siRNA target sequence for Tiam2 (NM_011878.1,4616-4634).
cacgtgggagctgattcat

SEQ ID NO: 541214 - DNA, 19 bp, Mus musculus
  siRNA target sequence for Tiam2 (NM_011878.1,4621-4639).
gggagctgattcataccaa

SEQ ID NO: 541215 - DNA, 19 bp, Mus musculus
  siRNA target sequence for Tiam2 (NM_011878.1,4657-4675).
ggccagaaaccatctttca

SEQ ID NO: 541216 - DNA, 19 bp, Mus musculus
  siRNA target sequence for Tiam2 (NM_011878.1,4797-4815).
cggctagtacctcttaaga

SEQ ID NO: 541217 - DNA, 19 bp, Mus musculus
  siRNA target sequence for Tiam2 (NM_011878.1,4798-4816).
ggctagtacctcttaagaa

SEQ ID NO: 541218 - DNA, 19 bp, Mus musculus
  siRNA target sequence for Tiam2 (NM_011878.1,5069-5087).
cgacattctgagtgatgaa

SEQ ID NO: 541219 - DNA, 19 bp, Mus musculus
  siRNA target sequence for Tiam2 (NM_011878.1,5096-5114).
cttccaccaccctctgaaa

SEQ ID NO: 541220 - DNA, 19 bp, Mus musculus
  siRNA target sequence for Tiam2 (NM_011878.1,5124-5142).
cctactaaggacattgaga

SEQ ID NO: 541221 - DNA, 19 bp, Mus musculus
  siRNA target sequence for Tiam2 (NM_011878.1,5231-5249).
gctggtcaggggccatttt

SEQ ID NO: 541222 - DNA, 19 bp, Mus musculus
  siRNA target sequence for Tiam2 (NM_011878.1,5253-5271).
cccattaaacggaaagcaa

SEQ ID NO: 541223 - DNA, 19 bp, Mus musculus
  siRNA target sequence for Tiam2 (NM_011878.1,5347-5365).
ctgccagcattgatctaaa

SEQ ID NO: 541224 - DNA, 19 bp, Mus musculus
  siRNA target sequence for Tiam2 (NM_011878.1,5349-5367).
gccagcattgatctaaact

SEQ ID NO: 541225 - DNA, 19 bp, Mus musculus
  siRNA target sequence for Tiam2 (NM_011878.1,5350-5368).
ccagcattgatctaaactt

SEQ ID NO: 541226 - DNA, 19 bp, Mus musculus
  siRNA target sequence for Tiam2 (NM_011878.1,5418-5436).
gaggagggtttttatgaaa

SEQ ID NO: 541227 - DNA, 19 bp, Mus musculus
  siRNA target sequence for Tiam2 (NM_011878.1,5439-5457).
cagagccatggcaaatcat

SEQ ID NO: 541228 - DNA, 19 bp, Mus musculus
  siRNA target sequence for Tjp1 (NM_009386.1,486-504).
gggctcctgggtttggatt

SEQ ID NO: 541229 - DNA, 19 bp, Mus musculus
  siRNA target sequence for Tjp1 (NM_009386.1,528-546).
gagataatcctcattttca

SEQ ID NO: 541230 - DNA, 19 bp, Mus musculus
  siRNA target sequence for Tjp1 (NM_009386.1,551-569).
ggggaaacctccatagtga

SEQ ID NO: 541231 - DNA, 19 bp, Mus musculus
  siRNA target sequence for Tjp1 (NM_009386.1,552-570).
gggaaacctccatagtgat

SEQ ID NO: 541232 - DNA, 19 bp, Mus musculus
  siRNA target sequence for Tjp1 (NM_009386.1,553-571).
ggaaacctccatagtgatt

SEQ ID NO: 541233 - DNA, 19 bp, Mus musculus
  siRNA target sequence for Tjp1 (NM_009386.1,559-577).
ctccatagtgatttctgat

SEQ ID NO: 541234 - DNA, 19 bp, Mus musculus
  siRNA target sequence for Tjp1 (NM_009386.1,566-584).
gtgatttctgatgtgttaa

SEQ ID NO: 541235 - DNA, 19 bp, Mus musculus
  siRNA target sequence for Tjp1 (NM_009386.1,620-638).
gaccgagttgcaatggtta

SEQ ID NO: 541236 - DNA, 19 bp, Mus musculus
  siRNA target sequence for Tjp1 (NM_009386.1,764-782).
cctgagccggtgtctgata

SEQ ID NO: 541237 - DNA, 19 bp, Mus musculus
  siRNA target sequence for Tjp1 (NM_009386.1,970-988).
ggtgaagtctcggaaaaat

SEQ ID NO: 541238 - DNA, 19 bp, Mus musculus
  siRNA target sequence for Tjp1 (NM_009386.1,978-996).
ctcggaaaaatgaagaata

SEQ ID NO: 541239 - DNA, 19 bp, Mus musculus
  siRNA target sequence for Tjp1 (NM_009386.1,1081-1099).
ggatgttgtcttgaagata

SEQ ID NO: 541240 - DNA, 19 bp, Mus musculus
  siRNA target sequence for Tjp1 (NM_009386.1,1103-1121).
ggtactgtgacagaaaata

SEQ ID NO: 541241 - DNA, 19 bp, Mus musculus
  siRNA target sequence for Tjp1 (NM_009386.1,1109-1127).
gtgacagaaaatatgtcat

SEQ ID NO: 541242 - DNA, 19 bp, Mus musculus
  siRNA target sequence for Tjp1 (NM_009386.1,1156-1174).
gtctaaaggcaagttaaaa

SEQ ID NO: 541243 - DNA, 19 bp, Mus musculus
  siRNA target sequence for Tjp1 (NM_009386.1,1193-1211).
gagcgggctaccttactga

SEQ ID NO: 541244 - DNA, 19 bp, Mus musculus
  siRNA target sequence for Tjp1 (NM_009386.1,1217-1235).
cctgacctttcggatagta

SEQ ID NO: 541245 - DNA, 19 bp, Mus musculus
  siRNA target sequence for Tjp1 (NM_009386.1,1218-1236).
ctgacctttcggatagtat

SEQ ID NO: 541246 - DNA, 19 bp, Mus musculus
  siRNA target sequence for Tjp1 (NM_009386.1,1222-1240).
cctttcggatagtatccat

SEQ ID NO: 541247 - DNA, 19 bp, Mus musculus
  siRNA target sequence for Tjp1 (NM_009386.1,1223-1241).
ctttcggatagtatccatt

SEQ ID NO: 541248 - DNA, 19 bp, Mus musculus
  siRNA target sequence for Tjp1 (NM_009386.1,1251-1269).
cctcggaaagagatgacat

SEQ ID NO: 541249 - DNA, 19 bp, Mus musculus
  siRNA target sequence for Tjp1 (NM_009386.1,1464-1482).
ctcctgtaaaacatgtaga

SEQ ID NO: 541250 - DNA, 19 bp, Mus musculus
  siRNA target sequence for Tjp1 (NM_009386.1,1616-1634).
gatggtgctctgcctaatt

SEQ ID NO: 541251 - DNA, 19 bp, Mus musculus
  siRNA target sequence for Tjp1 (NM_009386.1,1627-1645).
gcctaattcagctcatgaa

SEQ ID NO: 541252 - DNA, 19 bp, Mus musculus
  siRNA target sequence for Tjp1 (NM_009386.1,1629-1647).
ctaattcagctcatgaaga

SEQ ID NO: 541253 - DNA, 19 bp, Mus musculus
  siRNA target sequence for Tjp1 (NM_009386.1,1640-1658).
catgaagacgggatactta

SEQ ID NO: 541254 - DNA, 19 bp, Mus musculus
  siRNA target sequence for Tjp1 (NM_009386.1,1662-1680).
ccagcatgaaactggtaaa

SEQ ID NO: 541255 - DNA, 19 bp, Mus musculus
  siRNA target sequence for Tjp1 (NM_009386.1,1663-1681).
cagcatgaaactggtaaaa

SEQ ID NO: 541256 - DNA, 19 bp, Mus musculus
  siRNA target sequence for Tjp1 (NM_009386.1,1665-1683).
gcatgaaactggtaaaatt

SEQ ID NO: 541257 - DNA, 19 bp, Mus musculus
  siRNA target sequence for Tjp1 (NM_009386.1,1675-1693).
ggtaaaattcagaaaagga

SEQ ID NO: 541258 - DNA, 19 bp, Mus musculus
  siRNA target sequence for Tjp1 (NM_009386.1,1708-1726).
gcgactagctggtggaaat

SEQ ID NO: 541259 - DNA, 19 bp, Mus musculus
  siRNA target sequence for Tjp1 (NM_009386.1,1710-1728).
gactagctggtggaaatga

SEQ ID NO: 541260 - DNA, 19 bp, Mus musculus
  siRNA target sequence for Tjp1 (NM_009386.1,1918-1936).
cgtttatcgccgcattgta

SEQ ID NO: 541261 - DNA, 19 bp, Mus musculus
  siRNA target sequence for Tjp1 (NM_009386.1,1926-1944).
gccgcattgtagaatcaga

SEQ ID NO: 541262 - DNA, 19 bp, Mus musculus
  siRNA target sequence for Tjp1 (NM_009386.1,1927-1945).
ccgcattgtagaatcagat

SEQ ID NO: 541263 - DNA, 19 bp, Mus musculus
  siRNA target sequence for Tjp1 (NM_009386.1,1930-1948).
cattgtagaatcagatgta

SEQ ID NO: 541264 - DNA, 19 bp, Mus musculus
  siRNA target sequence for Tjp1 (NM_009386.1,1941-1959).
cagatgtaggagattcatt

SEQ ID NO: 541265 - DNA, 19 bp, Mus musculus
  siRNA target sequence for Tjp1 (NM_009386.1,1995-2013).
ctccttacggacttagttt

SEQ ID NO: 541266 - DNA, 19 bp, Mus musculus
  siRNA target sequence for Tjp1 (NM_009386.1,1997-2015).
ccttacggacttagtttta

SEQ ID NO: 541267 - DNA, 19 bp, Mus musculus
  siRNA target sequence for Tjp1 (NM_009386.1,1998-2016).
cttacggacttagttttaa

SEQ ID NO: 541268 - DNA, 19 bp, Mus musculus
  siRNA target sequence for Tjp1 (NM_009386.1,2002-2020).
cggacttagttttaacaaa

SEQ ID NO: 541269 - DNA, 19 bp, Mus musculus
  siRNA target sequence for Tjp1 (NM_009386.1,2032-2050).
ccgggtcgtggatacttta

SEQ ID NO: 541270 - DNA, 19 bp, Mus musculus
  siRNA target sequence for Tjp1 (NM_009386.1,2033-2051).
cgggtcgtggatactttat

SEQ ID NO: 541271 - DNA, 19 bp, Mus musculus
  siRNA target sequence for Tjp1 (NM_009386.1,2034-2052).
gggtcgtggatactttata

SEQ ID NO: 541272 - DNA, 19 bp, Mus musculus
  siRNA target sequence for Tjp1 (NM_009386.1,2036-2054).
gtcgtggatactttataca

SEQ ID NO: 541273 - DNA, 19 bp, Mus musculus
  siRNA target sequence for Tjp1 (NM_009386.1,2079-2097).
ccattcgaattggcaaaaa

SEQ ID NO: 541274 - DNA, 19 bp, Mus musculus
  siRNA target sequence for Tjp1 (NM_009386.1,2080-2098).
cattcgaattggcaaaaat

SEQ ID NO: 541275 - DNA, 19 bp, Mus musculus
  siRNA target sequence for Tjp1 (NM_009386.1,2084-2102).
cgaattggcaaaaatcata

SEQ ID NO: 541276 - DNA, 19 bp, Mus musculus
  siRNA target sequence for Tjp1 (NM_009386.1,2226-2244).
gcagctccaagagaaatct

SEQ ID NO: 541277 - DNA, 19 bp, Mus musculus
  siRNA target sequence for Tjp1 (NM_009386.1,2227-2245).
cagctccaagagaaatctt

SEQ ID NO: 541278 - DNA, 19 bp, Mus musculus
  siRNA target sequence for Tjp1 (NM_009386.1,2273-2291).
cagccagttcaaactaagt

SEQ ID NO: 541279 - DNA, 19 bp, Mus musculus
  siRNA target sequence for Tjp1 (NM_009386.1,2347-2365).
catctttggaccaatagct

SEQ ID NO: 541280 - DNA, 19 bp, Mus musculus
  siRNA target sequence for Tjp1 (NM_009386.1,2363-2381).
gctgatgttgccagagaaa

SEQ ID NO: 541281 - DNA, 19 bp, Mus musculus
  siRNA target sequence for Tjp1 (NM_009386.1,2391-2409).
gagaggagccagatatcta

SEQ ID NO: 541282 - DNA, 19 bp, Mus musculus
  siRNA target sequence for Tjp1 (NM_009386.1,2396-2414).
gagccagatatctatcaga

SEQ ID NO: 541283 - DNA, 19 bp, Mus musculus
  siRNA target sequence for Tjp1 (NM_009386.1,2398-2416).
gccagatatctatcagatt

SEQ ID NO: 541284 - DNA, 19 bp, Mus musculus
  siRNA target sequence for Tjp1 (NM_009386.1,2402-2420).
gatatctatcagattgcaa

SEQ ID NO: 541285 - DNA, 19 bp, Mus musculus
  siRNA target sequence for Tjp1 (NM_009386.1,2462-2480).
ggcatcattcgccttcata

SEQ ID NO: 541286 - DNA, 19 bp, Mus musculus
  siRNA target sequence for Tjp1 (NM_009386.1,2464-2482).
catcattcgccttcataca

SEQ ID NO: 541287 - DNA, 19 bp, Mus musculus
  siRNA target sequence for Tjp1 (NM_009386.1,2467-2485).
cattcgccttcatacaata

SEQ ID NO: 541288 - DNA, 19 bp, Mus musculus
  siRNA target sequence for Tjp1 (NM_009386.1,2472-2490).
gccttcatacaataaagca

SEQ ID NO: 541289 - DNA, 19 bp, Mus musculus
  siRNA target sequence for Tjp1 (NM_009386.1,2537-2555).
gcggttgatcgtcttaatt

SEQ ID NO: 541290 - DNA, 19 bp, Mus musculus
  siRNA target sequence for Tjp1 (NM_009386.1,2538-2556).
cggttgatcgtcttaatta

SEQ ID NO: 541291 - DNA, 19 bp, Mus musculus
  siRNA target sequence for Tjp1 (NM_009386.1,2539-2557).
ggttgatcgtcttaattat

SEQ ID NO: 541292 - DNA, 19 bp, Mus musculus
  siRNA target sequence for Tjp1 (NM_009386.1,2559-2577).
cgcagtggtatccaattgt

SEQ ID NO: 541293 - DNA, 19 bp, Mus musculus
  siRNA target sequence for Tjp1 (NM_009386.1,2570-2588).
ccaattgttgtgttcctta

SEQ ID NO: 541294 - DNA, 19 bp, Mus musculus
  siRNA target sequence for Tjp1 (NM_009386.1,2571-2589).
caattgttgtgttccttaa

SEQ ID NO: 541295 - DNA, 19 bp, Mus musculus
  siRNA target sequence for Tjp1 (NM_009386.1,2596-2614).
ctctaagcaaggtgtaaaa

SEQ ID NO: 541296 - DNA, 19 bp, Mus musculus
  siRNA target sequence for Tjp1 (NM_009386.1,2603-2621).
caaggtgtaaaaacaatga

SEQ ID NO: 541297 - DNA, 19 bp, Mus musculus
  siRNA target sequence for Tjp1 (NM_009386.1,2673-2691).
gctctcataagcttcgtaa

SEQ ID NO: 541298 - DNA, 19 bp, Mus musculus
  siRNA target sequence for Tjp1 (NM_009386.1,2676-2694).
ctcataagcttcgtaagaa

SEQ ID NO: 541299 - DNA, 19 bp, Mus musculus
  siRNA target sequence for Tjp1 (NM_009386.1,2678-2696).
cataagcttcgtaagaaca

SEQ ID NO: 541300 - DNA, 19 bp, Mus musculus
  siRNA target sequence for Tjp1 (NM_009386.1,2710-2728).
cacaactacaattaactta

SEQ ID NO: 541301 - DNA, 19 bp, Mus musculus
  siRNA target sequence for Tjp1 (NM_009386.1,2725-2743).
cttaaactcaatgaatgat

SEQ ID NO: 541302 - DNA, 19 bp, Mus musculus
  siRNA target sequence for Tjp1 (NM_009386.1,2748-2766).
ggtacggtgccctgaaaga

SEQ ID NO: 541303 - DNA, 19 bp, Mus musculus
  siRNA target sequence for Tjp1 (NM_009386.1,2815-2833).
ggcggatggtgctacaagt

SEQ ID NO: 541304 - DNA, 19 bp, Mus musculus
  siRNA target sequence for Tjp1 (NM_009386.1,2818-2836).
ggatggtgctacaagtgat

SEQ ID NO: 541305 - DNA, 19 bp, Mus musculus
  siRNA target sequence for Tjp1 (NM_009386.1,2879-2897).
ccaggtagtgagtactcaa

SEQ ID NO: 541306 - DNA, 19 bp, Mus musculus
  siRNA target sequence for Tjp1 (NM_009386.1,2880-2898).
caggtagtgagtactcaat

SEQ ID NO: 541307 - DNA, 19 bp, Mus musculus
  siRNA target sequence for Tjp1 (NM_009386.1,2882-2900).
ggtagtgagtactcaatgt

SEQ ID NO: 541308 - DNA, 19 bp, Mus musculus
  siRNA target sequence for Tjp1 (NM_009386.1,2883-2901).
gtagtgagtactcaatgta

SEQ ID NO: 541309 - DNA, 19 bp, Mus musculus
  siRNA target sequence for Tjp1 (NM_009386.1,2956-2974).
ggcctacactgatcaagaa

SEQ ID NO: 541310 - DNA, 19 bp, Mus musculus
  siRNA target sequence for Tjp1 (NM_009386.1,3060-3078).
ctggaatgcatcatgaaaa

SEQ ID NO: 541311 - DNA, 19 bp, Mus musculus
  siRNA target sequence for Tjp1 (NM_009386.1,3109-3127).
gcagccacaagctattcat

SEQ ID NO: 541312 - DNA, 19 bp, Mus musculus
  siRNA target sequence for Tjp1 (NM_009386.1,3110-3128).
cagccacaagctattcata

SEQ ID NO: 541313 - DNA, 19 bp, Mus musculus
  siRNA target sequence for Tjp1 (NM_009386.1,3112-3130).
gccacaagctattcataga

SEQ ID NO: 541314 - DNA, 19 bp, Mus musculus
  siRNA target sequence for Tjp1 (NM_009386.1,3113-3131).
ccacaagctattcatagaa

SEQ ID NO: 541315 - DNA, 19 bp, Mus musculus
  siRNA target sequence for Tjp1 (NM_009386.1,3119-3137).
gctattcatagaatagact

SEQ ID NO: 541316 - DNA, 19 bp, Mus musculus
  siRNA target sequence for Tjp1 (NM_009386.1,3227-3245).
gcctctgcagttaatcata

SEQ ID NO: 541317 - DNA, 19 bp, Mus musculus
  siRNA target sequence for Tjp1 (NM_009386.1,3228-3246).
cctctgcagttaatcataa

SEQ ID NO: 541318 - DNA, 19 bp, Mus musculus
  siRNA target sequence for Tjp1 (NM_009386.1,3233-3251).
gcagttaatcataatgtca

SEQ ID NO: 541319 - DNA, 19 bp, Mus musculus
  siRNA target sequence for Tjp1 (NM_009386.1,3242-3260).
cataatgtcagtgtaacta

SEQ ID NO: 541320 - DNA, 19 bp, Mus musculus
  siRNA target sequence for Tjp1 (NM_009386.1,3248-3266).
gtcagtgtaactaatgtca

SEQ ID NO: 541321 - DNA, 19 bp, Mus musculus
  siRNA target sequence for Tjp1 (NM_009386.1,3439-3457).
gatgagacaaaaccatatt

SEQ ID NO: 541322 - DNA, 19 bp, Mus musculus
  siRNA target sequence for Tjp1 (NM_009386.1,3521-3539).
gaaccccaacttccatata

SEQ ID NO: 541323 - DNA, 19 bp, Mus musculus
  siRNA target sequence for Tjp1 (NM_009386.1,3526-3544).
ccaacttccatatatagaa

SEQ ID NO: 541324 - DNA, 19 bp, Mus musculus
  siRNA target sequence for Tjp1 (NM_009386.1,3563-3581).
cttgagcagccgtcataca

SEQ ID NO: 541325 - DNA, 19 bp, Mus musculus
  siRNA target sequence for Tjp1 (NM_009386.1,3607-3625).
ccagttttctcggaactat

SEQ ID NO: 541326 - DNA, 19 bp, Mus musculus
  siRNA target sequence for Tjp1 (NM_009386.1,3651-3669).
gaatccctacctatgaaga

SEQ ID NO: 541327 - DNA, 19 bp, Mus musculus
  siRNA target sequence for Tjp1 (NM_009386.1,3675-3693).
ggtcatattatgatgacaa

SEQ ID NO: 541328 - DNA, 19 bp, Mus musculus
  siRNA target sequence for Tjp1 (NM_009386.1,3676-3694).
gtcatattatgatgacaaa

SEQ ID NO: 541329 - DNA, 19 bp, Mus musculus
  siRNA target sequence for Tjp1 (NM_009386.1,3708-3726).
ctcggccttttgagaatca

SEQ ID NO: 541330 - DNA, 19 bp, Mus musculus
  siRNA target sequence for Tjp1 (NM_009386.1,3766-3784).
ggcttcagaacgaggttat

SEQ ID NO: 541331 - DNA, 19 bp, Mus musculus
  siRNA target sequence for Tjp1 (NM_009386.1,3767-3785).
gcttcagaacgaggttatt

SEQ ID NO: 541332 - DNA, 19 bp, Mus musculus
  siRNA target sequence for Tjp1 (NM_009386.1,3768-3786).
cttcagaacgaggttattt

SEQ ID NO: 541333 - DNA, 19 bp, Mus musculus
  siRNA target sequence for Tjp1 (NM_009386.1,3771-3789).
cagaacgaggttatttcca

SEQ ID NO: 541334 - DNA, 19 bp, Mus musculus
  siRNA target sequence for Tjp1 (NM_009386.1,3812-3830).
ctgtcgtacgacagtagaa

SEQ ID NO: 541335 - DNA, 19 bp, Mus musculus
  siRNA target sequence for Tjp1 (NM_009386.1,3814-3832).
gtcgtacgacagtagaaca

SEQ ID NO: 541336 - DNA, 19 bp, Mus musculus
  siRNA target sequence for Tjp1 (NM_009386.1,3858-3876).
ctactctacgacatgaaga

SEQ ID NO: 541337 - DNA, 19 bp, Mus musculus
  siRNA target sequence for Tjp1 (NM_009386.1,3920-3938).
gaggcacagccctattctt

SEQ ID NO: 541338 - DNA, 19 bp, Mus musculus
  siRNA target sequence for Tjp1 (NM_009386.1,3957-3975).
ctgagcccaagcagtactt

SEQ ID NO: 541339 - DNA, 19 bp, Mus musculus
  siRNA target sequence for Tjp1 (NM_009386.1,4026-4044).
ccaaaacaggccattacga

SEQ ID NO: 541340 - DNA, 19 bp, Mus musculus
  siRNA target sequence for Tjp1 (NM_009386.1,4067-4085).
gtccctcctctgatacctt

SEQ ID NO: 541341 - DNA, 19 bp, Mus musculus
  siRNA target sequence for Tjp1 (NM_009386.1,4078-4096).
gataccttcctctcaacaa

SEQ ID NO: 541342 - DNA, 19 bp, Mus musculus
  siRNA target sequence for Tjp1 (NM_009386.1,4331-4349).
gtccctcagagtcagttta

SEQ ID NO: 541343 - DNA, 19 bp, Mus musculus
  siRNA target sequence for Tjp1 (NM_009386.1,4400-4418).
gtgaagccacccgaagata

SEQ ID NO: 541344 - DNA, 19 bp, Mus musculus
  siRNA target sequence for Tjp1 (NM_009386.1,4405-4423).
gccacccgaagatattgtt

SEQ ID NO: 541345 - DNA, 19 bp, Mus musculus
  siRNA target sequence for Tjp1 (NM_009386.1,4480-4498).
ctactttgaccgaagaagt

SEQ ID NO: 541346 - DNA, 19 bp, Mus musculus
  siRNA target sequence for Tjp1 (NM_009386.1,4483-4501).
ctttgaccgaagaagtttt

SEQ ID NO: 541347 - DNA, 19 bp, Mus musculus
  siRNA target sequence for Tjp1 (NM_009386.1,4487-4505).
gaccgaagaagttttgaga

SEQ ID NO: 541348 - DNA, 19 bp, Mus musculus
  siRNA target sequence for Tjp1 (NM_009386.1,4551-4569).
ctaagccagtccattctca

SEQ ID NO: 541349 - DNA, 19 bp, Mus musculus
  siRNA target sequence for Tjp1 (NM_009386.1,4603-4621).
gggaaaacccgaaactgat

SEQ ID NO: 541350 - DNA, 19 bp, Mus musculus
  siRNA target sequence for Tjp1 (NM_009386.1,4635-4653).
cattcagtgagaaacgtta

SEQ ID NO: 541351 - DNA, 19 bp, Mus musculus
  siRNA target sequence for Tjp1 (NM_009386.1,4639-4657).
cagtgagaaacgttatgat

SEQ ID NO: 541352 - DNA, 19 bp, Mus musculus
  siRNA target sequence for Tjp1 (NM_009386.1,4763-4781).
ggtgaaggcaactcagtat

SEQ ID NO: 541353 - DNA, 19 bp, Mus musculus
  siRNA target sequence for Tjp1 (NM_009386.1,4771-4789).
caactcagtatcattggat

SEQ ID NO: 541354 - DNA, 19 bp, Mus musculus
  siRNA target sequence for Tjp1 (NM_009386.1,4950-4968).
ccatcactccggtgtacaa

SEQ ID NO: 541355 - DNA, 19 bp, Mus musculus
  siRNA target sequence for Tjp1 (NM_009386.1,4951-4969).
catcactccggtgtacaat

SEQ ID NO: 541356 - DNA, 19 bp, Mus musculus
  siRNA target sequence for Tjp1 (NM_009386.1,4956-4974).
ctccggtgtacaatcgatt

SEQ ID NO: 541357 - DNA, 19 bp, Mus musculus
  siRNA target sequence for Tjp1 (NM_009386.1,4960-4978).
ggtgtacaatcgattcaca

SEQ ID NO: 541358 - DNA, 19 bp, Mus musculus
  siRNA target sequence for Tjp1 (NM_009386.1,4979-4997).
ccaaagccgtacacaagtt

SEQ ID NO: 541359 - DNA, 19 bp, Mus musculus
  siRNA target sequence for Tjp1 (NM_009386.1,5004-5022).
ggccatttgaacgcaaatt

SEQ ID NO: 541360 - DNA, 19 bp, Mus musculus
  siRNA target sequence for Tjp1 (NM_009386.1,5005-5023).
gccatttgaacgcaaattt

SEQ ID NO: 541361 - DNA, 19 bp, Mus musculus
  siRNA target sequence for Tjp1 (NM_009386.1,5007-5025).
catttgaacgcaaatttga

SEQ ID NO: 541362 - DNA, 19 bp, Mus musculus
  siRNA target sequence for Tjp1 (NM_009386.1,5028-5046).
gtccgaagttcaaccataa

SEQ ID NO: 541363 - DNA, 19 bp, Mus musculus
  siRNA target sequence for Tjp1 (NM_009386.1,5031-5049).
cgaagttcaaccataatct

SEQ ID NO: 541364 - DNA, 19 bp, Mus musculus
  siRNA target sequence for Tjp1 (NM_009386.1,5032-5050).
gaagttcaaccataatctt

SEQ ID NO: 541365 - DNA, 19 bp, Mus musculus
  siRNA target sequence for Tjp1 (NM_009386.1,5066-5084).
gtacataaacctgaattgt

SEQ ID NO: 541366 - DNA, 19 bp, Mus musculus
  siRNA target sequence for Tjp1 (NM_009386.1,5069-5087).
cataaacctgaattgtctt

SEQ ID NO: 541367 - DNA, 19 bp, Mus musculus
  siRNA target sequence for Tjp1 (NM_009386.1,5097-5115).
ccacttccccaaaaactct

SEQ ID NO: 541368 - DNA, 19 bp, Mus musculus
  siRNA target sequence for Tjp1 (NM_009386.1,5098-5116).
cacttccccaaaaactctt

SEQ ID NO: 541369 - DNA, 19 bp, Mus musculus
  siRNA target sequence for Tjp1 (NM_009386.1,5100-5118).
cttccccaaaaactcttat

SEQ ID NO: 541370 - DNA, 19 bp, Mus musculus
  siRNA target sequence for Tjp1 (NM_009386.1,5119-5137).
gaaagctcatagttcaaca

SEQ ID NO: 541371 - DNA, 19 bp, Mus musculus
  siRNA target sequence for Tjp1 (NM_009386.1,5180-5198).
cacacagataagcctaaat

SEQ ID NO: 541372 - DNA, 19 bp, Mus musculus
  siRNA target sequence for Tjp1 (NM_009386.1,5182-5200).
cacagataagcctaaatat

SEQ ID NO: 541373 - DNA, 19 bp, Mus musculus
  siRNA target sequence for Tjp1 (NM_009386.1,5191-5209).
gcctaaatatcaaatgaat

SEQ ID NO: 541374 - DNA, 19 bp, Mus musculus
  siRNA target sequence for Tjp1 (NM_009386.1,5298-5316).
cagctcgtggcatttttaa

SEQ ID NO: 541375 - DNA, 19 bp, Mus musculus
  siRNA target sequence for Tjp1 (NM_009386.1,5300-5318).
gctcgtggcatttttaaca

SEQ ID NO: 541376 - DNA, 19 bp, Mus musculus
  siRNA target sequence for Tjp1 (NM_009386.1,5330-5348).
gtgttgagttccatagaaa

SEQ ID NO: 541377 - DNA, 19 bp, Mus musculus
  siRNA target sequence for Tjp1 (NM_009386.1,5341-5359).
catagaaaccggtgttagt

SEQ ID NO: 541378 - DNA, 19 bp, Mus musculus
  siRNA target sequence for Tjp1 (NM_009386.1,5345-5363).
gaaaccggtgttagtataa

SEQ ID NO: 541379 - DNA, 19 bp, Mus musculus
  siRNA target sequence for Tjp1 (NM_009386.1,5349-5367).
ccggtgttagtataattat

SEQ ID NO: 541380 - DNA, 19 bp, Mus musculus
  siRNA target sequence for Tjp1 (NM_009386.1,5390-5408).
ggaattgagcaagaaatct

SEQ ID NO: 541381 - DNA, 19 bp, Mus musculus
  siRNA target sequence for Tjp1 (NM_009386.1,5419-5437).
ctgcagagacaatagcatt

SEQ ID NO: 541382 - DNA, 19 bp, Mus musculus
  siRNA target sequence for Tjp1 (NM_009386.1,5433-5451).
gcattctcccacctttaga

SEQ ID NO: 541383 - DNA, 19 bp, Mus musculus
  siRNA target sequence for Tjp1 (NM_009386.1,5543-5561).
cactgtgaccctaaaacct

SEQ ID NO: 541384 - DNA, 19 bp, Mus musculus
  siRNA target sequence for Tjp1 (NM_009386.1,5552-5570).
cctaaaacctggcaaaaca

SEQ ID NO: 541385 - DNA, 19 bp, Mus musculus
  siRNA target sequence for Tjp1 (NM_009386.1,5600-5618).
gttggagccaactgtgttt

SEQ ID NO: 541386 - DNA, 19 bp, Mus musculus
  siRNA target sequence for Tjp1 (NM_009386.1,5613-5631).
gtgtttctgtcctgattga

SEQ ID NO: 541387 - DNA, 19 bp, Mus musculus
  siRNA target sequence for Tle1 (NM_011599.2,894-912).
gcaggccagccctttaagt

SEQ ID NO: 541388 - DNA, 19 bp, Mus musculus
  siRNA target sequence for Tle1 (NM_011599.2,895-913).
caggccagccctttaagtt

SEQ ID NO: 541389 - DNA, 19 bp, Mus musculus
  siRNA target sequence for Tle1 (NM_011599.2,928-946).
ctctggaccggattaaaga

SEQ ID NO: 541390 - DNA, 19 bp, Mus musculus
  siRNA target sequence for Tle1 (NM_011599.2,1028-1046).
gaggcactacgtgatgtat

SEQ ID NO: 541391 - DNA, 19 bp, Mus musculus
  siRNA target sequence for Tle1 (NM_011599.2,1031-1049).
gcactacgtgatgtattat

SEQ ID NO: 541392 - DNA, 19 bp, Mus musculus
  siRNA target sequence for Tle1 (NM_011599.2,1114-1132).
ccatttgtgcccaagtcat

SEQ ID NO: 541393 - DNA, 19 bp, Mus musculus
  siRNA target sequence for Tle1 (NM_011599.2,1474-1492).
gcctaagaggcacagataa

SEQ ID NO: 541394 - DNA, 19 bp, Mus musculus
  siRNA target sequence for Tle1 (NM_011599.2,1541-1559).
ggatgataaggataactat

SEQ ID NO: 541395 - DNA, 19 bp, Mus musculus
  siRNA target sequence for Tle1 (NM_011599.2,1545-1563).
gataaggataactatgaca

SEQ ID NO: 541396 - DNA, 19 bp, Mus musculus
  siRNA target sequence for Tle1 (NM_011599.2,1654-1672).
gggaaaacggaattgacaa

SEQ ID NO: 541397 - DNA, 19 bp, Mus musculus
  siRNA target sequence for Tle1 (NM_011599.2,1655-1673).
ggaaaacggaattgacaaa

SEQ ID NO: 541398 - DNA, 19 bp, Mus musculus
  siRNA target sequence for Tle1 (NM_011599.2,1885-1903).
ccatggaaccccttgtcaa

SEQ ID NO: 541399 - DNA, 19 bp, Mus musculus
  siRNA target sequence for Tle1 (NM_011599.2,2098-2116).
gctccccaatggttggttt

SEQ ID NO: 541400 - DNA, 19 bp, Mus musculus
  siRNA target sequence for Tle1 (NM_011599.2,2099-2117).
ctccccaatggttggtttt

SEQ ID NO: 541401 - DNA, 19 bp, Mus musculus
  siRNA target sequence for Tle1 (NM_011599.2,2101-2119).
ccccaatggttggttttga

SEQ ID NO: 541402 - DNA, 19 bp, Mus musculus
  siRNA target sequence for Tle1 (NM_011599.2,2102-2120).
cccaatggttggttttgat

SEQ ID NO: 541403 - DNA, 19 bp, Mus musculus
  siRNA target sequence for Tle1 (NM_011599.2,2156-2174).
caacctggcaggaatacct

SEQ ID NO: 541404 - DNA, 19 bp, Mus musculus
  siRNA target sequence for Tle1 (NM_011599.2,2453-2471).
ccgttcctgtaaattgcta

SEQ ID NO: 541405 - DNA, 19 bp, Mus musculus
  siRNA target sequence for Tle1 (NM_011599.2,3134-3152).
caaaaaggctaccgtttat

SEQ ID NO: 541406 - DNA, 19 bp, Mus musculus
  siRNA target sequence for Tmpo (NM_011605.1,553-571).
gacagagctctctaatgaa

SEQ ID NO: 541407 - DNA, 19 bp, Mus musculus
  siRNA target sequence for Tmpo (NM_011605.1,578-596).
ctggatcagcttgtaagat

SEQ ID NO: 541408 - DNA, 19 bp, Mus musculus
  siRNA target sequence for Tmpo (NM_011605.1,580-598).
ggatcagcttgtaagatat

SEQ ID NO: 541409 - DNA, 19 bp, Mus musculus
  siRNA target sequence for Tmpo (NM_011605.1,627-645).
caaccaggaagctatatga

SEQ ID NO: 541410 - DNA, 19 bp, Mus musculus
  siRNA target sequence for Tmpo (NM_011605.1,811-829).
gtccgctagggattgtgtt

SEQ ID NO: 541411 - DNA, 19 bp, Mus musculus
  siRNA target sequence for Tmpo (NM_011605.1,855-873).
cctctggtgcattttttca

SEQ ID NO: 541412 - DNA, 19 bp, Mus musculus
  siRNA target sequence for Tmpo (NM_011605.1,965-983).
ccacctagggagacttgta

SEQ ID NO: 541413 - DNA, 19 bp, Mus musculus
  siRNA target sequence for Tmpo (NM_011605.1,1025-1043).
gcccctggacggagtttat

SEQ ID NO: 541414 - DNA, 19 bp, Mus musculus
  siRNA target sequence for Tmpo (NM_011605.1,1026-1044).
cccctggacggagtttatt

SEQ ID NO: 541415 - DNA, 19 bp, Mus musculus
  siRNA target sequence for Tmpo (NM_011605.1,1027-1045).
ccctggacggagtttattt

SEQ ID NO: 541416 - DNA, 19 bp, Mus musculus
  siRNA target sequence for Tmpo (NM_011605.1,1029-1047).
ctggacggagtttatttat

SEQ ID NO: 541417 - DNA, 19 bp, Mus musculus
  siRNA target sequence for Tmpo (NM_011605.1,1145-1163).
ccttcactgataagagaaa

SEQ ID NO: 541418 - DNA, 19 bp, Mus musculus
  siRNA target sequence for Tmpo (NM_011605.1,1158-1176).
gagaaaccactactactta

SEQ ID NO: 541419 - DNA, 19 bp, Mus musculus
  siRNA target sequence for Tmpo (NM_011605.1,1275-1293).
ctagtgaaagagaagtact

SEQ ID NO: 541420 - DNA, 19 bp, Mus musculus
  siRNA target sequence for Tmpo (NM_011605.1,1340-1358).
gcaattcgagattatgtca

SEQ ID NO: 541421 - DNA, 19 bp, Mus musculus
  siRNA target sequence for Tmpo (NM_011605.1,1341-1359).
caattcgagattatgtcaa

SEQ ID NO: 541422 - DNA, 19 bp, Mus musculus
  siRNA target sequence for Tmpo (NM_011605.1,1414-1432).
gcccacactggatgtagaa

SEQ ID NO: 541423 - DNA, 19 bp, Mus musculus
  siRNA target sequence for Tmpo (NM_011605.1,1454-1472).
cagtccagctatcaagatt

SEQ ID NO: 541424 - DNA, 19 bp, Mus musculus
  siRNA target sequence for Tmpo (NM_011605.1,1458-1476).
ccagctatcaagattctga

SEQ ID NO: 541425 - DNA, 19 bp, Mus musculus
  siRNA target sequence for Tmpo (NM_011605.1,1575-1593).
ccgaacataggtcttcttt

SEQ ID NO: 541426 - DNA, 19 bp, Mus musculus
  siRNA target sequence for Tmpo (NM_011605.1,1576-1594).
cgaacataggtcttctttt

SEQ ID NO: 541427 - DNA, 19 bp, Mus musculus
  siRNA target sequence for Tmpo (NM_011605.1,1621-1639).
gactactttaggagtagaa

SEQ ID NO: 541428 - DNA, 19 bp, Mus musculus
  siRNA target sequence for Tmpo (NM_011605.1,1623-1641).
ctactttaggagtagaagt

SEQ ID NO: 541429 - DNA, 19 bp, Mus musculus
  siRNA target sequence for Tmpo (NM_011605.1,1650-1668).
caccaccacagcatgataa

SEQ ID NO: 541430 - DNA, 19 bp, Mus musculus
  siRNA target sequence for Tmpo (NM_011605.1,1678-1696).
ctcagagccgtcttttcct

SEQ ID NO: 541431 - DNA, 19 bp, Mus musculus
  siRNA target sequence for Tmpo (NM_011605.1,1697-1715).
ctccacgaatctatcctaa

SEQ ID NO: 541432 - DNA, 19 bp, Mus musculus
  siRNA target sequence for Tmpo (NM_011605.1,1699-1717).
ccacgaatctatcctaaaa

SEQ ID NO: 541433 - DNA, 19 bp, Mus musculus
  siRNA target sequence for Tmpo (NM_011605.1,1730-1748).
gagtggcagcaaattgata

SEQ ID NO: 541434 - DNA, 19 bp, Mus musculus
  siRNA target sequence for Tmpo (NM_011605.1,1759-1777).
ctcggtggcgtgcagatat

SEQ ID NO: 541435 - DNA, 19 bp, Mus musculus
  siRNA target sequence for Tmpo (NM_011605.1,1762-1780).
ggtggcgtgcagatatcca

SEQ ID NO: 541436 - DNA, 19 bp, Mus musculus
  siRNA target sequence for Tmpo (NM_011605.1,1792-1810).
cgaggcagcacggatatta

SEQ ID NO: 541437 - DNA, 19 bp, Mus musculus
  siRNA target sequence for Tmpo (NM_011605.1,1793-1811).
gaggcagcacggatattat

SEQ ID NO: 541438 - DNA, 19 bp, Mus musculus
  siRNA target sequence for Tmpo (NM_011605.1,1795-1813).
ggcagcacggatattatca

SEQ ID NO: 541439 - DNA, 19 bp, Mus musculus
  siRNA target sequence for Tmpo (NM_011605.1,1797-1815).
cagcacggatattatcagt

SEQ ID NO: 541440 - DNA, 19 bp, Mus musculus
  siRNA target sequence for Tmpo (NM_011605.1,1896-1914).
cttgtgataaacatttgga

SEQ ID NO: 541441 - DNA, 19 bp, Mus musculus
  siRNA target sequence for Tmpo (NM_011605.1,1975-1993).
ggccttcgtagctaagtct

SEQ ID NO: 541442 - DNA, 19 bp, Mus musculus
  siRNA target sequence for Tmpo (NM_011605.1,2010-2028).
gtcaggctgcacagattat

SEQ ID NO: 541443 - DNA, 19 bp, Mus musculus
  siRNA target sequence for Tmpo (NM_011605.1,2014-2032).
ggctgcacagattattaat

SEQ ID NO: 541444 - DNA, 19 bp, Mus musculus
  siRNA target sequence for Tmpo (NM_011605.1,2060-2078).
ctcaggattctgaacagaa

SEQ ID NO: 541445 - DNA, 19 bp, Mus musculus
  siRNA target sequence for Tmpo (NM_011605.1,2079-2097).
cctatgatgcagcttcata

SEQ ID NO: 541446 - DNA, 19 bp, Mus musculus
  siRNA target sequence for Tmpo (NM_011605.1,2080-2098).
ctatgatgcagcttcatat

SEQ ID NO: 541447 - DNA, 19 bp, Mus musculus
  siRNA target sequence for Tmpo (NM_011605.1,2084-2102).
gatgcagcttcatatcttt

SEQ ID NO: 541448 - DNA, 19 bp, Mus musculus
  siRNA target sequence for Tmpo (NM_011605.1,2157-2175).
ccatgggtcggcgttatct

SEQ ID NO: 541449 - DNA, 19 bp, Mus musculus
  siRNA target sequence for Tmpo (NM_011605.1,2178-2196).
ggttgaaggattgtaagat

SEQ ID NO: 541450 - DNA, 19 bp, Mus musculus
  siRNA target sequence for Tmpo (NM_011605.1,2199-2217).
gtccagcttctaagaataa

SEQ ID NO: 541451 - DNA, 19 bp, Mus musculus
  siRNA target sequence for Tmpo (NM_011605.1,2201-2219).
ccagcttctaagaataaat

SEQ ID NO: 541452 - DNA, 19 bp, Mus musculus
  siRNA target sequence for Tmpo (NM_011605.1,2221-2239).
gactgttgccccctttaaa

SEQ ID NO: 541453 - DNA, 19 bp, Mus musculus
  siRNA target sequence for Tmpo (NM_011605.1,2233-2251).
ctttaaaggtggaacatta

SEQ ID NO: 541454 - DNA, 19 bp, Mus musculus
  siRNA target sequence for Tmpo (NM_011605.1,2258-2276).
ggggaagtacacaaagtta

SEQ ID NO: 541455 - DNA, 19 bp, Mus musculus
  siRNA target sequence for Tmpo (NM_011605.1,2259-2277).
gggaagtacacaaagttat

SEQ ID NO: 541456 - DNA, 19 bp, Mus musculus
  siRNA target sequence for Tnfaip1 (NM_009395.2,341-359).
ggaggctccctgtactaca

SEQ ID NO: 541457 - DNA, 19 bp, Mus musculus
  siRNA target sequence for Tnfaip1 (NM_009395.2,555-573).
ctgaagcaaaatattacct

SEQ ID NO: 541458 - DNA, 19 bp, Mus musculus
  siRNA target sequence for Tnfaip1 (NM_009395.2,673-691).
ggaggacaggctcattgaa

SEQ ID NO: 541459 - DNA, 19 bp, Mus musculus
  siRNA target sequence for Tnfaip1 (NM_009395.2,674-692).
gaggacaggctcattgaat

SEQ ID NO: 541460 - DNA, 19 bp, Mus musculus
  siRNA target sequence for Tnfaip1 (NM_009395.2,909-927).
gctgcacctcgattgtgta

SEQ ID NO: 541461 - DNA, 19 bp, Mus musculus
  siRNA target sequence for Tnfaip1 (NM_009395.2,961-979).
cccagaggcccgtatctat

SEQ ID NO: 541462 - DNA, 19 bp, Mus musculus
  siRNA target sequence for Tnfaip1 (NM_009395.2,963-981).
cagaggcccgtatctatga

SEQ ID NO: 541463 - DNA, 19 bp, Mus musculus
  siRNA target sequence for Tnfaip1 (NM_009395.2,972-990).
gtatctatgaggaaacact

SEQ ID NO: 541464 - DNA, 19 bp, Mus musculus
  siRNA target sequence for Tnfaip1 (NM_009395.2,987-1005).
cactcaatgtcctactcta

SEQ ID NO: 541465 - DNA, 19 bp, Mus musculus
  siRNA target sequence for Tnfaip1 (NM_009395.2,1012-1030).
ccctcgagtccctgacaat

SEQ ID NO: 541466 - DNA, 19 bp, Mus musculus
  siRNA target sequence for Tnfaip1 (NM_009395.2,1013-1031).
cctcgagtccctgacaatt

SEQ ID NO: 541467 - DNA, 19 bp, Mus musculus
  siRNA target sequence for Tnfaip1 (NM_009395.2,1016-1034).
cgagtccctgacaattcct

SEQ ID NO: 541468 - DNA, 19 bp, Mus musculus
  siRNA target sequence for Tnfaip1 (NM_009395.2,1017-1035).
gagtccctgacaattcctt

SEQ ID NO: 541469 - DNA, 19 bp, Mus musculus
  siRNA target sequence for Tnfaip1 (NM_009395.2,1068-1086).
cttcccccagtgaagatga

SEQ ID NO: 541470 - DNA, 19 bp, Mus musculus
  siRNA target sequence for Tnfaip1 (NM_009395.2,1108-1126).
ccgtgtccgtcgcattcat

SEQ ID NO: 541471 - DNA, 19 bp, Mus musculus
  siRNA target sequence for Tnfaip1 (NM_009395.2,1110-1128).
gtgtccgtcgcattcatgt

SEQ ID NO: 541472 - DNA, 19 bp, Mus musculus
  siRNA target sequence for Tnfaip1 (NM_009395.2,1124-1142).
catgtcaagcgctatagca

SEQ ID NO: 541473 - DNA, 19 bp, Mus musculus
  siRNA target sequence for Tnfaip1 (NM_009395.2,1132-1150).
gcgctatagcacttacgat

SEQ ID NO: 541474 - DNA, 19 bp, Mus musculus
  siRNA target sequence for Tnfrsf23 (NM_024290.2,70-88).
ctgttcttgccggtaatat

SEQ ID NO: 541475 - DNA, 19 bp, Mus musculus
  siRNA target sequence for Tnfrsf23 (NM_024290.2,72-90).
gttcttgccggtaatattt

SEQ ID NO: 541476 - DNA, 19 bp, Mus musculus
  siRNA target sequence for Tnfrsf23 (NM_024290.2,91-109).
gctatgcctgaatcatact

SEQ ID NO: 541477 - DNA, 19 bp, Mus musculus
  siRNA target sequence for Tnfrsf23 (NM_024290.2,100-118).
gaatcatactccttcaact

SEQ ID NO: 541478 - DNA, 19 bp, Mus musculus
  siRNA target sequence for Tnfrsf23 (NM_024290.2,119-137).
gtcccgatggtgaatacca

SEQ ID NO: 541479 - DNA, 19 bp, Mus musculus
  siRNA target sequence for Tnfrsf23 (NM_024290.2,161-179).
cctgtccctcaggtacatt

SEQ ID NO: 541480 - DNA, 19 bp, Mus musculus
  siRNA target sequence for Tnfrsf23 (NM_024290.2,264-282).
cctgcatgattgtgaactt

SEQ ID NO: 541481 - DNA, 19 bp, Mus musculus
  siRNA target sequence for Tnfrsf23 (NM_024290.2,342-360).
gaaatgcgagtgccaaata

SEQ ID NO: 541482 - DNA, 19 bp, Mus musculus
  siRNA target sequence for Tnfrsf23 (NM_024290.2,502-520).
ctgttcctactgatgctaa

SEQ ID NO: 541483 - DNA, 19 bp, Mus musculus
  siRNA target sequence for Tnfrsf23 (NM_024290.2,504-522).
gttcctactgatgctaatt

SEQ ID NO: 541484 - DNA, 19 bp, Mus musculus
  siRNA target sequence for Tnfrsf23 (NM_024290.2,508-526).
ctactgatgctaattgtct

SEQ ID NO: 541485 - DNA, 19 bp, Mus musculus
  siRNA target sequence for Tnip2 (NM_139064.1,570-588).
cccacatgtgccaacatct

SEQ ID NO: 541486 - DNA, 19 bp, Mus musculus
  siRNA target sequence for Tnip2 (NM_139064.1,580-598).
ccaacatctggccaaatgt

SEQ ID NO: 541487 - DNA, 19 bp, Mus musculus
  siRNA target sequence for Tnip2 (NM_139064.1,678-696).
ctggccagagtgttattaa

SEQ ID NO: 541488 - DNA, 19 bp, Mus musculus
  siRNA target sequence for Tnip2 (NM_139064.1,680-698).
ggccagagtgttattaaga

SEQ ID NO: 541489 - DNA, 19 bp, Mus musculus
  siRNA target sequence for Tnip2 (NM_139064.1,681-699).
gccagagtgttattaagaa

SEQ ID NO: 541490 - DNA, 19 bp, Mus musculus
  siRNA target sequence for Tnip2 (NM_139064.1,683-701).
cagagtgttattaagaagt

SEQ ID NO: 541491 - DNA, 19 bp, Mus musculus
  siRNA target sequence for Tnip2 (NM_139064.1,706-724).
ggaagaaaatcgactgtta

SEQ ID NO: 541492 - DNA, 19 bp, Mus musculus
  siRNA target sequence for Tnip2 (NM_139064.1,783-801).
gtagggacgaatatgtgaa

SEQ ID NO: 541493 - DNA, 19 bp, Mus musculus
  siRNA target sequence for Tnip2 (NM_139064.1,804-822).
ggttgcatgcccagctaaa

SEQ ID NO: 541494 - DNA, 19 bp, Mus musculus
  siRNA target sequence for Tnip2 (NM_139064.1,863-881).
gagatttcccgacttaaca

SEQ ID NO: 541495 - DNA, 19 bp, Mus musculus
  siRNA target sequence for Tnip2 (NM_139064.1,865-883).
gatttcccgacttaacaga

SEQ ID NO: 541496 - DNA, 19 bp, Mus musculus
  siRNA target sequence for Tnip2 (NM_139064.1,903-921).
gtgactgtgcggaagcaaa

SEQ ID NO: 541497 - DNA, 19 bp, Mus musculus
  siRNA target sequence for Tnip2 (NM_139064.1,1044-1062).
cgcacagtaggattcaaga

SEQ ID NO: 541498 - DNA, 19 bp, Mus musculus
  siRNA target sequence for Tnip2 (NM_139064.1,1127-1145).
ggaccctgtcggattcata

SEQ ID NO: 541499 - DNA, 19 bp, Mus musculus
  siRNA target sequence for Tnip2 (NM_139064.1,1138-1156).
gattcatacggggaacaaa

SEQ ID NO: 541500 - DNA, 19 bp, Mus musculus
  siRNA target sequence for Tnip2 (NM_139064.1,1158-1176).
ctgccaagtacttagagat

SEQ ID NO: 541501 - DNA, 19 bp, Mus musculus
  siRNA target sequence for Tollip (NM_023764.2,156-174).
ggacttcctccgtataaca

SEQ ID NO: 541502 - DNA, 19 bp, Mus musculus
  siRNA target sequence for Tollip (NM_023764.2,272-290).
ctgtggtacaggcaaaatt

SEQ ID NO: 541503 - DNA, 19 bp, Mus musculus
  siRNA target sequence for Tollip (NM_023764.2,284-302).
caaaattggcaaagaatta

SEQ ID NO: 541504 - DNA, 19 bp, Mus musculus
  siRNA target sequence for Tollip (NM_023764.2,338-356).
gtctgggctatgctgttta

SEQ ID NO: 541505 - DNA, 19 bp, Mus musculus
  siRNA target sequence for Tollip (NM_023764.2,342-360).
gggctatgctgtttatgaa

SEQ ID NO: 541506 - DNA, 19 bp, Mus musculus
  siRNA target sequence for Tollip (NM_023764.2,343-361).
ggctatgctgtttatgaaa

SEQ ID NO: 541507 - DNA, 19 bp, Mus musculus
  siRNA target sequence for Tollip (NM_023764.2,387-405).
gaaccctcgctggaacaaa

SEQ ID NO: 541508 - DNA, 19 bp, Mus musculus
  siRNA target sequence for Tollip (NM_023764.2,392-410).
ctcgctggaacaaagtcat

SEQ ID NO: 541509 - DNA, 19 bp, Mus musculus
  siRNA target sequence for Tollip (NM_023764.2,440-458).
cgttctaccttgagatctt

SEQ ID NO: 541510 - DNA, 19 bp, Mus musculus
  siRNA target sequence for Tollip (NM_023764.2,538-556).
gtggaggacgagtggtata

SEQ ID NO: 541511 - DNA, 19 bp, Mus musculus
  siRNA target sequence for Tollip (NM_023764.2,580-598).
gacaaggagggcatgatta

SEQ ID NO: 541512 - DNA, 19 bp, Mus musculus
  siRNA target sequence for Tollip (NM_023764.2,864-882).
ccagagagggaacaaagat

SEQ ID NO: 541513 - DNA, 19 bp, Mus musculus
  siRNA target sequence for Tollip (NM_023764.2,880-898).
gatgctgccatcaattcct

SEQ ID NO: 541514 - DNA, 19 bp, Mus musculus
  siRNA target sequence for Trappc4 (NM_021789.2,261-279).
gcgtgtacgtggtgaacaa

SEQ ID NO: 541515 - DNA, 19 bp, Mus musculus
  siRNA target sequence for Trappc4 (NM_021789.2,262-280).
cgtgtacgtggtgaacaaa

SEQ ID NO: 541516 - DNA, 19 bp, Mus musculus
  siRNA target sequence for Trappc4 (NM_021789.2,329-347).
gctgagaagactttcagtt

SEQ ID NO: 541517 - DNA, 19 bp, Mus musculus
  siRNA target sequence for Trappc4 (NM_021789.2,330-348).
ctgagaagactttcagtta

SEQ ID NO: 541518 - DNA, 19 bp, Mus musculus
  siRNA target sequence for Trappc4 (NM_021789.2,516-534).
cgaattacccggtttccat

SEQ ID NO: 541519 - DNA, 19 bp, Mus musculus
  siRNA target sequence for Trappc4 (NM_021789.2,558-576).
cctctaacgagaagcttat

SEQ ID NO: 541520 - DNA, 19 bp, Mus musculus
  siRNA target sequence for Trappc4 (NM_021789.2,561-579).
ctaacgagaagcttatgct

SEQ ID NO: 541521 - DNA, 19 bp, Mus musculus
  siRNA target sequence for Trappc4 (NM_021789.2,755-773).
ctccgaaaaatttatgaaa

SEQ ID NO: 541522 - DNA, 19 bp, Mus musculus
  siRNA target sequence for Trappc4 (NM_021789.2,757-775).
ccgaaaaatttatgaaatt

SEQ ID NO: 541523 - DNA, 19 bp, Mus musculus
  siRNA target sequence for Trappc4 (NM_021789.2,791-809).
ctcaagaatccattctact

SEQ ID NO: 541524 - DNA, 19 bp, Mus musculus
  siRNA target sequence for Trappc4 (NM_021789.2,800-818).
ccattctactccttggaaa

SEQ ID NO: 541525 - DNA, 19 bp, Mus musculus
  siRNA target sequence for Trappc4 (NM_021789.2,801-819).
cattctactccttggaaat

SEQ ID NO: 541526 - DNA, 19 bp, Mus musculus
  siRNA target sequence for Trappc4 (NM_021789.2,826-844).
cagatgcgagctgtttgat

SEQ ID NO: 541527 - DNA, 19 bp, Mus musculus
  siRNA target sequence for Trhr2 (NM_133202.1,299-317).
ggtggggcactggatctat

SEQ ID NO: 541528 - DNA, 19 bp, Mus musculus
  siRNA target sequence for Trhr2 (NM_133202.1,492-510).
gtcacgtccctctattgct

SEQ ID NO: 541529 - DNA, 19 bp, Mus musculus
  siRNA target sequence for Trhr2 (NM_133202.1,494-512).
cacgtccctctattgctta

SEQ ID NO: 541530 - DNA, 19 bp, Mus musculus
  siRNA target sequence for Trhr2 (NM_133202.1,653-671).
cgtgctctatgggttcatt

SEQ ID NO: 541531 - DNA, 19 bp, Mus musculus
  siRNA target sequence for Trhr2 (NM_133202.1,657-675).
ctctatgggttcattggaa

SEQ ID NO: 541532 - DNA, 19 bp, Mus musculus
  siRNA target sequence for Trhr2 (NM_133202.1,808-826).
ggatgctggccgtgattgt

SEQ ID NO: 541533 - DNA, 19 bp, Mus musculus
  siRNA target sequence for Trim10 (NM_011280.1,422-440).
gatcccaggtccagaatca

SEQ ID NO: 541534 - DNA, 19 bp, Mus musculus
  siRNA target sequence for Trim10 (NM_011280.1,585-603).
ccggaacacggggagaaaa

SEQ ID NO: 541535 - DNA, 19 bp, Mus musculus
  siRNA target sequence for Trim10 (NM_011280.1,586-604).
cggaacacggggagaaaat

SEQ ID NO: 541536 - DNA, 19 bp, Mus musculus
  siRNA target sequence for Trim10 (NM_011280.1,591-609).
cacggggagaaaatctact

SEQ ID NO: 541537 - DNA, 19 bp, Mus musculus
  siRNA target sequence for Trim10 (NM_011280.1,705-723).
ggtccctacagggaacaaa

SEQ ID NO: 541538 - DNA, 19 bp, Mus musculus
  siRNA target sequence for Trim10 (NM_011280.1,706-724).
gtccctacagggaacaaat

SEQ ID NO: 541539 - DNA, 19 bp, Mus musculus
  siRNA target sequence for Trim10 (NM_011280.1,709-727).
cctacagggaacaaataca

SEQ ID NO: 541540 - DNA, 19 bp, Mus musculus
  siRNA target sequence for Trim10 (NM_011280.1,913-931).
ggttagacggggacatctt

SEQ ID NO: 541541 - DNA, 19 bp, Mus musculus
  siRNA target sequence for Trim10 (NM_011280.1,936-954).
cagcaggaagagtttgatt

SEQ ID NO: 541542 - DNA, 19 bp, Mus musculus
  siRNA target sequence for Trim10 (NM_011280.1,1055-1073).
cactctaataagatgtgaa

SEQ ID NO: 541543 - DNA, 19 bp, Mus musculus
  siRNA target sequence for Trim10 (NM_011280.1,1086-1104).
cggaaacccgaggctatat

SEQ ID NO: 541544 - DNA, 19 bp, Mus musculus
  siRNA target sequence for Trim10 (NM_011280.1,1280-1298).
ggctcggttctcctacaaa

SEQ ID NO: 541545 - DNA, 19 bp, Mus musculus
  siRNA target sequence for Trim10 (NM_011280.1,1281-1299).
gctcggttctcctacaaat

SEQ ID NO: 541546 - DNA, 19 bp, Mus musculus
  siRNA target sequence for Trim10 (NM_011280.1,1350-1368).
ctggcccaatgtggtttta

SEQ ID NO: 541547 - DNA, 19 bp, Mus musculus
  siRNA target sequence for Trim10 (NM_011280.1,1352-1370).
ggcccaatgtggttttaca

SEQ ID NO: 541548 - DNA, 19 bp, Mus musculus
  siRNA target sequence for Trim10 (NM_011280.1,1452-1470).
cgacggaagggagaattga

SEQ ID NO: 541549 - DNA, 19 bp, Mus musculus
  siRNA target sequence for Trim10 (NM_011280.1,1580-1598).
gcaggtatctcttgactat

SEQ ID NO: 541550 - DNA, 19 bp, Mus musculus
  siRNA target sequence for Trim10 (NM_011280.1,1627-1645).
ctgtcactcaggagcatat

SEQ ID NO: 541551 - DNA, 19 bp, Mus musculus
  siRNA target sequence for Trim10 (NM_011280.1,1635-1653).
caggagcatatctatacct

SEQ ID NO: 541552 - DNA, 19 bp, Mus musculus
  siRNA target sequence for Trim29 (NM_023655.1,61-79).
gaccagacctgcatctgtt

SEQ ID NO: 541553 - DNA, 19 bp, Mus musculus
  siRNA target sequence for Trim29 (NM_023655.1,152-170).
ccgagctgtcactgcaaaa

SEQ ID NO: 541554 - DNA, 19 bp, Mus musculus
  siRNA target sequence for Trim29 (NM_023655.1,235-253).
gaccggatcaagagcttta

SEQ ID NO: 541555 - DNA, 19 bp, Mus musculus
  siRNA target sequence for Trim29 (NM_023655.1,481-499).
gaatttggtgcattgatga

SEQ ID NO: 541556 - DNA, 19 bp, Mus musculus
  siRNA target sequence for Trim29 (NM_023655.1,605-623).
gcatgcgtcatgttgagaa

SEQ ID NO: 541557 - DNA, 19 bp, Mus musculus
  siRNA target sequence for Trim29 (NM_023655.1,610-628).
cgtcatgttgagaagatgt

SEQ ID NO: 541558 - DNA, 19 bp, Mus musculus
  siRNA target sequence for Trim29 (NM_023655.1,682-700).
ggggaccatcgctacatga

SEQ ID NO: 541559 - DNA, 19 bp, Mus musculus
  siRNA target sequence for Trim29 (NM_023655.1,683-701).
gggaccatcgctacatgaa

SEQ ID NO: 541560 - DNA, 19 bp, Mus musculus
  siRNA target sequence for Trim29 (NM_023655.1,685-703).
gaccatcgctacatgaaca

SEQ ID NO: 541561 - DNA, 19 bp, Mus musculus
  siRNA target sequence for Trim29 (NM_023655.1,735-753).
cacgcctgacaccatgaaa

SEQ ID NO: 541562 - DNA, 19 bp, Mus musculus
  siRNA target sequence for Trim29 (NM_023655.1,739-757).
cctgacaccatgaaaagat

SEQ ID NO: 541563 - DNA, 19 bp, Mus musculus
  siRNA target sequence for Trim29 (NM_023655.1,865-883).
ggcacaaaaggcaactata

SEQ ID NO: 541564 - DNA, 19 bp, Mus musculus
  siRNA target sequence for Trim29 (NM_023655.1,903-921).
cacatccacggttcagaat

SEQ ID NO: 541565 - DNA, 19 bp, Mus musculus
  siRNA target sequence for Trim29 (NM_023655.1,1049-1067).
ctcactaccggccattcta

SEQ ID NO: 541566 - DNA, 19 bp, Mus musculus
  siRNA target sequence for Trim29 (NM_023655.1,1058-1076).
ggccattctatgtcaacaa

SEQ ID NO: 541567 - DNA, 19 bp, Mus musculus
  siRNA target sequence for Trim3 (NM_018880.1,280-298).
cataccttctgtgaaagat

SEQ ID NO: 541568 - DNA, 19 bp, Mus musculus
  siRNA target sequence for Trim3 (NM_018880.1,380-398).
gcgtctcagccctacaaaa

SEQ ID NO: 541569 - DNA, 19 bp, Mus musculus
  siRNA target sequence for Trim3 (NM_018880.1,753-771).
ggccctggctcagataagt

SEQ ID NO: 541570 - DNA, 19 bp, Mus musculus
  siRNA target sequence for Trim3 (NM_018880.1,828-846).
cgacttggagagcatttgt

SEQ ID NO: 541571 - DNA, 19 bp, Mus musculus
  siRNA target sequence for Trim3 (NM_018880.1,1158-1176).
cctgcgccaggcactagtt

SEQ ID NO: 541572 - DNA, 19 bp, Mus musculus
  siRNA target sequence for Trim3 (NM_018880.1,1294-1312).
ccggtggtggaccacaaaa

SEQ ID NO: 541573 - DNA, 19 bp, Mus musculus
  siRNA target sequence for Trim3 (NM_018880.1,1295-1313).
cggtggtggaccacaaaaa

SEQ ID NO: 541574 - DNA, 19 bp, Mus musculus
  siRNA target sequence for Trim3 (NM_018880.1,1392-1410).
gcgtggcagcccttttcgt

SEQ ID NO: 541575 - DNA, 19 bp, Mus musculus
  siRNA target sequence for Trim3 (NM_018880.1,1442-1460).
cttccccagatgatgtgaa

SEQ ID NO: 541576 - DNA, 19 bp, Mus musculus
  siRNA target sequence for Trim3 (NM_018880.1,1614-1632).
gggtgaattcaccaattta

SEQ ID NO: 541577 - DNA, 19 bp, Mus musculus
  siRNA target sequence for Trim3 (NM_018880.1,1687-1705).
caatgtattcaggttttct

SEQ ID NO: 541578 - DNA, 19 bp, Mus musculus
  siRNA target sequence for Trim3 (NM_018880.1,1789-1807).
gacaccaatggagacatta

SEQ ID NO: 541579 - DNA, 19 bp, Mus musculus
  siRNA target sequence for Trim3 (NM_018880.1,1828-1846).
cgttgggtcagcatcttct

SEQ ID NO: 541580 - DNA, 19 bp, Mus musculus
  siRNA target sequence for Trim3 (NM_018880.1,1847-1865).
ctcctgaaggcaagttcaa

SEQ ID NO: 541581 - DNA, 19 bp, Mus musculus
  siRNA target sequence for Trim3 (NM_018880.1,1936-1954).
gtggtggataacaaatctt

SEQ ID NO: 541582 - DNA, 19 bp, Mus musculus
  siRNA target sequence for Trim3 (NM_018880.1,2061-2079).
caagaatgagattgtagta

SEQ ID NO: 541583 - DNA, 19 bp, Mus musculus
  siRNA target sequence for Trim3 (NM_018880.1,2074-2092).
gtagtaacggatttccata

SEQ ID NO: 541584 - DNA, 19 bp, Mus musculus
  siRNA target sequence for Trim3 (NM_018880.1,2121-2139).
cggagagttcctcttcaaa

SEQ ID NO: 541585 - DNA, 19 bp, Mus musculus
  siRNA target sequence for Trim3 (NM_018880.1,2288-2306).
cgtctgcagagccactata

SEQ ID NO: 541586 - DNA, 19 bp, Mus musculus
  siRNA target sequence for Trim3 (NM_018880.1,2289-2307).
gtctgcagagccactatat

SEQ ID NO: 541587 - DNA, 19 bp, Mus musculus
  siRNA target sequence for Trim3 (NM_018880.1,2372-2390).
gctttaaggcctatcgata

SEQ ID NO: 541588 - DNA, 19 bp, Mus musculus
  siRNA target sequence for Trim32 (NM_053084.1,176-194).
ccgggaagtgctagaatgt

SEQ ID NO: 541589 - DNA, 19 bp, Mus musculus
  siRNA target sequence for Trim32 (NM_053084.1,309-327).
gtccgctgccccttttgca

SEQ ID NO: 541590 - DNA, 19 bp, Mus musculus
  siRNA target sequence for Trim32 (NM_053084.1,376-394).
cggtgctgaagatcattga

SEQ ID NO: 541591 - DNA, 19 bp, Mus musculus
  siRNA target sequence for Trim32 (NM_053084.1,649-667).
gcgtctccagggatcttca

SEQ ID NO: 541592 - DNA, 19 bp, Mus musculus
  siRNA target sequence for Trim32 (NM_053084.1,732-750).
gcccgctctcggaagttct

SEQ ID NO: 541593 - DNA, 19 bp, Mus musculus
  siRNA target sequence for Trim32 (NM_053084.1,733-751).
cccgctctcggaagttctt

SEQ ID NO: 541594 - DNA, 19 bp, Mus musculus
  siRNA target sequence for Trim32 (NM_053084.1,735-753).
cgctctcggaagttcttca

SEQ ID NO: 541595 - DNA, 19 bp, Mus musculus
  siRNA target sequence for Trim32 (NM_053084.1,844-862).
ctcgctgtgactactttct

SEQ ID NO: 541596 - DNA, 19 bp, Mus musculus
  siRNA target sequence for Trim32 (NM_053084.1,989-1007).
cgttggtcctctgcaaatt

SEQ ID NO: 541597 - DNA, 19 bp, Mus musculus
  siRNA target sequence for Trim32 (NM_053084.1,1085-1103).
ctcagcctcggtaaccttt

SEQ ID NO: 541598 - DNA, 19 bp, Mus musculus
  siRNA target sequence for Trim32 (NM_053084.1,1090-1108).
cctcggtaacctttagaga

SEQ ID NO: 541599 - DNA, 19 bp, Mus musculus
  siRNA target sequence for Trim32 (NM_053084.1,1234-1252).
gcactcccggcatgttcaa

SEQ ID NO: 541600 - DNA, 19 bp, Mus musculus
  siRNA target sequence for Trim32 (NM_053084.1,1235-1253).
cactcccggcatgttcaat

SEQ ID NO: 541601 - DNA, 19 bp, Mus musculus
  siRNA target sequence for Trim32 (NM_053084.1,1257-1275).
ccagtcagtctctatgtga

SEQ ID NO: 541602 - DNA, 19 bp, Mus musculus
  siRNA target sequence for Trim32 (NM_053084.1,1307-1325).
gggcaactatcgtatccaa

SEQ ID NO: 541603 - DNA, 19 bp, Mus musculus
  siRNA target sequence for Trim32 (NM_053084.1,1369-1387).
ccagcggcattgatagctt

SEQ ID NO: 541604 - DNA, 19 bp, Mus musculus
  siRNA target sequence for Trim32 (NM_053084.1,1458-1476).
ctgattggtgtcactgata

SEQ ID NO: 541605 - DNA, 19 bp, Mus musculus
  siRNA target sequence for Trim32 (NM_053084.1,1482-1500).
gacaactcccttaaagtct

SEQ ID NO: 541606 - DNA, 19 bp, Mus musculus
  siRNA target sequence for Trim32 (NM_053084.1,1484-1502).
caactcccttaaagtctat

SEQ ID NO: 541607 - DNA, 19 bp, Mus musculus
  siRNA target sequence for Trim32 (NM_053084.1,1639-1657).
gagcaggagtggtcaaata

SEQ ID NO: 541608 - DNA, 19 bp, Mus musculus
  siRNA target sequence for Trim32 (NM_053084.1,1641-1659).
gcaggagtggtcaaataca

SEQ ID NO: 541609 - DNA, 19 bp, Mus musculus
  siRNA target sequence for Trim32 (NM_053084.1,1675-1693).
ctgtgaggcccaagtttgt

SEQ ID NO: 541610 - DNA, 19 bp, Mus musculus
  siRNA target sequence for Trim32 (NM_053084.1,1748-1766).
ggaaaaccgacagaatgaa

SEQ ID NO: 541611 - DNA, 19 bp, Mus musculus
  siRNA target sequence for Trim32 (NM_053084.1,1914-1932).
gatagcagccgcaaggaaa

SEQ ID NO: 541612 - DNA, 19 bp, Mus musculus
  siRNA target sequence for Trim32 (NM_053084.1,1954-1972).
gtggctacagcgtccttat

SEQ ID NO: 541613 - DNA, 19 bp, Mus musculus
  siRNA target sequence for Trim32 (NM_053084.1,1958-1976).
ctacagcgtccttattcga

SEQ ID NO: 541614 - DNA, 19 bp, Mus musculus
  siRNA target sequence for Trim32 (NM_053084.1,2046-2064).
gatcactgcgtcaagatct

SEQ ID NO: 541615 - DNA, 19 bp, Mus musculus
  siRNA target sequence for Trim32 (NM_053084.1,2049-2067).
cactgcgtcaagatctaca

SEQ ID NO: 541616 - DNA, 19 bp, Mus musculus
  siRNA target sequence for Trim32 (NM_053084.1,2069-2087).
ctatcatctgagaagatat

SEQ ID NO: 541617 - DNA, 19 bp, Mus musculus
  siRNA target sequence for Trim8 (NM_053100.1,149-167).
gcggagaattggaagaact

SEQ ID NO: 541618 - DNA, 19 bp, Mus musculus
  siRNA target sequence for Trim8 (NM_053100.1,192-210).
ccatctgcctgcacgtttt

SEQ ID NO: 541619 - DNA, 19 bp, Mus musculus
  siRNA target sequence for Trim8 (NM_053100.1,220-238).
ggtgcagctgccatgcaaa

SEQ ID NO: 541620 - DNA, 19 bp, Mus musculus
  siRNA target sequence for Trim8 (NM_053100.1,307-325).
gtgcaaccaggcctacaat

SEQ ID NO: 541621 - DNA, 19 bp, Mus musculus
  siRNA target sequence for Trim8 (NM_053100.1,309-327).
gcaaccaggcctacaatca

SEQ ID NO: 541622 - DNA, 19 bp, Mus musculus
  siRNA target sequence for Trim8 (NM_053100.1,638-656).
cagtactgctgctactaca

SEQ ID NO: 541623 - DNA, 19 bp, Mus musculus
  siRNA target sequence for Trim8 (NM_053100.1,839-857).
gtgcggctgcagtacgaaa

SEQ ID NO: 541624 - DNA, 19 bp, Mus musculus
  siRNA target sequence for Trim8 (NM_053100.1,843-861).
ggctgcagtacgaaaagct

SEQ ID NO: 541625 - DNA, 19 bp, Mus musculus
  siRNA target sequence for Trim8 (NM_053100.1,1045-1063).
gaacaccaagtctgtgaaa

SEQ ID NO: 541626 - DNA, 19 bp, Mus musculus
  siRNA target sequence for Trim8 (NM_053100.1,1634-1652).
gtgccctcacaggagtatt

SEQ ID NO: 541627 - DNA, 19 bp, Mus musculus
  siRNA target sequence for Trim8 (NM_053100.1,1737-1755).
ctggccaccaggatttcta

SEQ ID NO: 541628 - DNA, 19 bp, Mus musculus
  siRNA target sequence for Trim8 (NM_053100.1,1739-1757).
ggccaccaggatttctaca

SEQ ID NO: 541629 - DNA, 19 bp, Mus musculus
  siRNA target sequence for Trim8 (NM_053100.1,1769-1787).
cagccgtccaccaaacact

SEQ ID NO: 541630 - DNA, 19 bp, Mus musculus
  siRNA target sequence for Trim8 (NM_053100.1,1771-1789).
gccgtccaccaaacactat

SEQ ID NO: 541631 - DNA, 19 bp, Mus musculus
  siRNA target sequence for Trim8 (NM_053100.1,1773-1791).
cgtccaccaaacactatgt

SEQ ID NO: 541632 - DNA, 19 bp, Mus musculus
  siRNA target sequence for Trp53bp1 (NM_013735.2,11-29).
ggaccctactggaagtcaa

SEQ ID NO: 541633 - DNA, 19 bp, Mus musculus
  siRNA target sequence for Trp53bp1 (NM_013735.2,12-30).
gaccctactggaagtcaat

SEQ ID NO: 541634 - DNA, 19 bp, Mus musculus
  siRNA target sequence for Trp53bp1 (NM_013735.2,25-43).
gtcaattggattcagattt

SEQ ID NO: 541635 - DNA, 19 bp, Mus musculus
  siRNA target sequence for Trp53bp1 (NM_013735.2,27-45).
caattggattcagatttct

SEQ ID NO: 541636 - DNA, 19 bp, Mus musculus
  siRNA target sequence for Trp53bp1 (NM_013735.2,56-74).
cactccttgcctgataata

SEQ ID NO: 541637 - DNA, 19 bp, Mus musculus
  siRNA target sequence for Trp53bp1 (NM_013735.2,65-83).
cctgataatagaagattct

SEQ ID NO: 541638 - DNA, 19 bp, Mus musculus
  siRNA target sequence for Trp53bp1 (NM_013735.2,139-157).
ctcgacaccttcctaatct

SEQ ID NO: 541639 - DNA, 19 bp, Mus musculus
  siRNA target sequence for Trp53bp1 (NM_013735.2,171-189).
gagaaccccgtgttggata

SEQ ID NO: 541640 - DNA, 19 bp, Mus musculus
  siRNA target sequence for Trp53bp1 (NM_013735.2,176-194).
ccccgtgttggatattgta

SEQ ID NO: 541641 - DNA, 19 bp, Mus musculus
  siRNA target sequence for Trp53bp1 (NM_013735.2,177-195).
cccgtgttggatattgtat

SEQ ID NO: 541642 - DNA, 19 bp, Mus musculus
  siRNA target sequence for Trp53bp1 (NM_013735.2,228-246).
gacagtaatagctcattca

SEQ ID NO: 541643 - DNA, 19 bp, Mus musculus
  siRNA target sequence for Trp53bp1 (NM_013735.2,527-545).
ccagagccaggatgttgaa

SEQ ID NO: 541644 - DNA, 19 bp, Mus musculus
  siRNA target sequence for Trp53bp1 (NM_013735.2,607-625).
gttctagcccgctatctga

SEQ ID NO: 541645 - DNA, 19 bp, Mus musculus
  siRNA target sequence for Trp53bp1 (NM_013735.2,629-647).
ggatgcgagcactgcaatt

SEQ ID NO: 541646 - DNA, 19 bp, Mus musculus
  siRNA target sequence for Trp53bp1 (NM_013735.2,630-648).
gatgcgagcactgcaatta

SEQ ID NO: 541647 - DNA, 19 bp, Mus musculus
  siRNA target sequence for Trp53bp1 (NM_013735.2,633-651).
gcgagcactgcaattaaat

SEQ ID NO: 541648 - DNA, 19 bp, Mus musculus
  siRNA target sequence for Trp53bp1 (NM_013735.2,657-675).
gaacagcccactgaagata

SEQ ID NO: 541649 - DNA, 19 bp, Mus musculus
  siRNA target sequence for Trp53bp1 (NM_013735.2,717-735).
gtacagcccggtaaaggta

SEQ ID NO: 541650 - DNA, 19 bp, Mus musculus
  siRNA target sequence for Trp53bp1 (NM_013735.2,722-740).
gcccggtaaaggtatccat

SEQ ID NO: 541651 - DNA, 19 bp, Mus musculus
  siRNA target sequence for Trp53bp1 (NM_013735.2,733-751).
gtatccatgtggtagaaga

SEQ ID NO: 541652 - DNA, 19 bp, Mus musculus
  siRNA target sequence for Trp53bp1 (NM_013735.2,753-771).
caaaatctaccacttgtaa

SEQ ID NO: 541653 - DNA, 19 bp, Mus musculus
  siRNA target sequence for Trp53bp1 (NM_013735.2,788-806).
gtccagtcctcaagtttct

SEQ ID NO: 541654 - DNA, 19 bp, Mus musculus
  siRNA target sequence for Trp53bp1 (NM_013735.2,807-825).
gttgctgctgtggaaacaa

SEQ ID NO: 541655 - DNA, 19 bp, Mus musculus
  siRNA target sequence for Trp53bp1 (NM_013735.2,1033-1051).
gtcagaagccccttgttca

SEQ ID NO: 541656 - DNA, 19 bp, Mus musculus
  siRNA target sequence for Trp53bp1 (NM_013735.2,1064-1082).
cacgaattcctcagatctt

SEQ ID NO: 541657 - DNA, 19 bp, Mus musculus
  siRNA target sequence for Trp53bp1 (NM_013735.2,1066-1084).
cgaattcctcagatcttgt

SEQ ID NO: 541658 - DNA, 19 bp, Mus musculus
  siRNA target sequence for Trp53bp1 (NM_013735.2,1067-1085).
gaattcctcagatcttgtt

SEQ ID NO: 541659 - DNA, 19 bp, Mus musculus
  siRNA target sequence for Trp53bp1 (NM_013735.2,1087-1105).
ctccttcccctgatgcttt

SEQ ID NO: 541660 - DNA, 19 bp, Mus musculus
  siRNA target sequence for Trp53bp1 (NM_013735.2,1108-1126).
gatctaccccttttatcgt

SEQ ID NO: 541661 - DNA, 19 bp, Mus musculus
  siRNA target sequence for Trp53bp1 (NM_013735.2,1169-1187).
catggatatgtcagtgata

SEQ ID NO: 541662 - DNA, 19 bp, Mus musculus
  siRNA target sequence for Trp53bp1 (NM_013735.2,1274-1292).
gtcaccgcaagcatcaaca

SEQ ID NO: 541663 - DNA, 19 bp, Mus musculus
  siRNA target sequence for Trp53bp1 (NM_013735.2,1300-1318).
ctcggagcacgccagtttt

SEQ ID NO: 541664 - DNA, 19 bp, Mus musculus
  siRNA target sequence for Trp53bp1 (NM_013735.2,1302-1320).
cggagcacgccagttttca

SEQ ID NO: 541665 - DNA, 19 bp, Mus musculus
  siRNA target sequence for Trp53bp1 (NM_013735.2,1352-1370).
cgagttctctcatgacatt

SEQ ID NO: 541666 - DNA, 19 bp, Mus musculus
  siRNA target sequence for Trp53bp1 (NM_013735.2,1353-1371).
gagttctctcatgacattt

SEQ ID NO: 541667 - DNA, 19 bp, Mus musculus
  siRNA target sequence for Trp53bp1 (NM_013735.2,1412-1430).
gaagaaaggtggaggttta

SEQ ID NO: 541668 - DNA, 19 bp, Mus musculus
  siRNA target sequence for Trp53bp1 (NM_013735.2,1514-1532).
gacaggggattcttgcaaa

SEQ ID NO: 541669 - DNA, 19 bp, Mus musculus
  siRNA target sequence for Trp53bp1 (NM_013735.2,1543-1561).
ctacaagtgagtatagtca

SEQ ID NO: 541670 - DNA, 19 bp, Mus musculus
  siRNA target sequence for Trp53bp1 (NM_013735.2,1628-1646).
cgatactgaacctttgtct

SEQ ID NO: 541671 - DNA, 19 bp, Mus musculus
  siRNA target sequence for Trp53bp1 (NM_013735.2,1643-1661).
gtctccagttagcaattct

SEQ ID NO: 541672 - DNA, 19 bp, Mus musculus
  siRNA target sequence for Trp53bp1 (NM_013735.2,1645-1663).
ctccagttagcaattctaa

SEQ ID NO: 541673 - DNA, 19 bp, Mus musculus
  siRNA target sequence for Trp53bp1 (NM_013735.2,1707-1725).
gacgaccaggtagaaatga

SEQ ID NO: 541674 - DNA, 19 bp, Mus musculus
  siRNA target sequence for Trp53bp1 (NM_013735.2,1715-1733).
ggtagaaatgagtcagaat

SEQ ID NO: 541675 - DNA, 19 bp, Mus musculus
  siRNA target sequence for Trp53bp1 (NM_013735.2,1763-1781).
ggacagaggtgactgtaaa

SEQ ID NO: 541676 - DNA, 19 bp, Mus musculus
  siRNA target sequence for Trp53bp1 (NM_013735.2,1793-1811).
cgcggttgctgaagatgtt

SEQ ID NO: 541677 - DNA, 19 bp, Mus musculus
  siRNA target sequence for Trp53bp1 (NM_013735.2,1814-1832).
catcgacctcacttgtgat

SEQ ID NO: 541678 - DNA, 19 bp, Mus musculus
  siRNA target sequence for Trp53bp1 (NM_013735.2,1817-1835).
cgacctcacttgtgattct

SEQ ID NO: 541679 - DNA, 19 bp, Mus musculus
  siRNA target sequence for Trp53bp1 (NM_013735.2,2034-2052).
cacctttctctgactgaaa

SEQ ID NO: 541680 - DNA, 19 bp, Mus musculus
  siRNA target sequence for Trp53bp1 (NM_013735.2,2121-2139).
gaaaccagtgtgattagta

SEQ ID NO: 541681 - DNA, 19 bp, Mus musculus
  siRNA target sequence for Trp53bp1 (NM_013735.2,2380-2398).
cagaagaaaagcgtataga

SEQ ID NO: 541682 - DNA, 19 bp, Mus musculus
  siRNA target sequence for Trp53bp1 (NM_013735.2,2382-2400).
gaagaaaagcgtatagaat

SEQ ID NO: 541683 - DNA, 19 bp, Mus musculus
  siRNA target sequence for Trp53bp1 (NM_013735.2,2656-2674).
ctagtgaaactccatttca

SEQ ID NO: 541684 - DNA, 19 bp, Mus musculus
  siRNA target sequence for Trp53bp1 (NM_013735.2,2659-2677).
gtgaaactccatttcattt

SEQ ID NO: 541685 - DNA, 19 bp, Mus musculus
  siRNA target sequence for Trp53bp1 (NM_013735.2,2684-2702).
gcctaaagaaggtgatatt

SEQ ID NO: 541686 - DNA, 19 bp, Mus musculus
  siRNA target sequence for Trp53bp1 (NM_013735.2,2686-2704).
ctaaagaaggtgatattat

SEQ ID NO: 541687 - DNA, 19 bp, Mus musculus
  siRNA target sequence for Trp53bp1 (NM_013735.2,2731-2749).
ctcttattgggcacctaaa

SEQ ID NO: 541688 - DNA, 19 bp, Mus musculus
  siRNA target sequence for Trp53bp1 (NM_013735.2,2733-2751).
cttattgggcacctaaaat

SEQ ID NO: 541689 - DNA, 19 bp, Mus musculus
  siRNA target sequence for Trp53bp1 (NM_013735.2,2754-2772).
gagcccaagagacatagta

SEQ ID NO: 541690 - DNA, 19 bp, Mus musculus
  siRNA target sequence for Trp53bp1 (NM_013735.2,2756-2774).
gcccaagagacatagtact

SEQ ID NO: 541691 - DNA, 19 bp, Mus musculus
  siRNA target sequence for Trp53bp1 (NM_013735.2,2762-2780).
gagacatagtactcctatt

SEQ ID NO: 541692 - DNA, 19 bp, Mus musculus
  siRNA target sequence for Trp53bp1 (NM_013735.2,2773-2791).
ctcctattgggattagcaa

SEQ ID NO: 541693 - DNA, 19 bp, Mus musculus
  siRNA target sequence for Trp53bp1 (NM_013735.2,2846-2864).
gatcaatgatcctctactt

SEQ ID NO: 541694 - DNA, 19 bp, Mus musculus
  siRNA target sequence for Trp53bp1 (NM_013735.2,2949-2967).
gaggccagtgaagaatctt

SEQ ID NO: 541695 - DNA, 19 bp, Mus musculus
  siRNA target sequence for Trp53bp1 (NM_013735.2,2954-2972).
cagtgaagaatctttgcaa

SEQ ID NO: 541696 - DNA, 19 bp, Mus musculus
  siRNA target sequence for Trp53bp1 (NM_013735.2,3127-3145).
cacccgacagggcgaattt

SEQ ID NO: 541697 - DNA, 19 bp, Mus musculus
  siRNA target sequence for Trp53bp1 (NM_013735.2,3130-3148).
ccgacagggcgaatttgct

SEQ ID NO: 541698 - DNA, 19 bp, Mus musculus
  siRNA target sequence for Trp53bp1 (NM_013735.2,3372-3390).
gacagacctagtaagatgt

SEQ ID NO: 541699 - DNA, 19 bp, Mus musculus
  siRNA target sequence for Trp53bp1 (NM_013735.2,3376-3394).
gacctagtaagatgttgat

SEQ ID NO: 541700 - DNA, 19 bp, Mus musculus
  siRNA target sequence for Trp53bp1 (NM_013735.2,3400-3418).
ggcccacccagagtaacat

SEQ ID NO: 541701 - DNA, 19 bp, Mus musculus
  siRNA target sequence for Trp53bp1 (NM_013735.2,3652-3670).
ctccgcatggccatgtctt

SEQ ID NO: 541702 - DNA, 19 bp, Mus musculus
  siRNA target sequence for Trp53bp1 (NM_013735.2,3717-3735).
cgcgtcatcacagatgttt

SEQ ID NO: 541703 - DNA, 19 bp, Mus musculus
  siRNA target sequence for Trp53bp1 (NM_013735.2,3718-3736).
gcgtcatcacagatgttta

SEQ ID NO: 541704 - DNA, 19 bp, Mus musculus
  siRNA target sequence for Trp53bp1 (NM_013735.2,3779-3797).
gactgaagaaccaatcgta

SEQ ID NO: 541705 - DNA, 19 bp, Mus musculus
  siRNA target sequence for Trp53bp1 (NM_013735.2,4216-4234).
gtccgttgggcgtagaaga

SEQ ID NO: 541706 - DNA, 19 bp, Mus musculus
  siRNA target sequence for Trp53bp1 (NM_013735.2,4218-4236).
ccgttgggcgtagaagata

SEQ ID NO: 541707 - DNA, 19 bp, Mus musculus
  siRNA target sequence for Trp53bp1 (NM_013735.2,4219-4237).
cgttgggcgtagaagatat

SEQ ID NO: 541708 - DNA, 19 bp, Mus musculus
  siRNA target sequence for Trp53bp1 (NM_013735.2,4220-4238).
gttgggcgtagaagatatt

SEQ ID NO: 541709 - DNA, 19 bp, Mus musculus
  siRNA target sequence for Trp53bp1 (NM_013735.2,4223-4241).
gggcgtagaagatatttca

SEQ ID NO: 541710 - DNA, 19 bp, Mus musculus
  siRNA target sequence for Trp53bp1 (NM_013735.2,4246-4264).
gcatgtcaccagatgacaa

SEQ ID NO: 541711 - DNA, 19 bp, Mus musculus
  siRNA target sequence for Trp53bp1 (NM_013735.2,4310-4328).
gacggatgccagttctagt

SEQ ID NO: 541712 - DNA, 19 bp, Mus musculus
  siRNA target sequence for Trp53bp1 (NM_013735.2,4340-4358).
gagtgattctccagagatt

SEQ ID NO: 541713 - DNA, 19 bp, Mus musculus
  siRNA target sequence for Trp53bp1 (NM_013735.2,4426-4444).
gtctccgtgttgtagctaa

SEQ ID NO: 541714 - DNA, 19 bp, Mus musculus
  siRNA target sequence for Trp53bp1 (NM_013735.2,4450-4468).
catccaatggctactttta

SEQ ID NO: 541715 - DNA, 19 bp, Mus musculus
  siRNA target sequence for Trp53bp1 (NM_013735.2,4541-4559).
cgtgctgggcaaagacatt

SEQ ID NO: 541716 - DNA, 19 bp, Mus musculus
  siRNA target sequence for Trp53bp1 (NM_013735.2,4665-4683).
ctgtattacagcattgaaa

SEQ ID NO: 541717 - DNA, 19 bp, Mus musculus
  siRNA target sequence for Trp53bp1 (NM_013735.2,4696-4714).
ggaagtggtataaacgaat

SEQ ID NO: 541718 - DNA, 19 bp, Mus musculus
  siRNA target sequence for Trp53bp1 (NM_013735.2,4842-4860).
cggaaacggcgcagtaaca

SEQ ID NO: 541719 - DNA, 19 bp, Mus musculus
  siRNA target sequence for Trp53bp1 (NM_013735.2,4843-4861).
ggaaacggcgcagtaacat

SEQ ID NO: 541720 - DNA, 19 bp, Mus musculus
  siRNA target sequence for Trp53bp1 (NM_013735.2,4901-4919).
cacaacgcccacacgtaaa

SEQ ID NO: 541721 - DNA, 19 bp, Mus musculus
  siRNA target sequence for Trp53bp1 (NM_013735.2,5262-5280).
gaaattcctcctttcaaca

SEQ ID NO: 541722 - DNA, 19 bp, Mus musculus
  siRNA target sequence for Trp53bp1 (NM_013735.2,5305-5323).
gagcaggagctgggtatat

SEQ ID NO: 541723 - DNA, 19 bp, Mus musculus
  siRNA target sequence for Trp53bp1 (NM_013735.2,5317-5335).
ggtatatccttgaagactt

SEQ ID NO: 541724 - DNA, 19 bp, Mus musculus
  siRNA target sequence for Trp53bp1 (NM_013735.2,5359-5377).
cctaccagtgtctcctaat

SEQ ID NO: 541725 - DNA, 19 bp, Mus musculus
  siRNA target sequence for Trp53bp1 (NM_013735.2,5360-5378).
ctaccagtgtctcctaatt

SEQ ID NO: 541726 - DNA, 19 bp, Mus musculus
  siRNA target sequence for Trp53bp1 (NM_013735.2,5392-5410).
gtcgaacccggaagtactt

SEQ ID NO: 541727 - DNA, 19 bp, Mus musculus
  siRNA target sequence for Trp53bp1 (NM_013735.2,5469-5487).
catgccaaccaacttcaaa

SEQ ID NO: 541728 - DNA, 19 bp, Mus musculus
  siRNA target sequence for Trp53bp1 (NM_013735.2,5478-5496).
caacttcaaaactatcgta

SEQ ID NO: 541729 - DNA, 19 bp, Mus musculus
  siRNA target sequence for Trp53bp1 (NM_013735.2,5521-5539).
gccttgaagagcaacgaat

SEQ ID NO: 541730 - DNA, 19 bp, Mus musculus
  siRNA target sequence for Trp53bp1 (NM_013735.2,5596-5614).
cagatcaacaacagaactt

SEQ ID NO: 541731 - DNA, 19 bp, Mus musculus
  siRNA target sequence for Trp53bp1 (NM_013735.2,5598-5616).
gatcaacaacagaacttct

SEQ ID NO: 541732 - DNA, 19 bp, Mus musculus
  siRNA target sequence for Trp53bp1 (NM_013735.2,5661-5679).
gtgaagcagcaccattcaa

SEQ ID NO: 541733 - DNA, 19 bp, Mus musculus
  siRNA target sequence for Trp53bp1 (NM_013735.2,5685-5703).
cacaacaaagacattgctt

SEQ ID NO: 541734 - DNA, 19 bp, Mus musculus
  siRNA target sequence for Trp53bp1 (NM_013735.2,5696-5714).
cattgctttaggggtattt

SEQ ID NO: 541735 - DNA, 19 bp, Mus musculus
  siRNA target sequence for Trp53bp1 (NM_013735.2,5780-5798).
gcctgtggtatcacaagaa

SEQ ID NO: 541736 - DNA, 19 bp, Mus musculus
  siRNA target sequence for Trp53bp1 (NM_013735.2,5781-5799).
cctgtggtatcacaagaat

SEQ ID NO: 541737 - DNA, 19 bp, Mus musculus
  siRNA target sequence for Trp53bp1 (NM_013735.2,5820-5838).
gttggggagagaattggat

SEQ ID NO: 541738 - DNA, 19 bp, Mus musculus
  siRNA target sequence for Trp53bp1 (NM_013735.2,5843-5861).
gcagcatccaaaatataaa

SEQ ID NO: 541739 - DNA, 19 bp, Mus musculus
  siRNA target sequence for Tsg101 (NM_021884.1,43-61).
ccgagagtcagctgaagaa

SEQ ID NO: 541740 - DNA, 19 bp, Mus musculus
  siRNA target sequence for Tsg101 (NM_021884.1,71-89).
caagtacaaatatagagat

SEQ ID NO: 541741 - DNA, 19 bp, Mus musculus
  siRNA target sequence for Tsg101 (NM_021884.1,74-92).
gtacaaatatagagatcta

SEQ ID NO: 541742 - DNA, 19 bp, Mus musculus
  siRNA target sequence for Tsg101 (NM_021884.1,99-117).
cgtcaaactgtcaatgtca

SEQ ID NO: 541743 - DNA, 19 bp, Mus musculus
  siRNA target sequence for Tsg101 (NM_021884.1,100-118).
gtcaaactgtcaatgtcat

SEQ ID NO: 541744 - DNA, 19 bp, Mus musculus
  siRNA target sequence for Tsg101 (NM_021884.1,116-134).
catcgctatgtacaaagat

SEQ ID NO: 541745 - DNA, 19 bp, Mus musculus
  siRNA target sequence for Tsg101 (NM_021884.1,213-231).
gtgcgttatcgaggtaata

SEQ ID NO: 541746 - DNA, 19 bp, Mus musculus
  siRNA target sequence for Tsg101 (NM_021884.1,215-233).
gcgttatcgaggtaatata

SEQ ID NO: 541747 - DNA, 19 bp, Mus musculus
  siRNA target sequence for Tsg101 (NM_021884.1,216-234).
cgttatcgaggtaatatat

SEQ ID NO: 541748 - DNA, 19 bp, Mus musculus
  siRNA target sequence for Tsg101 (NM_021884.1,217-235).
gttatcgaggtaatatata

SEQ ID NO: 541749 - DNA, 19 bp, Mus musculus
  siRNA target sequence for Tsg101 (NM_021884.1,222-240).
cgaggtaatatatataata

SEQ ID NO: 541750 - DNA, 19 bp, Mus musculus
  siRNA target sequence for Tsg101 (NM_021884.1,281-299).
cccccctatctgttttgtt

SEQ ID NO: 541751 - DNA, 19 bp, Mus musculus
  siRNA target sequence for Tsg101 (NM_021884.1,297-315).
gttaagcctactagttcaa

SEQ ID NO: 541752 - DNA, 19 bp, Mus musculus
  siRNA target sequence for Tsg101 (NM_021884.1,302-320).
gcctactagttcaatgact

SEQ ID NO: 541753 - DNA, 19 bp, Mus musculus
  siRNA target sequence for Tsg101 (NM_021884.1,303-321).
cctactagttcaatgacta

SEQ ID NO: 541754 - DNA, 19 bp, Mus musculus
  siRNA target sequence for Tsg101 (NM_021884.1,304-322).
ctactagttcaatgactat

SEQ ID NO: 541755 - DNA, 19 bp, Mus musculus
  siRNA target sequence for Tsg101 (NM_021884.1,359-377).
ctacctaccttatctacat

SEQ ID NO: 541756 - DNA, 19 bp, Mus musculus
  siRNA target sequence for Tsg101 (NM_021884.1,397-415).
cagagttgctggagcttat

SEQ ID NO: 541757 - DNA, 19 bp, Mus musculus
  siRNA target sequence for Tsg101 (NM_021884.1,401-419).
gttgctggagcttattcaa

SEQ ID NO: 541758 - DNA, 19 bp, Mus musculus
  siRNA target sequence for Tsg101 (NM_021884.1,410-428).
gcttattcaaatcatgatt

SEQ ID NO: 541759 - DNA, 19 bp, Mus musculus
  siRNA target sequence for Tsg101 (NM_021884.1,417-435).
caaatcatgattgtgatat

SEQ ID NO: 541760 - DNA, 19 bp, Mus musculus
  siRNA target sequence for Tsg101 (NM_021884.1,575-593).
caaccccagtggttatcct

SEQ ID NO: 541761 - DNA, 19 bp, Mus musculus
  siRNA target sequence for Tsnax (NM_016909.1,276-294).
gggaaggatgccagtttgt

SEQ ID NO: 541762 - DNA, 19 bp, Mus musculus
  siRNA target sequence for Tsnax (NM_016909.1,278-296).
gaaggatgccagtttgtct

SEQ ID NO: 541763 - DNA, 19 bp, Mus musculus
  siRNA target sequence for Tsnax (NM_016909.1,339-357).
gacgccaggcacgacaaat

SEQ ID NO: 541764 - DNA, 19 bp, Mus musculus
  siRNA target sequence for Tsnax (NM_016909.1,341-359).
cgccaggcacgacaaatat

SEQ ID NO: 541765 - DNA, 19 bp, Mus musculus
  siRNA target sequence for Tsnax (NM_016909.1,343-361).
ccaggcacgacaaatatga

SEQ ID NO: 541766 - DNA, 19 bp, Mus musculus
  siRNA target sequence for Tsnax (NM_016909.1,360-378).
gagagactcgtgaagctaa

SEQ ID NO: 541767 - DNA, 19 bp, Mus musculus
  siRNA target sequence for Tsnax (NM_016909.1,374-392).
gctaagccgggatattact

SEQ ID NO: 541768 - DNA, 19 bp, Mus musculus
  siRNA target sequence for Tsnax (NM_016909.1,398-416).
gagtaagaggacaattttt

SEQ ID NO: 541769 - DNA, 19 bp, Mus musculus
  siRNA target sequence for Tsnax (NM_016909.1,442-460).
ctgatatggaggagatact

SEQ ID NO: 541770 - DNA, 19 bp, Mus musculus
  siRNA target sequence for Tsnax (NM_016909.1,581-599).
cgtggaggctgtctctttt

SEQ ID NO: 541771 - DNA, 19 bp, Mus musculus
  siRNA target sequence for Tsnax (NM_016909.1,616-634).
ctcgttcattgatcagtat

SEQ ID NO: 541772 - DNA, 19 bp, Mus musculus
  siRNA target sequence for Tsnax (NM_016909.1,626-644).
gatcagtatggaagagatt

SEQ ID NO: 541773 - DNA, 19 bp, Mus musculus
  siRNA target sequence for Tsnax (NM_016909.1,631-649).
gtatggaagagattaacaa

SEQ ID NO: 541774 - DNA, 19 bp, Mus musculus
  siRNA target sequence for Tsnax (NM_016909.1,789-807).
gagttgatgcggatgtgta

SEQ ID NO: 541775 - DNA, 19 bp, Mus musculus
  siRNA target sequence for Tsnax (NM_016909.1,797-815).
gcggatgtgtattaacagt

SEQ ID NO: 541776 - DNA, 19 bp, Mus musculus
  siRNA target sequence for Tsnax (NM_016909.1,830-848).
catcgacaccccctttgaa

SEQ ID NO: 541777 - DNA, 19 bp, Mus musculus
  siRNA target sequence for Tsnax (NM_016909.1,904-922).
ggccctatgaggtctctaa

SEQ ID NO: 541778 - DNA, 19 bp, Mus musculus
  siRNA target sequence for Tsnax (NM_016909.1,907-925).
cctatgaggtctctaagaa

SEQ ID NO: 541779 - DNA, 19 bp, Mus musculus
  siRNA target sequence for Tsnax (NM_016909.1,927-945).
ctgtacaccttgaaacaga

SEQ ID NO: 541780 - DNA, 19 bp, Mus musculus
  siRNA target sequence for Tsnax (NM_016909.1,965-983).
cgcttgctatgcccttaaa

SEQ ID NO: 541781 - DNA, 19 bp, Mus musculus
  siRNA target sequence for Tsnax (NM_016909.1,987-1005).
cggggttctgagattccta

SEQ ID NO: 541782 - DNA, 19 bp, Mus musculus
  siRNA target sequence for Tsnax (NM_016909.1,988-1006).
ggggttctgagattcctaa

SEQ ID NO: 541783 - DNA, 19 bp, Mus musculus
  siRNA target sequence for Tsnaxip1 (NM_024445.2,54-72).
ctacaggagcgtaaaagtt

SEQ ID NO: 541784 - DNA, 19 bp, Mus musculus
  siRNA target sequence for Tsnaxip1 (NM_024445.2,57-75).
caggagcgtaaaagtttct

SEQ ID NO: 541785 - DNA, 19 bp, Mus musculus
  siRNA target sequence for Tsnaxip1 (NM_024445.2,76-94).
ccaagccaagaataagtat

SEQ ID NO: 541786 - DNA, 19 bp, Mus musculus
  siRNA target sequence for Tsnaxip1 (NM_024445.2,77-95).
caagccaagaataagtata

SEQ ID NO: 541787 - DNA, 19 bp, Mus musculus
  siRNA target sequence for Tsnaxip1 (NM_024445.2,80-98).
gccaagaataagtatacaa

SEQ ID NO: 541788 - DNA, 19 bp, Mus musculus
  siRNA target sequence for Tsnaxip1 (NM_024445.2,267-285).
cggaatcgagccaatagct

SEQ ID NO: 541789 - DNA, 19 bp, Mus musculus
  siRNA target sequence for Tsnaxip1 (NM_024445.2,320-338).
gtacctggagcaactagaa

SEQ ID NO: 541790 - DNA, 19 bp, Mus musculus
  siRNA target sequence for Tsnaxip1 (NM_024445.2,409-427).
cttatagggagatctttga

SEQ ID NO: 541791 - DNA, 19 bp, Mus musculus
  siRNA target sequence for Tsnaxip1 (NM_024445.2,449-467).
gacatacaagccactgtta

SEQ ID NO: 541792 - DNA, 19 bp, Mus musculus
  siRNA target sequence for Tsnaxip1 (NM_024445.2,597-615).
gctgaggagaggtacgaaa

SEQ ID NO: 541793 - DNA, 19 bp, Mus musculus
  siRNA target sequence for Tsnaxip1 (NM_024445.2,600-618).
gaggagaggtacgaaatct

SEQ ID NO: 541794 - DNA, 19 bp, Mus musculus
  siRNA target sequence for Tsnaxip1 (NM_024445.2,602-620).
ggagaggtacgaaatctct

SEQ ID NO: 541795 - DNA, 19 bp, Mus musculus
  siRNA target sequence for Tsnaxip1 (NM_024445.2,648-666).
ctaaaactcatcgacaaaa

SEQ ID NO: 541796 - DNA, 19 bp, Mus musculus
  siRNA target sequence for Tsnaxip1 (NM_024445.2,689-707).
gcagagcgaggtagctaaa

SEQ ID NO: 541797 - DNA, 19 bp, Mus musculus
  siRNA target sequence for Tsnaxip1 (NM_024445.2,728-746).
ggagtatctgcgttatctt

SEQ ID NO: 541798 - DNA, 19 bp, Mus musculus
  siRNA target sequence for Tsnaxip1 (NM_024445.2,754-772).
gagatgcccgcaaaattct

SEQ ID NO: 541799 - DNA, 19 bp, Mus musculus
  siRNA target sequence for Tsnaxip1 (NM_024445.2,756-774).
gatgcccgcaaaattctga

SEQ ID NO: 541800 - DNA, 19 bp, Mus musculus
  siRNA target sequence for Tsnaxip1 (NM_024445.2,773-791).
gattggggacctgaatgaa

SEQ ID NO: 541801 - DNA, 19 bp, Mus musculus
  siRNA target sequence for Tsnaxip1 (NM_024445.2,849-867).
gacccagtgaagctaacat

SEQ ID NO: 541802 - DNA, 19 bp, Mus musculus
  siRNA target sequence for Tsnaxip1 (NM_024445.2,1085-1103).
ggagcgggaccagttctat

SEQ ID NO: 541803 - DNA, 19 bp, Mus musculus
  siRNA target sequence for Tsnaxip1 (NM_024445.2,1086-1104).
gagcgggaccagttctata

SEQ ID NO: 541804 - DNA, 19 bp, Mus musculus
  siRNA target sequence for Tsnaxip1 (NM_024445.2,1088-1106).
gcgggaccagttctataat

SEQ ID NO: 541805 - DNA, 19 bp, Mus musculus
  siRNA target sequence for Tsnaxip1 (NM_024445.2,1092-1110).
gaccagttctataatgagt

SEQ ID NO: 541806 - DNA, 19 bp, Mus musculus
  siRNA target sequence for Tsnaxip1 (NM_024445.2,1154-1172).
caaatgcgaaagtatcata

SEQ ID NO: 541807 - DNA, 19 bp, Mus musculus
  siRNA target sequence for Tsnaxip1 (NM_024445.2,1316-1334).
ccccttccttcggtttgat

SEQ ID NO: 541808 - DNA, 19 bp, Mus musculus
  siRNA target sequence for Tsnaxip1 (NM_024445.2,1332-1350).
gatggccctgtgaagaaca

SEQ ID NO: 541809 - DNA, 19 bp, Mus musculus
  siRNA target sequence for Tsnaxip1 (NM_024445.2,1373-1391).
ggtaaacctccttaaggat

SEQ ID NO: 541810 - DNA, 19 bp, Mus musculus
  siRNA target sequence for Tsnaxip1 (NM_024445.2,1405-1423).
gcattgcagaggaacagaa

SEQ ID NO: 541811 - DNA, 19 bp, Mus musculus
  siRNA target sequence for Tsnaxip1 (NM_024445.2,1462-1480).
gtcgctttggggtcaatga

SEQ ID NO: 541812 - DNA, 19 bp, Mus musculus
  siRNA target sequence for Tsnaxip1 (NM_024445.2,1488-1506).
gcctgggcttacaccattt

SEQ ID NO: 541813 - DNA, 19 bp, Mus musculus
  siRNA target sequence for Tsnaxip1 (NM_024445.2,1489-1507).
cctgggcttacaccatttt

SEQ ID NO: 541814 - DNA, 19 bp, Mus musculus
  siRNA target sequence for Tsnaxip1 (NM_024445.2,1494-1512).
gcttacaccatttttgaaa

SEQ ID NO: 541815 - DNA, 19 bp, Mus musculus
  siRNA target sequence for Tsnaxip1 (NM_024445.2,1527-1545).
cgttccagtgagatcatga

SEQ ID NO: 541816 - DNA, 19 bp, Mus musculus
  siRNA target sequence for Tsnaxip1 (NM_024445.2,1531-1549).
ccagtgagatcatgaatca

SEQ ID NO: 541817 - DNA, 19 bp, Mus musculus
  siRNA target sequence for Tsnaxip1 (NM_024445.2,1548-1566).
cagttctatgcagtattga

SEQ ID NO: 541818 - DNA, 19 bp, Mus musculus
  siRNA target sequence for Tsnaxip1 (NM_024445.2,1583-1601).
gagtgtatatatcaatcaa

SEQ ID NO: 541819 - DNA, 19 bp, Mus musculus
  siRNA target sequence for Tsnaxip1 (NM_024445.2,1650-1668).
cagaatgagggatcaatca

SEQ ID NO: 541820 - DNA, 19 bp, Mus musculus
  siRNA target sequence for Tsnaxip1 (NM_024445.2,1771-1789).
gcaacacagacatgttaaa

SEQ ID NO: 541821 - DNA, 19 bp, Mus musculus
  siRNA target sequence for Tsnaxip1 (NM_024445.2,1790-1808).
ctaccgatctttgtttaat

SEQ ID NO: 541822 - DNA, 19 bp, Mus musculus
  siRNA target sequence for Tsnaxip1 (NM_024445.2,1947-1965).
cgtgggaccctgatgaaca

SEQ ID NO: 541823 - DNA, 19 bp, Mus musculus
  siRNA target sequence for Tsnaxip1 (NM_024445.2,1952-1970).
gaccctgatgaacatagat

SEQ ID NO: 541824 - DNA, 19 bp, Mus musculus
  siRNA target sequence for Tsnaxip1 (NM_024445.2,2061-2079).
caggggataatctccataa

SEQ ID NO: 541825 - DNA, 19 bp, Mus musculus
  siRNA target sequence for Tsnaxip1 (NM_024445.2,2081-2099).
ggttgagactgcacttgat

SEQ ID NO: 541826 - DNA, 19 bp, Mus musculus
  siRNA target sequence for Tsnaxip1 (NM_024445.2,2092-2110).
cacttgatcgacttaggat

SEQ ID NO: 541827 - DNA, 19 bp, Mus musculus
  siRNA target sequence for Twsg1 (NM_023053.1,199-217).
gccagcgatgtgagcaaat

SEQ ID NO: 541828 - DNA, 19 bp, Mus musculus
  siRNA target sequence for Twsg1 (NM_023053.1,486-504).
gtcacaccatgaaaaccta

SEQ ID NO: 541829 - DNA, 19 bp, Mus musculus
  siRNA target sequence for Twsg1 (NM_023053.1,502-520).
ctagtctccttcctagaaa

SEQ ID NO: 541830 - DNA, 19 bp, Mus musculus
  siRNA target sequence for Twsg1 (NM_023053.1,608-626).
cagtggtttactttgatga

SEQ ID NO: 541831 - DNA, 19 bp, Mus musculus
  siRNA target sequence for Twsg1 (NM_023053.1,635-653).
ccatccaccagtgtaagat

SEQ ID NO: 541832 - DNA, 19 bp, Mus musculus
  siRNA target sequence for Twsg1 (NM_023053.1,640-658).
caccagtgtaagatatcct

SEQ ID NO: 541833 - DNA, 19 bp, Mus musculus
  siRNA target sequence for Twsg1 (NM_023053.1,718-736).
ggtccagagtgcattgact

SEQ ID NO: 541834 - DNA, 19 bp, Mus musculus
  siRNA target sequence for Twsg1 (NM_023053.1,743-761).
gtaaaactgtcaagtgtat

SEQ ID NO: 541835 - DNA, 19 bp, Mus musculus
  siRNA target sequence for Twsg1 (NM_023053.1,756-774).
gtgtatgaactgcatgttt

SEQ ID NO: 541836 - DNA, 19 bp, Mus musculus
  siRNA target sequence for Txnip (NM_023719.1,356-374).
ggtggccggacgggtaata

SEQ ID NO: 541837 - DNA, 19 bp, Mus musculus
  siRNA target sequence for Txnip (NM_023719.1,479-497).
ggactacttgcgctatgaa

SEQ ID NO: 541838 - DNA, 19 bp, Mus musculus
  siRNA target sequence for Txnip (NM_023719.1,603-621).
cccctgggaacatccttta

SEQ ID NO: 541839 - DNA, 19 bp, Mus musculus
  siRNA target sequence for Txnip (NM_023719.1,716-734).
ggatctagtggatgtcaat

SEQ ID NO: 541840 - DNA, 19 bp, Mus musculus
  siRNA target sequence for Txnip (NM_023719.1,717-735).
gatctagtggatgtcaata

SEQ ID NO: 541841 - DNA, 19 bp, Mus musculus
  siRNA target sequence for Txnip (NM_023719.1,812-830).
gtcagtctctgctcgaatt

SEQ ID NO: 541842 - DNA, 19 bp, Mus musculus
  siRNA target sequence for Txnip (NM_023719.1,814-832).
cagtctctgctcgaattga

SEQ ID NO: 541843 - DNA, 19 bp, Mus musculus
  siRNA target sequence for Txnip (NM_023719.1,816-834).
gtctctgctcgaattgaca

SEQ ID NO: 541844 - DNA, 19 bp, Mus musculus
  siRNA target sequence for Txnip (NM_023719.1,926-944).
ggcccgacacacttacctt

SEQ ID NO: 541845 - DNA, 19 bp, Mus musculus
  siRNA target sequence for Txnip (NM_023719.1,985-1003).
cagtcagaggcaatcacat

SEQ ID NO: 541846 - DNA, 19 bp, Mus musculus
  siRNA target sequence for Txnip (NM_023719.1,1075-1093).
gctgcaacatcctcaaagt

SEQ ID NO: 541847 - DNA, 19 bp, Mus musculus
  siRNA target sequence for Txnip (NM_023719.1,1273-1291).
cttgctatatggacatcat

SEQ ID NO: 541848 - DNA, 19 bp, Mus musculus
  siRNA target sequence for Txnip (NM_023719.1,1422-1440).
gatccgtgcgtccttaaca

SEQ ID NO: 541849 - DNA, 19 bp, Mus musculus
  siRNA target sequence for Txnip (NM_023719.1,1425-1443).
ccgtgcgtccttaacaaca

SEQ ID NO: 541850 - DNA, 19 bp, Mus musculus
  siRNA target sequence for Ube2a (NM_019668.2,197-215).
gctccgtcggagaacaaca

SEQ ID NO: 541851 - DNA, 19 bp, Mus musculus
  siRNA target sequence for Ube2a (NM_019668.2,198-216).
ctccgtcggagaacaacat

SEQ ID NO: 541852 - DNA, 19 bp, Mus musculus
  siRNA target sequence for Ube2a (NM_019668.2,200-218).
ccgtcggagaacaacataa

SEQ ID NO: 541853 - DNA, 19 bp, Mus musculus
  siRNA target sequence for Ube2a (NM_019668.2,201-219).
cgtcggagaacaacataat

SEQ ID NO: 541854 - DNA, 19 bp, Mus musculus
  siRNA target sequence for Ube2a (NM_019668.2,204-222).
cggagaacaacataatggt

SEQ ID NO: 541855 - DNA, 19 bp, Mus musculus
  siRNA target sequence for Ube2a (NM_019668.2,205-223).
ggagaacaacataatggtt

SEQ ID NO: 541856 - DNA, 19 bp, Mus musculus
  siRNA target sequence for Ube2a (NM_019668.2,211-229).
caacataatggtttggaat

SEQ ID NO: 541857 - DNA, 19 bp, Mus musculus
  siRNA target sequence for Ube2a (NM_019668.2,221-239).
gtttggaatgcggtcattt

SEQ ID NO: 541858 - DNA, 19 bp, Mus musculus
  siRNA target sequence for Ube2a (NM_019668.2,266-284).
gatggaacatttaagctta

SEQ ID NO: 541859 - DNA, 19 bp, Mus musculus
  siRNA target sequence for Ube2a (NM_019668.2,273-291).
catttaagcttacaattga

SEQ ID NO: 541860 - DNA, 19 bp, Mus musculus
  siRNA target sequence for Ube2a (NM_019668.2,316-334).
gccacctactgttagattt

SEQ ID NO: 541861 - DNA, 19 bp, Mus musculus
  siRNA target sequence for Ube2a (NM_019668.2,361-379).
ctatgcagatggtagtata

SEQ ID NO: 541862 - DNA, 19 bp, Mus musculus
  siRNA target sequence for Ube2a (NM_019668.2,438-456).
cgtccatacagtctctatt

SEQ ID NO: 541863 - DNA, 19 bp, Mus musculus
  siRNA target sequence for Ube2a (NM_019668.2,442-460).
catacagtctctattggat

SEQ ID NO: 541864 - DNA, 19 bp, Mus musculus
  siRNA target sequence for Ube2a (NM_019668.2,450-468).
ctctattggatgaacctaa

SEQ ID NO: 541865 - DNA, 19 bp, Mus musculus
  siRNA target sequence for Ube2a (NM_019668.2,514-532).
gaacaagcgggaatatgaa

SEQ ID NO: 541866 - DNA, 19 bp, Mus musculus
  siRNA target sequence for Ube2a (NM_019668.2,537-555).
gtgtttctgcaatagtaga

SEQ ID NO: 541867 - DNA, 19 bp, Mus musculus
  siRNA target sequence for Ube3a (NM_011668.1,331-349).
cgctactaccatcagttaa

SEQ ID NO: 541868 - DNA, 19 bp, Mus musculus
  siRNA target sequence for Ube3a (NM_011668.1,333-351).
ctactaccatcagttaact

SEQ ID NO: 541869 - DNA, 19 bp, Mus musculus
  siRNA target sequence for Ube3a (NM_011668.1,367-385).
gaggcctgcacgaatgagt

SEQ ID NO: 541870 - DNA, 19 bp, Mus musculus
  siRNA target sequence for Ube3a (NM_011668.1,370-388).
gcctgcacgaatgagtttt

SEQ ID NO: 541871 - DNA, 19 bp, Mus musculus
  siRNA target sequence for Ube3a (NM_011668.1,372-390).
ctgcacgaatgagttttgt

SEQ ID NO: 541872 - DNA, 19 bp, Mus musculus
  siRNA target sequence for Ube3a (NM_011668.1,398-416).
gtccaacttttcttcgtat

SEQ ID NO: 541873 - DNA, 19 bp, Mus musculus
  siRNA target sequence for Ube3a (NM_011668.1,442-460).
gcccttgagctttataaaa

SEQ ID NO: 541874 - DNA, 19 bp, Mus musculus
  siRNA target sequence for Ube3a (NM_011668.1,443-461).
cccttgagctttataaaat

SEQ ID NO: 541875 - DNA, 19 bp, Mus musculus
  siRNA target sequence for Ube3a (NM_011668.1,444-462).
ccttgagctttataaaatt

SEQ ID NO: 541876 - DNA, 19 bp, Mus musculus
  siRNA target sequence for Ube3a (NM_011668.1,527-545).
caaaaggtgcatctaacaa

SEQ ID NO: 541877 - DNA, 19 bp, Mus musculus
  siRNA target sequence for Ube3a (NM_011668.1,651-669).
ggattattcccctttaatt

SEQ ID NO: 541878 - DNA, 19 bp, Mus musculus
  siRNA target sequence for Ube3a (NM_011668.1,659-677).
cccctttaattcgtgtaat

SEQ ID NO: 541879 - DNA, 19 bp, Mus musculus
  siRNA target sequence for Ube3a (NM_011668.1,670-688).
cgtgtaattggaagaatat

SEQ ID NO: 541880 - DNA, 19 bp, Mus musculus
  siRNA target sequence for Ube3a (NM_011668.1,671-689).
gtgtaattggaagaatatt

SEQ ID NO: 541881 - DNA, 19 bp, Mus musculus
  siRNA target sequence for Ube3a (NM_011668.1,869-887).
gttcacagggagacaacaa

SEQ ID NO: 541882 - DNA, 19 bp, Mus musculus
  siRNA target sequence for Ube3a (NM_011668.1,876-894).
gggagacaacaatgtacaa

SEQ ID NO: 541883 - DNA, 19 bp, Mus musculus
  siRNA target sequence for Ube3a (NM_011668.1,882-900).
caacaatgtacaaaaatta

SEQ ID NO: 541884 - DNA, 19 bp, Mus musculus
  siRNA target sequence for Ube3a (NM_011668.1,885-903).
caatgtacaaaaattaggt

SEQ ID NO: 541885 - DNA, 19 bp, Mus musculus
  siRNA target sequence for Ube3a (NM_011668.1,919-937).
gtggatattgatgctatta

SEQ ID NO: 541886 - DNA, 19 bp, Mus musculus
  siRNA target sequence for Ube3a (NM_011668.1,921-939).
ggatattgatgctattaga

SEQ ID NO: 541887 - DNA, 19 bp, Mus musculus
  siRNA target sequence for Ube3a (NM_011668.1,950-968).
gcagtttgctcgctaatga

SEQ ID NO: 541888 - DNA, 19 bp, Mus musculus
  siRNA target sequence for Ube3a (NM_011668.1,951-969).
cagtttgctcgctaatgaa

SEQ ID NO: 541889 - DNA, 19 bp, Mus musculus
  siRNA target sequence for Ube3a (NM_011668.1,953-971).
gtttgctcgctaatgaaaa

SEQ ID NO: 541890 - DNA, 19 bp, Mus musculus
  siRNA target sequence for Ube3a (NM_011668.1,960-978).
cgctaatgaaaaattagaa

SEQ ID NO: 541891 - DNA, 19 bp, Mus musculus
  siRNA target sequence for Ube3a (NM_011668.1,1012-1030).
cctaacgtggaatgtgatt

SEQ ID NO: 541892 - DNA, 19 bp, Mus musculus
  siRNA target sequence for Ube3a (NM_011668.1,1013-1031).
ctaacgtggaatgtgattt

SEQ ID NO: 541893 - DNA, 19 bp, Mus musculus
  siRNA target sequence for Ube3a (NM_011668.1,1017-1035).
cgtggaatgtgatttgaca

SEQ ID NO: 541894 - DNA, 19 bp, Mus musculus
  siRNA target sequence for Ube3a (NM_011668.1,1018-1036).
gtggaatgtgatttgacat

SEQ ID NO: 541895 - DNA, 19 bp, Mus musculus
  siRNA target sequence for Ube3a (NM_011668.1,1032-1050).
gacatatcataatgtgtat

SEQ ID NO: 541896 - DNA, 19 bp, Mus musculus
  siRNA target sequence for Ube3a (NM_011668.1,1047-1065).
gtatactcgagatcctaat

SEQ ID NO: 541897 - DNA, 19 bp, Mus musculus
  siRNA target sequence for Ube3a (NM_011668.1,1052-1070).
ctcgagatcctaattatct

SEQ ID NO: 541898 - DNA, 19 bp, Mus musculus
  siRNA target sequence for Ube3a (NM_011668.1,1054-1072).
cgagatcctaattatctca

SEQ ID NO: 541899 - DNA, 19 bp, Mus musculus
  siRNA target sequence for Ube3a (NM_011668.1,1055-1073).
gagatcctaattatctcaa

SEQ ID NO: 541900 - DNA, 19 bp, Mus musculus
  siRNA target sequence for Ube3a (NM_011668.1,1112-1130).
gtcctgaatatctggaaat

SEQ ID NO: 541901 - DNA, 19 bp, Mus musculus
  siRNA target sequence for Ube3a (NM_011668.1,1126-1144).
gaaatggcgttgccattat

SEQ ID NO: 541902 - DNA, 19 bp, Mus musculus
  siRNA target sequence for Ube3a (NM_011668.1,1133-1151).
cgttgccattattttgcaa

SEQ ID NO: 541903 - DNA, 19 bp, Mus musculus
  siRNA target sequence for Ube3a (NM_011668.1,1134-1152).
gttgccattattttgcaaa

SEQ ID NO: 541904 - DNA, 19 bp, Mus musculus
  siRNA target sequence for Ube3a (NM_011668.1,1138-1156).
ccattattttgcaaagcta

SEQ ID NO: 541905 - DNA, 19 bp, Mus musculus
  siRNA target sequence for Ube3a (NM_011668.1,1228-1246).
cggagaatgatggaaacat

SEQ ID NO: 541906 - DNA, 19 bp, Mus musculus
  siRNA target sequence for Ube3a (NM_011668.1,1229-1247).
ggagaatgatggaaacatt

SEQ ID NO: 541907 - DNA, 19 bp, Mus musculus
  siRNA target sequence for Ube3a (NM_011668.1,1263-1281).
ctacaaagtcataagcaat

SEQ ID NO: 541908 - DNA, 19 bp, Mus musculus
  siRNA target sequence for Ube3a (NM_011668.1,1292-1310).
gccgaaatctagtgaatga

SEQ ID NO: 541909 - DNA, 19 bp, Mus musculus
  siRNA target sequence for Ube3a (NM_011668.1,1293-1311).
ccgaaatctagtgaatgat

SEQ ID NO: 541910 - DNA, 19 bp, Mus musculus
  siRNA target sequence for Ube3a (NM_011668.1,1295-1313).
gaaatctagtgaatgatga

SEQ ID NO: 541911 - DNA, 19 bp, Mus musculus
  siRNA target sequence for Ube3a (NM_011668.1,1428-1446).
gtccagcgaattaacactt

SEQ ID NO: 541912 - DNA, 19 bp, Mus musculus
  siRNA target sequence for Ube3a (NM_011668.1,1489-1507).
cgagtggatccactagaaa

SEQ ID NO: 541913 - DNA, 19 bp, Mus musculus
  siRNA target sequence for Ube3a (NM_011668.1,1566-1584).
cattaatgaaccactgaat

SEQ ID NO: 541914 - DNA, 19 bp, Mus musculus
  siRNA target sequence for Ube3a (NM_011668.1,1686-1704).
gaatctgggattatattat

SEQ ID NO: 541915 - DNA, 19 bp, Mus musculus
  siRNA target sequence for Ube3a (NM_011668.1,1692-1710).
gggattatattatgacaat

SEQ ID NO: 541916 - DNA, 19 bp, Mus musculus
  siRNA target sequence for Ube3a (NM_011668.1,1693-1711).
ggattatattatgacaata

SEQ ID NO: 541917 - DNA, 19 bp, Mus musculus
  siRNA target sequence for Ube3a (NM_011668.1,1717-1735).
cgcatgtacagtgaaagaa

SEQ ID NO: 541918 - DNA, 19 bp, Mus musculus
  siRNA target sequence for Ube3a (NM_011668.1,1771-1789).
cagttgaatccgtatttga

SEQ ID NO: 541919 - DNA, 19 bp, Mus musculus
  siRNA target sequence for Ube3a (NM_011668.1,1798-1816).
gtcagacgtgaccatatta

SEQ ID NO: 541920 - DNA, 19 bp, Mus musculus
  siRNA target sequence for Ube3a (NM_011668.1,1800-1818).
cagacgtgaccatattata

SEQ ID NO: 541921 - DNA, 19 bp, Mus musculus
  siRNA target sequence for Ube3a (NM_011668.1,1802-1820).
gacgtgaccatattataga

SEQ ID NO: 541922 - DNA, 19 bp, Mus musculus
  siRNA target sequence for Ube3a (NM_011668.1,1805-1823).
gtgaccatattatagatga

SEQ ID NO: 541923 - DNA, 19 bp, Mus musculus
  siRNA target sequence for Ube3a (NM_011668.1,1826-1844).
cactggtccggctagagat

SEQ ID NO: 541924 - DNA, 19 bp, Mus musculus
  siRNA target sequence for Ube3a (NM_011668.1,1834-1852).
cggctagagatgattgcta

SEQ ID NO: 541925 - DNA, 19 bp, Mus musculus
  siRNA target sequence for Ube3a (NM_011668.1,1835-1853).
ggctagagatgattgctat

SEQ ID NO: 541926 - DNA, 19 bp, Mus musculus
  siRNA target sequence for Ube3a (NM_011668.1,1921-1939).
ggaggcgtttccaaagagt

SEQ ID NO: 541927 - DNA, 19 bp, Mus musculus
  siRNA target sequence for Ube3a (NM_011668.1,1922-1940).
gaggcgtttccaaagagtt

SEQ ID NO: 541928 - DNA, 19 bp, Mus musculus
  siRNA target sequence for Ube3a (NM_011668.1,1924-1942).
ggcgtttccaaagagtttt

SEQ ID NO: 541929 - DNA, 19 bp, Mus musculus
  siRNA target sequence for Ube3a (NM_011668.1,2038-2056).
gaaactgagggtcagttta

SEQ ID NO: 541930 - DNA, 19 bp, Mus musculus
  siRNA target sequence for Ube3a (NM_011668.1,2073-2091).
gggtctggctatttacaat

SEQ ID NO: 541931 - DNA, 19 bp, Mus musculus
  siRNA target sequence for Ube3a (NM_011668.1,2074-2092).
ggtctggctatttacaata

SEQ ID NO: 541932 - DNA, 19 bp, Mus musculus
  siRNA target sequence for Ube3a (NM_011668.1,2132-2150).
ggaagctaatggggaaaaa

SEQ ID NO: 541933 - DNA, 19 bp, Mus musculus
  siRNA target sequence for Ube3a (NM_011668.1,2236-2254).
gatgatatgatgatcactt

SEQ ID NO: 541934 - DNA, 19 bp, Mus musculus
  siRNA target sequence for Ube3a (NM_011668.1,2247-2265).
gatcactttccagatatca

SEQ ID NO: 541935 - DNA, 19 bp, Mus musculus
  siRNA target sequence for Ube3a (NM_011668.1,2259-2277).
gatatcacagacagatctt

SEQ ID NO: 541936 - DNA, 19 bp, Mus musculus
  siRNA target sequence for Ube3a (NM_011668.1,2282-2300).
gtaacccaatgatgtatga

SEQ ID NO: 541937 - DNA, 19 bp, Mus musculus
  siRNA target sequence for Ube3a (NM_011668.1,2371-2389).
gactacattctcaataaat

SEQ ID NO: 541938 - DNA, 19 bp, Mus musculus
  siRNA target sequence for Ube3a (NM_011668.1,2373-2391).
ctacattctcaataaatct

SEQ ID NO: 541939 - DNA, 19 bp, Mus musculus
  siRNA target sequence for Ube3a (NM_011668.1,2380-2398).
ctcaataaatctgtagaaa

SEQ ID NO: 541940 - DNA, 19 bp, Mus musculus
  siRNA target sequence for Ube3a (NM_011668.1,2409-2427).
ggcatttcgcagaggtttt

SEQ ID NO: 541941 - DNA, 19 bp, Mus musculus
  siRNA target sequence for Ube3a (NM_011668.1,2411-2429).
catttcgcagaggttttca

SEQ ID NO: 541942 - DNA, 19 bp, Mus musculus
  siRNA target sequence for Ube3a (NM_011668.1,2438-2456).
ctaatgaatcgcccttaaa

SEQ ID NO: 541943 - DNA, 19 bp, Mus musculus
  siRNA target sequence for Ube3a (NM_011668.1,2443-2461).
gaatcgcccttaaaatact

SEQ ID NO: 541944 - DNA, 19 bp, Mus musculus
  siRNA target sequence for Ube3a (NM_011668.1,2447-2465).
cgcccttaaaatacttatt

SEQ ID NO: 541945 - DNA, 19 bp, Mus musculus
  siRNA target sequence for Ube3a (NM_011668.1,2449-2467).
cccttaaaatacttattca

SEQ ID NO: 541946 - DNA, 19 bp, Mus musculus
  siRNA target sequence for Ube3a (NM_011668.1,2451-2469).
cttaaaatacttattcaga

SEQ ID NO: 541947 - DNA, 19 bp, Mus musculus
  siRNA target sequence for Ube3a (NM_011668.1,2460-2478).
cttattcagaccagaagaa

SEQ ID NO: 541948 - DNA, 19 bp, Mus musculus
  siRNA target sequence for Ube3a (NM_011668.1,2468-2486).
gaccagaagaaattgaatt

SEQ ID NO: 541949 - DNA, 19 bp, Mus musculus
  siRNA target sequence for Ube3a (NM_011668.1,2498-2516).
gaagccggaatctagattt

SEQ ID NO: 541950 - DNA, 19 bp, Mus musculus
  siRNA target sequence for Ube3a (NM_011668.1,2501-2519).
gccggaatctagatttcca

SEQ ID NO: 541951 - DNA, 19 bp, Mus musculus
  siRNA target sequence for Ube3a (NM_011668.1,2517-2535).
ccaggcactagaagaaact

SEQ ID NO: 541952 - DNA, 19 bp, Mus musculus
  siRNA target sequence for Ube3a (NM_011668.1,2518-2536).
caggcactagaagaaacta

SEQ ID NO: 541953 - DNA, 19 bp, Mus musculus
  siRNA target sequence for Ube3a (NM_011668.1,2552-2570).
gctatacgagggaatctgt

SEQ ID NO: 541954 - DNA, 19 bp, Mus musculus
  siRNA target sequence for Ube3a (NM_011668.1,2553-2571).
ctatacgagggaatctgtt

SEQ ID NO: 541955 - DNA, 19 bp, Mus musculus
  siRNA target sequence for Ube3a (NM_011668.1,2583-2601).
gttctgggaaattgttcat

SEQ ID NO: 541956 - DNA, 19 bp, Mus musculus
  siRNA target sequence for Ube3a (NM_011668.1,2663-2681).
ctgttggaggactaggaaa

SEQ ID NO: 541957 - DNA, 19 bp, Mus musculus
  siRNA target sequence for Ube3a (NM_011668.1,2665-2683).
gttggaggactaggaaaat

SEQ ID NO: 541958 - DNA, 19 bp, Mus musculus
  siRNA target sequence for Ube3a (NM_011668.1,2668-2686).
ggaggactaggaaaattga

SEQ ID NO: 541959 - DNA, 19 bp, Mus musculus
  siRNA target sequence for Ube3a (NM_011668.1,2672-2690).
gactaggaaaattgaagat

SEQ ID NO: 541960 - DNA, 19 bp, Mus musculus
  siRNA target sequence for Ube3a (NM_011668.1,2688-2706).
gatgattatagccaaaaat

SEQ ID NO: 541961 - DNA, 19 bp, Mus musculus
  siRNA target sequence for Ube3a (NM_011668.1,2724-2742).
gttacctacatctcatact

SEQ ID NO: 541962 - DNA, 19 bp, Mus musculus
  siRNA target sequence for Ube3a (NM_173010.1,985-1003).
gctttcggaaagtcaaaca

SEQ ID NO: 541963 - DNA, 19 bp, Mus musculus
  siRNA target sequence for Ube3a (NM_173010.1,1005-1023).
cacacaaaggaggaattga

SEQ ID NO: 541964 - DNA, 19 bp, Mus musculus
  siRNA target sequence for Ube3a (NM_173010.1,1340-1358).
caatttgttcattattgta

SEQ ID NO: 541965 - DNA, 19 bp, Mus musculus
  siRNA target sequence for Ube3a (NM_173010.1,1466-1484).
gctgtggtctaaatacagt

SEQ ID NO: 541966 - DNA, 19 bp, Mus musculus
  siRNA target sequence for Ube3a (NM_173010.1,1907-1925).
caaattctcttttatgaca

SEQ ID NO: 541967 - DNA, 19 bp, Mus musculus
  siRNA target sequence for Ube3a (NM_173010.1,2050-2068).
cgtatttgagactcaaagt

SEQ ID NO: 541968 - DNA, 19 bp, Mus musculus
  siRNA target sequence for Ube3a (NM_173010.1,2615-2633).
caggaaggaatttgtcaat

SEQ ID NO: 541969 - DNA, 19 bp, Mus musculus
  siRNA target sequence for Ube3a (NM_173010.1,2617-2635).
ggaaggaatttgtcaatct

SEQ ID NO: 541970 - DNA, 19 bp, Mus musculus
  siRNA target sequence for Ubr1 (NM_009461.1,197-215).
ggtgggatcagcaagttga

SEQ ID NO: 541971 - DNA, 19 bp, Mus musculus
  siRNA target sequence for Ubr1 (NM_009461.1,198-216).
gtgggatcagcaagttgat

SEQ ID NO: 541972 - DNA, 19 bp, Mus musculus
  siRNA target sequence for Ubr1 (NM_009461.1,200-218).
gggatcagcaagttgattt

SEQ ID NO: 541973 - DNA, 19 bp, Mus musculus
  siRNA target sequence for Ubr1 (NM_009461.1,245-263).
cacaattagtgccagaaat

SEQ ID NO: 541974 - DNA, 19 bp, Mus musculus
  siRNA target sequence for Ubr1 (NM_009461.1,247-265).
caattagtgccagaaattt

SEQ ID NO: 541975 - DNA, 19 bp, Mus musculus
  siRNA target sequence for Ubr1 (NM_009461.1,272-290).
ctgagatggacccagattt

SEQ ID NO: 541976 - DNA, 19 bp, Mus musculus
  siRNA target sequence for Ubr1 (NM_009461.1,276-294).
gatggacccagatttggaa

SEQ ID NO: 541977 - DNA, 19 bp, Mus musculus
  siRNA target sequence for Ubr1 (NM_009461.1,306-324).
gagtgtacagatgtcaata

SEQ ID NO: 541978 - DNA, 19 bp, Mus musculus
  siRNA target sequence for Ubr1 (NM_009461.1,310-328).
gtacagatgtcaatactca

SEQ ID NO: 541979 - DNA, 19 bp, Mus musculus
  siRNA target sequence for Ubr1 (NM_009461.1,332-350).
ctttggagtggtacttatt

SEQ ID NO: 541980 - DNA, 19 bp, Mus musculus
  siRNA target sequence for Ubr1 (NM_009461.1,336-354).
ggagtggtacttatttgga

SEQ ID NO: 541981 - DNA, 19 bp, Mus musculus
  siRNA target sequence for Ubr1 (NM_009461.1,352-370).
ggagaggatccggatattt

SEQ ID NO: 541982 - DNA, 19 bp, Mus musculus
  siRNA target sequence for Ubr1 (NM_009461.1,357-375).
ggatccggatatttgctta

SEQ ID NO: 541983 - DNA, 19 bp, Mus musculus
  siRNA target sequence for Ubr1 (NM_009461.1,361-379).
ccggatatttgcttagaga

SEQ ID NO: 541984 - DNA, 19 bp, Mus musculus
  siRNA target sequence for Ubr1 (NM_009461.1,362-380).
cggatatttgcttagagaa

SEQ ID NO: 541985 - DNA, 19 bp, Mus musculus
  siRNA target sequence for Ubr1 (NM_009461.1,449-467).
gtagggattgtgcaattga

SEQ ID NO: 541986 - DNA, 19 bp, Mus musculus
  siRNA target sequence for Ubr1 (NM_009461.1,470-488).
caacgtgtgtgctctgtat

SEQ ID NO: 541987 - DNA, 19 bp, Mus musculus
  siRNA target sequence for Ubr1 (NM_009461.1,495-513).
cttccaaagtagtgttcat

SEQ ID NO: 541988 - DNA, 19 bp, Mus musculus
  siRNA target sequence for Ubr1 (NM_009461.1,498-516).
ccaaagtagtgttcataaa

SEQ ID NO: 541989 - DNA, 19 bp, Mus musculus
  siRNA target sequence for Ubr1 (NM_009461.1,499-517).
caaagtagtgttcataaaa

SEQ ID NO: 541990 - DNA, 19 bp, Mus musculus
  siRNA target sequence for Ubr1 (NM_009461.1,523-541).
cgttacaagatgcatactt

SEQ ID NO: 541991 - DNA, 19 bp, Mus musculus
  siRNA target sequence for Ubr1 (NM_009461.1,571-589).
gacacagaagcgtggaaaa

SEQ ID NO: 541992 - DNA, 19 bp, Mus musculus
  siRNA target sequence for Ubr1 (NM_009461.1,620-638).
gaagagcaggtactacaaa

SEQ ID NO: 541993 - DNA, 19 bp, Mus musculus
  siRNA target sequence for Ubr1 (NM_009461.1,623-641).
gagcaggtactacaaaaga

SEQ ID NO: 541994 - DNA, 19 bp, Mus musculus
  siRNA target sequence for Ubr1 (NM_009461.1,625-643).
gcaggtactacaaaagaga

SEQ ID NO: 541995 - DNA, 19 bp, Mus musculus
  siRNA target sequence for Ubr1 (NM_009461.1,645-663).
cttacattgcccattgaat

SEQ ID NO: 541996 - DNA, 19 bp, Mus musculus
  siRNA target sequence for Ubr1 (NM_009461.1,676-694).
gctcaagccaggagaatat

SEQ ID NO: 541997 - DNA, 19 bp, Mus musculus
  siRNA target sequence for Ubr1 (NM_009461.1,697-715).
ccttcggtgataaaataca

SEQ ID NO: 541998 - DNA, 19 bp, Mus musculus
  siRNA target sequence for Ubr1 (NM_009461.1,698-716).
cttcggtgataaaatacat

SEQ ID NO: 541999 - DNA, 19 bp, Mus musculus
  siRNA target sequence for Ubr1 (NM_009461.1,714-732).
cattgtagaaatgactata

SEQ ID NO: 542000 - DNA, 19 bp, Mus musculus
  siRNA target sequence for Ubr1 (NM_009461.1,777-795).
gaaaaatgaacgatactat

SEQ ID NO: 542001 - DNA, 19 bp, Mus musculus
  siRNA target sequence for Ubr1 (NM_009461.1,810-828).
cgatgagcaccattcgtat

SEQ ID NO: 542002 - DNA, 19 bp, Mus musculus
  siRNA target sequence for Ubr1 (NM_009461.1,816-834).
gcaccattcgtatgatcat

SEQ ID NO: 542003 - DNA, 19 bp, Mus musculus
  siRNA target sequence for Ubr1 (NM_009461.1,824-842).
cgtatgatcatgtgatcta

SEQ ID NO: 542004 - DNA, 19 bp, Mus musculus
  siRNA target sequence for Ubr1 (NM_009461.1,847-865).
ctgcagagagctctagatt

SEQ ID NO: 542005 - DNA, 19 bp, Mus musculus
  siRNA target sequence for Ubr1 (NM_009461.1,1033-1051).
gttatggctcaccagaaat

SEQ ID NO: 542006 - DNA, 19 bp, Mus musculus
  siRNA target sequence for Ubr1 (NM_009461.1,1100-1118).
gtgactttagacagatatt

SEQ ID NO: 542007 - DNA, 19 bp, Mus musculus
  siRNA target sequence for Ubr1 (NM_009461.1,1151-1169).
ctgaaaatccctgtcttat

SEQ ID NO: 542008 - DNA, 19 bp, Mus musculus
  siRNA target sequence for Ubr1 (NM_009461.1,1182-1200).
gctttgggatgcaaaactt

SEQ ID NO: 542009 - DNA, 19 bp, Mus musculus
  siRNA target sequence for Ubr1 (NM_009461.1,1211-1229).
cccgtaagatccttcatga

SEQ ID NO: 542010 - DNA, 19 bp, Mus musculus
  siRNA target sequence for Ubr1 (NM_009461.1,1221-1239).
ccttcatgaattgatcttt

SEQ ID NO: 542011 - DNA, 19 bp, Mus musculus
  siRNA target sequence for Ubr1 (NM_009461.1,1280-1298).
ctatggaatttgtgaagta

SEQ ID NO: 542012 - DNA, 19 bp, Mus musculus
  siRNA target sequence for Ubr1 (NM_009461.1,1441-1459).
gaaacgctgctagaagttt

SEQ ID NO: 542013 - DNA, 19 bp, Mus musculus
  siRNA target sequence for Ubr1 (NM_009461.1,1502-1520).
gttatagccaggacaaact

SEQ ID NO: 542014 - DNA, 19 bp, Mus musculus
  siRNA target sequence for Ubr1 (NM_009461.1,1535-1553).
cagttatatgtgacctaaa

SEQ ID NO: 542015 - DNA, 19 bp, Mus musculus
  siRNA target sequence for Ubr1 (NM_009461.1,1537-1555).
gttatatgtgacctaaagt

SEQ ID NO: 542016 - DNA, 19 bp, Mus musculus
  siRNA target sequence for Ubr1 (NM_009461.1,1563-1581).
gattagcaagcctgtcata

SEQ ID NO: 542017 - DNA, 19 bp, Mus musculus
  siRNA target sequence for Ubr1 (NM_009461.1,1578-1596).
catatggacagaacgatta

SEQ ID NO: 542018 - DNA, 19 bp, Mus musculus
  siRNA target sequence for Ubr1 (NM_009461.1,1615-1633).
ggtttccggtcttttctga

SEQ ID NO: 542019 - DNA, 19 bp, Mus musculus
  siRNA target sequence for Ubr1 (NM_009461.1,1616-1634).
gtttccggtcttttctgaa

SEQ ID NO: 542020 - DNA, 19 bp, Mus musculus
  siRNA target sequence for Ubr1 (NM_009461.1,1620-1638).
ccggtcttttctgaagatt

SEQ ID NO: 542021 - DNA, 19 bp, Mus musculus
  siRNA target sequence for Ubr1 (NM_009461.1,1644-1662).
ctgtatgcagggaatggaa

SEQ ID NO: 542022 - DNA, 19 bp, Mus musculus
  siRNA target sequence for Ubr1 (NM_009461.1,1673-1691).
gacaagttggacaacacat

SEQ ID NO: 542023 - DNA, 19 bp, Mus musculus
  siRNA target sequence for Ubr1 (NM_009461.1,1714-1732).
gctgccatcgctatacaga

SEQ ID NO: 542024 - DNA, 19 bp, Mus musculus
  siRNA target sequence for Ubr1 (NM_009461.1,1715-1733).
ctgccatcgctatacagat

SEQ ID NO: 542025 - DNA, 19 bp, Mus musculus
  siRNA target sequence for Ubr1 (NM_009461.1,1723-1741).
gctatacagatgcaactaa

SEQ ID NO: 542026 - DNA, 19 bp, Mus musculus
  siRNA target sequence for Ubr1 (NM_009461.1,1724-1742).
ctatacagatgcaactaaa

SEQ ID NO: 542027 - DNA, 19 bp, Mus musculus
  siRNA target sequence for Ubr1 (NM_009461.1,1789-1807).
ctcttactggtggcttata

SEQ ID NO: 542028 - DNA, 19 bp, Mus musculus
  siRNA target sequence for Ubr1 (NM_009461.1,1825-1843).
gtaatgaggtgcagtacaa

SEQ ID NO: 542029 - DNA, 19 bp, Mus musculus
  siRNA target sequence for Ubr1 (NM_009461.1,1859-1877).
ccaagacagtagtgcaatt

SEQ ID NO: 542030 - DNA, 19 bp, Mus musculus
  siRNA target sequence for Ubr1 (NM_009461.1,1941-1959).
gccactctctagaacactt

SEQ ID NO: 542031 - DNA, 19 bp, Mus musculus
  siRNA target sequence for Ubr1 (NM_009461.1,1961-1979).
ctggtcttcatgtacgttt

SEQ ID NO: 542032 - DNA, 19 bp, Mus musculus
  siRNA target sequence for Ubr1 (NM_009461.1,1963-1981).
ggtcttcatgtacgtttaa

SEQ ID NO: 542033 - DNA, 19 bp, Mus musculus
  siRNA target sequence for Ubr1 (NM_009461.1,1966-1984).
cttcatgtacgtttaagca

SEQ ID NO: 542034 - DNA, 19 bp, Mus musculus
  siRNA target sequence for Ubr1 (NM_009461.1,1983-2001).
cagactaggtgctatttca

SEQ ID NO: 542035 - DNA, 19 bp, Mus musculus
  siRNA target sequence for Ubr1 (NM_009461.1,2000-2018).
caagactgcatgaatttgt

SEQ ID NO: 542036 - DNA, 19 bp, Mus musculus
  siRNA target sequence for Ubr1 (NM_009461.1,2125-2143).
ctcatcagccaggttttct

SEQ ID NO: 542037 - DNA, 19 bp, Mus musculus
  siRNA target sequence for Ubr1 (NM_009461.1,2127-2145).
catcagccaggttttctat

SEQ ID NO: 542038 - DNA, 19 bp, Mus musculus
  siRNA target sequence for Ubr1 (NM_009461.1,2132-2150).
gccaggttttctattatca

SEQ ID NO: 542039 - DNA, 19 bp, Mus musculus
  siRNA target sequence for Ubr1 (NM_009461.1,2165-2183).
gggaggaaatgtacgataa

SEQ ID NO: 542040 - DNA, 19 bp, Mus musculus
  siRNA target sequence for Ubr1 (NM_009461.1,2170-2188).
gaaatgtacgataaagata

SEQ ID NO: 542041 - DNA, 19 bp, Mus musculus
  siRNA target sequence for Ubr1 (NM_009461.1,2244-2262).
ggtacttcagagatatgaa

SEQ ID NO: 542042 - DNA, 19 bp, Mus musculus
  siRNA target sequence for Ubr1 (NM_009461.1,2248-2266).
cttcagagatatgaactta

SEQ ID NO: 542043 - DNA, 19 bp, Mus musculus
  siRNA target sequence for Ubr1 (NM_009461.1,2310-2328).
gattaaacagtataataca

SEQ ID NO: 542044 - DNA, 19 bp, Mus musculus
  siRNA target sequence for Ubr1 (NM_009461.1,2319-2337).
gtataatacattaatagaa

SEQ ID NO: 542045 - DNA, 19 bp, Mus musculus
  siRNA target sequence for Ubr1 (NM_009461.1,2343-2361).
gcttcaggtcctcatctat

SEQ ID NO: 542046 - DNA, 19 bp, Mus musculus
  siRNA target sequence for Ubr1 (NM_009461.1,2402-2420).
ccagagaggaggttataat

SEQ ID NO: 542047 - DNA, 19 bp, Mus musculus
  siRNA target sequence for Ubr1 (NM_009461.1,2481-2499).
cctacctgagaacgaaaat

SEQ ID NO: 542048 - DNA, 19 bp, Mus musculus
  siRNA target sequence for Ubr1 (NM_009461.1,2482-2500).
ctacctgagaacgaaaata

SEQ ID NO: 542049 - DNA, 19 bp, Mus musculus
  siRNA target sequence for Ubr1 (NM_009461.1,2559-2577).
gtcgggccatggagtttat

SEQ ID NO: 542050 - DNA, 19 bp, Mus musculus
  siRNA target sequence for Ubr1 (NM_009461.1,2561-2579).
cgggccatggagtttatga

SEQ ID NO: 542051 - DNA, 19 bp, Mus musculus
  siRNA target sequence for Ubr1 (NM_009461.1,2562-2580).
gggccatggagtttatgaa

SEQ ID NO: 542052 - DNA, 19 bp, Mus musculus
  siRNA target sequence for Ubr1 (NM_009461.1,2607-2625).
caatatgtacttttaccat

SEQ ID NO: 542053 - DNA, 19 bp, Mus musculus
  siRNA target sequence for Ubr1 (NM_009461.1,2630-2648).
ctaaaacacagcatagcaa

SEQ ID NO: 542054 - DNA, 19 bp, Mus musculus
  siRNA target sequence for Ubr1 (NM_009461.1,2640-2658).
gcatagcaaggctgaacat

SEQ ID NO: 542055 - DNA, 19 bp, Mus musculus
  siRNA target sequence for Ubr1 (NM_009461.1,2641-2659).
catagcaaggctgaacata

SEQ ID NO: 542056 - DNA, 19 bp, Mus musculus
  siRNA target sequence for Ubr1 (NM_009461.1,2732-2750).
ctgctttcagcaaagtagt

SEQ ID NO: 542057 - DNA, 19 bp, Mus musculus
  siRNA target sequence for Ubr1 (NM_009461.1,2758-2776).
ctcagctgtgatgttatga

SEQ ID NO: 542058 - DNA, 19 bp, Mus musculus
  siRNA target sequence for Ubr1 (NM_009461.1,2845-2863).
ctgcagatggcgttccata

SEQ ID NO: 542059 - DNA, 19 bp, Mus musculus
  siRNA target sequence for Ubr1 (NM_009461.1,2847-2865).
gcagatggcgttccatata

SEQ ID NO: 542060 - DNA, 19 bp, Mus musculus
  siRNA target sequence for Ubr1 (NM_009461.1,2848-2866).
cagatggcgttccatatat

SEQ ID NO: 542061 - DNA, 19 bp, Mus musculus
  siRNA target sequence for Ubr1 (NM_009461.1,2925-2943).
ggcttttgacttttaccat

SEQ ID NO: 542062 - DNA, 19 bp, Mus musculus
  siRNA target sequence for Ubr1 (NM_009461.1,2926-2944).
gcttttgacttttaccata

SEQ ID NO: 542063 - DNA, 19 bp, Mus musculus
  siRNA target sequence for Ubr1 (NM_009461.1,3033-3051).
ccagaaggacatgataaca

SEQ ID NO: 542064 - DNA, 19 bp, Mus musculus
  siRNA target sequence for Ubr1 (NM_009461.1,3070-3088).
gacacagtgaagcgattaa

SEQ ID NO: 542065 - DNA, 19 bp, Mus musculus
  siRNA target sequence for Ubr1 (NM_009461.1,3072-3090).
cacagtgaagcgattaaga

SEQ ID NO: 542066 - DNA, 19 bp, Mus musculus
  siRNA target sequence for Ubr1 (NM_009461.1,3076-3094).
gtgaagcgattaagagaaa

SEQ ID NO: 542067 - DNA, 19 bp, Mus musculus
  siRNA target sequence for Ubr1 (NM_009461.1,3147-3165).
ggagattactcatgataaa

SEQ ID NO: 542068 - DNA, 19 bp, Mus musculus
  siRNA target sequence for Ubr1 (NM_009461.1,3271-3289).
ctcatgtatgataatacgt

SEQ ID NO: 542069 - DNA, 19 bp, Mus musculus
  siRNA target sequence for Ubr1 (NM_009461.1,3280-3298).
gataatacgtcagaagtaa

SEQ ID NO: 542070 - DNA, 19 bp, Mus musculus
  siRNA target sequence for Ubr1 (NM_009461.1,3345-3363).
cagtgaggcctctagaatt

SEQ ID NO: 542071 - DNA, 19 bp, Mus musculus
  siRNA target sequence for Ubr1 (NM_009461.1,3570-3588).
cttggcacatggaacttat

SEQ ID NO: 542072 - DNA, 19 bp, Mus musculus
  siRNA target sequence for Ubr1 (NM_009461.1,3573-3591).
ggcacatggaacttataca

SEQ ID NO: 542073 - DNA, 19 bp, Mus musculus
  siRNA target sequence for Ubr1 (NM_009461.1,3596-3614).
gctgtggtcatgtaatgca

SEQ ID NO: 542074 - DNA, 19 bp, Mus musculus
  siRNA target sequence for Ubr1 (NM_009461.1,3597-3615).
ctgtggtcatgtaatgcat

SEQ ID NO: 542075 - DNA, 19 bp, Mus musculus
  siRNA target sequence for Ubr1 (NM_009461.1,3694-3712).
gagagcggcgagtacctat

SEQ ID NO: 542076 - DNA, 19 bp, Mus musculus
  siRNA target sequence for Ubr1 (NM_009461.1,3758-3776).
ctttgcagccgcagaagat

SEQ ID NO: 542077 - DNA, 19 bp, Mus musculus
  siRNA target sequence for Ubr1 (NM_009461.1,3793-3811).
gaggctcttgctcaacttt

SEQ ID NO: 542078 - DNA, 19 bp, Mus musculus
  siRNA target sequence for Ubr1 (NM_009461.1,3796-3814).
gctcttgctcaacttttga

SEQ ID NO: 542079 - DNA, 19 bp, Mus musculus
  siRNA target sequence for Ubr1 (NM_009461.1,3834-3852).
gactgtccttgccagaata

SEQ ID NO: 542080 - DNA, 19 bp, Mus musculus
  siRNA target sequence for Ubr1 (NM_009461.1,3844-3862).
gccagaatatcgggttata

SEQ ID NO: 542081 - DNA, 19 bp, Mus musculus
  siRNA target sequence for Ubr1 (NM_009461.1,3845-3863).
ccagaatatcgggttataa

SEQ ID NO: 542082 - DNA, 19 bp, Mus musculus
  siRNA target sequence for Ubr1 (NM_009461.1,3846-3864).
cagaatatcgggttataat

SEQ ID NO: 542083 - DNA, 19 bp, Mus musculus
  siRNA target sequence for Ubr1 (NM_009461.1,3848-3866).
gaatatcgggttataatat

SEQ ID NO: 542084 - DNA, 19 bp, Mus musculus
  siRNA target sequence for Ubr1 (NM_009461.1,3854-3872).
cgggttataatataaagca

SEQ ID NO: 542085 - DNA, 19 bp, Mus musculus
  siRNA target sequence for Ubr1 (NM_009461.1,3855-3873).
gggttataatataaagcat

SEQ ID NO: 542086 - DNA, 19 bp, Mus musculus
  siRNA target sequence for Ubr1 (NM_009461.1,3967-3985).
cagtcttcggtgaaatatt

SEQ ID NO: 542087 - DNA, 19 bp, Mus musculus
  siRNA target sequence for Ubr1 (NM_009461.1,3969-3987).
gtcttcggtgaaatattca

SEQ ID NO: 542088 - DNA, 19 bp, Mus musculus
  siRNA target sequence for Ubr1 (NM_009461.1,3971-3989).
cttcggtgaaatattcaaa

SEQ ID NO: 542089 - DNA, 19 bp, Mus musculus
  siRNA target sequence for Ubr1 (NM_009461.1,3986-4004).
caaatagtatcaaggaaat

SEQ ID NO: 542090 - DNA, 19 bp, Mus musculus
  siRNA target sequence for Ubr1 (NM_009461.1,4012-4030).
ctcttcgccacaacaattt

SEQ ID NO: 542091 - DNA, 19 bp, Mus musculus
  siRNA target sequence for Ubr1 (NM_009461.1,4017-4035).
cgccacaacaatttacaga

SEQ ID NO: 542092 - DNA, 19 bp, Mus musculus
  siRNA target sequence for Ubr1 (NM_009461.1,4018-4036).
gccacaacaatttacagaa

SEQ ID NO: 542093 - DNA, 19 bp, Mus musculus
  siRNA target sequence for Ubr1 (NM_009461.1,4020-4038).
cacaacaatttacagaatt

SEQ ID NO: 542094 - DNA, 19 bp, Mus musculus
  siRNA target sequence for Ubr1 (NM_009461.1,4069-4087).
ccacgagtgcccatgatga

SEQ ID NO: 542095 - DNA, 19 bp, Mus musculus
  siRNA target sequence for Ubr1 (NM_009461.1,4107-4125).
caccatccaggcaatcgaa

SEQ ID NO: 542096 - DNA, 19 bp, Mus musculus
  siRNA target sequence for Ubr1 (NM_009461.1,4131-4149).
gttgggagatgaaggaaaa

SEQ ID NO: 542097 - DNA, 19 bp, Mus musculus
  siRNA target sequence for Ubr1 (NM_009461.1,4232-4250).
gccctcaggtcctgataca

SEQ ID NO: 542098 - DNA, 19 bp, Mus musculus
  siRNA target sequence for Ubr1 (NM_009461.1,4235-4253).
ctcaggtcctgatacacaa

SEQ ID NO: 542099 - DNA, 19 bp, Mus musculus
  siRNA target sequence for Ubr1 (NM_009461.1,4261-4279).
gctcggctcctgtcagtta

SEQ ID NO: 542100 - DNA, 19 bp, Mus musculus
  siRNA target sequence for Ubr1 (NM_009461.1,4262-4280).
ctcggctcctgtcagttat

SEQ ID NO: 542101 - DNA, 19 bp, Mus musculus
  siRNA target sequence for Ubr1 (NM_009461.1,4286-4304).
ctaacctgcaatcagaaaa

SEQ ID NO: 542102 - DNA, 19 bp, Mus musculus
  siRNA target sequence for Ubr1 (NM_009461.1,4360-4378).
gcgttcccatccttgtatt

SEQ ID NO: 542103 - DNA, 19 bp, Mus musculus
  siRNA target sequence for Ubr1 (NM_009461.1,4408-4426).
ccacttagttcttcatata

SEQ ID NO: 542104 - DNA, 19 bp, Mus musculus
  siRNA target sequence for Ubr1 (NM_009461.1,4675-4693).
gcactgcttttccactatt

SEQ ID NO: 542105 - DNA, 19 bp, Mus musculus
  siRNA target sequence for Ubr1 (NM_009461.1,4680-4698).
gcttttccactatttactt

SEQ ID NO: 542106 - DNA, 19 bp, Mus musculus
  siRNA target sequence for Ubr1 (NM_009461.1,4753-4771).
gcactctgtagctatctat

SEQ ID NO: 542107 - DNA, 19 bp, Mus musculus
  siRNA target sequence for Ubr1 (NM_009461.1,4768-4786).
ctatctttacccacaaatt

SEQ ID NO: 542108 - DNA, 19 bp, Mus musculus
  siRNA target sequence for Ubr1 (NM_009461.1,4817-4835).
ccataaggcccttactaca

SEQ ID NO: 542109 - DNA, 19 bp, Mus musculus
  siRNA target sequence for Ubr1 (NM_009461.1,4846-4864).
ggagatcctgccttactca

SEQ ID NO: 542110 - DNA, 19 bp, Mus musculus
  siRNA target sequence for Ubr1 (NM_009461.1,4852-4870).
cctgccttactcaagtctt

SEQ ID NO: 542111 - DNA, 19 bp, Mus musculus
  siRNA target sequence for Ubr1 (NM_009461.1,4855-4873).
gccttactcaagtctttga

SEQ ID NO: 542112 - DNA, 19 bp, Mus musculus
  siRNA target sequence for Ubr1 (NM_009461.1,4890-4908).
ggtcaggtaccctagaaaa

SEQ ID NO: 542113 - DNA, 19 bp, Mus musculus
  siRNA target sequence for Ubr1 (NM_009461.1,4891-4909).
gtcaggtaccctagaaaaa

SEQ ID NO: 542114 - DNA, 19 bp, Mus musculus
  siRNA target sequence for Ubr1 (NM_009461.1,4893-4911).
caggtaccctagaaaaaga

SEQ ID NO: 542115 - DNA, 19 bp, Mus musculus
  siRNA target sequence for Ubr1 (NM_009461.1,4936-4954).
gactacagctgtcttctaa

SEQ ID NO: 542116 - DNA, 19 bp, Mus musculus
  siRNA target sequence for Ubr1 (NM_009461.1,5279-5297).
ggtatcggaagctgcattt

SEQ ID NO: 542117 - DNA, 19 bp, Mus musculus
  siRNA target sequence for Ubr1 (NM_009461.1,5303-5321).
ggcaacagcactgcattat

SEQ ID NO: 542118 - DNA, 19 bp, Mus musculus
  siRNA target sequence for Ubr1 (NM_009461.1,5304-5322).
gcaacagcactgcattata

SEQ ID NO: 542119 - DNA, 19 bp, Mus musculus
  siRNA target sequence for Ubr1 (NM_009461.1,5313-5331).
ctgcattatagaagagatt

SEQ ID NO: 542120 - DNA, 19 bp, Mus musculus
  siRNA target sequence for Ubr1 (NM_009461.1,5333-5351).
ctcggagccaggagactaa

SEQ ID NO: 542121 - DNA, 19 bp, Mus musculus
  siRNA target sequence for Ubr1 (NM_009461.1,5336-5354).
ggagccaggagactaatca

SEQ ID NO: 542122 - DNA, 19 bp, Mus musculus
  siRNA target sequence for Ubr1 (NM_009461.1,5344-5362).
gagactaatcagatgctat

SEQ ID NO: 542123 - DNA, 19 bp, Mus musculus
  siRNA target sequence for Ucn3 (NM_031250.2,118-136).
ctatctgaggtcaagaaga

SEQ ID NO: 542124 - DNA, 19 bp, Mus musculus
  siRNA target sequence for Ucn3 (NM_031250.2,154-172).
cccttgctgagcaagaaga

SEQ ID NO: 542125 - DNA, 19 bp, Mus musculus
  siRNA target sequence for Ucn3 (NM_031250.2,231-249).
cctccagatcaaaagaact

SEQ ID NO: 542126 - DNA, 19 bp, Mus musculus
  siRNA target sequence for Ucn3 (NM_031250.2,232-250).
ctccagatcaaaagaactt

SEQ ID NO: 542127 - DNA, 19 bp, Mus musculus
  siRNA target sequence for Ucn3 (NM_031250.2,280-298).
gggagcacccggtacagat

SEQ ID NO: 542128 - DNA, 19 bp, Mus musculus
  siRNA target sequence for Ucn3 (NM_031250.2,281-299).
ggagcacccggtacagata

SEQ ID NO: 542129 - DNA, 19 bp, Mus musculus
  siRNA target sequence for Ucn3 (NM_031250.2,285-303).
cacccggtacagataccaa

SEQ ID NO: 542130 - DNA, 19 bp, Mus musculus
  siRNA target sequence for Ucn3 (NM_031250.2,382-400).
gatgttcccactaacatca

SEQ ID NO: 542131 - DNA, 19 bp, Mus musculus
  siRNA target sequence for Ucn3 (NM_031250.2,385-403).
gttcccactaacatcatga

SEQ ID NO: 542132 - DNA, 19 bp, Mus musculus
  siRNA target sequence for Unc5c (NM_009472.1,185-203).
gcggactgggactaggata

SEQ ID NO: 542133 - DNA, 19 bp, Mus musculus
  siRNA target sequence for Unc5c (NM_009472.1,269-287).
ctcaagatgatgaattttt

SEQ ID NO: 542134 - DNA, 19 bp, Mus musculus
  siRNA target sequence for Unc5c (NM_009472.1,291-309).
cgaactcccagaaaccttt

SEQ ID NO: 542135 - DNA, 19 bp, Mus musculus
  siRNA target sequence for Unc5c (NM_009472.1,382-400).
cctgtgaacctgtattgta

SEQ ID NO: 542136 - DNA, 19 bp, Mus musculus
  siRNA target sequence for Unc5c (NM_009472.1,383-401).
ctgtgaacctgtattgtaa

SEQ ID NO: 542137 - DNA, 19 bp, Mus musculus
  siRNA target sequence for Unc5c (NM_009472.1,638-656).
cgtatctgcggaagacatt

SEQ ID NO: 542138 - DNA, 19 bp, Mus musculus
  siRNA target sequence for Unc5c (NM_009472.1,687-705).
cttggagcaggaagtctta

SEQ ID NO: 542139 - DNA, 19 bp, Mus musculus
  siRNA target sequence for Unc5c (NM_009472.1,752-770).
ggctaaagaatgaagacat

SEQ ID NO: 542140 - DNA, 19 bp, Mus musculus
  siRNA target sequence for Unc5c (NM_009472.1,781-799).
gctgaagatcggaactttt

SEQ ID NO: 542141 - DNA, 19 bp, Mus musculus
  siRNA target sequence for Unc5c (NM_009472.1,782-800).
ctgaagatcggaactttta

SEQ ID NO: 542142 - DNA, 19 bp, Mus musculus
  siRNA target sequence for Unc5c (NM_009472.1,784-802).
gaagatcggaacttttata

SEQ ID NO: 542143 - DNA, 19 bp, Mus musculus
  siRNA target sequence for Unc5c (NM_009472.1,790-808).
cggaacttttatattacta

SEQ ID NO: 542144 - DNA, 19 bp, Mus musculus
  siRNA target sequence for Unc5c (NM_009472.1,832-850).
caagcccgactctcagata

SEQ ID NO: 542145 - DNA, 19 bp, Mus musculus
  siRNA target sequence for Unc5c (NM_009472.1,909-927).
cactgtcatcgtgtatgtt

SEQ ID NO: 542146 - DNA, 19 bp, Mus musculus
  siRNA target sequence for Unc5c (NM_009472.1,911-929).
ctgtcatcgtgtatgttaa

SEQ ID NO: 542147 - DNA, 19 bp, Mus musculus
  siRNA target sequence for Unc5c (NM_009472.1,915-933).
catcgtgtatgttaatggt

SEQ ID NO: 542148 - DNA, 19 bp, Mus musculus
  siRNA target sequence for Unc5c (NM_009472.1,1096-1114).
gatggtaggtggacttcat

SEQ ID NO: 542149 - DNA, 19 bp, Mus musculus
  siRNA target sequence for Unc5c (NM_009472.1,1296-1314).
gattgtgatcgctgtaaca

SEQ ID NO: 542150 - DNA, 19 bp, Mus musculus
  siRNA target sequence for Unc5c (NM_009472.1,1359-1377).
gaagaaccaccgtgacttt

SEQ ID NO: 542151 - DNA, 19 bp, Mus musculus
  siRNA target sequence for Unc5c (NM_009472.1,1518-1536).
gcatgatgtctcagacaaa

SEQ ID NO: 542152 - DNA, 19 bp, Mus musculus
  siRNA target sequence for Unc5c (NM_009472.1,1564-1582).
gacccactacccaacttga

SEQ ID NO: 542153 - DNA, 19 bp, Mus musculus
  siRNA target sequence for Unc5c (NM_009472.1,1566-1584).
cccactacccaacttgaaa

SEQ ID NO: 542154 - DNA, 19 bp, Mus musculus
  siRNA target sequence for Unc5c (NM_009472.1,1568-1586).
cactacccaacttgaaaat

SEQ ID NO: 542155 - DNA, 19 bp, Mus musculus
  siRNA target sequence for Unc5c (NM_009472.1,1570-1588).
ctacccaacttgaaaatca

SEQ ID NO: 542156 - DNA, 19 bp, Mus musculus
  siRNA target sequence for Unc5c (NM_009472.1,1627-1645).
gaccttgccgagttctcat

SEQ ID NO: 542157 - DNA, 19 bp, Mus musculus
  siRNA target sequence for Unc5c (NM_009472.1,1771-1789).
ggtcacctcatcattccta

SEQ ID NO: 542158 - DNA, 19 bp, Mus musculus
  siRNA target sequence for Unc5c (NM_009472.1,1772-1790).
gtcacctcatcattcctaa

SEQ ID NO: 542159 - DNA, 19 bp, Mus musculus
  siRNA target sequence for Unc5c (NM_009472.1,1774-1792).
cacctcatcattcctaatt

SEQ ID NO: 542160 - DNA, 19 bp, Mus musculus
  siRNA target sequence for Unc5c (NM_009472.1,1776-1794).
cctcatcattcctaattca

SEQ ID NO: 542161 - DNA, 19 bp, Mus musculus
  siRNA target sequence for Unc5c (NM_009472.1,1834-1852).
gggagagtctatgaaatgt

SEQ ID NO: 542162 - DNA, 19 bp, Mus musculus
  siRNA target sequence for Unc5c (NM_009472.1,2082-2100).
cacaaccccctgttacatt

SEQ ID NO: 542163 - DNA, 19 bp, Mus musculus
  siRNA target sequence for Unc5c (NM_009472.1,2084-2102).
caaccccctgttacattca

SEQ ID NO: 542164 - DNA, 19 bp, Mus musculus
  siRNA target sequence for Unc5c (NM_009472.1,2180-2198).
cagctgccaagcgtcttaa

SEQ ID NO: 542165 - DNA, 19 bp, Mus musculus
  siRNA target sequence for Unc5c (NM_009472.1,2183-2201).
ctgccaagcgtcttaaact

SEQ ID NO: 542166 - DNA, 19 bp, Mus musculus
  siRNA target sequence for Unc5c (NM_009472.1,2315-2333).
gaggacagctcctagaaga

SEQ ID NO: 542167 - DNA, 19 bp, Mus musculus
  siRNA target sequence for Unc5c (NM_009472.1,2367-2385).
caacctgcgcctgtctatt

SEQ ID NO: 542168 - DNA, 19 bp, Mus musculus
  siRNA target sequence for Unc5c (NM_009472.1,2370-2388).
cctgcgcctgtctattcat

SEQ ID NO: 542169 - DNA, 19 bp, Mus musculus
  siRNA target sequence for Unc5c (NM_009472.1,2414-2432).
gcaaattgctggctaagta

SEQ ID NO: 542170 - DNA, 19 bp, Mus musculus
  siRNA target sequence for Unc5c (NM_009472.1,2415-2433).
caaattgctggctaagtat

SEQ ID NO: 542171 - DNA, 19 bp, Mus musculus
  siRNA target sequence for Unc5c (NM_009472.1,2689-2707).
cctatccggcagaagctat

SEQ ID NO: 542172 - DNA, 19 bp, Mus musculus
  siRNA target sequence for Unc5c (NM_009472.1,2715-2733).
cctggatgcccctcaaaca

SEQ ID NO: 542173 - DNA, 19 bp, Mus musculus
  siRNA target sequence for Unc5c (NM_009472.1,2718-2736).
ggatgcccctcaaacaaga

SEQ ID NO: 542174 - DNA, 19 bp, Mus musculus
  siRNA target sequence for Unc5c (NM_009472.1,2748-2766).
gaggatgctggcccataaa

SEQ ID NO: 542175 - DNA, 19 bp, Mus musculus
  siRNA target sequence for Unc5c (NM_009472.1,2750-2768).
ggatgctggcccataaact

SEQ ID NO: 542176 - DNA, 19 bp, Mus musculus
  siRNA target sequence for Unc5c (NM_009472.1,2810-2828).
gcccaactggcgtaatcct

SEQ ID NO: 542177 - DNA, 19 bp, Mus musculus
  siRNA target sequence for Unc5c (NM_009472.1,2818-2836).
ggcgtaatcctggatcttt

SEQ ID NO: 542178 - DNA, 19 bp, Mus musculus
  siRNA target sequence for Unc84a (NM_024451.1,139-157).
cgtcggatgctctggattt

SEQ ID NO: 542179 - DNA, 19 bp, Mus musculus
  siRNA target sequence for Unc84a (NM_024451.1,252-270).
gacagccaggctattgatt

SEQ ID NO: 542180 - DNA, 19 bp, Mus musculus
  siRNA target sequence for Unc84a (NM_024451.1,261-279).
gctattgattcgcacatta

SEQ ID NO: 542181 - DNA, 19 bp, Mus musculus
  siRNA target sequence for Unc84a (NM_024451.1,500-518).
ctggggtctcgatgatgat

SEQ ID NO: 542182 - DNA, 19 bp, Mus musculus
  siRNA target sequence for Unc84a (NM_024451.1,522-540).
gaccttaaaggtggaaata

SEQ ID NO: 542183 - DNA, 19 bp, Mus musculus
  siRNA target sequence for Unc84a (NM_024451.1,579-597).
gtggcgagcagcaatggat

SEQ ID NO: 542184 - DNA, 19 bp, Mus musculus
  siRNA target sequence for Unc84a (NM_024451.1,689-707).
cagagacaggactctcaaa

SEQ ID NO: 542185 - DNA, 19 bp, Mus musculus
  siRNA target sequence for Unc84a (NM_024451.1,709-727).
cacgcggagtgtcctttta

SEQ ID NO: 542186 - DNA, 19 bp, Mus musculus
  siRNA target sequence for Unc84a (NM_024451.1,712-730).
gcggagtgtccttttacct

SEQ ID NO: 542187 - DNA, 19 bp, Mus musculus
  siRNA target sequence for Unc84a (NM_024451.1,764-782).
ctcatcctttgcatcattt

SEQ ID NO: 542188 - DNA, 19 bp, Mus musculus
  siRNA target sequence for Unc84a (NM_024451.1,769-787).
cctttgcatcatttatagt

SEQ ID NO: 542189 - DNA, 19 bp, Mus musculus
  siRNA target sequence for Unc84a (NM_024451.1,770-788).
ctttgcatcatttatagtt

SEQ ID NO: 542190 - DNA, 19 bp, Mus musculus
  siRNA target sequence for Unc84a (NM_024451.1,812-830).
gaagctcaattttgaaact

SEQ ID NO: 542191 - DNA, 19 bp, Mus musculus
  siRNA target sequence for Unc84a (NM_024451.1,926-944).
gatgactgccggagaactt

SEQ ID NO: 542192 - DNA, 19 bp, Mus musculus
  siRNA target sequence for Unc84a (NM_024451.1,964-982).
ccctgtgcgatgactgtaa

SEQ ID NO: 542193 - DNA, 19 bp, Mus musculus
  siRNA target sequence for Unc84a (NM_024451.1,1212-1230).
gggagcggctggtaccaat

SEQ ID NO: 542194 - DNA, 19 bp, Mus musculus
  siRNA target sequence for Unc84a (NM_024451.1,1213-1231).
ggagcggctggtaccaatt

SEQ ID NO: 542195 - DNA, 19 bp, Mus musculus
  siRNA target sequence for Unc84a (NM_024451.1,1214-1232).
gagcggctggtaccaattt

SEQ ID NO: 542196 - DNA, 19 bp, Mus musculus
  siRNA target sequence for Unc84a (NM_024451.1,1218-1236).
ggctggtaccaatttgtta

SEQ ID NO: 542197 - DNA, 19 bp, Mus musculus
  siRNA target sequence for Unc84a (NM_024451.1,1276-1294).
gccttcgaaatatttgcaa

SEQ ID NO: 542198 - DNA, 19 bp, Mus musculus
  siRNA target sequence for Unc84a (NM_024451.1,1308-1326).
ctcctcccactcctacttt

SEQ ID NO: 542199 - DNA, 19 bp, Mus musculus
  siRNA target sequence for Unc84a (NM_024451.1,1425-1443).
gattccaagggcatgcata

SEQ ID NO: 542200 - DNA, 19 bp, Mus musculus
  siRNA target sequence for Unc84a (NM_024451.1,1463-1481).
gagcccacctccaaaggtt

SEQ ID NO: 542201 - DNA, 19 bp, Mus musculus
  siRNA target sequence for Unc84a (NM_024451.1,1468-1486).
cacctccaaaggttgatca

SEQ ID NO: 542202 - DNA, 19 bp, Mus musculus
  siRNA target sequence for Unc84a (NM_024451.1,1471-1489).
ctccaaaggttgatcacaa

SEQ ID NO: 542203 - DNA, 19 bp, Mus musculus
  siRNA target sequence for Unc84a (NM_024451.1,1646-1664).
gtcactgtgggtcaagaat

SEQ ID NO: 542204 - DNA, 19 bp, Mus musculus
  siRNA target sequence for Unc84a (NM_024451.1,1713-1731).
gctaagactgacttcatga

SEQ ID NO: 542205 - DNA, 19 bp, Mus musculus
  siRNA target sequence for Unc84a (NM_024451.1,1879-1897).
gtgtgcagcacctagaact

SEQ ID NO: 542206 - DNA, 19 bp, Mus musculus
  siRNA target sequence for Unc84a (NM_024451.1,2023-2041).
ccctcgagtggctattaga

SEQ ID NO: 542207 - DNA, 19 bp, Mus musculus
  siRNA target sequence for Unc84a (NM_024451.1,2075-2093).
gctgcaggtgctcttacat

SEQ ID NO: 542208 - DNA, 19 bp, Mus musculus
  siRNA target sequence for Unc84a (NM_024451.1,2183-2201).
gaatcaggcagggatttca

SEQ ID NO: 542209 - DNA, 19 bp, Mus musculus
  siRNA target sequence for Unc84a (NM_024451.1,2209-2227).
cagaagcgcaagcacatat

SEQ ID NO: 542210 - DNA, 19 bp, Mus musculus
  siRNA target sequence for Unc84a (NM_024451.1,2211-2229).
gaagcgcaagcacatatca

SEQ ID NO: 542211 - DNA, 19 bp, Mus musculus
  siRNA target sequence for Unc84a (NM_024451.1,2215-2233).
cgcaagcacatatcattgt

SEQ ID NO: 542212 - DNA, 19 bp, Mus musculus
  siRNA target sequence for Unc84a (NM_024451.1,2217-2235).
caagcacatatcattgtga

SEQ ID NO: 542213 - DNA, 19 bp, Mus musculus
  siRNA target sequence for Unc84a (NM_024451.1,2506-2524).
cattcaccatggaacacat

SEQ ID NO: 542214 - DNA, 19 bp, Mus musculus
  siRNA target sequence for Unc84a (NM_024451.1,2512-2530).
ccatggaacacattccaaa

SEQ ID NO: 542215 - DNA, 19 bp, Mus musculus
  siRNA target sequence for Unc84a (NM_024451.1,2558-2576).
cagtgcccccaaagacttt

SEQ ID NO: 542216 - DNA, 19 bp, Mus musculus
  siRNA target sequence for Unc84a (NM_024451.1,2567-2585).
caaagactttgcagtctat

SEQ ID NO: 542217 - DNA, 19 bp, Mus musculus
  siRNA target sequence for Unc84a (NM_024451.1,2587-2605).
gactggaaacggagtatca

SEQ ID NO: 542218 - DNA, 19 bp, Mus musculus
  siRNA target sequence for Unc84a (NM_024451.1,2591-2609).
ggaaacggagtatcaagaa

SEQ ID NO: 542219 - DNA, 19 bp, Mus musculus
  siRNA target sequence for Unc84a (NM_024451.1,2690-2708).
ccaagccttccagatagta

SEQ ID NO: 542220 - DNA, 19 bp, Mus musculus
  siRNA target sequence for Vbp1 (NM_011692.1,216-234).
ggtcagattcctgaaatta

SEQ ID NO: 542221 - DNA, 19 bp, Mus musculus
  siRNA target sequence for Vbp1 (NM_011692.1,289-307).
caatggagacgagattctt

SEQ ID NO: 542222 - DNA, 19 bp, Mus musculus
  siRNA target sequence for Vbp1 (NM_011692.1,337-355).
cagtccctcctactgataa

SEQ ID NO: 542223 - DNA, 19 bp, Mus musculus
  siRNA target sequence for Vbp1 (NM_011692.1,341-359).
ccctcctactgataaagta

SEQ ID NO: 542224 - DNA, 19 bp, Mus musculus
  siRNA target sequence for Vbp1 (NM_011692.1,342-360).
cctcctactgataaagtat

SEQ ID NO: 542225 - DNA, 19 bp, Mus musculus
  siRNA target sequence for Vbp1 (NM_011692.1,386-404).
gcttgaatatgatattgat

SEQ ID NO: 542226 - DNA, 19 bp, Mus musculus
  siRNA target sequence for Vbp1 (NM_011692.1,409-427).
ctcaggccttgttggaaaa

SEQ ID NO: 542227 - DNA, 19 bp, Mus musculus
  siRNA target sequence for Vbp1 (NM_011692.1,413-431).
ggccttgttggaaaagaat

SEQ ID NO: 542228 - DNA, 19 bp, Mus musculus
  siRNA target sequence for Vbp1 (NM_011692.1,414-432).
gccttgttggaaaagaatt

SEQ ID NO: 542229 - DNA, 19 bp, Mus musculus
  siRNA target sequence for Vbp1 (NM_011692.1,415-433).
ccttgttggaaaagaattt

SEQ ID NO: 542230 - DNA, 19 bp, Mus musculus
  siRNA target sequence for Vbp1 (NM_011692.1,479-497).
ctttcttcgagatcagttt

SEQ ID NO: 542231 - DNA, 19 bp, Mus musculus
  siRNA target sequence for Vbp1 (NM_011692.1,483-501).
cttcgagatcagtttacta

SEQ ID NO: 542232 - DNA, 19 bp, Mus musculus
  siRNA target sequence for Vbp1 (NM_011692.1,512-530).
caatatggccagggtttat

SEQ ID NO: 542233 - DNA, 19 bp, Mus musculus
  siRNA target sequence for Vbp1 (NM_011692.1,546-564).
cgaagaaacaaagatgatt

SEQ ID NO: 542234 - DNA, 19 bp, Mus musculus
  siRNA target sequence for Vbp1 (NM_011692.1,558-576).
gatgattctaccaagaata

SEQ ID NO: 542235 - DNA, 19 bp, Mus musculus
  siRNA target sequence for Vps26 (NM_133672.1,131-149).
gattgatgttgcccttaat

SEQ ID NO: 542236 - DNA, 19 bp, Mus musculus
  siRNA target sequence for Vps26 (NM_133672.1,193-211).
gcaaagtagaaaaacacta

SEQ ID NO: 542237 - DNA, 19 bp, Mus musculus
  siRNA target sequence for Vps26 (NM_133672.1,230-248).
gtctgtctcaggaaaggta

SEQ ID NO: 542238 - DNA, 19 bp, Mus musculus
  siRNA target sequence for Vps26 (NM_133672.1,236-254).
ctcaggaaaggtaaaccta

SEQ ID NO: 542239 - DNA, 19 bp, Mus musculus
  siRNA target sequence for Vps26 (NM_133672.1,277-295).
ggctagagcatcaaggaat

SEQ ID NO: 542240 - DNA, 19 bp, Mus musculus
  siRNA target sequence for Vps26 (NM_133672.1,278-296).
gctagagcatcaaggaatt

SEQ ID NO: 542241 - DNA, 19 bp, Mus musculus
  siRNA target sequence for Vps26 (NM_133672.1,324-342).
cttttcaatgacaagagta

SEQ ID NO: 542242 - DNA, 19 bp, Mus musculus
  siRNA target sequence for Vps26 (NM_133672.1,346-364).
ctcatgaatttgtaaacct

SEQ ID NO: 542243 - DNA, 19 bp, Mus musculus
  siRNA target sequence for Vps26 (NM_133672.1,401-419).
gagcagaagctatgacttt

SEQ ID NO: 542244 - DNA, 19 bp, Mus musculus
  siRNA target sequence for Vps26 (NM_133672.1,406-424).
gaagctatgactttgaatt

SEQ ID NO: 542245 - DNA, 19 bp, Mus musculus
  siRNA target sequence for Vps26 (NM_133672.1,420-438).
gaatttatgcaagttgaaa

SEQ ID NO: 542246 - DNA, 19 bp, Mus musculus
  siRNA target sequence for Vps26 (NM_133672.1,486-504).
cttaaggtgacaattgtga

SEQ ID NO: 542247 - DNA, 19 bp, Mus musculus
  siRNA target sequence for Vps26 (NM_133672.1,522-540).
gtgaaagagtacgatctta

SEQ ID NO: 542248 - DNA, 19 bp, Mus musculus
  siRNA target sequence for Vps26 (NM_133672.1,524-542).
gaaagagtacgatcttatt

SEQ ID NO: 542249 - DNA, 19 bp, Mus musculus
  siRNA target sequence for Vps26 (NM_133672.1,530-548).
gtacgatcttattgttcat

SEQ ID NO: 542250 - DNA, 19 bp, Mus musculus
  siRNA target sequence for Vps26 (NM_133672.1,559-577).
cctatcctgatgtcaacaa

SEQ ID NO: 542251 - DNA, 19 bp, Mus musculus
  siRNA target sequence for Vps26 (NM_133672.1,564-582).
cctgatgtcaacaactcta

SEQ ID NO: 542252 - DNA, 19 bp, Mus musculus
  siRNA target sequence for Vps26 (NM_133672.1,567-585).
gatgtcaacaactctatta

SEQ ID NO: 542253 - DNA, 19 bp, Mus musculus
  siRNA target sequence for Vps26 (NM_133672.1,606-624).
gactgtctgcacatagagt

SEQ ID NO: 542254 - DNA, 19 bp, Mus musculus
  siRNA target sequence for Vps26 (NM_133672.1,612-630).
ctgcacatagagtttgaat

SEQ ID NO: 542255 - DNA, 19 bp, Mus musculus
  siRNA target sequence for Vps26 (NM_133672.1,614-632).
gcacatagagtttgaatat

SEQ ID NO: 542256 - DNA, 19 bp, Mus musculus
  siRNA target sequence for Vps26 (NM_133672.1,617-635).
catagagtttgaatataat

SEQ ID NO: 542257 - DNA, 19 bp, Mus musculus
  siRNA target sequence for Vps26 (NM_133672.1,621-639).
gagtttgaatataataagt

SEQ ID NO: 542258 - DNA, 19 bp, Mus musculus
  siRNA target sequence for Vps26 (NM_133672.1,669-687).
ggaaaaatttacttcttat

SEQ ID NO: 542259 - DNA, 19 bp, Mus musculus
  siRNA target sequence for Vps26 (NM_133672.1,680-698).
cttcttattagtaagaata

SEQ ID NO: 542260 - DNA, 19 bp, Mus musculus
  siRNA target sequence for Vps26 (NM_133672.1,731-749).
gaaagagatcacaggaatt

SEQ ID NO: 542261 - DNA, 19 bp, Mus musculus
  siRNA target sequence for Vps26 (NM_133672.1,772-790).
cagaaacaatcgctaagta

SEQ ID NO: 542262 - DNA, 19 bp, Mus musculus
  siRNA target sequence for Vps26 (NM_133672.1,822-840).
gaatctattccgataagat

SEQ ID NO: 542263 - DNA, 19 bp, Mus musculus
  siRNA target sequence for Vps26 (NM_133672.1,826-844).
ctattccgataagattgtt

SEQ ID NO: 542264 - DNA, 19 bp, Mus musculus
  siRNA target sequence for Vps26 (NM_133672.1,868-886).
ccacgatgagagatgtgaa

SEQ ID NO: 542265 - DNA, 19 bp, Mus musculus
  siRNA target sequence for Vps26 (NM_133672.1,871-889).
cgatgagagatgtgaacaa

SEQ ID NO: 542266 - DNA, 19 bp, Mus musculus
  siRNA target sequence for Vps26 (NM_133672.1,893-911).
gttttcagtaaggtacttt

SEQ ID NO: 542267 - DNA, 19 bp, Mus musculus
  siRNA target sequence for Vps26 (NM_133672.1,936-954).
gaggaccgaaggtacttca

SEQ ID NO: 542268 - DNA, 19 bp, Mus musculus
  siRNA target sequence for Vps26 (NM_133672.1,985-1003).
cacccgagaaactgagaaa

SEQ ID NO: 542269 - DNA, 19 bp, Mus musculus
  siRNA target sequence for Vps26 (NM_133672.1,1016-1034).
ctttcaccagcggtttgaa

SEQ ID NO: 542270 - DNA, 19 bp, Mus musculus
  siRNA target sequence for Wbp1 (NM_016757.1,286-304).
ccctggataccatccttta

SEQ ID NO: 542271 - DNA, 19 bp, Mus musculus
  siRNA target sequence for Wbp1 (NM_016757.1,450-468).
gtcctcatcctctttagct

SEQ ID NO: 542272 - DNA, 19 bp, Mus musculus
  siRNA target sequence for Wbp1 (NM_016757.1,484-502).
gccaccgaagggctaaact

SEQ ID NO: 542273 - DNA, 19 bp, Mus musculus
  siRNA target sequence for Wbp1 (NM_016757.1,486-504).
caccgaagggctaaactca

SEQ ID NO: 542274 - DNA, 19 bp, Mus musculus
  siRNA target sequence for Wbp1 (NM_016757.1,519-537).
cagcggcagcgtgaaatca

SEQ ID NO: 542275 - DNA, 19 bp, Mus musculus
  siRNA target sequence for Wbp1 (NM_016757.1,522-540).
cggcagcgtgaaatcaact

SEQ ID NO: 542276 - DNA, 19 bp, Mus musculus
  siRNA target sequence for Wbp1 (NM_016757.1,525-543).
cagcgtgaaatcaacttgt

SEQ ID NO: 542277 - DNA, 19 bp, Mus musculus
  siRNA target sequence for Wbp1 (NM_016757.1,755-773).
ccacttggaggggacaaat

SEQ ID NO: 542278 - DNA, 19 bp, Mus musculus
  siRNA target sequence for Wbp1 (NM_016757.1,758-776).
cttggaggggacaaatgta

SEQ ID NO: 542279 - DNA, 19 bp, Mus musculus
  siRNA target sequence for Wbp1 (NM_016757.1,835-853).
gattgagcccagttcacat

SEQ ID NO: 542280 - DNA, 19 bp, Mus musculus
  siRNA target sequence for Wbp2 (NM_016852.1,43-61).
gcgctcaacaagaatcact

SEQ ID NO: 542281 - DNA, 19 bp, Mus musculus
  siRNA target sequence for Wbp2 (NM_016852.1,71-89).
gcggagtgatcgtcaacaa

SEQ ID NO: 542282 - DNA, 19 bp, Mus musculus
  siRNA target sequence for Wbp2 (NM_016852.1,73-91).
ggagtgatcgtcaacaaca

SEQ ID NO: 542283 - DNA, 19 bp, Mus musculus
  siRNA target sequence for Wbp2 (NM_016852.1,102-120).
cctaatgtcctatgatcat

SEQ ID NO: 542284 - DNA, 19 bp, Mus musculus
  siRNA target sequence for Wbp2 (NM_016852.1,132-150).
cttcaacgacatgaagaat

SEQ ID NO: 542285 - DNA, 19 bp, Mus musculus
  siRNA target sequence for Wbp2 (NM_016852.1,197-215).
ctccgtaccgggtcatctt

SEQ ID NO: 542286 - DNA, 19 bp, Mus musculus
  siRNA target sequence for Wbp2 (NM_016852.1,200-218).
cgtaccgggtcatctttct

SEQ ID NO: 542287 - DNA, 19 bp, Mus musculus
  siRNA target sequence for Wbp2 (NM_016852.1,267-285).
gatgaaggactgtgagatt

SEQ ID NO: 542288 - DNA, 19 bp, Mus musculus
  siRNA target sequence for Wbp2 (NM_016852.1,464-482).
cctatgggtacccttacat

SEQ ID NO: 542289 - DNA, 19 bp, Mus musculus
  siRNA target sequence for Wbp2 (NM_016852.1,512-530).
cagtcgccaatggaatgta

SEQ ID NO: 542290 - DNA, 19 bp, Mus musculus
  siRNA target sequence for Wbp2 (NM_016852.1,716-734).
ccgctgccagtgcctatta

SEQ ID NO: 542291 - DNA, 19 bp, Mus musculus
  siRNA target sequence for Wbp2 (NM_016852.1,718-736).
gctgccagtgcctattaca

SEQ ID NO: 542292 - DNA, 19 bp, Mus musculus
  siRNA target sequence for Wbp2 (NM_016852.1,740-758).
caggcaacccacacaatgt

SEQ ID NO: 542293 - DNA, 19 bp, Mus musculus
  siRNA target sequence for Wbp2 (NM_016852.1,742-760).
ggcaacccacacaatgtct

SEQ ID NO: 542294 - DNA, 19 bp, Mus musculus
  siRNA target sequence for Zbtb8 (NM_153541.1,129-147).
cagcggaaacgagactttt

SEQ ID NO: 542295 - DNA, 19 bp, Mus musculus
  siRNA target sequence for Zbtb8 (NM_153541.1,132-150).
cggaaacgagactttttct

SEQ ID NO: 542296 - DNA, 19 bp, Mus musculus
  siRNA target sequence for Zbtb8 (NM_153541.1,134-152).
gaaacgagactttttctgt

SEQ ID NO: 542297 - DNA, 19 bp, Mus musculus
  siRNA target sequence for Zbtb8 (NM_153541.1,232-250).
ccctactccttcactacat

SEQ ID NO: 542298 - DNA, 19 bp, Mus musculus
  siRNA target sequence for Zbtb8 (NM_153541.1,522-540).
gcagcccatcagatagaca

SEQ ID NO: 542299 - DNA, 19 bp, Mus musculus
  siRNA target sequence for Zbtb8 (NM_153541.1,539-557).
cagtgaaagtccaagttca

SEQ ID NO: 542300 - DNA, 19 bp, Mus musculus
  siRNA target sequence for Zbtb8 (NM_153541.1,618-636).
gggagtctagactgtacaa

SEQ ID NO: 542301 - DNA, 19 bp, Mus musculus
  siRNA target sequence for Zbtb8 (NM_153541.1,619-637).
ggagtctagactgtacaat

SEQ ID NO: 542302 - DNA, 19 bp, Mus musculus
  siRNA target sequence for Zbtb8 (NM_153541.1,620-638).
gagtctagactgtacaata

SEQ ID NO: 542303 - DNA, 19 bp, Mus musculus
  siRNA target sequence for Zbtb8 (NM_153541.1,624-642).
ctagactgtacaatatcat

SEQ ID NO: 542304 - DNA, 19 bp, Mus musculus
  siRNA target sequence for Zbtb8 (NM_153541.1,627-645).
gactgtacaatatcatctt

SEQ ID NO: 542305 - DNA, 19 bp, Mus musculus
  siRNA target sequence for Zbtb8 (NM_153541.1,727-745).
ccagacgggttgaacctaa

SEQ ID NO: 542306 - DNA, 19 bp, Mus musculus
  siRNA target sequence for Zbtb8 (NM_153541.1,785-803).
cgaacagctacagcaatat

SEQ ID NO: 542307 - DNA, 19 bp, Mus musculus
  siRNA target sequence for Zbtb8 (NM_153541.1,981-999).
ccaggagtggccatgagtt

SEQ ID NO: 542308 - DNA, 19 bp, Mus musculus
  siRNA target sequence for Zbtb8 (NM_153541.1,1000-1018).
ccgtgatggacgttcagaa

SEQ ID NO: 542309 - DNA, 19 bp, Mus musculus
  siRNA target sequence for Zbtb8 (NM_153541.1,1011-1029).
gttcagaacgactggtata

SEQ ID NO: 542310 - DNA, 19 bp, Mus musculus
  siRNA target sequence for Zbtb8 (NM_153541.1,1228-1246).
gatccagccgtccaattat

SEQ ID NO: 542311 - DNA, 19 bp, Mus musculus
  siRNA target sequence for Zbtb8 (NM_153541.1,1254-1272).
ggctgtcgacgaaccttta

SEQ ID NO: 542312 - DNA, 19 bp, Mus musculus
  siRNA target sequence for Zbtb8 (NM_153541.1,1359-1377).
ctgatgcctgtcaacctta

SEQ ID NO: 542313 - DNA, 19 bp, Mus musculus
  siRNA target sequence for Zbtb8 (NM_153541.1,1422-1440).
gatgactggcccatctaca

SEQ ID NO: 542314 - DNA, 19 bp, Mus musculus
  siRNA target sequence for Zfp131 (NM_028245.1,85-103).
cctgaacatcataaaatga

SEQ ID NO: 542315 - DNA, 19 bp, Mus musculus
  siRNA target sequence for Zfp131 (NM_028245.1,102-120).
gatcttggaccgattgaat

SEQ ID NO: 542316 - DNA, 19 bp, Mus musculus
  siRNA target sequence for Zfp131 (NM_028245.1,105-123).
cttggaccgattgaatgaa

SEQ ID NO: 542317 - DNA, 19 bp, Mus musculus
  siRNA target sequence for Zfp131 (NM_028245.1,108-126).
ggaccgattgaatgaacaa

SEQ ID NO: 542318 - DNA, 19 bp, Mus musculus
  siRNA target sequence for Zfp131 (NM_028245.1,163-181).
gtcgacggacaccatttta

SEQ ID NO: 542319 - DNA, 19 bp, Mus musculus
  siRNA target sequence for Zfp131 (NM_028245.1,202-220).
gctgcctgcagtaagttct

SEQ ID NO: 542320 - DNA, 19 bp, Mus musculus
  siRNA target sequence for Zfp131 (NM_028245.1,203-221).
ctgcctgcagtaagttctt

SEQ ID NO: 542321 - DNA, 19 bp, Mus musculus
  siRNA target sequence for Zfp131 (NM_028245.1,212-230).
gtaagttcttctacaaatt

SEQ ID NO: 542322 - DNA, 19 bp, Mus musculus
  siRNA target sequence for Zfp131 (NM_028245.1,231-249).
cttccaggagtttactcaa

SEQ ID NO: 542323 - DNA, 19 bp, Mus musculus
  siRNA target sequence for Zfp131 (NM_028245.1,252-270).
gcctttggttgaaattgaa

SEQ ID NO: 542324 - DNA, 19 bp, Mus musculus
  siRNA target sequence for Zfp131 (NM_028245.1,262-280).
gaaattgaaggtgttagta

SEQ ID NO: 542325 - DNA, 19 bp, Mus musculus
  siRNA target sequence for Zfp131 (NM_028245.1,285-303).
ggcttttcgccacttaatt

SEQ ID NO: 542326 - DNA, 19 bp, Mus musculus
  siRNA target sequence for Zfp131 (NM_028245.1,295-313).
cacttaattgagttcacat

SEQ ID NO: 542327 - DNA, 19 bp, Mus musculus
  siRNA target sequence for Zfp131 (NM_028245.1,306-324).
gttcacatacacagcaaaa

SEQ ID NO: 542328 - DNA, 19 bp, Mus musculus
  siRNA target sequence for Zfp131 (NM_028245.1,315-333).
cacagcaaaactaatgata

SEQ ID NO: 542329 - DNA, 19 bp, Mus musculus
  siRNA target sequence for Zfp131 (NM_028245.1,368-386).
cagcagagtttctacaaat

SEQ ID NO: 542330 - DNA, 19 bp, Mus musculus
  siRNA target sequence for Zfp131 (NM_028245.1,387-405).
gctggaagctattaaagca

SEQ ID NO: 542331 - DNA, 19 bp, Mus musculus
  siRNA target sequence for Zfp131 (NM_028245.1,483-501).
gattgcagaaacttcaaat

SEQ ID NO: 542332 - DNA, 19 bp, Mus musculus
  siRNA target sequence for Zfp131 (NM_028245.1,563-581).
ctgagggcacaattgaagt

SEQ ID NO: 542333 - DNA, 19 bp, Mus musculus
  siRNA target sequence for Zfp131 (NM_028245.1,567-585).
gggcacaattgaagtagaa

SEQ ID NO: 542334 - DNA, 19 bp, Mus musculus
  siRNA target sequence for Zfp131 (NM_028245.1,622-640).
gccaagcagtctataaagt

SEQ ID NO: 542335 - DNA, 19 bp, Mus musculus
  siRNA target sequence for Zfp131 (NM_028245.1,679-697).
gcgttgttggcagatatca

SEQ ID NO: 542336 - DNA, 19 bp, Mus musculus
  siRNA target sequence for Zfp131 (NM_028245.1,708-726).
ccgtcaaggtgaaagcaaa

SEQ ID NO: 542337 - DNA, 19 bp, Mus musculus
  siRNA target sequence for Zfp131 (NM_028245.1,751-769).
gcatctgaccccataagca

SEQ ID NO: 542338 - DNA, 19 bp, Mus musculus
  siRNA target sequence for Zfp131 (NM_028245.1,752-770).
catctgaccccataagcaa

SEQ ID NO: 542339 - DNA, 19 bp, Mus musculus
  siRNA target sequence for Zfp131 (NM_028245.1,848-866).
cgtggaaacagcaccttaa

SEQ ID NO: 542340 - DNA, 19 bp, Mus musculus
  siRNA target sequence for Zfp131 (NM_028245.1,852-870).
gaaacagcaccttaactgt

SEQ ID NO: 542341 - DNA, 19 bp, Mus musculus
  siRNA target sequence for Zfp131 (NM_028245.1,932-950).
gccagtactgtgacaaaca

SEQ ID NO: 542342 - DNA, 19 bp, Mus musculus
  siRNA target sequence for Zfp131 (NM_028245.1,934-952).
cagtactgtgacaaacagt

SEQ ID NO: 542343 - DNA, 19 bp, Mus musculus
  siRNA target sequence for Zfp131 (NM_028245.1,976-994).
gaacaccttcgaaaacata

SEQ ID NO: 542344 - DNA, 19 bp, Mus musculus
  siRNA target sequence for Zfp131 (NM_028245.1,1029-1047).
cgagcggtttgctagaaat

SEQ ID NO: 542345 - DNA, 19 bp, Mus musculus
  siRNA target sequence for Zfp131 (NM_028245.1,1033-1051).
cggtttgctagaaatagca

SEQ ID NO: 542346 - DNA, 19 bp, Mus musculus
  siRNA target sequence for Zfp131 (NM_028245.1,1082-1100).
ctggagtaggagcaaaaaa

SEQ ID NO: 542347 - DNA, 19 bp, Mus musculus
  siRNA target sequence for Zfp131 (NM_028245.1,1149-1167).
cagctgggaccagttcaaa

SEQ ID NO: 542348 - DNA, 19 bp, Mus musculus
  siRNA target sequence for Zfp131 (NM_028245.1,1152-1170).
ctgggaccagttcaaagat

SEQ ID NO: 542349 - DNA, 19 bp, Mus musculus
  siRNA target sequence for Zfp131 (NM_028245.1,1189-1207).
ggagataaacccaaccatt

SEQ ID NO: 542350 - DNA, 19 bp, Mus musculus
  siRNA target sequence for Zfp131 (NM_028245.1,1192-1210).
gataaacccaaccattgta

SEQ ID NO: 542351 - DNA, 19 bp, Mus musculus
  siRNA target sequence for Zfp131 (NM_028245.1,1224-1242).
gtggtttatgcaaggaaat

SEQ ID NO: 542352 - DNA, 19 bp, Mus musculus
  siRNA target sequence for Zfp131 (NM_028245.1,1243-1261).
gaattacggaggcatctta

SEQ ID NO: 542353 - DNA, 19 bp, Mus musculus
  siRNA target sequence for Zfp131 (NM_028245.1,1258-1276).
cttagtgatgctcacaata

SEQ ID NO: 542354 - DNA, 19 bp, Mus musculus
  siRNA target sequence for Zfp131 (NM_028245.1,1280-1298).
cagagcgtatagtaactga

SEQ ID NO: 542355 - DNA, 19 bp, Mus musculus
  siRNA target sequence for Zfp131 (NM_028245.1,1284-1302).
gcgtatagtaactgaagaa

SEQ ID NO: 542356 - DNA, 19 bp, Mus musculus
  siRNA target sequence for Zfp131 (NM_028245.1,1300-1318).
gaagtcctttcagtagaaa

SEQ ID NO: 542357 - DNA, 19 bp, Mus musculus
  siRNA target sequence for Zfp131 (NM_028245.1,1305-1323).
cctttcagtagaaacacat

SEQ ID NO: 542358 - DNA, 19 bp, Mus musculus
  siRNA target sequence for Zfp131 (NM_028245.1,1335-1353).
gccagtgacatcaatgact

SEQ ID NO: 542359 - DNA, 19 bp, Mus musculus
  siRNA target sequence for Zfp131 (NM_028245.1,1339-1357).
gtgacatcaatgactatta

SEQ ID NO: 542360 - DNA, 19 bp, Mus musculus
  siRNA target sequence for Zfp131 (NM_028245.1,1405-1423).
gtggattccgcacaagtaa

SEQ ID NO: 542361 - DNA, 19 bp, Mus musculus
  siRNA target sequence for Zfp131 (NM_028245.1,1456-1474).
gacagccaagtgcatgatt

SEQ ID NO: 542362 - DNA, 19 bp, Mus musculus
  siRNA target sequence for Zfp131 (NM_028245.1,1462-1480).
caagtgcatgattcacaaa

SEQ ID NO: 542363 - DNA, 19 bp, Mus musculus
  siRNA target sequence for Zfp131 (NM_028245.1,1576-1594).
gttgaacgggtaaatcaga

SEQ ID NO: 542364 - DNA, 19 bp, Mus musculus
  siRNA target sequence for Zfp131 (NM_028245.1,1723-1741).
gggttagagaccaaaccaa

SEQ ID NO: 542365 - DNA, 19 bp, Mus musculus
  siRNA target sequence for Zfp131 (NM_028245.1,1779-1797).
gacatctctgccggtttta

SEQ ID NO: 542366 - DNA, 19 bp, Mus musculus
  siRNA target sequence for Zfp131 (NM_028245.1,1781-1799).
catctctgccggttttaga

SEQ ID NO: 542367 - DNA, 19 bp, Mus musculus
  siRNA target sequence for Zfp259 (NM_011752.1,189-207).
ccctcagcgccgaagatga

SEQ ID NO: 542368 - DNA, 19 bp, Mus musculus
  siRNA target sequence for Zfp259 (NM_011752.1,230-248).
gagtcactgtgcatgaact

SEQ ID NO: 542369 - DNA, 19 bp, Mus musculus
  siRNA target sequence for Zfp259 (NM_011752.1,234-252).
cactgtgcatgaactgtta

SEQ ID NO: 542370 - DNA, 19 bp, Mus musculus
  siRNA target sequence for Zfp259 (NM_011752.1,280-298).
caccaagatccccttcttt

SEQ ID NO: 542371 - DNA, 19 bp, Mus musculus
  siRNA target sequence for Zfp259 (NM_011752.1,286-304).
gatccccttctttagagaa

SEQ ID NO: 542372 - DNA, 19 bp, Mus musculus
  siRNA target sequence for Zfp259 (NM_011752.1,465-483).
ggatccccgagctggattt

SEQ ID NO: 542373 - DNA, 19 bp, Mus musculus
  siRNA target sequence for Zfp259 (NM_011752.1,607-625).
gagaattgatgagttcatt

SEQ ID NO: 542374 - DNA, 19 bp, Mus musculus
  siRNA target sequence for Zfp259 (NM_011752.1,736-754).
cttggtgatcacatactat

SEQ ID NO: 542375 - DNA, 19 bp, Mus musculus
  siRNA target sequence for Zfp259 (NM_011752.1,842-860).
gtgctccagttcaacacta

SEQ ID NO: 542376 - DNA, 19 bp, Mus musculus
  siRNA target sequence for Zfp259 (NM_011752.1,845-863).
ctccagttcaacactaact

SEQ ID NO: 542377 - DNA, 19 bp, Mus musculus
  siRNA target sequence for Zfp259 (NM_011752.1,881-899).
ccggctcagaccaacatga

SEQ ID NO: 542378 - DNA, 19 bp, Mus musculus
  siRNA target sequence for Zfp259 (NM_011752.1,882-900).
cggctcagaccaacatgaa

SEQ ID NO: 542379 - DNA, 19 bp, Mus musculus
  siRNA target sequence for Zfp259 (NM_011752.1,905-923).
gtccaaatcccccacttta

SEQ ID NO: 542380 - DNA, 19 bp, Mus musculus
  siRNA target sequence for Zfp259 (NM_011752.1,1288-1306).
ggcccactttatcatgaat

SEQ ID NO: 542381 - DNA, 19 bp, Mus musculus
  siRNA target sequence for Zfp259 (NM_011752.1,1291-1309).
ccactttatcatgaatgat

SEQ ID NO: 542382 - DNA, 19 bp, Mus musculus
  siRNA target sequence for Zfp259 (NM_011752.1,1366-1384).
gaaggtcgagcggtacaaa

SEQ ID NO: 542383 - DNA, 19 bp, Mus musculus
  siRNA target sequence for Zfp259 (NM_011752.1,1406-1424).
gagctcgggctcaatgaca

SEQ ID NO: 542384 - DNA, 19 bp, Mus musculus
  siRNA target sequence for Zfp295 (NM_175428.2,296-314).
cagcgggctcacaaacact

SEQ ID NO: 542385 - DNA, 19 bp, Mus musculus
  siRNA target sequence for Zfp295 (NM_175428.2,371-389).
ggactgctgcattacatca

SEQ ID NO: 542386 - DNA, 19 bp, Mus musculus
  siRNA target sequence for Zfp295 (NM_175428.2,453-471).
gtgacgtgctcctgattgt

SEQ ID NO: 542387 - DNA, 19 bp, Mus musculus
  siRNA target sequence for Zfp295 (NM_175428.2,519-537).
gtgagtacttccagagttt

SEQ ID NO: 542388 - DNA, 19 bp, Mus musculus
  siRNA target sequence for Zfp295 (NM_175428.2,534-552).
gtttattcacgaataagga

SEQ ID NO: 542389 - DNA, 19 bp, Mus musculus
  siRNA target sequence for Zfp295 (NM_175428.2,588-606).
gtgagcctgacgcttttga

SEQ ID NO: 542390 - DNA, 19 bp, Mus musculus
  siRNA target sequence for Zfp295 (NM_175428.2,590-608).
gagcctgacgcttttgaca

SEQ ID NO: 542391 - DNA, 19 bp, Mus musculus
  siRNA target sequence for Zfp295 (NM_175428.2,605-623).
gacaacgttctgaactaca

SEQ ID NO: 542392 - DNA, 19 bp, Mus musculus
  siRNA target sequence for Zfp295 (NM_175428.2,750-768).
gtcccaacaggaaaagagt

SEQ ID NO: 542393 - DNA, 19 bp, Mus musculus
  siRNA target sequence for Zfp295 (NM_175428.2,946-964).
gccagagcagcttcatagt

SEQ ID NO: 542394 - DNA, 19 bp, Mus musculus
  siRNA target sequence for Zfp295 (NM_175428.2,948-966).
cagagcagcttcatagtct

SEQ ID NO: 542395 - DNA, 19 bp, Mus musculus
  siRNA target sequence for Zfp295 (NM_175428.2,965-983).
ctgcccttaactgaaaaga

SEQ ID NO: 542396 - DNA, 19 bp, Mus musculus
  siRNA target sequence for Zfp295 (NM_175428.2,1035-1053).
gggctttggatgatcctaa

SEQ ID NO: 542397 - DNA, 19 bp, Mus musculus
  siRNA target sequence for Zfp295 (NM_175428.2,1227-1245).
ctccatatctcctaaaaga

SEQ ID NO: 542398 - DNA, 19 bp, Mus musculus
  siRNA target sequence for Zfp295 (NM_175428.2,1285-1303).
gctctactactctaagcta

SEQ ID NO: 542399 - DNA, 19 bp, Mus musculus
  siRNA target sequence for Zfp295 (NM_175428.2,1425-1443).
ccccctccatagatttgaa

SEQ ID NO: 542400 - DNA, 19 bp, Mus musculus
  siRNA target sequence for Zfp295 (NM_175428.2,1458-1476).
catccacagcggcaaatga

SEQ ID NO: 542401 - DNA, 19 bp, Mus musculus
  siRNA target sequence for Zfp295 (NM_175428.2,1787-1805).
gaagaccagagagatatga

SEQ ID NO: 542402 - DNA, 19 bp, Mus musculus
  siRNA target sequence for Zfp295 (NM_175428.2,1989-2007).
ggacgagaccaaacaaaaa

SEQ ID NO: 542403 - DNA, 19 bp, Mus musculus
  siRNA target sequence for Zfp295 (NM_175428.2,2017-2035).
caaacattgccttaagatt

SEQ ID NO: 542404 - DNA, 19 bp, Mus musculus
  siRNA target sequence for Zfp295 (NM_175428.2,2026-2044).
ccttaagatttttagatca

SEQ ID NO: 542405 - DNA, 19 bp, Mus musculus
  siRNA target sequence for Zfp295 (NM_175428.2,2027-2045).
cttaagatttttagatcaa

SEQ ID NO: 542406 - DNA, 19 bp, Mus musculus
  siRNA target sequence for Zfp295 (NM_175428.2,2052-2070).
gtcttcaccgccatgttaa

SEQ ID NO: 542407 - DNA, 19 bp, Mus musculus
  siRNA target sequence for Zfp295 (NM_175428.2,2054-2072).
cttcaccgccatgttaaca

SEQ ID NO: 542408 - DNA, 19 bp, Mus musculus
  siRNA target sequence for Zfp295 (NM_175428.2,2057-2075).
caccgccatgttaacatgt

SEQ ID NO: 542409 - DNA, 19 bp, Mus musculus
  siRNA target sequence for Zfp295 (NM_175428.2,2063-2081).
catgttaacatgtaccata

SEQ ID NO: 542410 - DNA, 19 bp, Mus musculus
  siRNA target sequence for Zfp295 (NM_175428.2,2160-2178).
cccaacacggcatagtgaa

SEQ ID NO: 542411 - DNA, 19 bp, Mus musculus
  siRNA target sequence for Zfp295 (NM_175428.2,2423-2441).
cagtttaagcagcacataa

SEQ ID NO: 542412 - DNA, 19 bp, Mus musculus
  siRNA target sequence for Zfp295 (NM_175428.2,2536-2554).
cccgtgccgcctctgtaat

SEQ ID NO: 542413 - DNA, 19 bp, Mus musculus
  siRNA target sequence for Zfp295 (NM_175428.2,2539-2557).
gtgccgcctctgtaatgct

SEQ ID NO: 542414 - DNA, 19 bp, Mus musculus
  siRNA target sequence for Zfp295 (NM_175428.2,2541-2559).
gccgcctctgtaatgctaa

SEQ ID NO: 542415 - DNA, 19 bp, Mus musculus
  siRNA target sequence for Zfp295 (NM_175428.2,2671-2689).
ggacaggtgtgagtacaaa

SEQ ID NO: 542416 - DNA, 19 bp, Mus musculus
  siRNA target sequence for Zfp295 (NM_175428.2,2676-2694).
ggtgtgagtacaaaaagct

SEQ ID NO: 542417 - DNA, 19 bp, Mus musculus
  siRNA target sequence for Zfp295 (NM_175428.2,2770-2788).
gaacaacatggctttagca

SEQ ID NO: 542418 - DNA, 19 bp, Mus musculus
  siRNA target sequence for Zfp295 (NM_175428.2,2957-2975).
cctgaagacttgagtcttt

SEQ ID NO: 542419 - DNA, 19 bp, Mus musculus
  siRNA target sequence for Zfp295 (NM_175428.2,3098-3116).
gagaaatgcggaaagatgt

SEQ ID NO: 542420 - DNA, 19 bp, Mus musculus
  siRNA target sequence for Zfp295 (NM_175428.2,3178-3196).
ctgccacgtatgctacaaa

SEQ ID NO: 542421 - DNA, 19 bp, Mus musculus
  siRNA target sequence for Zfp295 (NM_175428.2,3262-3280).
gcctgtgcagaaagaatca

SEQ ID NO: 542422 - DNA, 19 bp, Mus musculus
  siRNA target sequence for Zfp295 (NM_175428.2,3335-3353).
gccacccttgcccaagatt

SEQ ID NO: 542423 - DNA, 19 bp, Mus musculus
  siRNA target sequence for Zfp295 (NM_175428.2,3337-3355).
cacccttgcccaagattca

SEQ ID NO: 542424 - DNA, 19 bp, Mus musculus
  siRNA target sequence for Zfp336 (NM_028986.1,162-180).
gtgatgtcactgttagcat

SEQ ID NO: 542425 - DNA, 19 bp, Mus musculus
  siRNA target sequence for Zfp336 (NM_028986.1,167-185).
gtcactgttagcatagaga

SEQ ID NO: 542426 - DNA, 19 bp, Mus musculus
  siRNA target sequence for Zfp336 (NM_028986.1,192-210).
gtgtccatgaagacttcat

SEQ ID NO: 542427 - DNA, 19 bp, Mus musculus
  siRNA target sequence for Zfp336 (NM_028986.1,205-223).
cttcatggcccataaagca

SEQ ID NO: 542428 - DNA, 19 bp, Mus musculus
  siRNA target sequence for Zfp336 (NM_028986.1,233-251).
gccaccagcaagtttttta

SEQ ID NO: 542429 - DNA, 19 bp, Mus musculus
  siRNA target sequence for Zfp336 (NM_028986.1,284-302).
ggaaccaggactaatgttt

SEQ ID NO: 542430 - DNA, 19 bp, Mus musculus
  siRNA target sequence for Zfp336 (NM_028986.1,288-306).
ccaggactaatgtttactt

SEQ ID NO: 542431 - DNA, 19 bp, Mus musculus
  siRNA target sequence for Zfp336 (NM_028986.1,294-312).
ctaatgtttacttgaatga

SEQ ID NO: 542432 - DNA, 19 bp, Mus musculus
  siRNA target sequence for Zfp336 (NM_028986.1,317-335).
caggctgttgactttgctt

SEQ ID NO: 542433 - DNA, 19 bp, Mus musculus
  siRNA target sequence for Zfp336 (NM_028986.1,333-351).
cttcgtttctggagtttgt

SEQ ID NO: 542434 - DNA, 19 bp, Mus musculus
  siRNA target sequence for Zfp336 (NM_028986.1,337-355).
gtttctggagtttgtctat

SEQ ID NO: 542435 - DNA, 19 bp, Mus musculus
  siRNA target sequence for Zfp336 (NM_028986.1,361-379).
caaagtgcgggtagaagaa

SEQ ID NO: 542436 - DNA, 19 bp, Mus musculus
  siRNA target sequence for Zfp336 (NM_028986.1,484-502).
ggaattgcagaatttctct

SEQ ID NO: 542437 - DNA, 19 bp, Mus musculus
  siRNA target sequence for Zfp336 (NM_028986.1,553-571).
cagctccaaagcaagtgta

SEQ ID NO: 542438 - DNA, 19 bp, Mus musculus
  siRNA target sequence for Zfp336 (NM_028986.1,609-627).
cctccgactacccaataga

SEQ ID NO: 542439 - DNA, 19 bp, Mus musculus
  siRNA target sequence for Zfp336 (NM_028986.1,653-671).
gaaacaccatccaagaagt

SEQ ID NO: 542440 - DNA, 19 bp, Mus musculus
  siRNA target sequence for Zfp336 (NM_028986.1,827-845).
gaagccgcagagaatgaca

SEQ ID NO: 542441 - DNA, 19 bp, Mus musculus
  siRNA target sequence for Zfp336 (NM_028986.1,856-874).
ggaccaaagcccagacaat

SEQ ID NO: 542442 - DNA, 19 bp, Mus musculus
  siRNA target sequence for Zfp336 (NM_028986.1,860-878).
caaagcccagacaatgaga

SEQ ID NO: 542443 - DNA, 19 bp, Mus musculus
  siRNA target sequence for Zfp336 (NM_028986.1,1187-1205).
cgccacttcccgtgtgaaa

SEQ ID NO: 542444 - DNA, 19 bp, Mus musculus
  siRNA target sequence for Zfp336 (NM_028986.1,1188-1206).
gccacttcccgtgtgaaat

SEQ ID NO: 542445 - DNA, 19 bp, Mus musculus
  siRNA target sequence for Zfp336 (NM_028986.1,1202-1220).
gaaatgtgtgccaagaagt

SEQ ID NO: 542446 - DNA, 19 bp, Mus musculus
  siRNA target sequence for Zfp336 (NM_028986.1,1216-1234).
gaagttcaaacgcaagaaa

SEQ ID NO: 542447 - DNA, 19 bp, Mus musculus
  siRNA target sequence for Zfp336 (NM_028986.1,1219-1237).
gttcaaacgcaagaaagat

SEQ ID NO: 542448 - DNA, 19 bp, Mus musculus
  siRNA target sequence for Zfp336 (NM_028986.1,1437-1455).
caggggaaagaccttttgt

SEQ ID NO: 542449 - DNA, 19 bp, Mus musculus
  siRNA target sequence for Zfp336 (NM_028986.1,1490-1508).
cacatgctgatttatcata

SEQ ID NO: 542450 - DNA, 19 bp, Mus musculus
  siRNA target sequence for Zfp336 (NM_028986.1,1492-1510).
catgctgatttatcataaa

SEQ ID NO: 542451 - DNA, 19 bp, Mus musculus
  siRNA target sequence for Zfp336 (NM_028986.1,1546-1564).
gacatgtggcaagagtttt

SEQ ID NO: 542452 - DNA, 19 bp, Mus musculus
  siRNA target sequence for Zfp336 (NM_028986.1,1554-1572).
gcaagagttttgcttctaa

SEQ ID NO: 542453 - DNA, 19 bp, Mus musculus
  siRNA target sequence for Zfp336 (NM_028986.1,1565-1583).
gcttctaaggagtacttaa

SEQ ID NO: 542454 - DNA, 19 bp, Mus musculus
  siRNA target sequence for Zfp336 (NM_028986.1,1566-1584).
cttctaaggagtacttaaa

SEQ ID NO: 542455 - DNA, 19 bp, Mus musculus
  siRNA target sequence for Zfp336 (NM_028986.1,1690-1708).
gggagagcggccttattgt

SEQ ID NO: 542456 - DNA, 19 bp, Mus musculus
  siRNA target sequence for Zfp336 (NM_028986.1,1799-1817).
gcatgtggacggactttta

SEQ ID NO: 542457 - DNA, 19 bp, Mus musculus
  siRNA target sequence for Zfp336 (NM_028986.1,1803-1821).
gtggacggacttttactga

SEQ ID NO: 542458 - DNA, 19 bp, Mus musculus
  siRNA target sequence for Zfp336 (NM_028986.1,1834-1852).
ccggaggcatacctcaata

SEQ ID NO: 542459 - DNA, 19 bp, Mus musculus
  siRNA target sequence for Zfp336 (NM_028986.1,1836-1854).
ggaggcatacctcaataca

SEQ ID NO: 542460 - DNA, 19 bp, Mus musculus
  siRNA target sequence for Zfp336 (NM_028986.1,1839-1857).
ggcatacctcaatacatga

SEQ ID NO: 542461 - DNA, 19 bp, Mus musculus
  siRNA target sequence for Zfp336 (NM_028986.1,1841-1859).
catacctcaatacatgata

SEQ ID NO: 542462 - DNA, 19 bp, Mus musculus
  siRNA target sequence for Zfp336 (NM_028986.1,1876-1894).
gtctttccttgtcattgta

SEQ ID NO: 542463 - DNA, 19 bp, Mus musculus
  siRNA target sequence for Zfp336 (NM_028986.1,1929-1947).
cagaacaacccgatgatga

SEQ ID NO: 542464 - DNA, 19 bp, Mus musculus
  siRNA target sequence for Zfp336 (NM_028986.1,1931-1949).
gaacaacccgatgatgaat

SEQ ID NO: 542465 - DNA, 19 bp, Mus musculus
  siRNA target sequence for Zfp336 (NM_028986.1,1959-1977).
ccaaactttcagatcgatt

SEQ ID NO: 542466 - DNA, 19 bp, Mus musculus
  siRNA target sequence for Zfp336 (NM_028986.1,1960-1978).
caaactttcagatcgatta

SEQ ID NO: 542467 - DNA, 19 bp, Mus musculus
  siRNA target sequence for Zfp336 (NM_028986.1,1968-1986).
cagatcgattactatcttt

SEQ ID NO: 542468 - DNA, 19 bp, Mus musculus
  siRNA target sequence for Zfp336 (NM_028986.1,1991-2009).
gaaaatagccatttcaaca

SEQ ID NO: 542469 - DNA, 19 bp, Mus musculus
  siRNA target sequence for Zfp336 (NM_028986.1,1998-2016).
gccatttcaacaacttact

SEQ ID NO: 542470 - DNA, 19 bp, Mus musculus
  siRNA target sequence for Zfp336 (NM_028986.1,2165-2183).
cttccctccttgaccaata

SEQ ID NO: 542471 - DNA, 19 bp, Mus musculus
  siRNA target sequence for Zfp336 (NM_028986.1,2169-2187).
cctccttgaccaatatgga

SEQ ID NO: 542472 - DNA, 19 bp, Mus musculus
  siRNA target sequence for Zp3r (NM_009581.1,109-127).
gagaacctctcattcaact

SEQ ID NO: 542473 - DNA, 19 bp, Mus musculus
  siRNA target sequence for Zp3r (NM_009581.1,119-137).
cattcaactctgttccaaa

SEQ ID NO: 542474 - DNA, 19 bp, Mus musculus
  siRNA target sequence for Zp3r (NM_009581.1,210-228).
ctccaaccaaccagttgta

SEQ ID NO: 542475 - DNA, 19 bp, Mus musculus
  siRNA target sequence for Zp3r (NM_009581.1,213-231).
caaccaaccagttgtatga

SEQ ID NO: 542476 - DNA, 19 bp, Mus musculus
  siRNA target sequence for Zp3r (NM_009581.1,251-269).
ggaactgtcctgaaatata

SEQ ID NO: 542477 - DNA, 19 bp, Mus musculus
  siRNA target sequence for Zp3r (NM_009581.1,281-299).
ggcttcaagagagtcaatt

SEQ ID NO: 542478 - DNA, 19 bp, Mus musculus
  siRNA target sequence for Zp3r (NM_009581.1,295-313).
caattcaagccatctttct

SEQ ID NO: 542479 - DNA, 19 bp, Mus musculus
  siRNA target sequence for Zp3r (NM_009581.1,334-352).
ggtctatagtaccttttgt

SEQ ID NO: 542480 - DNA, 19 bp, Mus musculus
  siRNA target sequence for Zp3r (NM_009581.1,385-403).
ggtcaatgggaaagtagaa

SEQ ID NO: 542481 - DNA, 19 bp, Mus musculus
  siRNA target sequence for Zp3r (NM_009581.1,388-406).
caatgggaaagtagaaatt

SEQ ID NO: 542482 - DNA, 19 bp, Mus musculus
  siRNA target sequence for Zp3r (NM_009581.1,416-434).
cttttggtaggctcaatca

SEQ ID NO: 542483 - DNA, 19 bp, Mus musculus
  siRNA target sequence for Zp3r (NM_009581.1,422-440).
gtaggctcaatcatagagt

SEQ ID NO: 542484 - DNA, 19 bp, Mus musculus
  siRNA target sequence for Zp3r (NM_009581.1,447-465).
gctcaaagggctatcttct

SEQ ID NO: 542485 - DNA, 19 bp, Mus musculus
  siRNA target sequence for Zp3r (NM_009581.1,466-484).
gattggctcagcaactagt

SEQ ID NO: 542486 - DNA, 19 bp, Mus musculus
  siRNA target sequence for Zp3r (NM_009581.1,486-504).
ggtgtgaggtccaaggtaa

SEQ ID NO: 542487 - DNA, 19 bp, Mus musculus
  siRNA target sequence for Zp3r (NM_009581.1,487-505).
gtgtgaggtccaaggtaaa

SEQ ID NO: 542488 - DNA, 19 bp, Mus musculus
  siRNA target sequence for Zp3r (NM_009581.1,662-680).
ggcaatgcctccattgtct

SEQ ID NO: 542489 - DNA, 19 bp, Mus musculus
  siRNA target sequence for Zp3r (NM_009581.1,726-744).
ctgcctgtcaaaaaatcgt

SEQ ID NO: 542490 - DNA, 19 bp, Mus musculus
  siRNA target sequence for Zp3r (NM_009581.1,775-793).
cttggcccctggatttcga

SEQ ID NO: 542491 - DNA, 19 bp, Mus musculus
  siRNA target sequence for Zp3r (NM_009581.1,783-801).
ctggatttcgacagttcta

SEQ ID NO: 542492 - DNA, 19 bp, Mus musculus
  siRNA target sequence for Zp3r (NM_009581.1,827-845).
cgatgcaagaagggtttta

SEQ ID NO: 542493 - DNA, 19 bp, Mus musculus
  siRNA target sequence for Zp3r (NM_009581.1,918-936).
ccaatggttgtaccaatat

SEQ ID NO: 542494 - DNA, 19 bp, Mus musculus
  siRNA target sequence for Zp3r (NM_009581.1,927-945).
gtaccaatataccagatat

SEQ ID NO: 542495 - DNA, 19 bp, Mus musculus
  siRNA target sequence for Zp3r (NM_009581.1,954-972).
cttcctgggagggatataa

SEQ ID NO: 542496 - DNA, 19 bp, Mus musculus
  siRNA target sequence for Zp3r (NM_009581.1,962-980).
gagggatataagtttccat

SEQ ID NO: 542497 - DNA, 19 bp, Mus musculus
  siRNA target sequence for Zp3r (NM_009581.1,964-982).
gggatataagtttccatta

SEQ ID NO: 542498 - DNA, 19 bp, Mus musculus
  siRNA target sequence for Zp3r (NM_009581.1,965-983).
ggatataagtttccattaa

SEQ ID NO: 542499 - DNA, 19 bp, Mus musculus
  siRNA target sequence for Zp3r (NM_009581.1,1037-1055).
ggttatcgagcaagtctta

SEQ ID NO: 542500 - DNA, 19 bp, Mus musculus
  siRNA target sequence for Zp3r (NM_009581.1,1038-1056).
gttatcgagcaagtcttaa

SEQ ID NO: 542501 - DNA, 19 bp, Mus musculus
  siRNA target sequence for Zp3r (NM_009581.1,1088-1106).
ctgacttggtcatctacta

SEQ ID NO: 542502 - DNA, 19 bp, Mus musculus
  siRNA target sequence for Zp3r (NM_009581.1,1090-1108).
gacttggtcatctactaat

SEQ ID NO: 542503 - DNA, 19 bp, Mus musculus
  siRNA target sequence for Zp3r (NM_009581.1,1104-1122).
ctaatggatgtgaaaggat

SEQ ID NO: 542504 - DNA, 19 bp, Mus musculus
  siRNA target sequence for Zp3r (NM_009581.1,1381-1399).
gacaaacaaaacctatcta

SEQ ID NO: 542505 - DNA, 19 bp, Mus musculus
  siRNA target sequence for Zp3r (NM_009581.1,1383-1401).
caaacaaaacctatctatt

SEQ ID NO: 542506 - DNA, 19 bp, Mus musculus
  siRNA target sequence for Zp3r (NM_009581.1,1387-1405).
caaaacctatctatttggt

SEQ ID NO: 542507 - DNA, 19 bp, Mus musculus
  siRNA target sequence for Zp3r (NM_009581.1,1403-1421).
ggtcatgaagaaaactcaa

SEQ ID NO: 542508 - DNA, 19 bp, Mus musculus
  siRNA target sequence for Zp3r (NM_009581.1,1440-1458).
gtgtgtgtctcaaaccaat

SEQ ID NO: 542509 - DNA, 19 bp, Mus musculus
  siRNA target sequence for Zp3r (NM_009581.1,1448-1466).
ctcaaaccaatggtcataa

SEQ ID NO: 542510 - DNA, 19 bp, Mus musculus
  siRNA target sequence for Zp3r (NM_009581.1,1450-1468).
caaaccaatggtcataaat

SEQ ID NO: 542511 - DNA, 19 bp, Mus musculus
  siRNA target sequence for Zp3r (NM_009581.1,1454-1472).
ccaatggtcataaatggaa

SEQ ID NO: 542512 - DNA, 19 bp, Mus musculus
  siRNA target sequence for Zp3r (NM_009581.1,1618-1636).
cctagaagactgcagaata

SEQ ID NO: 542513 - DNA, 19 bp, Mus musculus
  siRNA target sequence for Zp3r (NM_009581.1,1702-1720).
ggtgtacaagctgtttcta

SEQ ID NO: 542514 - DNA, 19 bp, Mus musculus
  siRNA target sequence for Zp3r (NM_009581.1,1731-1749).
gattggaacatcagaaaga

SEQ ID NO: 542515 - DNA, 19 bp, Mus musculus
  siRNA target sequence for Zp3r (NM_009581.1,1775-1793).
cctcagtctatgaaaatta

SEQ ID NO: 542516 - DNA, 19 bp, Mus musculus
  siRNA target sequence for Zp3r (NM_009581.1,1778-1796).
cagtctatgaaaattaata

SEQ ID NO: 542517 - DNA, 19 bp, Mus musculus
  siRNA target sequence for Zp3r (NM_009581.1,1797-1815).
ggtcatttagactttgcaa

SEQ ID NO: 542518 - DNA, 19 bp, Mus musculus
  siRNA target sequence for Calr (NM_007591.2,119-137).
cagaccctgccatctattt

SEQ ID NO: 542519 - DNA, 19 bp, Mus musculus
  siRNA target sequence for Calr (NM_007591.2,121-139).
gaccctgccatctatttca

SEQ ID NO: 542520 - DNA, 19 bp, Mus musculus
  siRNA target sequence for Calr (NM_007591.2,174-192).
ccgctgggtcgaatccaaa

SEQ ID NO: 542521 - DNA, 19 bp, Mus musculus
  siRNA target sequence for Calr (NM_007591.2,177-195).
ctgggtcgaatccaaacat

SEQ ID NO: 542522 - DNA, 19 bp, Mus musculus
  siRNA target sequence for Calr (NM_007591.2,179-197).
gggtcgaatccaaacataa

SEQ ID NO: 542523 - DNA, 19 bp, Mus musculus
  siRNA target sequence for Calr (NM_007591.2,181-199).
gtcgaatccaaacataagt

SEQ ID NO: 542524 - DNA, 19 bp, Mus musculus
  siRNA target sequence for Calr (NM_007591.2,200-218).
ccgattttggcaaatttgt

SEQ ID NO: 542525 - DNA, 19 bp, Mus musculus
  siRNA target sequence for Calr (NM_007591.2,275-293).
gccaagatgcccgatttta

SEQ ID NO: 542526 - DNA, 19 bp, Mus musculus
  siRNA target sequence for Calr (NM_007591.2,439-457).
ggagactcagaatataaca

SEQ ID NO: 542527 - DNA, 19 bp, Mus musculus
  siRNA target sequence for Calr (NM_007591.2,440-458).
gagactcagaatataacat

SEQ ID NO: 542528 - DNA, 19 bp, Mus musculus
  siRNA target sequence for Calr (NM_007591.2,442-460).
gactcagaatataacatca

SEQ ID NO: 542529 - DNA, 19 bp, Mus musculus
  siRNA target sequence for Calr (NM_007591.2,446-464).
cagaatataacatcatgtt

SEQ ID NO: 542530 - DNA, 19 bp, Mus musculus
  siRNA target sequence for Calr (NM_007591.2,488-506).
gcaccaagaaggttcatgt

SEQ ID NO: 542531 - DNA, 19 bp, Mus musculus
  siRNA target sequence for Calr (NM_007591.2,532-550).
gtgctgatcaacaaggata

SEQ ID NO: 542532 - DNA, 19 bp, Mus musculus
  siRNA target sequence for Calr (NM_007591.2,546-564).
ggatatccggtgtaaggat

SEQ ID NO: 542533 - DNA, 19 bp, Mus musculus
  siRNA target sequence for Calr (NM_007591.2,552-570).
ccggtgtaaggatgatgaa

SEQ ID NO: 542534 - DNA, 19 bp, Mus musculus
  siRNA target sequence for Calr (NM_007591.2,553-571).
cggtgtaaggatgatgaat

SEQ ID NO: 542535 - DNA, 19 bp, Mus musculus
  siRNA target sequence for Calr (NM_007591.2,568-586).
gaattcacacacctataca

SEQ ID NO: 542536 - DNA, 19 bp, Mus musculus
  siRNA target sequence for Calr (NM_007591.2,891-909).
gtggaaaccacgtcaaatt

SEQ ID NO: 542537 - DNA, 19 bp, Mus musculus
  siRNA target sequence for Calr (NM_007591.2,893-911).
ggaaaccacgtcaaattga

SEQ ID NO: 542538 - DNA, 19 bp, Mus musculus
  siRNA target sequence for Calr3 (NM_029782.1,66-84).
caccccagacagatcaagt

SEQ ID NO: 542539 - DNA, 19 bp, Mus musculus
  siRNA target sequence for Calr3 (NM_029782.1,68-86).
ccccagacagatcaagtta

SEQ ID NO: 542540 - DNA, 19 bp, Mus musculus
  siRNA target sequence for Calr3 (NM_029782.1,107-125).
gatgcttaggacctgatat

SEQ ID NO: 542541 - DNA, 19 bp, Mus musculus
  siRNA target sequence for Canx (NM_007597.2,110-128).
gaagggaagtggttactgt

SEQ ID NO: 542542 - DNA, 19 bp, Mus musculus
  siRNA target sequence for Canx (NM_007597.2,179-197).
gatgatgacgcgattgata

SEQ ID NO: 542543 - DNA, 19 bp, Mus musculus
  siRNA target sequence for Canx (NM_007597.2,187-205).
cgcgattgatattgaagat

SEQ ID NO: 542544 - DNA, 19 bp, Mus musculus
  siRNA target sequence for Canx (NM_007597.2,227-245).
gaggtagaagattcaaaat

SEQ ID NO: 542545 - DNA, 19 bp, Mus musculus
  siRNA target sequence for Canx (NM_007597.2,229-247).
ggtagaagattcaaaatct

SEQ ID NO: 542546 - DNA, 19 bp, Mus musculus
  siRNA target sequence for Canx (NM_007597.2,345-363).
ctctgtcagggtggatttt

SEQ ID NO: 542547 - DNA, 19 bp, Mus musculus
  siRNA target sequence for Canx (NM_007597.2,347-365).
ctgtcagggtggattttat

SEQ ID NO: 542548 - DNA, 19 bp, Mus musculus
  siRNA target sequence for Canx (NM_007597.2,497-515).
gccatctctgctaaactga

SEQ ID NO: 542549 - DNA, 19 bp, Mus musculus
  siRNA target sequence for Canx (NM_007597.2,551-569).
gttcagtatgaggttaatt

SEQ ID NO: 542550 - DNA, 19 bp, Mus musculus
  siRNA target sequence for Canx (NM_007597.2,563-581).
gttaattttcagaatggaa

SEQ ID NO: 542551 - DNA, 19 bp, Mus musculus
  siRNA target sequence for Canx (NM_007597.2,649-667).
cgacaagactccctatact

SEQ ID NO: 542552 - DNA, 19 bp, Mus musculus
  siRNA target sequence for Canx (NM_007597.2,652-670).
caagactccctatactatt

SEQ ID NO: 542553 - DNA, 19 bp, Mus musculus
  siRNA target sequence for Canx (NM_007597.2,657-675).
ctccctatactattatgtt

SEQ ID NO: 542554 - DNA, 19 bp, Mus musculus
  siRNA target sequence for Canx (NM_007597.2,735-753).
ccaagacaggtgtatatga

SEQ ID NO: 542555 - DNA, 19 bp, Mus musculus
  siRNA target sequence for Canx (NM_007597.2,736-754).
caagacaggtgtatatgaa

SEQ ID NO: 542556 - DNA, 19 bp, Mus musculus
  siRNA target sequence for Canx (NM_007597.2,779-797).
gcagatctgaagacctatt

SEQ ID NO: 542557 - DNA, 19 bp, Mus musculus
  siRNA target sequence for Canx (NM_007597.2,780-798).
cagatctgaagacctattt

SEQ ID NO: 542558 - DNA, 19 bp, Mus musculus
  siRNA target sequence for Canx (NM_007597.2,782-800).
gatctgaagacctatttca

SEQ ID NO: 542559 - DNA, 19 bp, Mus musculus
  siRNA target sequence for Canx (NM_007597.2,808-826).
gaaaacgcatctttataca

SEQ ID NO: 542560 - DNA, 19 bp, Mus musculus
  siRNA target sequence for Canx (NM_007597.2,813-831).
cgcatctttatacattaat

SEQ ID NO: 542561 - DNA, 19 bp, Mus musculus
  siRNA target sequence for Canx (NM_007597.2,818-836).
ctttatacattaatcttga

SEQ ID NO: 542562 - DNA, 19 bp, Mus musculus
  siRNA target sequence for Canx (NM_007597.2,832-850).
cttgaatccagacaatagt

SEQ ID NO: 542563 - DNA, 19 bp, Mus musculus
  siRNA target sequence for Canx (NM_007597.2,924-942).
cttcacgtgaaattgaaga

SEQ ID NO: 542564 - DNA, 19 bp, Mus musculus
  siRNA target sequence for Canx (NM_007597.2,1025-1043).
gaagacgccccttctaaga

SEQ ID NO: 542565 - DNA, 19 bp, Mus musculus
  siRNA target sequence for Canx (NM_007597.2,1082-1100).
gacgacgaacctgagtata

SEQ ID NO: 542566 - DNA, 19 bp, Mus musculus
  siRNA target sequence for Canx (NM_007597.2,1084-1102).
cgacgaacctgagtatatt

SEQ ID NO: 542567 - DNA, 19 bp, Mus musculus
  siRNA target sequence for Canx (NM_007597.2,1087-1105).
cgaacctgagtatattcca

SEQ ID NO: 542568 - DNA, 19 bp, Mus musculus
  siRNA target sequence for Canx (NM_007597.2,1215-1233).
ggcagcgacctatgattga

SEQ ID NO: 542569 - DNA, 19 bp, Mus musculus
  siRNA target sequence for Canx (NM_007597.2,1382-1400).
gagctctggtccatgacat

SEQ ID NO: 542570 - DNA, 19 bp, Mus musculus
  siRNA target sequence for Canx (NM_007597.2,1392-1410).
ccatgacatccgacatctt

SEQ ID NO: 542571 - DNA, 19 bp, Mus musculus
  siRNA target sequence for Canx (NM_007597.2,1393-1411).
catgacatccgacatcttt

SEQ ID NO: 542572 - DNA, 19 bp, Mus musculus
  siRNA target sequence for Canx (NM_007597.2,1396-1414).
gacatccgacatctttttt

SEQ ID NO: 542573 - DNA, 19 bp, Mus musculus
  siRNA target sequence for Canx (NM_007597.2,1434-1452).
gtgaccgaagagtagttga

SEQ ID NO: 542574 - DNA, 19 bp, Mus musculus
  siRNA target sequence for Canx (NM_007597.2,1438-1456).
ccgaagagtagttgatgat

SEQ ID NO: 542575 - DNA, 19 bp, Mus musculus
  siRNA target sequence for Canx (NM_007597.2,1439-1457).
cgaagagtagttgatgatt

SEQ ID NO: 542576 - DNA, 19 bp, Mus musculus
  siRNA target sequence for Canx (NM_007597.2,1561-1579).
ggtggtctacattttgact

SEQ ID NO: 542577 - DNA, 19 bp, Mus musculus
  siRNA target sequence for Casq1 (NM_009813.1,440-458).
gttagcagcccaagtctta

SEQ ID NO: 542578 - DNA, 19 bp, Mus musculus
  siRNA target sequence for Casq1 (NM_009813.1,515-533).
caagaaactaggactaact

SEQ ID NO: 542579 - DNA, 19 bp, Mus musculus
  siRNA target sequence for Casq1 (NM_009813.1,537-555).
gaagacagcgtttatgtgt

SEQ ID NO: 542580 - DNA, 19 bp, Mus musculus
  siRNA target sequence for Casq1 (NM_009813.1,576-594).
gaatatgacggcgagtttt

SEQ ID NO: 542581 - DNA, 19 bp, Mus musculus
  siRNA target sequence for Casq1 (NM_009813.1,638-656).
ccctgtagagttgattgaa

SEQ ID NO: 542582 - DNA, 19 bp, Mus musculus
  siRNA target sequence for Casq1 (NM_009813.1,671-689).
gcaggcatttgagaatatt

SEQ ID NO: 542583 - DNA, 19 bp, Mus musculus
  siRNA target sequence for Casq1 (NM_009813.1,824-842).
gctgactctgaagttgaat

SEQ ID NO: 542584 - DNA, 19 bp, Mus musculus
  siRNA target sequence for Casq1 (NM_009813.1,1109-1127).
cagtatcatctggattgat

SEQ ID NO: 542585 - DNA, 19 bp, Mus musculus
  siRNA target sequence for Casq1 (NM_009813.1,1181-1199).
cctgtcagctccacaaata

SEQ ID NO: 542586 - DNA, 19 bp, Mus musculus
  siRNA target sequence for Casq1 (NM_009813.1,1184-1202).
gtcagctccacaaatagga

SEQ ID NO: 542587 - DNA, 19 bp, Mus musculus
  siRNA target sequence for Casq1 (NM_009813.1,1192-1210).
cacaaataggagttgtcaa

SEQ ID NO: 542588 - DNA, 19 bp, Mus musculus
  siRNA target sequence for Casq1 (NM_009813.1,1201-1219).
gagttgtcaatgttacaga

SEQ ID NO: 542589 - DNA, 19 bp, Mus musculus
  siRNA target sequence for Casq2 (NM_009814.1,358-376).
ggtgatcgcacgattgagt

SEQ ID NO: 542590 - DNA, 19 bp, Mus musculus
  siRNA target sequence for Casq2 (NM_009814.1,359-377).
gtgatcgcacgattgagtt

SEQ ID NO: 542591 - DNA, 19 bp, Mus musculus
  siRNA target sequence for Casq2 (NM_009814.1,675-693).
caacgtcatccctaacaaa

SEQ ID NO: 542592 - DNA, 19 bp, Mus musculus
  siRNA target sequence for Casq2 (NM_009814.1,720-738).
gtttgtgaaggaacatcaa

SEQ ID NO: 542593 - DNA, 19 bp, Mus musculus
  siRNA target sequence for Casq2 (NM_009814.1,759-777).
gcgcccagaggacatgttt

SEQ ID NO: 542594 - DNA, 19 bp, Mus musculus
  siRNA target sequence for Casq2 (NM_009814.1,993-1011).
gattggggtggtgaatgta

SEQ ID NO: 542595 - DNA, 19 bp, Mus musculus
  siRNA target sequence for Casq2 (NM_009814.1,1185-1203).
cgatgataatgataattct

SEQ ID NO: 542596 - DNA, 19 bp, Mus musculus
  siRNA target sequence for Clgn (NM_009904.1,279-297).
cggtcaatgcggactttat

SEQ ID NO: 542597 - DNA, 19 bp, Mus musculus
  siRNA target sequence for Clgn (NM_009904.1,283-301).
caatgcggactttatggat

SEQ ID NO: 542598 - DNA, 19 bp, Mus musculus
  siRNA target sequence for Clgn (NM_009904.1,336-354).
cagacgagagtaatattaa

SEQ ID NO: 542599 - DNA, 19 bp, Mus musculus
  siRNA target sequence for Clgn (NM_009904.1,340-358).
cgagagtaatattaaagat

SEQ ID NO: 542600 - DNA, 19 bp, Mus musculus
  siRNA target sequence for Clgn (NM_009904.1,388-406).
gacacctcaacctatagga

SEQ ID NO: 542601 - DNA, 19 bp, Mus musculus
  siRNA target sequence for Clgn (NM_009904.1,395-413).
caacctataggagaagtat

SEQ ID NO: 542602 - DNA, 19 bp, Mus musculus
  siRNA target sequence for Clgn (NM_009904.1,426-444).
catttgatagtggaaatct

SEQ ID NO: 542603 - DNA, 19 bp, Mus musculus
  siRNA target sequence for Clgn (NM_009904.1,643-661).
gatagttcaatatgaagta

SEQ ID NO: 542604 - DNA, 19 bp, Mus musculus
  siRNA target sequence for Clgn (NM_009904.1,687-705).
gaggtgcatacattaaact

SEQ ID NO: 542605 - DNA, 19 bp, Mus musculus
  siRNA target sequence for Clgn (NM_009904.1,710-728).
gcagacactggtgatttga

SEQ ID NO: 542606 - DNA, 19 bp, Mus musculus
  siRNA target sequence for Clgn (NM_009904.1,711-729).
cagacactggtgatttgat

SEQ ID NO: 542607 - DNA, 19 bp, Mus musculus
  siRNA target sequence for Clgn (NM_009904.1,746-764).
gataaaacatcctatacca

SEQ ID NO: 542608 - DNA, 19 bp, Mus musculus
  siRNA target sequence for Clgn (NM_009904.1,753-771).
catcctataccatcatgtt

SEQ ID NO: 542609 - DNA, 19 bp, Mus musculus
  siRNA target sequence for Clgn (NM_009904.1,867-885).
ctccagatgtcgatctgaa

SEQ ID NO: 542610 - DNA, 19 bp, Mus musculus
  siRNA target sequence for Clgn (NM_009904.1,916-934).
ctatacccttgtgatgaat

SEQ ID NO: 542611 - DNA, 19 bp, Mus musculus
  siRNA target sequence for Clgn (NM_009904.1,926-944).
gtgatgaatccggatgata

SEQ ID NO: 542612 - DNA, 19 bp, Mus musculus
  siRNA target sequence for Clgn (NM_009904.1,928-946).
gatgaatccggatgataca

SEQ ID NO: 542613 - DNA, 19 bp, Mus musculus
  siRNA target sequence for Clgn (NM_009904.1,931-949).
gaatccggatgatacattt

SEQ ID NO: 542614 - DNA, 19 bp, Mus musculus
  siRNA target sequence for Clgn (NM_009904.1,1034-1052).
gacgaccccagtgataaaa

SEQ ID NO: 542615 - DNA, 19 bp, Mus musculus
  siRNA target sequence for Clgn (NM_009904.1,1255-1273).
ggaggcaccacatattcct

SEQ ID NO: 542616 - DNA, 19 bp, Mus musculus
  siRNA target sequence for Clgn (NM_009904.1,1355-1373).
ccaatgatcaataatccta

SEQ ID NO: 542617 - DNA, 19 bp, Mus musculus
  siRNA target sequence for Clgn (NM_009904.1,1356-1374).
caatgatcaataatcctaa

SEQ ID NO: 542618 - DNA, 19 bp, Mus musculus
  siRNA target sequence for Clgn (NM_009904.1,1672-1690).
cggcttgcccgttgcatta

SEQ ID NO: 542619 - DNA, 19 bp, Mus musculus
  siRNA target sequence for Clgn (NM_009904.1,1674-1692).
gcttgcccgttgcattagt

SEQ ID NO: 542620 - DNA, 19 bp, Mus musculus
  siRNA target sequence for Clgn (NM_009904.1,1675-1693).
cttgcccgttgcattagtt

SEQ ID NO: 542621 - DNA, 19 bp, Mus musculus
  siRNA target sequence for Clgn (NM_009904.1,1733-1751).
gaagacacgggacctaaaa

SEQ ID NO: 542622 - DNA, 19 bp, Mus musculus
  siRNA target sequence for Clgn (NM_009904.1,1736-1754).
gacacgggacctaaaaaaa

SEQ ID NO: 542623 - DNA, 19 bp, Mus musculus
  siRNA target sequence for Clgn (NM_009904.1,1738-1756).
cacgggacctaaaaaaact

SEQ ID NO: 542624 - DNA, 19 bp, Mus musculus
  siRNA target sequence for Clgn (NM_009904.1,1740-1758).
cgggacctaaaaaaactga

SEQ ID NO: 542625 - DNA, 19 bp, Mus musculus
  siRNA target sequence for Clgn (NM_009904.1,1918-1936).
ggaagacagagaaactcta

SEQ ID NO: 542626 - DNA, 19 bp, Mus musculus
  siRNA target sequence for Clgn (NM_009904.1,1954-1972).
gagcaagctgagtaaatct

SEQ ID NO: 542627 - DNA, 19 bp, Mus musculus
  siRNA target sequence for 1110008L20Rik (NM_028643.1,222-240).
cggtgtcggcgcagaaaaa

SEQ ID NO: 542628 - DNA, 19 bp, Mus musculus
  siRNA target sequence for 1110008L20Rik (NM_028643.1,226-244).
gtcggcgcagaaaaattat

SEQ ID NO: 542629 - DNA, 19 bp, Mus musculus
  siRNA target sequence for 1110008L20Rik (NM_028643.1,228-246).
cggcgcagaaaaattattt

SEQ ID NO: 542630 - DNA, 19 bp, Mus musculus
  siRNA target sequence for 1110008L20Rik (NM_028643.1,278-296).
cagcggttcatgcagtttt

SEQ ID NO: 542631 - DNA, 19 bp, Mus musculus
  siRNA target sequence for 1110008L20Rik (NM_028643.1,280-298).
gcggttcatgcagttttca

SEQ ID NO: 542632 - DNA, 19 bp, Mus musculus
  siRNA target sequence for 1110008L20Rik (NM_028643.1,304-322).
ggagcacgacggagagtat

SEQ ID NO: 542633 - DNA, 19 bp, Mus musculus
  siRNA target sequence for 1110008L20Rik (NM_028643.1,305-323).
gagcacgacggagagtatt

SEQ ID NO: 542634 - DNA, 19 bp, Mus musculus
  siRNA target sequence for 1110008L20Rik (NM_028643.1,308-326).
cacgacggagagtattaca

SEQ ID NO: 542635 - DNA, 19 bp, Mus musculus
  siRNA target sequence for 1110008L20Rik (NM_028643.1,362-380).
gagcaagtggagcgtaaaa

SEQ ID NO: 542636 - DNA, 19 bp, Mus musculus
  siRNA target sequence for 1110008L20Rik (NM_028643.1,364-382).
gcaagtggagcgtaaaaca

SEQ ID NO: 542637 - DNA, 19 bp, Mus musculus
  siRNA target sequence for 1110008L20Rik (NM_028643.1,440-458).
gcacgctgtggatcaacat

SEQ ID NO: 542638 - DNA, 19 bp, Mus musculus
  siRNA target sequence for 1110008L20Rik (NM_028643.1,441-459).
cacgctgtggatcaacatt

SEQ ID NO: 542639 - DNA, 19 bp, Mus musculus
  siRNA target sequence for 1110008L20Rik (NM_028643.1,443-461).
cgctgtggatcaacatttt

SEQ ID NO: 542640 - DNA, 19 bp, Mus musculus
  siRNA target sequence for 1110008L20Rik (NM_028643.1,450-468).
gatcaacattttttagaga

SEQ ID NO: 542641 - DNA, 19 bp, Mus musculus
  siRNA target sequence for 1110008L20Rik (NM_028643.1,476-494).
gataaaggggtaatttcat

SEQ ID NO: 542642 - DNA, 19 bp, Mus musculus
  siRNA target sequence for 1110008L20Rik (NM_028643.1,492-510).
catataccgagtatctttt

SEQ ID NO: 542643 - DNA, 19 bp, Mus musculus
  siRNA target sequence for 1110008L20Rik (NM_028643.1,500-518).
gagtatcttttcttgctta

SEQ ID NO: 542644 - DNA, 19 bp, Mus musculus
  siRNA target sequence for 1110008L20Rik (NM_028643.1,514-532).
gcttacaatcctcacaaaa

SEQ ID NO: 542645 - DNA, 19 bp, Mus musculus
  siRNA target sequence for 1110008L20Rik (NM_028643.1,613-631).
gctgcagaagatcataagt

SEQ ID NO: 542646 - DNA, 19 bp, Mus musculus
  siRNA target sequence for 1110008L20Rik (NM_028643.1,614-632).
ctgcagaagatcataagta

SEQ ID NO: 542647 - DNA, 19 bp, Mus musculus
  siRNA target sequence for 1110008L20Rik (NM_028643.1,616-634).
gcagaagatcataagtaaa

SEQ ID NO: 542648 - DNA, 19 bp, Mus musculus
  siRNA target sequence for 1110008L20Rik (NM_028643.1,866-884).
gcagaatggctacttttct

SEQ ID NO: 542649 - DNA, 19 bp, Mus musculus
  siRNA target sequence for 1110008L20Rik (NM_028643.1,873-891).
ggctacttttcttcactaa

SEQ ID NO: 542650 - DNA, 19 bp, Mus musculus
  siRNA target sequence for 1110008L20Rik (NM_028643.1,918-936).
gaaacgtgagagaaaagtt

SEQ ID NO: 542651 - DNA, 19 bp, Mus musculus
  siRNA target sequence for 1110008L20Rik (NM_028643.1,1011-1029).
ctatcgccatgcaaatgtt

SEQ ID NO: 542652 - DNA, 19 bp, Mus musculus
  siRNA target sequence for 1110008L20Rik (NM_028643.1,1015-1033).
cgccatgcaaatgtttagt

SEQ ID NO: 542653 - DNA, 19 bp, Mus musculus
  siRNA target sequence for 1110008L20Rik (NM_028643.1,1018-1036).
catgcaaatgtttagttta

SEQ ID NO: 542654 - DNA, 19 bp, Mus musculus
  siRNA target sequence for 1110008L20Rik (NM_028643.1,1118-1136).
gacaccgtcttcaagatct

SEQ ID NO: 542655 - DNA, 19 bp, Mus musculus
  siRNA target sequence for 1110008L20Rik (NM_028643.1,1174-1192).
gttccttggggtactgaaa

SEQ ID NO: 542656 - DNA, 19 bp, Mus musculus
  siRNA target sequence for 1110030N17Rik (NM_146118.2,352-370).
gggcgagctccggaaaatt

SEQ ID NO: 542657 - DNA, 19 bp, Mus musculus
  siRNA target sequence for 1110030N17Rik (NM_146118.2,484-502).
gaatgatggtcgaatcgat

SEQ ID NO: 542658 - DNA, 19 bp, Mus musculus
  siRNA target sequence for 1110030N17Rik (NM_146118.2,730-748).
cttcgatgtcggtgagaat

SEQ ID NO: 542659 - DNA, 19 bp, Mus musculus
  siRNA target sequence for 1110030N17Rik (NM_146118.2,916-934).
catcgtaggtggattcaca

SEQ ID NO: 542660 - DNA, 19 bp, Mus musculus
  siRNA target sequence for 1110030N17Rik (NM_146118.2,982-1000).
catcaatgtcctcaaaatt

SEQ ID NO: 542661 - DNA, 19 bp, Mus musculus
  siRNA target sequence for 1110030N17Rik (NM_146118.2,1004-1022).
cctgagtcggccatcaaat

SEQ ID NO: 542662 - DNA, 19 bp, Mus musculus
  siRNA target sequence for 1110030N17Rik (NM_146118.2,1007-1025).
gagtcggccatcaaattca

SEQ ID NO: 542663 - DNA, 19 bp, Mus musculus
  siRNA target sequence for 1110030N17Rik (NM_146118.2,1232-1250).
ggtgtagctgccttctaca

SEQ ID NO: 542664 - DNA, 19 bp, Mus musculus
  siRNA target sequence for 1110030N17Rik (NM_146118.2,1337-1355).
cagcgctacgcagtaaaca

SEQ ID NO: 542665 - DNA, 19 bp, Mus musculus
  siRNA target sequence for 1110030N17Rik (NM_146118.2,1339-1357).
gcgctacgcagtaaacagt

SEQ ID NO: 542666 - DNA, 19 bp, Mus musculus
  siRNA target sequence for 1110030N17Rik (NM_146118.2,1479-1497).
gcgcacctgaggtaaccat

SEQ ID NO: 542667 - DNA, 19 bp, Mus musculus
  siRNA target sequence for 1110030N17Rik (NM_146118.2,1503-1521).
gcctcttcaaacagattct

SEQ ID NO: 542668 - DNA, 19 bp, Mus musculus
  siRNA target sequence for 1110030N17Rik (NM_146118.2,1599-1617).
gctacgtggtctacgaaaa

SEQ ID NO: 542669 - DNA, 19 bp, Mus musculus
  siRNA target sequence for 1110033K19Rik (NM_133698.1,65-83).
ctgtcatcgatgttttcta

SEQ ID NO: 542670 - DNA, 19 bp, Mus musculus
  siRNA target sequence for 1110033K19Rik (NM_133698.1,84-102).
ccagtatgccactgaatat

SEQ ID NO: 542671 - DNA, 19 bp, Mus musculus
  siRNA target sequence for 1110033K19Rik (NM_133698.1,103-121).
gggaactgtgacatgttaa

SEQ ID NO: 542672 - DNA, 19 bp, Mus musculus
  siRNA target sequence for 1110033K19Rik (NM_133698.1,108-126).
ctgtgacatgttaagcaaa

SEQ ID NO: 542673 - DNA, 19 bp, Mus musculus
  siRNA target sequence for 1110033K19Rik (NM_133698.1,285-303).
ggcttgtaataaaattatt

SEQ ID NO: 542674 - DNA, 19 bp, Mus musculus
  siRNA target sequence for 1110033K19Rik (NM_133698.1,430-448).
gagaatgactcttattcca

SEQ ID NO: 542675 - DNA, 19 bp, Mus musculus
  siRNA target sequence for 1110033K19Rik (NM_133698.1,450-468).
gggctcaagaggaagcaat

SEQ ID NO: 542676 - DNA, 19 bp, Mus musculus
  siRNA target sequence for 1110033K19Rik (NM_133698.1,451-469).
ggctcaagaggaagcaata

SEQ ID NO: 542677 - DNA, 19 bp, Mus musculus
  siRNA target sequence for 1110033K19Rik (NM_133698.1,452-470).
gctcaagaggaagcaataa

SEQ ID NO: 542678 - DNA, 19 bp, Mus musculus
  siRNA target sequence for 1110033K19Rik (NM_133698.1,539-557).
gtgatcacgaaaatagtga

SEQ ID NO: 542679 - DNA, 19 bp, Mus musculus
  siRNA target sequence for 1110033K19Rik (NM_133698.1,546-564).
cgaaaatagtgaggattat

SEQ ID NO: 542680 - DNA, 19 bp, Mus musculus
  siRNA target sequence for 1110033K19Rik (NM_133698.1,616-634).
cctagctcaaggaaagctt

SEQ ID NO: 542681 - DNA, 19 bp, Mus musculus
  siRNA target sequence for 1110033K19Rik (NM_133698.1,691-709).
ggatctggcgaatgttatt

SEQ ID NO: 542682 - DNA, 19 bp, Mus musculus
  siRNA target sequence for 1110033K19Rik (NM_133698.1,721-739).
ggaaaacatggttcatcat

SEQ ID NO: 542683 - DNA, 19 bp, Mus musculus
  siRNA target sequence for 1110033K19Rik (NM_133698.1,758-776).
ctggctcaggtcactctaa

SEQ ID NO: 542684 - DNA, 19 bp, Mus musculus
  siRNA target sequence for 1110033K19Rik (NM_133698.1,760-778).
ggctcaggtcactctaaca

SEQ ID NO: 542685 - DNA, 19 bp, Mus musculus
  siRNA target sequence for 1110033K19Rik (NM_133698.1,769-787).
cactctaacacctatggta

SEQ ID NO: 542686 - DNA, 19 bp, Mus musculus
  siRNA target sequence for 1110033K19Rik (NM_133698.1,856-874).
ggctcccaagaatatagct

SEQ ID NO: 542687 - DNA, 19 bp, Mus musculus
  siRNA target sequence for 1110033K19Rik (NM_133698.1,907-925).
ggatctggtcgaaaaaact

SEQ ID NO: 542688 - DNA, 19 bp, Mus musculus
  siRNA target sequence for 1110033K19Rik (NM_133698.1,992-1010).
gatctagtcatgaattaga

SEQ ID NO: 542689 - DNA, 19 bp, Mus musculus
  siRNA target sequence for 1110033K19Rik (NM_133698.1,1009-1027).
gaatccggtcaatcaatca

SEQ ID NO: 542690 - DNA, 19 bp, Mus musculus
  siRNA target sequence for 1110033K19Rik (NM_133698.1,1033-1051).
gctaaccatggctctcatt

SEQ ID NO: 542691 - DNA, 19 bp, Mus musculus
  siRNA target sequence for 1110033K19Rik (NM_133698.1,1038-1056).
ccatggctctcattctaat

SEQ ID NO: 542692 - DNA, 19 bp, Mus musculus
  siRNA target sequence for 1110033K19Rik (NM_133698.1,1126-1144).
ggttcaggacactcttcaa

SEQ ID NO: 542693 - DNA, 19 bp, Mus musculus
  siRNA target sequence for 1110033K19Rik (NM_133698.1,1163-1181).
ccacttcaggacaaaatta

SEQ ID NO: 542694 - DNA, 19 bp, Mus musculus
  siRNA target sequence for 1110033K19Rik (NM_133698.1,1164-1182).
cacttcaggacaaaattat

SEQ ID NO: 542695 - DNA, 19 bp, Mus musculus
  siRNA target sequence for 1110033K19Rik (NM_133698.1,1217-1235).
cttctgggtctgaacaata

SEQ ID NO: 542696 - DNA, 19 bp, Mus musculus
  siRNA target sequence for 1110039B18Rik (NM_144525.2,144-162).
gcaaatggagtgttgaaat

SEQ ID NO: 542697 - DNA, 19 bp, Mus musculus
  siRNA target sequence for 1110039B18Rik (NM_144525.2,204-222).
gagcgtggctttgagaaaa

SEQ ID NO: 542698 - DNA, 19 bp, Mus musculus
  siRNA target sequence for 1110039B18Rik (NM_144525.2,224-242).
catgaaacggcagaataaa

SEQ ID NO: 542699 - DNA, 19 bp, Mus musculus
  siRNA target sequence for 1110039B18Rik (NM_144525.2,259-277).
ctgctgcagagtctaagaa

SEQ ID NO: 542700 - DNA, 19 bp, Mus musculus
  siRNA target sequence for 1110039B18Rik (NM_144525.2,271-289).
ctaagaaaccgataaacaa

SEQ ID NO: 542701 - DNA, 19 bp, Mus musculus
  siRNA target sequence for 1110039B18Rik (NM_144525.2,313-331).
ctgttcctagccaaaacca

SEQ ID NO: 542702 - DNA, 19 bp, Mus musculus
  siRNA target sequence for 1110039B18Rik (NM_144525.2,672-690).
catgggtaccgcatctgta

SEQ ID NO: 542703 - DNA, 19 bp, Mus musculus
  siRNA target sequence for 1110039B18Rik (NM_144525.2,676-694).
ggtaccgcatctgtattca

SEQ ID NO: 542704 - DNA, 19 bp, Mus musculus
  siRNA target sequence for 1110039B18Rik (NM_144525.2,704-722).
gcaagacaagcctaagatt

SEQ ID NO: 542705 - DNA, 19 bp, Mus musculus
  siRNA target sequence for 1110039B18Rik (NM_144525.2,1002-1020).
gcctatatgcccaacaatt

SEQ ID NO: 542706 - DNA, 19 bp, Mus musculus
  siRNA target sequence for 1110039B18Rik (NM_144525.2,1086-1104).
ggggccaagccggaatctt

SEQ ID NO: 542707 - DNA, 19 bp, Mus musculus
  siRNA target sequence for 1110039B18Rik (NM_144525.2,1310-1328).
caagaaggcacggaaatct

SEQ ID NO: 542708 - DNA, 19 bp, Mus musculus
  siRNA target sequence for 1110039B18Rik (NM_144525.2,1316-1334).
ggcacggaaatctttacaa

SEQ ID NO: 542709 - DNA, 19 bp, Mus musculus
  siRNA target sequence for 1110039B18Rik (NM_144525.2,1501-1519).
cagtaggattcctatgtca

SEQ ID NO: 542710 - DNA, 19 bp, Mus musculus
  siRNA target sequence for 1110039B18Rik (NM_144525.2,1518-1536).
catgacttgcggtcaaaca

SEQ ID NO: 542711 - DNA, 19 bp, Mus musculus
  siRNA target sequence for 1110039B18Rik (NM_144525.2,1973-1991).
ctgggactgcattaagaca

SEQ ID NO: 542712 - DNA, 19 bp, Mus musculus
  siRNA target sequence for 1500003O03Rik (NM_019769.2,146-164).
ctcgggcctccacgttatt

SEQ ID NO: 542713 - DNA, 19 bp, Mus musculus
  siRNA target sequence for 1600015H20Rik (NM_024237.2,280-298).
ctggctgcactgcaaaaca

SEQ ID NO: 542714 - DNA, 19 bp, Mus musculus
  siRNA target sequence for 1600015H20Rik (NM_024237.2,289-307).
ctgcaaaacacggttaaca

SEQ ID NO: 542715 - DNA, 19 bp, Mus musculus
  siRNA target sequence for 1600015H20Rik (NM_024237.2,450-468).
cgtggtgtgtcttgctaat

SEQ ID NO: 542716 - DNA, 19 bp, Mus musculus
  siRNA target sequence for 1600015H20Rik (NM_024237.2,453-471).
ggtgtgtcttgctaatggt

SEQ ID NO: 542717 - DNA, 19 bp, Mus musculus
  siRNA target sequence for 1600015H20Rik (NM_024237.2,556-574).
ggcatcaaccactacagat

SEQ ID NO: 542718 - DNA, 19 bp, Mus musculus
  siRNA target sequence for 1600015H20Rik (NM_024237.2,946-964).
gggaccacatgcatcaaca

SEQ ID NO: 542719 - DNA, 19 bp, Mus musculus
  siRNA target sequence for 1600015H20Rik (NM_024237.2,1006-1024).
ggcagcggcaatataagct

SEQ ID NO: 542720 - DNA, 19 bp, Mus musculus
  siRNA target sequence for 1600015H20Rik (NM_024237.2,1007-1025).
gcagcggcaatataagcta

SEQ ID NO: 542721 - DNA, 19 bp, Mus musculus
  siRNA target sequence for 1600015H20Rik (NM_024237.2,1124-1142).
ctctcccttccaagttgaa

SEQ ID NO: 542722 - DNA, 19 bp, Mus musculus
  siRNA target sequence for 1600015H20Rik (NM_024237.2,1164-1182).
catggccacagcctcaatt

SEQ ID NO: 542723 - DNA, 19 bp, Mus musculus
  siRNA target sequence for 1600015H20Rik (NM_024237.2,1167-1185).
ggccacagcctcaattcct

SEQ ID NO: 542724 - DNA, 19 bp, Mus musculus
  siRNA target sequence for 1600015H20Rik (NM_024237.2,1235-1253).
gccgtggccacttcgtaat

SEQ ID NO: 542725 - DNA, 19 bp, Mus musculus
  siRNA target sequence for 1600015H20Rik (NM_024237.2,1238-1256).
gtggccacttcgtaatgca

SEQ ID NO: 542726 - DNA, 19 bp, Mus musculus
  siRNA target sequence for 1600015H20Rik (NM_024237.2,1277-1295).
gagagctcatccttacaca

SEQ ID NO: 542727 - DNA, 19 bp, Mus musculus
  siRNA target sequence for 1700003H21Rik (NM_178617.3,408-426).
caccattgacacacacaat

SEQ ID NO: 542728 - DNA, 19 bp, Mus musculus
  siRNA target sequence for 1700003H21Rik (NM_178617.3,419-437).
cacacaataccaacaatct

SEQ ID NO: 542729 - DNA, 19 bp, Mus musculus
  siRNA target sequence for 1700003H21Rik (NM_178617.3,474-492).
cttgggtgaatatgagaat

SEQ ID NO: 542730 - DNA, 19 bp, Mus musculus
  siRNA target sequence for 1700003H21Rik (NM_178617.3,479-497).
gtgaatatgagaatgtact

SEQ ID NO: 542731 - DNA, 19 bp, Mus musculus
  siRNA target sequence for 1700003H21Rik (NM_178617.3,503-521).
cacttgaagacctgaatct

SEQ ID NO: 542732 - DNA, 19 bp, Mus musculus
  siRNA target sequence for 1700003H21Rik (NM_178617.3,583-601).
caatttgtcactcgatttt

SEQ ID NO: 542733 - DNA, 19 bp, Mus musculus
  siRNA target sequence for 1700003H21Rik (NM_178617.3,589-607).
gtcactcgatttttgttga

SEQ ID NO: 542734 - DNA, 19 bp, Mus musculus
  siRNA target sequence for 1700003H21Rik (NM_178617.3,673-691).
gagcaaacgcgtcaagaaa

SEQ ID NO: 542735 - DNA, 19 bp, Mus musculus
  siRNA target sequence for 1700003H21Rik (NM_178617.3,712-730).
gaagtcctgtccattcaat

SEQ ID NO: 542736 - DNA, 19 bp, Mus musculus
  siRNA target sequence for 1700003H21Rik (NM_178617.3,757-775).
gtccagagacacaatagtt

SEQ ID NO: 542737 - DNA, 19 bp, Mus musculus
  siRNA target sequence for 1700003H21Rik (NM_178617.3,783-801).
caacagcccgcagttcaat

SEQ ID NO: 542738 - DNA, 19 bp, Mus musculus
  siRNA target sequence for 1700003H21Rik (NM_178617.3,804-822).
cagcagtccagcattgtta

SEQ ID NO: 542739 - DNA, 19 bp, Mus musculus
  siRNA target sequence for 1700003H21Rik (NM_178617.3,812-830).
cagcattgttagaagaaga

SEQ ID NO: 542740 - DNA, 19 bp, Mus musculus
  siRNA target sequence for 1700003H21Rik (NM_178617.3,835-853).
cagtggatgacccagataa

SEQ ID NO: 542741 - DNA, 19 bp, Mus musculus
  siRNA target sequence for 1700003H21Rik (NM_178617.3,1052-1070).
gcctgcgtatctctataca

SEQ ID NO: 542742 - DNA, 19 bp, Mus musculus
  siRNA target sequence for 1700003H21Rik (NM_178617.3,1069-1087).
cagaagctctcaaacgaat

SEQ ID NO: 542743 - DNA, 19 bp, Mus musculus
  siRNA target sequence for 1700003H21Rik (NM_178617.3,1083-1101).
cgaatctcgctacatgatt

SEQ ID NO: 542744 - DNA, 19 bp, Mus musculus
  siRNA target sequence for 1700003H21Rik (NM_178617.3,1084-1102).
gaatctcgctacatgattt

SEQ ID NO: 542745 - DNA, 19 bp, Mus musculus
  siRNA target sequence for 1700003H21Rik (NM_178617.3,1088-1106).
ctcgctacatgatttatga

SEQ ID NO: 542746 - DNA, 19 bp, Mus musculus
  siRNA target sequence for 1700003H21Rik (NM_178617.3,1090-1108).
cgctacatgatttatgagt

SEQ ID NO: 542747 - DNA, 19 bp, Mus musculus
  siRNA target sequence for 1700003H21Rik (NM_178617.3,1091-1109).
gctacatgatttatgagtt

SEQ ID NO: 542748 - DNA, 19 bp, Mus musculus
  siRNA target sequence for 1700003H21Rik (NM_178617.3,1136-1154).
gccacctccagacgaatta

SEQ ID NO: 542749 - DNA, 19 bp, Mus musculus
  siRNA target sequence for 1700007I06Rik (NM_027031.1,142-160).
ccttgatggtgtactttca

SEQ ID NO: 542750 - DNA, 19 bp, Mus musculus
  siRNA target sequence for 1700007I06Rik (NM_027031.1,181-199).
ggaacaccttgaatgatgt

SEQ ID NO: 542751 - DNA, 19 bp, Mus musculus
  siRNA target sequence for 1700007I06Rik (NM_027031.1,191-209).
gaatgatgtgctcttcttt

SEQ ID NO: 542752 - DNA, 19 bp, Mus musculus
  siRNA target sequence for 1700007I06Rik (NM_027031.1,225-243).
gtgactaacctgaacaagt

SEQ ID NO: 542753 - DNA, 19 bp, Mus musculus
  siRNA target sequence for 1700007I06Rik (NM_027031.1,242-260).
gtcacagatcgggatgata

SEQ ID NO: 542754 - DNA, 19 bp, Mus musculus
  siRNA target sequence for 1700007I06Rik (NM_027031.1,244-262).
cacagatcgggatgatatt

SEQ ID NO: 542755 - DNA, 19 bp, Mus musculus
  siRNA target sequence for 1700007I06Rik (NM_027031.1,278-296).
gacagctgtaggagagatt

SEQ ID NO: 542756 - DNA, 19 bp, Mus musculus
  siRNA target sequence for 1700007I06Rik (NM_027031.1,405-423).
ctggacggggagatgaata

SEQ ID NO: 542757 - DNA, 19 bp, Mus musculus
  siRNA target sequence for 1700007I06Rik (NM_027031.1,407-425).
ggacggggagatgaatata

SEQ ID NO: 542758 - DNA, 19 bp, Mus musculus
  siRNA target sequence for 1700007I06Rik (NM_027031.1,426-444).
ggtgcggccaatttccaaa

SEQ ID NO: 542759 - DNA, 19 bp, Mus musculus
  siRNA target sequence for 1700007I06Rik (NM_027031.1,427-445).
gtgcggccaatttccaaaa

SEQ ID NO: 542760 - DNA, 19 bp, Mus musculus
  siRNA target sequence for 1700007I06Rik (NM_027031.1,429-447).
gcggccaatttccaaaact

SEQ ID NO: 542761 - DNA, 19 bp, Mus musculus
  siRNA target sequence for 1700007I06Rik (NM_027031.1,430-448).
cggccaatttccaaaacta

SEQ ID NO: 542762 - DNA, 19 bp, Mus musculus
  siRNA target sequence for 1700007I06Rik (NM_027031.1,513-531).
ggtgaccgactgcttaatt

SEQ ID NO: 542763 - DNA, 19 bp, Mus musculus
  siRNA target sequence for 1700007I06Rik (NM_027031.1,514-532).
gtgaccgactgcttaatta

SEQ ID NO: 542764 - DNA, 19 bp, Mus musculus
  siRNA target sequence for 1700007I06Rik (NM_027031.1,516-534).
gaccgactgcttaattaca

SEQ ID NO: 542765 - DNA, 19 bp, Mus musculus
  siRNA target sequence for 1700007I06Rik (NM_027031.1,560-578).
ctgcaccgacaaatccata

SEQ ID NO: 542766 - DNA, 19 bp, Mus musculus
  siRNA target sequence for 1700007I06Rik (NM_027031.1,660-678).
catctcaagaagatatatt

SEQ ID NO: 542767 - DNA, 19 bp, Mus musculus
  siRNA target sequence for 1700007I06Rik (NM_027031.1,665-683).
caagaagatatattcatct

SEQ ID NO: 542768 - DNA, 19 bp, Mus musculus
  siRNA target sequence for 1700008P20Rik (NM_027028.1,81-99).
gagagcaggaccgacttat

SEQ ID NO: 542769 - DNA, 19 bp, Mus musculus
  siRNA target sequence for 1700008P20Rik (NM_027028.1,426-444).
cggttcctcttcaacatgt

SEQ ID NO: 542770 - DNA, 19 bp, Mus musculus
  siRNA target sequence for 1700008P20Rik (NM_027028.1,452-470).
ggacggcgatgggatcatt

SEQ ID NO: 542771 - DNA, 19 bp, Mus musculus
  siRNA target sequence for 1700008P20Rik (NM_027028.1,453-471).
gacggcgatgggatcatta

SEQ ID NO: 542772 - DNA, 19 bp, Mus musculus
  siRNA target sequence for 1700008P20Rik (NM_027028.1,711-729).
ctagaagccacggtcttat

SEQ ID NO: 542773 - DNA, 19 bp, Mus musculus
  siRNA target sequence for 1700028N11Rik (NM_029341.1,308-326).
ccgaacccttgatttcaaa

SEQ ID NO: 542774 - DNA, 19 bp, Mus musculus
  siRNA target sequence for 1700028N11Rik (NM_029341.1,310-328).
gaacccttgatttcaaaga

SEQ ID NO: 542775 - DNA, 19 bp, Mus musculus
  siRNA target sequence for 1700028N11Rik (NM_029341.1,387-405).
cttttccagagattcgata

SEQ ID NO: 542776 - DNA, 19 bp, Mus musculus
  siRNA target sequence for 1700028N11Rik (NM_029341.1,406-424).
gagacggcagtggaacaat

SEQ ID NO: 542777 - DNA, 19 bp, Mus musculus
  siRNA target sequence for 1700028N11Rik (NM_029341.1,411-429).
ggcagtggaacaatagact

SEQ ID NO: 542778 - DNA, 19 bp, Mus musculus
  siRNA target sequence for 1700028N11Rik (NM_029341.1,412-430).
gcagtggaacaatagactt

SEQ ID NO: 542779 - DNA, 19 bp, Mus musculus
  siRNA target sequence for 1700028N11Rik (NM_029341.1,415-433).
gtggaacaatagacttcaa

SEQ ID NO: 542780 - DNA, 19 bp, Mus musculus
  siRNA target sequence for 1700028N11Rik (NM_029341.1,418-436).
gaacaatagacttcaatga

SEQ ID NO: 542781 - DNA, 19 bp, Mus musculus
  siRNA target sequence for 1700028N11Rik (NM_029341.1,435-453).
gagtttcttctcacgttaa

SEQ ID NO: 542782 - DNA, 19 bp, Mus musculus
  siRNA target sequence for 1700028N11Rik (NM_029341.1,471-489).
gccagaaaagaggtaatca

SEQ ID NO: 542783 - DNA, 19 bp, Mus musculus
  siRNA target sequence for 1700028N11Rik (NM_029341.1,472-490).
ccagaaaagaggtaatcat

SEQ ID NO: 542784 - DNA, 19 bp, Mus musculus
  siRNA target sequence for 1700028N11Rik (NM_029341.1,482-500).
ggtaatcatgaaagctttt

SEQ ID NO: 542785 - DNA, 19 bp, Mus musculus
  siRNA target sequence for 1700028N11Rik (NM_029341.1,543-561).
gaccttcgtgaagtttata

SEQ ID NO: 542786 - DNA, 19 bp, Mus musculus
  siRNA target sequence for 1700028N11Rik (NM_029341.1,565-583).
ctaaacatcatccaaagta

SEQ ID NO: 542787 - DNA, 19 bp, Mus musculus
  siRNA target sequence for 1700028N11Rik (NM_029341.1,570-588).
catcatccaaagtatcaaa

SEQ ID NO: 542788 - DNA, 19 bp, Mus musculus
  siRNA target sequence for 1700028N11Rik (NM_029341.1,635-653).
ctttgactcaccctatgat

SEQ ID NO: 542789 - DNA, 19 bp, Mus musculus
  siRNA target sequence for 1700028N11Rik (NM_029341.1,666-684).
gtgacccccgaggaattca

SEQ ID NO: 542790 - DNA, 19 bp, Mus musculus
  siRNA target sequence for 1700028N11Rik (NM_029341.1,689-707).
ctactatgcaggtgtaagt

SEQ ID NO: 542791 - DNA, 19 bp, Mus musculus
  siRNA target sequence for 1700028N11Rik (NM_029341.1,721-739).
cagatgtgtacttcatcat

SEQ ID NO: 542792 - DNA, 19 bp, Mus musculus
  siRNA target sequence for 1700028N11Rik (NM_029341.1,723-741).
gatgtgtacttcatcatca

SEQ ID NO: 542793 - DNA, 19 bp, Mus musculus
  siRNA target sequence for 1700028N11Rik (NM_029341.1,726-744).
gtgtacttcatcatcatga

SEQ ID NO: 542794 - DNA, 19 bp, Mus musculus
  siRNA target sequence for 1700073K01Rik (NM_026626.2,249-267).
gacagaggcactaattgca

SEQ ID NO: 542795 - DNA, 19 bp, Mus musculus
  siRNA target sequence for 1700073K01Rik (NM_026626.2,257-275).
cactaattgcagaacttca

SEQ ID NO: 542796 - DNA, 19 bp, Mus musculus
  siRNA target sequence for 1700073K01Rik (NM_026626.2,259-277).
ctaattgcagaacttcata

SEQ ID NO: 542797 - DNA, 19 bp, Mus musculus
  siRNA target sequence for 1700073K01Rik (NM_026626.2,282-300).
gatcaaagacgcatttgaa

SEQ ID NO: 542798 - DNA, 19 bp, Mus musculus
  siRNA target sequence for 1700073K01Rik (NM_026626.2,306-324).
cgaccatgaatcgaataat

SEQ ID NO: 542799 - DNA, 19 bp, Mus musculus
  siRNA target sequence for 1700073K01Rik (NM_026626.2,307-325).
gaccatgaatcgaataata

SEQ ID NO: 542800 - DNA, 19 bp, Mus musculus
  siRNA target sequence for 1700073K01Rik (NM_026626.2,338-356).
gagagattgggacaattat

SEQ ID NO: 542801 - DNA, 19 bp, Mus musculus
  siRNA target sequence for 1700073K01Rik (NM_026626.2,427-445).
cccactggctacattcgat

SEQ ID NO: 542802 - DNA, 19 bp, Mus musculus
  siRNA target sequence for 1700073K01Rik (NM_026626.2,428-446).
ccactggctacattcgatt

SEQ ID NO: 542803 - DNA, 19 bp, Mus musculus
  siRNA target sequence for 1700073K01Rik (NM_026626.2,429-447).
cactggctacattcgattt

SEQ ID NO: 542804 - DNA, 19 bp, Mus musculus
  siRNA target sequence for 1700073K01Rik (NM_026626.2,431-449).
ctggctacattcgatttga

SEQ ID NO: 542805 - DNA, 19 bp, Mus musculus
  siRNA target sequence for 1700073K01Rik (NM_026626.2,433-451).
ggctacattcgatttgaaa

SEQ ID NO: 542806 - DNA, 19 bp, Mus musculus
  siRNA target sequence for 1700073K01Rik (NM_026626.2,468-486).
gaccagagcccttgtagaa

SEQ ID NO: 542807 - DNA, 19 bp, Mus musculus
  siRNA target sequence for 1700073K01Rik (NM_026626.2,497-515).
gaccagctgctgaagatat

SEQ ID NO: 542808 - DNA, 19 bp, Mus musculus
  siRNA target sequence for 1700073K01Rik (NM_026626.2,503-521).
ctgctgaagatatcctttt

SEQ ID NO: 542809 - DNA, 19 bp, Mus musculus
  siRNA target sequence for 1700073K01Rik (NM_026626.2,524-542).
gagctttcgaggttttgga

SEQ ID NO: 542810 - DNA, 19 bp, Mus musculus
  siRNA target sequence for 1700073K01Rik (NM_026626.2,534-552).
ggttttggatccagctaaa

SEQ ID NO: 542811 - DNA, 19 bp, Mus musculus
  siRNA target sequence for 1700073K01Rik (NM_026626.2,547-565).
gctaaacgcgggtttctca

SEQ ID NO: 542812 - DNA, 19 bp, Mus musculus
  siRNA target sequence for 1700073K01Rik (NM_026626.2,555-573).
cgggtttctcactaaggat

SEQ ID NO: 542813 - DNA, 19 bp, Mus musculus
  siRNA target sequence for 1700073K01Rik (NM_026626.2,636-654).
gttgtctgctgcaattgat

SEQ ID NO: 542814 - DNA, 19 bp, Mus musculus
  siRNA target sequence for 1700073K01Rik (NM_026626.2,646-664).
gcaattgatcccgaatcaa

SEQ ID NO: 542815 - DNA, 19 bp, Mus musculus
  siRNA target sequence for 1700073K01Rik (NM_026626.2,647-665).
caattgatcccgaatcaaa

SEQ ID NO: 542816 - DNA, 19 bp, Mus musculus
  siRNA target sequence for 1700073K01Rik (NM_026626.2,655-673).
cccgaatcaaacaccatta

SEQ ID NO: 542817 - DNA, 19 bp, Mus musculus
  siRNA target sequence for 1700073K01Rik (NM_026626.2,656-674).
ccgaatcaaacaccattaa

SEQ ID NO: 542818 - DNA, 19 bp, Mus musculus
  siRNA target sequence for 1700073K01Rik (NM_026626.2,657-675).
cgaatcaaacaccattaat

SEQ ID NO: 542819 - DNA, 19 bp, Mus musculus
  siRNA target sequence for 2210417O06Rik (NM_025618.1,165-183).
cgttccctggacaaactca

SEQ ID NO: 542820 - DNA, 19 bp, Mus musculus
  siRNA target sequence for 2210417O06Rik (NM_025618.1,182-200).
caggatccgctatatggtt

SEQ ID NO: 542821 - DNA, 19 bp, Mus musculus
  siRNA target sequence for 2210417O06Rik (NM_025618.1,219-237).
gacaggacggacaaattga

SEQ ID NO: 542822 - DNA, 19 bp, Mus musculus
  siRNA target sequence for 2210417O06Rik (NM_025618.1,273-291).
gcattgcgggaggatacaa

SEQ ID NO: 542823 - DNA, 19 bp, Mus musculus
  siRNA target sequence for 2210417O06Rik (NM_025618.1,281-299).
ggaggatacaagcctttta

SEQ ID NO: 542824 - DNA, 19 bp, Mus musculus
  siRNA target sequence for 2300002L21Rik (NM_026416.2,142-160).
gctggagaaggcagttgtt

SEQ ID NO: 542825 - DNA, 19 bp, Mus musculus
  siRNA target sequence for 2300002L21Rik (NM_026416.2,161-179).
gtcctggtggaaaactttt

SEQ ID NO: 542826 - DNA, 19 bp, Mus musculus
  siRNA target sequence for 2300002L21Rik (NM_026416.2,197-215).
cacagcctggtcaaaaaca

SEQ ID NO: 542827 - DNA, 19 bp, Mus musculus
  siRNA target sequence for 2300002L21Rik (NM_026416.2,352-370).
cgaatactggaccatgatt

SEQ ID NO: 542828 - DNA, 19 bp, Mus musculus
  siRNA target sequence for 2310047O13Rik (NM_024185.3,248-266).
ctgtcggacaccatcttct

SEQ ID NO: 542829 - DNA, 19 bp, Mus musculus
  siRNA target sequence for 2310047O13Rik (NM_024185.3,273-291).
ggacgcaagggtttgtgtt

SEQ ID NO: 542830 - DNA, 19 bp, Mus musculus
  siRNA target sequence for 2310047O13Rik (NM_024185.3,356-374).
gtccaggcgtttcttttga

SEQ ID NO: 542831 - DNA, 19 bp, Mus musculus
  siRNA target sequence for 2310047O13Rik (NM_024185.3,447-465).
gtcacaccttgtgtgatat

SEQ ID NO: 542832 - DNA, 19 bp, Mus musculus
  siRNA target sequence for 2310047O13Rik (NM_024185.3,451-469).
caccttgtgtgatattgta

SEQ ID NO: 542833 - DNA, 19 bp, Mus musculus
  siRNA target sequence for 2310047O13Rik (NM_024185.3,467-485).
gtagagagtgcttatgaca

SEQ ID NO: 542834 - DNA, 19 bp, Mus musculus
  siRNA target sequence for 2310047O13Rik (NM_024185.3,482-500).
gacagctctggatcatact

SEQ ID NO: 542835 - DNA, 19 bp, Mus musculus
  siRNA target sequence for 2310047O13Rik (NM_024185.3,623-641).
gagcgatttcatgcattaa

SEQ ID NO: 542836 - DNA, 19 bp, Mus musculus
  siRNA target sequence for 2310047O13Rik (NM_024185.3,627-645).
gatttcatgcattaattca

SEQ ID NO: 542837 - DNA, 19 bp, Mus musculus
  siRNA target sequence for 2310047O13Rik (NM_024185.3,686-704).
gtcttggaccagtattcaa

SEQ ID NO: 542838 - DNA, 19 bp, Mus musculus
  siRNA target sequence for 2310047O13Rik (NM_024185.3,723-741).
gagtcttgctttttctcta

SEQ ID NO: 542839 - DNA, 19 bp, Mus musculus
  siRNA target sequence for 2310047O13Rik (NM_024185.3,795-813).
caaatgagcctttgataga

SEQ ID NO: 542840 - DNA, 19 bp, Mus musculus
  siRNA target sequence for 2310047O13Rik (NM_024185.3,827-845).
catggcagccaaagcttaa

SEQ ID NO: 542841 - DNA, 19 bp, Mus musculus
  siRNA target sequence for 2310047O13Rik (NM_024185.3,859-877).
gacggggcatgcagtatct

SEQ ID NO: 542842 - DNA, 19 bp, Mus musculus
  siRNA target sequence for 2310047O13Rik (NM_024185.3,861-879).
cggggcatgcagtatctaa

SEQ ID NO: 542843 - DNA, 19 bp, Mus musculus
  siRNA target sequence for 2310047O13Rik (NM_024185.3,864-882).
ggcatgcagtatctaatgt

SEQ ID NO: 542844 - DNA, 19 bp, Mus musculus
  siRNA target sequence for 2310047O13Rik (NM_024185.3,865-883).
gcatgcagtatctaatgta

SEQ ID NO: 542845 - DNA, 19 bp, Mus musculus
  siRNA target sequence for 2310047O13Rik (NM_024185.3,913-931).
gcaacttctcggtatccat

SEQ ID NO: 542846 - DNA, 19 bp, Mus musculus
  siRNA target sequence for 2310047O13Rik (NM_024185.3,944-962).
gtaggattcttaacactaa

SEQ ID NO: 542847 - DNA, 19 bp, Mus musculus
  siRNA target sequence for 2310047O13Rik (NM_024185.3,959-977).
ctaatggaagctttacgat

SEQ ID NO: 542848 - DNA, 19 bp, Mus musculus
  siRNA target sequence for 2310047O13Rik (NM_024185.3,965-983).
gaagctttacgatattgta

SEQ ID NO: 542849 - DNA, 19 bp, Mus musculus
  siRNA target sequence for 2310047O13Rik (NM_024185.3,985-1003).
ggttggttcttacttgaaa

SEQ ID NO: 542850 - DNA, 19 bp, Mus musculus
  siRNA target sequence for 2310047O13Rik (NM_024185.3,1052-1070).
gtattttttgccaaggata

SEQ ID NO: 542851 - DNA, 19 bp, Mus musculus
  siRNA target sequence for 2310047O13Rik (NM_024185.3,1062-1080).
ccaaggatatggctttagt

SEQ ID NO: 542852 - DNA, 19 bp, Mus musculus
  siRNA target sequence for 2310047O13Rik (NM_024185.3,1125-1143).
cctatgatccggaagataa

SEQ ID NO: 542853 - DNA, 19 bp, Mus musculus
  siRNA target sequence for 2310047O13Rik (NM_024185.3,1134-1152).
cggaagataatggattcat

SEQ ID NO: 542854 - DNA, 19 bp, Mus musculus
  siRNA target sequence for 2310047O13Rik (NM_024185.3,1155-1173).
ctgactcccttctagaaga

SEQ ID NO: 542855 - DNA, 19 bp, Mus musculus
  siRNA target sequence for 2310047O13Rik (NM_024185.3,1196-1214).
gtttcagatcccgagtata

SEQ ID NO: 542856 - DNA, 19 bp, Mus musculus
  siRNA target sequence for 2310047O13Rik (NM_024185.3,1200-1218).
cagatcccgagtatataaa

SEQ ID NO: 542857 - DNA, 19 bp, Mus musculus
  siRNA target sequence for 2310047O13Rik (NM_024185.3,1206-1224).
ccgagtatataaatctcat

SEQ ID NO: 542858 - DNA, 19 bp, Mus musculus
  siRNA target sequence for 2310047O13Rik (NM_024185.3,1344-1362).
gattgaagcagtcaaatta

SEQ ID NO: 542859 - DNA, 19 bp, Mus musculus
  siRNA target sequence for 2310047O13Rik (NM_024185.3,1348-1366).
gaagcagtcaaattataat

SEQ ID NO: 542860 - DNA, 19 bp, Mus musculus
  siRNA target sequence for 2310047O13Rik (NM_024185.3,1352-1370).
cagtcaaattataatgaaa

SEQ ID NO: 542861 - DNA, 19 bp, Mus musculus
  siRNA target sequence for 2310047O13Rik (NM_024185.3,1395-1413).
cagtggttatgggttttga

SEQ ID NO: 542862 - DNA, 19 bp, Mus musculus
  siRNA target sequence for 2310047O13Rik (NM_024185.3,1429-1447).
gacagacgacactcctatt

SEQ ID NO: 542863 - DNA, 19 bp, Mus musculus
  siRNA target sequence for 2310047O13Rik (NM_024185.3,1464-1482).
ccaaatggccatacattga

SEQ ID NO: 542864 - DNA, 19 bp, Mus musculus
  siRNA target sequence for 2310047O13Rik (NM_024185.3,1470-1488).
ggccatacattgagttact

SEQ ID NO: 542865 - DNA, 19 bp, Mus musculus
  siRNA target sequence for 2310068O22Rik (NM_027416.1,193-211).
gtatcaccacccaagaatt

SEQ ID NO: 542866 - DNA, 19 bp, Mus musculus
  siRNA target sequence for 2310068O22Rik (NM_027416.1,265-283).
gcatggtgaatgaaattga

SEQ ID NO: 542867 - DNA, 19 bp, Mus musculus
  siRNA target sequence for 2310068O22Rik (NM_027416.1,312-330).
cccgagttcctgacaatga

SEQ ID NO: 542868 - DNA, 19 bp, Mus musculus
  siRNA target sequence for 2310068O22Rik (NM_027416.1,313-331).
ccgagttcctgacaatgat

SEQ ID NO: 542869 - DNA, 19 bp, Mus musculus
  siRNA target sequence for 2310068O22Rik (NM_027416.1,511-529).
gtgatgggcaagtgaacta

SEQ ID NO: 542870 - DNA, 19 bp, Mus musculus
  siRNA target sequence for 2410011K10Rik (NM_021344.2,233-251).
cgcaaggagaacttcaaca

SEQ ID NO: 542871 - DNA, 19 bp, Mus musculus
  siRNA target sequence for 2410011K10Rik (NM_021344.2,271-289).
caacccgatccgatccaaa

SEQ ID NO: 542872 - DNA, 19 bp, Mus musculus
  siRNA target sequence for 2410011K10Rik (NM_021344.2,276-294).
cgatccgatccaaaatcgt

SEQ ID NO: 542873 - DNA, 19 bp, Mus musculus
  siRNA target sequence for 2410011K10Rik (NM_021344.2,339-357).
gtctggccgatgagatcaa

SEQ ID NO: 542874 - DNA, 19 bp, Mus musculus
  siRNA target sequence for 2410011K10Rik (NM_021344.2,343-361).
ggccgatgagatcaacttt

SEQ ID NO: 542875 - DNA, 19 bp, Mus musculus
  siRNA target sequence for 2410011K10Rik (NM_021344.2,535-553).
ctcgggaaaccctcacatt

SEQ ID NO: 542876 - DNA, 19 bp, Mus musculus
  siRNA target sequence for 2410011K10Rik (NM_021344.2,537-555).
cgggaaaccctcacattga

SEQ ID NO: 542877 - DNA, 19 bp, Mus musculus
  siRNA target sequence for 2410011K10Rik (NM_021344.2,699-717).
ccaagatgcacattcgttt

SEQ ID NO: 542878 - DNA, 19 bp, Mus musculus
  siRNA target sequence for 2600002E23Rik (NM_026441.2,348-366).
gtacccagcctggacatta

SEQ ID NO: 542879 - DNA, 19 bp, Mus musculus
  siRNA target sequence for 2600002E23Rik (NM_026441.2,432-450).
ccgatcacagtggctatat

SEQ ID NO: 542880 - DNA, 19 bp, Mus musculus
  siRNA target sequence for 2600002E23Rik (NM_026441.2,486-504).
ccaactggtcctcattcaa

SEQ ID NO: 542881 - DNA, 19 bp, Mus musculus
  siRNA target sequence for 2600002E23Rik (NM_026441.2,487-505).
caactggtcctcattcaat

SEQ ID NO: 542882 - DNA, 19 bp, Mus musculus
  siRNA target sequence for 2600002E23Rik (NM_026441.2,547-565).
caagtctggccgcattgat

SEQ ID NO: 542883 - DNA, 19 bp, Mus musculus
  siRNA target sequence for 2600002E23Rik (NM_026441.2,638-656).
cgctcgggctccattagct

SEQ ID NO: 542884 - DNA, 19 bp, Mus musculus
  siRNA target sequence for 2600002E23Rik (NM_026441.2,736-754).
ctgcgcacgctctgctatt

SEQ ID NO: 542885 - DNA, 19 bp, Mus musculus
  siRNA target sequence for 2600002E23Rik (NM_026441.2,814-832).
ggccttccgggaaaaggat

SEQ ID NO: 542886 - DNA, 19 bp, Mus musculus
  siRNA target sequence for 2610016M12Rik (NM_172685.1,229-247).
gacgcggaggagaaaattt

SEQ ID NO: 542887 - DNA, 19 bp, Mus musculus
  siRNA target sequence for 2610016M12Rik (NM_172685.1,252-270).
cactggcgatgtcaacaaa

SEQ ID NO: 542888 - DNA, 19 bp, Mus musculus
  siRNA target sequence for 2610016M12Rik (NM_172685.1,254-272).
ctggcgatgtcaacaaaga

SEQ ID NO: 542889 - DNA, 19 bp, Mus musculus
  siRNA target sequence for 2610016M12Rik (NM_172685.1,347-365).
gtttggacaagaataatga

SEQ ID NO: 542890 - DNA, 19 bp, Mus musculus
  siRNA target sequence for 2610016M12Rik (NM_172685.1,369-387).
gaaaatcgagccttctgaa

SEQ ID NO: 542891 - DNA, 19 bp, Mus musculus
  siRNA target sequence for 2610016M12Rik (NM_172685.1,411-429).
cggtttacatatttctgaa

SEQ ID NO: 542892 - DNA, 19 bp, Mus musculus
  siRNA target sequence for 2610016M12Rik (NM_172685.1,436-454).
gcagagctgattcttcaaa

SEQ ID NO: 542893 - DNA, 19 bp, Mus musculus
  siRNA target sequence for 2610016M12Rik (NM_172685.1,497-515).
ggagggattactttttatt

SEQ ID NO: 542894 - DNA, 19 bp, Mus musculus
  siRNA target sequence for 2610016M12Rik (NM_172685.1,525-543).
gacagacattgaggaaatt

SEQ ID NO: 542895 - DNA, 19 bp, Mus musculus
  siRNA target sequence for 2610016M12Rik (NM_172685.1,555-573).
gaaacactctactggaatt

SEQ ID NO: 542896 - DNA, 19 bp, Mus musculus
  siRNA target sequence for 2610016M12Rik (NM_172685.1,574-592).
gacataggggatagtttaa

SEQ ID NO: 542897 - DNA, 19 bp, Mus musculus
  siRNA target sequence for 2610016M12Rik (NM_172685.1,723-741).
gcaggttcatggttccaaa

SEQ ID NO: 542898 - DNA, 19 bp, Mus musculus
  siRNA target sequence for 2610016M12Rik (NM_172685.1,724-742).
caggttcatggttccaaat

SEQ ID NO: 542899 - DNA, 19 bp, Mus musculus
  siRNA target sequence for 2610016M12Rik (NM_172685.1,733-751).
ggttccaaatcaatgaata

SEQ ID NO: 542900 - DNA, 19 bp, Mus musculus
  siRNA target sequence for 2610016M12Rik (NM_172685.1,760-778).
ggctttcggcagatggtaa

SEQ ID NO: 542901 - DNA, 19 bp, Mus musculus
  siRNA target sequence for 2610016M12Rik (NM_172685.1,819-837).
caatgtcatcaaaatagct

SEQ ID NO: 542902 - DNA, 19 bp, Mus musculus
  siRNA target sequence for 2610016M12Rik (NM_172685.1,871-889).
cagtacaagaagttgctta

SEQ ID NO: 542903 - DNA, 19 bp, Mus musculus
  siRNA target sequence for 2610016M12Rik (NM_172685.1,910-928).
gggacctttgagaggttta

SEQ ID NO: 542904 - DNA, 19 bp, Mus musculus
  siRNA target sequence for 2610016M12Rik (NM_172685.1,911-929).
ggacctttgagaggtttat

SEQ ID NO: 542905 - DNA, 19 bp, Mus musculus
  siRNA target sequence for 2610016M12Rik (NM_172685.1,949-967).
gcaactgctcagactttta

SEQ ID NO: 542906 - DNA, 19 bp, Mus musculus
  siRNA target sequence for 2610016M12Rik (NM_172685.1,953-971).
ctgctcagacttttattta

SEQ ID NO: 542907 - DNA, 19 bp, Mus musculus
  siRNA target sequence for 2610016M12Rik (NM_172685.1,1006-1024).
gccaaaactggacaatact

SEQ ID NO: 542908 - DNA, 19 bp, Mus musculus
  siRNA target sequence for 2610016M12Rik (NM_172685.1,1015-1033).
ggacaatactccggaatat

SEQ ID NO: 542909 - DNA, 19 bp, Mus musculus
  siRNA target sequence for 2610016M12Rik (NM_172685.1,1016-1034).
gacaatactccggaatata

SEQ ID NO: 542910 - DNA, 19 bp, Mus musculus
  siRNA target sequence for 2610016M12Rik (NM_172685.1,1035-1053).
cggttgtgccaagaagatt

SEQ ID NO: 542911 - DNA, 19 bp, Mus musculus
  siRNA target sequence for 2610016M12Rik (NM_172685.1,1139-1157).
ctgtgtacgagcttttgaa

SEQ ID NO: 542912 - DNA, 19 bp, Mus musculus
  siRNA target sequence for 2610016M12Rik (NM_172685.1,1141-1159).
gtgtacgagcttttgaagt

SEQ ID NO: 542913 - DNA, 19 bp, Mus musculus
  siRNA target sequence for 2610016M12Rik (NM_172685.1,1146-1164).
cgagcttttgaagtcttat

SEQ ID NO: 542914 - DNA, 19 bp, Mus musculus
  siRNA target sequence for 2610016M12Rik (NM_172685.1,1160-1178).
cttattggctggataactt

SEQ ID NO: 542915 - DNA, 19 bp, Mus musculus
  siRNA target sequence for 2610016M12Rik (NM_172685.1,1171-1189).
gataactttgccaaagact

SEQ ID NO: 542916 - DNA, 19 bp, Mus musculus
  siRNA target sequence for 2610016M12Rik (NM_172685.1,1366-1384).
ggagtgtcaggactttaca

SEQ ID NO: 542917 - DNA, 19 bp, Mus musculus
  siRNA target sequence for 2610042J10Rik (NM_027266.2,207-225).
gaccagccctgcaaacagt

SEQ ID NO: 542918 - DNA, 19 bp, Mus musculus
  siRNA target sequence for 2610042J10Rik (NM_027266.2,226-244).
gccgtgtggagctcgaaaa

SEQ ID NO: 542919 - DNA, 19 bp, Mus musculus
  siRNA target sequence for 2610042J10Rik (NM_027266.2,227-245).
ccgtgtggagctcgaaaaa

SEQ ID NO: 542920 - DNA, 19 bp, Mus musculus
  siRNA target sequence for 2610042J10Rik (NM_027266.2,229-247).
gtgtggagctcgaaaaaca

SEQ ID NO: 542921 - DNA, 19 bp, Mus musculus
  siRNA target sequence for 2610042J10Rik (NM_027266.2,370-388).
cacagcaaacgctttttga

SEQ ID NO: 542922 - DNA, 19 bp, Mus musculus
  siRNA target sequence for 2610042J10Rik (NM_027266.2,424-442).
cactcaggaccaagactat

SEQ ID NO: 542923 - DNA, 19 bp, Mus musculus
  siRNA target sequence for 2610042J10Rik (NM_027266.2,606-624).
gatgaacgacgggttttct

SEQ ID NO: 542924 - DNA, 19 bp, Mus musculus
  siRNA target sequence for 2610042J10Rik (NM_027266.2,711-729).
ctcccttgaagacattgat

SEQ ID NO: 542925 - DNA, 19 bp, Mus musculus
  siRNA target sequence for 2610042J10Rik (NM_027266.2,730-748).
cagagcacagtttacgtta

SEQ ID NO: 542926 - DNA, 19 bp, Mus musculus
  siRNA target sequence for 2610042J10Rik (NM_027266.2,735-753).
cacagtttacgttattggt

SEQ ID NO: 542927 - DNA, 19 bp, Mus musculus
  siRNA target sequence for 2610042J10Rik (NM_027266.2,760-778).
gtagatgagagcattcaga

SEQ ID NO: 542928 - DNA, 19 bp, Mus musculus
  siRNA target sequence for 2610042J10Rik (NM_027266.2,793-811).
caaaaagcccgagaatact

SEQ ID NO: 542929 - DNA, 19 bp, Mus musculus
  siRNA target sequence for 2610205J15Rik (NM_152813.1,368-386).
cagcttctaagcacatatt

SEQ ID NO: 542930 - DNA, 19 bp, Mus musculus
  siRNA target sequence for 2610205J15Rik (NM_152813.1,370-388).
gcttctaagcacatattct

SEQ ID NO: 542931 - DNA, 19 bp, Mus musculus
  siRNA target sequence for 2610205J15Rik (NM_152813.1,607-625).
ctagaccattggatccatt

SEQ ID NO: 542932 - DNA, 19 bp, Mus musculus
  siRNA target sequence for 2610205J15Rik (NM_152813.1,612-630).
ccattggatccattcctat

SEQ ID NO: 542933 - DNA, 19 bp, Mus musculus
  siRNA target sequence for 2610205J15Rik (NM_152813.1,647-665).
ccgaccaagacagtaagat

SEQ ID NO: 542934 - DNA, 19 bp, Mus musculus
  siRNA target sequence for 2610205J15Rik (NM_152813.1,939-957).
gcagcttatccagacttat

SEQ ID NO: 542935 - DNA, 19 bp, Mus musculus
  siRNA target sequence for 2610205J15Rik (NM_152813.1,995-1013).
cgctggatggcttcatgat

SEQ ID NO: 542936 - DNA, 19 bp, Mus musculus
  siRNA target sequence for 2610205J15Rik (NM_152813.1,999-1017).
ggatggcttcatgatgtat

SEQ ID NO: 542937 - DNA, 19 bp, Mus musculus
  siRNA target sequence for 2610205J15Rik (NM_152813.1,1084-1102).
cccctcgcccactacttta

SEQ ID NO: 542938 - DNA, 19 bp, Mus musculus
  siRNA target sequence for 2610205J15Rik (NM_152813.1,1085-1103).
ccctcgcccactactttat

SEQ ID NO: 542939 - DNA, 19 bp, Mus musculus
  siRNA target sequence for 2610205J15Rik (NM_152813.1,1106-1124).
cgtcctctcacaataccta

SEQ ID NO: 542940 - DNA, 19 bp, Mus musculus
  siRNA target sequence for 2610205J15Rik (NM_152813.1,1154-1172).
gcagcacagaggcttatat

SEQ ID NO: 542941 - DNA, 19 bp, Mus musculus
  siRNA target sequence for 2610205J15Rik (NM_152813.1,1229-1247).
gaggggaacctgtcatcta

SEQ ID NO: 542942 - DNA, 19 bp, Mus musculus
  siRNA target sequence for 2610205J15Rik (NM_152813.1,1317-1335).
cacgtcgtccccatatcct

SEQ ID NO: 542943 - DNA, 19 bp, Mus musculus
  siRNA target sequence for 2610205J15Rik (NM_152813.1,1322-1340).
cgtccccatatcctgtaat

SEQ ID NO: 542944 - DNA, 19 bp, Mus musculus
  siRNA target sequence for 2610205J15Rik (NM_152813.1,1524-1542).
gagtgaggatggtcgaatt

SEQ ID NO: 542945 - DNA, 19 bp, Mus musculus
  siRNA target sequence for 2610205J15Rik (NM_152813.1,1648-1666).
gcgctggctgtgtattgct

SEQ ID NO: 542946 - DNA, 19 bp, Mus musculus
  siRNA target sequence for 2610205J15Rik (NM_152813.1,1741-1759).
cgcaaggccaggaagttca

SEQ ID NO: 542947 - DNA, 19 bp, Mus musculus
  siRNA target sequence for 2610205J15Rik (NM_152813.1,1768-1786).
gcagggaccagctttgtca

SEQ ID NO: 542948 - DNA, 19 bp, Mus musculus
  siRNA target sequence for 2610205J15Rik (NM_152813.1,1822-1840).
ctggggctgcggatgaact

SEQ ID NO: 542949 - DNA, 19 bp, Mus musculus
  siRNA target sequence for 2610205J15Rik (NM_152813.1,1903-1921).
cagactcctggttatgaga

SEQ ID NO: 542950 - DNA, 19 bp, Mus musculus
  siRNA target sequence for 2610205J15Rik (NM_152813.1,1934-1952).
cagggcgcttcctcataaa

SEQ ID NO: 542951 - DNA, 19 bp, Mus musculus
  siRNA target sequence for 2610205J15Rik (NM_152813.1,1982-2000).
cttacctcaggcaactcaa

SEQ ID NO: 542952 - DNA, 19 bp, Mus musculus
  siRNA target sequence for 2610205J15Rik (NM_152813.1,2044-2062).
ctggcaatccaggtgttaa

SEQ ID NO: 542953 - DNA, 19 bp, Mus musculus
  siRNA target sequence for 2610205J15Rik (NM_152813.1,2171-2189).
cagactacgtcctcaacaa

SEQ ID NO: 542954 - DNA, 19 bp, Mus musculus
  siRNA target sequence for 2610205J15Rik (NM_152813.1,2282-2300).
ccacctctcccaatgattt

SEQ ID NO: 542955 - DNA, 19 bp, Mus musculus
  siRNA target sequence for 2810003C17Rik (NM_145144.1,193-211).
ctcgcagccttcaaagaga

SEQ ID NO: 542956 - DNA, 19 bp, Mus musculus
  siRNA target sequence for 2810003C17Rik (NM_145144.1,195-213).
cgcagccttcaaagagaaa

SEQ ID NO: 542957 - DNA, 19 bp, Mus musculus
  siRNA target sequence for 2810003C17Rik (NM_145144.1,246-264).
gattgatctgatgtcttta

SEQ ID NO: 542958 - DNA, 19 bp, Mus musculus
  siRNA target sequence for 2810434I23Rik (NM_019686.3,365-383).
ccgggagaatcccttcaaa

SEQ ID NO: 542959 - DNA, 19 bp, Mus musculus
  siRNA target sequence for 2810434I23Rik (NM_019686.3,367-385).
gggagaatcccttcaaaga

SEQ ID NO: 542960 - DNA, 19 bp, Mus musculus
  siRNA target sequence for 2810434I23Rik (NM_019686.3,481-499).
gggagctcaaggcaaacta

SEQ ID NO: 542961 - DNA, 19 bp, Mus musculus
  siRNA target sequence for 2810434I23Rik (NM_019686.3,536-554).
catctgtaaagaagactta

SEQ ID NO: 542962 - DNA, 19 bp, Mus musculus
  siRNA target sequence for 2810434I23Rik (NM_019686.3,689-707).
cgccaaggcccctgatttt

SEQ ID NO: 542963 - DNA, 19 bp, Mus musculus
  siRNA target sequence for 4732418C07Rik (NM_172698.2,629-647).
ggtgaccatcggagaaaga

SEQ ID NO: 542964 - DNA, 19 bp, Mus musculus
  siRNA target sequence for 4732418C07Rik (NM_172698.2,630-648).
gtgaccatcggagaaagaa

SEQ ID NO: 542965 - DNA, 19 bp, Mus musculus
  siRNA target sequence for 4732418C07Rik (NM_172698.2,779-797).
gcccgatgctgcaagatct

SEQ ID NO: 542966 - DNA, 19 bp, Mus musculus
  siRNA target sequence for 4732418C07Rik (NM_172698.2,912-930).
gaacaatggagtctaatca

SEQ ID NO: 542967 - DNA, 19 bp, Mus musculus
  siRNA target sequence for 4732418C07Rik (NM_172698.2,915-933).
caatggagtctaatcagaa

SEQ ID NO: 542968 - DNA, 19 bp, Mus musculus
  siRNA target sequence for 4732418C07Rik (NM_172698.2,967-985).
ggaacttctcagcaaacaa

SEQ ID NO: 542969 - DNA, 19 bp, Mus musculus
  siRNA target sequence for 4732418C07Rik (NM_172698.2,1080-1098).
ctgcagtaaaccacctaaa

SEQ ID NO: 542970 - DNA, 19 bp, Mus musculus
  siRNA target sequence for 4732418C07Rik (NM_172698.2,1108-1126).
caagtcagccgcagactta

SEQ ID NO: 542971 - DNA, 19 bp, Mus musculus
  siRNA target sequence for 4732418C07Rik (NM_172698.2,1111-1129).
gtcagccgcagacttactt

SEQ ID NO: 542972 - DNA, 19 bp, Mus musculus
  siRNA target sequence for 4732418C07Rik (NM_172698.2,1116-1134).
ccgcagacttacttagtct

SEQ ID NO: 542973 - DNA, 19 bp, Mus musculus
  siRNA target sequence for 4732418C07Rik (NM_172698.2,1168-1186).
ggcttccattggcaatact

SEQ ID NO: 542974 - DNA, 19 bp, Mus musculus
  siRNA target sequence for 4732418C07Rik (NM_172698.2,1264-1282).
gggcagtatggagaacaat

SEQ ID NO: 542975 - DNA, 19 bp, Mus musculus
  siRNA target sequence for 4732418C07Rik (NM_172698.2,1477-1495).
gagactcagcctgatagaa

SEQ ID NO: 542976 - DNA, 19 bp, Mus musculus
  siRNA target sequence for 4732418C07Rik (NM_172698.2,1611-1629).
ctgtacaggcgcaaagcat

SEQ ID NO: 542977 - DNA, 19 bp, Mus musculus
  siRNA target sequence for 4732418C07Rik (NM_172698.2,1662-1680).
ccgagcttcgagaaaaact

SEQ ID NO: 542978 - DNA, 19 bp, Mus musculus
  siRNA target sequence for 4732418C07Rik (NM_172698.2,1728-1746).
cggagaccacagatgaaga

SEQ ID NO: 542979 - DNA, 19 bp, Mus musculus
  siRNA target sequence for 4732418C07Rik (NM_172698.2,1748-1766).
caagtacagaacttcacat

SEQ ID NO: 542980 - DNA, 19 bp, Mus musculus
  siRNA target sequence for 4732418C07Rik (NM_172698.2,1779-1797).
cattgccagaattttcaca

SEQ ID NO: 542981 - DNA, 19 bp, Mus musculus
  siRNA target sequence for 4732418C07Rik (NM_172698.2,1787-1805).
gaattttcacagcttctta

SEQ ID NO: 542982 - DNA, 19 bp, Mus musculus
  siRNA target sequence for 4732418C07Rik (NM_172698.2,1811-1829).
caaattgagacccaagtaa

SEQ ID NO: 542983 - DNA, 19 bp, Mus musculus
  siRNA target sequence for 4732418C07Rik (NM_172698.2,1848-1866).
ggatttctagcatcaaaga

SEQ ID NO: 542984 - DNA, 19 bp, Mus musculus
  siRNA target sequence for 4732418C07Rik (NM_172698.2,1849-1867).
gatttctagcatcaaagat

SEQ ID NO: 542985 - DNA, 19 bp, Mus musculus
  siRNA target sequence for 4732418C07Rik (NM_172698.2,1861-1879).
caaagatcttcaggattta

SEQ ID NO: 542986 - DNA, 19 bp, Mus musculus
  siRNA target sequence for 4732418C07Rik (NM_172698.2,1972-1990).
gagagcatttgattcgaat

SEQ ID NO: 542987 - DNA, 19 bp, Mus musculus
  siRNA target sequence for 4732418C07Rik (NM_172698.2,2014-2032).
ggaactaagattagcttta

SEQ ID NO: 542988 - DNA, 19 bp, Mus musculus
  siRNA target sequence for 4921525D22 (NM_172497.1,62-80).
gtggggtcccccaaacctt

SEQ ID NO: 542989 - DNA, 19 bp, Mus musculus
  siRNA target sequence for 4921525D22 (NM_172497.1,67-85).
gtcccccaaacctttgcaa

SEQ ID NO: 542990 - DNA, 19 bp, Mus musculus
  siRNA target sequence for 4921525D22 (NM_172497.1,71-89).
cccaaacctttgcaaactt

SEQ ID NO: 542991 - DNA, 19 bp, Mus musculus
  siRNA target sequence for 4921525D22 (NM_172497.1,123-141).
ggacgagagcacctgaaat

SEQ ID NO: 542992 - DNA, 19 bp, Mus musculus
  siRNA target sequence for 4921525D22 (NM_172497.1,153-171).
gactcaccccagagcaaaa

SEQ ID NO: 542993 - DNA, 19 bp, Mus musculus
  siRNA target sequence for 4921525D22 (NM_172497.1,162-180).
cagagcaaaaggacgatat

SEQ ID NO: 542994 - DNA, 19 bp, Mus musculus
  siRNA target sequence for 4921525D22 (NM_172497.1,166-184).
gcaaaaggacgatataaga

SEQ ID NO: 542995 - DNA, 19 bp, Mus musculus
  siRNA target sequence for 4921525D22 (NM_172497.1,190-208).
ggtacttagggggtcaaaa

SEQ ID NO: 542996 - DNA, 19 bp, Mus musculus
  siRNA target sequence for 4921525D22 (NM_172497.1,232-250).
cttgagactagaacaagat

SEQ ID NO: 542997 - DNA, 19 bp, Mus musculus
  siRNA target sequence for 4921525D22 (NM_172497.1,239-257).
ctagaacaagatcgaaaat

SEQ ID NO: 542998 - DNA, 19 bp, Mus musculus
  siRNA target sequence for 4921525D22 (NM_172497.1,265-283).
gaggatgggatcatcagaa

SEQ ID NO: 542999 - DNA, 19 bp, Mus musculus
  siRNA target sequence for 4921525D22 (NM_172497.1,272-290).
ggatcatcagaagcaaaat

SEQ ID NO: 543000 - DNA, 19 bp, Mus musculus
  siRNA target sequence for 4921525D22 (NM_172497.1,564-582).
cggatgctgtagtggaaaa

SEQ ID NO: 543001 - DNA, 19 bp, Mus musculus
  siRNA target sequence for 4921525D22 (NM_172497.1,630-648).
ccacctgtgtcgtgatgaa

SEQ ID NO: 543002 - DNA, 19 bp, Mus musculus
  siRNA target sequence for 4921525D22 (NM_172497.1,730-748).
gcctctaataggtttagta

SEQ ID NO: 543003 - DNA, 19 bp, Mus musculus
  siRNA target sequence for 4921525D22 (NM_172497.1,731-749).
cctctaataggtttagtaa

SEQ ID NO: 543004 - DNA, 19 bp, Mus musculus
  siRNA target sequence for 4921525D22 (NM_172497.1,824-842).
gagcctccagggaacatca

SEQ ID NO: 543005 - DNA, 19 bp, Mus musculus
  siRNA target sequence for 4921525D22 (NM_172497.1,888-906).
caagtgcaggaaaagttaa

SEQ ID NO: 543006 - DNA, 19 bp, Mus musculus
  siRNA target sequence for 4921525D22 (NM_172497.1,946-964).
gcttcccaggctaatgact

SEQ ID NO: 543007 - DNA, 19 bp, Mus musculus
  siRNA target sequence for 4921525D22 (NM_172497.1,968-986).
ccagaggcaaagaagtatt

SEQ ID NO: 543008 - DNA, 19 bp, Mus musculus
  siRNA target sequence for 4921525D22 (NM_172497.1,1008-1026).
ctggagcagaaagagtatt

SEQ ID NO: 543009 - DNA, 19 bp, Mus musculus
  siRNA target sequence for 4921525D22 (NM_172497.1,1010-1028).
ggagcagaaagagtatttt

SEQ ID NO: 543010 - DNA, 19 bp, Mus musculus
  siRNA target sequence for 4921525D22 (NM_172497.1,1047-1065).
cccaaattgcaccttattt

SEQ ID NO: 543011 - DNA, 19 bp, Mus musculus
  siRNA target sequence for 4921525D22 (NM_172497.1,1049-1067).
caaattgcaccttatttga

SEQ ID NO: 543012 - DNA, 19 bp, Mus musculus
  siRNA target sequence for 4921525D22 (NM_172497.1,1068-1086).
cacatggactaagatctaa

SEQ ID NO: 543013 - DNA, 19 bp, Mus musculus
  siRNA target sequence for 4921525D22 (NM_172497.1,1092-1110).
caataccgatgggatcatt

SEQ ID NO: 543014 - DNA, 19 bp, Mus musculus
  siRNA target sequence for 4921525D22 (NM_172497.1,1097-1115).
ccgatgggatcattgataa

SEQ ID NO: 543015 - DNA, 19 bp, Mus musculus
  siRNA target sequence for 4921525D22 (NM_172497.1,1098-1116).
cgatgggatcattgataaa

SEQ ID NO: 543016 - DNA, 19 bp, Mus musculus
  siRNA target sequence for 4921525D22 (NM_172497.1,1187-1205).
cgagcaccattgggaaaat

SEQ ID NO: 543017 - DNA, 19 bp, Mus musculus
  siRNA target sequence for 4921525D22 (NM_172497.1,1198-1216).
gggaaaatctcatgatcaa

SEQ ID NO: 543018 - DNA, 19 bp, Mus musculus
  siRNA target sequence for 4921525D22 (NM_172497.1,1221-1239).
caggattgccaaaaggaat

SEQ ID NO: 543019 - DNA, 19 bp, Mus musculus
  siRNA target sequence for 4921525D22 (NM_172497.1,1241-1259).
gatgtgatcaacacaacat

SEQ ID NO: 543020 - DNA, 19 bp, Mus musculus
  siRNA target sequence for 4921525D22 (NM_172497.1,1292-1310).
cgtgacactgtgaatccat

SEQ ID NO: 543021 - DNA, 19 bp, Mus musculus
  siRNA target sequence for 4921525D22 (NM_172497.1,1297-1315).
cactgtgaatccatcgaaa

SEQ ID NO: 543022 - DNA, 19 bp, Mus musculus
  siRNA target sequence for 4921525D22 (NM_172497.1,1311-1329).
cgaaatccttcgaagatgt

SEQ ID NO: 543023 - DNA, 19 bp, Mus musculus
  siRNA target sequence for 4921525D22 (NM_172497.1,1317-1335).
ccttcgaagatgtgcttaa

SEQ ID NO: 543024 - DNA, 19 bp, Mus musculus
  siRNA target sequence for 4921525D22 (NM_172497.1,1346-1364).
gaaggacatgatttgtaca

SEQ ID NO: 543025 - DNA, 19 bp, Mus musculus
  siRNA target sequence for 4921525D22 (NM_172497.1,1360-1378).
gtacactgtctctcacaat

SEQ ID NO: 543026 - DNA, 19 bp, Mus musculus
  siRNA target sequence for 4921525D22 (NM_172497.1,1391-1409).
ggagaagcaaagaatcgaa

SEQ ID NO: 543027 - DNA, 19 bp, Mus musculus
  siRNA target sequence for 4921525D22 (NM_172497.1,1394-1412).
gaagcaaagaatcgaaaat

SEQ ID NO: 543028 - DNA, 19 bp, Mus musculus
  siRNA target sequence for 4921525D22 (NM_172497.1,1397-1415).
gcaaagaatcgaaaatata

SEQ ID NO: 543029 - DNA, 19 bp, Mus musculus
  siRNA target sequence for 4921525D22 (NM_172497.1,1419-1437).
cggcaagcttccataggtt

SEQ ID NO: 543030 - DNA, 19 bp, Mus musculus
  siRNA target sequence for 4921525D22 (NM_172497.1,1420-1438).
ggcaagcttccataggttt

SEQ ID NO: 543031 - DNA, 19 bp, Mus musculus
  siRNA target sequence for 4921525D22 (NM_172497.1,1425-1443).
gcttccataggtttaactt

SEQ ID NO: 543032 - DNA, 19 bp, Mus musculus
  siRNA target sequence for 4921525D22 (NM_172497.1,1429-1447).
ccataggtttaacttgtat

SEQ ID NO: 543033 - DNA, 19 bp, Mus musculus
  siRNA target sequence for 4921525D22 (NM_172497.1,1453-1471).
cccaacacctcactttaat

SEQ ID NO: 543034 - DNA, 19 bp, Mus musculus
  siRNA target sequence for 4921525D22 (NM_172497.1,1477-1495).
gcgcaccatggctaaagct

SEQ ID NO: 543035 - DNA, 19 bp, Mus musculus
  siRNA target sequence for 4921525D22 (NM_172497.1,1482-1500).
ccatggctaaagctttaca

SEQ ID NO: 543036 - DNA, 19 bp, Mus musculus
  siRNA target sequence for 4921525D22 (NM_172497.1,1483-1501).
catggctaaagctttacat

SEQ ID NO: 543037 - DNA, 19 bp, Mus musculus
  siRNA target sequence for 4921525D22 (NM_172497.1,1530-1548).
gagcgaaaattgtatccaa

SEQ ID NO: 543038 - DNA, 19 bp, Mus musculus
  siRNA target sequence for 4921525D22 (NM_172497.1,1604-1622).
cccattgcagaaactatga

SEQ ID NO: 543039 - DNA, 19 bp, Mus musculus
  siRNA target sequence for 4921525D22 (NM_172497.1,1657-1675).
ccatcctgaggaatatgga

SEQ ID NO: 543040 - DNA, 19 bp, Mus musculus
  siRNA target sequence for 4921525D22 (NM_172497.1,1676-1694).
gctggcgatctcatccatt

SEQ ID NO: 543041 - DNA, 19 bp, Mus musculus
  siRNA target sequence for 4921525D22 (NM_172497.1,1679-1697).
ggcgatctcatccattata

SEQ ID NO: 543042 - DNA, 19 bp, Mus musculus
  siRNA target sequence for 4921525D22 (NM_172497.1,1681-1699).
cgatctcatccattataga

SEQ ID NO: 543043 - DNA, 19 bp, Mus musculus
  siRNA target sequence for 4921525D22 (NM_172497.1,1682-1700).
gatctcatccattatagaa

SEQ ID NO: 543044 - DNA, 19 bp, Mus musculus
  siRNA target sequence for 4921525D22 (NM_172497.1,1752-1770).
ctgctcgccaccacttgaa

SEQ ID NO: 543045 - DNA, 19 bp, Mus musculus
  siRNA target sequence for 4921525D22 (NM_172497.1,1759-1777).
ccaccacttgaagaaattt

SEQ ID NO: 543046 - DNA, 19 bp, Mus musculus
  siRNA target sequence for 4921525D22 (NM_172497.1,1760-1778).
caccacttgaagaaattta

SEQ ID NO: 543047 - DNA, 19 bp, Mus musculus
  siRNA target sequence for 4921525D22 (NM_172497.1,1808-1826).
gctttcaggcactatgaca

SEQ ID NO: 543048 - DNA, 19 bp, Mus musculus
  siRNA target sequence for 4921525D22 (NM_172497.1,1881-1899).
ccaacctgcatctagacaa

SEQ ID NO: 543049 - DNA, 19 bp, Mus musculus
  siRNA target sequence for 4921525D22 (NM_172497.1,1907-1925).
ctggaccatctgtttgact

SEQ ID NO: 543050 - DNA, 19 bp, Mus musculus
  siRNA target sequence for 4921525D22 (NM_172497.1,1951-1969).
gatcaactacctggaattt

SEQ ID NO: 543051 - DNA, 19 bp, Mus musculus
  siRNA target sequence for 4921525D22 (NM_172497.1,1963-1981).
ggaatttgccaatttcctt

SEQ ID NO: 543052 - DNA, 19 bp, Mus musculus
  siRNA target sequence for 4921525D22 (NM_172497.1,2015-2033).
gagaagagggtcgttgtta

SEQ ID NO: 543053 - DNA, 19 bp, Mus musculus
  siRNA target sequence for 4921525D22 (NM_172497.1,2017-2035).
gaagagggtcgttgttaaa

SEQ ID NO: 543054 - DNA, 19 bp, Mus musculus
  siRNA target sequence for 4921525D22 (NM_172497.1,2050-2068).
ctgtgaaaacgttactgat

SEQ ID NO: 543055 - DNA, 19 bp, Mus musculus
  siRNA target sequence for 4921525D22 (NM_172497.1,2054-2072).
gaaaacgttactgatacta

SEQ ID NO: 543056 - DNA, 19 bp, Mus musculus
  siRNA target sequence for 4921525D22 (NM_172497.1,2101-2119).
gataaatcctgaagacatt

SEQ ID NO: 543057 - DNA, 19 bp, Mus musculus
  siRNA target sequence for 4921525D22 (NM_172497.1,2183-2201).
gtttctcaccagtataaga

SEQ ID NO: 543058 - DNA, 19 bp, Mus musculus
  siRNA target sequence for 4921525D22 (NM_172497.1,2244-2262).
ccatgtgtcaccccatatt

SEQ ID NO: 543059 - DNA, 19 bp, Mus musculus
  siRNA target sequence for 4921525D22 (NM_172497.1,2264-2282).
ggtgttccaaccattcgat

SEQ ID NO: 543060 - DNA, 19 bp, Mus musculus
  siRNA target sequence for 4921525D22 (NM_172497.1,2307-2325).
gtcgagtcagtgacatgaa

SEQ ID NO: 543061 - DNA, 19 bp, Mus musculus
  siRNA target sequence for 4921525D22 (NM_172497.1,2310-2328).
gagtcagtgacatgaataa

SEQ ID NO: 543062 - DNA, 19 bp, Mus musculus
  siRNA target sequence for 4921525D22 (NM_172497.1,2312-2330).
gtcagtgacatgaataact

SEQ ID NO: 543063 - DNA, 19 bp, Mus musculus
  siRNA target sequence for 4921525D22 (NM_172497.1,2381-2399).
cagaaaggtgtatttgaga

SEQ ID NO: 543064 - DNA, 19 bp, Mus musculus
  siRNA target sequence for 4921525D22 (NM_172497.1,2431-2449).
gatttcagatatattaact

SEQ ID NO: 543065 - DNA, 19 bp, Mus musculus
  siRNA target sequence for 4921525D22 (NM_172497.1,2436-2454).
cagatatattaactaacat

SEQ ID NO: 543066 - DNA, 19 bp, Mus musculus
  siRNA target sequence for 4921525D22 (NM_172497.1,2541-2559).
ctatcaggaacgttctaga

SEQ ID NO: 543067 - DNA, 19 bp, Mus musculus
  siRNA target sequence for 4921525D22 (NM_172497.1,2576-2594).
gacctcgtcaagtgtaaaa

SEQ ID NO: 543068 - DNA, 19 bp, Mus musculus
  siRNA target sequence for 4930474N05 (NM_175008.1,43-61).
gtgtcttaggactactaga

SEQ ID NO: 543069 - DNA, 19 bp, Mus musculus
  siRNA target sequence for 4930474N05 (NM_175008.1,63-81).
gcttgggcctcaagaaaga

SEQ ID NO: 543070 - DNA, 19 bp, Mus musculus
  siRNA target sequence for 4930474N05 (NM_175008.1,237-255).
ccatcagtgctgaaatggt

SEQ ID NO: 543071 - DNA, 19 bp, Mus musculus
  siRNA target sequence for 4930474N05 (NM_175008.1,243-261).
gtgctgaaatggttgttaa

SEQ ID NO: 543072 - DNA, 19 bp, Mus musculus
  siRNA target sequence for 4930474N05 (NM_175008.1,246-264).
ctgaaatggttgttaagtt

SEQ ID NO: 543073 - DNA, 19 bp, Mus musculus
  siRNA target sequence for 4930474N05 (NM_175008.1,292-310).
ggaaggagaccacttcttt

SEQ ID NO: 543074 - DNA, 19 bp, Mus musculus
  siRNA target sequence for 4930474N05 (NM_175008.1,407-425).
gttgagcatagacaagtaa

SEQ ID NO: 543075 - DNA, 19 bp, Mus musculus
  siRNA target sequence for 4930474N05 (NM_175008.1,426-444).
ggagcagcctctgtaactt

SEQ ID NO: 543076 - DNA, 19 bp, Mus musculus
  siRNA target sequence for 4930474N05 (NM_175008.1,510-528).
catacctgaaggcctattt

SEQ ID NO: 543077 - DNA, 19 bp, Mus musculus
  siRNA target sequence for 4930474N05 (NM_175008.1,514-532).
cctgaaggcctatttgagt

SEQ ID NO: 543078 - DNA, 19 bp, Mus musculus
  siRNA target sequence for 4930474N05 (NM_175008.1,564-582).
gtgtcgataggcttctgaa

SEQ ID NO: 543079 - DNA, 19 bp, Mus musculus
  siRNA target sequence for 4930474N05 (NM_175008.1,607-625).
ggattcccatgccaagaat

SEQ ID NO: 543080 - DNA, 19 bp, Mus musculus
  siRNA target sequence for 4930474N05 (NM_175008.1,655-673).
ctcctccgatccagaactt

SEQ ID NO: 543081 - DNA, 19 bp, Mus musculus
  siRNA target sequence for 4930474N05 (NM_175008.1,657-675).
cctccgatccagaacttaa

SEQ ID NO: 543082 - DNA, 19 bp, Mus musculus
  siRNA target sequence for 4930474N05 (NM_175008.1,658-676).
ctccgatccagaacttaaa

SEQ ID NO: 543083 - DNA, 19 bp, Mus musculus
  siRNA target sequence for 4930474N05 (NM_175008.1,661-679).
cgatccagaacttaaacgt

SEQ ID NO: 543084 - DNA, 19 bp, Mus musculus
  siRNA target sequence for 4930474N05 (NM_175008.1,666-684).
cagaacttaaacgttgtaa

SEQ ID NO: 543085 - DNA, 19 bp, Mus musculus
  siRNA target sequence for 4930474N05 (NM_175008.1,668-686).
gaacttaaacgttgtaaat

SEQ ID NO: 543086 - DNA, 19 bp, Mus musculus
  siRNA target sequence for 4930511A21Rik (NM_021529.2,231-249).
cgcccaacacggatccaaa

SEQ ID NO: 543087 - DNA, 19 bp, Mus musculus
  siRNA target sequence for 4930511A21Rik (NM_021529.2,252-270).
ggaaaaaaagcgaacaaga

SEQ ID NO: 543088 - DNA, 19 bp, Mus musculus
  siRNA target sequence for 4930511A21Rik (NM_021529.2,290-308).
gatttatttaccaaatact

SEQ ID NO: 543089 - DNA, 19 bp, Mus musculus
  siRNA target sequence for 4930511A21Rik (NM_021529.2,355-373).
gaccataccccggttttat

SEQ ID NO: 543090 - DNA, 19 bp, Mus musculus
  siRNA target sequence for 4930511A21Rik (NM_021529.2,357-375).
ccataccccggttttatta

SEQ ID NO: 543091 - DNA, 19 bp, Mus musculus
  siRNA target sequence for 4930511A21Rik (NM_021529.2,379-397).
gttgccagctgaagatgaa

SEQ ID NO: 543092 - DNA, 19 bp, Mus musculus
  siRNA target sequence for 4930511A21Rik (NM_021529.2,456-474).
gagaactcttagataacga

SEQ ID NO: 543093 - DNA, 19 bp, Mus musculus
  siRNA target sequence for 4930511A21Rik (NM_021529.2,472-490).
cgaagagttgcagaactta

SEQ ID NO: 543094 - DNA, 19 bp, Mus musculus
  siRNA target sequence for 4930511A21Rik (NM_021529.2,473-491).
gaagagttgcagaacttat

SEQ ID NO: 543095 - DNA, 19 bp, Mus musculus
  siRNA target sequence for 4930511A21Rik (NM_021529.2,476-494).
gagttgcagaacttatggt

SEQ ID NO: 543096 - DNA, 19 bp, Mus musculus
  siRNA target sequence for 4930511A21Rik (NM_021529.2,478-496).
gttgcagaacttatggttt

SEQ ID NO: 543097 - DNA, 19 bp, Mus musculus
  siRNA target sequence for 4930511A21Rik (NM_021529.2,645-663).
catatggacgaatttccat

SEQ ID NO: 543098 - DNA, 19 bp, Mus musculus
  siRNA target sequence for 4930511A21Rik (NM_021529.2,660-678).
ccatcatgcagttctttaa

SEQ ID NO: 543099 - DNA, 19 bp, Mus musculus
  siRNA target sequence for 4930511A21Rik (NM_021529.2,679-697).
ctacgtcatgcgaaaagtt

SEQ ID NO: 543100 - DNA, 19 bp, Mus musculus
  siRNA target sequence for 4930511A21Rik (NM_021529.2,700-718).
gctgcatcagacaagaata

SEQ ID NO: 543101 - DNA, 19 bp, Mus musculus
  siRNA target sequence for 4930511A21Rik (NM_021529.2,720-738).
gactcagtttatatgatgt

SEQ ID NO: 543102 - DNA, 19 bp, Mus musculus
  siRNA target sequence for 4930511A21Rik (NM_021529.2,831-849).
ccttctactccttctatgt

SEQ ID NO: 543103 - DNA, 19 bp, Mus musculus
  siRNA target sequence for 4930511A21Rik (NM_021529.2,897-915).
cagggaagatcaaaattca

SEQ ID NO: 543104 - DNA, 19 bp, Mus musculus
  siRNA target sequence for 4930511A21Rik (NM_021529.2,933-951).
gttttctagatgatttact

SEQ ID NO: 543105 - DNA, 19 bp, Mus musculus
  siRNA target sequence for 4930511A21Rik (NM_021529.2,956-974).
ctaagagatgaggaattgt

SEQ ID NO: 543106 - DNA, 19 bp, Mus musculus
  siRNA target sequence for 4930511A21Rik (NM_021529.2,986-1004).
caagaaacaaattggtttt

SEQ ID NO: 543107 - DNA, 19 bp, Mus musculus
  siRNA target sequence for 4930511A21Rik (NM_021529.2,1025-1043).
gtctatggtcagtatttga

SEQ ID NO: 543108 - DNA, 19 bp, Mus musculus
  siRNA target sequence for 4930511A21Rik (NM_021529.2,1027-1045).
ctatggtcagtatttgaat

SEQ ID NO: 543109 - DNA, 19 bp, Mus musculus
  siRNA target sequence for 4930511A21Rik (NM_021529.2,1042-1060).
gaatcttgataaagatcat

SEQ ID NO: 543110 - DNA, 19 bp, Mus musculus
  siRNA target sequence for 4930511A21Rik (NM_021529.2,1103-1121).
gcaaccatgaccaatgtct

SEQ ID NO: 543111 - DNA, 19 bp, Mus musculus
  siRNA target sequence for 4930511A21Rik (NM_021529.2,1104-1122).
caaccatgaccaatgtctt

SEQ ID NO: 543112 - DNA, 19 bp, Mus musculus
  siRNA target sequence for 4930511A21Rik (NM_021529.2,1141-1159).
ggagtgtctcacttacgat

SEQ ID NO: 543113 - DNA, 19 bp, Mus musculus
  siRNA target sequence for 4930511A21Rik (NM_021529.2,1193-1211).
gttcttgccttagaaaaca

SEQ ID NO: 543114 - DNA, 19 bp, Mus musculus
  siRNA target sequence for 4930511A21Rik (NM_021529.2,1300-1318).
ctttagggccatacaagaa

SEQ ID NO: 543115 - DNA, 19 bp, Mus musculus
  siRNA target sequence for 4930511A21Rik (NM_021529.2,1305-1323).
gggccatacaagaactaat

SEQ ID NO: 543116 - DNA, 19 bp, Mus musculus
  siRNA target sequence for 4930511A21Rik (NM_021529.2,1358-1376).
gatgtcaaggatgaaatct

SEQ ID NO: 543117 - DNA, 19 bp, Mus musculus
  siRNA target sequence for 4930511A21Rik (NM_021529.2,1396-1414).
ggatcctttgaaaatctca

SEQ ID NO: 543118 - DNA, 19 bp, Mus musculus
  siRNA target sequence for 4930511A21Rik (NM_021529.2,1449-1467).
cagtcactaccattctaat

SEQ ID NO: 543119 - DNA, 19 bp, Mus musculus
  siRNA target sequence for 4930511A21Rik (NM_021529.2,1453-1471).
cactaccattctaattgat

SEQ ID NO: 543120 - DNA, 19 bp, Mus musculus
  siRNA target sequence for 4930511A21Rik (NM_021529.2,1455-1473).
ctaccattctaattgatct

SEQ ID NO: 543121 - DNA, 19 bp, Mus musculus
  siRNA target sequence for 4930511A21Rik (NM_021529.2,1458-1476).
ccattctaattgatctcaa

SEQ ID NO: 543122 - DNA, 19 bp, Mus musculus
  siRNA target sequence for 4930511A21Rik (NM_021529.2,1459-1477).
cattctaattgatctcaat

SEQ ID NO: 543123 - DNA, 19 bp, Mus musculus
  siRNA target sequence for 4930563A03Rik (NM_176965.2,189-207).
gctggaagcgttctatgat

SEQ ID NO: 543124 - DNA, 19 bp, Mus musculus
  siRNA target sequence for 4930563A03Rik (NM_176965.2,193-211).
gaagcgttctatgatcaat

SEQ ID NO: 543125 - DNA, 19 bp, Mus musculus
  siRNA target sequence for 4930563A03Rik (NM_176965.2,218-236).
ccaccactaggagtttact

SEQ ID NO: 543126 - DNA, 19 bp, Mus musculus
  siRNA target sequence for 4930563A03Rik (NM_176965.2,296-314).
ggggagacatggatattaa

SEQ ID NO: 543127 - DNA, 19 bp, Mus musculus
  siRNA target sequence for 4930563A03Rik (NM_176965.2,299-317).
gagacatggatattaagaa

SEQ ID NO: 543128 - DNA, 19 bp, Mus musculus
  siRNA target sequence for 4930563A03Rik (NM_176965.2,363-381).
gttagttgctgaaaaactt

SEQ ID NO: 543129 - DNA, 19 bp, Mus musculus
  siRNA target sequence for 4930563A03Rik (NM_176965.2,383-401).
caggcaaactcgcagaaaa

SEQ ID NO: 543130 - DNA, 19 bp, Mus musculus
  siRNA target sequence for 4930563A03Rik (NM_176965.2,385-403).
ggcaaactcgcagaaaaca

SEQ ID NO: 543131 - DNA, 19 bp, Mus musculus
  siRNA target sequence for 4930563A03Rik (NM_176965.2,387-405).
caaactcgcagaaaacaaa

SEQ ID NO: 543132 - DNA, 19 bp, Mus musculus
  siRNA target sequence for 4930563A03Rik (NM_176965.2,436-454).
ctttcatctgactcaacaa

SEQ ID NO: 543133 - DNA, 19 bp, Mus musculus
  siRNA target sequence for 4930563A03Rik (NM_176965.2,490-508).
cagagatcccgcagagtat

SEQ ID NO: 543134 - DNA, 19 bp, Mus musculus
  siRNA target sequence for 4930563A03Rik (NM_176965.2,492-510).
gagatcccgcagagtatca

SEQ ID NO: 543135 - DNA, 19 bp, Mus musculus
  siRNA target sequence for 4930563A03Rik (NM_176965.2,498-516).
ccgcagagtatcacttaca

SEQ ID NO: 543136 - DNA, 19 bp, Mus musculus
  siRNA target sequence for 4930563A03Rik (NM_176965.2,1003-1021).
gatccaaacagcgattcat

SEQ ID NO: 543137 - DNA, 19 bp, Mus musculus
  siRNA target sequence for 4930563A03Rik (NM_176965.2,1093-1111).
caacgcagagcatcagtaa

SEQ ID NO: 543138 - DNA, 19 bp, Mus musculus
  siRNA target sequence for 4930563A03Rik (NM_176965.2,1258-1276).
ccacatcaagagtccataa

SEQ ID NO: 543139 - DNA, 19 bp, Mus musculus
  siRNA target sequence for 4930563A03Rik (NM_176965.2,1303-1321).
ccaggaccgcaaatagaca

SEQ ID NO: 543140 - DNA, 19 bp, Mus musculus
  siRNA target sequence for 4930563A03Rik (NM_176965.2,1307-1325).
gaccgcaaatagacactat

SEQ ID NO: 543141 - DNA, 19 bp, Mus musculus
  siRNA target sequence for 4930563A03Rik (NM_176965.2,1310-1328).
cgcaaatagacactattca

SEQ ID NO: 543142 - DNA, 19 bp, Mus musculus
  siRNA target sequence for 4930563A03Rik (NM_176965.2,1344-1362).
ctcaactccacaattagaa

SEQ ID NO: 543143 - DNA, 19 bp, Mus musculus
  siRNA target sequence for 4930563A03Rik (NM_176965.2,1346-1364).
caactccacaattagaaga

SEQ ID NO: 543144 - DNA, 19 bp, Mus musculus
  siRNA target sequence for 4930563A03Rik (NM_176965.2,1365-1383).
cgatagtgccctaaaagaa

SEQ ID NO: 543145 - DNA, 19 bp, Mus musculus
  siRNA target sequence for 4930563A03Rik (NM_176965.2,1366-1384).
gatagtgccctaaaagaaa

SEQ ID NO: 543146 - DNA, 19 bp, Mus musculus
  siRNA target sequence for 4930563A03Rik (NM_176965.2,1370-1388).
gtgccctaaaagaaagtaa

SEQ ID NO: 543147 - DNA, 19 bp, Mus musculus
  siRNA target sequence for 4930563A03Rik (NM_176965.2,1391-1409).
cctcggaactcactaaaat

SEQ ID NO: 543148 - DNA, 19 bp, Mus musculus
  siRNA target sequence for 4930563A03Rik (NM_176965.2,1392-1410).
ctcggaactcactaaaata

SEQ ID NO: 543149 - DNA, 19 bp, Mus musculus
  siRNA target sequence for 4930563A03Rik (NM_176965.2,1487-1505).
ccacatccagcaaaaagga

SEQ ID NO: 543150 - DNA, 19 bp, Mus musculus
  siRNA target sequence for 4930563A03Rik (NM_176965.2,1534-1552).
cgcctttcaggaacttcaa

SEQ ID NO: 543151 - DNA, 19 bp, Mus musculus
  siRNA target sequence for 4930563A03Rik (NM_176965.2,1616-1634).
ggtcaggagaatttttgat

SEQ ID NO: 543152 - DNA, 19 bp, Mus musculus
  siRNA target sequence for 4930563A03Rik (NM_176965.2,1644-1662).
gaagataaagcatgtcaaa

SEQ ID NO: 543153 - DNA, 19 bp, Mus musculus
  siRNA target sequence for 4930563A03Rik (NM_176965.2,1672-1690).
gaggaacaggccaagttaa

SEQ ID NO: 543154 - DNA, 19 bp, Mus musculus
  siRNA target sequence for 4930563A03Rik (NM_176965.2,1675-1693).
gaacaggccaagttaatct

SEQ ID NO: 543155 - DNA, 19 bp, Mus musculus
  siRNA target sequence for 4930563A03Rik (NM_176965.2,1714-1732).
gacctacatgcgactatta

SEQ ID NO: 543156 - DNA, 19 bp, Mus musculus
  siRNA target sequence for 4930563A03Rik (NM_176965.2,1717-1735).
ctacatgcgactattagga

SEQ ID NO: 543157 - DNA, 19 bp, Mus musculus
  siRNA target sequence for 4930563A03Rik (NM_176965.2,1724-1742).
cgactattaggaattttca

SEQ ID NO: 543158 - DNA, 19 bp, Mus musculus
  siRNA target sequence for 4930563A03Rik (NM_176965.2,1733-1751).
ggaattttcagacttacaa

SEQ ID NO: 543159 - DNA, 19 bp, Mus musculus
  siRNA target sequence for 4930563A03Rik (NM_176965.2,1743-1761).
gacttacaaggggatcaaa

SEQ ID NO: 543160 - DNA, 19 bp, Mus musculus
  siRNA target sequence for 4930563A03Rik (NM_176965.2,1781-1799).
gagtctccctcgatttgct

SEQ ID NO: 543161 - DNA, 19 bp, Mus musculus
  siRNA target sequence for 4930563A03Rik (NM_176965.2,1860-1878).
ggacctcgcctcctttttt

SEQ ID NO: 543162 - DNA, 19 bp, Mus musculus
  siRNA target sequence for 4930563A03Rik (NM_176965.2,1871-1889).
ccttttttcagaagaacta

SEQ ID NO: 543163 - DNA, 19 bp, Mus musculus
  siRNA target sequence for 4930563A03Rik (NM_176965.2,1924-1942).
gaacaggccagacaaaatt

SEQ ID NO: 543164 - DNA, 19 bp, Mus musculus
  siRNA target sequence for 4930563A03Rik (NM_176965.2,1947-1965).
ccgcatccgacggagaatt

SEQ ID NO: 543165 - DNA, 19 bp, Mus musculus
  siRNA target sequence for 4930563A03Rik (NM_176965.2,1949-1967).
gcatccgacggagaattct

SEQ ID NO: 543166 - DNA, 19 bp, Mus musculus
  siRNA target sequence for 4930563A03Rik (NM_176965.2,2029-2047).
gttgatgatctcctgtata

SEQ ID NO: 543167 - DNA, 19 bp, Mus musculus
  siRNA target sequence for 4930563A03Rik (NM_176965.2,2035-2053).
gatctcctgtatacatata

SEQ ID NO: 543168 - DNA, 19 bp, Mus musculus
  siRNA target sequence for 4930563A03Rik (NM_176965.2,2117-2135).
gtcccggtcacgaagttaa

SEQ ID NO: 543169 - DNA, 19 bp, Mus musculus
  siRNA target sequence for 4930563A03Rik (NM_176965.2,2120-2138).
ccggtcacgaagttaaact

SEQ ID NO: 543170 - DNA, 19 bp, Mus musculus
  siRNA target sequence for 4930563A03Rik (NM_176965.2,2122-2140).
ggtcacgaagttaaactgt

SEQ ID NO: 543171 - DNA, 19 bp, Mus musculus
  siRNA target sequence for 4930563A03Rik (NM_176965.2,2291-2309).
ggctccatcagattcagta

SEQ ID NO: 543172 - DNA, 19 bp, Mus musculus
  siRNA target sequence for 4930563A03Rik (NM_176965.2,2380-2398).
gctgaggctcacggaaata

SEQ ID NO: 543173 - DNA, 19 bp, Mus musculus
  siRNA target sequence for 4930563A03Rik (NM_176965.2,2469-2487).
gaggaacgtggcttgtact

SEQ ID NO: 543174 - DNA, 19 bp, Mus musculus
  siRNA target sequence for 4930563A03Rik (NM_176965.2,2472-2490).
gaacgtggcttgtactcta

SEQ ID NO: 543175 - DNA, 19 bp, Mus musculus
  siRNA target sequence for 4930563A03Rik (NM_176965.2,2475-2493).
cgtggcttgtactctagat

SEQ ID NO: 543176 - DNA, 19 bp, Mus musculus
  siRNA target sequence for 4930563A03Rik (NM_176965.2,2498-2516).
ctccgttcgtcctgaacaa

SEQ ID NO: 543177 - DNA, 19 bp, Mus musculus
  siRNA target sequence for 4930563A03Rik (NM_176965.2,2590-2608).
gttcagcaccatggaaata

SEQ ID NO: 543178 - DNA, 19 bp, Mus musculus
  siRNA target sequence for 4930563A03Rik (NM_176965.2,2622-2640).
cagtttccgaagtaagaat

SEQ ID NO: 543179 - DNA, 19 bp, Mus musculus
  siRNA target sequence for 4930563A03Rik (NM_176965.2,2624-2642).
gtttccgaagtaagaatga

SEQ ID NO: 543180 - DNA, 19 bp, Mus musculus
  siRNA target sequence for 4930563A03Rik (NM_176965.2,2629-2647).
cgaagtaagaatgagtata

SEQ ID NO: 543181 - DNA, 19 bp, Mus musculus
  siRNA target sequence for 4930563A03Rik (NM_176965.2,2630-2648).
gaagtaagaatgagtataa

SEQ ID NO: 543182 - DNA, 19 bp, Mus musculus
  siRNA target sequence for 4930563A03Rik (NM_176965.2,2669-2687).
ctcttcaggatgcatacat

SEQ ID NO: 543183 - DNA, 19 bp, Mus musculus
  siRNA target sequence for 4930563A03Rik (NM_176965.2,2718-2736).
gcttcgagatcctcatgaa

SEQ ID NO: 543184 - DNA, 19 bp, Mus musculus
  siRNA target sequence for 4930563A03Rik (NM_176965.2,2722-2740).
cgagatcctcatgaaataa

SEQ ID NO: 543185 - DNA, 19 bp, Mus musculus
  siRNA target sequence for 4930563A03Rik (NM_176965.2,2752-2770).
cctcatgagatcaaattct

SEQ ID NO: 543186 - DNA, 19 bp, Mus musculus
  siRNA target sequence for 4930563A03Rik (NM_176965.2,2753-2771).
ctcatgagatcaaattcta

SEQ ID NO: 543187 - DNA, 19 bp, Mus musculus
  siRNA target sequence for 4930563A03Rik (NM_176965.2,2921-2939).
cagaacaggaagactatgt

SEQ ID NO: 543188 - DNA, 19 bp, Mus musculus
  siRNA target sequence for 4930563A03Rik (NM_176965.2,2923-2941).
gaacaggaagactatgttt

SEQ ID NO: 543189 - DNA, 19 bp, Mus musculus
  siRNA target sequence for 4930563A03Rik (NM_176965.2,2966-2984).
gtctcggtctagcagaaat

SEQ ID NO: 543190 - DNA, 19 bp, Mus musculus
  siRNA target sequence for 4930563A03Rik (NM_176965.2,3009-3027).
gaggaacgcatgcatcttt

SEQ ID NO: 543191 - DNA, 19 bp, Mus musculus
  siRNA target sequence for 4930563A03Rik (NM_176965.2,3137-3155).
gcatcctcgatgttaacat

SEQ ID NO: 543192 - DNA, 19 bp, Mus musculus
  siRNA target sequence for 4930563A03Rik (NM_176965.2,3138-3156).
catcctcgatgttaacatt

SEQ ID NO: 543193 - DNA, 19 bp, Mus musculus
  siRNA target sequence for 4930563A03Rik (NM_176965.2,3174-3192).
gctgtaccaagagtataaa

SEQ ID NO: 543194 - DNA, 19 bp, Mus musculus
  siRNA target sequence for 4930563A03Rik (NM_176965.2,3180-3198).
ccaagagtataaagatcta

SEQ ID NO: 543195 - DNA, 19 bp, Mus musculus
  siRNA target sequence for 4930563A03Rik (NM_176965.2,3256-3274).
ggcgaaatcgagaaaacta

SEQ ID NO: 543196 - DNA, 19 bp, Mus musculus
  siRNA target sequence for 4930563A03Rik (NM_176965.2,3257-3275).
gcgaaatcgagaaaactat

SEQ ID NO: 543197 - DNA, 19 bp, Mus musculus
  siRNA target sequence for 4930563A03Rik (NM_176965.2,3264-3282).
cgagaaaactatggttata

SEQ ID NO: 543198 - DNA, 19 bp, Mus musculus
  siRNA target sequence for 4930563A03Rik (NM_176965.2,3373-3391).
gattccatggactttgtgt

SEQ ID NO: 543199 - DNA, 19 bp, Mus musculus
  siRNA target sequence for 4930563A03Rik (NM_176965.2,3486-3504).
cgtcctgaaaggagttatt

SEQ ID NO: 543200 - DNA, 19 bp, Mus musculus
  siRNA target sequence for 4930563A03Rik (NM_176965.2,3560-3578).
ggaagtttcatattaacaa

SEQ ID NO: 543201 - DNA, 19 bp, Mus musculus
  siRNA target sequence for 4930563A03Rik (NM_176965.2,3617-3635).
ctagcaacgtggaggttaa

SEQ ID NO: 543202 - DNA, 19 bp, Mus musculus
  siRNA target sequence for 4930563A03Rik (NM_176965.2,3640-3658).
gagctcgttacaagctata

SEQ ID NO: 543203 - DNA, 19 bp, Mus musculus
  siRNA target sequence for 4930563A03Rik (NM_176965.2,3645-3663).
cgttacaagctatatccaa

SEQ ID NO: 543204 - DNA, 19 bp, Mus musculus
  siRNA target sequence for 4930563A03Rik (NM_176965.2,3654-3672).
ctatatccaagctcattct

SEQ ID NO: 543205 - DNA, 19 bp, Mus musculus
  siRNA target sequence for 4930563A03Rik (NM_176965.2,3673-3691).
cggactgaagtctggaatt

SEQ ID NO: 543206 - DNA, 19 bp, Mus musculus
  siRNA target sequence for 4930563A03Rik (NM_176965.2,3695-3713).
ggaacattgtcattgaact

SEQ ID NO: 543207 - DNA, 19 bp, Mus musculus
  siRNA target sequence for 4930563A03Rik (NM_176965.2,3715-3733).
ctgtatcactggataaaca

SEQ ID NO: 543208 - DNA, 19 bp, Mus musculus
  siRNA target sequence for 4930563A03Rik (NM_176965.2,3753-3771).
gctaaacatgcgacaagat

SEQ ID NO: 543209 - DNA, 19 bp, Mus musculus
  siRNA target sequence for 4930563A03Rik (NM_176965.2,3762-3780).
gcgacaagatgtttccatt

SEQ ID NO: 543210 - DNA, 19 bp, Mus musculus
  siRNA target sequence for 4930563A03Rik (NM_176965.2,3763-3781).
cgacaagatgtttccatta

SEQ ID NO: 543211 - DNA, 19 bp, Mus musculus
  siRNA target sequence for 4930563A03Rik (NM_176965.2,3799-3817).
gaagagtgccacctctatt

SEQ ID NO: 543212 - DNA, 19 bp, Mus musculus
  siRNA target sequence for 4930563A03Rik (NM_176965.2,3802-3820).
gagtgccacctctatttat

SEQ ID NO: 543213 - DNA, 19 bp, Mus musculus
  siRNA target sequence for 4930563A03Rik (NM_176965.2,3837-3855).
gatcaatccgagagaaact

SEQ ID NO: 543214 - DNA, 19 bp, Mus musculus
  siRNA target sequence for 4930563A03Rik (NM_176965.2,3844-3862).
ccgagagaaactttaagga

SEQ ID NO: 543215 - DNA, 19 bp, Mus musculus
  siRNA target sequence for 4930563A03Rik (NM_176965.2,3869-3887).
ctgtgtcgggacatgttga

SEQ ID NO: 543216 - DNA, 19 bp, Mus musculus
  siRNA target sequence for 4930563A03Rik (NM_176965.2,3871-3889).
gtgtcgggacatgttgatt

SEQ ID NO: 543217 - DNA, 19 bp, Mus musculus
  siRNA target sequence for 4930563A03Rik (NM_176965.2,3873-3891).
gtcgggacatgttgattgt

SEQ ID NO: 543218 - DNA, 19 bp, Mus musculus
  siRNA target sequence for 4930563A03Rik (NM_176965.2,3875-3893).
cgggacatgttgattgtgt

SEQ ID NO: 543219 - DNA, 19 bp, Mus musculus
  siRNA target sequence for 4931407K02Rik (NM_029946.2,200-218).
gtgtattctgcccatatct

SEQ ID NO: 543220 - DNA, 19 bp, Mus musculus
  siRNA target sequence for 4931407K02Rik (NM_029946.2,202-220).
gtattctgcccatatctat

SEQ ID NO: 543221 - DNA, 19 bp, Mus musculus
  siRNA target sequence for 4931407K02Rik (NM_029946.2,207-225).
ctgcccatatctatcaaat

SEQ ID NO: 543222 - DNA, 19 bp, Mus musculus
  siRNA target sequence for 4931407K02Rik (NM_029946.2,209-227).
gcccatatctatcaaatga

SEQ ID NO: 543223 - DNA, 19 bp, Mus musculus
  siRNA target sequence for 4931407K02Rik (NM_029946.2,226-244).
gagcacttagtaagattct

SEQ ID NO: 543224 - DNA, 19 bp, Mus musculus
  siRNA target sequence for 4931407K02Rik (NM_029946.2,235-253).
gtaagattctccagtaagt

SEQ ID NO: 543225 - DNA, 19 bp, Mus musculus
  siRNA target sequence for 4931407K02Rik (NM_029946.2,265-283).
ggctcaggaaggatactgt

SEQ ID NO: 543226 - DNA, 19 bp, Mus musculus
  siRNA target sequence for 4931407K02Rik (NM_029946.2,266-284).
gctcaggaaggatactgta

SEQ ID NO: 543227 - DNA, 19 bp, Mus musculus
  siRNA target sequence for 4931407K02Rik (NM_029946.2,269-287).
caggaaggatactgtacaa

SEQ ID NO: 543228 - DNA, 19 bp, Mus musculus
  siRNA target sequence for 4931407K02Rik (NM_029946.2,347-365).
cgaaggttcagctaagtga

SEQ ID NO: 543229 - DNA, 19 bp, Mus musculus
  siRNA target sequence for 4931407K02Rik (NM_029946.2,357-375).
gctaagtgaccagtttcaa

SEQ ID NO: 543230 - DNA, 19 bp, Mus musculus
  siRNA target sequence for 4931407K02Rik (NM_029946.2,362-380).
gtgaccagtttcaaattga

SEQ ID NO: 543231 - DNA, 19 bp, Mus musculus
  siRNA target sequence for 4931407K02Rik (NM_029946.2,408-426).
ccagccctccggggaaaaa

SEQ ID NO: 543232 - DNA, 19 bp, Mus musculus
  siRNA target sequence for 4931407K02Rik (NM_029946.2,428-446).
cttcggagatcaacaacat

SEQ ID NO: 543233 - DNA, 19 bp, Mus musculus
  siRNA target sequence for 4931407K02Rik (NM_029946.2,509-527).
gaaagcagtttcttagcat

SEQ ID NO: 543234 - DNA, 19 bp, Mus musculus
  siRNA target sequence for 4931407K02Rik (NM_029946.2,587-605).
gtggaatgcctatgaatga

SEQ ID NO: 543235 - DNA, 19 bp, Mus musculus
  siRNA target sequence for 4931407K02Rik (NM_029946.2,672-690).
cttcaccatgggatttgaa

SEQ ID NO: 543236 - DNA, 19 bp, Mus musculus
  siRNA target sequence for 4931407K02Rik (NM_029946.2,776-794).
ccgaggaatgcctgagaat

SEQ ID NO: 543237 - DNA, 19 bp, Mus musculus
  siRNA target sequence for 4931407K02Rik (NM_029946.2,777-795).
cgaggaatgcctgagaatt

SEQ ID NO: 543238 - DNA, 19 bp, Mus musculus
  siRNA target sequence for 4931407K02Rik (NM_029946.2,828-846).
cgtgtactccgccttcttt

SEQ ID NO: 543239 - DNA, 19 bp, Mus musculus
  siRNA target sequence for 4931407K02Rik (NM_029946.2,829-847).
gtgtactccgccttcttta

SEQ ID NO: 543240 - DNA, 19 bp, Mus musculus
  siRNA target sequence for 4931407K02Rik (NM_029946.2,831-849).
gtactccgccttctttaga

SEQ ID NO: 543241 - DNA, 19 bp, Mus musculus
  siRNA target sequence for 4931407K02Rik (NM_029946.2,834-852).
ctccgccttctttagaata

SEQ ID NO: 543242 - DNA, 19 bp, Mus musculus
  siRNA target sequence for 4931407K02Rik (NM_029946.2,838-856).
gccttctttagaatagact

SEQ ID NO: 543243 - DNA, 19 bp, Mus musculus
  siRNA target sequence for 4931407K02Rik (NM_029946.2,955-973).
ctcctgggcctgagactta

SEQ ID NO: 543244 - DNA, 19 bp, Mus musculus
  siRNA target sequence for 4931407K02Rik (NM_029946.2,957-975).
cctgggcctgagacttagt

SEQ ID NO: 543245 - DNA, 19 bp, Mus musculus
  siRNA target sequence for 4931407K02Rik (NM_029946.2,1045-1063).
caaaggctcatcagatgta

SEQ ID NO: 543246 - DNA, 19 bp, Mus musculus
  siRNA target sequence for 4931407K02Rik (NM_029946.2,1049-1067).
ggctcatcagatgtaaaca

SEQ ID NO: 543247 - DNA, 19 bp, Mus musculus
  siRNA target sequence for 4931407K02Rik (NM_029946.2,1103-1121).
ctcatcagtacctcatcat

SEQ ID NO: 543248 - DNA, 19 bp, Mus musculus
  siRNA target sequence for 4931407K02Rik (NM_029946.2,1144-1162).
gacctgtccaagaatttca

SEQ ID NO: 543249 - DNA, 19 bp, Mus musculus
  siRNA target sequence for 4931407K02Rik (NM_029946.2,1195-1213).
cggcgaagggacatcaaga

SEQ ID NO: 543250 - DNA, 19 bp, Mus musculus
  siRNA target sequence for 4931407K02Rik (NM_029946.2,1196-1214).
ggcgaagggacatcaagaa

SEQ ID NO: 543251 - DNA, 19 bp, Mus musculus
  siRNA target sequence for 4931407K02Rik (NM_029946.2,1198-1216).
cgaagggacatcaagaact

SEQ ID NO: 543252 - DNA, 19 bp, Mus musculus
  siRNA target sequence for 4931407K02Rik (NM_029946.2,1260-1278).
gaagctttggcaaaactat

SEQ ID NO: 543253 - DNA, 19 bp, Mus musculus
  siRNA target sequence for 4931407K02Rik (NM_029946.2,1264-1282).
ctttggcaaaactatgaca

SEQ ID NO: 543254 - DNA, 19 bp, Mus musculus
  siRNA target sequence for 4931407K02Rik (NM_029946.2,1283-1301).
ccgagggaaggggttatat

SEQ ID NO: 543255 - DNA, 19 bp, Mus musculus
  siRNA target sequence for 4931407K02Rik (NM_029946.2,1448-1466).
gtgagagggagaaactcat

SEQ ID NO: 543256 - DNA, 19 bp, Mus musculus
  siRNA target sequence for 4931407K02Rik (NM_029946.2,1458-1476).
gaaactcatgaaccattat

SEQ ID NO: 543257 - DNA, 19 bp, Mus musculus
  siRNA target sequence for 4931407K02Rik (NM_029946.2,1491-1509).
ggcgttcaacgcaatggaa

SEQ ID NO: 543258 - DNA, 19 bp, Mus musculus
  siRNA target sequence for 4931407K02Rik (NM_029946.2,1492-1510).
gcgttcaacgcaatggaaa

SEQ ID NO: 543259 - DNA, 19 bp, Mus musculus
  siRNA target sequence for 4931407K02Rik (NM_029946.2,1493-1511).
cgttcaacgcaatggaaaa

SEQ ID NO: 543260 - DNA, 19 bp, Mus musculus
  siRNA target sequence for 4931407K02Rik (NM_029946.2,1609-1627).
gacgtcagtgtgcataaca

SEQ ID NO: 543261 - DNA, 19 bp, Mus musculus
  siRNA target sequence for 4931407K02Rik (NM_029946.2,1611-1629).
cgtcagtgtgcataacaat

SEQ ID NO: 543262 - DNA, 19 bp, Mus musculus
  siRNA target sequence for 4931407K02Rik (NM_029946.2,1717-1735).
ccgcccatcagcttctcta

SEQ ID NO: 543263 - DNA, 19 bp, Mus musculus
  siRNA target sequence for 4931407K02Rik (NM_029946.2,1718-1736).
cgcccatcagcttctctaa

SEQ ID NO: 543264 - DNA, 19 bp, Mus musculus
  siRNA target sequence for 4931407K02Rik (NM_029946.2,1742-1760).
ccccagatgaggtgataaa

SEQ ID NO: 543265 - DNA, 19 bp, Mus musculus
  siRNA target sequence for 4931407K02Rik (NM_029946.2,1808-1826).
ccttctctgcactggataa

SEQ ID NO: 543266 - DNA, 19 bp, Mus musculus
  siRNA target sequence for 4931407K02Rik (NM_029946.2,1842-1860).
cgtgaaggctatggaattt

SEQ ID NO: 543267 - DNA, 19 bp, Mus musculus
  siRNA target sequence for 4931407K02Rik (NM_029946.2,1890-1908).
gctaacggataaccaatat

SEQ ID NO: 543268 - DNA, 19 bp, Mus musculus
  siRNA target sequence for 4931407K02Rik (NM_029946.2,1897-1915).
gataaccaatatcattact

SEQ ID NO: 543269 - DNA, 19 bp, Mus musculus
  siRNA target sequence for 4931407K02Rik (NM_029946.2,1935-1953).
ccacctaacacccaacata

SEQ ID NO: 543270 - DNA, 19 bp, Mus musculus
  siRNA target sequence for 4931407K02Rik (NM_029946.2,1939-1957).
ctaacacccaacatacact

SEQ ID NO: 543271 - DNA, 19 bp, Mus musculus
  siRNA target sequence for 4931407K02Rik (NM_029946.2,1945-1963).
cccaacatacactggaaat

SEQ ID NO: 543272 - DNA, 19 bp, Mus musculus
  siRNA target sequence for 4931407K02Rik (NM_029946.2,2117-2135).
cgattgtccaggagtttga

SEQ ID NO: 543273 - DNA, 19 bp, Mus musculus
  siRNA target sequence for 4931407K02Rik (NM_029946.2,2192-2210).
gcacccgccacatacagat

SEQ ID NO: 543274 - DNA, 19 bp, Mus musculus
  siRNA target sequence for 4931407K02Rik (NM_029946.2,2433-2451).
ctccagagtggggttgaaa

SEQ ID NO: 543275 - DNA, 19 bp, Mus musculus
  siRNA target sequence for 4931407K02Rik (NM_029946.2,2516-2534).
gccggctccgcaaacagat

SEQ ID NO: 543276 - DNA, 19 bp, Mus musculus
  siRNA target sequence for 4931407K02Rik (NM_029946.2,2818-2836).
gagacaccttccttttact

SEQ ID NO: 543277 - DNA, 19 bp, Mus musculus
  siRNA target sequence for 4931407K02Rik (NM_029946.2,2956-2974).
ctgcggcagtacagcatta

SEQ ID NO: 543278 - DNA, 19 bp, Mus musculus
  siRNA target sequence for 4931407K02Rik (NM_029946.2,2958-2976).
gcggcagtacagcattaat

SEQ ID NO: 543279 - DNA, 19 bp, Mus musculus
  siRNA target sequence for 4931407K02Rik (NM_029946.2,2997-3015).
ccacgtgctcgagtactat

SEQ ID NO: 543280 - DNA, 19 bp, Mus musculus
  siRNA target sequence for 4931407K02Rik (NM_029946.2,3001-3019).
gtgctcgagtactatgaca

SEQ ID NO: 543281 - DNA, 19 bp, Mus musculus
  siRNA target sequence for 4931407K02Rik (NM_029946.2,3004-3022).
ctcgagtactatgacaaat

SEQ ID NO: 543282 - DNA, 19 bp, Mus musculus
  siRNA target sequence for 4932411E22 (NM_172534.1,90-108).
ccacactgcagctgttcat

SEQ ID NO: 543283 - DNA, 19 bp, Mus musculus
  siRNA target sequence for 4932411E22 (NM_172534.1,122-140).
gagagaaatttattagtct

SEQ ID NO: 543284 - DNA, 19 bp, Mus musculus
  siRNA target sequence for 4932411E22 (NM_172534.1,222-240).
ggtcgcagctgccaaacaa

SEQ ID NO: 543285 - DNA, 19 bp, Mus musculus
  siRNA target sequence for 4932411E22 (NM_172534.1,247-265).
cagcaagtgctggacttta

SEQ ID NO: 543286 - DNA, 19 bp, Mus musculus
  siRNA target sequence for 4932411E22 (NM_172534.1,377-395).
cctccagtgagcagaatct

SEQ ID NO: 543287 - DNA, 19 bp, Mus musculus
  siRNA target sequence for 4932411E22 (NM_172534.1,427-445).
gactgtcttccgtcaacat

SEQ ID NO: 543288 - DNA, 19 bp, Mus musculus
  siRNA target sequence for 4932411E22 (NM_172534.1,575-593).
gagacctggacctggttta

SEQ ID NO: 543289 - DNA, 19 bp, Mus musculus
  siRNA target sequence for 4932411E22 (NM_172534.1,594-612).
cctgtcatcacatgacata

SEQ ID NO: 543290 - DNA, 19 bp, Mus musculus
  siRNA target sequence for 4932411E22 (NM_172534.1,929-947).
cactctccgaaggtgttta

SEQ ID NO: 543291 - DNA, 19 bp, Mus musculus
  siRNA target sequence for 4932411E22 (NM_172534.1,931-949).
ctctccgaaggtgtttaca

SEQ ID NO: 543292 - DNA, 19 bp, Mus musculus
  siRNA target sequence for 4932411E22 (NM_172534.1,1103-1121).
ccctgcagagagtctatgt

SEQ ID NO: 543293 - DNA, 19 bp, Mus musculus
  siRNA target sequence for 4932411E22 (NM_172534.1,1204-1222).
ctcccaagctccactagtt

SEQ ID NO: 543294 - DNA, 19 bp, Mus musculus
  siRNA target sequence for 4932411E22 (NM_172534.1,1249-1267).
ccagtttcagaaatattaa

SEQ ID NO: 543295 - DNA, 19 bp, Mus musculus
  siRNA target sequence for 4933406E20Rik (NM_028944.2,456-474).
cctcaagccgctgcttttt

SEQ ID NO: 543296 - DNA, 19 bp, Mus musculus
  siRNA target sequence for 4933406E20Rik (NM_028944.2,459-477).
caagccgctgctttttgaa

SEQ ID NO: 543297 - DNA, 19 bp, Mus musculus
  siRNA target sequence for 4933406E20Rik (NM_028944.2,726-744).
gatgtactctgcaatcaaa

SEQ ID NO: 543298 - DNA, 19 bp, Mus musculus
  siRNA target sequence for 4933406E20Rik (NM_028944.2,768-786).
gctgagtctgcaggaattt

SEQ ID NO: 543299 - DNA, 19 bp, Mus musculus
  siRNA target sequence for 4933406E20Rik (NM_028944.2,769-787).
ctgagtctgcaggaatttt

SEQ ID NO: 543300 - DNA, 19 bp, Mus musculus
  siRNA target sequence for 4933406E20Rik (NM_028944.2,802-820).
cgagacttccacaagtaca

SEQ ID NO: 543301 - DNA, 19 bp, Mus musculus
  siRNA target sequence for 4933406E20Rik (NM_028944.2,827-845).
gccataaggcagaatccaa

SEQ ID NO: 543302 - DNA, 19 bp, Mus musculus
  siRNA target sequence for 4933406E20Rik (NM_028944.2,828-846).
ccataaggcagaatccaat

SEQ ID NO: 543303 - DNA, 19 bp, Mus musculus
  siRNA target sequence for 4933406E20Rik (NM_028944.2,977-995).
cactacaggttgtacgata

SEQ ID NO: 543304 - DNA, 19 bp, Mus musculus
  siRNA target sequence for 4933406E20Rik (NM_028944.2,1074-1092).
ggtagccaatgaatctgta

SEQ ID NO: 543305 - DNA, 19 bp, Mus musculus
  siRNA target sequence for 4933406E20Rik (NM_028944.2,1084-1102).
gaatctgtaccgtttgaga

SEQ ID NO: 543306 - DNA, 19 bp, Mus musculus
  siRNA target sequence for 4933406E20Rik (NM_028944.2,1205-1223).
gtctgattcaggatgatgt

SEQ ID NO: 543307 - DNA, 19 bp, Mus musculus
  siRNA target sequence for 4933406E20Rik (NM_028944.2,1388-1406).
ccaagtggatcgctaacaa

SEQ ID NO: 543308 - DNA, 19 bp, Mus musculus
  siRNA target sequence for 4933406E20Rik (NM_028944.2,1400-1418).
ctaacaactggatcaatgt

SEQ ID NO: 543309 - DNA, 19 bp, Mus musculus
  siRNA target sequence for 4933414G08 (NM_177867.2,407-425).
gctccagcagtccaatcaa

SEQ ID NO: 543310 - DNA, 19 bp, Mus musculus
  siRNA target sequence for 4933414G08 (NM_177867.2,410-428).
ccagcagtccaatcaagtt

SEQ ID NO: 543311 - DNA, 19 bp, Mus musculus
  siRNA target sequence for 4933414G08 (NM_177867.2,431-449).
ggcctgagttccaccaaaa

SEQ ID NO: 543312 - DNA, 19 bp, Mus musculus
  siRNA target sequence for 4933414G08 (NM_177867.2,432-450).
gcctgagttccaccaaaaa

SEQ ID NO: 543313 - DNA, 19 bp, Mus musculus
  siRNA target sequence for 4933414G08 (NM_177867.2,762-780).
gtgccgaggtcaaagagat

SEQ ID NO: 543314 - DNA, 19 bp, Mus musculus
  siRNA target sequence for 4933414G08 (NM_177867.2,854-872).
cagccactgaagaataact

SEQ ID NO: 543315 - DNA, 19 bp, Mus musculus
  siRNA target sequence for 4933414G08 (NM_177867.2,1209-1227).
cccgacggggtttcatgaa

SEQ ID NO: 543316 - DNA, 19 bp, Mus musculus
  siRNA target sequence for 4933414G08 (NM_177867.2,1211-1229).
cgacggggtttcatgaagt

SEQ ID NO: 543317 - DNA, 19 bp, Mus musculus
  siRNA target sequence for 4933414G08 (NM_177867.2,1595-1613).
ctcttcagaatgtatcaga

SEQ ID NO: 543318 - DNA, 19 bp, Mus musculus
  siRNA target sequence for 4933414G08 (NM_177867.2,1662-1680).
ccttccgaagctactttga

SEQ ID NO: 543319 - DNA, 19 bp, Mus musculus
  siRNA target sequence for 4933414G08 (NM_177867.2,1663-1681).
cttccgaagctactttgat

SEQ ID NO: 543320 - DNA, 19 bp, Mus musculus
  siRNA target sequence for 4933414G08 (NM_177867.2,1667-1685).
cgaagctactttgatatct

SEQ ID NO: 543321 - DNA, 19 bp, Mus musculus
  siRNA target sequence for 4933414G08 (NM_177867.2,1738-1756).
gattggcttcacctttact

SEQ ID NO: 543322 - DNA, 19 bp, Mus musculus
  siRNA target sequence for 4933414G08 (NM_177867.2,1808-1826).
cacgtggatttcaaagact

SEQ ID NO: 543323 - DNA, 19 bp, Mus musculus
  siRNA target sequence for 4933414G08 (NM_177867.2,1861-1879).
ctgctccgtggaacagaat

SEQ ID NO: 543324 - DNA, 19 bp, Mus musculus
  siRNA target sequence for 4933414G08 (NM_177867.2,1973-1991).
ctagaggagatcactaact

SEQ ID NO: 543325 - DNA, 19 bp, Mus musculus
  siRNA target sequence for 4933414G08 (NM_177867.2,1978-1996).
ggagatcactaactactat

SEQ ID NO: 543326 - DNA, 19 bp, Mus musculus
  siRNA target sequence for 4933414G08 (NM_177867.2,1986-2004).
ctaactactatcagaagaa

SEQ ID NO: 543327 - DNA, 19 bp, Mus musculus
  siRNA target sequence for 4933414G08 (NM_177867.2,2088-2106).
ctcagcaagtagaaaactt

SEQ ID NO: 543328 - DNA, 19 bp, Mus musculus
  siRNA target sequence for 4933414G08 (NM_177867.2,2214-2232).
gcccgaggctggacaagaa

SEQ ID NO: 543329 - DNA, 19 bp, Mus musculus
  siRNA target sequence for 4933414G08 (NM_177867.2,2248-2266).
gctggctagccataaccat

SEQ ID NO: 543330 - DNA, 19 bp, Mus musculus
  siRNA target sequence for 4933414G08 (NM_177867.2,2339-2357).
caaggaagcagggaacata

SEQ ID NO: 543331 - DNA, 19 bp, Mus musculus
  siRNA target sequence for 4933431N12Rik (NM_027758.1,867-885).
gtaccctcgatgtggtatt

SEQ ID NO: 543332 - DNA, 19 bp, Mus musculus
  siRNA target sequence for 4933431N12Rik (NM_027758.1,904-922).
cgcaccgtaccgaatcctt

SEQ ID NO: 543333 - DNA, 19 bp, Mus musculus
  siRNA target sequence for 4933431N12Rik (NM_027758.1,905-923).
gcaccgtaccgaatccttt

SEQ ID NO: 543334 - DNA, 19 bp, Mus musculus
  siRNA target sequence for 4933431N12Rik (NM_027758.1,906-924).
caccgtaccgaatccttta

SEQ ID NO: 543335 - DNA, 19 bp, Mus musculus
  siRNA target sequence for 4933431N12Rik (NM_027758.1,909-927).
cgtaccgaatcctttatca

SEQ ID NO: 543336 - DNA, 19 bp, Mus musculus
  siRNA target sequence for 4933431N12Rik (NM_027758.1,910-928).
gtaccgaatcctttatcaa

SEQ ID NO: 543337 - DNA, 19 bp, Mus musculus
  siRNA target sequence for 4933431N12Rik (NM_027758.1,1021-1039).
gcagacactctccatcttt

SEQ ID NO: 543338 - DNA, 19 bp, Mus musculus
  siRNA target sequence for 4933431N12Rik (NM_027758.1,1048-1066).
gaatgacgtcaccacattt

SEQ ID NO: 543339 - DNA, 19 bp, Mus musculus
  siRNA target sequence for 4933431N12Rik (NM_027758.1,1052-1070).
gacgtcaccacatttgtaa

SEQ ID NO: 543340 - DNA, 19 bp, Mus musculus
  siRNA target sequence for 4933431N12Rik (NM_027758.1,1054-1072).
cgtcaccacatttgtaaga

SEQ ID NO: 543341 - DNA, 19 bp, Mus musculus
  siRNA target sequence for 4933431N12Rik (NM_027758.1,1239-1257).
ggatctactcagacaaaga

SEQ ID NO: 543342 - DNA, 19 bp, Mus musculus
  siRNA target sequence for 4933431N12Rik (NM_027758.1,1243-1261).
ctactcagacaaagagttt

SEQ ID NO: 543343 - DNA, 19 bp, Mus musculus
  siRNA target sequence for 4933431N12Rik (NM_027758.1,1246-1264).
ctcagacaaagagttttca

SEQ ID NO: 543344 - DNA, 19 bp, Mus musculus
  siRNA target sequence for 4933431N12Rik (NM_027758.1,1359-1377).
gagaacgcccctttaacct

SEQ ID NO: 543345 - DNA, 19 bp, Mus musculus
  siRNA target sequence for 4933431N12Rik (NM_027758.1,1431-1449).
ggcgatctcctgaagaatt

SEQ ID NO: 543346 - DNA, 19 bp, Mus musculus
  siRNA target sequence for 4933431N12Rik (NM_027758.1,1433-1451).
cgatctcctgaagaattca

SEQ ID NO: 543347 - DNA, 19 bp, Mus musculus
  siRNA target sequence for 4933431N12Rik (NM_027758.1,1434-1452).
gatctcctgaagaattcaa

SEQ ID NO: 543348 - DNA, 19 bp, Mus musculus
  siRNA target sequence for 4933431N12Rik (NM_027758.1,1455-1473).
caaaattggccaaagagtt

SEQ ID NO: 543349 - DNA, 19 bp, Mus musculus
  siRNA target sequence for 4933431N12Rik (NM_027758.1,1611-1629).
caggggccatcaatgaaaa

SEQ ID NO: 543350 - DNA, 19 bp, Mus musculus
  siRNA target sequence for 4933431N12Rik (NM_027758.1,1669-1687).
gtcgatgggaaagtacaat

SEQ ID NO: 543351 - DNA, 19 bp, Mus musculus
  siRNA target sequence for 4933431N12Rik (NM_027758.1,1671-1689).
cgatgggaaagtacaatct

SEQ ID NO: 543352 - DNA, 19 bp, Mus musculus
  siRNA target sequence for 4933431N12Rik (NM_027758.1,1739-1757).
ccagctttccagaacgaaa

SEQ ID NO: 543353 - DNA, 19 bp, Mus musculus
  siRNA target sequence for 4933431N12Rik (NM_027758.1,1740-1758).
cagctttccagaacgaaat

SEQ ID NO: 543354 - DNA, 19 bp, Mus musculus
  siRNA target sequence for 4933431N12Rik (NM_027758.1,1783-1801).
cttaacggcttatgctttt

SEQ ID NO: 543355 - DNA, 19 bp, Mus musculus
  siRNA target sequence for 4933431N12Rik (NM_027758.1,1802-1820).
cgcaatcccaacataggat

SEQ ID NO: 543356 - DNA, 19 bp, Mus musculus
  siRNA target sequence for 4933431N12Rik (NM_027758.1,2167-2185).
ggatgccaacgtggataaa

SEQ ID NO: 543357 - DNA, 19 bp, Mus musculus
  siRNA target sequence for 4933431N12Rik (NM_027758.1,2171-2189).
gccaacgtggataaactct

SEQ ID NO: 543358 - DNA, 19 bp, Mus musculus
  siRNA target sequence for 4933431N12Rik (NM_027758.1,2172-2190).
ccaacgtggataaactctt

SEQ ID NO: 543359 - DNA, 19 bp, Mus musculus
  siRNA target sequence for 4933431N12Rik (NM_027758.1,2177-2195).
gtggataaactcttgaact

SEQ ID NO: 543360 - DNA, 19 bp, Mus musculus
  siRNA target sequence for 4933431N12Rik (NM_027758.1,2348-2366).
gggacgtcttacgagaaat

SEQ ID NO: 543361 - DNA, 19 bp, Mus musculus
  siRNA target sequence for 4933431N12Rik (NM_027758.1,2349-2367).
ggacgtcttacgagaaatt

SEQ ID NO: 543362 - DNA, 19 bp, Mus musculus
  siRNA target sequence for 4933431N12Rik (NM_027758.1,2350-2368).
gacgtcttacgagaaattt

SEQ ID NO: 543363 - DNA, 19 bp, Mus musculus
  siRNA target sequence for 4933431N12Rik (NM_027758.1,2353-2371).
gtcttacgagaaatttgga

SEQ ID NO: 543364 - DNA, 19 bp, Mus musculus
  siRNA target sequence for 4933431N12Rik (NM_027758.1,2459-2477).
gtggtacggaccattgtga

SEQ ID NO: 543365 - DNA, 19 bp, Mus musculus
  siRNA target sequence for 4933431N12Rik (NM_027758.1,2730-2748).
gagactccttgattaactt

SEQ ID NO: 543366 - DNA, 19 bp, Mus musculus
  siRNA target sequence for 4933431N12Rik (NM_027758.1,2839-2857).
gccatcctgtgatcaagat

SEQ ID NO: 543367 - DNA, 19 bp, Mus musculus
  siRNA target sequence for 4933431N12Rik (NM_027758.1,2880-2898).
ccactcagtacttttttga

SEQ ID NO: 543368 - DNA, 19 bp, Mus musculus
  siRNA target sequence for 4933431N12Rik (NM_027758.1,2883-2901).
ctcagtacttttttgaaga

SEQ ID NO: 543369 - DNA, 19 bp, Mus musculus
  siRNA target sequence for 4933431N12Rik (NM_027758.1,3000-3018).
ggaaaagggcaaattctca

SEQ ID NO: 543370 - DNA, 19 bp, Mus musculus
  siRNA target sequence for 4933431N12Rik (NM_027758.1,3020-3038).
gaaaaccgtaattacctaa

SEQ ID NO: 543371 - DNA, 19 bp, Mus musculus
  siRNA target sequence for 4933431N12Rik (NM_027758.1,3026-3044).
cgtaattacctaaaactct

SEQ ID NO: 543372 - DNA, 19 bp, Mus musculus
  siRNA target sequence for 4933431N12Rik (NM_027758.1,3050-3068).
gcagaaaataagtctaagt

SEQ ID NO: 543373 - DNA, 19 bp, Mus musculus
  siRNA target sequence for 4933431N12Rik (NM_027758.1,3123-3141).
gtaagaccatgtacaacat

SEQ ID NO: 543374 - DNA, 19 bp, Mus musculus
  siRNA target sequence for 4933431N12Rik (NM_027758.1,3221-3239).
gttggcaagttcttcatta

SEQ ID NO: 543375 - DNA, 19 bp, Mus musculus
  siRNA target sequence for 4933431N12Rik (NM_027758.1,3453-3471).
cctgctcctccatgttgat

SEQ ID NO: 543376 - DNA, 19 bp, Mus musculus
  siRNA target sequence for 4933431N12Rik (NM_027758.1,3695-3713).
ctcgtgaggtactttgaca

SEQ ID NO: 543377 - DNA, 19 bp, Mus musculus
  siRNA target sequence for 4933431N12Rik (NM_027758.1,3737-3755).
gtcaccagtgcgaagaaca

SEQ ID NO: 543378 - DNA, 19 bp, Mus musculus
  siRNA target sequence for 4933431N12Rik (NM_027758.1,3747-3765).
cgaagaacatccgtatgat

SEQ ID NO: 543379 - DNA, 19 bp, Mus musculus
  siRNA target sequence for 4933431N12Rik (NM_027758.1,3783-3801).
cagccagtgactatgaaat

SEQ ID NO: 543380 - DNA, 19 bp, Mus musculus
  siRNA target sequence for 5430400H23Rik (NM_027762.1,106-124).
gtgtcgttgagatattcca

SEQ ID NO: 543381 - DNA, 19 bp, Mus musculus
  siRNA target sequence for 5430400H23Rik (NM_027762.1,281-299).
catcagttttgaggaattt

SEQ ID NO: 543382 - DNA, 19 bp, Mus musculus
  siRNA target sequence for 5430400H23Rik (NM_027762.1,303-321).
cttgcaatcttcagcttat

SEQ ID NO: 543383 - DNA, 19 bp, Mus musculus
  siRNA target sequence for 5430400H23Rik (NM_027762.1,306-324).
gcaatcttcagcttattga

SEQ ID NO: 543384 - DNA, 19 bp, Mus musculus
  siRNA target sequence for 5430400H23Rik (NM_027762.1,360-378).
gaaccaagactgatgtcta

SEQ ID NO: 543385 - DNA, 19 bp, Mus musculus
  siRNA target sequence for 5430400H23Rik (NM_027762.1,409-427).
gggcaattggtggaaacat

SEQ ID NO: 543386 - DNA, 19 bp, Mus musculus
  siRNA target sequence for 5430400H23Rik (NM_027762.1,410-428).
ggcaattggtggaaacatt

SEQ ID NO: 543387 - DNA, 19 bp, Mus musculus
  siRNA target sequence for 5430400H23Rik (NM_027762.1,443-461).
ggttgggccaactcaagaa

SEQ ID NO: 543388 - DNA, 19 bp, Mus musculus
  siRNA target sequence for 5430400H23Rik (NM_027762.1,454-472).
ctcaagaaaggctcatatt

SEQ ID NO: 543389 - DNA, 19 bp, Mus musculus
  siRNA target sequence for 5430400H23Rik (NM_027762.1,544-562).
gcccatgtgaagacattaa

SEQ ID NO: 543390 - DNA, 19 bp, Mus musculus
  siRNA target sequence for 5430400H23Rik (NM_027762.1,566-584).
ccacagcctgccaagaaat

SEQ ID NO: 543391 - DNA, 19 bp, Mus musculus
  siRNA target sequence for 5430400H23Rik (NM_027762.1,631-649).
ctcaggaagtcgcacaaaa

SEQ ID NO: 543392 - DNA, 19 bp, Mus musculus
  siRNA target sequence for 5430400H23Rik (NM_027762.1,673-691).
gagtccaatttaagagaaa

SEQ ID NO: 543393 - DNA, 19 bp, Mus musculus
  siRNA target sequence for 5430400H23Rik (NM_027762.1,675-693).
gtccaatttaagagaaata

SEQ ID NO: 543394 - DNA, 19 bp, Mus musculus
  siRNA target sequence for 5430400H23Rik (NM_027762.1,699-717).
gtcgaagtacccaaacaga

SEQ ID NO: 543395 - DNA, 19 bp, Mus musculus
  siRNA target sequence for 5430400H23Rik (NM_027762.1,770-788).
gctaagtgacaccaagata

SEQ ID NO: 543396 - DNA, 19 bp, Mus musculus
  siRNA target sequence for 5430400H23Rik (NM_027762.1,771-789).
ctaagtgacaccaagataa

SEQ ID NO: 543397 - DNA, 19 bp, Mus musculus
  siRNA target sequence for 5430400H23Rik (NM_027762.1,775-793).
gtgacaccaagataagtga

SEQ ID NO: 543398 - DNA, 19 bp, Mus musculus
  siRNA target sequence for 5430400H23Rik (NM_027762.1,822-840).
gaggaacatacttctacaa

SEQ ID NO: 543399 - DNA, 19 bp, Mus musculus
  siRNA target sequence for 5430400H23Rik (NM_027762.1,824-842).
ggaacatacttctacaaca

SEQ ID NO: 543400 - DNA, 19 bp, Mus musculus
  siRNA target sequence for 5430400H23Rik (NM_027762.1,835-853).
ctacaacacaagatccatt

SEQ ID NO: 543401 - DNA, 19 bp, Mus musculus
  siRNA target sequence for 5430400H23Rik (NM_027762.1,846-864).
gatccattcctgcaaaaaa

SEQ ID NO: 543402 - DNA, 19 bp, Mus musculus
  siRNA target sequence for 5430400H23Rik (NM_027762.1,879-897).
gggtcagagaacactgatt

SEQ ID NO: 543403 - DNA, 19 bp, Mus musculus
  siRNA target sequence for 5430400H23Rik (NM_027762.1,880-898).
ggtcagagaacactgattt

SEQ ID NO: 543404 - DNA, 19 bp, Mus musculus
  siRNA target sequence for 5430400H23Rik (NM_027762.1,919-937).
ggaaatcatctcaaacaca

SEQ ID NO: 543405 - DNA, 19 bp, Mus musculus
  siRNA target sequence for 5430400H23Rik (NM_027762.1,948-966).
gagcctatggatgatacta

SEQ ID NO: 543406 - DNA, 19 bp, Mus musculus
  siRNA target sequence for 5430400H23Rik (NM_027762.1,950-968).
gcctatggatgatactaaa

SEQ ID NO: 543407 - DNA, 19 bp, Mus musculus
  siRNA target sequence for 5430400H23Rik (NM_027762.1,1067-1085).
cggattgccagcacaagaa

SEQ ID NO: 543408 - DNA, 19 bp, Mus musculus
  siRNA target sequence for 5430400H23Rik (NM_027762.1,1232-1250).
gaagtgtcaagaatttcca

SEQ ID NO: 543409 - DNA, 19 bp, Mus musculus
  siRNA target sequence for 5430400H23Rik (NM_027762.1,1320-1338).
cagaatctccctgaaatta

SEQ ID NO: 543410 - DNA, 19 bp, Mus musculus
  siRNA target sequence for 5430400H23Rik (NM_027762.1,1329-1347).
cctgaaattaaggaagatt

SEQ ID NO: 543411 - DNA, 19 bp, Mus musculus
  siRNA target sequence for 5430400H23Rik (NM_027762.1,1379-1397).
ggaagacacagtatatgca

SEQ ID NO: 543412 - DNA, 19 bp, Mus musculus
  siRNA target sequence for 5430400H23Rik (NM_027762.1,1389-1407).
gtatatgcatttgaaatca

SEQ ID NO: 543413 - DNA, 19 bp, Mus musculus
  siRNA target sequence for 5430400H23Rik (NM_027762.1,1467-1485).
gcaccacttgagaagcaat

SEQ ID NO: 543414 - DNA, 19 bp, Mus musculus
  siRNA target sequence for 5430400H23Rik (NM_027762.1,1545-1563).
cacaatgagggagaagatt

SEQ ID NO: 543415 - DNA, 19 bp, Mus musculus
  siRNA target sequence for 5430400H23Rik (NM_027762.1,1547-1565).
caatgagggagaagattct

SEQ ID NO: 543416 - DNA, 19 bp, Mus musculus
  siRNA target sequence for 5430400H23Rik (NM_027762.1,1553-1571).
gggagaagattctgagtta

SEQ ID NO: 543417 - DNA, 19 bp, Mus musculus
  siRNA target sequence for 5430400H23Rik (NM_027762.1,1560-1578).
gattctgagttatcactta

SEQ ID NO: 543418 - DNA, 19 bp, Mus musculus
  siRNA target sequence for 5430400H23Rik (NM_027762.1,1585-1603).
gtgatgagggcttttgtga

SEQ ID NO: 543419 - DNA, 19 bp, Mus musculus
  siRNA target sequence for 5430400H23Rik (NM_027762.1,1673-1691).
ggattcacagagtcagata

SEQ ID NO: 543420 - DNA, 19 bp, Mus musculus
  siRNA target sequence for 5430400H23Rik (NM_027762.1,1963-1981).
ccctagaggcagagagttt

SEQ ID NO: 543421 - DNA, 19 bp, Mus musculus
  siRNA target sequence for 5430404L10Rik (NM_025769.1,137-155).
gacggacaccttaactaaa

SEQ ID NO: 543422 - DNA, 19 bp, Mus musculus
  siRNA target sequence for 5430404L10Rik (NM_025769.1,140-158).
ggacaccttaactaaaaat

SEQ ID NO: 543423 - DNA, 19 bp, Mus musculus
  siRNA target sequence for 5430404L10Rik (NM_025769.1,141-159).
gacaccttaactaaaaatt

SEQ ID NO: 543424 - DNA, 19 bp, Mus musculus
  siRNA target sequence for 5430404L10Rik (NM_025769.1,173-191).
caaatttgaggtgaaatgt

SEQ ID NO: 543425 - DNA, 19 bp, Mus musculus
  siRNA target sequence for 5430404L10Rik (NM_025769.1,192-210).
cttataacacttttctata

SEQ ID NO: 543426 - DNA, 19 bp, Mus musculus
  siRNA target sequence for 5430404L10Rik (NM_025769.1,248-266).
caccggactagatcgtaat

SEQ ID NO: 543427 - DNA, 19 bp, Mus musculus
  siRNA target sequence for 5430404L10Rik (NM_025769.1,250-268).
ccggactagatcgtaatgt

SEQ ID NO: 543428 - DNA, 19 bp, Mus musculus
  siRNA target sequence for 5430404L10Rik (NM_025769.1,251-269).
cggactagatcgtaatgta

SEQ ID NO: 543429 - DNA, 19 bp, Mus musculus
  siRNA target sequence for 5430404L10Rik (NM_025769.1,281-299).
cttgcatgtgacatttgga

SEQ ID NO: 543430 - DNA, 19 bp, Mus musculus
  siRNA target sequence for 5430404L10Rik (NM_025769.1,358-376).
gctgtataagcgtatcaga

SEQ ID NO: 543431 - DNA, 19 bp, Mus musculus
  siRNA target sequence for 5430404L10Rik (NM_025769.1,368-386).
cgtatcagagtggattcat

SEQ ID NO: 543432 - DNA, 19 bp, Mus musculus
  siRNA target sequence for 5430404L10Rik (NM_025769.1,375-393).
gagtggattcatggattat

SEQ ID NO: 543433 - DNA, 19 bp, Mus musculus
  siRNA target sequence for 5430404L10Rik (NM_025769.1,398-416).
gtttcttcgagggacttta

SEQ ID NO: 543434 - DNA, 19 bp, Mus musculus
  siRNA target sequence for 5430404L10Rik (NM_025769.1,540-558).
gatgaagggattaaagatt

SEQ ID NO: 543435 - DNA, 19 bp, Mus musculus
  siRNA target sequence for 5430404L10Rik (NM_025769.1,561-579).
gttgaaattacacttaaga

SEQ ID NO: 543436 - DNA, 19 bp, Mus musculus
  siRNA target sequence for 5430404L10Rik (NM_025769.1,699-717).
gaatttgaagcccaagtat

SEQ ID NO: 543437 - DNA, 19 bp, Mus musculus
  siRNA target sequence for 5730592L21Rik (NM_029720.1,245-263).
gagaagacgctgtctaagt

SEQ ID NO: 543438 - DNA, 19 bp, Mus musculus
  siRNA target sequence for 5730592L21Rik (NM_029720.1,252-270).
cgctgtctaagtacgaatt

SEQ ID NO: 543439 - DNA, 19 bp, Mus musculus
  siRNA target sequence for 5730592L21Rik (NM_029720.1,809-827).
gtcaacggctcgtacacat

SEQ ID NO: 543440 - DNA, 19 bp, Mus musculus
  siRNA target sequence for 5730592L21Rik (NM_029720.1,876-894).
ccaactgtaaggagtgtat

SEQ ID NO: 543441 - DNA, 19 bp, Mus musculus
  siRNA target sequence for 5730592L21Rik (NM_029720.1,915-933).
gtggacagtgcacagatat

SEQ ID NO: 543442 - DNA, 19 bp, Mus musculus
  siRNA target sequence for 5730592L21Rik (NM_029720.1,960-978).
cctgtaagaggaaaaacga

SEQ ID NO: 543443 - DNA, 19 bp, Mus musculus
  siRNA target sequence for 5730592L21Rik (NM_029720.1,1098-1116).
caccctcccgtgaggattt

SEQ ID NO: 543444 - DNA, 19 bp, Mus musculus
  siRNA target sequence for 5730592L21Rik (NM_029720.1,1100-1118).
ccctcccgtgaggatttgt

SEQ ID NO: 543445 - DNA, 19 bp, Mus musculus
  siRNA target sequence for 6430526J12Rik (NM_172668.2,82-100).
ggtcggagccacttcacat

SEQ ID NO: 543446 - DNA, 19 bp, Mus musculus
  siRNA target sequence for 6430526J12Rik (NM_172668.2,605-623).
gctgcatcctcgacatcta

SEQ ID NO: 543447 - DNA, 19 bp, Mus musculus
  siRNA target sequence for 6430526J12Rik (NM_172668.2,694-712).
cgctctggggaattcatgt

SEQ ID NO: 543448 - DNA, 19 bp, Mus musculus
  siRNA target sequence for 6430526J12Rik (NM_172668.2,807-825).
gtgcacagccgaacagttt

SEQ ID NO: 543449 - DNA, 19 bp, Mus musculus
  siRNA target sequence for 6430526J12Rik (NM_172668.2,889-907).
gacaacagcgatgaagaaa

SEQ ID NO: 543450 - DNA, 19 bp, Mus musculus
  siRNA target sequence for 6430526J12Rik (NM_172668.2,1066-1084).
gagaactgcaatgttaaca

SEQ ID NO: 543451 - DNA, 19 bp, Mus musculus
  siRNA target sequence for 6430526J12Rik (NM_172668.2,1172-1190).
gaacgtgccaggatgtaaa

SEQ ID NO: 543452 - DNA, 19 bp, Mus musculus
  siRNA target sequence for 6430526J12Rik (NM_172668.2,1175-1193).
cgtgccaggatgtaaacga

SEQ ID NO: 543453 - DNA, 19 bp, Mus musculus
  siRNA target sequence for 6430526J12Rik (NM_172668.2,1176-1194).
gtgccaggatgtaaacgaa

SEQ ID NO: 543454 - DNA, 19 bp, Mus musculus
  siRNA target sequence for 6430526J12Rik (NM_172668.2,1218-1236).
ccagggctgcacaaacact

SEQ ID NO: 543455 - DNA, 19 bp, Mus musculus
  siRNA target sequence for 6430526J12Rik (NM_172668.2,1324-1342).
ctactgtttgccaatcgta

SEQ ID NO: 543456 - DNA, 19 bp, Mus musculus
  siRNA target sequence for 6430526J12Rik (NM_172668.2,1410-1428).
cattgccctcgactttcat

SEQ ID NO: 543457 - DNA, 19 bp, Mus musculus
  siRNA target sequence for 6430526J12Rik (NM_172668.2,1476-1494).
cctccgtgccaaccttaat

SEQ ID NO: 543458 - DNA, 19 bp, Mus musculus
  siRNA target sequence for 6430526J12Rik (NM_172668.2,1488-1506).
ccttaatggcagcaatgta

SEQ ID NO: 543459 - DNA, 19 bp, Mus musculus
  siRNA target sequence for 6430526J12Rik (NM_172668.2,1688-1706).
ccatggagggaaccattta

SEQ ID NO: 543460 - DNA, 19 bp, Mus musculus
  siRNA target sequence for 6430526J12Rik (NM_172668.2,1689-1707).
catggagggaaccatttat

SEQ ID NO: 543461 - DNA, 19 bp, Mus musculus
  siRNA target sequence for 6430526J12Rik (NM_172668.2,1693-1711).
gagggaaccatttattgga

SEQ ID NO: 543462 - DNA, 19 bp, Mus musculus
  siRNA target sequence for 6430526J12Rik (NM_172668.2,1758-1776).
ctctgggcgtcgcatcatt

SEQ ID NO: 543463 - DNA, 19 bp, Mus musculus
  siRNA target sequence for 6430526J12Rik (NM_172668.2,1773-1791).
cattgctgacactcatctt

SEQ ID NO: 543464 - DNA, 19 bp, Mus musculus
  siRNA target sequence for 6430526J12Rik (NM_172668.2,1822-1840).
gctggtcgccgcatgtact

SEQ ID NO: 543465 - DNA, 19 bp, Mus musculus
  siRNA target sequence for 6430526J12Rik (NM_172668.2,1863-1881).
catcgagagggccaatcta

SEQ ID NO: 543466 - DNA, 19 bp, Mus musculus
  siRNA target sequence for 6430526J12Rik (NM_172668.2,1866-1884).
cgagagggccaatctagat

SEQ ID NO: 543467 - DNA, 19 bp, Mus musculus
  siRNA target sequence for 6430526J12Rik (NM_172668.2,1891-1909).
caccgcaaggctgtcatta

SEQ ID NO: 543468 - DNA, 19 bp, Mus musculus
  siRNA target sequence for 6430526J12Rik (NM_172668.2,1948-1966).
gaagacagcttgtattgga

SEQ ID NO: 543469 - DNA, 19 bp, Mus musculus
  siRNA target sequence for 6430526J12Rik (NM_172668.2,1975-1993).
cacaccaagagcatcaata

SEQ ID NO: 543470 - DNA, 19 bp, Mus musculus
  siRNA target sequence for 6430526J12Rik (NM_172668.2,2009-2027).
cggggaagaaccaggaaat

SEQ ID NO: 543471 - DNA, 19 bp, Mus musculus
  siRNA target sequence for 6430526J12Rik (NM_172668.2,2051-2069).
ctatggacattcatacctt

SEQ ID NO: 543472 - DNA, 19 bp, Mus musculus
  siRNA target sequence for 6430526J12Rik (NM_172668.2,2177-2195).
ccggcttccgcaagatcaa

SEQ ID NO: 543473 - DNA, 19 bp, Mus musculus
  siRNA target sequence for 6430526J12Rik (NM_172668.2,2207-2225).
gtgcccagagtcttgacaa

SEQ ID NO: 543474 - DNA, 19 bp, Mus musculus
  siRNA target sequence for 6430526J12Rik (NM_172668.2,2347-2365).
cgggatgaccacgtgtatt

SEQ ID NO: 543475 - DNA, 19 bp, Mus musculus
  siRNA target sequence for 6430526J12Rik (NM_172668.2,2672-2690).
cctccagccgacaagtcat

SEQ ID NO: 543476 - DNA, 19 bp, Mus musculus
  siRNA target sequence for 6430526J12Rik (NM_172668.2,2675-2693).
ccagccgacaagtcatcat

SEQ ID NO: 543477 - DNA, 19 bp, Mus musculus
  siRNA target sequence for 6430526J12Rik (NM_172668.2,2758-2776).
gcggatgccggcatgaaga

SEQ ID NO: 543478 - DNA, 19 bp, Mus musculus
  siRNA target sequence for 6430526J12Rik (NM_172668.2,2761-2779).
gatgccggcatgaagacta

SEQ ID NO: 543479 - DNA, 19 bp, Mus musculus
  siRNA target sequence for 6430526J12Rik (NM_172668.2,2765-2783).
ccggcatgaagactattga

SEQ ID NO: 543480 - DNA, 19 bp, Mus musculus
  siRNA target sequence for 6430526J12Rik (NM_172668.2,2766-2784).
cggcatgaagactattgaa

SEQ ID NO: 543481 - DNA, 19 bp, Mus musculus
  siRNA target sequence for 6430526J12Rik (NM_172668.2,2804-2822).
gcaagaggaaggtactaat

SEQ ID NO: 543482 - DNA, 19 bp, Mus musculus
  siRNA target sequence for 6430526J12Rik (NM_172668.2,2805-2823).
caagaggaaggtactaatt

SEQ ID NO: 543483 - DNA, 19 bp, Mus musculus
  siRNA target sequence for 6430526J12Rik (NM_172668.2,2842-2860).
ccttttgggctgactctat

SEQ ID NO: 543484 - DNA, 19 bp, Mus musculus
  siRNA target sequence for 6430526J12Rik (NM_172668.2,2843-2861).
cttttgggctgactctata

SEQ ID NO: 543485 - DNA, 19 bp, Mus musculus
  siRNA target sequence for 6430526J12Rik (NM_172668.2,2886-2904).
ctggcagaccaagagtata

SEQ ID NO: 543486 - DNA, 19 bp, Mus musculus
  siRNA target sequence for 6430526J12Rik (NM_172668.2,2890-2908).
cagaccaagagtatacaaa

SEQ ID NO: 543487 - DNA, 19 bp, Mus musculus
  siRNA target sequence for 6430526J12Rik (NM_172668.2,2892-2910).
gaccaagagtatacaaagt

SEQ ID NO: 543488 - DNA, 19 bp, Mus musculus
  siRNA target sequence for 6430526J12Rik (NM_172668.2,3033-3051).
cggctgcagccatttgtgt

SEQ ID NO: 543489 - DNA, 19 bp, Mus musculus
  siRNA target sequence for 6430526J12Rik (NM_172668.2,3109-3127).
ctacgagatggcaagacat

SEQ ID NO: 543490 - DNA, 19 bp, Mus musculus
  siRNA target sequence for 6430526J12Rik (NM_172668.2,3156-3174).
cttcgccaggaggattgat

SEQ ID NO: 543491 - DNA, 19 bp, Mus musculus
  siRNA target sequence for 6430526J12Rik (NM_172668.2,3179-3197).
gcatggtctccttggatat

SEQ ID NO: 543492 - DNA, 19 bp, Mus musculus
  siRNA target sequence for 6430526J12Rik (NM_172668.2,3188-3206).
ccttggatatcccttattt

SEQ ID NO: 543493 - DNA, 19 bp, Mus musculus
  siRNA target sequence for 6430526J12Rik (NM_172668.2,3189-3207).
cttggatatcccttatttt

SEQ ID NO: 543494 - DNA, 19 bp, Mus musculus
  siRNA target sequence for 6430526J12Rik (NM_172668.2,3192-3210).
ggatatcccttattttgct

SEQ ID NO: 543495 - DNA, 19 bp, Mus musculus
  siRNA target sequence for 6430526J12Rik (NM_172668.2,3214-3232).
gtggtggtacccatcaaca

SEQ ID NO: 543496 - DNA, 19 bp, Mus musculus
  siRNA target sequence for 6430526J12Rik (NM_172668.2,3264-3282).
ggatccgctggaaggaaaa

SEQ ID NO: 543497 - DNA, 19 bp, Mus musculus
  siRNA target sequence for 6430526J12Rik (NM_172668.2,3431-3449).
gaacgaatcggattgaagt

SEQ ID NO: 543498 - DNA, 19 bp, Mus musculus
  siRNA target sequence for 6430526J12Rik (NM_172668.2,3463-3481).
gggtctatgcggaaagtgt

SEQ ID NO: 543499 - DNA, 19 bp, Mus musculus
  siRNA target sequence for 6430526J12Rik (NM_172668.2,3464-3482).
ggtctatgcggaaagtgtt

SEQ ID NO: 543500 - DNA, 19 bp, Mus musculus
  siRNA target sequence for 6430526J12Rik (NM_172668.2,3526-3544).
catgaaatggggttcatgt

SEQ ID NO: 543501 - DNA, 19 bp, Mus musculus
  siRNA target sequence for 6430526J12Rik (NM_172668.2,3529-3547).
gaaatggggttcatgtact

SEQ ID NO: 543502 - DNA, 19 bp, Mus musculus
  siRNA target sequence for 6430526J12Rik (NM_172668.2,3558-3576).
gggggagaacgccaaatta

SEQ ID NO: 543503 - DNA, 19 bp, Mus musculus
  siRNA target sequence for 6430526J12Rik (NM_172668.2,3560-3578).
gggagaacgccaaattaga

SEQ ID NO: 543504 - DNA, 19 bp, Mus musculus
  siRNA target sequence for 6430526J12Rik (NM_172668.2,3914-3932).
cacagccactgggttttaa

SEQ ID NO: 543505 - DNA, 19 bp, Mus musculus
  siRNA target sequence for 6430526J12Rik (NM_172668.2,3916-3934).
cagccactgggttttaata

SEQ ID NO: 543506 - DNA, 19 bp, Mus musculus
  siRNA target sequence for 6430526J12Rik (NM_172668.2,4086-4104).
ctctattcgccgtatctca

SEQ ID NO: 543507 - DNA, 19 bp, Mus musculus
  siRNA target sequence for 6430526J12Rik (NM_172668.2,4207-4225).
gatgtgttcctggatgtta

SEQ ID NO: 543508 - DNA, 19 bp, Mus musculus
  siRNA target sequence for 6430526J12Rik (NM_172668.2,4210-4228).
gtgttcctggatgttatca

SEQ ID NO: 543509 - DNA, 19 bp, Mus musculus
  siRNA target sequence for 6430526J12Rik (NM_172668.2,4250-4268).
gcaacatggagactgttat

SEQ ID NO: 543510 - DNA, 19 bp, Mus musculus
  siRNA target sequence for 6430526J12Rik (NM_172668.2,4379-4397).
cctgtcgcaaagtgctaat

SEQ ID NO: 543511 - DNA, 19 bp, Mus musculus
  siRNA target sequence for 6430526J12Rik (NM_172668.2,4382-4400).
gtcgcaaagtgctaatcaa

SEQ ID NO: 543512 - DNA, 19 bp, Mus musculus
  siRNA target sequence for 6430526J12Rik (NM_172668.2,4384-4402).
cgcaaagtgctaatcaaca

SEQ ID NO: 543513 - DNA, 19 bp, Mus musculus
  siRNA target sequence for 6430526J12Rik (NM_172668.2,4385-4403).
gcaaagtgctaatcaacaa

SEQ ID NO: 543514 - DNA, 19 bp, Mus musculus
  siRNA target sequence for 6430526J12Rik (NM_172668.2,4557-4575).
cctcaccttggactatgat

SEQ ID NO: 543515 - DNA, 19 bp, Mus musculus
  siRNA target sequence for 6430526J12Rik (NM_172668.2,4573-4591).
gatacccgcaggatctact

SEQ ID NO: 543516 - DNA, 19 bp, Mus musculus
  siRNA target sequence for 6430526J12Rik (NM_172668.2,4693-4711).
caggacaggtggatctact

SEQ ID NO: 543517 - DNA, 19 bp, Mus musculus
  siRNA target sequence for 6430526J12Rik (NM_172668.2,4717-4735).
gactggcagaccaaatcga

SEQ ID NO: 543518 - DNA, 19 bp, Mus musculus
  siRNA target sequence for 6430526J12Rik (NM_172668.2,4738-4756).
caacgtgtcgacaagtact

SEQ ID NO: 543519 - DNA, 19 bp, Mus musculus
  siRNA target sequence for 6430526J12Rik (NM_172668.2,4784-4802).
ccaacgtggagggacttat

SEQ ID NO: 543520 - DNA, 19 bp, Mus musculus
  siRNA target sequence for 6430526J12Rik (NM_172668.2,4788-4806).
cgtggagggacttatggat

SEQ ID NO: 543521 - DNA, 19 bp, Mus musculus
  siRNA target sequence for 6430526J12Rik (NM_172668.2,4791-4809).
ggagggacttatggatatt

SEQ ID NO: 543522 - DNA, 19 bp, Mus musculus
  siRNA target sequence for 6430526J12Rik (NM_172668.2,4792-4810).
gagggacttatggatatta

SEQ ID NO: 543523 - DNA, 19 bp, Mus musculus
  siRNA target sequence for 6430526J12Rik (NM_172668.2,4796-4814).
gacttatggatattattgt

SEQ ID NO: 543524 - DNA, 19 bp, Mus musculus
  siRNA target sequence for 6430526J12Rik (NM_172668.2,4842-4860).
caatgcctgcggtgtgaat

SEQ ID NO: 543525 - DNA, 19 bp, Mus musculus
  siRNA target sequence for 6430526J12Rik (NM_172668.2,4848-4866).
ctgcggtgtgaataatggt

SEQ ID NO: 543526 - DNA, 19 bp, Mus musculus
  siRNA target sequence for 6430526J12Rik (NM_172668.2,4889-4907).
cccgagcctctgactttgt

SEQ ID NO: 543527 - DNA, 19 bp, Mus musculus
  siRNA target sequence for 6430526J12Rik (NM_172668.2,5026-5044).
cccaccaccttacattctt

SEQ ID NO: 543528 - DNA, 19 bp, Mus musculus
  siRNA target sequence for 6430526J12Rik (NM_172668.2,5114-5132).
gcctctgtgcacattccaa

SEQ ID NO: 543529 - DNA, 19 bp, Mus musculus
  siRNA target sequence for 6430526J12Rik (NM_172668.2,5224-5242).
gcggctttgatgctataca

SEQ ID NO: 543530 - DNA, 19 bp, Mus musculus
  siRNA target sequence for 6430526J12Rik (NM_172668.2,5226-5244).
ggctttgatgctatacaga

SEQ ID NO: 543531 - DNA, 19 bp, Mus musculus
  siRNA target sequence for 6430526J12Rik (NM_172668.2,5345-5363).
ccaagccagccgtgtataa

SEQ ID NO: 543532 - DNA, 19 bp, Mus musculus
  siRNA target sequence for 6430526J12Rik (NM_172668.2,5515-5533).
gatcacgtatgcatgaaga

SEQ ID NO: 543533 - DNA, 19 bp, Mus musculus
  siRNA target sequence for 9130003P18Rik (NM_172791.1,58-76).
gggtcctgggggtacttct

SEQ ID NO: 543534 - DNA, 19 bp, Mus musculus
  siRNA target sequence for 9130003P18Rik (NM_172791.1,59-77).
ggtcctgggggtacttcta

SEQ ID NO: 543535 - DNA, 19 bp, Mus musculus
  siRNA target sequence for 9130003P18Rik (NM_172791.1,124-142).
gtacctcctgccatttggt

SEQ ID NO: 543536 - DNA, 19 bp, Mus musculus
  siRNA target sequence for 9130003P18Rik (NM_172791.1,381-399).
cagtgggaggcatgtcaaa

SEQ ID NO: 543537 - DNA, 19 bp, Mus musculus
  siRNA target sequence for 9130003P18Rik (NM_172791.1,425-443).
cagggagaagcgagcaata

SEQ ID NO: 543538 - DNA, 19 bp, Mus musculus
  siRNA target sequence for 9130003P18Rik (NM_172791.1,427-445).
gggagaagcgagcaataga

SEQ ID NO: 543539 - DNA, 19 bp, Mus musculus
  siRNA target sequence for 9130003P18Rik (NM_172791.1,597-615).
cagtgcccacaaaccattt

SEQ ID NO: 543540 - DNA, 19 bp, Mus musculus
  siRNA target sequence for 9130003P18Rik (NM_172791.1,616-634).
cgcccttgcagtataacta

SEQ ID NO: 543541 - DNA, 19 bp, Mus musculus
  siRNA target sequence for 9130003P18Rik (NM_172791.1,617-635).
gcccttgcagtataactat

SEQ ID NO: 543542 - DNA, 19 bp, Mus musculus
  siRNA target sequence for 9130003P18Rik (NM_172791.1,679-697).
gtgacgccaggtttcaaca

SEQ ID NO: 543543 - DNA, 19 bp, Mus musculus
  siRNA target sequence for 9130003P18Rik (NM_172791.1,893-911).
ggctgaggccacctcatat

SEQ ID NO: 543544 - DNA, 19 bp, Mus musculus
  siRNA target sequence for 9130003P18Rik (NM_172791.1,894-912).
gctgaggccacctcatata

SEQ ID NO: 543545 - DNA, 19 bp, Mus musculus
  siRNA target sequence for 9130003P18Rik (NM_172791.1,1088-1106).
ggatggcccaaaacatcaa

SEQ ID NO: 543546 - DNA, 19 bp, Mus musculus
  siRNA target sequence for 9130003P18Rik (NM_172791.1,1089-1107).
gatggcccaaaacatcaaa

SEQ ID NO: 543547 - DNA, 19 bp, Mus musculus
  siRNA target sequence for 9130003P18Rik (NM_172791.1,1303-1321).
gtaccacctgctttaagct

SEQ ID NO: 543548 - DNA, 19 bp, Mus musculus
  siRNA target sequence for 9130207J01Rik (NM_178673.2,429-447).
ggtgctggtctgccatttt

SEQ ID NO: 543549 - DNA, 19 bp, Mus musculus
  siRNA target sequence for 9130207J01Rik (NM_178673.2,432-450).
gctggtctgccattttgat

SEQ ID NO: 543550 - DNA, 19 bp, Mus musculus
  siRNA target sequence for 9130207J01Rik (NM_178673.2,433-451).
ctggtctgccattttgatt

SEQ ID NO: 543551 - DNA, 19 bp, Mus musculus
  siRNA target sequence for 9130207J01Rik (NM_178673.2,435-453).
ggtctgccattttgattct

SEQ ID NO: 543552 - DNA, 19 bp, Mus musculus
  siRNA target sequence for 9130207J01Rik (NM_178673.2,479-497).
gggaggccaacaaaagaat

SEQ ID NO: 543553 - DNA, 19 bp, Mus musculus
  siRNA target sequence for 9130207J01Rik (NM_178673.2,500-518).
ggatatggccttaaatcct

SEQ ID NO: 543554 - DNA, 19 bp, Mus musculus
  siRNA target sequence for 9130207J01Rik (NM_178673.2,501-519).
gatatggccttaaatccta

SEQ ID NO: 543555 - DNA, 19 bp, Mus musculus
  siRNA target sequence for 9130207J01Rik (NM_178673.2,517-535).
ctatcaacctcttacaaga

SEQ ID NO: 543556 - DNA, 19 bp, Mus musculus
  siRNA target sequence for 9130207J01Rik (NM_178673.2,531-549).
caagattgcgacataagca

SEQ ID NO: 543557 - DNA, 19 bp, Mus musculus
  siRNA target sequence for 9130207J01Rik (NM_178673.2,538-556).
gcgacataagcaggaaaaa

SEQ ID NO: 543558 - DNA, 19 bp, Mus musculus
  siRNA target sequence for 9130207J01Rik (NM_178673.2,539-557).
cgacataagcaggaaaaaa

SEQ ID NO: 543559 - DNA, 19 bp, Mus musculus
  siRNA target sequence for 9130207J01Rik (NM_178673.2,567-585).
gttcaagaatcaaagaatt

SEQ ID NO: 543560 - DNA, 19 bp, Mus musculus
  siRNA target sequence for 9130207J01Rik (NM_178673.2,577-595).
caaagaatttctaattcat

SEQ ID NO: 543561 - DNA, 19 bp, Mus musculus
  siRNA target sequence for 9130207J01Rik (NM_178673.2,593-611).
catgatggaccatttggat

SEQ ID NO: 543562 - DNA, 19 bp, Mus musculus
  siRNA target sequence for 9130207J01Rik (NM_178673.2,685-703).
ctgcatggacctttgtaaa

SEQ ID NO: 543563 - DNA, 19 bp, Mus musculus
  siRNA target sequence for 9130207J01Rik (NM_178673.2,725-743).
ggatctgatggggaattct

SEQ ID NO: 543564 - DNA, 19 bp, Mus musculus
  siRNA target sequence for 9130207J01Rik (NM_178673.2,726-744).
gatctgatggggaattcta

SEQ ID NO: 543565 - DNA, 19 bp, Mus musculus
  siRNA target sequence for 9130207J01Rik (NM_178673.2,766-784).
cagagctgcctgtcttaaa

SEQ ID NO: 543566 - DNA, 19 bp, Mus musculus
  siRNA target sequence for 9130207J01Rik (NM_178673.2,793-811).
gatcaccatcgttcacaat

SEQ ID NO: 543567 - DNA, 19 bp, Mus musculus
  siRNA target sequence for 9130207J01Rik (NM_178673.2,796-814).
caccatcgttcacaatgaa

SEQ ID NO: 543568 - DNA, 19 bp, Mus musculus
  siRNA target sequence for 9130207J01Rik (NM_178673.2,870-888).
gtatgcttttagacttaca

SEQ ID NO: 543569 - DNA, 19 bp, Mus musculus
  siRNA target sequence for 9130207J01Rik (NM_178673.2,874-892).
gcttttagacttacaaaat

SEQ ID NO: 543570 - DNA, 19 bp, Mus musculus
  siRNA target sequence for 9130207J01Rik (NM_178673.2,887-905).
caaaatcaaaagtatatta

SEQ ID NO: 543571 - DNA, 19 bp, Mus musculus
  siRNA target sequence for 9130207J01Rik (NM_178673.2,993-1011).
gtaatggacttgtagatat

SEQ ID NO: 543572 - DNA, 19 bp, Mus musculus
  siRNA target sequence for 9130207J01Rik (NM_178673.2,1055-1073).
gacctttctgactgtactt

SEQ ID NO: 543573 - DNA, 19 bp, Mus musculus
  siRNA target sequence for 9130207J01Rik (NM_178673.2,1115-1133).
cacctggctcttgaagaat

SEQ ID NO: 543574 - DNA, 19 bp, Mus musculus
  siRNA target sequence for 9130207J01Rik (NM_178673.2,1118-1136).
ctggctcttgaagaattct

SEQ ID NO: 543575 - DNA, 19 bp, Mus musculus
  siRNA target sequence for 9130207J01Rik (NM_178673.2,1159-1177).
gttgagtctgcctgaagat

SEQ ID NO: 543576 - DNA, 19 bp, Mus musculus
  siRNA target sequence for 9130207J01Rik (NM_178673.2,1175-1193).
gatcagagagtaagcatta

SEQ ID NO: 543577 - DNA, 19 bp, Mus musculus
  siRNA target sequence for 9130207J01Rik (NM_178673.2,1245-1263).
cgctgagaccccctatcat

SEQ ID NO: 543578 - DNA, 19 bp, Mus musculus
  siRNA target sequence for 9130207J01Rik (NM_178673.2,1246-1264).
gctgagaccccctatcata

SEQ ID NO: 543579 - DNA, 19 bp, Mus musculus
  siRNA target sequence for 9130207J01Rik (NM_178673.2,1247-1265).
ctgagaccccctatcatat

SEQ ID NO: 543580 - DNA, 19 bp, Mus musculus
  siRNA target sequence for 9130207J01Rik (NM_178673.2,1251-1269).
gaccccctatcatatggaa

SEQ ID NO: 543581 - DNA, 19 bp, Mus musculus
  siRNA target sequence for 9130207J01Rik (NM_178673.2,1270-1288).
gaggaacaacattgttcta

SEQ ID NO: 543582 - DNA, 19 bp, Mus musculus
  siRNA target sequence for 9130207J01Rik (NM_178673.2,1272-1290).
ggaacaacattgttctaaa

SEQ ID NO: 543583 - DNA, 19 bp, Mus musculus
  siRNA target sequence for 9130207J01Rik (NM_178673.2,1331-1349).
gggtccctgtatattacca

SEQ ID NO: 543584 - DNA, 19 bp, Mus musculus
  siRNA target sequence for 9130207J01Rik (NM_178673.2,1332-1350).
ggtccctgtatattaccaa

SEQ ID NO: 543585 - DNA, 19 bp, Mus musculus
  siRNA target sequence for 9130207J01Rik (NM_178673.2,1337-1355).
ctgtatattaccaaggtta

SEQ ID NO: 543586 - DNA, 19 bp, Mus musculus
  siRNA target sequence for 9130207J01Rik (NM_178673.2,1359-1377).
cagttcacatgggaaatta

SEQ ID NO: 543587 - DNA, 19 bp, Mus musculus
  siRNA target sequence for 9130207J01Rik (NM_178673.2,1474-1492).
cagagaacctggtgtaact

SEQ ID NO: 543588 - DNA, 19 bp, Mus musculus
  siRNA target sequence for 9130207J01Rik (NM_178673.2,1544-1562).
ctgaagaatgggattgaca

SEQ ID NO: 543589 - DNA, 19 bp, Mus musculus
  siRNA target sequence for 9130207J01Rik (NM_178673.2,1546-1564).
gaagaatgggattgacatt

SEQ ID NO: 543590 - DNA, 19 bp, Mus musculus
  siRNA target sequence for 9130207J01Rik (NM_178673.2,1608-1626).
gtgaggtccacataagcaa

SEQ ID NO: 543591 - DNA, 19 bp, Mus musculus
  siRNA target sequence for 9130207J01Rik (NM_178673.2,1649-1667).
gcatacacgtgcattgcta

SEQ ID NO: 543592 - DNA, 19 bp, Mus musculus
  siRNA target sequence for 9130207J01Rik (NM_178673.2,1654-1672).
cacgtgcattgctaggaat

SEQ ID NO: 543593 - DNA, 19 bp, Mus musculus
  siRNA target sequence for 9130207J01Rik (NM_178673.2,1677-1695).
ccggtgtggatgaagacat

SEQ ID NO: 543594 - DNA, 19 bp, Mus musculus
  siRNA target sequence for 9130207J01Rik (NM_178673.2,1729-1747).
gacactagctaacatatta

SEQ ID NO: 543595 - DNA, 19 bp, Mus musculus
  siRNA target sequence for 9130207J01Rik (NM_178673.2,1733-1751).
ctagctaacatattatgga

SEQ ID NO: 543596 - DNA, 19 bp, Mus musculus
  siRNA target sequence for 9130207J01Rik (NM_178673.2,1741-1759).
catattatggagagaagaa

SEQ ID NO: 543597 - DNA, 19 bp, Mus musculus
  siRNA target sequence for 9130207J01Rik (NM_178673.2,1783-1801).
ctatgttttttatgaagat

SEQ ID NO: 543598 - DNA, 19 bp, Mus musculus
  siRNA target sequence for 9130207J01Rik (NM_178673.2,1817-1835).
caacccacggaatgtgaat

SEQ ID NO: 543599 - DNA, 19 bp, Mus musculus
  siRNA target sequence for 9130207J01Rik (NM_178673.2,1821-1839).
ccacggaatgtgaatttca

SEQ ID NO: 543600 - DNA, 19 bp, Mus musculus
  siRNA target sequence for 9130207J01Rik (NM_178673.2,1927-1945).
gtgggcatctgctgttaat

SEQ ID NO: 543601 - DNA, 19 bp, Mus musculus
  siRNA target sequence for 9130207J01Rik (NM_178673.2,1929-1947).
gggcatctgctgttaatgt

SEQ ID NO: 543602 - DNA, 19 bp, Mus musculus
  siRNA target sequence for 9130207J01Rik (NM_178673.2,1932-1950).
catctgctgttaatgtcaa

SEQ ID NO: 543603 - DNA, 19 bp, Mus musculus
  siRNA target sequence for 9130207J01Rik (NM_178673.2,1938-1956).
ctgttaatgtcaaagacaa

SEQ ID NO: 543604 - DNA, 19 bp, Mus musculus
  siRNA target sequence for 9130207J01Rik (NM_178673.2,1946-1964).
gtcaaagacaagttcattt

SEQ ID NO: 543605 - DNA, 19 bp, Mus musculus
  siRNA target sequence for 9130207J01Rik (NM_178673.2,2042-2060).
gatcctgtaccagttaaat

SEQ ID NO: 543606 - DNA, 19 bp, Mus musculus
  siRNA target sequence for 9130207J01Rik (NM_178673.2,2046-2064).
ctgtaccagttaaattaca

SEQ ID NO: 543607 - DNA, 19 bp, Mus musculus
  siRNA target sequence for 9130207J01Rik (NM_178673.2,2116-2134).
gaagacatcaccaactcta

SEQ ID NO: 543608 - DNA, 19 bp, Mus musculus
  siRNA target sequence for 9130207J01Rik (NM_178673.2,2192-2210).
gttgggaaacagtttgaca

SEQ ID NO: 543609 - DNA, 19 bp, Mus musculus
  siRNA target sequence for 9130207J01Rik (NM_178673.2,2207-2225).
gacagagtggacgattttt

SEQ ID NO: 543610 - DNA, 19 bp, Mus musculus
  siRNA target sequence for 9130207J01Rik (NM_178673.2,2209-2227).
cagagtggacgattttttt

SEQ ID NO: 543611 - DNA, 19 bp, Mus musculus
  siRNA target sequence for 9130207J01Rik (NM_178673.2,2231-2249).
ccaactccaacacttatta

SEQ ID NO: 543612 - DNA, 19 bp, Mus musculus
  siRNA target sequence for 9130207J01Rik (NM_178673.2,2232-2250).
caactccaacacttattat

SEQ ID NO: 543613 - DNA, 19 bp, Mus musculus
  siRNA target sequence for 9130207J01Rik (NM_178673.2,2387-2405).
catctgggaggatactact

SEQ ID NO: 543614 - DNA, 19 bp, Mus musculus
  siRNA target sequence for 9130207J01Rik (NM_178673.2,2392-2410).
gggaggatactacttcata

SEQ ID NO: 543615 - DNA, 19 bp, Mus musculus
  siRNA target sequence for 9130207J01Rik (NM_178673.2,2463-2481).
gtgtgactgactctatcat

SEQ ID NO: 543616 - DNA, 19 bp, Mus musculus
  siRNA target sequence for 9130207J01Rik (NM_178673.2,2520-2538).
ctccagacggacactatct

SEQ ID NO: 543617 - DNA, 19 bp, Mus musculus
  siRNA target sequence for 9130207J01Rik (NM_178673.2,2531-2549).
cactatcttgtcagtgtta

SEQ ID NO: 543618 - DNA, 19 bp, Mus musculus
  siRNA target sequence for 9130207J01Rik (NM_178673.2,2564-2582).
cttgtcagagtccaatata

SEQ ID NO: 543619 - DNA, 19 bp, Mus musculus
  siRNA target sequence for 9130207J01Rik (NM_178673.2,2567-2585).
gtcagagtccaatatatca

SEQ ID NO: 543620 - DNA, 19 bp, Mus musculus
  siRNA target sequence for 9130207J01Rik (NM_178673.2,2586-2604).
ccatccgaggagagattct

SEQ ID NO: 543621 - DNA, 19 bp, Mus musculus
  siRNA target sequence for 9130207J01Rik (NM_178673.2,2625-2643).
ccaacctacatatatctga

SEQ ID NO: 543622 - DNA, 19 bp, Mus musculus
  siRNA target sequence for 9130207J01Rik (NM_178673.2,2669-2687).
gaagcccaccagtacaaca

SEQ ID NO: 543623 - DNA, 19 bp, Mus musculus
  siRNA target sequence for 9130207J01Rik (NM_178673.2,2739-2757).
ctgggaaggtcaagatgat

SEQ ID NO: 543624 - DNA, 19 bp, Mus musculus
  siRNA target sequence for 9130207J01Rik (NM_178673.2,2881-2899).
cctggatggtcgccttaat

SEQ ID NO: 543625 - DNA, 19 bp, Mus musculus
  siRNA target sequence for 9130207J01Rik (NM_178673.2,2882-2900).
ctggatggtcgccttaata

SEQ ID NO: 543626 - DNA, 19 bp, Mus musculus
  siRNA target sequence for 9130207J01Rik (NM_178673.2,2884-2902).
ggatggtcgccttaataaa

SEQ ID NO: 543627 - DNA, 19 bp, Mus musculus
  siRNA target sequence for 9130207J01Rik (NM_178673.2,2885-2903).
gatggtcgccttaataaat

SEQ ID NO: 543628 - DNA, 19 bp, Mus musculus
  siRNA target sequence for 9130207J01Rik (NM_178673.2,2888-2906).
ggtcgccttaataaattaa

SEQ ID NO: 543629 - DNA, 19 bp, Mus musculus
  siRNA target sequence for 9130207J01Rik (NM_178673.2,2889-2907).
gtcgccttaataaattaaa

SEQ ID NO: 543630 - DNA, 19 bp, Mus musculus
  siRNA target sequence for 9130207J01Rik (NM_178673.2,2921-2939).
gaggttcagaaaggaaata

SEQ ID NO: 543631 - DNA, 19 bp, Mus musculus
  siRNA target sequence for 9430004M15 (NM_177728.2,242-260).
ccaggtacgggacttcaat

SEQ ID NO: 543632 - DNA, 19 bp, Mus musculus
  siRNA target sequence for 9430004M15 (NM_177728.2,246-264).
gtacgggacttcaatgaca

SEQ ID NO: 543633 - DNA, 19 bp, Mus musculus
  siRNA target sequence for 9430004M15 (NM_177728.2,279-297).
cctccgggagacattttta

SEQ ID NO: 543634 - DNA, 19 bp, Mus musculus
  siRNA target sequence for 9430004M15 (NM_177728.2,282-300).
ccgggagacatttttaagt

SEQ ID NO: 543635 - DNA, 19 bp, Mus musculus
  siRNA target sequence for 9430004M15 (NM_177728.2,318-336).
ccccttggtacgtctgtta

SEQ ID NO: 543636 - DNA, 19 bp, Mus musculus
  siRNA target sequence for 9430004M15 (NM_177728.2,319-337).
cccttggtacgtctgttat

SEQ ID NO: 543637 - DNA, 19 bp, Mus musculus
  siRNA target sequence for 9430004M15 (NM_177728.2,320-338).
ccttggtacgtctgttatt

SEQ ID NO: 543638 - DNA, 19 bp, Mus musculus
  siRNA target sequence for 9430004M15 (NM_177728.2,321-339).
cttggtacgtctgttattt

SEQ ID NO: 543639 - DNA, 19 bp, Mus musculus
  siRNA target sequence for 9430004M15 (NM_177728.2,483-501).
gccaacctcttcgagttaa

SEQ ID NO: 543640 - DNA, 19 bp, Mus musculus
  siRNA target sequence for 9430004M15 (NM_177728.2,519-537).
caagcagtgccgatagaaa

SEQ ID NO: 543641 - DNA, 19 bp, Mus musculus
  siRNA target sequence for 9430004M15 (NM_177728.2,539-557).
caggaggtacgctctgaaa

SEQ ID NO: 543642 - DNA, 19 bp, Mus musculus
  siRNA target sequence for 9430004M15 (NM_177728.2,541-559).
ggaggtacgctctgaaaaa

SEQ ID NO: 543643 - DNA, 19 bp, Mus musculus
  siRNA target sequence for 9430004M15 (NM_177728.2,542-560).
gaggtacgctctgaaaaat

SEQ ID NO: 543644 - DNA, 19 bp, Mus musculus
  siRNA target sequence for 9430004M15 (NM_177728.2,544-562).
ggtacgctctgaaaaatgt

SEQ ID NO: 543645 - DNA, 19 bp, Mus musculus
  siRNA target sequence for 9430004M15 (NM_177728.2,588-606).
gacaatgtcccaatgttta

SEQ ID NO: 543646 - DNA, 19 bp, Mus musculus
  siRNA target sequence for 9430004M15 (NM_177728.2,596-614).
cccaatgtttatatctcaa

SEQ ID NO: 543647 - DNA, 19 bp, Mus musculus
  siRNA target sequence for 9430004M15 (NM_177728.2,633-651).
ccgtcagccatgattggtt

SEQ ID NO: 543648 - DNA, 19 bp, Mus musculus
  siRNA target sequence for 9430004M15 (NM_177728.2,699-717).
ggcgaggtcgagtatgaga

SEQ ID NO: 543649 - DNA, 19 bp, Mus musculus
  siRNA target sequence for 9430004M15 (NM_177728.2,700-718).
gcgaggtcgagtatgagat

SEQ ID NO: 543650 - DNA, 19 bp, Mus musculus
  siRNA target sequence for 9430004M15 (NM_177728.2,701-719).
cgaggtcgagtatgagata

SEQ ID NO: 543651 - DNA, 19 bp, Mus musculus
  siRNA target sequence for 9430004M15 (NM_177728.2,705-723).
gtcgagtatgagatactca

SEQ ID NO: 543652 - DNA, 19 bp, Mus musculus
  siRNA target sequence for 9430004M15 (NM_177728.2,707-725).
cgagtatgagatactcaat

SEQ ID NO: 543653 - DNA, 19 bp, Mus musculus
  siRNA target sequence for 9430004M15 (NM_177728.2,792-810).
ccttcacagctcatctaca

SEQ ID NO: 543654 - DNA, 19 bp, Mus musculus
  siRNA target sequence for 9430004M15 (NM_177728.2,840-858).
ccagagcggaggaagtcaa

SEQ ID NO: 543655 - DNA, 19 bp, Mus musculus
  siRNA target sequence for 9430004M15 (NM_177728.2,1019-1037).
cgtttctgttcgttgtgaa

SEQ ID NO: 543656 - DNA, 19 bp, Mus musculus
  siRNA target sequence for 9430004M15 (NM_177728.2,1043-1061).
gactgtcggacgtctcttt

SEQ ID NO: 543657 - DNA, 19 bp, Mus musculus
  siRNA target sequence for 9430004M15 (NM_177728.2,1047-1065).
gtcggacgtctctttacca

SEQ ID NO: 543658 - DNA, 19 bp, Mus musculus
  siRNA target sequence for 9430004M15 (NM_177728.2,1073-1091).
gcagacgggtgtcattcaa

SEQ ID NO: 543659 - DNA, 19 bp, Mus musculus
  siRNA target sequence for 9430004M15 (NM_177728.2,1074-1092).
cagacgggtgtcattcaaa

SEQ ID NO: 543660 - DNA, 19 bp, Mus musculus
  siRNA target sequence for 9430004M15 (NM_177728.2,1076-1094).
gacgggtgtcattcaaact

SEQ ID NO: 543661 - DNA, 19 bp, Mus musculus
  siRNA target sequence for 9430004M15 (NM_177728.2,1130-1148).
ctacctggtggatgtttat

SEQ ID NO: 543662 - DNA, 19 bp, Mus musculus
  siRNA target sequence for 9430004M15 (NM_177728.2,1140-1158).
gatgtttatgccatagaga

SEQ ID NO: 543663 - DNA, 19 bp, Mus musculus
  siRNA target sequence for 9430004M15 (NM_177728.2,1193-1211).
ggtagaaataacacttcaa

SEQ ID NO: 543664 - DNA, 19 bp, Mus musculus
  siRNA target sequence for 9430004M15 (NM_177728.2,1340-1358).
ggtcacgtatgctctcatt

SEQ ID NO: 543665 - DNA, 19 bp, Mus musculus
  siRNA target sequence for 9430004M15 (NM_177728.2,1341-1359).
gtcacgtatgctctcatta

SEQ ID NO: 543666 - DNA, 19 bp, Mus musculus
  siRNA target sequence for 9430004M15 (NM_177728.2,1343-1361).
cacgtatgctctcattagt

SEQ ID NO: 543667 - DNA, 19 bp, Mus musculus
  siRNA target sequence for 9430004M15 (NM_177728.2,1488-1506).
gacatgaggataaatatca

SEQ ID NO: 543668 - DNA, 19 bp, Mus musculus
  siRNA target sequence for 9430004M15 (NM_177728.2,1524-1542).
gaccacacccccagattct

SEQ ID NO: 543669 - DNA, 19 bp, Mus musculus
  siRNA target sequence for 9430004M15 (NM_177728.2,1591-1609).
ccctggtggcagctatttt

SEQ ID NO: 543670 - DNA, 19 bp, Mus musculus
  siRNA target sequence for 9430004M15 (NM_177728.2,1670-1688).
cggggatggcgtgttcttt

SEQ ID NO: 543671 - DNA, 19 bp, Mus musculus
  siRNA target sequence for 9430004M15 (NM_177728.2,1672-1690).
gggatggcgtgttctttct

SEQ ID NO: 543672 - DNA, 19 bp, Mus musculus
  siRNA target sequence for 9430004M15 (NM_177728.2,1798-1816).
ccatccgagcttacttcaa

SEQ ID NO: 543673 - DNA, 19 bp, Mus musculus
  siRNA target sequence for 9430004M15 (NM_177728.2,1802-1820).
ccgagcttacttcaacatt

SEQ ID NO: 543674 - DNA, 19 bp, Mus musculus
  siRNA target sequence for 9430004M15 (NM_177728.2,1804-1822).
gagcttacttcaacattct

SEQ ID NO: 543675 - DNA, 19 bp, Mus musculus
  siRNA target sequence for 9430004M15 (NM_177728.2,1807-1825).
cttacttcaacattcttga

SEQ ID NO: 543676 - DNA, 19 bp, Mus musculus
  siRNA target sequence for 9430004M15 (NM_177728.2,1859-1877).
ctcctacagcacatcctta

SEQ ID NO: 543677 - DNA, 19 bp, Mus musculus
  siRNA target sequence for 9430004M15 (NM_177728.2,1897-1915).
gatccacggtccttgtgtt

SEQ ID NO: 543678 - DNA, 19 bp, Mus musculus
  siRNA target sequence for 9430004M15 (NM_177728.2,1900-1918).
ccacggtccttgtgtttaa

SEQ ID NO: 543679 - DNA, 19 bp, Mus musculus
  siRNA target sequence for 9430093N24Rik (NM_178793.2,238-256).
gctgcaaaggatataaatt

SEQ ID NO: 543680 - DNA, 19 bp, Mus musculus
  siRNA target sequence for 9430093N24Rik (NM_178793.2,315-333).
cagcagtgcacggataact

SEQ ID NO: 543681 - DNA, 19 bp, Mus musculus
  siRNA target sequence for 9430093N24Rik (NM_178793.2,403-421).
gaccgtactgtctggatat

SEQ ID NO: 543682 - DNA, 19 bp, Mus musculus
  siRNA target sequence for 9430093N24Rik (NM_178793.2,406-424).
cgtactgtctggatatcga

SEQ ID NO: 543683 - DNA, 19 bp, Mus musculus
  siRNA target sequence for 9430093N24Rik (NM_178793.2,407-425).
gtactgtctggatatcgat

SEQ ID NO: 543684 - DNA, 19 bp, Mus musculus
  siRNA target sequence for 9430093N24Rik (NM_178793.2,536-554).
ctgcacaaggggagacaaa

SEQ ID NO: 543685 - DNA, 19 bp, Mus musculus
  siRNA target sequence for 9430093N24Rik (NM_178793.2,538-556).
gcacaaggggagacaaata

SEQ ID NO: 543686 - DNA, 19 bp, Mus musculus
  siRNA target sequence for 9430093N24Rik (NM_178793.2,677-695).
ggcgctgctccccaacaat

SEQ ID NO: 543687 - DNA, 19 bp, Mus musculus
  siRNA target sequence for 9430093N24Rik (NM_178793.2,702-720).
gaactgggcaagtatgtca

SEQ ID NO: 543688 - DNA, 19 bp, Mus musculus
  siRNA target sequence for 9430093N24Rik (NM_178793.2,892-910).
cccctgacctgtctcatat

SEQ ID NO: 543689 - DNA, 19 bp, Mus musculus
  siRNA target sequence for 9430093N24Rik (NM_178793.2,1041-1059).
gtgctggcggacattcgaa

SEQ ID NO: 543690 - DNA, 19 bp, Mus musculus
  siRNA target sequence for 9430093N24Rik (NM_178793.2,1043-1061).
gctggcggacattcgaaat

SEQ ID NO: 543691 - DNA, 19 bp, Mus musculus
  siRNA target sequence for 9430093N24Rik (NM_178793.2,1047-1065).
gcggacattcgaaatgaca

SEQ ID NO: 543692 - DNA, 19 bp, Mus musculus
  siRNA target sequence for 9430093N24Rik (NM_178793.2,1048-1066).
cggacattcgaaatgacat

SEQ ID NO: 543693 - DNA, 19 bp, Mus musculus
  siRNA target sequence for 9430093N24Rik (NM_178793.2,1125-1143).
cccctacctcaggaattct

SEQ ID NO: 543694 - DNA, 19 bp, Mus musculus
  siRNA target sequence for 9430093N24Rik (NM_178793.2,1179-1197).
gatgactactccagaagaa

SEQ ID NO: 543695 - DNA, 19 bp, Mus musculus
  siRNA target sequence for 9430093N24Rik (NM_178793.2,1217-1235).
ggccccaagaaatttttat

SEQ ID NO: 543696 - DNA, 19 bp, Mus musculus
  siRNA target sequence for 9530090G24Rik (NM_145537.1,253-271).
cgacacctggggcagtttt

SEQ ID NO: 543697 - DNA, 19 bp, Mus musculus
  siRNA target sequence for 9530090G24Rik (NM_145537.1,258-276).
cctggggcagtttttctct

SEQ ID NO: 543698 - DNA, 19 bp, Mus musculus
  siRNA target sequence for 9530090G24Rik (NM_145537.1,315-333).
ggaatacctctgaattcca

SEQ ID NO: 543699 - DNA, 19 bp, Mus musculus
  siRNA target sequence for 9530090G24Rik (NM_145537.1,321-339).
cctctgaattccaaagagt

SEQ ID NO: 543700 - DNA, 19 bp, Mus musculus
  siRNA target sequence for 9530090G24Rik (NM_145537.1,322-340).
ctctgaattccaaagagta

SEQ ID NO: 543701 - DNA, 19 bp, Mus musculus
  siRNA target sequence for 9530090G24Rik (NM_145537.1,355-373).
ggacaatgtggactttgat

SEQ ID NO: 543702 - DNA, 19 bp, Mus musculus
  siRNA target sequence for 9530090G24Rik (NM_145537.1,636-654).
ggaccttcattgtggaatt

SEQ ID NO: 543703 - DNA, 19 bp, Mus musculus
  siRNA target sequence for 9530090G24Rik (NM_145537.1,726-744).
gggagagccggtcagatat

SEQ ID NO: 543704 - DNA, 19 bp, Mus musculus
  siRNA target sequence for 9530090G24Rik (NM_145537.1,747-765).
ggctggttggcaatcacat

SEQ ID NO: 543705 - DNA, 19 bp, Mus musculus
  siRNA target sequence for 9530090G24Rik (NM_145537.1,811-829).
ggctggtgtggattcctat

SEQ ID NO: 543706 - DNA, 19 bp, Mus musculus
  siRNA target sequence for 9530090G24Rik (NM_145537.1,812-830).
gctggtgtggattcctatt

SEQ ID NO: 543707 - DNA, 19 bp, Mus musculus
  siRNA target sequence for 9530090G24Rik (NM_145537.1,818-836).
gtggattcctattttgagt

SEQ ID NO: 543708 - DNA, 19 bp, Mus musculus
  siRNA target sequence for 9530090G24Rik (NM_145537.1,852-870).
ccatccttcttcaggataa

SEQ ID NO: 543709 - DNA, 19 bp, Mus musculus
  siRNA target sequence for 9530090G24Rik (NM_145537.1,1022-1040).
cttattggagacattgaca

SEQ ID NO: 543710 - DNA, 19 bp, Mus musculus
  siRNA target sequence for 9530090G24Rik (NM_145537.1,1043-1061).
gccatgaggacctttctca

SEQ ID NO: 543711 - DNA, 19 bp, Mus musculus
  siRNA target sequence for 9530090G24Rik (NM_145537.1,1050-1068).
ggacctttctcaactacta

SEQ ID NO: 543712 - DNA, 19 bp, Mus musculus
  siRNA target sequence for 9530090G24Rik (NM_145537.1,1111-1129).
cattcctcagggatacaca

SEQ ID NO: 543713 - DNA, 19 bp, Mus musculus
  siRNA target sequence for 9530090G24Rik (NM_145537.1,1204-1222).
ggatcccactctcttagaa

SEQ ID NO: 543714 - DNA, 19 bp, Mus musculus
  siRNA target sequence for 9530090G24Rik (NM_145537.1,1336-1354).
cctggctgaaactgtgaaa

SEQ ID NO: 543715 - DNA, 19 bp, Mus musculus
  siRNA target sequence for 9530090G24Rik (NM_145537.1,1367-1385).
ctgttccacccaaacaact

SEQ ID NO: 543716 - DNA, 19 bp, Mus musculus
  siRNA target sequence for 9530090G24Rik (NM_145537.1,1753-1771).
gctaggccaggttttccta

SEQ ID NO: 543717 - DNA, 19 bp, Mus musculus
  siRNA target sequence for 9930111I18Rik (NM_178695.3,236-254).
cgaacatgccccagaagaa

SEQ ID NO: 543718 - DNA, 19 bp, Mus musculus
  siRNA target sequence for 9930111I18Rik (NM_178695.3,305-323).
gaacaataggtttgatcta

SEQ ID NO: 543719 - DNA, 19 bp, Mus musculus
  siRNA target sequence for 9930111I18Rik (NM_178695.3,365-383).
ggagttctgtagttatgaa

SEQ ID NO: 543720 - DNA, 19 bp, Mus musculus
  siRNA target sequence for 9930111I18Rik (NM_178695.3,402-420).
ggggatgatgaaaatacga

SEQ ID NO: 543721 - DNA, 19 bp, Mus musculus
  siRNA target sequence for 9930111I18Rik (NM_178695.3,403-421).
gggatgatgaaaatacgat

SEQ ID NO: 543722 - DNA, 19 bp, Mus musculus
  siRNA target sequence for 9930111I18Rik (NM_178695.3,434-452).
gacttattcaattaaagga

SEQ ID NO: 543723 - DNA, 19 bp, Mus musculus
  siRNA target sequence for 9930111I18Rik (NM_178695.3,457-475).
ccacaggatcagatgttaa

SEQ ID NO: 543724 - DNA, 19 bp, Mus musculus
  siRNA target sequence for 9930111I18Rik (NM_178695.3,499-517).
gccttctgactggattgat

SEQ ID NO: 543725 - DNA, 19 bp, Mus musculus
  siRNA target sequence for 9930111I18Rik (NM_178695.3,500-518).
ccttctgactggattgatt

SEQ ID NO: 543726 - DNA, 19 bp, Mus musculus
  siRNA target sequence for 9930111I18Rik (NM_178695.3,522-540).
gctggagtattcttggtta

SEQ ID NO: 543727 - DNA, 19 bp, Mus musculus
  siRNA target sequence for 9930111I18Rik (NM_178695.3,547-565).
gcttagttggctactatgt

SEQ ID NO: 543728 - DNA, 19 bp, Mus musculus
  siRNA target sequence for 9930111I18Rik (NM_178695.3,564-582).
gtatgtctcaccaagtgta

SEQ ID NO: 543729 - DNA, 19 bp, Mus musculus
  siRNA target sequence for 9930111I18Rik (NM_178695.3,706-724).
gactaccttcctatgaaca

SEQ ID NO: 543730 - DNA, 19 bp, Mus musculus
  siRNA target sequence for 9930111I18Rik (NM_178695.3,777-795).
gggcctgcaagaggattta

SEQ ID NO: 543731 - DNA, 19 bp, Mus musculus
  siRNA target sequence for 9930111I18Rik (NM_178695.3,787-805).
gaggatttagggtatttaa

SEQ ID NO: 543732 - DNA, 19 bp, Mus musculus
  siRNA target sequence for A330042H22 (NM_173014.1,300-318).
gctcccagtccgtgcttta

SEQ ID NO: 543733 - DNA, 19 bp, Mus musculus
  siRNA target sequence for A330042H22 (NM_173014.1,390-408).
gacccatccaataagcaat

SEQ ID NO: 543734 - DNA, 19 bp, Mus musculus
  siRNA target sequence for A330042H22 (NM_173014.1,445-463).
ctggcgcgtgccatgttct

SEQ ID NO: 543735 - DNA, 19 bp, Mus musculus
  siRNA target sequence for A330042H22 (NM_173014.1,479-497).
cggttaccgtgaaaggaaa

SEQ ID NO: 543736 - DNA, 19 bp, Mus musculus
  siRNA target sequence for A330042H22 (NM_173014.1,558-576).
cggaattgcctgtgtagta

SEQ ID NO: 543737 - DNA, 19 bp, Mus musculus
  siRNA target sequence for A330042H22 (NM_173014.1,594-612).
ggtatcacggaatgagaat

SEQ ID NO: 543738 - DNA, 19 bp, Mus musculus
  siRNA target sequence for A330042H22 (NM_173014.1,682-700).
gactcccgaaaaaacacaa

SEQ ID NO: 543739 - DNA, 19 bp, Mus musculus
  siRNA target sequence for A330042H22 (NM_173014.1,740-758).
ggccccagatactagtttt

SEQ ID NO: 543740 - DNA, 19 bp, Mus musculus
  siRNA target sequence for A330042H22 (NM_173014.1,759-777).
cccagaaggtacttgtact

SEQ ID NO: 543741 - DNA, 19 bp, Mus musculus
  siRNA target sequence for A330042H22 (NM_173014.1,776-794).
ctaatcgctcctgtttgat

SEQ ID NO: 543742 - DNA, 19 bp, Mus musculus
  siRNA target sequence for A330042H22 (NM_173014.1,847-865).
ctcagatacccaaacaagt

SEQ ID NO: 543743 - DNA, 19 bp, Mus musculus
  siRNA target sequence for A330042H22 (NM_173014.1,884-902).
cctggcaaggctatacatt

SEQ ID NO: 543744 - DNA, 19 bp, Mus musculus
  siRNA target sequence for A330042H22 (NM_173014.1,941-959).
cgaaggtggagattgagtt

SEQ ID NO: 543745 - DNA, 19 bp, Mus musculus
  siRNA target sequence for A330042H22 (NM_173014.1,1003-1021).
gtccttttcgccagtagaa

SEQ ID NO: 543746 - DNA, 19 bp, Mus musculus
  siRNA target sequence for A330042H22 (NM_173014.1,1078-1096).
gactgcaggctgatgatct

SEQ ID NO: 543747 - DNA, 19 bp, Mus musculus
  siRNA target sequence for A330042H22 (NM_173014.1,1149-1167).
gattagccggaaactgaaa

SEQ ID NO: 543748 - DNA, 19 bp, Mus musculus
  siRNA target sequence for A330042H22 (NM_173014.1,1186-1204).
cggaagcacttggatgaat

SEQ ID NO: 543749 - DNA, 19 bp, Mus musculus
  siRNA target sequence for A330042H22 (NM_173014.1,1187-1205).
ggaagcacttggatgaata

SEQ ID NO: 543750 - DNA, 19 bp, Mus musculus
  siRNA target sequence for A330042H22 (NM_173014.1,1188-1206).
gaagcacttggatgaatat

SEQ ID NO: 543751 - DNA, 19 bp, Mus musculus
  siRNA target sequence for A330042H22 (NM_173014.1,1249-1267).
gaggagtttgcggaatact

SEQ ID NO: 543752 - DNA, 19 bp, Mus musculus
  siRNA target sequence for A330042H22 (NM_173014.1,1284-1302).
cgatgtcctgagacaactt

SEQ ID NO: 543753 - DNA, 19 bp, Mus musculus
  siRNA target sequence for A330042H22 (NM_173014.1,1374-1392).
gtgcaaccctgccaataca

SEQ ID NO: 543754 - DNA, 19 bp, Mus musculus
  siRNA target sequence for A330042H22 (NM_173014.1,1376-1394).
gcaaccctgccaatacaga

SEQ ID NO: 543755 - DNA, 19 bp, Mus musculus
  siRNA target sequence for A330042H22 (NM_173014.1,1382-1400).
ctgccaatacagaagagat

SEQ ID NO: 543756 - DNA, 19 bp, Mus musculus
  siRNA target sequence for A330042H22 (NM_173014.1,1410-1428).
ggcatttaagctctttgat

SEQ ID NO: 543757 - DNA, 19 bp, Mus musculus
  siRNA target sequence for A330042H22 (NM_173014.1,1492-1510).
gtgcctgaccttaatgttt

SEQ ID NO: 543758 - DNA, 19 bp, Mus musculus
  siRNA target sequence for A330042H22 (NM_173014.1,1546-1564).
gtttcctacgaggaattca

SEQ ID NO: 543759 - DNA, 19 bp, Mus musculus
  siRNA target sequence for A330042H22 (NM_173014.1,1551-1569).
ctacgaggaattcaaaagt

SEQ ID NO: 543760 - DNA, 19 bp, Mus musculus
  siRNA target sequence for A330042H22 (NM_173014.1,1599-1617).
gatatttaccacataccta

SEQ ID NO: 543761 - DNA, 19 bp, Mus musculus
  siRNA target sequence for A330042H22 (NM_173014.1,1667-1685).
ctccctctgttgctagtaa

SEQ ID NO: 543762 - DNA, 19 bp, Mus musculus
  siRNA target sequence for A330042H22 (NM_173014.1,1669-1687).
ccctctgttgctagtaata

SEQ ID NO: 543763 - DNA, 19 bp, Mus musculus
  siRNA target sequence for A330042H22 (NM_173014.1,1670-1688).
cctctgttgctagtaataa

SEQ ID NO: 543764 - DNA, 19 bp, Mus musculus
  siRNA target sequence for A430083B19 (NM_177624.2,102-120).
catttcagcacctagcaaa

SEQ ID NO: 543765 - DNA, 19 bp, Mus musculus
  siRNA target sequence for A430083B19 (NM_177624.2,116-134).
gcaaaatgcctaaaagtgt

SEQ ID NO: 543766 - DNA, 19 bp, Mus musculus
  siRNA target sequence for A430083B19 (NM_177624.2,123-141).
gcctaaaagtgtttcaata

SEQ ID NO: 543767 - DNA, 19 bp, Mus musculus
  siRNA target sequence for A430083B19 (NM_177624.2,147-165).
gcaactggcttcaataaaa

SEQ ID NO: 543768 - DNA, 19 bp, Mus musculus
  siRNA target sequence for A430083B19 (NM_177624.2,203-221).
ctactattgctctggtttt

SEQ ID NO: 543769 - DNA, 19 bp, Mus musculus
  siRNA target sequence for A430083B19 (NM_177624.2,276-294).
gctacaaacccaatttaaa

SEQ ID NO: 543770 - DNA, 19 bp, Mus musculus
  siRNA target sequence for A430083B19 (NM_177624.2,420-438).
gtcagatctgctacgaaat

SEQ ID NO: 543771 - DNA, 19 bp, Mus musculus
  siRNA target sequence for A430083B19 (NM_177624.2,424-442).
gatctgctacgaaatatgt

SEQ ID NO: 543772 - DNA, 19 bp, Mus musculus
  siRNA target sequence for A630008I04 (NM_177849.2,195-213).
gccagatggccaagactaa

SEQ ID NO: 543773 - DNA, 19 bp, Mus musculus
  siRNA target sequence for A630008I04 (NM_177849.2,196-214).
ccagatggccaagactaat

SEQ ID NO: 543774 - DNA, 19 bp, Mus musculus
  siRNA target sequence for A630008I04 (NM_177849.2,486-504).
ctcgagttgctgttcttga

SEQ ID NO: 543775 - DNA, 19 bp, Mus musculus
  siRNA target sequence for A630008I04 (NM_177849.2,516-534).
gactgcaatggctttgtca

SEQ ID NO: 543776 - DNA, 19 bp, Mus musculus
  siRNA target sequence for A730072L08Rik (NM_175543.2,156-174).
cgaccccgacggctttcta

SEQ ID NO: 543777 - DNA, 19 bp, Mus musculus
  siRNA target sequence for A730072L08Rik (NM_175543.2,262-280).
ctggggagaatcaacttca

SEQ ID NO: 543778 - DNA, 19 bp, Mus musculus
  siRNA target sequence for A730072L08Rik (NM_175543.2,294-312).
cggagtattcgccatgaaa

SEQ ID NO: 543779 - DNA, 19 bp, Mus musculus
  siRNA target sequence for A730072L08Rik (NM_175543.2,443-461).
ccagggaacccgacttctt

SEQ ID NO: 543780 - DNA, 19 bp, Mus musculus
  siRNA target sequence for A730072L08Rik (NM_175543.2,673-691).
cactccaccgcctctctta

SEQ ID NO: 543781 - DNA, 19 bp, Mus musculus
  siRNA target sequence for A730072L08Rik (NM_175543.2,693-711).
cagcaacgaggagcaattt

SEQ ID NO: 543782 - DNA, 19 bp, Mus musculus
  siRNA target sequence for A730072L08Rik (NM_175543.2,768-786).
cgatgagaccagaaccaat

SEQ ID NO: 543783 - DNA, 19 bp, Mus musculus
  siRNA target sequence for A730072L08Rik (NM_175543.2,994-1012).
cagctcatgcacaacagta

SEQ ID NO: 543784 - DNA, 19 bp, Mus musculus
  siRNA target sequence for A730072L08Rik (NM_175543.2,1674-1692).
ggaggtggaacttgaacat

SEQ ID NO: 543785 - DNA, 19 bp, Mus musculus
  siRNA target sequence for A730072L08Rik (NM_175543.2,1722-1740).
caagctgcgggatcagaat

SEQ ID NO: 543786 - DNA, 19 bp, Mus musculus
  siRNA target sequence for A730072L08Rik (NM_175543.2,1728-1746).
gcgggatcagaatgatgat

SEQ ID NO: 543787 - DNA, 19 bp, Mus musculus
  siRNA target sequence for A730072L08Rik (NM_175543.2,1729-1747).
cgggatcagaatgatgatt

SEQ ID NO: 543788 - DNA, 19 bp, Mus musculus
  siRNA target sequence for A730072L08Rik (NM_175543.2,1731-1749).
ggatcagaatgatgattta

SEQ ID NO: 543789 - DNA, 19 bp, Mus musculus
  siRNA target sequence for A730072L08Rik (NM_175543.2,1783-1801).
gcgaagaacctctttgcaa

SEQ ID NO: 543790 - DNA, 19 bp, Mus musculus
  siRNA target sequence for A730072L08Rik (NM_175543.2,1906-1924).
cagtacatggacaagatta

SEQ ID NO: 543791 - DNA, 19 bp, Mus musculus
  siRNA target sequence for A930027K05Rik (NM_175556.2,411-429).
ggattggtccgcttctact

SEQ ID NO: 543792 - DNA, 19 bp, Mus musculus
  siRNA target sequence for A930027K05Rik (NM_175556.2,412-430).
gattggtccgcttctacta

SEQ ID NO: 543793 - DNA, 19 bp, Mus musculus
  siRNA target sequence for A930027K05Rik (NM_175556.2,909-927).
gaattctgcgccttctaca

SEQ ID NO: 543794 - DNA, 19 bp, Mus musculus
  siRNA target sequence for A930027K05Rik (NM_175556.2,1122-1140).
gggattgatggctttacca

SEQ ID NO: 543795 - DNA, 19 bp, Mus musculus
  siRNA target sequence for A930027K05Rik (NM_175556.2,1123-1141).
ggattgatggctttaccaa

SEQ ID NO: 543796 - DNA, 19 bp, Mus musculus
  siRNA target sequence for A930027K05Rik (NM_175556.2,1213-1231).
cgctgagtcactacttcat

SEQ ID NO: 543797 - DNA, 19 bp, Mus musculus
  siRNA target sequence for A930027K05Rik (NM_175556.2,1280-1298).
gtctcgggtggacatgtat

SEQ ID NO: 543798 - DNA, 19 bp, Mus musculus
  siRNA target sequence for A930027K05Rik (NM_175556.2,1393-1411).
cctccaagatccttttcaa

SEQ ID NO: 543799 - DNA, 19 bp, Mus musculus
  siRNA target sequence for A930027K05Rik (NM_175556.2,1394-1412).
ctccaagatccttttcaaa

SEQ ID NO: 543800 - DNA, 19 bp, Mus musculus
  siRNA target sequence for A930027K05Rik (NM_175556.2,1481-1499).
gaaccactgtagtgttgtt

SEQ ID NO: 543801 - DNA, 19 bp, Mus musculus
  siRNA target sequence for A930027K05Rik (NM_175556.2,1749-1767).
cggaagcgtgtggaaaaca

SEQ ID NO: 543802 - DNA, 19 bp, Mus musculus
  siRNA target sequence for A930027K05Rik (NM_175556.2,1750-1768).
ggaagcgtgtggaaaacat

SEQ ID NO: 543803 - DNA, 19 bp, Mus musculus
  siRNA target sequence for A930027K05Rik (NM_175556.2,1751-1769).
gaagcgtgtggaaaacatt

SEQ ID NO: 543804 - DNA, 19 bp, Mus musculus
  siRNA target sequence for A930027K05Rik (NM_175556.2,1755-1773).
cgtgtggaaaacattgcaa

SEQ ID NO: 543805 - DNA, 19 bp, Mus musculus
  siRNA target sequence for A930027K05Rik (NM_175556.2,2117-2135).
ccctctcggacctagtgaa

SEQ ID NO: 543806 - DNA, 19 bp, Mus musculus
  siRNA target sequence for A930027K05Rik (NM_175556.2,2118-2136).
cctctcggacctagtgaaa

SEQ ID NO: 543807 - DNA, 19 bp, Mus musculus
  siRNA target sequence for A930027K05Rik (NM_175556.2,2119-2137).
ctctcggacctagtgaaat

SEQ ID NO: 543808 - DNA, 19 bp, Mus musculus
  siRNA target sequence for A930027K05Rik (NM_175556.2,2121-2139).
ctcggacctagtgaaatat

SEQ ID NO: 543809 - DNA, 19 bp, Mus musculus
  siRNA target sequence for Aif1 (NM_019467.2,387-405).
gaggggatcaacaagcaat

SEQ ID NO: 543810 - DNA, 19 bp, Mus musculus
  siRNA target sequence for Aif1 (NM_019467.2,418-436).
ccaaatacagcaatgatga

SEQ ID NO: 543811 - DNA, 19 bp, Mus musculus
  siRNA target sequence for Aif1 (NM_019467.2,480-498).
gagtttgatctgaatggaa

SEQ ID NO: 543812 - DNA, 19 bp, Mus musculus
  siRNA target sequence for Aif1 (NM_019467.2,496-514).
gaaatggagatatcgatat

SEQ ID NO: 543813 - DNA, 19 bp, Mus musculus
  siRNA target sequence for Aif1 (NM_019467.2,501-519).
ggagatatcgatattatgt

SEQ ID NO: 543814 - DNA, 19 bp, Mus musculus
  siRNA target sequence for Aif1 (NM_019467.2,527-545).
gcgaatgctggagaaactt

SEQ ID NO: 543815 - DNA, 19 bp, Mus musculus
  siRNA target sequence for Aif1 (NM_019467.2,625-643).
ctgactttctcagaatgat

SEQ ID NO: 543816 - DNA, 19 bp, Mus musculus
  siRNA target sequence for Aif1 (NM_019467.2,661-679).
ccatcttgagaatgattct

SEQ ID NO: 543817 - DNA, 19 bp, Mus musculus
  siRNA target sequence for Aif1 (NM_019467.2,668-686).
gagaatgattctgatgtat

SEQ ID NO: 543818 - DNA, 19 bp, Mus musculus
  siRNA target sequence for Aif1 (NM_019467.2,670-688).
gaatgattctgatgtatga

SEQ ID NO: 543819 - DNA, 19 bp, Mus musculus
  siRNA target sequence for Amy1 (NM_007446.1,258-276).
cccacatactcaatatgga

SEQ ID NO: 543820 - DNA, 19 bp, Mus musculus
  siRNA target sequence for Amy1 (NM_007446.1,574-592).
gctggacaaagcagtacat

SEQ ID NO: 543821 - DNA, 19 bp, Mus musculus
  siRNA target sequence for Amy1 (NM_007446.1,683-701).
gtggaggtatcgagaacta

SEQ ID NO: 543822 - DNA, 19 bp, Mus musculus
  siRNA target sequence for Amy1 (NM_007446.1,965-983).
gtgaggcagtgtcaagtaa

SEQ ID NO: 543823 - DNA, 19 bp, Mus musculus
  siRNA target sequence for Amy1 (NM_007446.1,970-988).
gcagtgtcaagtaatgagt

SEQ ID NO: 543824 - DNA, 19 bp, Mus musculus
  siRNA target sequence for Amy1 (NM_007446.1,971-989).
cagtgtcaagtaatgagta

SEQ ID NO: 543825 - DNA, 19 bp, Mus musculus
  siRNA target sequence for Amy1 (NM_007446.1,973-991).
gtgtcaagtaatgagtatt

SEQ ID NO: 543826 - DNA, 19 bp, Mus musculus
  siRNA target sequence for Amy1 (NM_007446.1,1171-1189).
gggggagcatccatcttga

SEQ ID NO: 543827 - DNA, 19 bp, Mus musculus
  siRNA target sequence for Amy1 (NM_007446.1,1256-1274).
cacgggtgatgtcaagtta

SEQ ID NO: 543828 - DNA, 19 bp, Mus musculus
  siRNA target sequence for Amy1 (NM_007446.1,1258-1276).
cgggtgatgtcaagttact

SEQ ID NO: 543829 - DNA, 19 bp, Mus musculus
  siRNA target sequence for Amy1 (NM_007446.1,1271-1289).
gttactattggccaagaaa

SEQ ID NO: 543830 - DNA, 19 bp, Mus musculus
  siRNA target sequence for Amy1 (NM_007446.1,1328-1346).
caccaaataacaatggaaa

SEQ ID NO: 543831 - DNA, 19 bp, Mus musculus
  siRNA target sequence for Ankrd5 (NM_175667.2,608-626).
gggtaccctgagctaatca

SEQ ID NO: 543832 - DNA, 19 bp, Mus musculus
  siRNA target sequence for Ankrd5 (NM_175667.2,609-627).
ggtaccctgagctaatcaa

SEQ ID NO: 543833 - DNA, 19 bp, Mus musculus
  siRNA target sequence for Ankrd5 (NM_175667.2,628-646).
cttcaccgaacccatagat

SEQ ID NO: 543834 - DNA, 19 bp, Mus musculus
  siRNA target sequence for Ankrd5 (NM_175667.2,659-677).
ctccacttagcctccattt

SEQ ID NO: 543835 - DNA, 19 bp, Mus musculus
  siRNA target sequence for Ankrd5 (NM_175667.2,771-789).
ccgagctgggccatgagtt

SEQ ID NO: 543836 - DNA, 19 bp, Mus musculus
  siRNA target sequence for Ankrd5 (NM_175667.2,776-794).
ctgggccatgagttgtcaa

SEQ ID NO: 543837 - DNA, 19 bp, Mus musculus
  siRNA target sequence for Ankrd5 (NM_175667.2,785-803).
gagttgtcaatggaaattt

SEQ ID NO: 543838 - DNA, 19 bp, Mus musculus
  siRNA target sequence for Ankrd5 (NM_175667.2,811-829).
ggccaaagctgatatgaca

SEQ ID NO: 543839 - DNA, 19 bp, Mus musculus
  siRNA target sequence for Ankrd5 (NM_175667.2,819-837).
ctgatatgacaatagttga

SEQ ID NO: 543840 - DNA, 19 bp, Mus musculus
  siRNA target sequence for Ankrd5 (NM_175667.2,921-939).
gtgcagatgtcaacaatat

SEQ ID NO: 543841 - DNA, 19 bp, Mus musculus
  siRNA target sequence for Ankrd5 (NM_175667.2,923-941).
gcagatgtcaacaatatca

SEQ ID NO: 543842 - DNA, 19 bp, Mus musculus
  siRNA target sequence for Ankrd5 (NM_175667.2,975-993).
gcgaggaagcacatgatgt

SEQ ID NO: 543843 - DNA, 19 bp, Mus musculus
  siRNA target sequence for Ankrd5 (NM_175667.2,983-1001).
gcacatgatgtgaaggata

SEQ ID NO: 543844 - DNA, 19 bp, Mus musculus
  siRNA target sequence for Ankrd5 (NM_175667.2,1029-1047).
ccaatcctaatgctatcaa

SEQ ID NO: 543845 - DNA, 19 bp, Mus musculus
  siRNA target sequence for Ankrd5 (NM_175667.2,1034-1052).
cctaatgctatcaacacat

SEQ ID NO: 543846 - DNA, 19 bp, Mus musculus
  siRNA target sequence for Ankrd5 (NM_175667.2,1056-1074).
caggacgcacggctttgat

SEQ ID NO: 543847 - DNA, 19 bp, Mus musculus
  siRNA target sequence for Ankrd5 (NM_175667.2,1061-1079).
cgcacggctttgatggaat

SEQ ID NO: 543848 - DNA, 19 bp, Mus musculus
  siRNA target sequence for Ankrd5 (NM_175667.2,1106-1124).
gttcgtggcatattggaaa

SEQ ID NO: 543849 - DNA, 19 bp, Mus musculus
  siRNA target sequence for Ankrd5 (NM_175667.2,1131-1149).
gtgaagtgaacgcatatga

SEQ ID NO: 543850 - DNA, 19 bp, Mus musculus
  siRNA target sequence for Ankrd5 (NM_175667.2,1133-1151).
gaagtgaacgcatatgaca

SEQ ID NO: 543851 - DNA, 19 bp, Mus musculus
  siRNA target sequence for Ankrd5 (NM_175667.2,1138-1156).
gaacgcatatgacaatgat

SEQ ID NO: 543852 - DNA, 19 bp, Mus musculus
  siRNA target sequence for Ankrd5 (NM_175667.2,1141-1159).
cgcatatgacaatgataga

SEQ ID NO: 543853 - DNA, 19 bp, Mus musculus
  siRNA target sequence for Ankrd5 (NM_175667.2,1162-1180).
ccacgctgctcattttgct

SEQ ID NO: 543854 - DNA, 19 bp, Mus musculus
  siRNA target sequence for Ankrd5 (NM_175667.2,1179-1197).
ctgccaaaggaggcttttt

SEQ ID NO: 543855 - DNA, 19 bp, Mus musculus
  siRNA target sequence for Ankrd5 (NM_175667.2,1188-1206).
gaggcttttttgatattct

SEQ ID NO: 543856 - DNA, 19 bp, Mus musculus
  siRNA target sequence for Ankrd5 (NM_175667.2,1232-1250).
gacatggggttaattggaa

SEQ ID NO: 543857 - DNA, 19 bp, Mus musculus
  siRNA target sequence for Ankrd5 (NM_175667.2,1295-1313).
gcagattgctgtaaatata

SEQ ID NO: 543858 - DNA, 19 bp, Mus musculus
  siRNA target sequence for Ankrd5 (NM_175667.2,1296-1314).
cagattgctgtaaatatat

SEQ ID NO: 543859 - DNA, 19 bp, Mus musculus
  siRNA target sequence for Ankrd5 (NM_175667.2,1322-1340).
cgaggatgtgacctgaaat

SEQ ID NO: 543860 - DNA, 19 bp, Mus musculus
  siRNA target sequence for Ankrd5 (NM_175667.2,1435-1453).
cgctaaactcgctaagaca

SEQ ID NO: 543861 - DNA, 19 bp, Mus musculus
  siRNA target sequence for Ankrd5 (NM_175667.2,1452-1470).
caggagcaaaaaatcctaa

SEQ ID NO: 543862 - DNA, 19 bp, Mus musculus
  siRNA target sequence for Ankrd5 (NM_175667.2,1521-1539).
cccttcggaacgcctttaa

SEQ ID NO: 543863 - DNA, 19 bp, Mus musculus
  siRNA target sequence for Ankrd5 (NM_175667.2,1523-1541).
cttcggaacgcctttaagt

SEQ ID NO: 543864 - DNA, 19 bp, Mus musculus
  siRNA target sequence for Ankrd5 (NM_175667.2,1560-1578).
gcgtagtcagcaaagatga

SEQ ID NO: 543865 - DNA, 19 bp, Mus musculus
  siRNA target sequence for Ankrd5 (NM_175667.2,1670-1688).
ggggtcaacattaatgagt

SEQ ID NO: 543866 - DNA, 19 bp, Mus musculus
  siRNA target sequence for Ankrd5 (NM_175667.2,1671-1689).
gggtcaacattaatgagtt

SEQ ID NO: 543867 - DNA, 19 bp, Mus musculus
  siRNA target sequence for Ankrd5 (NM_175667.2,1719-1737).
cgtacgtattgggatcttt

SEQ ID NO: 543868 - DNA, 19 bp, Mus musculus
  siRNA target sequence for Ankrd5 (NM_175667.2,1731-1749).
gatctttcgggcctaagaa

SEQ ID NO: 543869 - DNA, 19 bp, Mus musculus
  siRNA target sequence for Ankrd5 (NM_175667.2,1774-1792).
gccaaggaaaggcaagttt

SEQ ID NO: 543870 - DNA, 19 bp, Mus musculus
  siRNA target sequence for Ankrd5 (NM_175667.2,1859-1877).
ccctactacatgattgaga

SEQ ID NO: 543871 - DNA, 19 bp, Mus musculus
  siRNA target sequence for Ankrd5 (NM_175667.2,1931-1949).
cacccaatccaggatgatt

SEQ ID NO: 543872 - DNA, 19 bp, Mus musculus
  siRNA target sequence for Ankrd5 (NM_175667.2,1974-1992).
gtagggtcttcgcaaatat

SEQ ID NO: 543873 - DNA, 19 bp, Mus musculus
  siRNA target sequence for Ankrd5 (NM_175667.2,1978-1996).
ggtcttcgcaaatattagt

SEQ ID NO: 543874 - DNA, 19 bp, Mus musculus
  siRNA target sequence for Ankrd5 (NM_175667.2,1979-1997).
gtcttcgcaaatattagtt

SEQ ID NO: 543875 - DNA, 19 bp, Mus musculus
  siRNA target sequence for Ankrd5 (NM_175667.2,1985-2003).
gcaaatattagttttatca

SEQ ID NO: 543876 - DNA, 19 bp, Mus musculus
  siRNA target sequence for Ankrd5 (NM_175667.2,2035-2053).
ggccatcgaaacaggaata

SEQ ID NO: 543877 - DNA, 19 bp, Mus musculus
  siRNA target sequence for Ankrd5 (NM_175667.2,2046-2064).
caggaatacccgtggatat

SEQ ID NO: 543878 - DNA, 19 bp, Mus musculus
  siRNA target sequence for Ankrd5 (NM_175667.2,2048-2066).
ggaatacccgtggatatga

SEQ ID NO: 543879 - DNA, 19 bp, Mus musculus
  siRNA target sequence for Ankrd5 (NM_175667.2,2049-2067).
gaatacccgtggatatgaa

SEQ ID NO: 543880 - DNA, 19 bp, Mus musculus
  siRNA target sequence for Ankrd5 (NM_175667.2,2080-2098).
caagactcctctcatgata

SEQ ID NO: 543881 - DNA, 19 bp, Mus musculus
  siRNA target sequence for Ankrd5 (NM_175667.2,2101-2119).
gtgtgccagtggcaacatt

SEQ ID NO: 543882 - DNA, 19 bp, Mus musculus
  siRNA target sequence for Ankrd5 (NM_175667.2,2103-2121).
gtgccagtggcaacattga

SEQ ID NO: 543883 - DNA, 19 bp, Mus musculus
  siRNA target sequence for Ankrd5 (NM_175667.2,2120-2138).
gatgtggtcaagtttctta

SEQ ID NO: 543884 - DNA, 19 bp, Mus musculus
  siRNA target sequence for Ankrd5 (NM_175667.2,2125-2143).
ggtcaagtttcttatcgaa

SEQ ID NO: 543885 - DNA, 19 bp, Mus musculus
  siRNA target sequence for Ankrd5 (NM_175667.2,2126-2144).
gtcaagtttcttatcgaaa

SEQ ID NO: 543886 - DNA, 19 bp, Mus musculus
  siRNA target sequence for Ankrd5 (NM_175667.2,2253-2271).
caatagatgcaacatcaat

SEQ ID NO: 543887 - DNA, 19 bp, Mus musculus
  siRNA target sequence for Ankrd5 (NM_175667.2,2258-2276).
gatgcaacatcaatcaaca

SEQ ID NO: 543888 - DNA, 19 bp, Mus musculus
  siRNA target sequence for Ankrd5 (NM_175667.2,2310-2328).
gtaggctggacactgtaaa

SEQ ID NO: 543889 - DNA, 19 bp, Mus musculus
  siRNA target sequence for Ankrd5 (NM_175667.2,2313-2331).
ggctggacactgtaaaata

SEQ ID NO: 543890 - DNA, 19 bp, Mus musculus
  siRNA target sequence for Ankrd5 (NM_175667.2,2322-2340).
ctgtaaaatacctacttga

SEQ ID NO: 543891 - DNA, 19 bp, Mus musculus
  siRNA target sequence for Ankrd5 (NM_175667.2,2348-2366).
gccaaattccagattgaaa

SEQ ID NO: 543892 - DNA, 19 bp, Mus musculus
  siRNA target sequence for Ankrd5 (NM_175667.2,2375-2393).
ggacatgctgccatggata

SEQ ID NO: 543893 - DNA, 19 bp, Mus musculus
  siRNA target sequence for Ankrd5 (NM_175667.2,2376-2394).
gacatgctgccatggatat

SEQ ID NO: 543894 - DNA, 19 bp, Mus musculus
  siRNA target sequence for Ankrd5 (NM_175667.2,2401-2419).
ggcatatgctgattataga

SEQ ID NO: 543895 - DNA, 19 bp, Mus musculus
  siRNA target sequence for Ankrd5 (NM_175667.2,2403-2421).
catatgctgattatagaat

SEQ ID NO: 543896 - DNA, 19 bp, Mus musculus
  siRNA target sequence for Ankrd5 (NM_175667.2,2409-2427).
ctgattatagaataattga

SEQ ID NO: 543897 - DNA, 19 bp, Mus musculus
  siRNA target sequence for Ankrd5 (NM_175667.2,2411-2429).
gattatagaataattgata

SEQ ID NO: 543898 - DNA, 19 bp, Mus musculus
  siRNA target sequence for Ankrd5 (NM_175667.2,2457-2475).
ctaaacaagcagataatca

SEQ ID NO: 543899 - DNA, 19 bp, Mus musculus
  siRNA target sequence for Ankrd5 (NM_175667.2,2486-2504).
ggcaagcttcctaaactga

SEQ ID NO: 543900 - DNA, 19 bp, Mus musculus
  siRNA target sequence for Ankrd5 (NM_175667.2,2487-2505).
gcaagcttcctaaactgaa

SEQ ID NO: 543901 - DNA, 19 bp, Mus musculus
  siRNA target sequence for Ankrd5 (NM_175667.2,2595-2613).
gggatagtgtggtttacct

SEQ ID NO: 543902 - DNA, 19 bp, Mus musculus
  siRNA target sequence for Ankrd5 (NM_175667.2,2634-2652).
gcttcaccaagaaagttga

SEQ ID NO: 543903 - DNA, 19 bp, Mus musculus
  siRNA target sequence for Ankrd5 (NM_175667.2,2641-2659).
caagaaagttgatatcaca

SEQ ID NO: 543904 - DNA, 19 bp, Mus musculus
  siRNA target sequence for Ankrd5 (NM_175667.2,2742-2760).
catacgaggtggactttga

SEQ ID NO: 543905 - DNA, 19 bp, Mus musculus
  siRNA target sequence for Ankrd5 (NM_175667.2,2774-2792).
cctttccaaaagaacatca

SEQ ID NO: 543906 - DNA, 19 bp, Mus musculus
  siRNA target sequence for Anktm1 (NM_177781.2,143-161).
gacattgaaggagatatgt

SEQ ID NO: 543907 - DNA, 19 bp, Mus musculus
  siRNA target sequence for Anktm1 (NM_177781.2,145-163).
cattgaaggagatatgtgt

SEQ ID NO: 543908 - DNA, 19 bp, Mus musculus
  siRNA target sequence for Anktm1 (NM_177781.2,304-322).
gaatataatggatggttat

SEQ ID NO: 543909 - DNA, 19 bp, Mus musculus
  siRNA target sequence for Anktm1 (NM_177781.2,342-360).
gtgctgcagaaaaaaatca

SEQ ID NO: 543910 - DNA, 19 bp, Mus musculus
  siRNA target sequence for Anktm1 (NM_177781.2,443-461).
gctgtgcatggcatgtaca

SEQ ID NO: 543911 - DNA, 19 bp, Mus musculus
  siRNA target sequence for Anktm1 (NM_177781.2,453-471).
gcatgtacaacgaagtgat

SEQ ID NO: 543912 - DNA, 19 bp, Mus musculus
  siRNA target sequence for Anktm1 (NM_177781.2,485-503).
gagcacaaggccactaaca

SEQ ID NO: 543913 - DNA, 19 bp, Mus musculus
  siRNA target sequence for Anktm1 (NM_177781.2,488-506).
cacaaggccactaacatca

SEQ ID NO: 543914 - DNA, 19 bp, Mus musculus
  siRNA target sequence for Anktm1 (NM_177781.2,493-511).
ggccactaacatcaattta

SEQ ID NO: 543915 - DNA, 19 bp, Mus musculus
  siRNA target sequence for Anktm1 (NM_177781.2,496-514).
cactaacatcaatttagaa

SEQ ID NO: 543916 - DNA, 19 bp, Mus musculus
  siRNA target sequence for Anktm1 (NM_177781.2,524-542).
gggaacacggctttgatgt

SEQ ID NO: 543917 - DNA, 19 bp, Mus musculus
  siRNA target sequence for Anktm1 (NM_177781.2,593-611).
ggagctaagctgtgtaaat

SEQ ID NO: 543918 - DNA, 19 bp, Mus musculus
  siRNA target sequence for Anktm1 (NM_177781.2,597-615).
ctaagctgtgtaaatcaaa

SEQ ID NO: 543919 - DNA, 19 bp, Mus musculus
  siRNA target sequence for Anktm1 (NM_177781.2,602-620).
ctgtgtaaatcaaataagt

SEQ ID NO: 543920 - DNA, 19 bp, Mus musculus
  siRNA target sequence for Anktm1 (NM_177781.2,659-677).
gccaaaaaatgcatggaat

SEQ ID NO: 543921 - DNA, 19 bp, Mus musculus
  siRNA target sequence for Anktm1 (NM_177781.2,673-691).
ggaattaatcttagcatat

SEQ ID NO: 543922 - DNA, 19 bp, Mus musculus
  siRNA target sequence for Anktm1 (NM_177781.2,711-729).
gcagggagactcacattaa

SEQ ID NO: 543923 - DNA, 19 bp, Mus musculus
  siRNA target sequence for Anktm1 (NM_177781.2,777-795).
gcggagacttggacatgat

SEQ ID NO: 543924 - DNA, 19 bp, Mus musculus
  siRNA target sequence for Anktm1 (NM_177781.2,778-796).
cggagacttggacatgatt

SEQ ID NO: 543925 - DNA, 19 bp, Mus musculus
  siRNA target sequence for Anktm1 (NM_177781.2,816-834).
gtgcacacatcgacatgat

SEQ ID NO: 543926 - DNA, 19 bp, Mus musculus
  siRNA target sequence for Anktm1 (NM_177781.2,882-900).
ccactgacatcgttaagct

SEQ ID NO: 543927 - DNA, 19 bp, Mus musculus
  siRNA target sequence for Anktm1 (NM_177781.2,898-916).
gctcatgatctcatcctat

SEQ ID NO: 543928 - DNA, 19 bp, Mus musculus
  siRNA target sequence for Anktm1 (NM_177781.2,899-917).
ctcatgatctcatcctata

SEQ ID NO: 543929 - DNA, 19 bp, Mus musculus
  siRNA target sequence for Anktm1 (NM_177781.2,913-931).
ctataccggaagtagtgat

SEQ ID NO: 543930 - DNA, 19 bp, Mus musculus
  siRNA target sequence for Anktm1 (NM_177781.2,920-938).
ggaagtagtgatattgtga

SEQ ID NO: 543931 - DNA, 19 bp, Mus musculus
  siRNA target sequence for Anktm1 (NM_177781.2,921-939).
gaagtagtgatattgtgaa

SEQ ID NO: 543932 - DNA, 19 bp, Mus musculus
  siRNA target sequence for Anktm1 (NM_177781.2,1055-1073).
ggacgctctccacttattt

SEQ ID NO: 543933 - DNA, 19 bp, Mus musculus
  siRNA target sequence for Anktm1 (NM_177781.2,1056-1074).
gacgctctccacttatttt

SEQ ID NO: 543934 - DNA, 19 bp, Mus musculus
  siRNA target sequence for Anktm1 (NM_177781.2,1060-1078).
ctctccacttattttagca

SEQ ID NO: 543935 - DNA, 19 bp, Mus musculus
  siRNA target sequence for Anktm1 (NM_177781.2,1092-1110).
cctggaacattgtgaattt

SEQ ID NO: 543936 - DNA, 19 bp, Mus musculus
  siRNA target sequence for Anktm1 (NM_177781.2,1148-1166).
catcttggacgtaactttt

SEQ ID NO: 543937 - DNA, 19 bp, Mus musculus
  siRNA target sequence for Anktm1 (NM_177781.2,1154-1172).
ggacgtaactttttgcatt

SEQ ID NO: 543938 - DNA, 19 bp, Mus musculus
  siRNA target sequence for Anktm1 (NM_177781.2,1155-1173).
gacgtaactttttgcattt

SEQ ID NO: 543939 - DNA, 19 bp, Mus musculus
  siRNA target sequence for Anktm1 (NM_177781.2,1157-1175).
cgtaactttttgcatttga

SEQ ID NO: 543940 - DNA, 19 bp, Mus musculus
  siRNA target sequence for Anktm1 (NM_177781.2,1269-1287).
gatgcacacctctccatta

SEQ ID NO: 543941 - DNA, 19 bp, Mus musculus
  siRNA target sequence for Anktm1 (NM_177781.2,1304-1322).
gttcctgtctctgtaaata

SEQ ID NO: 543942 - DNA, 19 bp, Mus musculus
  siRNA target sequence for Anktm1 (NM_177781.2,1342-1360).
gtccattcatagcaaaagt

SEQ ID NO: 543943 - DNA, 19 bp, Mus musculus
  siRNA target sequence for Anktm1 (NM_177781.2,1344-1362).
ccattcatagcaaaagtaa

SEQ ID NO: 543944 - DNA, 19 bp, Mus musculus
  siRNA target sequence for Anktm1 (NM_177781.2,1369-1387).
gaagtcgcccctgcatttt

SEQ ID NO: 543945 - DNA, 19 bp, Mus musculus
  siRNA target sequence for Anktm1 (NM_177781.2,1372-1390).
gtcgcccctgcattttgca

SEQ ID NO: 543946 - DNA, 19 bp, Mus musculus
  siRNA target sequence for Anktm1 (NM_177781.2,1420-1438).
gagacttctgcaagacata

SEQ ID NO: 543947 - DNA, 19 bp, Mus musculus
  siRNA target sequence for Anktm1 (NM_177781.2,1427-1445).
ctgcaagacataagtgata

SEQ ID NO: 543948 - DNA, 19 bp, Mus musculus
  siRNA target sequence for Anktm1 (NM_177781.2,1440-1458).
gtgatacgaggcttttgaa

SEQ ID NO: 543949 - DNA, 19 bp, Mus musculus
  siRNA target sequence for Anktm1 (NM_177781.2,1487-1505).
ctccacctggcagcaaaaa

SEQ ID NO: 543950 - DNA, 19 bp, Mus musculus
  siRNA target sequence for Anktm1 (NM_177781.2,1499-1517).
gcaaaaaatgggcatgata

SEQ ID NO: 543951 - DNA, 19 bp, Mus musculus
  siRNA target sequence for Anktm1 (NM_177781.2,1618-1636).
catgaaggtcattcttgat

SEQ ID NO: 543952 - DNA, 19 bp, Mus musculus
  siRNA target sequence for Anktm1 (NM_177781.2,1625-1643).
gtcattcttgatactaact

SEQ ID NO: 543953 - DNA, 19 bp, Mus musculus
  siRNA target sequence for Anktm1 (NM_177781.2,1631-1649).
cttgatactaacttgaaat

SEQ ID NO: 543954 - DNA, 19 bp, Mus musculus
  siRNA target sequence for Anktm1 (NM_177781.2,1634-1652).
gatactaacttgaaatgca

SEQ ID NO: 543955 - DNA, 19 bp, Mus musculus
  siRNA target sequence for Anktm1 (NM_177781.2,1650-1668).
gcacagaccgactagatga

SEQ ID NO: 543956 - DNA, 19 bp, Mus musculus
  siRNA target sequence for Anktm1 (NM_177781.2,1651-1669).
cacagaccgactagatgaa

SEQ ID NO: 543957 - DNA, 19 bp, Mus musculus
  siRNA target sequence for Anktm1 (NM_177781.2,1784-1802).
catattgccctgcacaata

SEQ ID NO: 543958 - DNA, 19 bp, Mus musculus
  siRNA target sequence for Anktm1 (NM_177781.2,1884-1902).
gcaatcgatgtccaatcat

SEQ ID NO: 543959 - DNA, 19 bp, Mus musculus
  siRNA target sequence for Anktm1 (NM_177781.2,1921-1939).
ccccgagtgcatgaaagtt

SEQ ID NO: 543960 - DNA, 19 bp, Mus musculus
  siRNA target sequence for Anktm1 (NM_177781.2,1924-1942).
cgagtgcatgaaagttctt

SEQ ID NO: 543961 - DNA, 19 bp, Mus musculus
  siRNA target sequence for Anktm1 (NM_177781.2,1925-1943).
gagtgcatgaaagttcttt

SEQ ID NO: 543962 - DNA, 19 bp, Mus musculus
  siRNA target sequence for Anktm1 (NM_177781.2,1980-1998).
cctgtcaagactaccatat

SEQ ID NO: 543963 - DNA, 19 bp, Mus musculus
  siRNA target sequence for Anktm1 (NM_177781.2,1981-1999).
ctgtcaagactaccatatt

SEQ ID NO: 543964 - DNA, 19 bp, Mus musculus
  siRNA target sequence for Anktm1 (NM_177781.2,1983-2001).
gtcaagactaccatattga

SEQ ID NO: 543965 - DNA, 19 bp, Mus musculus
  siRNA target sequence for Anktm1 (NM_177781.2,1985-2003).
caagactaccatattgagt

SEQ ID NO: 543966 - DNA, 19 bp, Mus musculus
  siRNA target sequence for Anktm1 (NM_177781.2,1988-2006).
gactaccatattgagtata

SEQ ID NO: 543967 - DNA, 19 bp, Mus musculus
  siRNA target sequence for Anktm1 (NM_177781.2,1990-2008).
ctaccatattgagtataat

SEQ ID NO: 543968 - DNA, 19 bp, Mus musculus
  siRNA target sequence for Anktm1 (NM_177781.2,2027-2045).
ccattatccatgaccaaaa

SEQ ID NO: 543969 - DNA, 19 bp, Mus musculus
  siRNA target sequence for Anktm1 (NM_177781.2,2028-2046).
cattatccatgaccaaaaa

SEQ ID NO: 543970 - DNA, 19 bp, Mus musculus
  siRNA target sequence for Anktm1 (NM_177781.2,2055-2073).
ctacccaggatgtggtata

SEQ ID NO: 543971 - DNA, 19 bp, Mus musculus
  siRNA target sequence for Anktm1 (NM_177781.2,2058-2076).
cccaggatgtggtatatga

SEQ ID NO: 543972 - DNA, 19 bp, Mus musculus
  siRNA target sequence for Anktm1 (NM_177781.2,2068-2086).
ggtatatgagcctcttaca

SEQ ID NO: 543973 - DNA, 19 bp, Mus musculus
  siRNA target sequence for Anktm1 (NM_177781.2,2069-2087).
gtatatgagcctcttacaa

SEQ ID NO: 543974 - DNA, 19 bp, Mus musculus
  siRNA target sequence for Anktm1 (NM_177781.2,2079-2097).
ctcttacaatcctcaatgt

SEQ ID NO: 543975 - DNA, 19 bp, Mus musculus
  siRNA target sequence for Anktm1 (NM_177781.2,2081-2099).
cttacaatcctcaatgtca

SEQ ID NO: 543976 - DNA, 19 bp, Mus musculus
  siRNA target sequence for Anktm1 (NM_177781.2,2104-2122).
ccaacataaccgcatagaa

SEQ ID NO: 543977 - DNA, 19 bp, Mus musculus
  siRNA target sequence for Anktm1 (NM_177781.2,2147-2165).
gagtacttactcatgaaat

SEQ ID NO: 543978 - DNA, 19 bp, Mus musculus
  siRNA target sequence for Anktm1 (NM_177781.2,2177-2195).
ggattcagagcccatatga

SEQ ID NO: 543979 - DNA, 19 bp, Mus musculus
  siRNA target sequence for Anktm1 (NM_177781.2,2178-2196).
gattcagagcccatatgat

SEQ ID NO: 543980 - DNA, 19 bp, Mus musculus
  siRNA target sequence for Anktm1 (NM_177781.2,2197-2215).
gaacctaggatcttattgt

SEQ ID NO: 543981 - DNA, 19 bp, Mus musculus
  siRNA target sequence for Anktm1 (NM_177781.2,2200-2218).
cctaggatcttattgtctt

SEQ ID NO: 543982 - DNA, 19 bp, Mus musculus
  siRNA target sequence for Anktm1 (NM_177781.2,2233-2251).
gacccttcttgttgtcaaa

SEQ ID NO: 543983 - DNA, 19 bp, Mus musculus
  siRNA target sequence for Anktm1 (NM_177781.2,2235-2253).
cccttcttgttgtcaaaat

SEQ ID NO: 543984 - DNA, 19 bp, Mus musculus
  siRNA target sequence for Anktm1 (NM_177781.2,2257-2275).
gcctggaatggccttcaat

SEQ ID NO: 543985 - DNA, 19 bp, Mus musculus
  siRNA target sequence for Anktm1 (NM_177781.2,2258-2276).
cctggaatggccttcaatt

SEQ ID NO: 543986 - DNA, 19 bp, Mus musculus
  siRNA target sequence for Anktm1 (NM_177781.2,2261-2279).
ggaatggccttcaattcta

SEQ ID NO: 543987 - DNA, 19 bp, Mus musculus
  siRNA target sequence for Anktm1 (NM_177781.2,2290-2308).
caatggaactagtagtact

SEQ ID NO: 543988 - DNA, 19 bp, Mus musculus
  siRNA target sequence for Anktm1 (NM_177781.2,2304-2322).
gtactcatgaggaaagaat

SEQ ID NO: 543989 - DNA, 19 bp, Mus musculus
  siRNA target sequence for Anktm1 (NM_177781.2,2458-2476).
ggaatgggttatctataca

SEQ ID NO: 543990 - DNA, 19 bp, Mus musculus
  siRNA target sequence for Anktm1 (NM_177781.2,2459-2477).
gaatgggttatctatacaa

SEQ ID NO: 543991 - DNA, 19 bp, Mus musculus
  siRNA target sequence for Anktm1 (NM_177781.2,2530-2548).
gtggcaatgtggagcaata

SEQ ID NO: 543992 - DNA, 19 bp, Mus musculus
  siRNA target sequence for Anktm1 (NM_177781.2,2538-2556).
gtggagcaatagcgatatt

SEQ ID NO: 543993 - DNA, 19 bp, Mus musculus
  siRNA target sequence for Anktm1 (NM_177781.2,2540-2558).
ggagcaatagcgatattct

SEQ ID NO: 543994 - DNA, 19 bp, Mus musculus
  siRNA target sequence for Anktm1 (NM_177781.2,2541-2559).
gagcaatagcgatattctt

SEQ ID NO: 543995 - DNA, 19 bp, Mus musculus
  siRNA target sequence for Anktm1 (NM_177781.2,2543-2561).
gcaatagcgatattcttct

SEQ ID NO: 543996 - DNA, 19 bp, Mus musculus
  siRNA target sequence for Anktm1 (NM_177781.2,2544-2562).
caatagcgatattcttcta

SEQ ID NO: 543997 - DNA, 19 bp, Mus musculus
  siRNA target sequence for Anktm1 (NM_177781.2,2569-2587).
gaacttcctactgtatctt

SEQ ID NO: 543998 - DNA, 19 bp, Mus musculus
  siRNA target sequence for Anktm1 (NM_177781.2,2618-2636).
gttatgttggaggtgattt

SEQ ID NO: 543999 - DNA, 19 bp, Mus musculus
  siRNA target sequence for Anktm1 (NM_177781.2,2650-2668).
gagatcgaccggagtgttt

SEQ ID NO: 544000 - DNA, 19 bp, Mus musculus
  siRNA target sequence for Anktm1 (NM_177781.2,2652-2670).
gatcgaccggagtgtttat

SEQ ID NO: 544001 - DNA, 19 bp, Mus musculus
  siRNA target sequence for Anktm1 (NM_177781.2,2655-2673).
cgaccggagtgtttatctt

SEQ ID NO: 544002 - DNA, 19 bp, Mus musculus
  siRNA target sequence for Anktm1 (NM_177781.2,2728-2746).
cttcagcaccccattgctt

SEQ ID NO: 544003 - DNA, 19 bp, Mus musculus
  siRNA target sequence for Anktm1 (NM_177781.2,2770-2788).
gatgctaggagacatcaat

SEQ ID NO: 544004 - DNA, 19 bp, Mus musculus
  siRNA target sequence for Anktm1 (NM_177781.2,2799-2817).
ccttcctagaaccattgtt

SEQ ID NO: 544005 - DNA, 19 bp, Mus musculus
  siRNA target sequence for Anktm1 (NM_177781.2,2800-2818).
cttcctagaaccattgttt

SEQ ID NO: 544006 - DNA, 19 bp, Mus musculus
  siRNA target sequence for Anktm1 (NM_177781.2,2845-2863).
gacctttgggcagcttatt

SEQ ID NO: 544007 - DNA, 19 bp, Mus musculus
  siRNA target sequence for Anktm1 (NM_177781.2,2855-2873).
cagcttattgccttcacaa

SEQ ID NO: 544008 - DNA, 19 bp, Mus musculus
  siRNA target sequence for Anktm1 (NM_177781.2,2871-2889).
caatgtttgtcccaattgt

SEQ ID NO: 544009 - DNA, 19 bp, Mus musculus
  siRNA target sequence for Anktm1 (NM_177781.2,2939-2957).
cagaagcatgcgtcattga

SEQ ID NO: 544010 - DNA, 19 bp, Mus musculus
  siRNA target sequence for Anktm1 (NM_177781.2,2967-2985).
ctatgcaggtggaacttca

SEQ ID NO: 544011 - DNA, 19 bp, Mus musculus
  siRNA target sequence for Anktm1 (NM_177781.2,2977-2995).
ggaacttcataccaactta

SEQ ID NO: 544012 - DNA, 19 bp, Mus musculus
  siRNA target sequence for Anktm1 (NM_177781.2,2981-2999).
cttcataccaacttagaaa

SEQ ID NO: 544013 - DNA, 19 bp, Mus musculus
  siRNA target sequence for Anktm1 (NM_177781.2,3004-3022).
gctgccactctggtactta

SEQ ID NO: 544014 - DNA, 19 bp, Mus musculus
  siRNA target sequence for Anktm1 (NM_177781.2,3075-3093).
gcaggatgctacggttttt

SEQ ID NO: 544015 - DNA, 19 bp, Mus musculus
  siRNA target sequence for Anktm1 (NM_177781.2,3076-3094).
caggatgctacggtttttt

SEQ ID NO: 544016 - DNA, 19 bp, Mus musculus
  siRNA target sequence for Anktm1 (NM_177781.2,3079-3097).
gatgctacggttttttcat

SEQ ID NO: 544017 - DNA, 19 bp, Mus musculus
  siRNA target sequence for Anktm1 (NM_177781.2,3083-3101).
ctacggttttttcattact

SEQ ID NO: 544018 - DNA, 19 bp, Mus musculus
  siRNA target sequence for Anktm1 (NM_177781.2,3120-3138).
cacgacaagaagtaccaaa

SEQ ID NO: 544019 - DNA, 19 bp, Mus musculus
  siRNA target sequence for Anktm1 (NM_177781.2,3123-3141).
gacaagaagtaccaaacat

SEQ ID NO: 544020 - DNA, 19 bp, Mus musculus
  siRNA target sequence for Anktm1 (NM_177781.2,3331-3349).
gcacagcaagtggaatttt

SEQ ID NO: 544021 - DNA, 19 bp, Mus musculus
  siRNA target sequence for Anktm1 (NM_177781.2,3350-3368).
gtcttaaacgcagttaaga

SEQ ID NO: 544022 - DNA, 19 bp, Mus musculus
  siRNA target sequence for Anktm1 (NM_177781.2,3360-3378).
cagttaagactaaaacaca

SEQ ID NO: 544023 - DNA, 19 bp, Mus musculus
  siRNA target sequence for Anktm1 (NM_177781.2,3362-3380).
gttaagactaaaacacatt

SEQ ID NO: 544024 - DNA, 19 bp, Mus musculus
  siRNA target sequence for Anktm1 (NM_177781.2,3367-3385).
gactaaaacacattgttct

SEQ ID NO: 544025 - DNA, 19 bp, Mus musculus
  siRNA target sequence for Anktm1 (NM_177781.2,3369-3387).
ctaaaacacattgttctat

SEQ ID NO: 544026 - DNA, 19 bp, Mus musculus
  siRNA target sequence for Anxa1 (NM_010730.1,81-99).
caatggtatcagaattcct

SEQ ID NO: 544027 - DNA, 19 bp, Mus musculus
  siRNA target sequence for Anxa1 (NM_010730.1,100-118).
caagcaggcccgttttctt

SEQ ID NO: 544028 - DNA, 19 bp, Mus musculus
  siRNA target sequence for Anxa1 (NM_010730.1,103-121).
gcaggcccgttttcttgaa

SEQ ID NO: 544029 - DNA, 19 bp, Mus musculus
  siRNA target sequence for Anxa1 (NM_010730.1,104-122).
caggcccgttttcttgaaa

SEQ ID NO: 544030 - DNA, 19 bp, Mus musculus
  siRNA target sequence for Anxa1 (NM_010730.1,106-124).
ggcccgttttcttgaaaat

SEQ ID NO: 544031 - DNA, 19 bp, Mus musculus
  siRNA target sequence for Anxa1 (NM_010730.1,140-158).
gttcaagctgtaaaatcat

SEQ ID NO: 544032 - DNA, 19 bp, Mus musculus
  siRNA target sequence for Anxa1 (NM_010730.1,190-208).
ctacccttccttcaatgta

SEQ ID NO: 544033 - DNA, 19 bp, Mus musculus
  siRNA target sequence for Anxa1 (NM_010730.1,221-239).
gctgccttgcacaaagcta

SEQ ID NO: 544034 - DNA, 19 bp, Mus musculus
  siRNA target sequence for Anxa1 (NM_010730.1,222-240).
ctgccttgcacaaagctat

SEQ ID NO: 544035 - DNA, 19 bp, Mus musculus
  siRNA target sequence for Anxa1 (NM_010730.1,225-243).
ccttgcacaaagctatcat

SEQ ID NO: 544036 - DNA, 19 bp, Mus musculus
  siRNA target sequence for Anxa1 (NM_010730.1,230-248).
cacaaagctatcatggtta

SEQ ID NO: 544037 - DNA, 19 bp, Mus musculus
  siRNA target sequence for Anxa1 (NM_010730.1,394-412).
ggttgttttggctatgcta

SEQ ID NO: 544038 - DNA, 19 bp, Mus musculus
  siRNA target sequence for Anxa1 (NM_010730.1,395-413).
gttgttttggctatgctaa

SEQ ID NO: 544039 - DNA, 19 bp, Mus musculus
  siRNA target sequence for Anxa1 (NM_010730.1,479-497).
gacactctcattgagattt

SEQ ID NO: 544040 - DNA, 19 bp, Mus musculus
  siRNA target sequence for Anxa1 (NM_010730.1,575-593).
gacatcacttcagatacat

SEQ ID NO: 544041 - DNA, 19 bp, Mus musculus
  siRNA target sequence for Anxa10 (NM_011922.1,185-203).
gattgacatcctaacacaa

SEQ ID NO: 544042 - DNA, 19 bp, Mus musculus
  siRNA target sequence for Anxa10 (NM_011922.1,236-254).
gacctatcagagcatgtat

SEQ ID NO: 544043 - DNA, 19 bp, Mus musculus
  siRNA target sequence for Anxa10 (NM_011922.1,326-344).
gtatcctccaccatcttat

SEQ ID NO: 544044 - DNA, 19 bp, Mus musculus
  siRNA target sequence for Anxa10 (NM_011922.1,392-410).
gaattgcctcattgaaata

SEQ ID NO: 544045 - DNA, 19 bp, Mus musculus
  siRNA target sequence for Anxa10 (NM_011922.1,399-417).
ctcattgaaatattagctt

SEQ ID NO: 544046 - DNA, 19 bp, Mus musculus
  siRNA target sequence for Anxa10 (NM_011922.1,446-464).
gcgagaagcctactgttta

SEQ ID NO: 544047 - DNA, 19 bp, Mus musculus
  siRNA target sequence for Anxa10 (NM_011922.1,450-468).
gaagcctactgtttacagt

SEQ ID NO: 544048 - DNA, 19 bp, Mus musculus
  siRNA target sequence for Anxa10 (NM_011922.1,486-504).
gaggacatttactcagaaa

SEQ ID NO: 544049 - DNA, 19 bp, Mus musculus
  siRNA target sequence for Anxa10 (NM_011922.1,511-529).
gacacttcagggatactct

SEQ ID NO: 544050 - DNA, 19 bp, Mus musculus
  siRNA target sequence for Anxa10 (NM_011922.1,628-646).
ctggggaacataaaaccat

SEQ ID NO: 544051 - DNA, 19 bp, Mus musculus
  siRNA target sequence for Anxa10 (NM_011922.1,668-686).
caagagctacccacaactt

SEQ ID NO: 544052 - DNA, 19 bp, Mus musculus
  siRNA target sequence for Anxa10 (NM_011922.1,801-819).
caggacaaaccaagctatt

SEQ ID NO: 544053 - DNA, 19 bp, Mus musculus
  siRNA target sequence for Anxa10 (NM_011922.1,811-829).
caagctattttgcttataa

SEQ ID NO: 544054 - DNA, 19 bp, Mus musculus
  siRNA target sequence for Anxa10 (NM_011922.1,871-889).
ctgtcatcaggattctcat

SEQ ID NO: 544055 - DNA, 19 bp, Mus musculus
  siRNA target sequence for Anxa10 (NM_011922.1,885-903).
ctcatcgccagaagtgaaa

SEQ ID NO: 544056 - DNA, 19 bp, Mus musculus
  siRNA target sequence for Anxa10 (NM_011922.1,887-905).
catcgccagaagtgaaata

SEQ ID NO: 544057 - DNA, 19 bp, Mus musculus
  siRNA target sequence for Anxa10 (NM_011922.1,906-924).
gacctaatgaccataagga

SEQ ID NO: 544058 - DNA, 19 bp, Mus musculus
  siRNA target sequence for Anxa10 (NM_011922.1,908-926).
cctaatgaccataaggaaa

SEQ ID NO: 544059 - DNA, 19 bp, Mus musculus
  siRNA target sequence for Anxa10 (NM_011922.1,916-934).
ccataaggaaacgttacaa

SEQ ID NO: 544060 - DNA, 19 bp, Mus musculus
  siRNA target sequence for Anxa10 (NM_011922.1,917-935).
cataaggaaacgttacaaa

SEQ ID NO: 544061 - DNA, 19 bp, Mus musculus
  siRNA target sequence for Anxa10 (NM_011922.1,989-1007).
ctatgagaaagcactactt

SEQ ID NO: 544062 - DNA, 19 bp, Mus musculus
  siRNA target sequence for Anxa13 (NM_027211.1,94-112).
cagaccgagatgccaaaaa

SEQ ID NO: 544063 - DNA, 19 bp, Mus musculus
  siRNA target sequence for Anxa13 (NM_027211.1,153-171).
gccatcattgaagtcttat

SEQ ID NO: 544064 - DNA, 19 bp, Mus musculus
  siRNA target sequence for Anxa13 (NM_027211.1,184-202).
cggaggagaggcaacagat

SEQ ID NO: 544065 - DNA, 19 bp, Mus musculus
  siRNA target sequence for Anxa13 (NM_027211.1,256-274).
gtgaactgagtggaaactt

SEQ ID NO: 544066 - DNA, 19 bp, Mus musculus
  siRNA target sequence for Anxa13 (NM_027211.1,297-315).
ctggatcggcccaatgagt

SEQ ID NO: 544067 - DNA, 19 bp, Mus musculus
  siRNA target sequence for Anxa13 (NM_027211.1,520-538).
ccagtcgtgatgaagaaga

SEQ ID NO: 544068 - DNA, 19 bp, Mus musculus
  siRNA target sequence for Anxa13 (NM_027211.1,564-582).
caggatgccaaagatttgt

SEQ ID NO: 544069 - DNA, 19 bp, Mus musculus
  siRNA target sequence for Anxa13 (NM_027211.1,566-584).
ggatgccaaagatttgtat

SEQ ID NO: 544070 - DNA, 19 bp, Mus musculus
  siRNA target sequence for Anxa13 (NM_027211.1,665-683).
cgccacctttcaagcttat

SEQ ID NO: 544071 - DNA, 19 bp, Mus musculus
  siRNA target sequence for Anxa13 (NM_027211.1,667-685).
ccacctttcaagcttatca

SEQ ID NO: 544072 - DNA, 19 bp, Mus musculus
  siRNA target sequence for Anxa13 (NM_027211.1,670-688).
cctttcaagcttatcagat

SEQ ID NO: 544073 - DNA, 19 bp, Mus musculus
  siRNA target sequence for Anxa13 (NM_027211.1,671-689).
ctttcaagcttatcagatt

SEQ ID NO: 544074 - DNA, 19 bp, Mus musculus
  siRNA target sequence for Anxa13 (NM_027211.1,743-761).
gaagaaggcctatttaact

SEQ ID NO: 544075 - DNA, 19 bp, Mus musculus
  siRNA target sequence for Anxa13 (NM_027211.1,746-764).
gaaggcctatttaactata

SEQ ID NO: 544076 - DNA, 19 bp, Mus musculus
  siRNA target sequence for Anxa13 (NM_027211.1,779-797).
ggaccttgagggctatttt

SEQ ID NO: 544077 - DNA, 19 bp, Mus musculus
  siRNA target sequence for Anxa13 (NM_027211.1,835-853).
cagatgaggagacattaat

SEQ ID NO: 544078 - DNA, 19 bp, Mus musculus
  siRNA target sequence for Anxa13 (NM_027211.1,845-863).
gacattaattcgcatcatt

SEQ ID NO: 544079 - DNA, 19 bp, Mus musculus
  siRNA target sequence for Anxa2 (NM_007585.2,79-97).
ctactgtccacgaaatcct

SEQ ID NO: 544080 - DNA, 19 bp, Mus musculus
  siRNA target sequence for Anxa2 (NM_007585.2,111-129).
ctggagggtgatcattcta

SEQ ID NO: 544081 - DNA, 19 bp, Mus musculus
  siRNA target sequence for Anxa2 (NM_007585.2,113-131).
ggagggtgatcattctaca

SEQ ID NO: 544082 - DNA, 19 bp, Mus musculus
  siRNA target sequence for Anxa2 (NM_007585.2,184-202).
gggatgctctgaacattga

SEQ ID NO: 544083 - DNA, 19 bp, Mus musculus
  siRNA target sequence for Anxa2 (NM_007585.2,228-246).
gatgaggtcaccattgtca

SEQ ID NO: 544084 - DNA, 19 bp, Mus musculus
  siRNA target sequence for Anxa2 (NM_007585.2,354-372).
cacctggagacggtgattt

SEQ ID NO: 544085 - DNA, 19 bp, Mus musculus
  siRNA target sequence for Anxa2 (NM_007585.2,405-423).
gcttcggaactaaaagctt

SEQ ID NO: 544086 - DNA, 19 bp, Mus musculus
  siRNA target sequence for Anxa2 (NM_007585.2,756-774).
gtgttcgaaaggtacaaga

SEQ ID NO: 544087 - DNA, 19 bp, Mus musculus
  siRNA target sequence for Anxa2 (NM_007585.2,775-793).
gctacagcccttatgacat

SEQ ID NO: 544088 - DNA, 19 bp, Mus musculus
  siRNA target sequence for Anxa2 (NM_007585.2,966-984).
gtggacatgctgaaaatca

SEQ ID NO: 544089 - DNA, 19 bp, Mus musculus
  siRNA target sequence for Anxa3 (NM_013470.1,225-243).
cgaggaaccataaaagatt

SEQ ID NO: 544090 - DNA, 19 bp, Mus musculus
  siRNA target sequence for Anxa3 (NM_013470.1,262-280).
cggtggatgccgaagctat

SEQ ID NO: 544091 - DNA, 19 bp, Mus musculus
  siRNA target sequence for Anxa3 (NM_013470.1,300-318).
cttgggactgacgagaaaa

SEQ ID NO: 544092 - DNA, 19 bp, Mus musculus
  siRNA target sequence for Anxa3 (NM_013470.1,352-370).
cgcagcgacagctgattgt

SEQ ID NO: 544093 - DNA, 19 bp, Mus musculus
  siRNA target sequence for Anxa3 (NM_013470.1,377-395).
gtaccaagcagcgtatgaa

SEQ ID NO: 544094 - DNA, 19 bp, Mus musculus
  siRNA target sequence for Anxa3 (NM_013470.1,447-465).
gtcatggtggctcttgtta

SEQ ID NO: 544095 - DNA, 19 bp, Mus musculus
  siRNA target sequence for Anxa3 (NM_013470.1,466-484).
ctgcaccagccctgtttga

SEQ ID NO: 544096 - DNA, 19 bp, Mus musculus
  siRNA target sequence for Anxa3 (NM_013470.1,584-602).
ctcgcaggcctattataca

SEQ ID NO: 544097 - DNA, 19 bp, Mus musculus
  siRNA target sequence for Anxa3 (NM_013470.1,590-608).
ggcctattatacagtgtat

SEQ ID NO: 544098 - DNA, 19 bp, Mus musculus
  siRNA target sequence for Anxa3 (NM_013470.1,591-609).
gcctattatacagtgtata

SEQ ID NO: 544099 - DNA, 19 bp, Mus musculus
  siRNA target sequence for Anxa3 (NM_013470.1,618-636).
ctcggggatgacattagct

SEQ ID NO: 544100 - DNA, 19 bp, Mus musculus
  siRNA target sequence for Anxa3 (NM_013470.1,700-718).
gcctcaaagtggatgaaca

SEQ ID NO: 544101 - DNA, 19 bp, Mus musculus
  siRNA target sequence for Anxa3 (NM_013470.1,701-719).
cctcaaagtggatgaacat

SEQ ID NO: 544102 - DNA, 19 bp, Mus musculus
  siRNA target sequence for Anxa3 (NM_013470.1,732-750).
gatgctcagatcctctata

SEQ ID NO: 544103 - DNA, 19 bp, Mus musculus
  siRNA target sequence for Anxa3 (NM_013470.1,818-836).
cccgcagctgaaactaaca

SEQ ID NO: 544104 - DNA, 19 bp, Mus musculus
  siRNA target sequence for Anxa3 (NM_013470.1,819-837).
ccgcagctgaaactaacat

SEQ ID NO: 544105 - DNA, 19 bp, Mus musculus
  siRNA target sequence for Anxa3 (NM_013470.1,824-842).
gctgaaactaacatttgat

SEQ ID NO: 544106 - DNA, 19 bp, Mus musculus
  siRNA target sequence for Anxa3 (NM_013470.1,869-887).
cattgaggacagcattaaa

SEQ ID NO: 544107 - DNA, 19 bp, Mus musculus
  siRNA target sequence for Anxa3 (NM_013470.1,943-961).
ggaacactccagcgttttt

SEQ ID NO: 544108 - DNA, 19 bp, Mus musculus
  siRNA target sequence for Anxa3 (NM_013470.1,956-974).
gtttttggcagaaagactt

SEQ ID NO: 544109 - DNA, 19 bp, Mus musculus
  siRNA target sequence for Anxa3 (NM_013470.1,991-1009).
gtgctggaacagatgaatt

SEQ ID NO: 544110 - DNA, 19 bp, Mus musculus
  siRNA target sequence for Anxa3 (NM_013470.1,993-1011).
gctggaacagatgaattca

SEQ ID NO: 544111 - DNA, 19 bp, Mus musculus
  siRNA target sequence for Anxa3 (NM_013470.1,1014-1032).
ctgaacagaataatggttt

SEQ ID NO: 544112 - DNA, 19 bp, Mus musculus
  siRNA target sequence for Anxa3 (NM_013470.1,1033-1051).
ccagatcagagattgatct

SEQ ID NO: 544113 - DNA, 19 bp, Mus musculus
  siRNA target sequence for Anxa3 (NM_013470.1,1095-1113).
ctatactcggccatccaat

SEQ ID NO: 544114 - DNA, 19 bp, Mus musculus
  siRNA target sequence for Anxa3 (NM_013470.1,1104-1122).
gccatccaatcagatactt

SEQ ID NO: 544115 - DNA, 19 bp, Mus musculus
  siRNA target sequence for Anxa3 (NM_013470.1,1135-1153).
gaaccgtgctcttgaagat

SEQ ID NO: 544116 - DNA, 19 bp, Mus musculus
  siRNA target sequence for Anxa4 (NM_013471.1,171-189).
gaaaggcctcggtactgat

SEQ ID NO: 544117 - DNA, 19 bp, Mus musculus
  siRNA target sequence for Anxa4 (NM_013471.1,402-420).
ggacgagggctgtctgatt

SEQ ID NO: 544118 - DNA, 19 bp, Mus musculus
  siRNA target sequence for Anxa4 (NM_013471.1,455-473).
gtcgaatcaaccagacata

SEQ ID NO: 544119 - DNA, 19 bp, Mus musculus
  siRNA target sequence for Anxa4 (NM_013471.1,468-486).
gacataccagcagcaatat

SEQ ID NO: 544120 - DNA, 19 bp, Mus musculus
  siRNA target sequence for Anxa4 (NM_013471.1,649-667).
gggacagacgaggtgaaat

SEQ ID NO: 544121 - DNA, 19 bp, Mus musculus
  siRNA target sequence for Anxa4 (NM_013471.1,653-671).
cagacgaggtgaaattcct

SEQ ID NO: 544122 - DNA, 19 bp, Mus musculus
  siRNA target sequence for Anxa4 (NM_013471.1,655-673).
gacgaggtgaaattcctaa

SEQ ID NO: 544123 - DNA, 19 bp, Mus musculus
  siRNA target sequence for Anxa4 (NM_013471.1,711-729).
cgtgtttgatgaatacaaa

SEQ ID NO: 544124 - DNA, 19 bp, Mus musculus
  siRNA target sequence for Anxa4 (NM_013471.1,745-763).
gacattgaacagagcatta

SEQ ID NO: 544125 - DNA, 19 bp, Mus musculus
  siRNA target sequence for Anxa4 (NM_013471.1,771-789).
gacatctggaagctttgaa

SEQ ID NO: 544126 - DNA, 19 bp, Mus musculus
  siRNA target sequence for Anxa4 (NM_013471.1,793-811).
gccctgttggctatagtga

SEQ ID NO: 544127 - DNA, 19 bp, Mus musculus
  siRNA target sequence for Anxa4 (NM_013471.1,810-828).
gaagtgcatgcggagtaaa

SEQ ID NO: 544128 - DNA, 19 bp, Mus musculus
  siRNA target sequence for Anxa4 (NM_013471.1,813-831).
gtgcatgcggagtaaacct

SEQ ID NO: 544129 - DNA, 19 bp, Mus musculus
  siRNA target sequence for Anxa4 (NM_013471.1,819-837).
gcggagtaaaccttcatat

SEQ ID NO: 544130 - DNA, 19 bp, Mus musculus
  siRNA target sequence for Anxa4 (NM_013471.1,820-838).
cggagtaaaccttcatatt

SEQ ID NO: 544131 - DNA, 19 bp, Mus musculus
  siRNA target sequence for Anxa4 (NM_013471.1,840-858).
cgctgagagactttataaa

SEQ ID NO: 544132 - DNA, 19 bp, Mus musculus
  siRNA target sequence for Anxa4 (NM_013471.1,841-859).
gctgagagactttataaat

SEQ ID NO: 544133 - DNA, 19 bp, Mus musculus
  siRNA target sequence for Anxa4 (NM_013471.1,869-887).
gcttaggcactgatgacaa

SEQ ID NO: 544134 - DNA, 19 bp, Mus musculus
  siRNA target sequence for Anxa4 (NM_013471.1,956-974).
ggctctacgggaagtcttt

SEQ ID NO: 544135 - DNA, 19 bp, Mus musculus
  siRNA target sequence for Anxa4 (NM_013471.1,958-976).
ctctacgggaagtctttgt

SEQ ID NO: 544136 - DNA, 19 bp, Mus musculus
  siRNA target sequence for Anxa5 (NM_009673.1,313-331).
ggagtttaagactctgttt

SEQ ID NO: 544137 - DNA, 19 bp, Mus musculus
  siRNA target sequence for Anxa5 (NM_009673.1,458-476).
ggtacagacgagaaagtat

SEQ ID NO: 544138 - DNA, 19 bp, Mus musculus
  siRNA target sequence for Anxa5 (NM_009673.1,514-532).
cagtgccataaaacaagtt

SEQ ID NO: 544139 - DNA, 19 bp, Mus musculus
  siRNA target sequence for Anxa5 (NM_009673.1,552-570).
ccaacctggaagatgatgt

SEQ ID NO: 544140 - DNA, 19 bp, Mus musculus
  siRNA target sequence for Anxa5 (NM_009673.1,613-631).
cctccttcaggcgaataga

SEQ ID NO: 544141 - DNA, 19 bp, Mus musculus
  siRNA target sequence for Anxa5 (NM_009673.1,634-652).
ccctgatactgcaattgat

SEQ ID NO: 544142 - DNA, 19 bp, Mus musculus
  siRNA target sequence for Anxa5 (NM_009673.1,636-654).
ctgatactgcaattgatga

SEQ ID NO: 544143 - DNA, 19 bp, Mus musculus
  siRNA target sequence for Anxa5 (NM_009673.1,751-769).
cagtgtgtctcatttaaga

SEQ ID NO: 544144 - DNA, 19 bp, Mus musculus
  siRNA target sequence for Anxa5 (NM_009673.1,771-789).
gagtgtttgacaagtacat

SEQ ID NO: 544145 - DNA, 19 bp, Mus musculus
  siRNA target sequence for Anxa5 (NM_009673.1,779-797).
gacaagtacatgaccatat

SEQ ID NO: 544146 - DNA, 19 bp, Mus musculus
  siRNA target sequence for Anxa5 (NM_009673.1,862-880).
ggctgtcgtgaagtctatt

SEQ ID NO: 544147 - DNA, 19 bp, Mus musculus
  siRNA target sequence for Anxa5 (NM_009673.1,978-996).
gtgagattgacctgtttaa

SEQ ID NO: 544148 - DNA, 19 bp, Mus musculus
  siRNA target sequence for Anxa5 (NM_009673.1,986-1004).
gacctgtttaacataagga

SEQ ID NO: 544149 - DNA, 19 bp, Mus musculus
  siRNA target sequence for Anxa5 (NM_009673.1,1029-1047).
cctccctgtattctatgat

SEQ ID NO: 544150 - DNA, 19 bp, Mus musculus
  siRNA target sequence for Anxa5 (NM_009673.1,1054-1072).
cgacacatctggagactat

SEQ ID NO: 544151 - DNA, 19 bp, Mus musculus
  siRNA target sequence for Anxa6 (NM_013472.2,136-154).
cagagtttgacgcaaatca

SEQ ID NO: 544152 - DNA, 19 bp, Mus musculus
  siRNA target sequence for Anxa6 (NM_013472.2,249-267).
caggagatctgccagaatt

SEQ ID NO: 544153 - DNA, 19 bp, Mus musculus
  siRNA target sequence for Anxa6 (NM_013472.2,252-270).
gagatctgccagaattaca

SEQ ID NO: 544154 - DNA, 19 bp, Mus musculus
  siRNA target sequence for Anxa6 (NM_013472.2,297-315).
gaagacttgaagtatgagt

SEQ ID NO: 544155 - DNA, 19 bp, Mus musculus
  siRNA target sequence for Anxa6 (NM_013472.2,580-598).
gggagaatgacgatgttgt

SEQ ID NO: 544156 - DNA, 19 bp, Mus musculus
  siRNA target sequence for Anxa6 (NM_013472.2,713-731).
cctacgactggtgtttgat

SEQ ID NO: 544157 - DNA, 19 bp, Mus musculus
  siRNA target sequence for Anxa6 (NM_013472.2,723-741).
gtgtttgatgagtatctga

SEQ ID NO: 544158 - DNA, 19 bp, Mus musculus
  siRNA target sequence for Anxa6 (NM_013472.2,756-774).
cccatcgaagccagtatca

SEQ ID NO: 544159 - DNA, 19 bp, Mus musculus
  siRNA target sequence for Anxa6 (NM_013472.2,758-776).
catcgaagccagtatcaga

SEQ ID NO: 544160 - DNA, 19 bp, Mus musculus
  siRNA target sequence for Anxa6 (NM_013472.2,831-849).
cgaagcaccccggagtatt

SEQ ID NO: 544161 - DNA, 19 bp, Mus musculus
  siRNA target sequence for Anxa6 (NM_013472.2,922-940).
ccaggagcgagctggatat

SEQ ID NO: 544162 - DNA, 19 bp, Mus musculus
  siRNA target sequence for Anxa6 (NM_013472.2,982-1000).
cactctacagcatgatcaa

SEQ ID NO: 544163 - DNA, 19 bp, Mus musculus
  siRNA target sequence for Anxa6 (NM_013472.2,992-1010).
catgatcaagaatgatact

SEQ ID NO: 544164 - DNA, 19 bp, Mus musculus
  siRNA target sequence for Anxa6 (NM_013472.2,1005-1023).
gatacttccggtgaataca

SEQ ID NO: 544165 - DNA, 19 bp, Mus musculus
  siRNA target sequence for Anxa6 (NM_013472.2,1009-1027).
cttccggtgaatacaagaa

SEQ ID NO: 544166 - DNA, 19 bp, Mus musculus
  siRNA target sequence for Anxa6 (NM_013472.2,1283-1301).
gatccggcagaccttcaaa

SEQ ID NO: 544167 - DNA, 19 bp, Mus musculus
  siRNA target sequence for Anxa6 (NM_013472.2,1385-1403).
gccacctgcccattacgat

SEQ ID NO: 544168 - DNA, 19 bp, Mus musculus
  siRNA target sequence for Anxa6 (NM_013472.2,1390-1408).
ctgcccattacgatgctaa

SEQ ID NO: 544169 - DNA, 19 bp, Mus musculus
  siRNA target sequence for Anxa6 (NM_013472.2,1431-1449).
ggagccggcacagatgaaa

SEQ ID NO: 544170 - DNA, 19 bp, Mus musculus
  siRNA target sequence for Anxa6 (NM_013472.2,1474-1492).
cccggaccaatgctgaaat

SEQ ID NO: 544171 - DNA, 19 bp, Mus musculus
  siRNA target sequence for Anxa6 (NM_013472.2,1576-1594).
gaaggattctcatttctct

SEQ ID NO: 544172 - DNA, 19 bp, Mus musculus
  siRNA target sequence for Anxa6 (NM_013472.2,1877-1895).
gaacaagcctctcttcttt

SEQ ID NO: 544173 - DNA, 19 bp, Mus musculus
  siRNA target sequence for Anxa6 (NM_013472.2,1896-1914).
gctgataaactgtacaagt

SEQ ID NO: 544174 - DNA, 19 bp, Mus musculus
  siRNA target sequence for Anxa6 (NM_013472.2,1961-1979).
ggtgtctcggagtgagata

SEQ ID NO: 544175 - DNA, 19 bp, Mus musculus
  siRNA target sequence for Anxa6 (NM_013472.2,1966-1984).
ctcggagtgagatagatct

SEQ ID NO: 544176 - DNA, 19 bp, Mus musculus
  siRNA target sequence for Anxa6 (NM_013472.2,1995-2013).
cggagggaattcattgaga

SEQ ID NO: 544177 - DNA, 19 bp, Mus musculus
  siRNA target sequence for Anxa6 (NM_013472.2,2000-2018).
ggaattcattgagaaatat

SEQ ID NO: 544178 - DNA, 19 bp, Mus musculus
  siRNA target sequence for Anxa7 (NM_009674.1,100-118).
gcaggtcaggagtcatctt

SEQ ID NO: 544179 - DNA, 19 bp, Mus musculus
  siRNA target sequence for Anxa7 (NM_009674.1,354-372).
gccacctgcacagtcttat

SEQ ID NO: 544180 - DNA, 19 bp, Mus musculus
  siRNA target sequence for Anxa7 (NM_009674.1,541-559).
gaaattctccgcaaagcaa

SEQ ID NO: 544181 - DNA, 19 bp, Mus musculus
  siRNA target sequence for Anxa7 (NM_009674.1,657-675).
gtatggcaaggatttaatt

SEQ ID NO: 544182 - DNA, 19 bp, Mus musculus
  siRNA target sequence for Anxa7 (NM_009674.1,735-753).
gccttctacatactatgat

SEQ ID NO: 544183 - DNA, 19 bp, Mus musculus
  siRNA target sequence for Anxa7 (NM_009674.1,788-806).
gaactcaagaacgtgtatt

SEQ ID NO: 544184 - DNA, 19 bp, Mus musculus
  siRNA target sequence for Anxa7 (NM_009674.1,791-809).
ctcaagaacgtgtattgat

SEQ ID NO: 544185 - DNA, 19 bp, Mus musculus
  siRNA target sequence for Anxa7 (NM_009674.1,796-814).
gaacgtgtattgatagaga

SEQ ID NO: 544186 - DNA, 19 bp, Mus musculus
  siRNA target sequence for Anxa7 (NM_009674.1,799-817).
cgtgtattgatagagattt

SEQ ID NO: 544187 - DNA, 19 bp, Mus musculus
  siRNA target sequence for Anxa7 (NM_009674.1,819-837).
gtgcacaagaacaaatcaa

SEQ ID NO: 544188 - DNA, 19 bp, Mus musculus
  siRNA target sequence for Anxa7 (NM_009674.1,849-867).
cattgttagatgttaccaa

SEQ ID NO: 544189 - DNA, 19 bp, Mus musculus
  siRNA target sequence for Anxa7 (NM_009674.1,905-923).
cagatacctcgggacattt

SEQ ID NO: 544190 - DNA, 19 bp, Mus musculus
  siRNA target sequence for Anxa7 (NM_009674.1,999-1017).
ggacgctcagcgtctctat

SEQ ID NO: 544191 - DNA, 19 bp, Mus musculus
  siRNA target sequence for Anxa7 (NM_009674.1,1043-1061).
cggatgaatcctgtttcaa

SEQ ID NO: 544192 - DNA, 19 bp, Mus musculus
  siRNA target sequence for Anxa7 (NM_009674.1,1045-1063).
gatgaatcctgtttcaaca

SEQ ID NO: 544193 - DNA, 19 bp, Mus musculus
  siRNA target sequence for Anxa7 (NM_009674.1,1052-1070).
cctgtttcaacatgattct

SEQ ID NO: 544194 - DNA, 19 bp, Mus musculus
  siRNA target sequence for Anxa7 (NM_009674.1,1125-1143).
ggctaatcgcgatttgcta

SEQ ID NO: 544195 - DNA, 19 bp, Mus musculus
  siRNA target sequence for Anxa7 (NM_009674.1,1126-1144).
gctaatcgcgatttgctaa

SEQ ID NO: 544196 - DNA, 19 bp, Mus musculus
  siRNA target sequence for Anxa7 (NM_009674.1,1135-1153).
gatttgctaagcagtgtaa

SEQ ID NO: 544197 - DNA, 19 bp, Mus musculus
  siRNA target sequence for Anxa7 (NM_009674.1,1174-1192).
gttgaaagtggtttgaaga

SEQ ID NO: 544198 - DNA, 19 bp, Mus musculus
  siRNA target sequence for Anxa7 (NM_009674.1,1231-1249).
gctgaacgactctactatt

SEQ ID NO: 544199 - DNA, 19 bp, Mus musculus
  siRNA target sequence for Anxa7 (NM_009674.1,1234-1252).
gaacgactctactattcca

SEQ ID NO: 544200 - DNA, 19 bp, Mus musculus
  siRNA target sequence for Anxa7 (NM_009674.1,1335-1353).
gatgttcacccagatgtat

SEQ ID NO: 544201 - DNA, 19 bp, Mus musculus
  siRNA target sequence for Anxa7 (NM_009674.1,1382-1400).
gtgacacgagtggagatta

SEQ ID NO: 544202 - DNA, 19 bp, Mus musculus
  siRNA target sequence for Anxa7 (NM_009674.1,1384-1402).
gacacgagtggagattaca

SEQ ID NO: 544203 - DNA, 19 bp, Mus musculus
  siRNA target sequence for Anxa8 (NM_013473.2,132-150).
cgtgaagggtagttctcat

SEQ ID NO: 544204 - DNA, 19 bp, Mus musculus
  siRNA target sequence for Anxa8 (NM_013473.2,207-225).
caatgagcaggccatcata

SEQ ID NO: 544205 - DNA, 19 bp, Mus musculus
  siRNA target sequence for Anxa8 (NM_013473.2,273-291).
gtccttcaaggctcaattt

SEQ ID NO: 544206 - DNA, 19 bp, Mus musculus
  siRNA target sequence for Anxa8 (NM_013473.2,303-321).
cactgagaccttaaagtca

SEQ ID NO: 544207 - DNA, 19 bp, Mus musculus
  siRNA target sequence for Anxa8 (NM_013473.2,325-343).
ctgagtggcaaatttgaga

SEQ ID NO: 544208 - DNA, 19 bp, Mus musculus
  siRNA target sequence for Anxa8 (NM_013473.2,408-426).
gaagggcttaggaaccaaa

SEQ ID NO: 544209 - DNA, 19 bp, Mus musculus
  siRNA target sequence for Anxa8 (NM_013473.2,411-429).
gggcttaggaaccaaagaa

SEQ ID NO: 544210 - DNA, 19 bp, Mus musculus
  siRNA target sequence for Anxa8 (NM_013473.2,509-527).
gatctaccctggaagaaga

SEQ ID NO: 544211 - DNA, 19 bp, Mus musculus
  siRNA target sequence for Anxa8 (NM_013473.2,673-691).
ggaaccgatgagatgaagt

SEQ ID NO: 544212 - DNA, 19 bp, Mus musculus
  siRNA target sequence for Anxa8 (NM_013473.2,674-692).
gaaccgatgagatgaagtt

SEQ ID NO: 544213 - DNA, 19 bp, Mus musculus
  siRNA target sequence for Anxa8 (NM_013473.2,677-695).
ccgatgagatgaagttcat

SEQ ID NO: 544214 - DNA, 19 bp, Mus musculus
  siRNA target sequence for Anxa8 (NM_013473.2,732-750).
gagagtgttcgaggaatat

SEQ ID NO: 544215 - DNA, 19 bp, Mus musculus
  siRNA target sequence for Anxa8 (NM_013473.2,734-752).
gagtgttcgaggaatatga

SEQ ID NO: 544216 - DNA, 19 bp, Mus musculus
  siRNA target sequence for Anxa8 (NM_013473.2,904-922).
cgtgatggaacgctgataa

SEQ ID NO: 544217 - DNA, 19 bp, Mus musculus
  siRNA target sequence for Anxa8 (NM_013473.2,907-925).
gatggaacgctgataagga

SEQ ID NO: 544218 - DNA, 19 bp, Mus musculus
  siRNA target sequence for Anxa8 (NM_013473.2,914-932).
cgctgataaggaacattgt

SEQ ID NO: 544219 - DNA, 19 bp, Mus musculus
  siRNA target sequence for Anxa8 (NM_013473.2,915-933).
gctgataaggaacattgtt

SEQ ID NO: 544220 - DNA, 19 bp, Mus musculus
  siRNA target sequence for Anxa8 (NM_013473.2,916-934).
ctgataaggaacattgttt

SEQ ID NO: 544221 - DNA, 19 bp, Mus musculus
  siRNA target sequence for Anxa8 (NM_013473.2,936-954).
caggagtgagattgactta

SEQ ID NO: 544222 - DNA, 19 bp, Mus musculus
  siRNA target sequence for Anxa8 (NM_013473.2,938-956).
ggagtgagattgacttaaa

SEQ ID NO: 544223 - DNA, 19 bp, Mus musculus
  siRNA target sequence for Anxa8 (NM_013473.2,941-959).
gtgagattgacttaaatct

SEQ ID NO: 544224 - DNA, 19 bp, Mus musculus
  siRNA target sequence for Anxa8 (NM_013473.2,943-961).
gagattgacttaaatctta

SEQ ID NO: 544225 - DNA, 19 bp, Mus musculus
  siRNA target sequence for Anxa8 (NM_013473.2,995-1013).
ctctcagcagcatgatcat

SEQ ID NO: 544226 - DNA, 19 bp, Mus musculus
  siRNA target sequence for Anxa9 (NM_023628.1,241-259).
ccaaggtgtggactatgat

SEQ ID NO: 544227 - DNA, 19 bp, Mus musculus
  siRNA target sequence for Anxa9 (NM_023628.1,242-260).
caaggtgtggactatgata

SEQ ID NO: 544228 - DNA, 19 bp, Mus musculus
  siRNA target sequence for Anxa9 (NM_023628.1,246-264).
gtgtggactatgataccat

SEQ ID NO: 544229 - DNA, 19 bp, Mus musculus
  siRNA target sequence for Anxa9 (NM_023628.1,329-347).
cgcaccaaacaggatctat

SEQ ID NO: 544230 - DNA, 19 bp, Mus musculus
  siRNA target sequence for Anxa9 (NM_023628.1,520-538).
ggcatgcctggcagtatat

SEQ ID NO: 544231 - DNA, 19 bp, Mus musculus
  siRNA target sequence for Anxa9 (NM_023628.1,525-543).
gcctggcagtatataagca

SEQ ID NO: 544232 - DNA, 19 bp, Mus musculus
  siRNA target sequence for Anxa9 (NM_023628.1,531-549).
cagtatataagcatgactt

SEQ ID NO: 544233 - DNA, 19 bp, Mus musculus
  siRNA target sequence for Anxa9 (NM_023628.1,576-594).
ggactgagaccaatggtat

SEQ ID NO: 544234 - DNA, 19 bp, Mus musculus
  siRNA target sequence for Anxa9 (NM_023628.1,760-778).
cctcatccgagtgtttgat

SEQ ID NO: 544235 - DNA, 19 bp, Mus musculus
  siRNA target sequence for Anxa9 (NM_023628.1,812-830).
gatgctatccggaactgtt

SEQ ID NO: 544236 - DNA, 19 bp, Mus musculus
  siRNA target sequence for Anxa9 (NM_023628.1,879-897).
gaaacacagcgctgtactt

SEQ ID NO: 544237 - DNA, 19 bp, Mus musculus
  siRNA target sequence for Anxa9 (NM_023628.1,885-903).
cagcgctgtactttgctaa

SEQ ID NO: 544238 - DNA, 19 bp, Mus musculus
  siRNA target sequence for Anxa9 (NM_023628.1,888-906).
cgctgtactttgctaacaa

SEQ ID NO: 544239 - DNA, 19 bp, Mus musculus
  siRNA target sequence for Anxa9 (NM_023628.1,889-907).
gctgtactttgctaacaaa

SEQ ID NO: 544240 - DNA, 19 bp, Mus musculus
  siRNA target sequence for Anxa9 (NM_023628.1,923-941).
caggaaactgagcctaatt

SEQ ID NO: 544241 - DNA, 19 bp, Mus musculus
  siRNA target sequence for Anxa9 (NM_023628.1,950-968).
ctgacgcgggtccttatct

SEQ ID NO: 544242 - DNA, 19 bp, Mus musculus
  siRNA target sequence for Anxa9 (NM_023628.1,979-997).
gagtgaccttctaagcatt

SEQ ID NO: 544243 - DNA, 19 bp, Mus musculus
  siRNA target sequence for Anxa9 (NM_023628.1,993-1011).
gcattcgggctgagttcaa

SEQ ID NO: 544244 - DNA, 19 bp, Mus musculus
  siRNA target sequence for Anxa9 (NM_023628.1,1022-1040).
gggaagtctctctattctt

SEQ ID NO: 544245 - DNA, 19 bp, Mus musculus
  siRNA target sequence for Anxa9 (NM_023628.1,1024-1042).
gaagtctctctattcttct

SEQ ID NO: 544246 - DNA, 19 bp, Mus musculus
  siRNA target sequence for Apob48r (NM_138310.1,421-439).
cagagacaggagcagtaat

SEQ ID NO: 544247 - DNA, 19 bp, Mus musculus
  siRNA target sequence for Apob48r (NM_138310.1,696-714).
gtgccaaagggattgacaa

SEQ ID NO: 544248 - DNA, 19 bp, Mus musculus
  siRNA target sequence for Apob48r (NM_138310.1,921-939).
gagtctgggtcctagaaga

SEQ ID NO: 544249 - DNA, 19 bp, Mus musculus
  siRNA target sequence for Apob48r (NM_138310.1,1228-1246).
cacggaggctaaagatgaa

SEQ ID NO: 544250 - DNA, 19 bp, Mus musculus
  siRNA target sequence for Apob48r (NM_138310.1,1383-1401).
cccaggctttaactaaaca

SEQ ID NO: 544251 - DNA, 19 bp, Mus musculus
  siRNA target sequence for Apob48r (NM_138310.1,1384-1402).
ccaggctttaactaaacaa

SEQ ID NO: 544252 - DNA, 19 bp, Mus musculus
  siRNA target sequence for Apob48r (NM_138310.1,1387-1405).
ggctttaactaaacaactt

SEQ ID NO: 544253 - DNA, 19 bp, Mus musculus
  siRNA target sequence for Apob48r (NM_138310.1,1389-1407).
ctttaactaaacaacttga

SEQ ID NO: 544254 - DNA, 19 bp, Mus musculus
  siRNA target sequence for Apob48r (NM_138310.1,2583-2601).
ggccctctttccatcgaat

SEQ ID NO: 544255 - DNA, 19 bp, Mus musculus
  siRNA target sequence for Apob48r (NM_138310.1,2587-2605).
ctctttccatcgaatctct

SEQ ID NO: 544256 - DNA, 19 bp, Mus musculus
  siRNA target sequence for AU040320 (NM_133886.1,267-285).
gttttgccaggatattgtt

SEQ ID NO: 544257 - DNA, 19 bp, Mus musculus
  siRNA target sequence for AU040320 (NM_133886.1,310-328).
gaagcctgtacctgcttta

SEQ ID NO: 544258 - DNA, 19 bp, Mus musculus
  siRNA target sequence for AU040320 (NM_133886.1,419-437).
gagaactgagggagaaaat

SEQ ID NO: 544259 - DNA, 19 bp, Mus musculus
  siRNA target sequence for AU040320 (NM_133886.1,586-604).
cagactcttccaattccat

SEQ ID NO: 544260 - DNA, 19 bp, Mus musculus
  siRNA target sequence for AU040320 (NM_133886.1,759-777).
caccaccagagcttactca

SEQ ID NO: 544261 - DNA, 19 bp, Mus musculus
  siRNA target sequence for AU040320 (NM_133886.1,819-837).
ggagcgatgcagcattcta

SEQ ID NO: 544262 - DNA, 19 bp, Mus musculus
  siRNA target sequence for AU040320 (NM_133886.1,820-838).
gagcgatgcagcattctaa

SEQ ID NO: 544263 - DNA, 19 bp, Mus musculus
  siRNA target sequence for AU040320 (NM_133886.1,882-900).
gcagaggtccgcaaaacca

SEQ ID NO: 544264 - DNA, 19 bp, Mus musculus
  siRNA target sequence for AU040320 (NM_133886.1,883-901).
cagaggtccgcaaaaccat

SEQ ID NO: 544265 - DNA, 19 bp, Mus musculus
  siRNA target sequence for AU040320 (NM_133886.1,885-903).
gaggtccgcaaaaccatta

SEQ ID NO: 544266 - DNA, 19 bp, Mus musculus
  siRNA target sequence for AU040320 (NM_133886.1,887-905).
ggtccgcaaaaccattaca

SEQ ID NO: 544267 - DNA, 19 bp, Mus musculus
  siRNA target sequence for AU040320 (NM_133886.1,946-964).
ctgagtggcccaagaatgt

SEQ ID NO: 544268 - DNA, 19 bp, Mus musculus
  siRNA target sequence for AU040320 (NM_133886.1,948-966).
gagtggcccaagaatgtgt

SEQ ID NO: 544269 - DNA, 19 bp, Mus musculus
  siRNA target sequence for AU040320 (NM_133886.1,989-1007).
gcactccagtcctgtatct

SEQ ID NO: 544270 - DNA, 19 bp, Mus musculus
  siRNA target sequence for AU040320 (NM_133886.1,1006-1024).
ctggtactccgcaagtaaa

SEQ ID NO: 544271 - DNA, 19 bp, Mus musculus
  siRNA target sequence for AU040320 (NM_133886.1,1008-1026).
ggtactccgcaagtaaaaa

SEQ ID NO: 544272 - DNA, 19 bp, Mus musculus
  siRNA target sequence for AU040320 (NM_133886.1,1178-1196).
caccctgcctaagaatgaa

SEQ ID NO: 544273 - DNA, 19 bp, Mus musculus
  siRNA target sequence for AU040320 (NM_133886.1,1339-1357).
ctccaggcctgtacgaatt

SEQ ID NO: 544274 - DNA, 19 bp, Mus musculus
  siRNA target sequence for AU040320 (NM_133886.1,1342-1360).
caggcctgtacgaattcaa

SEQ ID NO: 544275 - DNA, 19 bp, Mus musculus
  siRNA target sequence for AU040320 (NM_133886.1,1489-1507).
ccacttctaccatcattga

SEQ ID NO: 544276 - DNA, 19 bp, Mus musculus
  siRNA target sequence for AU040320 (NM_133886.1,1490-1508).
cacttctaccatcattgat

SEQ ID NO: 544277 - DNA, 19 bp, Mus musculus
  siRNA target sequence for AU040320 (NM_133886.1,1517-1535).
gagcacggatgacgataaa

SEQ ID NO: 544278 - DNA, 19 bp, Mus musculus
  siRNA target sequence for AU040320 (NM_133886.1,1519-1537).
gcacggatgacgataaaat

SEQ ID NO: 544279 - DNA, 19 bp, Mus musculus
  siRNA target sequence for AU040320 (NM_133886.1,1520-1538).
cacggatgacgataaaatt

SEQ ID NO: 544280 - DNA, 19 bp, Mus musculus
  siRNA target sequence for AU040320 (NM_133886.1,1522-1540).
cggatgacgataaaattgt

SEQ ID NO: 544281 - DNA, 19 bp, Mus musculus
  siRNA target sequence for AU040320 (NM_133886.1,1593-1611).
gaagacacagccatactaa

SEQ ID NO: 544282 - DNA, 19 bp, Mus musculus
  siRNA target sequence for AU040320 (NM_133886.1,1602-1620).
gccatactaaaacttagta

SEQ ID NO: 544283 - DNA, 19 bp, Mus musculus
  siRNA target sequence for AU040320 (NM_133886.1,1603-1621).
ccatactaaaacttagtaa

SEQ ID NO: 544284 - DNA, 19 bp, Mus musculus
  siRNA target sequence for AU040320 (NM_133886.1,1637-1655).
ctacaccttcagcttaact

SEQ ID NO: 544285 - DNA, 19 bp, Mus musculus
  siRNA target sequence for AU040320 (NM_133886.1,1693-1711).
caagcctgactgtgaacaa

SEQ ID NO: 544286 - DNA, 19 bp, Mus musculus
  siRNA target sequence for AU040320 (NM_133886.1,1741-1759).
caggccccaaccaagtgat

SEQ ID NO: 544287 - DNA, 19 bp, Mus musculus
  siRNA target sequence for AU040320 (NM_133886.1,1815-1833).
ggcatcaccagctatgagt

SEQ ID NO: 544288 - DNA, 19 bp, Mus musculus
  siRNA target sequence for AU040320 (NM_133886.1,1898-1916).
gcagctgtccgcaatgcaa

SEQ ID NO: 544289 - DNA, 19 bp, Mus musculus
  siRNA target sequence for AU040320 (NM_133886.1,1973-1991).
cgcccaagtgactgtgatt

SEQ ID NO: 544290 - DNA, 19 bp, Mus musculus
  siRNA target sequence for AU040320 (NM_133886.1,2102-2120).
gagagtcgtctcttacctt

SEQ ID NO: 544291 - DNA, 19 bp, Mus musculus
  siRNA target sequence for AU040320 (NM_133886.1,2192-2210).
gctgcaagtcgggacttat

SEQ ID NO: 544292 - DNA, 19 bp, Mus musculus
  siRNA target sequence for AU040320 (NM_133886.1,2195-2213).
gcaagtcgggacttatgta

SEQ ID NO: 544293 - DNA, 19 bp, Mus musculus
  siRNA target sequence for AU040320 (NM_133886.1,2196-2214).
caagtcgggacttatgtat

SEQ ID NO: 544294 - DNA, 19 bp, Mus musculus
  siRNA target sequence for AU040320 (NM_133886.1,2199-2217).
gtcgggacttatgtattca

SEQ ID NO: 544295 - DNA, 19 bp, Mus musculus
  siRNA target sequence for AU040320 (NM_133886.1,2249-2267).
gagccagagctccgttaat

SEQ ID NO: 544296 - DNA, 19 bp, Mus musculus
  siRNA target sequence for AU040320 (NM_133886.1,2251-2269).
gccagagctccgttaatgt

SEQ ID NO: 544297 - DNA, 19 bp, Mus musculus
  siRNA target sequence for AU040320 (NM_133886.1,2255-2273).
gagctccgttaatgtcatt

SEQ ID NO: 544298 - DNA, 19 bp, Mus musculus
  siRNA target sequence for AU040320 (NM_133886.1,2257-2275).
gctccgttaatgtcattgt

SEQ ID NO: 544299 - DNA, 19 bp, Mus musculus
  siRNA target sequence for AU040320 (NM_133886.1,2365-2383).
cgaggtcctcagatgacaa

SEQ ID NO: 544300 - DNA, 19 bp, Mus musculus
  siRNA target sequence for AU040320 (NM_133886.1,2376-2394).
gatgacaaggggatagtca

SEQ ID NO: 544301 - DNA, 19 bp, Mus musculus
  siRNA target sequence for AU040320 (NM_133886.1,2572-2590).
ctgaccccaggaaaagcaa

SEQ ID NO: 544302 - DNA, 19 bp, Mus musculus
  siRNA target sequence for AU040320 (NM_133886.1,2730-2748).
cagagcaccaagatgttgt

SEQ ID NO: 544303 - DNA, 19 bp, Mus musculus
  siRNA target sequence for AU040320 (NM_133886.1,2734-2752).
gcaccaagatgttgttttt

SEQ ID NO: 544304 - DNA, 19 bp, Mus musculus
  siRNA target sequence for AU040320 (NM_133886.1,2943-2961).
ccgttttggatggagaatt

SEQ ID NO: 544305 - DNA, 19 bp, Mus musculus
  siRNA target sequence for AU040320 (NM_133886.1,2944-2962).
cgttttggatggagaattt

SEQ ID NO: 544306 - DNA, 19 bp, Mus musculus
  siRNA target sequence for AU040320 (NM_133886.1,3007-3025).
gcgtgctctacgtcatcat

SEQ ID NO: 544307 - DNA, 19 bp, Mus musculus
  siRNA target sequence for AU040320 (NM_133886.1,3008-3026).
cgtgctctacgtcatcatt

SEQ ID NO: 544308 - DNA, 19 bp, Mus musculus
  siRNA target sequence for AU040320 (NM_133886.1,3028-3046).
cctcctttgtcattgttgt

SEQ ID NO: 544309 - DNA, 19 bp, Mus musculus
  siRNA target sequence for AU040320 (NM_133886.1,3060-3078).
ctgtcatggactacaatct

SEQ ID NO: 544310 - DNA, 19 bp, Mus musculus
  siRNA target sequence for AU040320 (NM_133886.1,3083-3101).
ctgcaagaggcaaaaagga

SEQ ID NO: 544311 - DNA, 19 bp, Mus musculus
  siRNA target sequence for AU040320 (NM_133886.1,3249-3267).
gacgatgccatcttcacat

SEQ ID NO: 544312 - DNA, 19 bp, Mus musculus
  siRNA target sequence for AU040320 (NM_133886.1,3275-3293).
ccgggagaagggcaaacta

SEQ ID NO: 544313 - DNA, 19 bp, Mus musculus
  siRNA target sequence for AU040320 (NM_133886.1,3349-3367).
gcgcacgggaggagatctt

SEQ ID NO: 544314 - DNA, 19 bp, Mus musculus
  siRNA target sequence for AU040377 (NM_178748.3,299-317).
cgaacggctctgcgaaaat

SEQ ID NO: 544315 - DNA, 19 bp, Mus musculus
  siRNA target sequence for AU040377 (NM_178748.3,350-368).
ctgggagccttgaactgta

SEQ ID NO: 544316 - DNA, 19 bp, Mus musculus
  siRNA target sequence for AU040377 (NM_178748.3,422-440).
ggctacacagtgttttact

SEQ ID NO: 544317 - DNA, 19 bp, Mus musculus
  siRNA target sequence for AU040377 (NM_178748.3,443-461).
gaggttggttcagataagt

SEQ ID NO: 544318 - DNA, 19 bp, Mus musculus
  siRNA target sequence for AU040377 (NM_178748.3,494-512).
ggccaggataccctaatca

SEQ ID NO: 544319 - DNA, 19 bp, Mus musculus
  siRNA target sequence for AU040377 (NM_178748.3,496-514).
ccaggataccctaatcact

SEQ ID NO: 544320 - DNA, 19 bp, Mus musculus
  siRNA target sequence for AU040377 (NM_178748.3,542-560).
ggcactgaatatcaagtaa

SEQ ID NO: 544321 - DNA, 19 bp, Mus musculus
  siRNA target sequence for AU040377 (NM_178748.3,608-626).
cgacatgtgaccactttgt

SEQ ID NO: 544322 - DNA, 19 bp, Mus musculus
  siRNA target sequence for AU040377 (NM_178748.3,784-802).
gagctggaccataatccaa

SEQ ID NO: 544323 - DNA, 19 bp, Mus musculus
  siRNA target sequence for AU040377 (NM_178748.3,817-835).
ggactccatggttatcaaa

SEQ ID NO: 544324 - DNA, 19 bp, Mus musculus
  siRNA target sequence for AU040377 (NM_178748.3,837-855).
gccttgatccagataccaa

SEQ ID NO: 544325 - DNA, 19 bp, Mus musculus
  siRNA target sequence for AU040377 (NM_178748.3,987-1005).
ccggtgtgagtgaagatga

SEQ ID NO: 544326 - DNA, 19 bp, Mus musculus
  siRNA target sequence for AU040377 (NM_178748.3,988-1006).
cggtgtgagtgaagatgat

SEQ ID NO: 544327 - DNA, 19 bp, Mus musculus
  siRNA target sequence for AU040377 (NM_178748.3,1022-1040).
gaactggacctggatgtat

SEQ ID NO: 544328 - DNA, 19 bp, Mus musculus
  siRNA target sequence for AU040377 (NM_178748.3,1068-1086).
ctaccaaagttgggaataa

SEQ ID NO: 544329 - DNA, 19 bp, Mus musculus
  siRNA target sequence for AU040377 (NM_178748.3,1071-1089).
ccaaagttgggaataagaa

SEQ ID NO: 544330 - DNA, 19 bp, Mus musculus
  siRNA target sequence for AU040377 (NM_178748.3,1076-1094).
gttgggaataagaagttct

SEQ ID NO: 544331 - DNA, 19 bp, Mus musculus
  siRNA target sequence for AU040377 (NM_178748.3,1163-1181).
gcctctctccacgaaacta

SEQ ID NO: 544332 - DNA, 19 bp, Mus musculus
  siRNA target sequence for AU040377 (NM_178748.3,1320-1338).
gctcacgatgccattgcaa

SEQ ID NO: 544333 - DNA, 19 bp, Mus musculus
  siRNA target sequence for AU040377 (NM_178748.3,1608-1626).
gtgagaccaaaatcaaact

SEQ ID NO: 544334 - DNA, 19 bp, Mus musculus
  siRNA target sequence for AU040377 (NM_178748.3,1670-1688).
gggatgctgcagttgaata

SEQ ID NO: 544335 - DNA, 19 bp, Mus musculus
  siRNA target sequence for AU040377 (NM_178748.3,1671-1689).
ggatgctgcagttgaataa

SEQ ID NO: 544336 - DNA, 19 bp, Mus musculus
  siRNA target sequence for AU040377 (NM_178748.3,1672-1690).
gatgctgcagttgaataat

SEQ ID NO: 544337 - DNA, 19 bp, Mus musculus
  siRNA target sequence for AU040377 (NM_178748.3,1717-1735).
gggtcagtacagtaaaatt

SEQ ID NO: 544338 - DNA, 19 bp, Mus musculus
  siRNA target sequence for AU040377 (NM_178748.3,1718-1736).
ggtcagtacagtaaaatta

SEQ ID NO: 544339 - DNA, 19 bp, Mus musculus
  siRNA target sequence for AU040377 (NM_178748.3,1828-1846).
gcagtcactttctgttaat

SEQ ID NO: 544340 - DNA, 19 bp, Mus musculus
  siRNA target sequence for AU040377 (NM_178748.3,1864-1882).
gaggccctggccattagga

SEQ ID NO: 544341 - DNA, 19 bp, Mus musculus
  siRNA target sequence for AU040377 (NM_178748.3,1867-1885).
gccctggccattaggaaaa

SEQ ID NO: 544342 - DNA, 19 bp, Mus musculus
  siRNA target sequence for AU040377 (NM_178748.3,2159-2177).
ggggatggtgtccttttgt

SEQ ID NO: 544343 - DNA, 19 bp, Mus musculus
  siRNA target sequence for AU040377 (NM_178748.3,2160-2178).
gggatggtgtccttttgta

SEQ ID NO: 544344 - DNA, 19 bp, Mus musculus
  siRNA target sequence for AU040377 (NM_178748.3,2162-2180).
gatggtgtccttttgtaca

SEQ ID NO: 544345 - DNA, 19 bp, Mus musculus
  siRNA target sequence for AU040377 (NM_178748.3,2200-2218).
ggacttcctctccatcaat

SEQ ID NO: 544346 - DNA, 19 bp, Mus musculus
  siRNA target sequence for AU040377 (NM_178748.3,2201-2219).
gacttcctctccatcaata

SEQ ID NO: 544347 - DNA, 19 bp, Mus musculus
  siRNA target sequence for AU040377 (NM_178748.3,2323-2341).
gtctcgcacagcgaagaat

SEQ ID NO: 544348 - DNA, 19 bp, Mus musculus
  siRNA target sequence for AU040377 (NM_178748.3,2390-2408).
ggaggcttcacccagatta

SEQ ID NO: 544349 - DNA, 19 bp, Mus musculus
  siRNA target sequence for AU040377 (NM_178748.3,2391-2409).
gaggcttcacccagattaa

SEQ ID NO: 544350 - DNA, 19 bp, Mus musculus
  siRNA target sequence for AU040377 (NM_178748.3,2393-2411).
ggcttcacccagattaagt

SEQ ID NO: 544351 - DNA, 19 bp, Mus musculus
  siRNA target sequence for AU040377 (NM_178748.3,2398-2416).
cacccagattaagtgtaat

SEQ ID NO: 544352 - DNA, 19 bp, Mus musculus
  siRNA target sequence for AU040377 (NM_178748.3,2410-2428).
gtgtaatacggacattttt

SEQ ID NO: 544353 - DNA, 19 bp, Mus musculus
  siRNA target sequence for AU040377 (NM_178748.3,2433-2451).
gtggagtcccaaattacga

SEQ ID NO: 544354 - DNA, 19 bp, Mus musculus
  siRNA target sequence for AU040377 (NM_178748.3,2442-2460).
caaattacgatgatgtcaa

SEQ ID NO: 544355 - DNA, 19 bp, Mus musculus
  siRNA target sequence for AU040377 (NM_178748.3,2470-2488).
ggggatcctccatccattt

SEQ ID NO: 544356 - DNA, 19 bp, Mus musculus
  siRNA target sequence for AU040377 (NM_178748.3,2471-2489).
gggatcctccatccattta

SEQ ID NO: 544357 - DNA, 19 bp, Mus musculus
  siRNA target sequence for AU040377 (NM_178748.3,2473-2491).
gatcctccatccatttagt

SEQ ID NO: 544358 - DNA, 19 bp, Mus musculus
  siRNA target sequence for AU040377 (NM_178748.3,2490-2508).
gtgggagcattcagaagat

SEQ ID NO: 544359 - DNA, 19 bp, Mus musculus
  siRNA target sequence for AU040377 (NM_178748.3,2493-2511).
ggagcattcagaagatcat

SEQ ID NO: 544360 - DNA, 19 bp, Mus musculus
  siRNA target sequence for AU040377 (NM_178748.3,2531-2549).
catgtgaagcatgacttta

SEQ ID NO: 544361 - DNA, 19 bp, Mus musculus
  siRNA target sequence for AU040377 (NM_178748.3,2534-2552).
gtgaagcatgactttacat

SEQ ID NO: 544362 - DNA, 19 bp, Mus musculus
  siRNA target sequence for AU040377 (NM_178748.3,2672-2690).
ctgaactgccagaaagcta

SEQ ID NO: 544363 - DNA, 19 bp, Mus musculus
  siRNA target sequence for AU040377 (NM_178748.3,2730-2748).
gctacctgacgtatgacaa

SEQ ID NO: 544364 - DNA, 19 bp, Mus musculus
  siRNA target sequence for AU040377 (NM_178748.3,2739-2757).
cgtatgacaacccaaatat

SEQ ID NO: 544365 - DNA, 19 bp, Mus musculus
  siRNA target sequence for AU040377 (NM_178748.3,2770-2788).
gtctggatcgaggtcaaat

SEQ ID NO: 544366 - DNA, 19 bp, Mus musculus
  siRNA target sequence for AU040377 (NM_178748.3,2789-2807).
gcgttcatgaggtttaaga

SEQ ID NO: 544367 - DNA, 19 bp, Mus musculus
  siRNA target sequence for AU040377 (NM_178748.3,2791-2809).
gttcatgaggtttaagaca

SEQ ID NO: 544368 - DNA, 19 bp, Mus musculus
  siRNA target sequence for AU040377 (NM_178748.3,2888-2906).
cgggatggagccctgatat

SEQ ID NO: 544369 - DNA, 19 bp, Mus musculus
  siRNA target sequence for AU040377 (NM_178748.3,2889-2907).
gggatggagccctgatatt

SEQ ID NO: 544370 - DNA, 19 bp, Mus musculus
  siRNA target sequence for AU040377 (NM_178748.3,2999-3017).
ggccagtccgggaagatta

SEQ ID NO: 544371 - DNA, 19 bp, Mus musculus
  siRNA target sequence for AU040377 (NM_178748.3,3001-3019).
ccagtccgggaagattaca

SEQ ID NO: 544372 - DNA, 19 bp, Mus musculus
  siRNA target sequence for AU040377 (NM_178748.3,3057-3075).
gcttgatgcggcagcttaa

SEQ ID NO: 544373 - DNA, 19 bp, Mus musculus
  siRNA target sequence for AU040377 (NM_178748.3,3119-3137).
ctgcacacgaacagacaat

SEQ ID NO: 544374 - DNA, 19 bp, Mus musculus
  siRNA target sequence for AU040950 (NM_134065.2,520-538).
gaatacattttactctata

SEQ ID NO: 544375 - DNA, 19 bp, Mus musculus
  siRNA target sequence for AU040950 (NM_134065.2,691-709).
gagtggtctgacagaagaa

SEQ ID NO: 544376 - DNA, 19 bp, Mus musculus
  siRNA target sequence for AU040950 (NM_134065.2,739-757).
gtttatacagccaaggatt

SEQ ID NO: 544377 - DNA, 19 bp, Mus musculus
  siRNA target sequence for AU040950 (NM_134065.2,804-822).
gtccacgcggttctttgat

SEQ ID NO: 544378 - DNA, 19 bp, Mus musculus
  siRNA target sequence for AU040950 (NM_134065.2,806-824).
ccacgcggttctttgatgt

SEQ ID NO: 544379 - DNA, 19 bp, Mus musculus
  siRNA target sequence for B830002B15 (NM_181422.2,334-352).
ccagctgctgtctccatat

SEQ ID NO: 544380 - DNA, 19 bp, Mus musculus
  siRNA target sequence for B830002B15 (NM_181422.2,404-422).
cgagaacagggagctttat

SEQ ID NO: 544381 - DNA, 19 bp, Mus musculus
  siRNA target sequence for B830002B15 (NM_181422.2,439-457).
gggagcttgtggtatacat

SEQ ID NO: 544382 - DNA, 19 bp, Mus musculus
  siRNA target sequence for B830002B15 (NM_181422.2,444-462).
cttgtggtatacatagtgt

SEQ ID NO: 544383 - DNA, 19 bp, Mus musculus
  siRNA target sequence for B830002B15 (NM_181422.2,482-500).
gttgacctacggaatgaca

SEQ ID NO: 544384 - DNA, 19 bp, Mus musculus
  siRNA target sequence for B830002B15 (NM_181422.2,488-506).
ctacggaatgacaagttct

SEQ ID NO: 544385 - DNA, 19 bp, Mus musculus
  siRNA target sequence for B830002B15 (NM_181422.2,568-586).
gagtctccttccaaaccat

SEQ ID NO: 544386 - DNA, 19 bp, Mus musculus
  siRNA target sequence for B830002B15 (NM_181422.2,682-700).
gctcccactccttcatcta

SEQ ID NO: 544387 - DNA, 19 bp, Mus musculus
  siRNA target sequence for B830002B15 (NM_181422.2,686-704).
ccactccttcatctactat

SEQ ID NO: 544388 - DNA, 19 bp, Mus musculus
  siRNA target sequence for B830002B15 (NM_181422.2,763-781).
gtgtggttcatgaagactt

SEQ ID NO: 544389 - DNA, 19 bp, Mus musculus
  siRNA target sequence for B830002B15 (NM_181422.2,783-801).
cgggaggacattttgaact

SEQ ID NO: 544390 - DNA, 19 bp, Mus musculus
  siRNA target sequence for B830002B15 (NM_181422.2,812-830).
gtactcgccggacaaagaa

SEQ ID NO: 544391 - DNA, 19 bp, Mus musculus
  siRNA target sequence for B830002B15 (NM_181422.2,817-835).
cgccggacaaagaagatca

SEQ ID NO: 544392 - DNA, 19 bp, Mus musculus
  siRNA target sequence for B830002B15 (NM_181422.2,1023-1041).
ggcactcgggtggtcttta

SEQ ID NO: 544393 - DNA, 19 bp, Mus musculus
  siRNA target sequence for B830002B15 (NM_181422.2,1024-1042).
gcactcgggtggtctttat

SEQ ID NO: 544394 - DNA, 19 bp, Mus musculus
  siRNA target sequence for B830002B15 (NM_181422.2,1027-1045).
ctcgggtggtctttatcga

SEQ ID NO: 544395 - DNA, 19 bp, Mus musculus
  siRNA target sequence for B830002B15 (NM_181422.2,1043-1061).
cgacttctccgtctacaat

SEQ ID NO: 544396 - DNA, 19 bp, Mus musculus
  siRNA target sequence for B830002B15 (NM_181422.2,1135-1153).
ggcagatccgcacagttaa

SEQ ID NO: 544397 - DNA, 19 bp, Mus musculus
  siRNA target sequence for B830002B15 (NM_181422.2,1280-1298).
cagcagcgtctggaacatt

SEQ ID NO: 544398 - DNA, 19 bp, Mus musculus
  siRNA target sequence for B830002B15 (NM_181422.2,1370-1388).
ccgactgatgggaaagctt

SEQ ID NO: 544399 - DNA, 19 bp, Mus musculus
  siRNA target sequence for B830002B15 (NM_181422.2,1460-1478).
cgcggtcaaccttttcttt

SEQ ID NO: 544400 - DNA, 19 bp, Mus musculus
  siRNA target sequence for B830002B15 (NM_181422.2,1484-1502).
gatcaagatattcaagtat

SEQ ID NO: 544401 - DNA, 19 bp, Mus musculus
  siRNA target sequence for B830002B15 (NM_181422.2,1661-1679).
cgtcaagtgcattttcact

SEQ ID NO: 544402 - DNA, 19 bp, Mus musculus
  siRNA target sequence for B830002B15 (NM_181422.2,1678-1696).
ctcagttccggataatcct

SEQ ID NO: 544403 - DNA, 19 bp, Mus musculus
  siRNA target sequence for B830002B15 (NM_181422.2,1807-1825).
ccatcatcaacgacacata

SEQ ID NO: 544404 - DNA, 19 bp, Mus musculus
  siRNA target sequence for B830002B15 (NM_181422.2,1928-1946).
gaaagagcgggtttctgat

SEQ ID NO: 544405 - DNA, 19 bp, Mus musculus
  siRNA target sequence for BC005662 (NM_145376.3,414-432).
cagcccctggccttatgga

SEQ ID NO: 544406 - DNA, 19 bp, Mus musculus
  siRNA target sequence for BC005662 (NM_145376.3,598-616).
ccatgtcctccattgtgat

SEQ ID NO: 544407 - DNA, 19 bp, Mus musculus
  siRNA target sequence for BC005662 (NM_145376.3,646-664).
ggggaactctgataagata

SEQ ID NO: 544408 - DNA, 19 bp, Mus musculus
  siRNA target sequence for BC005662 (NM_145376.3,648-666).
ggaactctgataagataca

SEQ ID NO: 544409 - DNA, 19 bp, Mus musculus
  siRNA target sequence for BC005662 (NM_145376.3,649-667).
gaactctgataagatacat

SEQ ID NO: 544410 - DNA, 19 bp, Mus musculus
  siRNA target sequence for BC005662 (NM_145376.3,736-754).
gggcacagtcgaatggaaa

SEQ ID NO: 544411 - DNA, 19 bp, Mus musculus
  siRNA target sequence for BC005662 (NM_145376.3,750-768).
ggaaagtggcctcagataa

SEQ ID NO: 544412 - DNA, 19 bp, Mus musculus
  siRNA target sequence for BC005662 (NM_145376.3,758-776).
gcctcagataatgattttt

SEQ ID NO: 544413 - DNA, 19 bp, Mus musculus
  siRNA target sequence for BC005662 (NM_145376.3,863-881).
gctacgctacccaaacaaa

SEQ ID NO: 544414 - DNA, 19 bp, Mus musculus
  siRNA target sequence for BC005662 (NM_145376.3,909-927).
ggacctggagcgttgaaaa

SEQ ID NO: 544415 - DNA, 19 bp, Mus musculus
  siRNA target sequence for BC005662 (NM_145376.3,910-928).
gacctggagcgttgaaaat

SEQ ID NO: 544416 - DNA, 19 bp, Mus musculus
  siRNA target sequence for BC005662 (NM_145376.3,913-931).
ctggagcgttgaaaatcct

SEQ ID NO: 544417 - DNA, 19 bp, Mus musculus
  siRNA target sequence for BC005662 (NM_145376.3,938-956).
cactctgtgccagtttcaa

SEQ ID NO: 544418 - DNA, 19 bp, Mus musculus
  siRNA target sequence for BC005662 (NM_145376.3,940-958).
ctctgtgccagtttcaaaa

SEQ ID NO: 544419 - DNA, 19 bp, Mus musculus
  siRNA target sequence for BC005662 (NM_145376.3,1059-1077).
gccctgggtgtctcagtaa

SEQ ID NO: 544420 - DNA, 19 bp, Mus musculus
  siRNA target sequence for BC005662 (NM_145376.3,1068-1086).
gtctcagtaaccgactata

SEQ ID NO: 544421 - DNA, 19 bp, Mus musculus
  siRNA target sequence for BC005662 (NM_145376.3,1070-1088).
ctcagtaaccgactataca

SEQ ID NO: 544422 - DNA, 19 bp, Mus musculus
  siRNA target sequence for BC005662 (NM_145376.3,1072-1090).
cagtaaccgactatacatt

SEQ ID NO: 544423 - DNA, 19 bp, Mus musculus
  siRNA target sequence for BC005662 (NM_145376.3,1172-1190).
gaggggcctcggactaaaa

SEQ ID NO: 544424 - DNA, 19 bp, Mus musculus
  siRNA target sequence for BC005662 (NM_145376.3,1175-1193).
gggcctcggactaaaacca

SEQ ID NO: 544425 - DNA, 19 bp, Mus musculus
  siRNA target sequence for BC005662 (NM_145376.3,1227-1245).
gaaagtgcgaggatgaaga

SEQ ID NO: 544426 - DNA, 19 bp, Mus musculus
  siRNA target sequence for BC005662 (NM_145376.3,1305-1323).
gcactggaagacatgttct

SEQ ID NO: 544427 - DNA, 19 bp, Mus musculus
  siRNA target sequence for BC005662 (NM_145376.3,1352-1370).
gattgaccttcgtgaatat

SEQ ID NO: 544428 - DNA, 19 bp, Mus musculus
  siRNA target sequence for BC005662 (NM_145376.3,1417-1435).
ccatccagctggcattcaa

SEQ ID NO: 544429 - DNA, 19 bp, Mus musculus
  siRNA target sequence for BC005662 (NM_145376.3,1422-1440).
cagctggcattcaagatgt

SEQ ID NO: 544430 - DNA, 19 bp, Mus musculus
  siRNA target sequence for BC005662 (NM_145376.3,1496-1514).
gactgcactgggtgtatca

SEQ ID NO: 544431 - DNA, 19 bp, Mus musculus
  siRNA target sequence for BC005662 (NM_145376.3,1503-1521).
ctgggtgtatcagaattaa

SEQ ID NO: 544432 - DNA, 19 bp, Mus musculus
  siRNA target sequence for BC005662 (NM_145376.3,1505-1523).
gggtgtatcagaattaaca

SEQ ID NO: 544433 - DNA, 19 bp, Mus musculus
  siRNA target sequence for BC005662 (NM_145376.3,1636-1654).
ctgatcagacacatttcga

SEQ ID NO: 544434 - DNA, 19 bp, Mus musculus
  siRNA target sequence for BC020077 (NM_145549.1,750-768).
catgccttactgtcaacaa

SEQ ID NO: 544435 - DNA, 19 bp, Mus musculus
  siRNA target sequence for BC020077 (NM_145549.1,753-771).
gccttactgtcaacaacta

SEQ ID NO: 544436 - DNA, 19 bp, Mus musculus
  siRNA target sequence for BC020077 (NM_145549.1,759-777).
ctgtcaacaactagaaagt

SEQ ID NO: 544437 - DNA, 19 bp, Mus musculus
  siRNA target sequence for BC020077 (NM_145549.1,803-821).
gaccatgagcgctaacagt

SEQ ID NO: 544438 - DNA, 19 bp, Mus musculus
  siRNA target sequence for BC020077 (NM_145549.1,805-823).
ccatgagcgctaacagtaa

SEQ ID NO: 544439 - DNA, 19 bp, Mus musculus
  siRNA target sequence for BC020077 (NM_145549.1,809-827).
gagcgctaacagtaaccaa

SEQ ID NO: 544440 - DNA, 19 bp, Mus musculus
  siRNA target sequence for BC020077 (NM_145549.1,919-937).
gtcatcagtacaaaatgca

SEQ ID NO: 544441 - DNA, 19 bp, Mus musculus
  siRNA target sequence for BC020077 (NM_145549.1,967-985).
caattaagccgttatatct

SEQ ID NO: 544442 - DNA, 19 bp, Mus musculus
  siRNA target sequence for BC020077 (NM_145549.1,990-1008).
caagtggaaggaaaacgtt

SEQ ID NO: 544443 - DNA, 19 bp, Mus musculus
  siRNA target sequence for BC020077 (NM_145549.1,1021-1039).
cggttgacacagccttata

SEQ ID NO: 544444 - DNA, 19 bp, Mus musculus
  siRNA target sequence for BC020077 (NM_145549.1,1032-1050).
gccttatatattcttaaga

SEQ ID NO: 544445 - DNA, 19 bp, Mus musculus
  siRNA target sequence for BC020077 (NM_145549.1,1084-1102).
gctttactgaactacgaaa

SEQ ID NO: 544446 - DNA, 19 bp, Mus musculus
  siRNA target sequence for BC020077 (NM_145549.1,1902-1920).
gaagaatggatatattgtt

SEQ ID NO: 544447 - DNA, 19 bp, Mus musculus
  siRNA target sequence for BC029109 (NM_153573.1,153-171).
ctgagccagaagtgaaaat

SEQ ID NO: 544448 - DNA, 19 bp, Mus musculus
  siRNA target sequence for BC029109 (NM_153573.1,238-256).
ctacgaaggctatttagaa

SEQ ID NO: 544449 - DNA, 19 bp, Mus musculus
  siRNA target sequence for BC029109 (NM_153573.1,260-278).
gacggctccctgtttcatt

SEQ ID NO: 544450 - DNA, 19 bp, Mus musculus
  siRNA target sequence for BC029109 (NM_153573.1,271-289).
gtttcattccactcacaaa

SEQ ID NO: 544451 - DNA, 19 bp, Mus musculus
  siRNA target sequence for BC029109 (NM_153573.1,324-342).
gcatactggaggttctcaa

SEQ ID NO: 544452 - DNA, 19 bp, Mus musculus
  siRNA target sequence for BC029109 (NM_153573.1,456-474).
cactgatattcaacattga

SEQ ID NO: 544453 - DNA, 19 bp, Mus musculus
  siRNA target sequence for BC029109 (NM_153573.1,473-491).
gacctcctggaaattcgaa

SEQ ID NO: 544454 - DNA, 19 bp, Mus musculus
  siRNA target sequence for BC029109 (NM_153573.1,506-524).
cacgagtcgtttcaagaaa

SEQ ID NO: 544455 - DNA, 19 bp, Mus musculus
  siRNA target sequence for BC029109 (NM_153573.1,552-570).
ctaagcatgaggttaaagt

SEQ ID NO: 544456 - DNA, 19 bp, Mus musculus
  siRNA target sequence for BC034076 (NM_177649.3,227-245).
gatgggcaccgtgaagaaa

SEQ ID NO: 544457 - DNA, 19 bp, Mus musculus
  siRNA target sequence for BC034076 (NM_177649.3,595-613).
gaatggctactctcaacat

SEQ ID NO: 544458 - DNA, 19 bp, Mus musculus
  siRNA target sequence for BC034076 (NM_177649.3,749-767).
gagcggagaggccttaaat

SEQ ID NO: 544459 - DNA, 19 bp, Mus musculus
  siRNA target sequence for BC034076 (NM_177649.3,878-896).
cctgctcgtggacatgaaa

SEQ ID NO: 544460 - DNA, 19 bp, Mus musculus
  siRNA target sequence for BC034076 (NM_177649.3,882-900).
ctcgtggacatgaaaatca

SEQ ID NO: 544461 - DNA, 19 bp, Mus musculus
  siRNA target sequence for BC034076 (NM_177649.3,1101-1119).
catcttcgggcctcttcta

SEQ ID NO: 544462 - DNA, 19 bp, Mus musculus
  siRNA target sequence for BC034076 (NM_177649.3,1104-1122).
cttcgggcctcttctatca

SEQ ID NO: 544463 - DNA, 19 bp, Mus musculus
  siRNA target sequence for BC034076 (NM_177649.3,1224-1242).
gatgtgcagggagcatttt

SEQ ID NO: 544464 - DNA, 19 bp, Mus musculus
  siRNA target sequence for BC034076 (NM_177649.3,1352-1370).
ggaccacaggaattgtaga

SEQ ID NO: 544465 - DNA, 19 bp, Mus musculus
  siRNA target sequence for BC034076 (NM_177649.3,1355-1373).
ccacaggaattgtagagat

SEQ ID NO: 544466 - DNA, 19 bp, Mus musculus
  siRNA target sequence for BC034076 (NM_177649.3,1427-1445).
gaacctgcttggatcctat

SEQ ID NO: 544467 - DNA, 19 bp, Mus musculus
  siRNA target sequence for BC034076 (NM_177649.3,1532-1550).
ggatgagtgtcactacaat

SEQ ID NO: 544468 - DNA, 19 bp, Mus musculus
  siRNA target sequence for BC034076 (NM_177649.3,1764-1782).
gaacggaaccgtcaaaaca

SEQ ID NO: 544469 - DNA, 19 bp, Mus musculus
  siRNA target sequence for BC034076 (NM_177649.3,1767-1785).
cggaaccgtcaaaacatta

SEQ ID NO: 544470 - DNA, 19 bp, Mus musculus
  siRNA target sequence for BC034076 (NM_177649.3,1772-1790).
ccgtcaaaacattaccatt

SEQ ID NO: 544471 - DNA, 19 bp, Mus musculus
  siRNA target sequence for BC034076 (NM_177649.3,2006-2024).
cacagagggtagctactat

SEQ ID NO: 544472 - DNA, 19 bp, Mus musculus
  siRNA target sequence for BC034076 (NM_177649.3,2506-2524).
gcgtctacatcctgctaat

SEQ ID NO: 544473 - DNA, 19 bp, Mus musculus
  siRNA target sequence for BC037527 (NM_172259.1,119-137).
ggatgctcccgtgaagaaa

SEQ ID NO: 544474 - DNA, 19 bp, Mus musculus
  siRNA target sequence for BC037527 (NM_172259.1,222-240).
ccccaggcacctgcaaaat

SEQ ID NO: 544475 - DNA, 19 bp, Mus musculus
  siRNA target sequence for BC037527 (NM_172259.1,455-473).
gtcccgacgtgtagacttt

SEQ ID NO: 544476 - DNA, 19 bp, Mus musculus
  siRNA target sequence for BC037527 (NM_172259.1,512-530).
ccgggaccaaggcacatat

SEQ ID NO: 544477 - DNA, 19 bp, Mus musculus
  siRNA target sequence for BC037527 (NM_172259.1,514-532).
gggaccaaggcacatatga

SEQ ID NO: 544478 - DNA, 19 bp, Mus musculus
  siRNA target sequence for BC037527 (NM_172259.1,592-610).
cagagctcagacatgttct

SEQ ID NO: 544479 - DNA, 19 bp, Mus musculus
  siRNA target sequence for BC037527 (NM_172259.1,594-612).
gagctcagacatgttctta

SEQ ID NO: 544480 - DNA, 19 bp, Mus musculus
  siRNA target sequence for Bmp1 (NM_009755.1,134-152).
ccggagctcctcaactaca

SEQ ID NO: 544481 - DNA, 19 bp, Mus musculus
  siRNA target sequence for Bmp1 (NM_009755.1,135-153).
cggagctcctcaactacaa

SEQ ID NO: 544482 - DNA, 19 bp, Mus musculus
  siRNA target sequence for Bmp1 (NM_009755.1,136-154).
ggagctcctcaactacaaa

SEQ ID NO: 544483 - DNA, 19 bp, Mus musculus
  siRNA target sequence for Bmp1 (NM_009755.1,258-276).
ccgaaggccatccatcaaa

SEQ ID NO: 544484 - DNA, 19 bp, Mus musculus
  siRNA target sequence for Bmp1 (NM_009755.1,273-291).
caaagctgcaggaaactct

SEQ ID NO: 544485 - DNA, 19 bp, Mus musculus
  siRNA target sequence for Bmp1 (NM_009755.1,427-445).
gtgattggagggaatttca

SEQ ID NO: 544486 - DNA, 19 bp, Mus musculus
  siRNA target sequence for Bmp1 (NM_009755.1,719-737).
ctattgtacgcgagaacat

SEQ ID NO: 544487 - DNA, 19 bp, Mus musculus
  siRNA target sequence for Bmp1 (NM_009755.1,803-821).
cctatgactttgacagtat

SEQ ID NO: 544488 - DNA, 19 bp, Mus musculus
  siRNA target sequence for Bmp1 (NM_009755.1,867-885).
caccattgttcccaagtat

SEQ ID NO: 544489 - DNA, 19 bp, Mus musculus
  siRNA target sequence for Bmp1 (NM_009755.1,869-887).
ccattgttcccaagtatga

SEQ ID NO: 544490 - DNA, 19 bp, Mus musculus
  siRNA target sequence for Bmp1 (NM_009755.1,1079-1097).
cacctggggagaagattat

SEQ ID NO: 544491 - DNA, 19 bp, Mus musculus
  siRNA target sequence for Bmp1 (NM_009755.1,1087-1105).
gagaagattattctaaact

SEQ ID NO: 544492 - DNA, 19 bp, Mus musculus
  siRNA target sequence for Bmp1 (NM_009755.1,1134-1152).
cctgtgctggtatgactat

SEQ ID NO: 544493 - DNA, 19 bp, Mus musculus
  siRNA target sequence for Bmp1 (NM_009755.1,1319-1337).
gcggtggcgatgtgaaaaa

SEQ ID NO: 544494 - DNA, 19 bp, Mus musculus
  siRNA target sequence for Bmp1 (NM_009755.1,1322-1340).
gtggcgatgtgaaaaagga

SEQ ID NO: 544495 - DNA, 19 bp, Mus musculus
  siRNA target sequence for Bmp1 (NM_009755.1,1324-1342).
ggcgatgtgaaaaaggata

SEQ ID NO: 544496 - DNA, 19 bp, Mus musculus
  siRNA target sequence for Bmp1 (NM_009755.1,1325-1343).
gcgatgtgaaaaaggataa

SEQ ID NO: 544497 - DNA, 19 bp, Mus musculus
  siRNA target sequence for Bmp1 (NM_009755.1,1361-1379).
ccaattacccagacgatta

SEQ ID NO: 544498 - DNA, 19 bp, Mus musculus
  siRNA target sequence for Bmp1 (NM_009755.1,1362-1380).
caattacccagacgattat

SEQ ID NO: 544499 - DNA, 19 bp, Mus musculus
  siRNA target sequence for Bmp1 (NM_009755.1,1607-1625).
ctgacgggtccattaacaa

SEQ ID NO: 544500 - DNA, 19 bp, Mus musculus
  siRNA target sequence for Bmp1 (NM_009755.1,1637-1655).
cagtcaactttttcaaaga

SEQ ID NO: 544501 - DNA, 19 bp, Mus musculus
  siRNA target sequence for Bmp1 (NM_009755.1,1896-1914).
ccgtatctccctgcaattt

SEQ ID NO: 544502 - DNA, 19 bp, Mus musculus
  siRNA target sequence for Bmp1 (NM_009755.1,1898-1916).
gtatctccctgcaatttga

SEQ ID NO: 544503 - DNA, 19 bp, Mus musculus
  siRNA target sequence for Bmp1 (NM_009755.1,1923-1941).
cgagactgagggcaatgat

SEQ ID NO: 544504 - DNA, 19 bp, Mus musculus
  siRNA target sequence for Bmp1 (NM_009755.1,1976-1994).
gactcacggcggactctaa

SEQ ID NO: 544505 - DNA, 19 bp, Mus musculus
  siRNA target sequence for Bmp1 (NM_009755.1,2037-2055).
cacttcccagtacaacaat

SEQ ID NO: 544506 - DNA, 19 bp, Mus musculus
  siRNA target sequence for Bmp1 (NM_009755.1,2039-2057).
cttcccagtacaacaatat

SEQ ID NO: 544507 - DNA, 19 bp, Mus musculus
  siRNA target sequence for Bmp1 (NM_009755.1,2067-2085).
gttcaagtctgacaatact

SEQ ID NO: 544508 - DNA, 19 bp, Mus musculus
  siRNA target sequence for Bmp1 (NM_009755.1,2214-2232).
cgtccttcacgacaacaaa

SEQ ID NO: 544509 - DNA, 19 bp, Mus musculus
  siRNA target sequence for Bmp1 (NM_009755.1,2217-2235).
ccttcacgacaacaaacat

SEQ ID NO: 544510 - DNA, 19 bp, Mus musculus
  siRNA target sequence for Bmp1 (NM_009755.1,2357-2375).
ctgggcaccgggtaaagct

SEQ ID NO: 544511 - DNA, 19 bp, Mus musculus
  siRNA target sequence for Bmp1 (NM_009755.1,2474-2492).
gattctgtggcagtaagaa

SEQ ID NO: 544512 - DNA, 19 bp, Mus musculus
  siRNA target sequence for Bmp1 (NM_009755.1,2513-2531).
caggcaaccgcatgttctt

SEQ ID NO: 544513 - DNA, 19 bp, Mus musculus
  siRNA target sequence for Bmp1 (NM_009755.1,2552-2570).
cggtacagaggaaaggttt

SEQ ID NO: 544514 - DNA, 19 bp, Mus musculus
  siRNA target sequence for Bmp1 (NM_009755.1,2644-2662).
gcccagttcggcgataaca

SEQ ID NO: 544515 - DNA, 19 bp, Mus musculus
  siRNA target sequence for Bmp1 (NM_009755.1,2775-2793).
ctacatagagctctttgat

SEQ ID NO: 544516 - DNA, 19 bp, Mus musculus
  siRNA target sequence for Bmp1 (NM_009755.1,2840-2858).
ggcctcccgaggaagtgta

SEQ ID NO: 544517 - DNA, 19 bp, Mus musculus
  siRNA target sequence for Bmp1 (NM_009755.1,2856-2874).
gtactcggctggagattct

SEQ ID NO: 544518 - DNA, 19 bp, Mus musculus
  siRNA target sequence for C1qr1 (NM_010740.1,213-231).
ggggactgcctgctataca

SEQ ID NO: 544519 - DNA, 19 bp, Mus musculus
  siRNA target sequence for C1qr1 (NM_010740.1,265-283).
cagcatcgctgcaatgaga

SEQ ID NO: 544520 - DNA, 19 bp, Mus musculus
  siRNA target sequence for C1qr1 (NM_010740.1,379-397).
gcaaagatgggcaaattct

SEQ ID NO: 544521 - DNA, 19 bp, Mus musculus
  siRNA target sequence for C1qr1 (NM_010740.1,412-430).
cgagagaagggcaactgta

SEQ ID NO: 544522 - DNA, 19 bp, Mus musculus
  siRNA target sequence for C1qr1 (NM_010740.1,513-531).
caagagctcctgtatcttt

SEQ ID NO: 544523 - DNA, 19 bp, Mus musculus
  siRNA target sequence for C1qr1 (NM_010740.1,654-672).
gtgcaagttcaacttcaaa

SEQ ID NO: 544524 - DNA, 19 bp, Mus musculus
  siRNA target sequence for C1qr1 (NM_010740.1,809-827).
gtgaaacccactatttcct

SEQ ID NO: 544525 - DNA, 19 bp, Mus musculus
  siRNA target sequence for C1qr1 (NM_010740.1,815-833).
cccactatttcctatgcaa

SEQ ID NO: 544526 - DNA, 19 bp, Mus musculus
  siRNA target sequence for C1qr1 (NM_010740.1,816-834).
ccactatttcctatgcaat

SEQ ID NO: 544527 - DNA, 19 bp, Mus musculus
  siRNA target sequence for C1qr1 (NM_010740.1,819-837).
ctatttcctatgcaatgaa

SEQ ID NO: 544528 - DNA, 19 bp, Mus musculus
  siRNA target sequence for C1qr1 (NM_010740.1,986-1004).
gactgctggatgatctagt

SEQ ID NO: 544529 - DNA, 19 bp, Mus musculus
  siRNA target sequence for C1qr1 (NM_010740.1,993-1011).
ggatgatctagtaacttgt

SEQ ID NO: 544530 - DNA, 19 bp, Mus musculus
  siRNA target sequence for C1qr1 (NM_010740.1,1067-1085).
ctgtaccactcagtgaaaa

SEQ ID NO: 544531 - DNA, 19 bp, Mus musculus
  siRNA target sequence for C1qr1 (NM_010740.1,1200-1218).
gagcttccactgtgaatgt

SEQ ID NO: 544532 - DNA, 19 bp, Mus musculus
  siRNA target sequence for C1qr1 (NM_010740.1,1300-1318).
gcccaaggctgcatcaaca

SEQ ID NO: 544533 - DNA, 19 bp, Mus musculus
  siRNA target sequence for C1qr1 (NM_010740.1,1340-1358).
cctgtaaagagggctatat

SEQ ID NO: 544534 - DNA, 19 bp, Mus musculus
  siRNA target sequence for C1qr1 (NM_010740.1,1343-1361).
gtaaagagggctatattgt

SEQ ID NO: 544535 - DNA, 19 bp, Mus musculus
  siRNA target sequence for C1qr1 (NM_010740.1,1408-1426).
gacgcaaggggcaatccat

SEQ ID NO: 544536 - DNA, 19 bp, Mus musculus
  siRNA target sequence for C1qr1 (NM_010740.1,1521-1539).
cactgtgttttctgaacta

SEQ ID NO: 544537 - DNA, 19 bp, Mus musculus
  siRNA target sequence for C1qr1 (NM_010740.1,1661-1679).
gtctcttcgtccaatcaga

SEQ ID NO: 544538 - DNA, 19 bp, Mus musculus
  siRNA target sequence for C1qr1 (NM_010740.1,1663-1681).
ctcttcgtccaatcagata

SEQ ID NO: 544539 - DNA, 19 bp, Mus musculus
  siRNA target sequence for C1qr1 (NM_010740.1,1665-1683).
cttcgtccaatcagatatt

SEQ ID NO: 544540 - DNA, 19 bp, Mus musculus
  siRNA target sequence for C1qr1 (NM_010740.1,1711-1729).
gaaatccctagtgaagtat

SEQ ID NO: 544541 - DNA, 19 bp, Mus musculus
  siRNA target sequence for C1qr1 (NM_010740.1,1716-1734).
ccctagtgaagtatctgat

SEQ ID NO: 544542 - DNA, 19 bp, Mus musculus
  siRNA target sequence for C1qr1 (NM_010740.1,1779-1797).
cagcaagccgacacatgaa

SEQ ID NO: 544543 - DNA, 19 bp, Mus musculus
  siRNA target sequence for C1qr1 (NM_010740.1,1781-1799).
gcaagccgacacatgaaga

SEQ ID NO: 544544 - DNA, 19 bp, Mus musculus
  siRNA target sequence for C1qr1 (NM_010740.1,1891-1909).
ctggccctagggattctca

SEQ ID NO: 544545 - DNA, 19 bp, Mus musculus
  siRNA target sequence for C1qr1 (NM_010740.1,1893-1911).
ggccctagggattctcatt

SEQ ID NO: 544546 - DNA, 19 bp, Mus musculus
  siRNA target sequence for C1qr1 (NM_010740.1,1966-1984).
gcagccgacagctattcct

SEQ ID NO: 544547 - DNA, 19 bp, Mus musculus
  siRNA target sequence for C1r (NM_023143.1,761-779).
gagccctcaggctatgtct

SEQ ID NO: 544548 - DNA, 19 bp, Mus musculus
  siRNA target sequence for C1r (NM_023143.1,812-830).
gatctacgctgcaactaca

SEQ ID NO: 544549 - DNA, 19 bp, Mus musculus
  siRNA target sequence for C1r (NM_023143.1,868-886).
gttcctggatccttttgaa

SEQ ID NO: 544550 - DNA, 19 bp, Mus musculus
  siRNA target sequence for C1r (NM_023143.1,1779-1797).
cagtccgtagggtcatcat

SEQ ID NO: 544551 - DNA, 19 bp, Mus musculus
  siRNA target sequence for C1s (NM_144938.1,595-613).
cgggctttgcagcatacta

SEQ ID NO: 544552 - DNA, 19 bp, Mus musculus
  siRNA target sequence for C1s (NM_144938.1,597-615).
ggctttgcagcatactaca

SEQ ID NO: 544553 - DNA, 19 bp, Mus musculus
  siRNA target sequence for C1s (NM_144938.1,929-947).
gaactgccctgacagttta

SEQ ID NO: 544554 - DNA, 19 bp, Mus musculus
  siRNA target sequence for C1s (NM_144938.1,932-950).
ctgccctgacagtttaact

SEQ ID NO: 544555 - DNA, 19 bp, Mus musculus
  siRNA target sequence for C1s (NM_144938.1,934-952).
gccctgacagtttaacttt

SEQ ID NO: 544556 - DNA, 19 bp, Mus musculus
  siRNA target sequence for C1s (NM_144938.1,935-953).
ccctgacagtttaactttt

SEQ ID NO: 544557 - DNA, 19 bp, Mus musculus
  siRNA target sequence for C1s (NM_144938.1,1033-1051).
ctctcggcattgtctttca

SEQ ID NO: 544558 - DNA, 19 bp, Mus musculus
  siRNA target sequence for C1s (NM_144938.1,1037-1055).
cggcattgtctttcaaact

SEQ ID NO: 544559 - DNA, 19 bp, Mus musculus
  siRNA target sequence for C1s (NM_144938.1,1221-1239).
ggacatgttagctctactt

SEQ ID NO: 544560 - DNA, 19 bp, Mus musculus
  siRNA target sequence for C1s (NM_144938.1,1224-1242).
catgttagctctacttcat

SEQ ID NO: 544561 - DNA, 19 bp, Mus musculus
  siRNA target sequence for C1s (NM_144938.1,1227-1245).
gttagctctacttcatact

SEQ ID NO: 544562 - DNA, 19 bp, Mus musculus
  siRNA target sequence for C1s (NM_144938.1,1273-1291).
ggagcaactccggtctaaa

SEQ ID NO: 544563 - DNA, 19 bp, Mus musculus
  siRNA target sequence for C1s (NM_144938.1,1274-1292).
gagcaactccggtctaaaa

SEQ ID NO: 544564 - DNA, 19 bp, Mus musculus
  siRNA target sequence for C1s (NM_144938.1,1280-1298).
ctccggtctaaaatgtcaa

SEQ ID NO: 544565 - DNA, 19 bp, Mus musculus
  siRNA target sequence for C1s (NM_144938.1,1433-1451).
gtatcgatgtgctgcaaat

SEQ ID NO: 544566 - DNA, 19 bp, Mus musculus
  siRNA target sequence for C1s (NM_144938.1,1560-1578).
cctgcaaagattgaaaatt

SEQ ID NO: 544567 - DNA, 19 bp, Mus musculus
  siRNA target sequence for C1s (NM_144938.1,1585-1603).
ggcaagtcttctttaatca

SEQ ID NO: 544568 - DNA, 19 bp, Mus musculus
  siRNA target sequence for C1s (NM_144938.1,2211-2229).
gggacttatggggtttaca

SEQ ID NO: 544569 - DNA, 19 bp, Mus musculus
  siRNA target sequence for C1s (NM_144938.1,2213-2231).
gacttatggggtttacaca

SEQ ID NO: 544570 - DNA, 19 bp, Mus musculus
  siRNA target sequence for C1sb (NM_173864.2,437-455).
ctgccatagacgtaaacga

SEQ ID NO: 544571 - DNA, 19 bp, Mus musculus
  siRNA target sequence for C1sb (NM_173864.2,439-457).
gccatagacgtaaacgaat

SEQ ID NO: 544572 - DNA, 19 bp, Mus musculus
  siRNA target sequence for C1sb (NM_173864.2,704-722).
cgatgcagagagaagattt

SEQ ID NO: 544573 - DNA, 19 bp, Mus musculus
  siRNA target sequence for C1sb (NM_173864.2,943-961).
gaaagcactgccaattcta

SEQ ID NO: 544574 - DNA, 19 bp, Mus musculus
  siRNA target sequence for C1sb (NM_173864.2,1432-1450).
gctggtggggctcttatta

SEQ ID NO: 544575 - DNA, 19 bp, Mus musculus
  siRNA target sequence for C1sb (NM_173864.2,1433-1451).
ctggtggggctcttattaa

SEQ ID NO: 544576 - DNA, 19 bp, Mus musculus
  siRNA target sequence for C1sb (NM_173864.2,1494-1512).
ctccgacccttcaatgtat

SEQ ID NO: 544577 - DNA, 19 bp, Mus musculus
  siRNA target sequence for C1sb (NM_173864.2,1515-1533).
cgggatcacggctttgaga

SEQ ID NO: 544578 - DNA, 19 bp, Mus musculus
  siRNA target sequence for C1sb (NM_173864.2,1566-1584).
caccaagcgtgtgattatt

SEQ ID NO: 544579 - DNA, 19 bp, Mus musculus
  siRNA target sequence for C1sb (NM_173864.2,1568-1586).
ccaagcgtgtgattattca

SEQ ID NO: 544580 - DNA, 19 bp, Mus musculus
  siRNA target sequence for C1sb (NM_173864.2,1611-1629).
cctaaacccacggacaaat

SEQ ID NO: 544581 - DNA, 19 bp, Mus musculus
  siRNA target sequence for C1sb (NM_173864.2,1612-1630).
ctaaacccacggacaaatt

SEQ ID NO: 544582 - DNA, 19 bp, Mus musculus
  siRNA target sequence for C630015B17Rik (NM_178685.3,187-205).
ggcacccgtgcctggatat

SEQ ID NO: 544583 - DNA, 19 bp, Mus musculus
  siRNA target sequence for C630015B17Rik (NM_178685.3,244-262).
ggaacctgccgcatgtttt

SEQ ID NO: 544584 - DNA, 19 bp, Mus musculus
  siRNA target sequence for C630015B17Rik (NM_178685.3,245-263).
gaacctgccgcatgttttt

SEQ ID NO: 544585 - DNA, 19 bp, Mus musculus
  siRNA target sequence for C630015B17Rik (NM_178685.3,253-271).
cgcatgtttttctgctttt

SEQ ID NO: 544586 - DNA, 19 bp, Mus musculus
  siRNA target sequence for C630015B17Rik (NM_178685.3,275-293).
cttcgtgggacccttcaat

SEQ ID NO: 544587 - DNA, 19 bp, Mus musculus
  siRNA target sequence for C630015B17Rik (NM_178685.3,313-331).
gtgctaccgagcttctgta

SEQ ID NO: 544588 - DNA, 19 bp, Mus musculus
  siRNA target sequence for C630015B17Rik (NM_178685.3,323-341).
gcttctgtacagcctaaat

SEQ ID NO: 544589 - DNA, 19 bp, Mus musculus
  siRNA target sequence for C630015B17Rik (NM_178685.3,507-525).
cagtatgtgaccctaaaca

SEQ ID NO: 544590 - DNA, 19 bp, Mus musculus
  siRNA target sequence for C630015B17Rik (NM_178685.3,745-763).
cgcagttccccatttctga

SEQ ID NO: 544591 - DNA, 19 bp, Mus musculus
  siRNA target sequence for C630015B17Rik (NM_178685.3,746-764).
gcagttccccatttctgaa

SEQ ID NO: 544592 - DNA, 19 bp, Mus musculus
  siRNA target sequence for C630015B17Rik (NM_178685.3,783-801).
gaaaattcacctgtaaata

SEQ ID NO: 544593 - DNA, 19 bp, Mus musculus
  siRNA target sequence for C630015B17Rik (NM_178685.3,857-875).
gcaaacctatcgcttacta

SEQ ID NO: 544594 - DNA, 19 bp, Mus musculus
  siRNA target sequence for C630015B17Rik (NM_178685.3,862-880).
cctatcgcttactagacta

SEQ ID NO: 544595 - DNA, 19 bp, Mus musculus
  siRNA target sequence for C630015B17Rik (NM_178685.3,924-942).
gagcgcacaccctacttga

SEQ ID NO: 544596 - DNA, 19 bp, Mus musculus
  siRNA target sequence for C630015B17Rik (NM_178685.3,926-944).
gcgcacaccctacttgatt

SEQ ID NO: 544597 - DNA, 19 bp, Mus musculus
  siRNA target sequence for C630015B17Rik (NM_178685.3,1040-1058).
cctcaccattggcataagt

SEQ ID NO: 544598 - DNA, 19 bp, Mus musculus
  siRNA target sequence for C630015B17Rik (NM_178685.3,1068-1086).
gacaattgtcctctcttta

SEQ ID NO: 544599 - DNA, 19 bp, Mus musculus
  siRNA target sequence for C630015B17Rik (NM_178685.3,1080-1098).
ctctttatagactcacaaa

SEQ ID NO: 544600 - DNA, 19 bp, Mus musculus
  siRNA target sequence for C630015B17Rik (NM_178685.3,1082-1100).
ctttatagactcacaaatt

SEQ ID NO: 544601 - DNA, 19 bp, Mus musculus
  siRNA target sequence for C630015B17Rik (NM_178685.3,1182-1200).
gcacagatcacttacagtt

SEQ ID NO: 544602 - DNA, 19 bp, Mus musculus
  siRNA target sequence for C630015B17Rik (NM_178685.3,1196-1214).
cagttacagccagaaagtt

SEQ ID NO: 544603 - DNA, 19 bp, Mus musculus
  siRNA target sequence for C630015B17Rik (NM_178685.3,1291-1309).
gtgtcctacagacacataa

SEQ ID NO: 544604 - DNA, 19 bp, Mus musculus
  siRNA target sequence for C630015B17Rik (NM_178685.3,1313-1331).
caccatcctagctaatgga

SEQ ID NO: 544605 - DNA, 19 bp, Mus musculus
  siRNA target sequence for C630015B17Rik (NM_178685.3,1359-1377).
gctcttgtatcgatcatca

SEQ ID NO: 544606 - DNA, 19 bp, Mus musculus
  siRNA target sequence for C630015B17Rik (NM_178685.3,1360-1378).
ctcttgtatcgatcatcaa

SEQ ID NO: 544607 - DNA, 19 bp, Mus musculus
  siRNA target sequence for C630015B17Rik (NM_178685.3,1369-1387).
cgatcatcaaagtcgtttt

SEQ ID NO: 544608 - DNA, 19 bp, Mus musculus
  siRNA target sequence for C630015B17Rik (NM_178685.3,1398-1416).
gaaatcgtcccacgttata

SEQ ID NO: 544609 - DNA, 19 bp, Mus musculus
  siRNA target sequence for C630015B17Rik (NM_178685.3,1408-1426).
cacgttatatcgcaaatga

SEQ ID NO: 544610 - DNA, 19 bp, Mus musculus
  siRNA target sequence for C630015B17Rik (NM_178685.3,1460-1478).
gcctgttaatactccaatt

SEQ ID NO: 544611 - DNA, 19 bp, Mus musculus
  siRNA target sequence for C630015B17Rik (NM_178685.3,1495-1513).
gagatccagaaggtaaata

SEQ ID NO: 544612 - DNA, 19 bp, Mus musculus
  siRNA target sequence for C630015B17Rik (NM_178685.3,1497-1515).
gatccagaaggtaaataca

SEQ ID NO: 544613 - DNA, 19 bp, Mus musculus
  siRNA target sequence for C630015B17Rik (NM_178685.3,1560-1578).
ccctacaagccgtacaaca

SEQ ID NO: 544614 - DNA, 19 bp, Mus musculus
  siRNA target sequence for C630015B17Rik (NM_178685.3,1561-1579).
cctacaagccgtacaacaa

SEQ ID NO: 544615 - DNA, 19 bp, Mus musculus
  siRNA target sequence for C630015B17Rik (NM_178685.3,1565-1583).
caagccgtacaacaatgaa

SEQ ID NO: 544616 - DNA, 19 bp, Mus musculus
  siRNA target sequence for C630015B17Rik (NM_178685.3,1568-1586).
gccgtacaacaatgaatat

SEQ ID NO: 544617 - DNA, 19 bp, Mus musculus
  siRNA target sequence for C630015B17Rik (NM_178685.3,1569-1587).
ccgtacaacaatgaatatt

SEQ ID NO: 544618 - DNA, 19 bp, Mus musculus
  siRNA target sequence for C630015B17Rik (NM_178685.3,1570-1588).
cgtacaacaatgaatattt

SEQ ID NO: 544619 - DNA, 19 bp, Mus musculus
  siRNA target sequence for C630015B17Rik (NM_178685.3,1620-1638).
gtgcagtccttctatgaaa

SEQ ID NO: 544620 - DNA, 19 bp, Mus musculus
  siRNA target sequence for C630015B17Rik (NM_178685.3,1715-1733).
caatgcccctgttttcctt

SEQ ID NO: 544621 - DNA, 19 bp, Mus musculus
  siRNA target sequence for C630015B17Rik (NM_178685.3,1742-1760).
gatagaattgaccattgaa

SEQ ID NO: 544622 - DNA, 19 bp, Mus musculus
  siRNA target sequence for C630015B17Rik (NM_178685.3,1828-1846).
gacgagtttcctacttctt

SEQ ID NO: 544623 - DNA, 19 bp, Mus musculus
  siRNA target sequence for C630015B17Rik (NM_178685.3,1852-1870).
ctgatgctccgtcatactt

SEQ ID NO: 544624 - DNA, 19 bp, Mus musculus
  siRNA target sequence for C630015B17Rik (NM_178685.3,1854-1872).
gatgctccgtcatactttt

SEQ ID NO: 544625 - DNA, 19 bp, Mus musculus
  siRNA target sequence for C630015B17Rik (NM_178685.3,1857-1875).
gctccgtcatacttttcct

SEQ ID NO: 544626 - DNA, 19 bp, Mus musculus
  siRNA target sequence for C630015B17Rik (NM_178685.3,1858-1876).
ctccgtcatacttttcctt

SEQ ID NO: 544627 - DNA, 19 bp, Mus musculus
  siRNA target sequence for C630015B17Rik (NM_178685.3,2032-2050).
gtccgaggttcatcaacaa

SEQ ID NO: 544628 - DNA, 19 bp, Mus musculus
  siRNA target sequence for C630015B17Rik (NM_178685.3,2084-2102).
ggggtatggtgaaattgga

SEQ ID NO: 544629 - DNA, 19 bp, Mus musculus
  siRNA target sequence for C630015B17Rik (NM_178685.3,2162-2180).
gaaccagagtgacattttt

SEQ ID NO: 544630 - DNA, 19 bp, Mus musculus
  siRNA target sequence for C630015B17Rik (NM_178685.3,2172-2190).
gacatttttgtcatagaca

SEQ ID NO: 544631 - DNA, 19 bp, Mus musculus
  siRNA target sequence for C630015B17Rik (NM_178685.3,2198-2216).
gggtatgttgagagctaaa

SEQ ID NO: 544632 - DNA, 19 bp, Mus musculus
  siRNA target sequence for C630015B17Rik (NM_178685.3,2200-2218).
gtatgttgagagctaaagt

SEQ ID NO: 544633 - DNA, 19 bp, Mus musculus
  siRNA target sequence for C630015B17Rik (NM_178685.3,2207-2225).
gagagctaaagtctcttta

SEQ ID NO: 544634 - DNA, 19 bp, Mus musculus
  siRNA target sequence for C630015B17Rik (NM_178685.3,2209-2227).
gagctaaagtctctttaga

SEQ ID NO: 544635 - DNA, 19 bp, Mus musculus
  siRNA target sequence for C630015B17Rik (NM_178685.3,2211-2229).
gctaaagtctctttagaca

SEQ ID NO: 544636 - DNA, 19 bp, Mus musculus
  siRNA target sequence for C630015B17Rik (NM_178685.3,2294-2312).
ctctaccacaaaaatcaca

SEQ ID NO: 544637 - DNA, 19 bp, Mus musculus
  siRNA target sequence for C630015B17Rik (NM_178685.3,2333-2351).
cgataaccctcctcttgtt

SEQ ID NO: 544638 - DNA, 19 bp, Mus musculus
  siRNA target sequence for C630015B17Rik (NM_178685.3,2334-2352).
gataaccctcctcttgttt

SEQ ID NO: 544639 - DNA, 19 bp, Mus musculus
  siRNA target sequence for C630015B17Rik (NM_178685.3,2410-2428).
caccagtaacagaagtcta

SEQ ID NO: 544640 - DNA, 19 bp, Mus musculus
  siRNA target sequence for C630015B17Rik (NM_178685.3,2453-2471).
gaatgctgtcatagcttat

SEQ ID NO: 544641 - DNA, 19 bp, Mus musculus
  siRNA target sequence for C630015B17Rik (NM_178685.3,2457-2475).
gctgtcatagcttatagca

SEQ ID NO: 544642 - DNA, 19 bp, Mus musculus
  siRNA target sequence for C630015B17Rik (NM_178685.3,2458-2476).
ctgtcatagcttatagcat

SEQ ID NO: 544643 - DNA, 19 bp, Mus musculus
  siRNA target sequence for C630015B17Rik (NM_178685.3,2462-2480).
catagcttatagcatcata

SEQ ID NO: 544644 - DNA, 19 bp, Mus musculus
  siRNA target sequence for C630015B17Rik (NM_178685.3,2497-2515).
ggcctgagtctttcagaat

SEQ ID NO: 544645 - DNA, 19 bp, Mus musculus
  siRNA target sequence for C630015B17Rik (NM_178685.3,2551-2569).
ccttgcttcagacagatta

SEQ ID NO: 544646 - DNA, 19 bp, Mus musculus
  siRNA target sequence for C630015B17Rik (NM_178685.3,2580-2598).
cgcttactggtgaaagtga

SEQ ID NO: 544647 - DNA, 19 bp, Mus musculus
  siRNA target sequence for C630015B17Rik (NM_178685.3,2702-2720).
ggagccagaaattaatata

SEQ ID NO: 544648 - DNA, 19 bp, Mus musculus
  siRNA target sequence for C630015B17Rik (NM_178685.3,2741-2759).
ctcaatagagccaactcat

SEQ ID NO: 544649 - DNA, 19 bp, Mus musculus
  siRNA target sequence for C630015B17Rik (NM_178685.3,2796-2814).
gtagctctgtcagtcataa

SEQ ID NO: 544650 - DNA, 19 bp, Mus musculus
  siRNA target sequence for C630015B17Rik (NM_178685.3,2799-2817).
gctctgtcagtcataagct

SEQ ID NO: 544651 - DNA, 19 bp, Mus musculus
  siRNA target sequence for C630015B17Rik (NM_178685.3,2819-2837).
gggctccatcacactagtt

SEQ ID NO: 544652 - DNA, 19 bp, Mus musculus
  siRNA target sequence for C630015B17Rik (NM_178685.3,2820-2838).
ggctccatcacactagtta

SEQ ID NO: 544653 - DNA, 19 bp, Mus musculus
  siRNA target sequence for C630015B17Rik (NM_178685.3,2822-2840).
ctccatcacactagttaca

SEQ ID NO: 544654 - DNA, 19 bp, Mus musculus
  siRNA target sequence for C630015B17Rik (NM_178685.3,2841-2859).
gggatgggaatatacatct

SEQ ID NO: 544655 - DNA, 19 bp, Mus musculus
  siRNA target sequence for C630015B17Rik (NM_178685.3,2858-2876).
ctgcttacggaaaggtaaa

SEQ ID NO: 544656 - DNA, 19 bp, Mus musculus
  siRNA target sequence for Cabp1 (NM_013879.1,77-95).
cgtcaagtcgccactaaga

SEQ ID NO: 544657 - DNA, 19 bp, Mus musculus
  siRNA target sequence for Cabp1 (NM_013879.1,78-96).
gtcaagtcgccactaagaa

SEQ ID NO: 544658 - DNA, 19 bp, Mus musculus
  siRNA target sequence for Cabp1 (NM_013879.1,239-257).
gggtcccgcctgcattttt

SEQ ID NO: 544659 - DNA, 19 bp, Mus musculus
  siRNA target sequence for Cabp1 (NM_013879.1,241-259).
gtcccgcctgcatttttct

SEQ ID NO: 544660 - DNA, 19 bp, Mus musculus
  siRNA target sequence for Cabp1 (NM_013879.1,469-487).
gtggccacgtggattttga

SEQ ID NO: 544661 - DNA, 19 bp, Mus musculus
  siRNA target sequence for Cabp1 (NM_013879.1,476-494).
cgtggattttgatgacttt

SEQ ID NO: 544662 - DNA, 19 bp, Mus musculus
  siRNA target sequence for Cabp1 (NM_013879.1,532-550).
cagatatgattggtgtaaa

SEQ ID NO: 544663 - DNA, 19 bp, Mus musculus
  siRNA target sequence for Cabp1 (NM_013879.1,587-605).
cggtgacggggagataagt

SEQ ID NO: 544664 - DNA, 19 bp, Mus musculus
  siRNA target sequence for Cabp1 (NM_013879.1,588-606).
ggtgacggggagataagta

SEQ ID NO: 544665 - DNA, 19 bp, Mus musculus
  siRNA target sequence for Cabp1 (NM_013879.1,706-724).
gacgagtggactttgaaga

SEQ ID NO: 544666 - DNA, 19 bp, Mus musculus
  siRNA target sequence for Cabp2 (NM_013878.1,423-441).
ggagctcattgagatatca

SEQ ID NO: 544667 - DNA, 19 bp, Mus musculus
  siRNA target sequence for Cabp2 (NM_013878.1,639-657).
cagccaacgggaagtagat

SEQ ID NO: 544668 - DNA, 19 bp, Mus musculus
  siRNA target sequence for Cabp2 (NM_013878.1,641-659).
gccaacgggaagtagatga

SEQ ID NO: 544669 - DNA, 19 bp, Mus musculus
  siRNA target sequence for Cabp2 (NM_013878.1,647-665).
gggaagtagatgagatact

SEQ ID NO: 544670 - DNA, 19 bp, Mus musculus
  siRNA target sequence for Cabp4 (NM_144532.2,98-116).
gatccctaaaggagttgta

SEQ ID NO: 544671 - DNA, 19 bp, Mus musculus
  siRNA target sequence for Cabp4 (NM_144532.2,101-119).
ccctaaaggagttgtatct

SEQ ID NO: 544672 - DNA, 19 bp, Mus musculus
  siRNA target sequence for Cabp4 (NM_144532.2,383-401).
cttgctcaaccgcatgttt

SEQ ID NO: 544673 - DNA, 19 bp, Mus musculus
  siRNA target sequence for Cabp4 (NM_144532.2,387-405).
ctcaaccgcatgtttggaa

SEQ ID NO: 544674 - DNA, 19 bp, Mus musculus
  siRNA target sequence for Cabp4 (NM_144532.2,538-556).
cggagatggagcttctaga

SEQ ID NO: 544675 - DNA, 19 bp, Mus musculus
  siRNA target sequence for Cabp4 (NM_144532.2,586-604).
gaggctttgtggattttga

SEQ ID NO: 544676 - DNA, 19 bp, Mus musculus
  siRNA target sequence for Cabp4 (NM_144532.2,677-695).
catcgccttccgagagttt

SEQ ID NO: 544677 - DNA, 19 bp, Mus musculus
  siRNA target sequence for Cabp4 (NM_144532.2,840-858).
gagtttgtaatgatgctat

SEQ ID NO: 544678 - DNA, 19 bp, Mus musculus
  siRNA target sequence for Cabp5 (NM_013877.2,171-189).
gtcctgcctgcatcttctt

SEQ ID NO: 544679 - DNA, 19 bp, Mus musculus
  siRNA target sequence for Cabp5 (NM_013877.2,173-191).
cctgcctgcatcttcttga

SEQ ID NO: 544680 - DNA, 19 bp, Mus musculus
  siRNA target sequence for Cabp5 (NM_013877.2,176-194).
gcctgcatcttcttgagaa

SEQ ID NO: 544681 - DNA, 19 bp, Mus musculus
  siRNA target sequence for Cabp5 (NM_013877.2,192-210).
gaaaaggcattgctgaaaa

SEQ ID NO: 544682 - DNA, 19 bp, Mus musculus
  siRNA target sequence for Cabp5 (NM_013877.2,250-268).
gctccgggaagcatttctt

SEQ ID NO: 544683 - DNA, 19 bp, Mus musculus
  siRNA target sequence for Cabp5 (NM_013877.2,281-299).
gaccaagatgggttcatct

SEQ ID NO: 544684 - DNA, 19 bp, Mus musculus
  siRNA target sequence for Cabp5 (NM_013877.2,287-305).
gatgggttcatctcttaca

SEQ ID NO: 544685 - DNA, 19 bp, Mus musculus
  siRNA target sequence for Cabp5 (NM_013877.2,363-381).
ctgagttgggccagcaaat

SEQ ID NO: 544686 - DNA, 19 bp, Mus musculus
  siRNA target sequence for Cabp5 (NM_013877.2,372-390).
gccagcaaatccgaatgaa

SEQ ID NO: 544687 - DNA, 19 bp, Mus musculus
  siRNA target sequence for Cabp7 (NM_138948.2,167-185).
cgagaggccttcaaggtat

SEQ ID NO: 544688 - DNA, 19 bp, Mus musculus
  siRNA target sequence for Cabp7 (NM_138948.2,168-186).
gagaggccttcaaggtatt

SEQ ID NO: 544689 - DNA, 19 bp, Mus musculus
  siRNA target sequence for Cacna1c (NM_009781.1,1208-1226).
ccaccaaggttccaactat

SEQ ID NO: 544690 - DNA, 19 bp, Mus musculus
  siRNA target sequence for Cacna1c (NM_009781.1,1240-1258).
cagctcatgccaacatgaa

SEQ ID NO: 544691 - DNA, 19 bp, Mus musculus
  siRNA target sequence for Cacna1c (NM_009781.1,1511-1529).
ggcgtgcataagcattgtt

SEQ ID NO: 544692 - DNA, 19 bp, Mus musculus
  siRNA target sequence for Cacna1c (NM_009781.1,1513-1531).
cgtgcataagcattgttga

SEQ ID NO: 544693 - DNA, 19 bp, Mus musculus
  siRNA target sequence for Cacna1c (NM_009781.1,1644-1662).
gaacgagtggagtatctct

SEQ ID NO: 544694 - DNA, 19 bp, Mus musculus
  siRNA target sequence for Cacna1c (NM_009781.1,1731-1749).
gcttacctccgcaatggtt

SEQ ID NO: 544695 - DNA, 19 bp, Mus musculus
  siRNA target sequence for Cacna1c (NM_009781.1,1737-1755).
ctccgcaatggttggaatt

SEQ ID NO: 544696 - DNA, 19 bp, Mus musculus
  siRNA target sequence for Cacna1c (NM_009781.1,1739-1757).
ccgcaatggttggaattta

SEQ ID NO: 544697 - DNA, 19 bp, Mus musculus
  siRNA target sequence for Cacna1c (NM_009781.1,1772-1790).
cgtggttgtagggcttttt

SEQ ID NO: 544698 - DNA, 19 bp, Mus musculus
  siRNA target sequence for Cacna1c (NM_009781.1,1773-1791).
gtggttgtagggcttttta

SEQ ID NO: 544699 - DNA, 19 bp, Mus musculus
  siRNA target sequence for Cacna1c (NM_009781.1,1775-1793).
ggttgtagggctttttagt

SEQ ID NO: 544700 - DNA, 19 bp, Mus musculus
  siRNA target sequence for Cacna1c (NM_009781.1,2063-2081).
caaccaggagggcataata

SEQ ID NO: 544701 - DNA, 19 bp, Mus musculus
  siRNA target sequence for Cacna1c (NM_009781.1,2286-2304).
gacgctatgggctatgagt

SEQ ID NO: 544702 - DNA, 19 bp, Mus musculus
  siRNA target sequence for Cacna1c (NM_009781.1,2341-2359).
gatcctttttcgttctaaa

SEQ ID NO: 544703 - DNA, 19 bp, Mus musculus
  siRNA target sequence for Cacna1c (NM_009781.1,2378-2396).
gagcggggagttttccaaa

SEQ ID NO: 544704 - DNA, 19 bp, Mus musculus
  siRNA target sequence for Cacna1c (NM_009781.1,2646-2664).
gcccatcggatctccaaat

SEQ ID NO: 544705 - DNA, 19 bp, Mus musculus
  siRNA target sequence for Cacna1c (NM_009781.1,2649-2667).
catcggatctccaaatcca

SEQ ID NO: 544706 - DNA, 19 bp, Mus musculus
  siRNA target sequence for Cacna1c (NM_009781.1,2683-2701).
ggcgcaggtggaatcgatt

SEQ ID NO: 544707 - DNA, 19 bp, Mus musculus
  siRNA target sequence for Cacna1c (NM_009781.1,2904-2922).
cttcaggcctattttgtgt

SEQ ID NO: 544708 - DNA, 19 bp, Mus musculus
  siRNA target sequence for Cacna1c (NM_009781.1,2982-3000).
gtggagacgaagatcatgt

SEQ ID NO: 544709 - DNA, 19 bp, Mus musculus
  siRNA target sequence for Cacna1c (NM_009781.1,3033-3051).
cggttgctcaggatcttca

SEQ ID NO: 544710 - DNA, 19 bp, Mus musculus
  siRNA target sequence for Cacna1c (NM_009781.1,3182-3200).
ctttggagggaagttcaat

SEQ ID NO: 544711 - DNA, 19 bp, Mus musculus
  siRNA target sequence for Cacna1c (NM_009781.1,3187-3205).
gagggaagttcaatttcga

SEQ ID NO: 544712 - DNA, 19 bp, Mus musculus
  siRNA target sequence for Cacna1c (NM_009781.1,3219-3237).
cgtaggagcacgttcgata

SEQ ID NO: 544713 - DNA, 19 bp, Mus musculus
  siRNA target sequence for Cacna1c (NM_009781.1,3220-3238).
gtaggagcacgttcgataa

SEQ ID NO: 544714 - DNA, 19 bp, Mus musculus
  siRNA target sequence for Cacna1c (NM_009781.1,3223-3241).
ggagcacgttcgataactt

SEQ ID NO: 544715 - DNA, 19 bp, Mus musculus
  siRNA target sequence for Cacna1c (NM_009781.1,3332-3350).
ctcttttccagggatgtta

SEQ ID NO: 544716 - DNA, 19 bp, Mus musculus
  siRNA target sequence for Cacna1c (NM_009781.1,3385-3403).
gaaattatatcctactgaa

SEQ ID NO: 544717 - DNA, 19 bp, Mus musculus
  siRNA target sequence for Cacna1c (NM_009781.1,3616-3634).
ccactaccaagatcaacat

SEQ ID NO: 544718 - DNA, 19 bp, Mus musculus
  siRNA target sequence for Cacna1c (NM_009781.1,3649-3667).
ccagtgaaaacgaggataa

SEQ ID NO: 544719 - DNA, 19 bp, Mus musculus
  siRNA target sequence for Cacna1c (NM_009781.1,3788-3806).
gccggaagccagtgcattt

SEQ ID NO: 544720 - DNA, 19 bp, Mus musculus
  siRNA target sequence for Cacna1c (NM_009781.1,3840-3858).
cagtgccaccgtattgtca

SEQ ID NO: 544721 - DNA, 19 bp, Mus musculus
  siRNA target sequence for Cacna1c (NM_009781.1,3844-3862).
gccaccgtattgtcaatga

SEQ ID NO: 544722 - DNA, 19 bp, Mus musculus
  siRNA target sequence for Cacna1c (NM_009781.1,3855-3873).
gtcaatgacacgatcttca

SEQ ID NO: 544723 - DNA, 19 bp, Mus musculus
  siRNA target sequence for Cacna1c (NM_009781.1,3967-3985).
gcaatgcagactatgtctt

SEQ ID NO: 544724 - DNA, 19 bp, Mus musculus
  siRNA target sequence for Cacna1c (NM_009781.1,3981-3999).
gtcttcactagtatcttta

SEQ ID NO: 544725 - DNA, 19 bp, Mus musculus
  siRNA target sequence for Cacna1c (NM_009781.1,3988-4006).
ctagtatctttacattaga

SEQ ID NO: 544726 - DNA, 19 bp, Mus musculus
  siRNA target sequence for Cacna1c (NM_009781.1,4000-4018).
cattagaaattatccttaa

SEQ ID NO: 544727 - DNA, 19 bp, Mus musculus
  siRNA target sequence for Cacna1c (NM_009781.1,4132-4150).
gcgcgatcaacgttgtgaa

SEQ ID NO: 544728 - DNA, 19 bp, Mus musculus
  siRNA target sequence for Cacna1c (NM_009781.1,4139-4157).
caacgttgtgaagatttta

SEQ ID NO: 544729 - DNA, 19 bp, Mus musculus
  siRNA target sequence for Cacna1c (NM_009781.1,4250-4268).
catcgggaacatcgtaatt

SEQ ID NO: 544730 - DNA, 19 bp, Mus musculus
  siRNA target sequence for Cacna1c (NM_009781.1,4336-4354).
cctgttcggatagttctaa

SEQ ID NO: 544731 - DNA, 19 bp, Mus musculus
  siRNA target sequence for Cacna1c (NM_009781.1,4337-4355).
ctgttcggatagttctaaa

SEQ ID NO: 544732 - DNA, 19 bp, Mus musculus
  siRNA target sequence for Cacna1c (NM_009781.1,4339-4357).
gttcggatagttctaaaca

SEQ ID NO: 544733 - DNA, 19 bp, Mus musculus
  siRNA target sequence for Cacna1c (NM_009781.1,4377-4395).
ggtaactatatcacataca

SEQ ID NO: 544734 - DNA, 19 bp, Mus musculus
  siRNA target sequence for Cacna1c (NM_009781.1,4382-4400).
ctatatcacatacaaagat

SEQ ID NO: 544735 - DNA, 19 bp, Mus musculus
  siRNA target sequence for Cacna1c (NM_009781.1,4451-4469).
gtttgactttgacaatgtt

SEQ ID NO: 544736 - DNA, 19 bp, Mus musculus
  siRNA target sequence for Cacna1c (NM_009781.1,4819-4837).
ctacctacttcgagtatct

SEQ ID NO: 544737 - DNA, 19 bp, Mus musculus
  siRNA target sequence for Cacna1c (NM_009781.1,4991-5009).
caagggttactttagtgat

SEQ ID NO: 544738 - DNA, 19 bp, Mus musculus
  siRNA target sequence for Cacna1c (NM_009781.1,5036-5054).
cgtcattgggagcataatt

SEQ ID NO: 544739 - DNA, 19 bp, Mus musculus
  siRNA target sequence for Cacna1c (NM_009781.1,5060-5078).
cattctcagtgagactaat

SEQ ID NO: 544740 - DNA, 19 bp, Mus musculus
  siRNA target sequence for Cacna1c (NM_009781.1,5072-5090).
gactaatccagctgaacat

SEQ ID NO: 544741 - DNA, 19 bp, Mus musculus
  siRNA target sequence for Cacna1c (NM_009781.1,5248-5266).
cctatgtggctcttttgat

SEQ ID NO: 544742 - DNA, 19 bp, Mus musculus
  siRNA target sequence for Cacna1c (NM_009781.1,5270-5288).
gatgctgttctttatctat

SEQ ID NO: 544743 - DNA, 19 bp, Mus musculus
  siRNA target sequence for Cacna1c (NM_009781.1,5369-5387).
gttcccccaggctgtgtta

SEQ ID NO: 544744 - DNA, 19 bp, Mus musculus
  siRNA target sequence for Cacna1c (NM_009781.1,5662-5680).
gaatctgggccgagtatga

SEQ ID NO: 544745 - DNA, 19 bp, Mus musculus
  siRNA target sequence for Cacna1c (NM_009781.1,5689-5707).
ccaagggtcggatcaaaca

SEQ ID NO: 544746 - DNA, 19 bp, Mus musculus
  siRNA target sequence for Cacna1c (NM_009781.1,5720-5738).
gaccctcctccgtcgaatt

SEQ ID NO: 544747 - DNA, 19 bp, Mus musculus
  siRNA target sequence for Cacna1c (NM_009781.1,5722-5740).
ccctcctccgtcgaattca

SEQ ID NO: 544748 - DNA, 19 bp, Mus musculus
  siRNA target sequence for Cacna1c (NM_009781.1,5750-5768).
gggttttgggaaattgtgt

SEQ ID NO: 544749 - DNA, 19 bp, Mus musculus
  siRNA target sequence for Cacna1c (NM_009781.1,5867-5885).
gacagccctgaggatcaaa

SEQ ID NO: 544750 - DNA, 19 bp, Mus musculus
  siRNA target sequence for Cacna1c (NM_009781.1,6005-6023).
cacagtgggcaagttctat

SEQ ID NO: 544751 - DNA, 19 bp, Mus musculus
  siRNA target sequence for Cacna1c (NM_009781.1,6084-6102).
gtgggcaagccctcacaaa

SEQ ID NO: 544752 - DNA, 19 bp, Mus musculus
  siRNA target sequence for Cacna1c (NM_009781.1,6131-6149).
gcgcaccttgcatgacatt

SEQ ID NO: 544753 - DNA, 19 bp, Mus musculus
  siRNA target sequence for Cacna1c (NM_009781.1,6232-6250).
ctgcctccgaagatgacat

SEQ ID NO: 544754 - DNA, 19 bp, Mus musculus
  siRNA target sequence for Cacna1c (NM_009781.1,6278-6296).
caaccatgtcacctactat

SEQ ID NO: 544755 - DNA, 19 bp, Mus musculus
  siRNA target sequence for Cacna1c (NM_009781.1,6282-6300).
catgtcacctactatcaga

SEQ ID NO: 544756 - DNA, 19 bp, Mus musculus
  siRNA target sequence for Cacna1c (NM_009781.1,6640-6658).
cggtgaatcaggagatatt

SEQ ID NO: 544757 - DNA, 19 bp, Mus musculus
  siRNA target sequence for Cacna1c (NM_009781.1,6718-6736).
gcctgctctccacagatat

SEQ ID NO: 544758 - DNA, 19 bp, Mus musculus
  siRNA target sequence for Cacna1c (NM_009781.1,7095-7113).
gagtccagcgagaaactca

SEQ ID NO: 544759 - DNA, 19 bp, Mus musculus
  siRNA target sequence for Cacna1c (NM_009781.1,7274-7292).
ggtggaagcggtcttgatt

SEQ ID NO: 544760 - DNA, 19 bp, Mus musculus
  siRNA target sequence for Cacna1c (NM_009781.1,7275-7293).
gtggaagcggtcttgattt

SEQ ID NO: 544761 - DNA, 19 bp, Mus musculus
  siRNA target sequence for Cacna1c (NM_009781.1,7277-7295).
ggaagcggtcttgatttca

SEQ ID NO: 544762 - DNA, 19 bp, Mus musculus
  siRNA target sequence for Cacna1c (NM_009781.1,7359-7377).
gacgcctgcgacatgacaa

SEQ ID NO: 544763 - DNA, 19 bp, Mus musculus
  siRNA target sequence for Cacna1c (NM_009781.1,7361-7379).
cgcctgcgacatgacaata

SEQ ID NO: 544764 - DNA, 19 bp, Mus musculus
  siRNA target sequence for Cacna1c (NM_009781.1,7363-7381).
cctgcgacatgacaataga

SEQ ID NO: 544765 - DNA, 19 bp, Mus musculus
  siRNA target sequence for Cacna1c (NM_009781.1,7439-7457).
cggcaccctcttacctttt

SEQ ID NO: 544766 - DNA, 19 bp, Mus musculus
  siRNA target sequence for Cacna1c (NM_009781.1,7444-7462).
ccctcttaccttttgtgaa

SEQ ID NO: 544767 - DNA, 19 bp, Mus musculus
  siRNA target sequence for Cacna1d (NM_028981.1,58-76).
gaaccttccgacattttct

SEQ ID NO: 544768 - DNA, 19 bp, Mus musculus
  siRNA target sequence for Cacna1d (NM_028981.1,61-79).
ccttccgacattttctagt

SEQ ID NO: 544769 - DNA, 19 bp, Mus musculus
  siRNA target sequence for Cacna1d (NM_028981.1,67-85).
gacattttctagtgatcta

SEQ ID NO: 544770 - DNA, 19 bp, Mus musculus
  siRNA target sequence for Cacna1d (NM_028981.1,75-93).
ctagtgatctaattttaat

SEQ ID NO: 544771 - DNA, 19 bp, Mus musculus
  siRNA target sequence for Cacna1d (NM_028981.1,113-131).
gagactgatgcccgatata

SEQ ID NO: 544772 - DNA, 19 bp, Mus musculus
  siRNA target sequence for Cacna1d (NM_028981.1,140-158).
gttgtaagtgcggtagaaa

SEQ ID NO: 544773 - DNA, 19 bp, Mus musculus
  siRNA target sequence for Cacna1d (NM_028981.1,180-198).
cctttgcagaggcaaacta

SEQ ID NO: 544774 - DNA, 19 bp, Mus musculus
  siRNA target sequence for Cacna1d (NM_028981.1,181-199).
ctttgcagaggcaaactat

SEQ ID NO: 544775 - DNA, 19 bp, Mus musculus
  siRNA target sequence for Cacna1d (NM_028981.1,380-398).
caatacgccaagagcaaaa

SEQ ID NO: 544776 - DNA, 19 bp, Mus musculus
  siRNA target sequence for Cacna1d (NM_028981.1,401-419).
cagggtaactcgtctaaca

SEQ ID NO: 544777 - DNA, 19 bp, Mus musculus
  siRNA target sequence for Cacna1d (NM_028981.1,429-447).
cccgtgcccttttctgttt

SEQ ID NO: 544778 - DNA, 19 bp, Mus musculus
  siRNA target sequence for Cacna1d (NM_028981.1,431-449).
cgtgcccttttctgtttat

SEQ ID NO: 544779 - DNA, 19 bp, Mus musculus
  siRNA target sequence for Cacna1d (NM_028981.1,466-484).
ccgaagagcctgcattagt

SEQ ID NO: 544780 - DNA, 19 bp, Mus musculus
  siRNA target sequence for Cacna1d (NM_028981.1,467-485).
cgaagagcctgcattagta

SEQ ID NO: 544781 - DNA, 19 bp, Mus musculus
  siRNA target sequence for Cacna1d (NM_028981.1,471-489).
gagcctgcattagtatagt

SEQ ID NO: 544782 - DNA, 19 bp, Mus musculus
  siRNA target sequence for Cacna1d (NM_028981.1,500-518).
ccatttgacatatttatat

SEQ ID NO: 544783 - DNA, 19 bp, Mus musculus
  siRNA target sequence for Cacna1d (NM_028981.1,559-577).
catcccattccctgaagat

SEQ ID NO: 544784 - DNA, 19 bp, Mus musculus
  siRNA target sequence for Cacna1d (NM_028981.1,582-600).
ctaattcaacaaatcataa

SEQ ID NO: 544785 - DNA, 19 bp, Mus musculus
  siRNA target sequence for Cacna1d (NM_028981.1,682-700).
gcatcctaatgcttacgtt

SEQ ID NO: 544786 - DNA, 19 bp, Mus musculus
  siRNA target sequence for Cacna1d (NM_028981.1,687-705).
ctaatgcttacgttaggaa

SEQ ID NO: 544787 - DNA, 19 bp, Mus musculus
  siRNA target sequence for Cacna1d (NM_028981.1,692-710).
gcttacgttaggaatggat

SEQ ID NO: 544788 - DNA, 19 bp, Mus musculus
  siRNA target sequence for Cacna1d (NM_028981.1,734-752).
gtaattgtaggattgttta

SEQ ID NO: 544789 - DNA, 19 bp, Mus musculus
  siRNA target sequence for Cacna1d (NM_028981.1,744-762).
gattgtttagtgtaattct

SEQ ID NO: 544790 - DNA, 19 bp, Mus musculus
  siRNA target sequence for Cacna1d (NM_028981.1,753-771).
gtgtaattctggaacaatt

SEQ ID NO: 544791 - DNA, 19 bp, Mus musculus
  siRNA target sequence for Cacna1d (NM_028981.1,755-773).
gtaattctggaacaattaa

SEQ ID NO: 544792 - DNA, 19 bp, Mus musculus
  siRNA target sequence for Cacna1d (NM_028981.1,796-814).
ccactctagtggcaaatca

SEQ ID NO: 544793 - DNA, 19 bp, Mus musculus
  siRNA target sequence for Cacna1d (NM_028981.1,838-856).
ccgtgccttccgagtgtta

SEQ ID NO: 544794 - DNA, 19 bp, Mus musculus
  siRNA target sequence for Cacna1d (NM_028981.1,879-897).
gagtgcccagtttacaagt

SEQ ID NO: 544795 - DNA, 19 bp, Mus musculus
  siRNA target sequence for Cacna1d (NM_028981.1,883-901).
gcccagtttacaagttgtt

SEQ ID NO: 544796 - DNA, 19 bp, Mus musculus
  siRNA target sequence for Cacna1d (NM_028981.1,885-903).
ccagtttacaagttgttct

SEQ ID NO: 544797 - DNA, 19 bp, Mus musculus
  siRNA target sequence for Cacna1d (NM_028981.1,896-914).
gttgttctgaactccatta

SEQ ID NO: 544798 - DNA, 19 bp, Mus musculus
  siRNA target sequence for Cacna1d (NM_028981.1,899-917).
gttctgaactccattataa

SEQ ID NO: 544799 - DNA, 19 bp, Mus musculus
  siRNA target sequence for Cacna1d (NM_028981.1,925-943).
ggtccccctccttcacata

SEQ ID NO: 544800 - DNA, 19 bp, Mus musculus
  siRNA target sequence for Cacna1d (NM_028981.1,938-956).
cacatagcccttttggtat

SEQ ID NO: 544801 - DNA, 19 bp, Mus musculus
  siRNA target sequence for Cacna1d (NM_028981.1,940-958).
catagcccttttggtatta

SEQ ID NO: 544802 - DNA, 19 bp, Mus musculus
  siRNA target sequence for Cacna1d (NM_028981.1,945-963).
cccttttggtattatttgt

SEQ ID NO: 544803 - DNA, 19 bp, Mus musculus
  siRNA target sequence for Cacna1d (NM_028981.1,946-964).
ccttttggtattatttgta

SEQ ID NO: 544804 - DNA, 19 bp, Mus musculus
  siRNA target sequence for Cacna1d (NM_028981.1,970-988).
catctatgctattatagga

SEQ ID NO: 544805 - DNA, 19 bp, Mus musculus
  siRNA target sequence for Cacna1d (NM_028981.1,1140-1158).
ccaatggaggcatcactaa

SEQ ID NO: 544806 - DNA, 19 bp, Mus musculus
  siRNA target sequence for Cacna1d (NM_028981.1,1146-1164).
gaggcatcactaactttga

SEQ ID NO: 544807 - DNA, 19 bp, Mus musculus
  siRNA target sequence for Cacna1d (NM_028981.1,1148-1166).
ggcatcactaactttgata

SEQ ID NO: 544808 - DNA, 19 bp, Mus musculus
  siRNA target sequence for Cacna1d (NM_028981.1,1149-1167).
gcatcactaactttgataa

SEQ ID NO: 544809 - DNA, 19 bp, Mus musculus
  siRNA target sequence for Cacna1d (NM_028981.1,1153-1171).
cactaactttgataacttt

SEQ ID NO: 544810 - DNA, 19 bp, Mus musculus
  siRNA target sequence for Cacna1d (NM_028981.1,1228-1246).
gctctactgggttaatgat

SEQ ID NO: 544811 - DNA, 19 bp, Mus musculus
  siRNA target sequence for Cacna1d (NM_028981.1,1238-1256).
gttaatgatgcgataggat

SEQ ID NO: 544812 - DNA, 19 bp, Mus musculus
  siRNA target sequence for Cacna1d (NM_028981.1,1368-1386).
ctaaagctcgtggagattt

SEQ ID NO: 544813 - DNA, 19 bp, Mus musculus
  siRNA target sequence for Cacna1d (NM_028981.1,1495-1513).
ggaaggcaaacgaaacact

SEQ ID NO: 544814 - DNA, 19 bp, Mus musculus
  siRNA target sequence for Cacna1d (NM_028981.1,1496-1514).
gaaggcaaacgaaacacta

SEQ ID NO: 544815 - DNA, 19 bp, Mus musculus
  siRNA target sequence for Cacna1d (NM_028981.1,1601-1619).
caggccatctcgaaatcca

SEQ ID NO: 544816 - DNA, 19 bp, Mus musculus
  siRNA target sequence for Cacna1d (NM_028981.1,1603-1621).
ggccatctcgaaatccaaa

SEQ ID NO: 544817 - DNA, 19 bp, Mus musculus
  siRNA target sequence for Cacna1d (NM_028981.1,1724-1742).
ctcaacactttaactattt

SEQ ID NO: 544818 - DNA, 19 bp, Mus musculus
  siRNA target sequence for Cacna1d (NM_028981.1,1743-1761).
cctctgagcattacaatca

SEQ ID NO: 544819 - DNA, 19 bp, Mus musculus
  siRNA target sequence for Cacna1d (NM_028981.1,1768-1786).
ctggctgacacagattcaa

SEQ ID NO: 544820 - DNA, 19 bp, Mus musculus
  siRNA target sequence for Cacna1d (NM_028981.1,1911-1929).
ggggcatcaccgaaaccat

SEQ ID NO: 544821 - DNA, 19 bp, Mus musculus
  siRNA target sequence for Cacna1d (NM_028981.1,1980-1998).
gtgtgcgcctcctgagaat

SEQ ID NO: 544822 - DNA, 19 bp, Mus musculus
  siRNA target sequence for Cacna1d (NM_028981.1,2286-2304).
cctcttccgggatgattgt

SEQ ID NO: 544823 - DNA, 19 bp, Mus musculus
  siRNA target sequence for Cacna1d (NM_028981.1,2292-2310).
ccgggatgattgtctgtat

SEQ ID NO: 544824 - DNA, 19 bp, Mus musculus
  siRNA target sequence for Cacna1d (NM_028981.1,2521-2539).
caacaaggttacaattgat

SEQ ID NO: 544825 - DNA, 19 bp, Mus musculus
  siRNA target sequence for Cacna1d (NM_028981.1,2524-2542).
caaggttacaattgatgat

SEQ ID NO: 544826 - DNA, 19 bp, Mus musculus
  siRNA target sequence for Cacna1d (NM_028981.1,2715-2733).
ccttcttcattcttagcaa

SEQ ID NO: 544827 - DNA, 19 bp, Mus musculus
  siRNA target sequence for Cacna1d (NM_028981.1,2757-2775).
gccacaagctcattaacca

SEQ ID NO: 544828 - DNA, 19 bp, Mus musculus
  siRNA target sequence for Cacna1d (NM_028981.1,2844-2862).
ccatccgtagccactcatt

SEQ ID NO: 544829 - DNA, 19 bp, Mus musculus
  siRNA target sequence for Cacna1d (NM_028981.1,2869-2887).
cacgatactgggctacttt

SEQ ID NO: 544830 - DNA, 19 bp, Mus musculus
  siRNA target sequence for Cacna1d (NM_028981.1,2903-2921).
gccatctttacggttgaaa

SEQ ID NO: 544831 - DNA, 19 bp, Mus musculus
  siRNA target sequence for Cacna1d (NM_028981.1,2904-2922).
ccatctttacggttgaaat

SEQ ID NO: 544832 - DNA, 19 bp, Mus musculus
  siRNA target sequence for Cacna1d (NM_028981.1,2913-2931).
cggttgaaatcctgttaaa

SEQ ID NO: 544833 - DNA, 19 bp, Mus musculus
  siRNA target sequence for Cacna1d (NM_028981.1,3186-3204).
cgaccctgctccagttcat

SEQ ID NO: 544834 - DNA, 19 bp, Mus musculus
  siRNA target sequence for Cacna1d (NM_028981.1,3244-3262).
ctaccgttgcacagatgaa

SEQ ID NO: 544835 - DNA, 19 bp, Mus musculus
  siRNA target sequence for Cacna1d (NM_028981.1,3285-3303).
gcagggggcttttcattct

SEQ ID NO: 544836 - DNA, 19 bp, Mus musculus
  siRNA target sequence for Cacna1d (NM_028981.1,3345-3363).
ggatctggcaaaatagtga

SEQ ID NO: 544837 - DNA, 19 bp, Mus musculus
  siRNA target sequence for Cacna1d (NM_028981.1,3346-3364).
gatctggcaaaatagtgat

SEQ ID NO: 544838 - DNA, 19 bp, Mus musculus
  siRNA target sequence for Cacna1d (NM_028981.1,3352-3370).
gcaaaatagtgatttcaat

SEQ ID NO: 544839 - DNA, 19 bp, Mus musculus
  siRNA target sequence for Cacna1d (NM_028981.1,3434-3452).
gcgttgctgtacaaagcta

SEQ ID NO: 544840 - DNA, 19 bp, Mus musculus
  siRNA target sequence for Cacna1d (NM_028981.1,3435-3453).
cgttgctgtacaaagctat

SEQ ID NO: 544841 - DNA, 19 bp, Mus musculus
  siRNA target sequence for Cacna1d (NM_028981.1,3439-3457).
gctgtacaaagctattgat

SEQ ID NO: 544842 - DNA, 19 bp, Mus musculus
  siRNA target sequence for Cacna1d (NM_028981.1,3440-3458).
ctgtacaaagctattgatt

SEQ ID NO: 544843 - DNA, 19 bp, Mus musculus
  siRNA target sequence for Cacna1d (NM_028981.1,3473-3491).
gttggtcctgtctacaact

SEQ ID NO: 544844 - DNA, 19 bp, Mus musculus
  siRNA target sequence for Cacna1d (NM_028981.1,3668-3686).
cgccccttaaggagataca

SEQ ID NO: 544845 - DNA, 19 bp, Mus musculus
  siRNA target sequence for Cacna1d (NM_028981.1,3669-3687).
gccccttaaggagatacat

SEQ ID NO: 544846 - DNA, 19 bp, Mus musculus
  siRNA target sequence for Cacna1d (NM_028981.1,3698-3716).
ccataccagtacaagttct

SEQ ID NO: 544847 - DNA, 19 bp, Mus musculus
  siRNA target sequence for Cacna1d (NM_028981.1,3727-3745).
gaactcctcgcctttcgaa

SEQ ID NO: 544848 - DNA, 19 bp, Mus musculus
  siRNA target sequence for Cacna1d (NM_028981.1,3737-3755).
cctttcgaatacatgatgt

SEQ ID NO: 544849 - DNA, 19 bp, Mus musculus
  siRNA target sequence for Cacna1d (NM_028981.1,3738-3756).
ctttcgaatacatgatgtt

SEQ ID NO: 544850 - DNA, 19 bp, Mus musculus
  siRNA target sequence for Cacna1d (NM_028981.1,3858-3876).
gggtcttcactgttgagat

SEQ ID NO: 544851 - DNA, 19 bp, Mus musculus
  siRNA target sequence for Cacna1d (NM_028981.1,3901-3919).
gcccaaggggtattttagt

SEQ ID NO: 544852 - DNA, 19 bp, Mus musculus
  siRNA target sequence for Cacna1d (NM_028981.1,3923-3941).
gcctggaacacgtttgact

SEQ ID NO: 544853 - DNA, 19 bp, Mus musculus
  siRNA target sequence for Cacna1d (NM_028981.1,3949-3967).
cgtaatcggcagcattata

SEQ ID NO: 544854 - DNA, 19 bp, Mus musculus
  siRNA target sequence for Cacna1d (NM_028981.1,4340-4358).
gacccagactccgattaca

SEQ ID NO: 544855 - DNA, 19 bp, Mus musculus
  siRNA target sequence for Cacna1d (NM_028981.1,4486-4504).
gactcgggactggtctatt

SEQ ID NO: 544856 - DNA, 19 bp, Mus musculus
  siRNA target sequence for Cacna1d (NM_028981.1,4488-4506).
ctcgggactggtctattct

SEQ ID NO: 544857 - DNA, 19 bp, Mus musculus
  siRNA target sequence for Cacna1d (NM_028981.1,4516-4534).
ccacttggacgaattcaaa

SEQ ID NO: 544858 - DNA, 19 bp, Mus musculus
  siRNA target sequence for Cacna1d (NM_028981.1,4517-4535).
cacttggacgaattcaaaa

SEQ ID NO: 544859 - DNA, 19 bp, Mus musculus
  siRNA target sequence for Cacna1d (NM_028981.1,4519-4537).
cttggacgaattcaaaaga

SEQ ID NO: 544860 - DNA, 19 bp, Mus musculus
  siRNA target sequence for Cacna1d (NM_028981.1,4522-4540).
ggacgaattcaaaagaata

SEQ ID NO: 544861 - DNA, 19 bp, Mus musculus
  siRNA target sequence for Cacna1d (NM_028981.1,4572-4590).
ggataaaacaccttgatgt

SEQ ID NO: 544862 - DNA, 19 bp, Mus musculus
  siRNA target sequence for Cacna1d (NM_028981.1,4622-4640).
ctggggtttggaaaattat

SEQ ID NO: 544863 - DNA, 19 bp, Mus musculus
  siRNA target sequence for Cacna1d (NM_028981.1,4644-4662).
cacaccgagtagcatgtaa

SEQ ID NO: 544864 - DNA, 19 bp, Mus musculus
  siRNA target sequence for Cacna1d (NM_028981.1,4646-4664).
caccgagtagcatgtaaga

SEQ ID NO: 544865 - DNA, 19 bp, Mus musculus
  siRNA target sequence for Cacna1d (NM_028981.1,4648-4666).
ccgagtagcatgtaagaga

SEQ ID NO: 544866 - DNA, 19 bp, Mus musculus
  siRNA target sequence for Cacna1d (NM_028981.1,4649-4667).
cgagtagcatgtaagagat

SEQ ID NO: 544867 - DNA, 19 bp, Mus musculus
  siRNA target sequence for Cacna1d (NM_028981.1,4650-4668).
gagtagcatgtaagagatt

SEQ ID NO: 544868 - DNA, 19 bp, Mus musculus
  siRNA target sequence for Cacna1d (NM_028981.1,4906-4924).
cctgatacaggactacttt

SEQ ID NO: 544869 - DNA, 19 bp, Mus musculus
  siRNA target sequence for Cacna1d (NM_028981.1,4991-5009).
gccctacaggcgggattaa

SEQ ID NO: 544870 - DNA, 19 bp, Mus musculus
  siRNA target sequence for Cacna1d (NM_028981.1,4994-5012).
ctacaggcgggattaagga

SEQ ID NO: 544871 - DNA, 19 bp, Mus musculus
  siRNA target sequence for Cacna1d (NM_028981.1,5033-5051).
gaaatccgacgggctatat

SEQ ID NO: 544872 - DNA, 19 bp, Mus musculus
  siRNA target sequence for Cacna1d (NM_028981.1,5128-5146).
gcttggaaaccatgtcaat

SEQ ID NO: 544873 - DNA, 19 bp, Mus musculus
  siRNA target sequence for Cacna1d (NM_028981.1,5133-5151).
gaaaccatgtcaatcatgt

SEQ ID NO: 544874 - DNA, 19 bp, Mus musculus
  siRNA target sequence for Cacna1d (NM_028981.1,5174-5192).
cttcagcagaccaatacca

SEQ ID NO: 544875 - DNA, 19 bp, Mus musculus
  siRNA target sequence for Cacna1d (NM_028981.1,5229-5247).
cacctgcaagtgatactga

SEQ ID NO: 544876 - DNA, 19 bp, Mus musculus
  siRNA target sequence for Cacna1d (NM_028981.1,5270-5288).
ggaaattcggggtgtcata

SEQ ID NO: 544877 - DNA, 19 bp, Mus musculus
  siRNA target sequence for Cacna1d (NM_028981.1,5271-5289).
gaaattcggggtgtcataa

SEQ ID NO: 544878 - DNA, 19 bp, Mus musculus
  siRNA target sequence for Cacna1d (NM_028981.1,5279-5297).
gggtgtcataaccatcata

SEQ ID NO: 544879 - DNA, 19 bp, Mus musculus
  siRNA target sequence for Cacna1d (NM_028981.1,5444-5462).
gatcgagagcttcaaagaa

SEQ ID NO: 544880 - DNA, 19 bp, Mus musculus
  siRNA target sequence for Cacna1d (NM_028981.1,5481-5499).
cccgctattacgagactta

SEQ ID NO: 544881 - DNA, 19 bp, Mus musculus
  siRNA target sequence for Cacna1d (NM_028981.1,5483-5501).
cgctattacgagacttaca

SEQ ID NO: 544882 - DNA, 19 bp, Mus musculus
  siRNA target sequence for Cacna1d (NM_028981.1,5484-5502).
gctattacgagacttacat

SEQ ID NO: 544883 - DNA, 19 bp, Mus musculus
  siRNA target sequence for Cacna1d (NM_028981.1,5485-5503).
ctattacgagacttacatt

SEQ ID NO: 544884 - DNA, 19 bp, Mus musculus
  siRNA target sequence for Cacna1d (NM_028981.1,5516-5534).
ggagatgagcaatttccaa

SEQ ID NO: 544885 - DNA, 19 bp, Mus musculus
  siRNA target sequence for Cacna1d (NM_028981.1,5652-5670).
gcaggcaaaactacaacta

SEQ ID NO: 544886 - DNA, 19 bp, Mus musculus
  siRNA target sequence for Cacna1d (NM_028981.1,5655-5673).
ggcaaaactacaactacta

SEQ ID NO: 544887 - DNA, 19 bp, Mus musculus
  siRNA target sequence for Cacna1d (NM_028981.1,5825-5843).
cggaggtcctccttcaact

SEQ ID NO: 544888 - DNA, 19 bp, Mus musculus
  siRNA target sequence for Cacna1d (NM_028981.1,5826-5844).
ggaggtcctccttcaactt

SEQ ID NO: 544889 - DNA, 19 bp, Mus musculus
  siRNA target sequence for Cacna1d (NM_028981.1,5827-5845).
gaggtcctccttcaacttt

SEQ ID NO: 544890 - DNA, 19 bp, Mus musculus
  siRNA target sequence for Cacna1d (NM_028981.1,5948-5966).
gccgttgcaggcctagatt

SEQ ID NO: 544891 - DNA, 19 bp, Mus musculus
  siRNA target sequence for Cacna1d (NM_028981.1,6054-6072).
catgctacacccctttgat

SEQ ID NO: 544892 - DNA, 19 bp, Mus musculus
  siRNA target sequence for Cacna1d (NM_028981.1,6074-6092).
caggtggaccgctcagaat

SEQ ID NO: 544893 - DNA, 19 bp, Mus musculus
  siRNA target sequence for Cacna1d (NM_028981.1,6152-6170).
gaacccgacatctcctata

SEQ ID NO: 544894 - DNA, 19 bp, Mus musculus
  siRNA target sequence for Cacna1d (NM_028981.1,6155-6173).
cccgacatctcctatagga

SEQ ID NO: 544895 - DNA, 19 bp, Mus musculus
  siRNA target sequence for Cacna1d (NM_028981.1,6254-6272).
gtggaggcagtcctgatat

SEQ ID NO: 544896 - DNA, 19 bp, Mus musculus
  siRNA target sequence for Cacna1d (NM_028981.1,6292-6310).
cgcgagggaccccaaattt

SEQ ID NO: 544897 - DNA, 19 bp, Mus musculus
  siRNA target sequence for Cacna1d (NM_028981.1,6294-6312).
cgagggaccccaaatttgt

SEQ ID NO: 544898 - DNA, 19 bp, Mus musculus
  siRNA target sequence for Cacna1d (NM_028981.1,6315-6333).
cagcgacaaaacatgagat

SEQ ID NO: 544899 - DNA, 19 bp, Mus musculus
  siRNA target sequence for Cacna1e (NM_009782.2,574-592).
cgcctacaagcagtcaaaa

SEQ ID NO: 544900 - DNA, 19 bp, Mus musculus
  siRNA target sequence for Cacna1e (NM_009782.2,632-650).
ccagtccggcagaactgtt

SEQ ID NO: 544901 - DNA, 19 bp, Mus musculus
  siRNA target sequence for Cacna1e (NM_009782.2,633-651).
cagtccggcagaactgttt

SEQ ID NO: 544902 - DNA, 19 bp, Mus musculus
  siRNA target sequence for Cacna1e (NM_009782.2,670-688).
gttcatcttcggagaagat

SEQ ID NO: 544903 - DNA, 19 bp, Mus musculus
  siRNA target sequence for Cacna1e (NM_009782.2,729-747).
cgccatttgagtacatgat

SEQ ID NO: 544904 - DNA, 19 bp, Mus musculus
  siRNA target sequence for Cacna1e (NM_009782.2,835-853).
ggagaagacagaaccatat

SEQ ID NO: 544905 - DNA, 19 bp, Mus musculus
  siRNA target sequence for Cacna1e (NM_009782.2,1060-1078).
gctggtatcaggaatacct

SEQ ID NO: 544906 - DNA, 19 bp, Mus musculus
  siRNA target sequence for Cacna1e (NM_009782.2,1219-1237).
catgaacaattcaggtatt

SEQ ID NO: 544907 - DNA, 19 bp, Mus musculus
  siRNA target sequence for Cacna1e (NM_009782.2,1222-1240).
gaacaattcaggtattcta

SEQ ID NO: 544908 - DNA, 19 bp, Mus musculus
  siRNA target sequence for Cacna1e (NM_009782.2,1284-1302).
cggctggttatgaatgtaa

SEQ ID NO: 544909 - DNA, 19 bp, Mus musculus
  siRNA target sequence for Cacna1e (NM_009782.2,1325-1343).
gggatcacccagtttgaca

SEQ ID NO: 544910 - DNA, 19 bp, Mus musculus
  siRNA target sequence for Cacna1e (NM_009782.2,1326-1344).
ggatcacccagtttgacaa

SEQ ID NO: 544911 - DNA, 19 bp, Mus musculus
  siRNA target sequence for Cacna1e (NM_009782.2,1367-1385).
gtcttccaatgcatcacta

SEQ ID NO: 544912 - DNA, 19 bp, Mus musculus
  siRNA target sequence for Cacna1e (NM_009782.2,1401-1419).
ctgtgctgtacaataccaa

SEQ ID NO: 544913 - DNA, 19 bp, Mus musculus
  siRNA target sequence for Cacna1e (NM_009782.2,1471-1489).
catcggatccttctttgtt

SEQ ID NO: 544914 - DNA, 19 bp, Mus musculus
  siRNA target sequence for Cacna1e (NM_009782.2,1640-1658).
gtcatgcttgctgaagaaa

SEQ ID NO: 544915 - DNA, 19 bp, Mus musculus
  siRNA target sequence for Cacna1e (NM_009782.2,1694-1712).
cgaagggcaaccatcaaaa

SEQ ID NO: 544916 - DNA, 19 bp, Mus musculus
  siRNA target sequence for Cacna1e (NM_009782.2,1748-1766).
gatgagcactgcgttgata

SEQ ID NO: 544917 - DNA, 19 bp, Mus musculus
  siRNA target sequence for Cacna1e (NM_009782.2,1751-1769).
gagcactgcgttgatatct

SEQ ID NO: 544918 - DNA, 19 bp, Mus musculus
  siRNA target sequence for Cacna1e (NM_009782.2,1753-1771).
gcactgcgttgatatctct

SEQ ID NO: 544919 - DNA, 19 bp, Mus musculus
  siRNA target sequence for Cacna1e (NM_009782.2,1754-1772).
cactgcgttgatatctctt

SEQ ID NO: 544920 - DNA, 19 bp, Mus musculus
  siRNA target sequence for Cacna1e (NM_009782.2,1817-1835).
gtagatggggcctcctatt

SEQ ID NO: 544921 - DNA, 19 bp, Mus musculus
  siRNA target sequence for Cacna1e (NM_009782.2,1850-1868).
cggcttctgcgcatctcta

SEQ ID NO: 544922 - DNA, 19 bp, Mus musculus
  siRNA target sequence for Cacna1e (NM_009782.2,1879-1897).
ggtcaagtcccaagtcttt

SEQ ID NO: 544923 - DNA, 19 bp, Mus musculus
  siRNA target sequence for Cacna1e (NM_009782.2,1938-1956).
gtgtggccattgttcatca

SEQ ID NO: 544924 - DNA, 19 bp, Mus musculus
  siRNA target sequence for Cacna1e (NM_009782.2,2057-2075).
ccacgcctctattttcact

SEQ ID NO: 544925 - DNA, 19 bp, Mus musculus
  siRNA target sequence for Cacna1e (NM_009782.2,2126-2144).
gttgtctgggcaatcttca

SEQ ID NO: 544926 - DNA, 19 bp, Mus musculus
  siRNA target sequence for Cacna1e (NM_009782.2,2183-2201).
ctccggctcctaaggatat

SEQ ID NO: 544927 - DNA, 19 bp, Mus musculus
  siRNA target sequence for Cacna1e (NM_009782.2,2185-2203).
ccggctcctaaggatattt

SEQ ID NO: 544928 - DNA, 19 bp, Mus musculus
  siRNA target sequence for Cacna1e (NM_009782.2,2186-2204).
cggctcctaaggatattta

SEQ ID NO: 544929 - DNA, 19 bp, Mus musculus
  siRNA target sequence for Cacna1e (NM_009782.2,2188-2206).
gctcctaaggatatttaaa

SEQ ID NO: 544930 - DNA, 19 bp, Mus musculus
  siRNA target sequence for Cacna1e (NM_009782.2,2191-2209).
cctaaggatatttaaaata

SEQ ID NO: 544931 - DNA, 19 bp, Mus musculus
  siRNA target sequence for Cacna1e (NM_009782.2,2339-2357).
ggaggcaggtttaacttta

SEQ ID NO: 544932 - DNA, 19 bp, Mus musculus
  siRNA target sequence for Cacna1e (NM_009782.2,2344-2362).
caggtttaactttaatgat

SEQ ID NO: 544933 - DNA, 19 bp, Mus musculus
  siRNA target sequence for Cacna1e (NM_009782.2,2369-2387).
ccttcagctaattttgaca

SEQ ID NO: 544934 - DNA, 19 bp, Mus musculus
  siRNA target sequence for Cacna1e (NM_009782.2,2439-2457).
ggaatgaggtgatgtacaa

SEQ ID NO: 544935 - DNA, 19 bp, Mus musculus
  siRNA target sequence for Cacna1e (NM_009782.2,2496-2514).
ggtctgccatctacttcat

SEQ ID NO: 544936 - DNA, 19 bp, Mus musculus
  siRNA target sequence for Cacna1e (NM_009782.2,2497-2515).
gtctgccatctacttcatt

SEQ ID NO: 544937 - DNA, 19 bp, Mus musculus
  siRNA target sequence for Cacna1e (NM_009782.2,2536-2554).
ctacacgctgctaaatgta

SEQ ID NO: 544938 - DNA, 19 bp, Mus musculus
  siRNA target sequence for Cacna1e (NM_009782.2,2541-2559).
cgctgctaaatgtattctt

SEQ ID NO: 544939 - DNA, 19 bp, Mus musculus
  siRNA target sequence for Cacna1e (NM_009782.2,2686-2704).
caacatgccttccattgaa

SEQ ID NO: 544940 - DNA, 19 bp, Mus musculus
  siRNA target sequence for Cacna1e (NM_009782.2,2689-2707).
catgccttccattgaaaga

SEQ ID NO: 544941 - DNA, 19 bp, Mus musculus
  siRNA target sequence for Cacna1e (NM_009782.2,2841-2859).
gccaagaagccctcaacaa

SEQ ID NO: 544942 - DNA, 19 bp, Mus musculus
  siRNA target sequence for Cacna1e (NM_009782.2,3712-3730).
ctcgacagtggtgaacatt

SEQ ID NO: 544943 - DNA, 19 bp, Mus musculus
  siRNA target sequence for Cacna1e (NM_009782.2,3826-3844).
gaagcgagagactggaaaa

SEQ ID NO: 544944 - DNA, 19 bp, Mus musculus
  siRNA target sequence for Cacna1e (NM_009782.2,3919-3937).
gaacctacgctactttgaa

SEQ ID NO: 544945 - DNA, 19 bp, Mus musculus
  siRNA target sequence for Cacna1e (NM_009782.2,3983-4001).
gccgaggaccctgtactaa

SEQ ID NO: 544946 - DNA, 19 bp, Mus musculus
  siRNA target sequence for Cacna1e (NM_009782.2,3985-4003).
cgaggaccctgtactaact

SEQ ID NO: 544947 - DNA, 19 bp, Mus musculus
  siRNA target sequence for Cacna1e (NM_009782.2,3986-4004).
gaggaccctgtactaacta

SEQ ID NO: 544948 - DNA, 19 bp, Mus musculus
  siRNA target sequence for Cacna1e (NM_009782.2,3989-4007).
gaccctgtactaactaact

SEQ ID NO: 544949 - DNA, 19 bp, Mus musculus
  siRNA target sequence for Cacna1e (NM_009782.2,4215-4233).
gggatatcaagactatcaa

SEQ ID NO: 544950 - DNA, 19 bp, Mus musculus
  siRNA target sequence for Cacna1e (NM_009782.2,4253-4271).
gttctgcggccactgaaaa

SEQ ID NO: 544951 - DNA, 19 bp, Mus musculus
  siRNA target sequence for Cacna1e (NM_009782.2,4450-4468).
ggagtgcataggcaactat

SEQ ID NO: 544952 - DNA, 19 bp, Mus musculus
  siRNA target sequence for Cacna1e (NM_009782.2,4455-4473).
gcataggcaactatgtaga

SEQ ID NO: 544953 - DNA, 19 bp, Mus musculus
  siRNA target sequence for Cacna1e (NM_009782.2,4507-4525).
ggaatggaagcgtcatgaa

SEQ ID NO: 544954 - DNA, 19 bp, Mus musculus
  siRNA target sequence for Cacna1e (NM_009782.2,4508-4526).
gaatggaagcgtcatgaat

SEQ ID NO: 544955 - DNA, 19 bp, Mus musculus
  siRNA target sequence for Cacna1e (NM_009782.2,4512-4530).
ggaagcgtcatgaattcca

SEQ ID NO: 544956 - DNA, 19 bp, Mus musculus
  siRNA target sequence for Cacna1e (NM_009782.2,4518-4536).
gtcatgaattccactatga

SEQ ID NO: 544957 - DNA, 19 bp, Mus musculus
  siRNA target sequence for Cacna1e (NM_009782.2,4897-4915).
ctccccatcctttgagtat

SEQ ID NO: 544958 - DNA, 19 bp, Mus musculus
  siRNA target sequence for Cacna1e (NM_009782.2,5034-5052).
ccctggagtgtgtcctaaa

SEQ ID NO: 544959 - DNA, 19 bp, Mus musculus
  siRNA target sequence for Cacna1e (NM_009782.2,5061-5079).
ctttcggcttcctgaacta

SEQ ID NO: 544960 - DNA, 19 bp, Mus musculus
  siRNA target sequence for Cacna1e (NM_009782.2,5116-5134).
ggtgatcggcagtatcaca

SEQ ID NO: 544961 - DNA, 19 bp, Mus musculus
  siRNA target sequence for Cacna1e (NM_009782.2,5204-5222).
cgagctgcacggctcataa

SEQ ID NO: 544962 - DNA, 19 bp, Mus musculus
  siRNA target sequence for Cacna1e (NM_009782.2,5205-5223).
gagctgcacggctcataaa

SEQ ID NO: 544963 - DNA, 19 bp, Mus musculus
  siRNA target sequence for Cacna1e (NM_009782.2,5520-5538).
caccctcagggcagaatga

SEQ ID NO: 544964 - DNA, 19 bp, Mus musculus
  siRNA target sequence for Cacna1e (NM_009782.2,5556-5574).
ctgacctggcctacgttta

SEQ ID NO: 544965 - DNA, 19 bp, Mus musculus
  siRNA target sequence for Cacna1e (NM_009782.2,5558-5576).
gacctggcctacgtttatt

SEQ ID NO: 544966 - DNA, 19 bp, Mus musculus
  siRNA target sequence for Cacna1e (NM_009782.2,5560-5578).
cctggcctacgtttatttt

SEQ ID NO: 544967 - DNA, 19 bp, Mus musculus
  siRNA target sequence for Cacna1e (NM_009782.2,5732-5750).
gcatgtggccgcatccatt

SEQ ID NO: 544968 - DNA, 19 bp, Mus musculus
  siRNA target sequence for Cacna1e (NM_009782.2,5733-5751).
catgtggccgcatccatta

SEQ ID NO: 544969 - DNA, 19 bp, Mus musculus
  siRNA target sequence for Cacna1e (NM_009782.2,5746-5764).
ccattacactgagatgtat

SEQ ID NO: 544970 - DNA, 19 bp, Mus musculus
  siRNA target sequence for Cacna1e (NM_009782.2,5792-5810).
ctaggcctcggcaagagat

SEQ ID NO: 544971 - DNA, 19 bp, Mus musculus
  siRNA target sequence for Cacna1e (NM_009782.2,5814-5832).
cctccaaagtggcctataa

SEQ ID NO: 544972 - DNA, 19 bp, Mus musculus
  siRNA target sequence for Cacna1e (NM_009782.2,5909-5927).
cggacagctctggacatta

SEQ ID NO: 544973 - DNA, 19 bp, Mus musculus
  siRNA target sequence for Cacna1e (NM_009782.2,5913-5931).
cagctctggacattaaaat

SEQ ID NO: 544974 - DNA, 19 bp, Mus musculus
  siRNA target sequence for Cacna1e (NM_009782.2,5999-6017).
cctcacctgtcccaaaaga

SEQ ID NO: 544975 - DNA, 19 bp, Mus musculus
  siRNA target sequence for Cacna1e (NM_009782.2,6000-6018).
ctcacctgtcccaaaagat

SEQ ID NO: 544976 - DNA, 19 bp, Mus musculus
  siRNA target sequence for Cacna1e (NM_009782.2,6192-6210).
ctcaggagatcattgctaa

SEQ ID NO: 544977 - DNA, 19 bp, Mus musculus
  siRNA target sequence for Cacna1e (NM_009782.2,6264-6282).
ggagtggatacccttcaat

SEQ ID NO: 544978 - DNA, 19 bp, Mus musculus
  siRNA target sequence for Cacna1e (NM_009782.2,6294-6312).
cccctcaagaaatattcca

SEQ ID NO: 544979 - DNA, 19 bp, Mus musculus
  siRNA target sequence for Cacna1e (NM_009782.2,6330-6348).
cagcggatgatggacaatt

SEQ ID NO: 544980 - DNA, 19 bp, Mus musculus
  siRNA target sequence for Cacna1e (NM_009782.2,6333-6351).
cggatgatggacaattcca

SEQ ID NO: 544981 - DNA, 19 bp, Mus musculus
  siRNA target sequence for Cacna1e (NM_009782.2,6385-6403).
ctctatgcgacgttcattt

SEQ ID NO: 544982 - DNA, 19 bp, Mus musculus
  siRNA target sequence for Cacna1e (NM_009782.2,6391-6409).
gcgacgttcattttctaca

SEQ ID NO: 544983 - DNA, 19 bp, Mus musculus
  siRNA target sequence for Cacna1e (NM_009782.2,6413-6431).
cgggataagcgttcaaatt

SEQ ID NO: 544984 - DNA, 19 bp, Mus musculus
  siRNA target sequence for Cacna1e (NM_009782.2,6465-6483).
gcagtgaaaacacttacaa

SEQ ID NO: 544985 - DNA, 19 bp, Mus musculus
  siRNA target sequence for Cacna1e (NM_009782.2,6591-6609).
gccgatccaaagaacgaaa

SEQ ID NO: 544986 - DNA, 19 bp, Mus musculus
  siRNA target sequence for Cacna1e (NM_009782.2,6626-6644).
gatgtctcccgctgcaatt

SEQ ID NO: 544987 - DNA, 19 bp, Mus musculus
  siRNA target sequence for Cacna1e (NM_009782.2,6631-6649).
ctcccgctgcaattctgaa

SEQ ID NO: 544988 - DNA, 19 bp, Mus musculus
  siRNA target sequence for Cacna1e (NM_009782.2,6741-6759).
gtaccggttccctaagtga

SEQ ID NO: 544989 - DNA, 19 bp, Mus musculus
  siRNA target sequence for Cacna1f (NM_019582.1,61-79).
gaagtcgggaaagatacaa

SEQ ID NO: 544990 - DNA, 19 bp, Mus musculus
  siRNA target sequence for Cacna1f (NM_019582.1,145-163).
ccaactgtggggactgata

SEQ ID NO: 544991 - DNA, 19 bp, Mus musculus
  siRNA target sequence for Cacna1f (NM_019582.1,197-215).
gaaggacccagcacaacaa

SEQ ID NO: 544992 - DNA, 19 bp, Mus musculus
  siRNA target sequence for Cacna1f (NM_019582.1,267-285).
ctgcctcacccttactaat

SEQ ID NO: 544993 - DNA, 19 bp, Mus musculus
  siRNA target sequence for Cacna1f (NM_019582.1,297-315).
gtcctgcatcagcattgta

SEQ ID NO: 544994 - DNA, 19 bp, Mus musculus
  siRNA target sequence for Cacna1f (NM_019582.1,316-334).
gagtggaagccttttgata

SEQ ID NO: 544995 - DNA, 19 bp, Mus musculus
  siRNA target sequence for Cacna1f (NM_019582.1,366-384).
cgtggcattgggggtatat

SEQ ID NO: 544996 - DNA, 19 bp, Mus musculus
  siRNA target sequence for Cacna1f (NM_019582.1,367-385).
gtggcattgggggtatata

SEQ ID NO: 544997 - DNA, 19 bp, Mus musculus
  siRNA target sequence for Cacna1f (NM_019582.1,536-554).
ggaacctgctcgacttcat

SEQ ID NO: 544998 - DNA, 19 bp, Mus musculus
  siRNA target sequence for Cacna1f (NM_019582.1,980-998).
cgaacttcgacaatttttt

SEQ ID NO: 544999 - DNA, 19 bp, Mus musculus
  siRNA target sequence for Cacna1f (NM_019582.1,1541-1559).
gcctaaacaagattatgaa

SEQ ID NO: 545000 - DNA, 19 bp, Mus musculus
  siRNA target sequence for Cacna1f (NM_019582.1,1719-1737).
cacccagacccaagagtat

SEQ ID NO: 545001 - DNA, 19 bp, Mus musculus
  siRNA target sequence for Cacna1f (NM_019582.1,1728-1746).
ccaagagtatgccaacaaa

SEQ ID NO: 545002 - DNA, 19 bp, Mus musculus
  siRNA target sequence for Cacna1f (NM_019582.1,1771-1789).
gagatgctcctcaaactgt

SEQ ID NO: 545003 - DNA, 19 bp, Mus musculus
  siRNA target sequence for Cacna1f (NM_019582.1,1911-1929).
ctcagtgctccgatgtgta

SEQ ID NO: 545004 - DNA, 19 bp, Mus musculus
  siRNA target sequence for Cacna1f (NM_019582.1,1976-1994).
gcaatctggtggcatcttt

SEQ ID NO: 545005 - DNA, 19 bp, Mus musculus
  siRNA target sequence for Cacna1f (NM_019582.1,1987-2005).
gcatctttgctcaattcca

SEQ ID NO: 545006 - DNA, 19 bp, Mus musculus
  siRNA target sequence for Cacna1f (NM_019582.1,1988-2006).
catctttgctcaattccat

SEQ ID NO: 545007 - DNA, 19 bp, Mus musculus
  siRNA target sequence for Cacna1f (NM_019582.1,2115-2133).
caagaggagcacctttgat

SEQ ID NO: 545008 - DNA, 19 bp, Mus musculus
  siRNA target sequence for Cacna1f (NM_019582.1,2120-2138).
ggagcacctttgatacctt

SEQ ID NO: 545009 - DNA, 19 bp, Mus musculus
  siRNA target sequence for Cacna1f (NM_019582.1,2186-2204).
ggaacgttgtcatgtatga

SEQ ID NO: 545010 - DNA, 19 bp, Mus musculus
  siRNA target sequence for Cacna1f (NM_019582.1,2187-2205).
gaacgttgtcatgtatgat

SEQ ID NO: 545011 - DNA, 19 bp, Mus musculus
  siRNA target sequence for Cacna1f (NM_019582.1,2543-2561).
caggacatgtggaactctt

SEQ ID NO: 545012 - DNA, 19 bp, Mus musculus
  siRNA target sequence for Cacna1f (NM_019582.1,2649-2667).
ggcctgccacacactcata

SEQ ID NO: 545013 - DNA, 19 bp, Mus musculus
  siRNA target sequence for Cacna1f (NM_019582.1,2687-2705).
gtctcatcctagtgttcat

SEQ ID NO: 545014 - DNA, 19 bp, Mus musculus
  siRNA target sequence for Cacna1f (NM_019582.1,2752-2770).
cactccttccgaaaccata

SEQ ID NO: 545015 - DNA, 19 bp, Mus musculus
  siRNA target sequence for Cacna1f (NM_019582.1,2756-2774).
ccttccgaaaccatattct

SEQ ID NO: 545016 - DNA, 19 bp, Mus musculus
  siRNA target sequence for Cacna1f (NM_019582.1,2851-2869).
ctgcaccgaggctctttct

SEQ ID NO: 545017 - DNA, 19 bp, Mus musculus
  siRNA target sequence for Cacna1f (NM_019582.1,2868-2886).
ctgccgtagctggttcaat

SEQ ID NO: 545018 - DNA, 19 bp, Mus musculus
  siRNA target sequence for Cacna1f (NM_019582.1,2872-2890).
cgtagctggttcaatctgt

SEQ ID NO: 545019 - DNA, 19 bp, Mus musculus
  siRNA target sequence for Cacna1f (NM_019582.1,3060-3078).
catcggaaacatcatgatt

SEQ ID NO: 545020 - DNA, 19 bp, Mus musculus
  siRNA target sequence for Cacna1f (NM_019582.1,3244-3262).
ctctgggtcaacagtgatt

SEQ ID NO: 545021 - DNA, 19 bp, Mus musculus
  siRNA target sequence for Cacna1f (NM_019582.1,3250-3268).
gtcaacagtgattttaact

SEQ ID NO: 545022 - DNA, 19 bp, Mus musculus
  siRNA target sequence for Cacna1f (NM_019582.1,3323-3341).
gctggcctgcgctactata

SEQ ID NO: 545023 - DNA, 19 bp, Mus musculus
  siRNA target sequence for Cacna1f (NM_019582.1,3326-3344).
ggcctgcgctactatacaa

SEQ ID NO: 545024 - DNA, 19 bp, Mus musculus
  siRNA target sequence for Cacna1f (NM_019582.1,3367-3385).
gatgagggccctatctaca

SEQ ID NO: 545025 - DNA, 19 bp, Mus musculus
  siRNA target sequence for Cacna1f (NM_019582.1,3370-3388).
gagggccctatctacaatt

SEQ ID NO: 545026 - DNA, 19 bp, Mus musculus
  siRNA target sequence for Cacna1f (NM_019582.1,3374-3392).
gccctatctacaattacca

SEQ ID NO: 545027 - DNA, 19 bp, Mus musculus
  siRNA target sequence for Cacna1f (NM_019582.1,3399-3417).
gatatcagtattcttcatt

SEQ ID NO: 545028 - DNA, 19 bp, Mus musculus
  siRNA target sequence for Cacna1f (NM_019582.1,3463-3481).
ggctttgttatcatcacat

SEQ ID NO: 545029 - DNA, 19 bp, Mus musculus
  siRNA target sequence for Cacna1f (NM_019582.1,3464-3482).
gctttgttatcatcacatt

SEQ ID NO: 545030 - DNA, 19 bp, Mus musculus
  siRNA target sequence for Cacna1f (NM_019582.1,3493-3511).
ggagagcaggagtaccaaa

SEQ ID NO: 545031 - DNA, 19 bp, Mus musculus
  siRNA target sequence for Cacna1f (NM_019582.1,3494-3512).
gagagcaggagtaccaaaa

SEQ ID NO: 545032 - DNA, 19 bp, Mus musculus
  siRNA target sequence for Cacna1f (NM_019582.1,3498-3516).
gcaggagtaccaaaactgt

SEQ ID NO: 545033 - DNA, 19 bp, Mus musculus
  siRNA target sequence for Cacna1f (NM_019582.1,3587-3605).
ctaagaatcctcatcagta

SEQ ID NO: 545034 - DNA, 19 bp, Mus musculus
  siRNA target sequence for Cacna1f (NM_019582.1,3635-3653).
cctttgagtacctcatgtt

SEQ ID NO: 545035 - DNA, 19 bp, Mus musculus
  siRNA target sequence for Cacna1f (NM_019582.1,3703-3721).
cagactgctccctttaact

SEQ ID NO: 545036 - DNA, 19 bp, Mus musculus
  siRNA target sequence for Cacna1f (NM_019582.1,3705-3723).
gactgctccctttaactat

SEQ ID NO: 545037 - DNA, 19 bp, Mus musculus
  siRNA target sequence for Cacna1f (NM_019582.1,3791-3809).
cctttaaacccaagcatta

SEQ ID NO: 545038 - DNA, 19 bp, Mus musculus
  siRNA target sequence for Cacna1f (NM_019582.1,3830-3848).
cgtttgatgctctcattgt

SEQ ID NO: 545039 - DNA, 19 bp, Mus musculus
  siRNA target sequence for Cacna1f (NM_019582.1,3930-3948).
catatctatcacgttcttt

SEQ ID NO: 545040 - DNA, 19 bp, Mus musculus
  siRNA target sequence for Cacna1f (NM_019582.1,4051-4069).
gtggcacttctcatagcaa

SEQ ID NO: 545041 - DNA, 19 bp, Mus musculus
  siRNA target sequence for Cacna1f (NM_019582.1,4055-4073).
cacttctcatagcaatgat

SEQ ID NO: 545042 - DNA, 19 bp, Mus musculus
  siRNA target sequence for Cacna1f (NM_019582.1,4057-4075).
cttctcatagcaatgatat

SEQ ID NO: 545043 - DNA, 19 bp, Mus musculus
  siRNA target sequence for Cacna1f (NM_019582.1,4060-4078).
ctcatagcaatgatattct

SEQ ID NO: 545044 - DNA, 19 bp, Mus musculus
  siRNA target sequence for Cacna1f (NM_019582.1,4126-4144).
caggacggcacgcagataa

SEQ ID NO: 545045 - DNA, 19 bp, Mus musculus
  siRNA target sequence for Cacna1f (NM_019582.1,4131-4149).
cggcacgcagataaatcga

SEQ ID NO: 545046 - DNA, 19 bp, Mus musculus
  siRNA target sequence for Cacna1f (NM_019582.1,4132-4150).
ggcacgcagataaatcgaa

SEQ ID NO: 545047 - DNA, 19 bp, Mus musculus
  siRNA target sequence for Cacna1f (NM_019582.1,4133-4151).
gcacgcagataaatcgaaa

SEQ ID NO: 545048 - DNA, 19 bp, Mus musculus
  siRNA target sequence for Cacna1f (NM_019582.1,4140-4158).
gataaatcgaaacaacaat

SEQ ID NO: 545049 - DNA, 19 bp, Mus musculus
  siRNA target sequence for Cacna1f (NM_019582.1,4236-4254).
cagccttccaggaaatcga

SEQ ID NO: 545050 - DNA, 19 bp, Mus musculus
  siRNA target sequence for Cacna1f (NM_019582.1,4276-4294).
ggcccaggcgaggaattta

SEQ ID NO: 545051 - DNA, 19 bp, Mus musculus
  siRNA target sequence for Cacna1f (NM_019582.1,4279-4297).
ccaggcgaggaatttacct

SEQ ID NO: 545052 - DNA, 19 bp, Mus musculus
  siRNA target sequence for Cacna1f (NM_019582.1,4349-4367).
ccttcctgattataaatct

SEQ ID NO: 545053 - DNA, 19 bp, Mus musculus
  siRNA target sequence for Cacna1f (NM_019582.1,4396-4414).
gattacctaaccagagatt

SEQ ID NO: 545054 - DNA, 19 bp, Mus musculus
  siRNA target sequence for Cacna1f (NM_019582.1,4452-4470).
gaggatctggtctgaatat

SEQ ID NO: 545055 - DNA, 19 bp, Mus musculus
  siRNA target sequence for Cacna1f (NM_019582.1,4454-4472).
ggatctggtctgaatatga

SEQ ID NO: 545056 - DNA, 19 bp, Mus musculus
  siRNA target sequence for Cacna1f (NM_019582.1,4533-4551).
gcccccattgggatttgga

SEQ ID NO: 545057 - DNA, 19 bp, Mus musculus
  siRNA target sequence for Cacna1f (NM_019582.1,4534-4552).
cccccattgggatttggaa

SEQ ID NO: 545058 - DNA, 19 bp, Mus musculus
  siRNA target sequence for Cacna1f (NM_019582.1,4535-4553).
ccccattgggatttggaaa

SEQ ID NO: 545059 - DNA, 19 bp, Mus musculus
  siRNA target sequence for Cacna1f (NM_019582.1,4710-4728).
gcttcggatggtcatcaaa

SEQ ID NO: 545060 - DNA, 19 bp, Mus musculus
  siRNA target sequence for Cacna1f (NM_019582.1,4714-4732).
cggatggtcatcaaaaaga

SEQ ID NO: 545061 - DNA, 19 bp, Mus musculus
  siRNA target sequence for Cacna1f (NM_019582.1,4715-4733).
ggatggtcatcaaaaagat

SEQ ID NO: 545062 - DNA, 19 bp, Mus musculus
  siRNA target sequence for Cacna1f (NM_019582.1,4741-4759).
cggataaagcagaaattgt

SEQ ID NO: 545063 - DNA, 19 bp, Mus musculus
  siRNA target sequence for Cacna1f (NM_019582.1,5083-5101).
caatctcgatggaactcta

SEQ ID NO: 545064 - DNA, 19 bp, Mus musculus
  siRNA target sequence for Cacna1f (NM_019582.1,5089-5107).
cgatggaactctaggattt

SEQ ID NO: 545065 - DNA, 19 bp, Mus musculus
  siRNA target sequence for Cacna1f (NM_019582.1,5108-5126).
cggtgtctctacctgttaa

SEQ ID NO: 545066 - DNA, 19 bp, Mus musculus
  siRNA target sequence for Cacna1f (NM_019582.1,5242-5260).
ggggttttcatgttcacta

SEQ ID NO: 545067 - DNA, 19 bp, Mus musculus
  siRNA target sequence for Cacna1f (NM_019582.1,5243-5261).
gggttttcatgttcactat

SEQ ID NO: 545068 - DNA, 19 bp, Mus musculus
  siRNA target sequence for Cacna1f (NM_019582.1,5373-5391).
cttcgaacccagtcctttt

SEQ ID NO: 545069 - DNA, 19 bp, Mus musculus
  siRNA target sequence for Cacna1f (NM_019582.1,5510-5528).
gttgtgaagatttacctat

SEQ ID NO: 545070 - DNA, 19 bp, Mus musculus
  siRNA target sequence for Cacna1f (NM_019582.1,5601-5619).
gaagggtcgactgctatat

SEQ ID NO: 545071 - DNA, 19 bp, Mus musculus
  siRNA target sequence for Cacna1f (NM_019582.1,5631-5649).
gttggtggaggaatctaca

SEQ ID NO: 545072 - DNA, 19 bp, Mus musculus
  siRNA target sequence for Cacna1f (NM_019582.1,5787-5805).
cgaaggcctaggtctcttt

SEQ ID NO: 545073 - DNA, 19 bp, Mus musculus
  siRNA target sequence for Cacna1f (NM_019582.1,5807-5825).
cccaagacccacgatttgt

SEQ ID NO: 545074 - DNA, 19 bp, Mus musculus
  siRNA target sequence for Cacna1h (NM_021415.2,278-296).
gcctccgactggtttgtaa

SEQ ID NO: 545075 - DNA, 19 bp, Mus musculus
  siRNA target sequence for Cacna1h (NM_021415.2,298-316).
ccgtggttcgagcacatta

SEQ ID NO: 545076 - DNA, 19 bp, Mus musculus
  siRNA target sequence for Cacna1h (NM_021415.2,302-320).
ggttcgagcacattagcat

SEQ ID NO: 545077 - DNA, 19 bp, Mus musculus
  siRNA target sequence for Cacna1h (NM_021415.2,475-493).
ggactgttcggccagaaat

SEQ ID NO: 545078 - DNA, 19 bp, Mus musculus
  siRNA target sequence for Cacna1h (NM_021415.2,478-496).
ctgttcggccagaaatgct

SEQ ID NO: 545079 - DNA, 19 bp, Mus musculus
  siRNA target sequence for Cacna1h (NM_021415.2,793-811).
gccttcgtcaggaacaaca

SEQ ID NO: 545080 - DNA, 19 bp, Mus musculus
  siRNA target sequence for Cacna1h (NM_021415.2,794-812).
ccttcgtcaggaacaacaa

SEQ ID NO: 545081 - DNA, 19 bp, Mus musculus
  siRNA target sequence for Cacna1h (NM_021415.2,818-836).
ccttcttgcggccatacta

SEQ ID NO: 545082 - DNA, 19 bp, Mus musculus
  siRNA target sequence for Cacna1h (NM_021415.2,851-869).
gcgaggagaacccattcat

SEQ ID NO: 545083 - DNA, 19 bp, Mus musculus
  siRNA target sequence for Cacna1h (NM_021415.2,886-904).
gacaacggcatgcagaaat

SEQ ID NO: 545084 - DNA, 19 bp, Mus musculus
  siRNA target sequence for Cacna1h (NM_021415.2,1165-1183).
gatgcccactcgttctaca

SEQ ID NO: 545085 - DNA, 19 bp, Mus musculus
  siRNA target sequence for Cacna1h (NM_021415.2,1168-1186).
gcccactcgttctacaact

SEQ ID NO: 545086 - DNA, 19 bp, Mus musculus
  siRNA target sequence for Cacna1h (NM_021415.2,1169-1187).
cccactcgttctacaactt

SEQ ID NO: 545087 - DNA, 19 bp, Mus musculus
  siRNA target sequence for Cacna1h (NM_021415.2,1396-1414).
cacatcttccgaaaggtta

SEQ ID NO: 545088 - DNA, 19 bp, Mus musculus
  siRNA target sequence for Cacna1h (NM_021415.2,1398-1416).
catcttccgaaaggttaaa

SEQ ID NO: 545089 - DNA, 19 bp, Mus musculus
  siRNA target sequence for Cacna1h (NM_021415.2,2091-2109).
gaagagctgcccatattgt

SEQ ID NO: 545090 - DNA, 19 bp, Mus musculus
  siRNA target sequence for Cacna1h (NM_021415.2,2320-2338).
cgcctctgggcttccttta

SEQ ID NO: 545091 - DNA, 19 bp, Mus musculus
  siRNA target sequence for Cacna1h (NM_021415.2,2396-2414).
ccatcctcgtcaatactct

SEQ ID NO: 545092 - DNA, 19 bp, Mus musculus
  siRNA target sequence for Cacna1h (NM_021415.2,2960-2978).
gggctgccctttactttgt

SEQ ID NO: 545093 - DNA, 19 bp, Mus musculus
  siRNA target sequence for Cacna1h (NM_021415.2,3073-3091).
gacaccgatgaggataaga

SEQ ID NO: 545094 - DNA, 19 bp, Mus musculus
  siRNA target sequence for Cacna1h (NM_021415.2,3079-3097).
gatgaggataagacatcta

SEQ ID NO: 545095 - DNA, 19 bp, Mus musculus
  siRNA target sequence for Cacna1h (NM_021415.2,3102-3120).
cctagaggaagatttcgat

SEQ ID NO: 545096 - DNA, 19 bp, Mus musculus
  siRNA target sequence for Cacna1h (NM_021415.2,3274-3292).
gacatggcccacactcttt

SEQ ID NO: 545097 - DNA, 19 bp, Mus musculus
  siRNA target sequence for Cacna1h (NM_021415.2,3747-3765).
cgcagcagagtttgatgat

SEQ ID NO: 545098 - DNA, 19 bp, Mus musculus
  siRNA target sequence for Cacna1h (NM_021415.2,3901-3919).
gtcatcgcacacaagatgt

SEQ ID NO: 545099 - DNA, 19 bp, Mus musculus
  siRNA target sequence for Cacna1h (NM_021415.2,4157-4175).
ccctggttgacatcattgt

SEQ ID NO: 545100 - DNA, 19 bp, Mus musculus
  siRNA target sequence for Cacna1h (NM_021415.2,4287-4305).
ggtcgtggagactctgata

SEQ ID NO: 545101 - DNA, 19 bp, Mus musculus
  siRNA target sequence for Cacna1h (NM_021415.2,4288-4306).
gtcgtggagactctgatat

SEQ ID NO: 545102 - DNA, 19 bp, Mus musculus
  siRNA target sequence for Cacna1h (NM_021415.2,4290-4308).
cgtggagactctgatatca

SEQ ID NO: 545103 - DNA, 19 bp, Mus musculus
  siRNA target sequence for Cacna1h (NM_021415.2,4404-4422).
ctactgcgagggtacagat

SEQ ID NO: 545104 - DNA, 19 bp, Mus musculus
  siRNA target sequence for Cacna1h (NM_021415.2,4414-4432).
ggtacagataccaggaata

SEQ ID NO: 545105 - DNA, 19 bp, Mus musculus
  siRNA target sequence for Cacna1h (NM_021415.2,4415-4433).
gtacagataccaggaatat

SEQ ID NO: 545106 - DNA, 19 bp, Mus musculus
  siRNA target sequence for Cacna1h (NM_021415.2,4469-4487).
gctgggtgaggcgcaaata

SEQ ID NO: 545107 - DNA, 19 bp, Mus musculus
  siRNA target sequence for Cacna1h (NM_021415.2,4472-4490).
gggtgaggcgcaaatacaa

SEQ ID NO: 545108 - DNA, 19 bp, Mus musculus
  siRNA target sequence for Cacna1h (NM_021415.2,4474-4492).
gtgaggcgcaaatacaact

SEQ ID NO: 545109 - DNA, 19 bp, Mus musculus
  siRNA target sequence for Cacna1h (NM_021415.2,4476-4494).
gaggcgcaaatacaacttt

SEQ ID NO: 545110 - DNA, 19 bp, Mus musculus
  siRNA target sequence for Cacna1h (NM_021415.2,4827-4845).
ctactacgcagactattca

SEQ ID NO: 545111 - DNA, 19 bp, Mus musculus
  siRNA target sequence for Cacna1h (NM_021415.2,5281-5299).
gggaaccttggtcttcttt

SEQ ID NO: 545112 - DNA, 19 bp, Mus musculus
  siRNA target sequence for Cacna1h (NM_021415.2,5397-5415).
cgccaccttcaccaacttt

SEQ ID NO: 545113 - DNA, 19 bp, Mus musculus
  siRNA target sequence for Cacna1h (NM_021415.2,5534-5552).
cgctctcccccgtctactt

SEQ ID NO: 545114 - DNA, 19 bp, Mus musculus
  siRNA target sequence for Cacna1h (NM_021415.2,5761-5779).
ctggtcgtgcgcaaagtat

SEQ ID NO: 545115 - DNA, 19 bp, Mus musculus
  siRNA target sequence for Cacna1h (NM_021415.2,5763-5781).
ggtcgtgcgcaaagtatct

SEQ ID NO: 545116 - DNA, 19 bp, Mus musculus
  siRNA target sequence for Cacna1h (NM_021415.2,5794-5812).
ctctcgctacccaatgaca

SEQ ID NO: 545117 - DNA, 19 bp, Mus musculus
  siRNA target sequence for Cacna1h (NM_021415.2,6212-6230).
gtacccgcaagcacacttt

SEQ ID NO: 545118 - DNA, 19 bp, Mus musculus
  siRNA target sequence for Cacna1h (NM_021415.2,6378-6396).
gacagcctctcctgcaaaa

SEQ ID NO: 545119 - DNA, 19 bp, Mus musculus
  siRNA target sequence for Cacna1h (NM_021415.2,6426-6444).
caggttctgcagtgtagat

SEQ ID NO: 545120 - DNA, 19 bp, Mus musculus
  siRNA target sequence for Cacna1h (NM_021415.2,6495-6513).
ctcggtggaactggataat

SEQ ID NO: 545121 - DNA, 19 bp, Mus musculus
  siRNA target sequence for Cacna1h (NM_021415.2,6935-6953).
ctatagtgcctctaatact

SEQ ID NO: 545122 - DNA, 19 bp, Mus musculus
  siRNA target sequence for Cacna1h (NM_021415.2,6940-6958).
gtgcctctaatactagaaa

SEQ ID NO: 545123 - DNA, 19 bp, Mus musculus
  siRNA target sequence for Cacna1h (NM_021415.2,6942-6960).
gcctctaatactagaaact

SEQ ID NO: 545124 - DNA, 19 bp, Mus musculus
  siRNA target sequence for Calb1 (NM_009788.2,173-191).
gcctcacagttttttgaga

SEQ ID NO: 545125 - DNA, 19 bp, Mus musculus
  siRNA target sequence for Calb1 (NM_009788.2,174-192).
cctcacagttttttgagat

SEQ ID NO: 545126 - DNA, 19 bp, Mus musculus
  siRNA target sequence for Calb1 (NM_009788.2,219-237).
gtggttacctggaaggaaa

SEQ ID NO: 545127 - DNA, 19 bp, Mus musculus
  siRNA target sequence for Calb1 (NM_009788.2,296-314).
ctatcaccggaaatgaaat

SEQ ID NO: 545128 - DNA, 19 bp, Mus musculus
  siRNA target sequence for Calb1 (NM_009788.2,341-359).
gatgatggaaaaataggaa

SEQ ID NO: 545129 - DNA, 19 bp, Mus musculus
  siRNA target sequence for Calb1 (NM_009788.2,348-366).
gaaaaataggaattgtaga

SEQ ID NO: 545130 - DNA, 19 bp, Mus musculus
  siRNA target sequence for Calb1 (NM_009788.2,379-397).
cttacccacagaagagaat

SEQ ID NO: 545131 - DNA, 19 bp, Mus musculus
  siRNA target sequence for Calb1 (NM_009788.2,451-469).
gacttggagaaagtatgat

SEQ ID NO: 545132 - DNA, 19 bp, Mus musculus
  siRNA target sequence for Calb1 (NM_009788.2,476-494).
cacagcggcttcatcgaaa

SEQ ID NO: 545133 - DNA, 19 bp, Mus musculus
  siRNA target sequence for Calb1 (NM_009788.2,491-509).
gaaaccgaggaacttaaga

SEQ ID NO: 545134 - DNA, 19 bp, Mus musculus
  siRNA target sequence for Calb1 (NM_009788.2,495-513).
ccgaggaacttaagaactt

SEQ ID NO: 545135 - DNA, 19 bp, Mus musculus
  siRNA target sequence for Calb1 (NM_009788.2,496-514).
cgaggaacttaagaacttt

SEQ ID NO: 545136 - DNA, 19 bp, Mus musculus
  siRNA target sequence for Calb1 (NM_009788.2,696-714).
gtgggaaagagttcaataa

SEQ ID NO: 545137 - DNA, 19 bp, Mus musculus
  siRNA target sequence for Calb1 (NM_009788.2,709-727).
caataaggcttttgagtta

SEQ ID NO: 545138 - DNA, 19 bp, Mus musculus
  siRNA target sequence for Calb1 (NM_009788.2,715-733).
ggcttttgagttatatgat

SEQ ID NO: 545139 - DNA, 19 bp, Mus musculus
  siRNA target sequence for Calb1 (NM_009788.2,717-735).
cttttgagttatatgatca

SEQ ID NO: 545140 - DNA, 19 bp, Mus musculus
  siRNA target sequence for Calb1 (NM_009788.2,745-763).
cggatacatagatgaaaat

SEQ ID NO: 545141 - DNA, 19 bp, Mus musculus
  siRNA target sequence for Calb1 (NM_009788.2,808-826).
ggaattggatattaacaat

SEQ ID NO: 545142 - DNA, 19 bp, Mus musculus
  siRNA target sequence for Calb2 (NM_007586.1,162-180).
cggaaatgggtacattgaa

SEQ ID NO: 545143 - DNA, 19 bp, Mus musculus
  siRNA target sequence for Calb2 (NM_007586.1,170-188).
ggtacattgaaggtaaaga

SEQ ID NO: 545144 - DNA, 19 bp, Mus musculus
  siRNA target sequence for Calb2 (NM_007586.1,243-261).
gtccaagagcgacaatttt

SEQ ID NO: 545145 - DNA, 19 bp, Mus musculus
  siRNA target sequence for Calb2 (NM_007586.1,279-297).
gttcatgcagaagtatgat

SEQ ID NO: 545146 - DNA, 19 bp, Mus musculus
  siRNA target sequence for Calb2 (NM_007586.1,347-365).
cgaccgaagagaatttcct

SEQ ID NO: 545147 - DNA, 19 bp, Mus musculus
  siRNA target sequence for Calb2 (NM_007586.1,348-366).
gaccgaagagaatttcctt

SEQ ID NO: 545148 - DNA, 19 bp, Mus musculus
  siRNA target sequence for Calb2 (NM_007586.1,350-368).
ccgaagagaatttcctttt

SEQ ID NO: 545149 - DNA, 19 bp, Mus musculus
  siRNA target sequence for Calb2 (NM_007586.1,387-405).
gggctccagcgctgagttt

SEQ ID NO: 545150 - DNA, 19 bp, Mus musculus
  siRNA target sequence for Calb2 (NM_007586.1,503-521).
ggccctatgatgaacctaa

SEQ ID NO: 545151 - DNA, 19 bp, Mus musculus
  siRNA target sequence for Calb2 (NM_007586.1,531-549).
gtacacccagaccatacta

SEQ ID NO: 545152 - DNA, 19 bp, Mus musculus
  siRNA target sequence for Calb2 (NM_007586.1,540-558).
gaccatactacggatgttt

SEQ ID NO: 545153 - DNA, 19 bp, Mus musculus
  siRNA target sequence for Calb2 (NM_007586.1,542-560).
ccatactacggatgtttga

SEQ ID NO: 545154 - DNA, 19 bp, Mus musculus
  siRNA target sequence for Calb2 (NM_007586.1,547-565).
ctacggatgtttgacttaa

SEQ ID NO: 545155 - DNA, 19 bp, Mus musculus
  siRNA target sequence for Calb2 (NM_007586.1,696-714).
ggatggaagcggctatatt

SEQ ID NO: 545156 - DNA, 19 bp, Mus musculus
  siRNA target sequence for Calb2 (NM_007586.1,701-719).
gaagcggctatattgatga

SEQ ID NO: 545157 - DNA, 19 bp, Mus musculus
  siRNA target sequence for Calb2 (NM_007586.1,704-722).
gcggctatattgatgagaa

SEQ ID NO: 545158 - DNA, 19 bp, Mus musculus
  siRNA target sequence for Calb2 (NM_007586.1,705-723).
cggctatattgatgagaat

SEQ ID NO: 545159 - DNA, 19 bp, Mus musculus
  siRNA target sequence for Calb3 (NM_009789.1,188-206).
cctcctgaaggcttcaagt

SEQ ID NO: 545160 - DNA, 19 bp, Mus musculus
  siRNA target sequence for Calb3 (NM_009789.1,189-207).
ctcctgaaggcttcaagta

SEQ ID NO: 545161 - DNA, 19 bp, Mus musculus
  siRNA target sequence for Calb3 (NM_009789.1,191-209).
cctgaaggcttcaagtact

SEQ ID NO: 545162 - DNA, 19 bp, Mus musculus
  siRNA target sequence for Calb3 (NM_009789.1,208-226).
ctctggacaatctctttaa

SEQ ID NO: 545163 - DNA, 19 bp, Mus musculus
  siRNA target sequence for Calb3 (NM_009789.1,267-285).
gaattcgaagctttcttca

SEQ ID NO: 545164 - DNA, 19 bp, Mus musculus
  siRNA target sequence for Calm4 (NM_020036.2,182-200).
ggcagctttcaataggttt

SEQ ID NO: 545165 - DNA, 19 bp, Mus musculus
  siRNA target sequence for Calm4 (NM_020036.2,196-214).
ggtttgacaagaataagga

SEQ ID NO: 545166 - DNA, 19 bp, Mus musculus
  siRNA target sequence for Calm4 (NM_020036.2,230-248).
cgaggaacttggagatgta

SEQ ID NO: 545167 - DNA, 19 bp, Mus musculus
  siRNA target sequence for Calm4 (NM_020036.2,234-252).
gaacttggagatgtaatga

SEQ ID NO: 545168 - DNA, 19 bp, Mus musculus
  siRNA target sequence for Calm4 (NM_020036.2,352-370).
cagccatagagaagtacaa

SEQ ID NO: 545169 - DNA, 19 bp, Mus musculus
  siRNA target sequence for Calm4 (NM_020036.2,564-582).
gtgcgcctccacgttgaaa

SEQ ID NO: 545170 - DNA, 19 bp, Mus musculus
  siRNA target sequence for Calm4 (NM_020036.2,567-585).
cgcctccacgttgaaaatt

SEQ ID NO: 545171 - DNA, 19 bp, Mus musculus
  siRNA target sequence for Calml4 (NM_138304.1,68-86).
ctttcccaggaccaaatta

SEQ ID NO: 545172 - DNA, 19 bp, Mus musculus
  siRNA target sequence for Calml4 (NM_138304.1,74-92).
caggaccaaattaatgagt

SEQ ID NO: 545173 - DNA, 19 bp, Mus musculus
  siRNA target sequence for Calml4 (NM_138304.1,136-154).
gatcaaggccacagatctt

SEQ ID NO: 545174 - DNA, 19 bp, Mus musculus
  siRNA target sequence for Calml4 (NM_138304.1,215-233).
cagactcatgggatagaca

SEQ ID NO: 545175 - DNA, 19 bp, Mus musculus
  siRNA target sequence for Calml4 (NM_138304.1,219-237).
ctcatgggatagacaagaa

SEQ ID NO: 545176 - DNA, 19 bp, Mus musculus
  siRNA target sequence for Calml4 (NM_138304.1,265-283).
gaccatcatgcatatgcaa

SEQ ID NO: 545177 - DNA, 19 bp, Mus musculus
  siRNA target sequence for Calml4 (NM_138304.1,368-386).
gagctgcggtcgaaactca

SEQ ID NO: 545178 - DNA, 19 bp, Mus musculus
  siRNA target sequence for Calml4 (NM_138304.1,373-391).
gcggtcgaaactcatgaaa

SEQ ID NO: 545179 - DNA, 19 bp, Mus musculus
  siRNA target sequence for Calml4 (NM_138304.1,375-393).
ggtcgaaactcatgaaact

SEQ ID NO: 545180 - DNA, 19 bp, Mus musculus
  siRNA target sequence for Calml4 (NM_138304.1,452-470).
ccaaacggccaagtgaaat

SEQ ID NO: 545181 - DNA, 19 bp, Mus musculus
  siRNA target sequence for Caln1 (NM_021371.1,997-1015).
gggatggttttcttggaaa

SEQ ID NO: 545182 - DNA, 19 bp, Mus musculus
  siRNA target sequence for Caln1 (NM_021371.1,998-1016).
ggatggttttcttggaaat

SEQ ID NO: 545183 - DNA, 19 bp, Mus musculus
  siRNA target sequence for Caln1 (NM_021371.1,999-1017).
gatggttttcttggaaata

SEQ ID NO: 545184 - DNA, 19 bp, Mus musculus
  siRNA target sequence for Caln1 (NM_021371.1,1002-1020).
ggttttcttggaaatacga

SEQ ID NO: 545185 - DNA, 19 bp, Mus musculus
  siRNA target sequence for Caln1 (NM_021371.1,1003-1021).
gttttcttggaaatacgat

SEQ ID NO: 545186 - DNA, 19 bp, Mus musculus
  siRNA target sequence for Caln1 (NM_021371.1,1091-1109).
cgccttccgggatcactta

SEQ ID NO: 545187 - DNA, 19 bp, Mus musculus
  siRNA target sequence for Caln1 (NM_021371.1,1092-1110).
gccttccgggatcacttaa

SEQ ID NO: 545188 - DNA, 19 bp, Mus musculus
  siRNA target sequence for Caln1 (NM_021371.1,1172-1190).
gaactgccagacagagttt

SEQ ID NO: 545189 - DNA, 19 bp, Mus musculus
  siRNA target sequence for Caln1 (NM_021371.1,1230-1248).
gtccgcaagagcctcatat

SEQ ID NO: 545190 - DNA, 19 bp, Mus musculus
  siRNA target sequence for Calu (NM_007594.2,163-181).
gcctcagctcagcgataaa

SEQ ID NO: 545191 - DNA, 19 bp, Mus musculus
  siRNA target sequence for Calu (NM_007594.2,172-190).
cagcgataaagttcacaat

SEQ ID NO: 545192 - DNA, 19 bp, Mus musculus
  siRNA target sequence for Calu (NM_007594.2,174-192).
gcgataaagttcacaatga

SEQ ID NO: 545193 - DNA, 19 bp, Mus musculus
  siRNA target sequence for Calu (NM_007594.2,175-193).
cgataaagttcacaatgat

SEQ ID NO: 545194 - DNA, 19 bp, Mus musculus
  siRNA target sequence for Calu (NM_007594.2,445-463).
ctgggaggagtataaaaat

SEQ ID NO: 545195 - DNA, 19 bp, Mus musculus
  siRNA target sequence for Calu (NM_007594.2,465-483).
ccacctacggctacgtttt

SEQ ID NO: 545196 - DNA, 19 bp, Mus musculus
  siRNA target sequence for Calu (NM_007594.2,466-484).
cacctacggctacgtttta

SEQ ID NO: 545197 - DNA, 19 bp, Mus musculus
  siRNA target sequence for Calu (NM_007594.2,468-486).
cctacggctacgttttaga

SEQ ID NO: 545198 - DNA, 19 bp, Mus musculus
  siRNA target sequence for Calu (NM_007594.2,469-487).
ctacggctacgttttagat

SEQ ID NO: 545199 - DNA, 19 bp, Mus musculus
  siRNA target sequence for Calu (NM_007594.2,472-490).
cggctacgttttagatgat

SEQ ID NO: 545200 - DNA, 19 bp, Mus musculus
  siRNA target sequence for Calu (NM_007594.2,574-592).
cctaattgccacaaaggaa

SEQ ID NO: 545201 - DNA, 19 bp, Mus musculus
  siRNA target sequence for Calu (NM_007594.2,619-637).
ggaatatgactacatgaaa

SEQ ID NO: 545202 - DNA, 19 bp, Mus musculus
  siRNA target sequence for Calu (NM_007594.2,681-699).
ctgatgggttcattgatct

SEQ ID NO: 545203 - DNA, 19 bp, Mus musculus
  siRNA target sequence for Calu (NM_007594.2,879-897).
ccaggcatctggtctatga

SEQ ID NO: 545204 - DNA, 19 bp, Mus musculus
  siRNA target sequence for Calu (NM_007594.2,937-955).
gattgtcgacaagtatgat

SEQ ID NO: 545205 - DNA, 19 bp, Mus musculus
  siRNA target sequence for Calu (NM_007594.2,941-959).
gtcgacaagtatgatttat

SEQ ID NO: 545206 - DNA, 19 bp, Mus musculus
  siRNA target sequence for Calu (NM_007594.2,943-961).
cgacaagtatgatttattt

SEQ ID NO: 545207 - DNA, 19 bp, Mus musculus
  siRNA target sequence for Calu (NM_007594.2,991-1009).
ggccttagtacgacatgat

SEQ ID NO: 545208 - DNA, 19 bp, Mus musculus
  siRNA target sequence for Calu (NM_007594.2,993-1011).
ccttagtacgacatgatga

SEQ ID NO: 545209 - DNA, 19 bp, Mus musculus
  siRNA target sequence for Capn1 (NM_007600.2,96-114).
gggtgtcagcccaagtaca

SEQ ID NO: 545210 - DNA, 19 bp, Mus musculus
  siRNA target sequence for Capn1 (NM_007600.2,149-167).
catgaaaacgccatcaagt

SEQ ID NO: 545211 - DNA, 19 bp, Mus musculus
  siRNA target sequence for Capn1 (NM_007600.2,166-184).
gtacctgggccaggattat

SEQ ID NO: 545212 - DNA, 19 bp, Mus musculus
  siRNA target sequence for Capn1 (NM_007600.2,169-187).
cctgggccaggattatgaa

SEQ ID NO: 545213 - DNA, 19 bp, Mus musculus
  siRNA target sequence for Capn1 (NM_007600.2,170-188).
ctgggccaggattatgaaa

SEQ ID NO: 545214 - DNA, 19 bp, Mus musculus
  siRNA target sequence for Capn1 (NM_007600.2,277-295).
gggtcctcattcctctaaa

SEQ ID NO: 545215 - DNA, 19 bp, Mus musculus
  siRNA target sequence for Capn1 (NM_007600.2,278-296).
ggtcctcattcctctaaaa

SEQ ID NO: 545216 - DNA, 19 bp, Mus musculus
  siRNA target sequence for Capn1 (NM_007600.2,281-299).
cctcattcctctaaaacct

SEQ ID NO: 545217 - DNA, 19 bp, Mus musculus
  siRNA target sequence for Capn1 (NM_007600.2,282-300).
ctcattcctctaaaaccta

SEQ ID NO: 545218 - DNA, 19 bp, Mus musculus
  siRNA target sequence for Capn1 (NM_007600.2,320-338).
cctacggaactgatgtcaa

SEQ ID NO: 545219 - DNA, 19 bp, Mus musculus
  siRNA target sequence for Capn1 (NM_007600.2,321-339).
ctacggaactgatgtcaaa

SEQ ID NO: 545220 - DNA, 19 bp, Mus musculus
  siRNA target sequence for Capn1 (NM_007600.2,430-448).
caccctcaacgagactatt

SEQ ID NO: 545221 - DNA, 19 bp, Mus musculus
  siRNA target sequence for Capn1 (NM_007600.2,432-450).
ccctcaacgagactattct

SEQ ID NO: 545222 - DNA, 19 bp, Mus musculus
  siRNA target sequence for Capn1 (NM_007600.2,534-552).
gggtcgacgtggtcataga

SEQ ID NO: 545223 - DNA, 19 bp, Mus musculus
  siRNA target sequence for Capn1 (NM_007600.2,757-775).
cctctaccagatcattcta

SEQ ID NO: 545224 - DNA, 19 bp, Mus musculus
  siRNA target sequence for Capn1 (NM_007600.2,820-838).
ctccgatatccgtgattta

SEQ ID NO: 545225 - DNA, 19 bp, Mus musculus
  siRNA target sequence for Capn1 (NM_007600.2,822-840).
ccgatatccgtgatttaga

SEQ ID NO: 545226 - DNA, 19 bp, Mus musculus
  siRNA target sequence for Capn1 (NM_007600.2,830-848).
cgtgatttagaggctatta

SEQ ID NO: 545227 - DNA, 19 bp, Mus musculus
  siRNA target sequence for Capn1 (NM_007600.2,839-857).
gaggctattacttttaaga

SEQ ID NO: 545228 - DNA, 19 bp, Mus musculus
  siRNA target sequence for Capn1 (NM_007600.2,914-932).
ggccagcgggtgaacctaa

SEQ ID NO: 545229 - DNA, 19 bp, Mus musculus
  siRNA target sequence for Capn1 (NM_007600.2,915-933).
gccagcgggtgaacctaat

SEQ ID NO: 545230 - DNA, 19 bp, Mus musculus
  siRNA target sequence for Capn1 (NM_007600.2,988-1006).
ctcctatgagtggaacaaa

SEQ ID NO: 545231 - DNA, 19 bp, Mus musculus
  siRNA target sequence for Capn1 (NM_007600.2,1074-1092).
gagacttcatccgtgaatt

SEQ ID NO: 545232 - DNA, 19 bp, Mus musculus
  siRNA target sequence for Capn1 (NM_007600.2,1076-1094).
gacttcatccgtgaattca

SEQ ID NO: 545233 - DNA, 19 bp, Mus musculus
  siRNA target sequence for Capn1 (NM_007600.2,1145-1163).
ctccggaattggaatacca

SEQ ID NO: 545234 - DNA, 19 bp, Mus musculus
  siRNA target sequence for Capn1 (NM_007600.2,1150-1168).
gaattggaataccacattt

SEQ ID NO: 545235 - DNA, 19 bp, Mus musculus
  siRNA target sequence for Capn1 (NM_007600.2,1155-1173).
ggaataccacattttacga

SEQ ID NO: 545236 - DNA, 19 bp, Mus musculus
  siRNA target sequence for Capn1 (NM_007600.2,1233-1251).
gggtaaacccccagttcaa

SEQ ID NO: 545237 - DNA, 19 bp, Mus musculus
  siRNA target sequence for Capn1 (NM_007600.2,1235-1253).
gtaaacccccagttcaaga

SEQ ID NO: 545238 - DNA, 19 bp, Mus musculus
  siRNA target sequence for Capn1 (NM_007600.2,1372-1390).
ggagaccatcggttttgca

SEQ ID NO: 545239 - DNA, 19 bp, Mus musculus
  siRNA target sequence for Capn1 (NM_007600.2,1430-1448).
cacttgaagcgtgatttct

SEQ ID NO: 545240 - DNA, 19 bp, Mus musculus
  siRNA target sequence for Capn1 (NM_007600.2,1470-1488).
cgcagtcagagcacttcat

SEQ ID NO: 545241 - DNA, 19 bp, Mus musculus
  siRNA target sequence for Capn1 (NM_007600.2,1645-1663).
caacctccctgatgagaaa

SEQ ID NO: 545242 - DNA, 19 bp, Mus musculus
  siRNA target sequence for Capn1 (NM_007600.2,1759-1777).
catcttgaacaggatcatt

SEQ ID NO: 545243 - DNA, 19 bp, Mus musculus
  siRNA target sequence for Capn1 (NM_007600.2,1786-1804).
caaagacctgcgcactaat

SEQ ID NO: 545244 - DNA, 19 bp, Mus musculus
  siRNA target sequence for Capn1 (NM_007600.2,1896-1914).
ggaaccgcatccgaaatta

SEQ ID NO: 545245 - DNA, 19 bp, Mus musculus
  siRNA target sequence for Capn1 (NM_007600.2,1918-1936).
gaccatcttccggaagttt

SEQ ID NO: 545246 - DNA, 19 bp, Mus musculus
  siRNA target sequence for Capn1 (NM_007600.2,1956-1974).
gcatgagtgcctatgagat

SEQ ID NO: 545247 - DNA, 19 bp, Mus musculus
  siRNA target sequence for Capn1 (NM_007600.2,1991-2009).
gctgcaggcttcaagctta

SEQ ID NO: 545248 - DNA, 19 bp, Mus musculus
  siRNA target sequence for Capn1 (NM_007600.2,1994-2012).
gcaggcttcaagcttaaca

SEQ ID NO: 545249 - DNA, 19 bp, Mus musculus
  siRNA target sequence for Capn1 (NM_007600.2,1995-2013).
caggcttcaagcttaacaa

SEQ ID NO: 545250 - DNA, 19 bp, Mus musculus
  siRNA target sequence for Capn1 (NM_007600.2,2062-2080).
cgtggactttgacaacttt

SEQ ID NO: 545251 - DNA, 19 bp, Mus musculus
  siRNA target sequence for Capn1 (NM_007600.2,2150-2168).
gttgtgacctttgatctat

SEQ ID NO: 545252 - DNA, 19 bp, Mus musculus
  siRNA target sequence for Capn2 (NM_009794.1,334-352).
cgtcatccttgggctataa

SEQ ID NO: 545253 - DNA, 19 bp, Mus musculus
  siRNA target sequence for Capn2 (NM_009794.1,379-397).
ctcggggcatcgaatggaa

SEQ ID NO: 545254 - DNA, 19 bp, Mus musculus
  siRNA target sequence for Capn2 (NM_009794.1,416-434).
cgctgacccccagttcatt

SEQ ID NO: 545255 - DNA, 19 bp, Mus musculus
  siRNA target sequence for Capn2 (NM_009794.1,422-440).
cccccagttcattattgga

SEQ ID NO: 545256 - DNA, 19 bp, Mus musculus
  siRNA target sequence for Capn2 (NM_009794.1,731-749).
gatcaatgggtgctatgaa

SEQ ID NO: 545257 - DNA, 19 bp, Mus musculus
  siRNA target sequence for Capn2 (NM_009794.1,767-785).
caccacggaaggctttgaa

SEQ ID NO: 545258 - DNA, 19 bp, Mus musculus
  siRNA target sequence for Capn2 (NM_009794.1,828-846).
cctcctcccaacttgttca

SEQ ID NO: 545259 - DNA, 19 bp, Mus musculus
  siRNA target sequence for Capn2 (NM_009794.1,829-847).
ctcctcccaacttgttcaa

SEQ ID NO: 545260 - DNA, 19 bp, Mus musculus
  siRNA target sequence for Capn2 (NM_009794.1,835-853).
ccaacttgttcaagatcat

SEQ ID NO: 545261 - DNA, 19 bp, Mus musculus
  siRNA target sequence for Capn2 (NM_009794.1,881-899).
gcttggctgctctatcgat

SEQ ID NO: 545262 - DNA, 19 bp, Mus musculus
  siRNA target sequence for Capn2 (NM_009794.1,925-943).
ccgttacgtaccagaagtt

SEQ ID NO: 545263 - DNA, 19 bp, Mus musculus
  siRNA target sequence for Capn2 (NM_009794.1,972-990).
ggagccgaggaggttgaaa

SEQ ID NO: 545264 - DNA, 19 bp, Mus musculus
  siRNA target sequence for Capn2 (NM_009794.1,977-995).
cgaggaggttgaaagttca

SEQ ID NO: 545265 - DNA, 19 bp, Mus musculus
  siRNA target sequence for Capn2 (NM_009794.1,1025-1043).
gaatccctggggacaagta

SEQ ID NO: 545266 - DNA, 19 bp, Mus musculus
  siRNA target sequence for Capn2 (NM_009794.1,1051-1069).
ccgggaagtggaatgacaa

SEQ ID NO: 545267 - DNA, 19 bp, Mus musculus
  siRNA target sequence for Capn2 (NM_009794.1,1053-1071).
gggaagtggaatgacaatt

SEQ ID NO: 545268 - DNA, 19 bp, Mus musculus
  siRNA target sequence for Capn2 (NM_009794.1,1085-1103).
cacggttgacccagaagta

SEQ ID NO: 545269 - DNA, 19 bp, Mus musculus
  siRNA target sequence for Capn2 (NM_009794.1,1324-1342).
ctcagtacctaattaagct

SEQ ID NO: 545270 - DNA, 19 bp, Mus musculus
  siRNA target sequence for Capn2 (NM_009794.1,1542-1560).
gccagggagcggtcagata

SEQ ID NO: 545271 - DNA, 19 bp, Mus musculus
  siRNA target sequence for Capn2 (NM_009794.1,1546-1564).
gggagcggtcagatacctt

SEQ ID NO: 545272 - DNA, 19 bp, Mus musculus
  siRNA target sequence for Capn2 (NM_009794.1,1550-1568).
gcggtcagataccttcatt

SEQ ID NO: 545273 - DNA, 19 bp, Mus musculus
  siRNA target sequence for Capn2 (NM_009794.1,1551-1569).
cggtcagataccttcatta

SEQ ID NO: 545274 - DNA, 19 bp, Mus musculus
  siRNA target sequence for Capn2 (NM_009794.1,1644-1662).
cacaaggatggcgatttct

SEQ ID NO: 545275 - DNA, 19 bp, Mus musculus
  siRNA target sequence for Capn2 (NM_009794.1,1712-1730).
cgagatcgaggccaacatt

SEQ ID NO: 545276 - DNA, 19 bp, Mus musculus
  siRNA target sequence for Capn2 (NM_009794.1,1715-1733).
gatcgaggccaacattgaa

SEQ ID NO: 545277 - DNA, 19 bp, Mus musculus
  siRNA target sequence for Capn2 (NM_009794.1,1855-1873).
ccaaacgccaagacatcaa

SEQ ID NO: 545278 - DNA, 19 bp, Mus musculus
  siRNA target sequence for Capn2 (NM_009794.1,1948-1966).
gcctgaaggagttctacat

SEQ ID NO: 545279 - DNA, 19 bp, Mus musculus
  siRNA target sequence for Capn2 (NM_009794.1,1972-1990).
ggacgaagattcagaaata

SEQ ID NO: 545280 - DNA, 19 bp, Mus musculus
  siRNA target sequence for Capn2 (NM_009794.1,2121-2139).
gcagacgacgagctaatca

SEQ ID NO: 545281 - DNA, 19 bp, Mus musculus
  siRNA target sequence for Capn2 (NM_009794.1,2122-2140).
cagacgacgagctaatcat

SEQ ID NO: 545282 - DNA, 19 bp, Mus musculus
  siRNA target sequence for Capn2 (NM_009794.1,2133-2151).
ctaatcatcgactttgaca

SEQ ID NO: 545283 - DNA, 19 bp, Mus musculus
  siRNA target sequence for Capn2 (NM_009794.1,2172-2190).
cgtctggaaacgctattca

SEQ ID NO: 545284 - DNA, 19 bp, Mus musculus
  siRNA target sequence for Capn2 (NM_009794.1,2173-2191).
gtctggaaacgctattcaa

SEQ ID NO: 545285 - DNA, 19 bp, Mus musculus
  siRNA target sequence for Capn2 (NM_009794.1,2175-2193).
ctggaaacgctattcaaga

SEQ ID NO: 545286 - DNA, 19 bp, Mus musculus
  siRNA target sequence for Capn2 (NM_009794.1,2177-2195).
ggaaacgctattcaagata

SEQ ID NO: 545287 - DNA, 19 bp, Mus musculus
  siRNA target sequence for Capn2 (NM_009794.1,2182-2200).
cgctattcaagatattcaa

SEQ ID NO: 545288 - DNA, 19 bp, Mus musculus
  siRNA target sequence for Capn3 (NM_007601.1,155-173).
cgatcatcggtgtgaaaga

SEQ ID NO: 545289 - DNA, 19 bp, Mus musculus
  siRNA target sequence for Capn3 (NM_007601.1,201-219).
gtgcctagagaagaaagtt

SEQ ID NO: 545290 - DNA, 19 bp, Mus musculus
  siRNA target sequence for Capn3 (NM_007601.1,247-265).
gatgagacctctctctttt

SEQ ID NO: 545291 - DNA, 19 bp, Mus musculus
  siRNA target sequence for Capn3 (NM_007601.1,297-315).
gaagagacctccggaaatt

SEQ ID NO: 545292 - DNA, 19 bp, Mus musculus
  siRNA target sequence for Capn3 (NM_007601.1,317-335).
gtgagaatccccggtttat

SEQ ID NO: 545293 - DNA, 19 bp, Mus musculus
  siRNA target sequence for Capn3 (NM_007601.1,319-337).
gagaatccccggtttatca

SEQ ID NO: 545294 - DNA, 19 bp, Mus musculus
  siRNA target sequence for Capn3 (NM_007601.1,321-339).
gaatccccggtttatcatt

SEQ ID NO: 545295 - DNA, 19 bp, Mus musculus
  siRNA target sequence for Capn3 (NM_007601.1,429-447).
gctgcttttccgagttata

SEQ ID NO: 545296 - DNA, 19 bp, Mus musculus
  siRNA target sequence for Capn3 (NM_007601.1,440-458).
gagttataccccatgatca

SEQ ID NO: 545297 - DNA, 19 bp, Mus musculus
  siRNA target sequence for Capn3 (NM_007601.1,442-460).
gttataccccatgatcaaa

SEQ ID NO: 545298 - DNA, 19 bp, Mus musculus
  siRNA target sequence for Capn3 (NM_007601.1,454-472).
gatcaaagtttcactgaaa

SEQ ID NO: 545299 - DNA, 19 bp, Mus musculus
  siRNA target sequence for Capn3 (NM_007601.1,565-583).
ctggttttcaccaaatcca

SEQ ID NO: 545300 - DNA, 19 bp, Mus musculus
  siRNA target sequence for Capn3 (NM_007601.1,697-715).
ggaggggtgacagagtttt

SEQ ID NO: 545301 - DNA, 19 bp, Mus musculus
  siRNA target sequence for Capn3 (NM_007601.1,730-748).
gctccgagtgacatgtaca

SEQ ID NO: 545302 - DNA, 19 bp, Mus musculus
  siRNA target sequence for Capn3 (NM_007601.1,799-817).
gacgatggcacgaacatga

SEQ ID NO: 545303 - DNA, 19 bp, Mus musculus
  siRNA target sequence for Capn3 (NM_007601.1,802-820).
gatggcacgaacatgactt

SEQ ID NO: 545304 - DNA, 19 bp, Mus musculus
  siRNA target sequence for Capn3 (NM_007601.1,830-848).
ctccttctggtctgaacat

SEQ ID NO: 545305 - DNA, 19 bp, Mus musculus
  siRNA target sequence for Capn3 (NM_007601.1,843-861).
gaacatgggggagttgatt

SEQ ID NO: 545306 - DNA, 19 bp, Mus musculus
  siRNA target sequence for Capn3 (NM_007601.1,863-881).
cacggatggtgagaaatat

SEQ ID NO: 545307 - DNA, 19 bp, Mus musculus
  siRNA target sequence for Capn3 (NM_007601.1,933-951).
cagaccgtcacggacaatt

SEQ ID NO: 545308 - DNA, 19 bp, Mus musculus
  siRNA target sequence for Capn3 (NM_007601.1,935-953).
gaccgtcacggacaattgt

SEQ ID NO: 545309 - DNA, 19 bp, Mus musculus
  siRNA target sequence for Capn3 (NM_007601.1,958-976).
gtgcagtatgaaacaagaa

SEQ ID NO: 545310 - DNA, 19 bp, Mus musculus
  siRNA target sequence for Capn3 (NM_007601.1,1119-1137).
gaaggactggagctttgta

SEQ ID NO: 545311 - DNA, 19 bp, Mus musculus
  siRNA target sequence for Capn3 (NM_007601.1,1184-1202).
gagagttctggatgtcata

SEQ ID NO: 545312 - DNA, 19 bp, Mus musculus
  siRNA target sequence for Capn3 (NM_007601.1,1188-1206).
gttctggatgtcatatgat

SEQ ID NO: 545313 - DNA, 19 bp, Mus musculus
  siRNA target sequence for Capn3 (NM_007601.1,1204-1222).
gatgacttcgtctaccatt

SEQ ID NO: 545314 - DNA, 19 bp, Mus musculus
  siRNA target sequence for Capn3 (NM_007601.1,1283-1301).
cctggacggtgtctgtaaa

SEQ ID NO: 545315 - DNA, 19 bp, Mus musculus
  siRNA target sequence for Capn3 (NM_007601.1,1331-1349).
ctggaggctgccgaaactt

SEQ ID NO: 545316 - DNA, 19 bp, Mus musculus
  siRNA target sequence for Capn3 (NM_007601.1,1488-1506).
ggccaacctcttcactatt

SEQ ID NO: 545317 - DNA, 19 bp, Mus musculus
  siRNA target sequence for Capn3 (NM_007601.1,1536-1554).
gatgcacgggaataagcaa

SEQ ID NO: 545318 - DNA, 19 bp, Mus musculus
  siRNA target sequence for Capn3 (NM_007601.1,1601-1619).
gcaaaacctacatcaacat

SEQ ID NO: 545319 - DNA, 19 bp, Mus musculus
  siRNA target sequence for Capn3 (NM_007601.1,1768-1786).
gtggatcggccagtgaaaa

SEQ ID NO: 545320 - DNA, 19 bp, Mus musculus
  siRNA target sequence for Capn3 (NM_007601.1,1771-1789).
gatcggccagtgaaaaaga

SEQ ID NO: 545321 - DNA, 19 bp, Mus musculus
  siRNA target sequence for Capn3 (NM_007601.1,1802-1820).
ccatcatcttcgtttctga

SEQ ID NO: 545322 - DNA, 19 bp, Mus musculus
  siRNA target sequence for Capn3 (NM_007601.1,1954-1972).
cagcaattccggaacatct

SEQ ID NO: 545323 - DNA, 19 bp, Mus musculus
  siRNA target sequence for Capn3 (NM_007601.1,1957-1975).
caattccggaacatcttca

SEQ ID NO: 545324 - DNA, 19 bp, Mus musculus
  siRNA target sequence for Capn3 (NM_007601.1,2036-2054).
cagtggtgaacaaacacaa

SEQ ID NO: 545325 - DNA, 19 bp, Mus musculus
  siRNA target sequence for Capn3 (NM_007601.1,2123-2141).
gctctggaagactgaatct

SEQ ID NO: 545326 - DNA, 19 bp, Mus musculus
  siRNA target sequence for Capn3 (NM_007601.1,2132-2150).
gactgaatcttcaagagtt

SEQ ID NO: 545327 - DNA, 19 bp, Mus musculus
  siRNA target sequence for Capn3 (NM_007601.1,2211-2229).
ccattccggtaccatcaat

SEQ ID NO: 545328 - DNA, 19 bp, Mus musculus
  siRNA target sequence for Capn3 (NM_007601.1,2212-2230).
cattccggtaccatcaata

SEQ ID NO: 545329 - DNA, 19 bp, Mus musculus
  siRNA target sequence for Capn3 (NM_007601.1,2216-2234).
ccggtaccatcaatagcta

SEQ ID NO: 545330 - DNA, 19 bp, Mus musculus
  siRNA target sequence for Capn3 (NM_007601.1,2217-2235).
cggtaccatcaatagctat

SEQ ID NO: 545331 - DNA, 19 bp, Mus musculus
  siRNA target sequence for Capn3 (NM_007601.1,2222-2240).
ccatcaatagctatgagat

SEQ ID NO: 545332 - DNA, 19 bp, Mus musculus
  siRNA target sequence for Capn3 (NM_007601.1,2232-2250).
ctatgagatgcgaaatgca

SEQ ID NO: 545333 - DNA, 19 bp, Mus musculus
  siRNA target sequence for Capn3 (NM_007601.1,2238-2256).
gatgcgaaatgcagtcaat

SEQ ID NO: 545334 - DNA, 19 bp, Mus musculus
  siRNA target sequence for Capn3 (NM_007601.1,2279-2297).
gccaactctatgacatcat

SEQ ID NO: 545335 - DNA, 19 bp, Mus musculus
  siRNA target sequence for Capn3 (NM_007601.1,2306-2324).
gctatgcggacaaacacat

SEQ ID NO: 545336 - DNA, 19 bp, Mus musculus
  siRNA target sequence for Capn3 (NM_007601.1,2311-2329).
gcggacaaacacatgaaca

SEQ ID NO: 545337 - DNA, 19 bp, Mus musculus
  siRNA target sequence for Capn3 (NM_007601.1,2371-2389).
gggatgttcagagctttta

SEQ ID NO: 545338 - DNA, 19 bp, Mus musculus
  siRNA target sequence for Capn3 (NM_007601.1,2383-2401).
gcttttaacgcgtttgaca

SEQ ID NO: 545339 - DNA, 19 bp, Mus musculus
  siRNA target sequence for Capn3 (NM_007601.1,2384-2402).
cttttaacgcgtttgacaa

SEQ ID NO: 545340 - DNA, 19 bp, Mus musculus
  siRNA target sequence for Capn3 (NM_007601.1,2404-2422).
gatggcgatggtatcatca

SEQ ID NO: 545341 - DNA, 19 bp, Mus musculus
  siRNA target sequence for Capn3 (NM_007601.1,2408-2426).
gcgatggtatcatcaaact

SEQ ID NO: 545342 - DNA, 19 bp, Mus musculus
  siRNA target sequence for Capn8 (NM_130890.1,173-191).
ctcaggggtcctatttaaa

SEQ ID NO: 545343 - DNA, 19 bp, Mus musculus
  siRNA target sequence for Capn8 (NM_130890.1,175-193).
caggggtcctatttaaaga

SEQ ID NO: 545344 - DNA, 19 bp, Mus musculus
  siRNA target sequence for Capn8 (NM_130890.1,278-296).
gcgacccacggaattgtgt

SEQ ID NO: 545345 - DNA, 19 bp, Mus musculus
  siRNA target sequence for Capn8 (NM_130890.1,279-297).
cgacccacggaattgtgtt

SEQ ID NO: 545346 - DNA, 19 bp, Mus musculus
  siRNA target sequence for Capn8 (NM_130890.1,298-316).
ccaaccctcagtttatcgt

SEQ ID NO: 545347 - DNA, 19 bp, Mus musculus
  siRNA target sequence for Capn8 (NM_130890.1,299-317).
caaccctcagtttatcgtt

SEQ ID NO: 545348 - DNA, 19 bp, Mus musculus
  siRNA target sequence for Capn8 (NM_130890.1,518-536).
ccggctccccaccaagaat

SEQ ID NO: 545349 - DNA, 19 bp, Mus musculus
  siRNA target sequence for Capn8 (NM_130890.1,559-577).
ccgaagaaggcaatgagtt

SEQ ID NO: 545350 - DNA, 19 bp, Mus musculus
  siRNA target sequence for Capn8 (NM_130890.1,608-626).
caagctcaatggttcgtat

SEQ ID NO: 545351 - DNA, 19 bp, Mus musculus
  siRNA target sequence for Capn8 (NM_130890.1,676-694).
gtggcatctctgagtttta

SEQ ID NO: 545352 - DNA, 19 bp, Mus musculus
  siRNA target sequence for Capn8 (NM_130890.1,709-727).
ctccgggcaatctgtacta

SEQ ID NO: 545353 - DNA, 19 bp, Mus musculus
  siRNA target sequence for Capn8 (NM_130890.1,711-729).
ccgggcaatctgtactaca

SEQ ID NO: 545354 - DNA, 19 bp, Mus musculus
  siRNA target sequence for Capn8 (NM_130890.1,805-823).
ccaccaccaggcaaaagct

SEQ ID NO: 545355 - DNA, 19 bp, Mus musculus
  siRNA target sequence for Capn8 (NM_130890.1,853-871).
gagtcgaagaggtggattt

SEQ ID NO: 545356 - DNA, 19 bp, Mus musculus
  siRNA target sequence for Capn8 (NM_130890.1,952-970).
cacctgagtggaattacat

SEQ ID NO: 545357 - DNA, 19 bp, Mus musculus
  siRNA target sequence for Capn8 (NM_130890.1,1052-1070).
gttctcccgactagagata

SEQ ID NO: 545358 - DNA, 19 bp, Mus musculus
  siRNA target sequence for Capn8 (NM_130890.1,1057-1075).
cccgactagagatatgcaa

SEQ ID NO: 545359 - DNA, 19 bp, Mus musculus
  siRNA target sequence for Capn8 (NM_130890.1,1117-1135).
ggaacctggtactcttcaa

SEQ ID NO: 545360 - DNA, 19 bp, Mus musculus
  siRNA target sequence for Capn8 (NM_130890.1,1142-1160).
ctggacacggggttctaca

SEQ ID NO: 545361 - DNA, 19 bp, Mus musculus
  siRNA target sequence for Capn8 (NM_130890.1,1196-1214).
gaccaacccccagtttaaa

SEQ ID NO: 545362 - DNA, 19 bp, Mus musculus
  siRNA target sequence for Capn8 (NM_130890.1,1198-1216).
ccaacccccagtttaaaat

SEQ ID NO: 545363 - DNA, 19 bp, Mus musculus
  siRNA target sequence for Capn8 (NM_130890.1,1202-1220).
cccccagtttaaaatccat

SEQ ID NO: 545364 - DNA, 19 bp, Mus musculus
  siRNA target sequence for Capn8 (NM_130890.1,1203-1221).
ccccagtttaaaatccatt

SEQ ID NO: 545365 - DNA, 19 bp, Mus musculus
  siRNA target sequence for Capn8 (NM_130890.1,1204-1222).
cccagtttaaaatccattt

SEQ ID NO: 545366 - DNA, 19 bp, Mus musculus
  siRNA target sequence for Capn8 (NM_130890.1,1574-1592).
ggcccaggctctagaaatt

SEQ ID NO: 545367 - DNA, 19 bp, Mus musculus
  siRNA target sequence for Capn8 (NM_130890.1,1677-1695).
gagtttgcggacaaggatt

SEQ ID NO: 545368 - DNA, 19 bp, Mus musculus
  siRNA target sequence for Capn8 (NM_130890.1,1683-1701).
gcggacaaggattctgaaa

SEQ ID NO: 545369 - DNA, 19 bp, Mus musculus
  siRNA target sequence for Capn8 (NM_130890.1,1725-1743).
gtcctgaatggattgcttt

SEQ ID NO: 545370 - DNA, 19 bp, Mus musculus
  siRNA target sequence for Capn8 (NM_130890.1,1744-1762).
ctaaacgaacagacatgaa

SEQ ID NO: 545371 - DNA, 19 bp, Mus musculus
  siRNA target sequence for Capn8 (NM_130890.1,1767-1785).
gacggattcaacatcaaca

SEQ ID NO: 545372 - DNA, 19 bp, Mus musculus
  siRNA target sequence for Capn8 (NM_130890.1,1836-1854).
cgaccggtggagttcaaga

SEQ ID NO: 545373 - DNA, 19 bp, Mus musculus
  siRNA target sequence for Capn8 (NM_130890.1,1873-1891).
gcaagtatctggagatcta

SEQ ID NO: 545374 - DNA, 19 bp, Mus musculus
  siRNA target sequence for Capn8 (NM_130890.1,1910-1928).
ccgtgcagggaccattgat

SEQ ID NO: 545375 - DNA, 19 bp, Mus musculus
  siRNA target sequence for Capn8 (NM_130890.1,2064-2082).
ctggagatcctgttcaaat

SEQ ID NO: 545376 - DNA, 19 bp, Mus musculus
  siRNA target sequence for Capn8 (NM_130890.1,2067-2085).
gagatcctgttcaaattgt

SEQ ID NO: 545377 - DNA, 19 bp, Mus musculus
  siRNA target sequence for Capn9 (NM_023709.2,187-205).
gcaatgtctccctgttcta

SEQ ID NO: 545378 - DNA, 19 bp, Mus musculus
  siRNA target sequence for Capn9 (NM_023709.2,346-364).
cctccctaaccctcaatca

SEQ ID NO: 545379 - DNA, 19 bp, Mus musculus
  siRNA target sequence for Capn9 (NM_023709.2,412-430).
gctatgccgggatatttca

SEQ ID NO: 545380 - DNA, 19 bp, Mus musculus
  siRNA target sequence for Capn9 (NM_023709.2,413-431).
ctatgccgggatatttcat

SEQ ID NO: 545381 - DNA, 19 bp, Mus musculus
  siRNA target sequence for Capn9 (NM_023709.2,455-473).
gtggctggacgtagtgatt

SEQ ID NO: 545382 - DNA, 19 bp, Mus musculus
  siRNA target sequence for Capn9 (NM_023709.2,458-476).
gctggacgtagtgattgat

SEQ ID NO: 545383 - DNA, 19 bp, Mus musculus
  siRNA target sequence for Capn9 (NM_023709.2,520-538).
ctgctgatcacaatgagtt

SEQ ID NO: 545384 - DNA, 19 bp, Mus musculus
  siRNA target sequence for Capn9 (NM_023709.2,569-587).
caagcttaacgggagttat

SEQ ID NO: 545385 - DNA, 19 bp, Mus musculus
  siRNA target sequence for Capn9 (NM_023709.2,723-741).
ctgggatgctccatagata

SEQ ID NO: 545386 - DNA, 19 bp, Mus musculus
  siRNA target sequence for Capn9 (NM_023709.2,743-761).
cctgaatgcctcagaatct

SEQ ID NO: 545387 - DNA, 19 bp, Mus musculus
  siRNA target sequence for Capn9 (NM_023709.2,772-790).
catctcttggtctcattaa

SEQ ID NO: 545388 - DNA, 19 bp, Mus musculus
  siRNA target sequence for Capn9 (NM_023709.2,811-829).
cggggctcgatcaggtaaa

SEQ ID NO: 545389 - DNA, 19 bp, Mus musculus
  siRNA target sequence for Capn9 (NM_023709.2,1162-1180).
ccaaccctcagataaagct

SEQ ID NO: 545390 - DNA, 19 bp, Mus musculus
  siRNA target sequence for Capn9 (NM_023709.2,1208-1226).
ggagggctgcactttccta

SEQ ID NO: 545391 - DNA, 19 bp, Mus musculus
  siRNA target sequence for Capn9 (NM_023709.2,1285-1303).
ccattggctacgccattta

SEQ ID NO: 545392 - DNA, 19 bp, Mus musculus
  siRNA target sequence for Capn9 (NM_023709.2,1329-1347).
ctgagtagggactttttca

SEQ ID NO: 545393 - DNA, 19 bp, Mus musculus
  siRNA target sequence for Capn9 (NM_023709.2,1369-1387).
gaagcaagacgttcatcaa

SEQ ID NO: 545394 - DNA, 19 bp, Mus musculus
  siRNA target sequence for Capn9 (NM_023709.2,1372-1390).
gcaagacgttcatcaactt

SEQ ID NO: 545395 - DNA, 19 bp, Mus musculus
  siRNA target sequence for Capn9 (NM_023709.2,1473-1491).
gacttctgcctgagaatct

SEQ ID NO: 545396 - DNA, 19 bp, Mus musculus
  siRNA target sequence for Capn9 (NM_023709.2,1656-1674).
gagcttgaatatgttctaa

SEQ ID NO: 545397 - DNA, 19 bp, Mus musculus
  siRNA target sequence for Capn9 (NM_023709.2,1658-1676).
gcttgaatatgttctaaat

SEQ ID NO: 545398 - DNA, 19 bp, Mus musculus
  siRNA target sequence for Capn9 (NM_023709.2,2016-2034).
gcaagccgggtgttccaat

SEQ ID NO: 545399 - DNA, 19 bp, Mus musculus
  siRNA target sequence for Capn9 (NM_023709.2,2020-2038).
gccgggtgttccaatctct

SEQ ID NO: 545400 - DNA, 19 bp, Mus musculus
  siRNA target sequence for Capn9 (NM_023709.2,2035-2053).
ctctcagtgtgaagaacaa

SEQ ID NO: 545401 - DNA, 19 bp, Mus musculus
  siRNA target sequence for Capn9 (NM_023709.2,2057-2075).
cttcatccatctcaacata

SEQ ID NO: 545402 - DNA, 19 bp, Mus musculus
  siRNA target sequence for Capns1 (NM_009795.1,217-235).
catcctgggcggagtcatt

SEQ ID NO: 545403 - DNA, 19 bp, Mus musculus
  siRNA target sequence for Capns1 (NM_009795.1,331-349).
ccgtcagttcaggaaactt

SEQ ID NO: 545404 - DNA, 19 bp, Mus musculus
  siRNA target sequence for Capns1 (NM_009795.1,332-350).
cgtcagttcaggaaacttt

SEQ ID NO: 545405 - DNA, 19 bp, Mus musculus
  siRNA target sequence for Capns1 (NM_009795.1,333-351).
gtcagttcaggaaactttt

SEQ ID NO: 545406 - DNA, 19 bp, Mus musculus
  siRNA target sequence for Capns1 (NM_009795.1,423-441).
cccgacacccggatctgaa

SEQ ID NO: 545407 - DNA, 19 bp, Mus musculus
  siRNA target sequence for Capns1 (NM_009795.1,424-442).
ccgacacccggatctgaaa

SEQ ID NO: 545408 - DNA, 19 bp, Mus musculus
  siRNA target sequence for Capns1 (NM_009795.1,425-443).
cgacacccggatctgaaaa

SEQ ID NO: 545409 - DNA, 19 bp, Mus musculus
  siRNA target sequence for Capns1 (NM_009795.1,430-448).
cccggatctgaaaactgat

SEQ ID NO: 545410 - DNA, 19 bp, Mus musculus
  siRNA target sequence for Capns1 (NM_009795.1,516-534).
gctttgaggagttcaaata

SEQ ID NO: 545411 - DNA, 19 bp, Mus musculus
  siRNA target sequence for Capns1 (NM_009795.1,556-574).
gtggcaggctatatacaaa

SEQ ID NO: 545412 - DNA, 19 bp, Mus musculus
  siRNA target sequence for Capns1 (NM_009795.1,600-618).
ctatcggtagccatgaact

SEQ ID NO: 545413 - DNA, 19 bp, Mus musculus
  siRNA target sequence for Capns1 (NM_009795.1,639-657).
caggattccacctgaatga

SEQ ID NO: 545414 - DNA, 19 bp, Mus musculus
  siRNA target sequence for Capns1 (NM_009795.1,751-769).
catgttccgtgctttcaaa

SEQ ID NO: 545415 - DNA, 19 bp, Mus musculus
  siRNA target sequence for Capns1 (NM_009795.1,757-775).
ccgtgctttcaaatctctt

SEQ ID NO: 545416 - DNA, 19 bp, Mus musculus
  siRNA target sequence for Capns1 (NM_009795.1,762-780).
ctttcaaatctcttgacaa

SEQ ID NO: 545417 - DNA, 19 bp, Mus musculus
  siRNA target sequence for Capns1 (NM_009795.1,789-807).
ccggacagatccaagtgaa

SEQ ID NO: 545418 - DNA, 19 bp, Mus musculus
  siRNA target sequence for Cbara1 (NM_144822.1,213-231).
gaaggctcacgcagaatct

SEQ ID NO: 545419 - DNA, 19 bp, Mus musculus
  siRNA target sequence for Cbara1 (NM_144822.1,423-441).
ctccacaccagacaaaatt

SEQ ID NO: 545420 - DNA, 19 bp, Mus musculus
  siRNA target sequence for Cbara1 (NM_144822.1,433-451).
gacaaaattttccgatatt

SEQ ID NO: 545421 - DNA, 19 bp, Mus musculus
  siRNA target sequence for Cbara1 (NM_144822.1,454-472).
gccaccttgaaagtaatca

SEQ ID NO: 545422 - DNA, 19 bp, Mus musculus
  siRNA target sequence for Cbara1 (NM_144822.1,455-473).
ccaccttgaaagtaatcaa

SEQ ID NO: 545423 - DNA, 19 bp, Mus musculus
  siRNA target sequence for Cbara1 (NM_144822.1,479-497).
ctggtgaaaccgaagtgtt

SEQ ID NO: 545424 - DNA, 19 bp, Mus musculus
  siRNA target sequence for Cbara1 (NM_144822.1,482-500).
gtgaaaccgaagtgttcat

SEQ ID NO: 545425 - DNA, 19 bp, Mus musculus
  siRNA target sequence for Cbara1 (NM_144822.1,524-542).
ccataacgcccaatgagaa

SEQ ID NO: 545426 - DNA, 19 bp, Mus musculus
  siRNA target sequence for Cbara1 (NM_144822.1,558-576).
gggcctggatcagtatata

SEQ ID NO: 545427 - DNA, 19 bp, Mus musculus
  siRNA target sequence for Cbara1 (NM_144822.1,559-577).
ggcctggatcagtatataa

SEQ ID NO: 545428 - DNA, 19 bp, Mus musculus
  siRNA target sequence for Cbara1 (NM_144822.1,561-579).
cctggatcagtatataata

SEQ ID NO: 545429 - DNA, 19 bp, Mus musculus
  siRNA target sequence for Cbara1 (NM_144822.1,583-601).
cgctttgatggaaagaaaa

SEQ ID NO: 545430 - DNA, 19 bp, Mus musculus
  siRNA target sequence for Cbara1 (NM_144822.1,605-623).
cccaggaacgagaaaaatt

SEQ ID NO: 545431 - DNA, 19 bp, Mus musculus
  siRNA target sequence for Cbara1 (NM_144822.1,609-627).
ggaacgagaaaaatttgct

SEQ ID NO: 545432 - DNA, 19 bp, Mus musculus
  siRNA target sequence for Cbara1 (NM_144822.1,710-728).
ccactcctcagagaaattt

SEQ ID NO: 545433 - DNA, 19 bp, Mus musculus
  siRNA target sequence for Cbara1 (NM_144822.1,711-729).
cactcctcagagaaatttt

SEQ ID NO: 545434 - DNA, 19 bp, Mus musculus
  siRNA target sequence for Cbara1 (NM_144822.1,716-734).
ctcagagaaattttgaaat

SEQ ID NO: 545435 - DNA, 19 bp, Mus musculus
  siRNA target sequence for Cbara1 (NM_144822.1,761-779).
gagacggagaggtagacat

SEQ ID NO: 545436 - DNA, 19 bp, Mus musculus
  siRNA target sequence for Cbara1 (NM_144822.1,867-885).
cctcaagtctggcttatgt

SEQ ID NO: 545437 - DNA, 19 bp, Mus musculus
  siRNA target sequence for Cbara1 (NM_144822.1,868-886).
ctcaagtctggcttatgtt

SEQ ID NO: 545438 - DNA, 19 bp, Mus musculus
  siRNA target sequence for Cbara1 (NM_144822.1,890-908).
ccctcacgacctacttttt

SEQ ID NO: 545439 - DNA, 19 bp, Mus musculus
  siRNA target sequence for Cbara1 (NM_144822.1,891-909).
cctcacgacctactttttt

SEQ ID NO: 545440 - DNA, 19 bp, Mus musculus
  siRNA target sequence for Cbara1 (NM_144822.1,894-912).
cacgacctacttttttgga

SEQ ID NO: 545441 - DNA, 19 bp, Mus musculus
  siRNA target sequence for Cbara1 (NM_144822.1,967-985).
cttcagcatgacgttctaa

SEQ ID NO: 545442 - DNA, 19 bp, Mus musculus
  siRNA target sequence for Cbara1 (NM_144822.1,1009-1027).
ccggtagatgggagaatct

SEQ ID NO: 545443 - DNA, 19 bp, Mus musculus
  siRNA target sequence for Cbara1 (NM_144822.1,1011-1029).
ggtagatgggagaatctct

SEQ ID NO: 545444 - DNA, 19 bp, Mus musculus
  siRNA target sequence for Cbara1 (NM_144822.1,1150-1168).
gtagagaacttcttcactt

SEQ ID NO: 545445 - DNA, 19 bp, Mus musculus
  siRNA target sequence for Cbara1 (NM_144822.1,1191-1209).
ggacactgcactaagcttt

SEQ ID NO: 545446 - DNA, 19 bp, Mus musculus
  siRNA target sequence for Cbara1 (NM_144822.1,1192-1210).
gacactgcactaagctttt

SEQ ID NO: 545447 - DNA, 19 bp, Mus musculus
  siRNA target sequence for Cbara1 (NM_144822.1,1219-1237).
gctggagcatctcttgata

SEQ ID NO: 545448 - DNA, 19 bp, Mus musculus
  siRNA target sequence for Cd164l1 (NM_054042.2,284-302).
ccaacgggctgctatggat

SEQ ID NO: 545449 - DNA, 19 bp, Mus musculus
  siRNA target sequence for Cd164l1 (NM_054042.2,285-303).
caacgggctgctatggatt

SEQ ID NO: 545450 - DNA, 19 bp, Mus musculus
  siRNA target sequence for Cd164l1 (NM_054042.2,604-622).
gtttccagcgagttcgaat

SEQ ID NO: 545451 - DNA, 19 bp, Mus musculus
  siRNA target sequence for Cd164l1 (NM_054042.2,910-928).
gggccacaaggctatagct

SEQ ID NO: 545452 - DNA, 19 bp, Mus musculus
  siRNA target sequence for Cd164l1 (NM_054042.2,1435-1453).
gcccacaagacctctgtta

SEQ ID NO: 545453 - DNA, 19 bp, Mus musculus
  siRNA target sequence for Cd164l1 (NM_054042.2,1534-1552).
caccagatccccaaaatca

SEQ ID NO: 545454 - DNA, 19 bp, Mus musculus
  siRNA target sequence for Cd164l1 (NM_054042.2,1582-1600).
cacaagcctgggataacct

SEQ ID NO: 545455 - DNA, 19 bp, Mus musculus
  siRNA target sequence for Cd164l1 (NM_054042.2,1652-1670).
ccaactatccccaagtctt

SEQ ID NO: 545456 - DNA, 19 bp, Mus musculus
  siRNA target sequence for Cd164l1 (NM_054042.2,1748-1766).
ctggggataccacttctaa

SEQ ID NO: 545457 - DNA, 19 bp, Mus musculus
  siRNA target sequence for Cd97 (NM_011925.1,133-151).
ggtgccctatcaactcaaa

SEQ ID NO: 545458 - DNA, 19 bp, Mus musculus
  siRNA target sequence for Cd97 (NM_011925.1,134-152).
gtgccctatcaactcaaaa

SEQ ID NO: 545459 - DNA, 19 bp, Mus musculus
  siRNA target sequence for Cd97 (NM_011925.1,239-257).
catcaacgagtgtttacta

SEQ ID NO: 545460 - DNA, 19 bp, Mus musculus
  siRNA target sequence for Cd97 (NM_011925.1,273-291).
ggagactttgccatgtgta

SEQ ID NO: 545461 - DNA, 19 bp, Mus musculus
  siRNA target sequence for Cd97 (NM_011925.1,352-370).
cagaatcttttgttaacga

SEQ ID NO: 545462 - DNA, 19 bp, Mus musculus
  siRNA target sequence for Cd97 (NM_011925.1,363-381).
gttaacgagagtgagaata

SEQ ID NO: 545463 - DNA, 19 bp, Mus musculus
  siRNA target sequence for Cd97 (NM_011925.1,425-443).
caggatccacacagttact

SEQ ID NO: 545464 - DNA, 19 bp, Mus musculus
  siRNA target sequence for Cd97 (NM_011925.1,428-446).
gatccacacagttactact

SEQ ID NO: 545465 - DNA, 19 bp, Mus musculus
  siRNA target sequence for Cd97 (NM_011925.1,459-477).
ctccccgagcagacaacta

SEQ ID NO: 545466 - DNA, 19 bp, Mus musculus
  siRNA target sequence for Cd97 (NM_011925.1,461-479).
ccccgagcagacaactaca

SEQ ID NO: 545467 - DNA, 19 bp, Mus musculus
  siRNA target sequence for Cd97 (NM_011925.1,514-532).
ggacacccaaggatgtgaa

SEQ ID NO: 545468 - DNA, 19 bp, Mus musculus
  siRNA target sequence for Cd97 (NM_011925.1,539-557).
catctccgggcaaaaccat

SEQ ID NO: 545469 - DNA, 19 bp, Mus musculus
  siRNA target sequence for Cd97 (NM_011925.1,689-707).
ctctgggcagcatcaatgt

SEQ ID NO: 545470 - DNA, 19 bp, Mus musculus
  siRNA target sequence for Cd97 (NM_011925.1,691-709).
ctgggcagcatcaatgtca

SEQ ID NO: 545471 - DNA, 19 bp, Mus musculus
  siRNA target sequence for Cd97 (NM_011925.1,695-713).
gcagcatcaatgtcacaat

SEQ ID NO: 545472 - DNA, 19 bp, Mus musculus
  siRNA target sequence for Cd97 (NM_011925.1,792-810).
cgtggtccagacaccatat

SEQ ID NO: 545473 - DNA, 19 bp, Mus musculus
  siRNA target sequence for Cd97 (NM_011925.1,859-877).
gtcagactctcttgagatt

SEQ ID NO: 545474 - DNA, 19 bp, Mus musculus
  siRNA target sequence for Cd97 (NM_011925.1,863-881).
gactctcttgagattctct

SEQ ID NO: 545475 - DNA, 19 bp, Mus musculus
  siRNA target sequence for Cd97 (NM_011925.1,1017-1035).
ctctcgaacctggaacaaa

SEQ ID NO: 545476 - DNA, 19 bp, Mus musculus
  siRNA target sequence for Cd97 (NM_011925.1,1079-1097).
ctacacgtccccttcaaat

SEQ ID NO: 545477 - DNA, 19 bp, Mus musculus
  siRNA target sequence for Cd97 (NM_011925.1,1082-1100).
cacgtccccttcaaatact

SEQ ID NO: 545478 - DNA, 19 bp, Mus musculus
  siRNA target sequence for Cd97 (NM_011925.1,1084-1102).
cgtccccttcaaatactga

SEQ ID NO: 545479 - DNA, 19 bp, Mus musculus
  siRNA target sequence for Cd97 (NM_011925.1,1085-1103).
gtccccttcaaatactgaa

SEQ ID NO: 545480 - DNA, 19 bp, Mus musculus
  siRNA target sequence for Cd97 (NM_011925.1,1149-1167).
gtgcaccacggccaaactt

SEQ ID NO: 545481 - DNA, 19 bp, Mus musculus
  siRNA target sequence for Cd97 (NM_011925.1,1411-1429).
cgaatgtcacgttcaagtt

SEQ ID NO: 545482 - DNA, 19 bp, Mus musculus
  siRNA target sequence for Cd97 (NM_011925.1,1424-1442).
caagttcgactttacttct

SEQ ID NO: 545483 - DNA, 19 bp, Mus musculus
  siRNA target sequence for Cd97 (NM_011925.1,1520-1538).
cgacggctgctcaatgaat

SEQ ID NO: 545484 - DNA, 19 bp, Mus musculus
  siRNA target sequence for Cd97 (NM_011925.1,1746-1764).
ctcttcctgggctcaatca

SEQ ID NO: 545485 - DNA, 19 bp, Mus musculus
  siRNA target sequence for Cd97 (NM_011925.1,1748-1766).
cttcctgggctcaatcata

SEQ ID NO: 545486 - DNA, 19 bp, Mus musculus
  siRNA target sequence for Cd97 (NM_011925.1,1772-1790).
ggtcggcgtggagaatgaa

SEQ ID NO: 545487 - DNA, 19 bp, Mus musculus
  siRNA target sequence for Cd97 (NM_011925.1,1971-1989).
ctcatcgtggccatctcaa

SEQ ID NO: 545488 - DNA, 19 bp, Mus musculus
  siRNA target sequence for Cd97 (NM_011925.1,2011-2029).
gctatgggcatgcaacata

SEQ ID NO: 545489 - DNA, 19 bp, Mus musculus
  siRNA target sequence for Cd97 (NM_011925.1,2076-2094).
ggacccgtggccttcatca

SEQ ID NO: 545490 - DNA, 19 bp, Mus musculus
  siRNA target sequence for Cd97 (NM_011925.1,2077-2095).
gacccgtggccttcatcat

SEQ ID NO: 545491 - DNA, 19 bp, Mus musculus
  siRNA target sequence for Cd97 (NM_011925.1,2154-2172).
gaaatcaacccaaacatga

SEQ ID NO: 545492 - DNA, 19 bp, Mus musculus
  siRNA target sequence for Cd97 (NM_011925.1,2278-2296).
catggctatcctacatctt

SEQ ID NO: 545493 - DNA, 19 bp, Mus musculus
  siRNA target sequence for Cd97 (NM_011925.1,2311-2329).
gcctgcagggcctattcct

SEQ ID NO: 545494 - DNA, 19 bp, Mus musculus
  siRNA target sequence for Cd97 (NM_011925.1,2319-2337).
ggcctattcctctatgtga

SEQ ID NO: 545495 - DNA, 19 bp, Mus musculus
  siRNA target sequence for Cd97 (NM_011925.1,2339-2357).
gctctgcctgctcaacaaa

SEQ ID NO: 545496 - DNA, 19 bp, Mus musculus
  siRNA target sequence for Cd97 (NM_011925.1,2394-2412).
gtcactgggagcaagtaca

SEQ ID NO: 545497 - DNA, 19 bp, Mus musculus
  siRNA target sequence for Cdh11 (NM_009866.2,1294-1312).
cttatagcttgaagataga

SEQ ID NO: 545498 - DNA, 19 bp, Mus musculus
  siRNA target sequence for Cdh11 (NM_009866.2,1316-1334).
cgccaatgttcacattgat

SEQ ID NO: 545499 - DNA, 19 bp, Mus musculus
  siRNA target sequence for Cdh11 (NM_009866.2,1326-1344).
cacattgatccgaagttca

SEQ ID NO: 545500 - DNA, 19 bp, Mus musculus
  siRNA target sequence for Cdh11 (NM_009866.2,1367-1385).
cactgtgaccgtcaagatt

SEQ ID NO: 545501 - DNA, 19 bp, Mus musculus
  siRNA target sequence for Cdh11 (NM_009866.2,1373-1391).
gaccgtcaagatttcagta

SEQ ID NO: 545502 - DNA, 19 bp, Mus musculus
  siRNA target sequence for Cdh11 (NM_009866.2,1376-1394).
cgtcaagatttcagtagaa

SEQ ID NO: 545503 - DNA, 19 bp, Mus musculus
  siRNA target sequence for Cdh11 (NM_009866.2,1415-1433).
gttcttggccccaagttat

SEQ ID NO: 545504 - DNA, 19 bp, Mus musculus
  siRNA target sequence for Cdh11 (NM_009866.2,1421-1439).
ggccccaagttatatccat

SEQ ID NO: 545505 - DNA, 19 bp, Mus musculus
  siRNA target sequence for Cdh11 (NM_009866.2,1429-1447).
gttatatccatgaagttca

SEQ ID NO: 545506 - DNA, 19 bp, Mus musculus
  siRNA target sequence for Cdh11 (NM_009866.2,1503-1521).
gctgccaacagcccaataa

SEQ ID NO: 545507 - DNA, 19 bp, Mus musculus
  siRNA target sequence for Cdh11 (NM_009866.2,1506-1524).
gccaacagcccaataaggt

SEQ ID NO: 545508 - DNA, 19 bp, Mus musculus
  siRNA target sequence for Cdh11 (NM_009866.2,1507-1525).
ccaacagcccaataaggta

SEQ ID NO: 545509 - DNA, 19 bp, Mus musculus
  siRNA target sequence for Cdh11 (NM_009866.2,1508-1526).
caacagcccaataaggtat

SEQ ID NO: 545510 - DNA, 19 bp, Mus musculus
  siRNA target sequence for Cdh11 (NM_009866.2,1511-1529).
cagcccaataaggtattca

SEQ ID NO: 545511 - DNA, 19 bp, Mus musculus
  siRNA target sequence for Cdh11 (NM_009866.2,1513-1531).
gcccaataaggtattcaat

SEQ ID NO: 545512 - DNA, 19 bp, Mus musculus
  siRNA target sequence for Cdh11 (NM_009866.2,1514-1532).
cccaataaggtattcaatt

SEQ ID NO: 545513 - DNA, 19 bp, Mus musculus
  siRNA target sequence for Cdh11 (NM_009866.2,1528-1546).
caattgatcgtcatactga

SEQ ID NO: 545514 - DNA, 19 bp, Mus musculus
  siRNA target sequence for Cdh11 (NM_009866.2,1543-1561).
ctgacctcgacaggttttt

SEQ ID NO: 545515 - DNA, 19 bp, Mus musculus
  siRNA target sequence for Cdh11 (NM_009866.2,1545-1563).
gacctcgacaggtttttca

SEQ ID NO: 545516 - DNA, 19 bp, Mus musculus
  siRNA target sequence for Cdh11 (NM_009866.2,1551-1569).
gacaggtttttcacgatta

SEQ ID NO: 545517 - DNA, 19 bp, Mus musculus
  siRNA target sequence for Cdh11 (NM_009866.2,1553-1571).
caggtttttcacgattaat

SEQ ID NO: 545518 - DNA, 19 bp, Mus musculus
  siRNA target sequence for Cdh11 (NM_009866.2,1556-1574).
gtttttcacgattaatcca

SEQ ID NO: 545519 - DNA, 19 bp, Mus musculus
  siRNA target sequence for Cdh11 (NM_009866.2,1697-1715).
cagggtcctggatgtcaat

SEQ ID NO: 545520 - DNA, 19 bp, Mus musculus
  siRNA target sequence for Cdh11 (NM_009866.2,1737-1755).
gccccttatgaaggtttta

SEQ ID NO: 545521 - DNA, 19 bp, Mus musculus
  siRNA target sequence for Cdh11 (NM_009866.2,1738-1756).
ccccttatgaaggttttat

SEQ ID NO: 545522 - DNA, 19 bp, Mus musculus
  siRNA target sequence for Cdh11 (NM_009866.2,1790-1808).
ccagccaatagttacagtt

SEQ ID NO: 545523 - DNA, 19 bp, Mus musculus
  siRNA target sequence for Cdh11 (NM_009866.2,1793-1811).
gccaatagttacagttagt

SEQ ID NO: 545524 - DNA, 19 bp, Mus musculus
  siRNA target sequence for Cdh11 (NM_009866.2,1858-1876).
gcctaccccctgaaatcat

SEQ ID NO: 545525 - DNA, 19 bp, Mus musculus
  siRNA target sequence for Cdh11 (NM_009866.2,1883-1901).
cccaaacttcacagtaaga

SEQ ID NO: 545526 - DNA, 19 bp, Mus musculus
  siRNA target sequence for Cdh11 (NM_009866.2,1896-1914).
gtaagagacaacagagata

SEQ ID NO: 545527 - DNA, 19 bp, Mus musculus
  siRNA target sequence for Cdh11 (NM_009866.2,2001-2019).
ggcattccacctatgagta

SEQ ID NO: 545528 - DNA, 19 bp, Mus musculus
  siRNA target sequence for Cdh11 (NM_009866.2,2020-2038).
gcaccaataccctcactat

SEQ ID NO: 545529 - DNA, 19 bp, Mus musculus
  siRNA target sequence for Cdh11 (NM_009866.2,2024-2042).
caataccctcactatcaaa

SEQ ID NO: 545530 - DNA, 19 bp, Mus musculus
  siRNA target sequence for Cdh11 (NM_009866.2,2201-2219).
gaaagaaccactcattgta

SEQ ID NO: 545531 - DNA, 19 bp, Mus musculus
  siRNA target sequence for Cdh11 (NM_009866.2,2322-2340).
gacggcatcaatggattta

SEQ ID NO: 545532 - DNA, 19 bp, Mus musculus
  siRNA target sequence for Cdh11 (NM_009866.2,2342-2360).
ccctcgcaaagatatcaaa

SEQ ID NO: 545533 - DNA, 19 bp, Mus musculus
  siRNA target sequence for Cdh11 (NM_009866.2,2426-2444).
cttcatcaacacaagaata

SEQ ID NO: 545534 - DNA, 19 bp, Mus musculus
  siRNA target sequence for Cdh11 (NM_009866.2,2475-2493).
ccctatgactccatccaaa

SEQ ID NO: 545535 - DNA, 19 bp, Mus musculus
  siRNA target sequence for Cdh11 (NM_009866.2,2476-2494).
cctatgactccatccaaat

SEQ ID NO: 545536 - DNA, 19 bp, Mus musculus
  siRNA target sequence for Cdh11 (NM_009866.2,2588-2606).
gaactggggacctcgtttt

SEQ ID NO: 545537 - DNA, 19 bp, Mus musculus
  siRNA target sequence for Cdh13 (NM_019707.1,196-214).
ggattccagcggaaagtgt

SEQ ID NO: 545538 - DNA, 19 bp, Mus musculus
  siRNA target sequence for Cdh13 (NM_019707.1,197-215).
gattccagcggaaagtgtt

SEQ ID NO: 545539 - DNA, 19 bp, Mus musculus
  siRNA target sequence for Cdh13 (NM_019707.1,464-482).
gctccttgcaggatatctt

SEQ ID NO: 545540 - DNA, 19 bp, Mus musculus
  siRNA target sequence for Cdh13 (NM_019707.1,471-489).
gcaggatatctttaaattt

SEQ ID NO: 545541 - DNA, 19 bp, Mus musculus
  siRNA target sequence for Cdh13 (NM_019707.1,529-547).
gtggtgtcccccatcttga

SEQ ID NO: 545542 - DNA, 19 bp, Mus musculus
  siRNA target sequence for Cdh13 (NM_019707.1,665-683).
gaactttcagaatcaatga

SEQ ID NO: 545543 - DNA, 19 bp, Mus musculus
  siRNA target sequence for Cdh13 (NM_019707.1,722-740).
gagaaacgatcgctactta

SEQ ID NO: 545544 - DNA, 19 bp, Mus musculus
  siRNA target sequence for Cdh13 (NM_019707.1,728-746).
cgatcgctacttatcaact

SEQ ID NO: 545545 - DNA, 19 bp, Mus musculus
  siRNA target sequence for Cdh13 (NM_019707.1,732-750).
cgctacttatcaactgtat

SEQ ID NO: 545546 - DNA, 19 bp, Mus musculus
  siRNA target sequence for Cdh13 (NM_019707.1,734-752).
ctacttatcaactgtatgt

SEQ ID NO: 545547 - DNA, 19 bp, Mus musculus
  siRNA target sequence for Cdh13 (NM_019707.1,796-814).
cctctggaagtcattgtga

SEQ ID NO: 545548 - DNA, 19 bp, Mus musculus
  siRNA target sequence for Cdh13 (NM_019707.1,903-921).
gcggatgacagcgtttgat

SEQ ID NO: 545549 - DNA, 19 bp, Mus musculus
  siRNA target sequence for Cdh13 (NM_019707.1,989-1007).
catctcctaacatgttcta

SEQ ID NO: 545550 - DNA, 19 bp, Mus musculus
  siRNA target sequence for Cdh13 (NM_019707.1,992-1010).
ctcctaacatgttctacat

SEQ ID NO: 545551 - DNA, 19 bp, Mus musculus
  siRNA target sequence for Cdh13 (NM_019707.1,1016-1034).
ccgagaaaggagacattgt

SEQ ID NO: 545552 - DNA, 19 bp, Mus musculus
  siRNA target sequence for Cdh13 (NM_019707.1,1018-1036).
gagaaaggagacattgtca

SEQ ID NO: 545553 - DNA, 19 bp, Mus musculus
  siRNA target sequence for Cdh13 (NM_019707.1,1082-1100).
ccaagtatgaactgatcat

SEQ ID NO: 545554 - DNA, 19 bp, Mus musculus
  siRNA target sequence for Cdh13 (NM_019707.1,1095-1113).
gatcatcgaagctcaagat

SEQ ID NO: 545555 - DNA, 19 bp, Mus musculus
  siRNA target sequence for Cdh13 (NM_019707.1,1161-1179).
cgtgatcgatgacaaaaat

SEQ ID NO: 545556 - DNA, 19 bp, Mus musculus
  siRNA target sequence for Cdh13 (NM_019707.1,1180-1198).
gatcactcaccaaaattca

SEQ ID NO: 545557 - DNA, 19 bp, Mus musculus
  siRNA target sequence for Cdh13 (NM_019707.1,1548-1566).
ccccatgatggtgactaaa

SEQ ID NO: 545558 - DNA, 19 bp, Mus musculus
  siRNA target sequence for Cdh13 (NM_019707.1,1619-1637).
cagactccctgcaacatca

SEQ ID NO: 545559 - DNA, 19 bp, Mus musculus
  siRNA target sequence for Cdh13 (NM_019707.1,1625-1643).
ccctgcaacatcaaactat

SEQ ID NO: 545560 - DNA, 19 bp, Mus musculus
  siRNA target sequence for Cdh13 (NM_019707.1,1636-1654).
caaactatcaggtactcta

SEQ ID NO: 545561 - DNA, 19 bp, Mus musculus
  siRNA target sequence for Cdh13 (NM_019707.1,1640-1658).
ctatcaggtactctatcta

SEQ ID NO: 545562 - DNA, 19 bp, Mus musculus
  siRNA target sequence for Cdh13 (NM_019707.1,1667-1685).
cagcaggctggctgagtat

SEQ ID NO: 545563 - DNA, 19 bp, Mus musculus
  siRNA target sequence for Cdh13 (NM_019707.1,1680-1698).
gagtatcaaccccatcaat

SEQ ID NO: 545564 - DNA, 19 bp, Mus musculus
  siRNA target sequence for Cdh15 (NM_007662.1,659-677).
ggtcatcccacccattagt

SEQ ID NO: 545565 - DNA, 19 bp, Mus musculus
  siRNA target sequence for Cdh15 (NM_007662.1,708-726).
ccacttgtgcagatcaagt

SEQ ID NO: 545566 - DNA, 19 bp, Mus musculus
  siRNA target sequence for Cdh15 (NM_007662.1,716-734).
gcagatcaagtctgacaaa

SEQ ID NO: 545567 - DNA, 19 bp, Mus musculus
  siRNA target sequence for Cdh15 (NM_007662.1,783-801).
gaggagccccgaaatgtct

SEQ ID NO: 545568 - DNA, 19 bp, Mus musculus
  siRNA target sequence for Cdh15 (NM_007662.1,938-956).
cgttgtggtggatcaaaat

SEQ ID NO: 545569 - DNA, 19 bp, Mus musculus
  siRNA target sequence for Cdh15 (NM_007662.1,1179-1197).
gaggtggtggctgtgtata

SEQ ID NO: 545570 - DNA, 19 bp, Mus musculus
  siRNA target sequence for Cdh15 (NM_007662.1,1534-1552).
gagtgtctgtacaaaacga

SEQ ID NO: 545571 - DNA, 19 bp, Mus musculus
  siRNA target sequence for Cdh15 (NM_007662.1,1831-1849).
gccctgcttcacccttttt

SEQ ID NO: 545572 - DNA, 19 bp, Mus musculus
  siRNA target sequence for Cdh15 (NM_007662.1,1834-1852).
ctgcttcaccctttttgaa

SEQ ID NO: 545573 - DNA, 19 bp, Mus musculus
  siRNA target sequence for Cdh15 (NM_007662.1,1927-1945).
ccatcgagatcctagaagt

SEQ ID NO: 545574 - DNA, 19 bp, Mus musculus
  siRNA target sequence for Cdh15 (NM_007662.1,2113-2131).
ggagcgtcagccagattaa

SEQ ID NO: 545575 - DNA, 19 bp, Mus musculus
  siRNA target sequence for Cdh15 (NM_007662.1,2116-2134).
gcgtcagccagattaacgt

SEQ ID NO: 545576 - DNA, 19 bp, Mus musculus
  siRNA target sequence for Cdh15 (NM_007662.1,2356-2374).
gcaccgtggtcttactagt

SEQ ID NO: 545577 - DNA, 19 bp, Mus musculus
  siRNA target sequence for Cdh15 (NM_007662.1,2357-2375).
caccgtggtcttactagtt

SEQ ID NO: 545578 - DNA, 19 bp, Mus musculus
  siRNA target sequence for Cdh15 (NM_007662.1,2359-2377).
ccgtggtcttactagttct

SEQ ID NO: 545579 - DNA, 19 bp, Mus musculus
  siRNA target sequence for Cdh15 (NM_007662.1,2460-2478).
cgggacaacatccttaact

SEQ ID NO: 545580 - DNA, 19 bp, Mus musculus
  siRNA target sequence for Cdh15 (NM_007662.1,2845-2863).
ctcggctggcggacatgta

SEQ ID NO: 545581 - DNA, 19 bp, Mus musculus
  siRNA target sequence for Cdh2 (NM_007664.1,401-419).
ggaggcttctggtgaaatt

SEQ ID NO: 545582 - DNA, 19 bp, Mus musculus
  siRNA target sequence for Cdh2 (NM_007664.1,404-422).
ggcttctggtgaaattgca

SEQ ID NO: 545583 - DNA, 19 bp, Mus musculus
  siRNA target sequence for Cdh2 (NM_007664.1,405-423).
gcttctggtgaaattgcat

SEQ ID NO: 545584 - DNA, 19 bp, Mus musculus
  siRNA target sequence for Cdh2 (NM_007664.1,406-424).
cttctggtgaaattgcatt

SEQ ID NO: 545585 - DNA, 19 bp, Mus musculus
  siRNA target sequence for Cdh2 (NM_007664.1,433-451).
ctggatttcctgaagatgt

SEQ ID NO: 545586 - DNA, 19 bp, Mus musculus
  siRNA target sequence for Cdh2 (NM_007664.1,491-509).
gccccttctcaatgtgaaa

SEQ ID NO: 545587 - DNA, 19 bp, Mus musculus
  siRNA target sequence for Cdh2 (NM_007664.1,492-510).
ccccttctcaatgtgaaat

SEQ ID NO: 545588 - DNA, 19 bp, Mus musculus
  siRNA target sequence for Cdh2 (NM_007664.1,493-511).
cccttctcaatgtgaaatt

SEQ ID NO: 545589 - DNA, 19 bp, Mus musculus
  siRNA target sequence for Cdh2 (NM_007664.1,553-571).
gcgagccagcagatttcaa

SEQ ID NO: 545590 - DNA, 19 bp, Mus musculus
  siRNA target sequence for Cdh2 (NM_007664.1,629-647).
ggcaaagttcctgatatat

SEQ ID NO: 545591 - DNA, 19 bp, Mus musculus
  siRNA target sequence for Cdh2 (NM_007664.1,816-834).
gtcatcccgccaatcaact

SEQ ID NO: 545592 - DNA, 19 bp, Mus musculus
  siRNA target sequence for Cdh2 (NM_007664.1,826-844).
caatcaacttgccagaaaa

SEQ ID NO: 545593 - DNA, 19 bp, Mus musculus
  siRNA target sequence for Cdh2 (NM_007664.1,873-891).
gtcagaatcaggtctgata

SEQ ID NO: 545594 - DNA, 19 bp, Mus musculus
  siRNA target sequence for Cdh2 (NM_007664.1,875-893).
cagaatcaggtctgataga

SEQ ID NO: 545595 - DNA, 19 bp, Mus musculus
  siRNA target sequence for Cdh2 (NM_007664.1,881-899).
caggtctgatagagataaa

SEQ ID NO: 545596 - DNA, 19 bp, Mus musculus
  siRNA target sequence for Cdh2 (NM_007664.1,888-906).
gatagagataaaaaccttt

SEQ ID NO: 545597 - DNA, 19 bp, Mus musculus
  siRNA target sequence for Cdh2 (NM_007664.1,945-963).
cctccaacgggcatcttca

SEQ ID NO: 545598 - DNA, 19 bp, Mus musculus
  siRNA target sequence for Cdh2 (NM_007664.1,946-964).
ctccaacgggcatcttcat

SEQ ID NO: 545599 - DNA, 19 bp, Mus musculus
  siRNA target sequence for Cdh2 (NM_007664.1,949-967).
caacgggcatcttcattat

SEQ ID NO: 545600 - DNA, 19 bp, Mus musculus
  siRNA target sequence for Cdh2 (NM_007664.1,952-970).
cgggcatcttcattatcaa

SEQ ID NO: 545601 - DNA, 19 bp, Mus musculus
  siRNA target sequence for Cdh2 (NM_007664.1,1017-1035).
ctgatagcccggtttcact

SEQ ID NO: 545602 - DNA, 19 bp, Mus musculus
  siRNA target sequence for Cdh2 (NM_007664.1,1052-1070).
ggacatcaatggcaatcaa

SEQ ID NO: 545603 - DNA, 19 bp, Mus musculus
  siRNA target sequence for Cdh2 (NM_007664.1,1097-1115).
caatgttattgacatgaat

SEQ ID NO: 545604 - DNA, 19 bp, Mus musculus
  siRNA target sequence for Cdh2 (NM_007664.1,1156-1174).
ctgttccagagggatcaaa

SEQ ID NO: 545605 - DNA, 19 bp, Mus musculus
  siRNA target sequence for Cdh2 (NM_007664.1,1193-1211).
gacggtcactgccattgat

SEQ ID NO: 545606 - DNA, 19 bp, Mus musculus
  siRNA target sequence for Cdh2 (NM_007664.1,1282-1300).
cacccaacatgtttacaat

SEQ ID NO: 545607 - DNA, 19 bp, Mus musculus
  siRNA target sequence for Cdh2 (NM_007664.1,1308-1326).
gagactggggacatcatca

SEQ ID NO: 545608 - DNA, 19 bp, Mus musculus
  siRNA target sequence for Cdh2 (NM_007664.1,1356-1374).
gtgcaacagtatacgttaa

SEQ ID NO: 545609 - DNA, 19 bp, Mus musculus
  siRNA target sequence for Cdh2 (NM_007664.1,1358-1376).
gcaacagtatacgttaata

SEQ ID NO: 545610 - DNA, 19 bp, Mus musculus
  siRNA target sequence for Cdh2 (NM_007664.1,1404-1422).
cccacttatggcctttcaa

SEQ ID NO: 545611 - DNA, 19 bp, Mus musculus
  siRNA target sequence for Cdh2 (NM_007664.1,1405-1423).
ccacttatggcctttcaaa

SEQ ID NO: 545612 - DNA, 19 bp, Mus musculus
  siRNA target sequence for Cdh2 (NM_007664.1,1514-1532).
cagggtggacgtcattgta

SEQ ID NO: 545613 - DNA, 19 bp, Mus musculus
  siRNA target sequence for Cdh2 (NM_007664.1,1524-1542).
gtcattgtagccaacctaa

SEQ ID NO: 545614 - DNA, 19 bp, Mus musculus
  siRNA target sequence for Cdh2 (NM_007664.1,1543-1561).
ctgtcacggacaaagatca

SEQ ID NO: 545615 - DNA, 19 bp, Mus musculus
  siRNA target sequence for Cdh2 (NM_007664.1,1577-1595).
ctggaatgcggcatacaga

SEQ ID NO: 545616 - DNA, 19 bp, Mus musculus
  siRNA target sequence for Cdh2 (NM_007664.1,1579-1597).
ggaatgcggcatacagaat

SEQ ID NO: 545617 - DNA, 19 bp, Mus musculus
  siRNA target sequence for Cdh2 (NM_007664.1,1657-1675).
ggctagtcacagtggtaaa

SEQ ID NO: 545618 - DNA, 19 bp, Mus musculus
  siRNA target sequence for Cdh2 (NM_007664.1,1658-1676).
gctagtcacagtggtaaaa

SEQ ID NO: 545619 - DNA, 19 bp, Mus musculus
  siRNA target sequence for Cdh2 (NM_007664.1,1662-1680).
gtcacagtggtaaaaccaa

SEQ ID NO: 545620 - DNA, 19 bp, Mus musculus
  siRNA target sequence for Cdh2 (NM_007664.1,1668-1686).
gtggtaaaaccaattgact

SEQ ID NO: 545621 - DNA, 19 bp, Mus musculus
  siRNA target sequence for Cdh2 (NM_007664.1,1670-1688).
ggtaaaaccaattgacttt

SEQ ID NO: 545622 - DNA, 19 bp, Mus musculus
  siRNA target sequence for Cdh2 (NM_007664.1,1699-1717).
ggatgtttgtccttactgt

SEQ ID NO: 545623 - DNA, 19 bp, Mus musculus
  siRNA target sequence for Cdh2 (NM_007664.1,1700-1718).
gatgtttgtccttactgtt

SEQ ID NO: 545624 - DNA, 19 bp, Mus musculus
  siRNA target sequence for Cdh2 (NM_007664.1,1784-1802).
gtctgtgacagttattgat

SEQ ID NO: 545625 - DNA, 19 bp, Mus musculus
  siRNA target sequence for Cdh2 (NM_007664.1,1786-1804).
ctgtgacagttattgatgt

SEQ ID NO: 545626 - DNA, 19 bp, Mus musculus
  siRNA target sequence for Cdh2 (NM_007664.1,1803-1821).
gtcaatgaaaatccttatt

SEQ ID NO: 545627 - DNA, 19 bp, Mus musculus
  siRNA target sequence for Cdh2 (NM_007664.1,1824-1842).
gccccaaatcctaaaatca

SEQ ID NO: 545628 - DNA, 19 bp, Mus musculus
  siRNA target sequence for Cdh2 (NM_007664.1,1894-1912).
ctcaggaccccgatcgata

SEQ ID NO: 545629 - DNA, 19 bp, Mus musculus
  siRNA target sequence for Cdh2 (NM_007664.1,1901-1919).
ccccgatcgatatatgcaa

SEQ ID NO: 545630 - DNA, 19 bp, Mus musculus
  siRNA target sequence for Cdh2 (NM_007664.1,1908-1926).
cgatatatgcaacagaata

SEQ ID NO: 545631 - DNA, 19 bp, Mus musculus
  siRNA target sequence for Cdh2 (NM_007664.1,1954-1972).
ccaactggctgaaaataga

SEQ ID NO: 545632 - DNA, 19 bp, Mus musculus
  siRNA target sequence for Cdh2 (NM_007664.1,1993-2011).
ctactattgccgttttgga

SEQ ID NO: 545633 - DNA, 19 bp, Mus musculus
  siRNA target sequence for Cdh2 (NM_007664.1,2097-2115).
ggaacactgcaaatctatt

SEQ ID NO: 545634 - DNA, 19 bp, Mus musculus
  siRNA target sequence for Cdh2 (NM_007664.1,2157-2175).
gaggcggagacctgtgaaa

SEQ ID NO: 545635 - DNA, 19 bp, Mus musculus
  siRNA target sequence for Cdh2 (NM_007664.1,2159-2177).
ggcggagacctgtgaaact

SEQ ID NO: 545636 - DNA, 19 bp, Mus musculus
  siRNA target sequence for Cdh2 (NM_007664.1,2178-2196).
ccagaacccaactcaatta

SEQ ID NO: 545637 - DNA, 19 bp, Mus musculus
  siRNA target sequence for Cdh2 (NM_007664.1,2179-2197).
cagaacccaactcaattaa

SEQ ID NO: 545638 - DNA, 19 bp, Mus musculus
  siRNA target sequence for Cdh2 (NM_007664.1,2206-2224).
cacttgattatgacataga

SEQ ID NO: 545639 - DNA, 19 bp, Mus musculus
  siRNA target sequence for Cdh2 (NM_007664.1,2237-2255).
gccgttcgcgtttgatctt

SEQ ID NO: 545640 - DNA, 19 bp, Mus musculus
  siRNA target sequence for Cdh2 (NM_007664.1,2246-2264).
gtttgatcttcccttatct

SEQ ID NO: 545641 - DNA, 19 bp, Mus musculus
  siRNA target sequence for Cdh2 (NM_007664.1,2288-2306).
gaccatcaaccggcttaat

SEQ ID NO: 545642 - DNA, 19 bp, Mus musculus
  siRNA target sequence for Cdh2 (NM_007664.1,2291-2309).
catcaaccggcttaatggt

SEQ ID NO: 545643 - DNA, 19 bp, Mus musculus
  siRNA target sequence for Cdh2 (NM_007664.1,2297-2315).
ccggcttaatggtgatttt

SEQ ID NO: 545644 - DNA, 19 bp, Mus musculus
  siRNA target sequence for Cdh2 (NM_007664.1,2300-2318).
gcttaatggtgattttgct

SEQ ID NO: 545645 - DNA, 19 bp, Mus musculus
  siRNA target sequence for Cdh2 (NM_007664.1,2357-2375).
ctatgaagttcccatcatt

SEQ ID NO: 545646 - DNA, 19 bp, Mus musculus
  siRNA target sequence for Cdh2 (NM_007664.1,2414-2432).
catcctgcgtgtgaaagtt

SEQ ID NO: 545647 - DNA, 19 bp, Mus musculus
  siRNA target sequence for Cdh2 (NM_007664.1,2596-2614).
ccaagcagcttttaattga

SEQ ID NO: 545648 - DNA, 19 bp, Mus musculus
  siRNA target sequence for Cdh2 (NM_007664.1,2735-2753).
caagcccgtgggaatcaga

SEQ ID NO: 545649 - DNA, 19 bp, Mus musculus
  siRNA target sequence for Cdh20 (NM_011800.2,326-344).
cactccaatgccagaagtt

SEQ ID NO: 545650 - DNA, 19 bp, Mus musculus
  siRNA target sequence for Cdh20 (NM_011800.2,328-346).
ctccaatgccagaagttga

SEQ ID NO: 545651 - DNA, 19 bp, Mus musculus
  siRNA target sequence for Cdh20 (NM_011800.2,335-353).
gccagaagttgaattagaa

SEQ ID NO: 545652 - DNA, 19 bp, Mus musculus
  siRNA target sequence for Cdh20 (NM_011800.2,439-457).
ctgggactgaccctttgta

SEQ ID NO: 545653 - DNA, 19 bp, Mus musculus
  siRNA target sequence for Cdh20 (NM_011800.2,442-460).
ggactgaccctttgtatgt

SEQ ID NO: 545654 - DNA, 19 bp, Mus musculus
  siRNA target sequence for Cdh20 (NM_011800.2,525-543).
ggagcaggcatcgtgttta

SEQ ID NO: 545655 - DNA, 19 bp, Mus musculus
  siRNA target sequence for Cdh20 (NM_011800.2,533-551).
catcgtgtttaccattgat

SEQ ID NO: 545656 - DNA, 19 bp, Mus musculus
  siRNA target sequence for Cdh20 (NM_011800.2,581-599).
gaggctcgaccgagaagaa

SEQ ID NO: 545657 - DNA, 19 bp, Mus musculus
  siRNA target sequence for Cdh20 (NM_011800.2,584-602).
gctcgaccgagaagaaaga

SEQ ID NO: 545658 - DNA, 19 bp, Mus musculus
  siRNA target sequence for Cdh20 (NM_011800.2,756-774).
ccagtaggtacatctgtta

SEQ ID NO: 545659 - DNA, 19 bp, Mus musculus
  siRNA target sequence for Cdh20 (NM_011800.2,757-775).
cagtaggtacatctgttat

SEQ ID NO: 545660 - DNA, 19 bp, Mus musculus
  siRNA target sequence for Cdh20 (NM_011800.2,892-910).
gaacagcccttatgaacat

SEQ ID NO: 545661 - DNA, 19 bp, Mus musculus
  siRNA target sequence for Cdh20 (NM_011800.2,922-940).
ccaaggagtactatgaagt

SEQ ID NO: 545662 - DNA, 19 bp, Mus musculus
  siRNA target sequence for Cdh20 (NM_011800.2,927-945).
gagtactatgaagtgatta

SEQ ID NO: 545663 - DNA, 19 bp, Mus musculus
  siRNA target sequence for Cdh20 (NM_011800.2,932-950).
ctatgaagtgattatccaa

SEQ ID NO: 545664 - DNA, 19 bp, Mus musculus
  siRNA target sequence for Cdh20 (NM_011800.2,941-959).
gattatccaagccaaagat

SEQ ID NO: 545665 - DNA, 19 bp, Mus musculus
  siRNA target sequence for Cdh20 (NM_011800.2,1037-1055).
ccgatttccacagaaacat

SEQ ID NO: 545666 - DNA, 19 bp, Mus musculus
  siRNA target sequence for Cdh20 (NM_011800.2,1044-1062).
ccacagaaacattatcaga

SEQ ID NO: 545667 - DNA, 19 bp, Mus musculus
  siRNA target sequence for Cdh20 (NM_011800.2,1059-1077).
cagatgagtgtgctagaat

SEQ ID NO: 545668 - DNA, 19 bp, Mus musculus
  siRNA target sequence for Cdh20 (NM_011800.2,1061-1079).
gatgagtgtgctagaatct

SEQ ID NO: 545669 - DNA, 19 bp, Mus musculus
  siRNA target sequence for Cdh20 (NM_011800.2,1070-1088).
gctagaatctgctccaatt

SEQ ID NO: 545670 - DNA, 19 bp, Mus musculus
  siRNA target sequence for Cdh20 (NM_011800.2,1071-1089).
ctagaatctgctccaatta

SEQ ID NO: 545671 - DNA, 19 bp, Mus musculus
  siRNA target sequence for Cdh20 (NM_011800.2,1141-1159).
cagagatgaagtataccat

SEQ ID NO: 545672 - DNA, 19 bp, Mus musculus
  siRNA target sequence for Cdh20 (NM_011800.2,1174-1192).
gtgcagatgcttttgatat

SEQ ID NO: 545673 - DNA, 19 bp, Mus musculus
  siRNA target sequence for Cdh20 (NM_011800.2,1208-1226).
cttccaagttggcatcata

SEQ ID NO: 545674 - DNA, 19 bp, Mus musculus
  siRNA target sequence for Cdh20 (NM_011800.2,1211-1229).
ccaagttggcatcataact

SEQ ID NO: 545675 - DNA, 19 bp, Mus musculus
  siRNA target sequence for Cdh20 (NM_011800.2,1299-1317).
ctagagatgcgttttctga

SEQ ID NO: 545676 - DNA, 19 bp, Mus musculus
  siRNA target sequence for Cdh20 (NM_011800.2,1415-1433).
gccagaggatgtgacaatt

SEQ ID NO: 545677 - DNA, 19 bp, Mus musculus
  siRNA target sequence for Cdh20 (NM_011800.2,1419-1437).
gaggatgtgacaattggaa

SEQ ID NO: 545678 - DNA, 19 bp, Mus musculus
  siRNA target sequence for Cdh20 (NM_011800.2,1427-1445).
gacaattggaacaaccata

SEQ ID NO: 545679 - DNA, 19 bp, Mus musculus
  siRNA target sequence for Cdh20 (NM_011800.2,1435-1453).
gaacaaccatacagatcat

SEQ ID NO: 545680 - DNA, 19 bp, Mus musculus
  siRNA target sequence for Cdh20 (NM_011800.2,1473-1491).
gtaaccaacaactcaatca

SEQ ID NO: 545681 - DNA, 19 bp, Mus musculus
  siRNA target sequence for Cdh20 (NM_011800.2,1510-1528).
gcagcgacccgggaagatt

SEQ ID NO: 545682 - DNA, 19 bp, Mus musculus
  siRNA target sequence for Cdh20 (NM_011800.2,1511-1529).
cagcgacccgggaagattt

SEQ ID NO: 545683 - DNA, 19 bp, Mus musculus
  siRNA target sequence for Cdh20 (NM_011800.2,1513-1531).
gcgacccgggaagattttt

SEQ ID NO: 545684 - DNA, 19 bp, Mus musculus
  siRNA target sequence for Cdh20 (NM_011800.2,1519-1537).
cgggaagatttttctatgt

SEQ ID NO: 545685 - DNA, 19 bp, Mus musculus
  siRNA target sequence for Cdh20 (NM_011800.2,1589-1607).
gttctcctggcataatata

SEQ ID NO: 545686 - DNA, 19 bp, Mus musculus
  siRNA target sequence for Cdh20 (NM_011800.2,1592-1610).
ctcctggcataatataact

SEQ ID NO: 545687 - DNA, 19 bp, Mus musculus
  siRNA target sequence for Cdh20 (NM_011800.2,1594-1612).
cctggcataatataactgt

SEQ ID NO: 545688 - DNA, 19 bp, Mus musculus
  siRNA target sequence for Cdh20 (NM_011800.2,1696-1714).
cagagtttcccagattcta

SEQ ID NO: 545689 - DNA, 19 bp, Mus musculus
  siRNA target sequence for Cdh20 (NM_011800.2,1700-1718).
gtttcccagattctatgaa

SEQ ID NO: 545690 - DNA, 19 bp, Mus musculus
  siRNA target sequence for Cdh20 (NM_011800.2,1788-1806).
cctcacaatggccaacatt

SEQ ID NO: 545691 - DNA, 19 bp, Mus musculus
  siRNA target sequence for Cdh20 (NM_011800.2,1789-1807).
ctcacaatggccaacattt

SEQ ID NO: 545692 - DNA, 19 bp, Mus musculus
  siRNA target sequence for Cdh20 (NM_011800.2,1797-1815).
ggccaacatttctactaca

SEQ ID NO: 545693 - DNA, 19 bp, Mus musculus
  siRNA target sequence for Cdh20 (NM_011800.2,1822-1840).
ctcctgaggctgctaacaa

SEQ ID NO: 545694 - DNA, 19 bp, Mus musculus
  siRNA target sequence for Cdh20 (NM_011800.2,1856-1874).
cagggacaaccaagataat

SEQ ID NO: 545695 - DNA, 19 bp, Mus musculus
  siRNA target sequence for Cdh20 (NM_011800.2,1979-1997).
caccggcacgcttaccatt

SEQ ID NO: 545696 - DNA, 19 bp, Mus musculus
  siRNA target sequence for Cdh20 (NM_011800.2,2104-2122).
gcatctttgtcctcttagt

SEQ ID NO: 545697 - DNA, 19 bp, Mus musculus
  siRNA target sequence for Cdh20 (NM_011800.2,2157-2175).
cgcaaacaaccctacatca

SEQ ID NO: 545698 - DNA, 19 bp, Mus musculus
  siRNA target sequence for Cdh20 (NM_011800.2,2189-2207).
gaacatccacgagaacatt

SEQ ID NO: 545699 - DNA, 19 bp, Mus musculus
  siRNA target sequence for Cdh20 (NM_011800.2,2575-2593).
gaaaactggcagaactcta

SEQ ID NO: 545700 - DNA, 19 bp, Mus musculus
  siRNA target sequence for Cdh22 (NM_174988.2,751-769).
ggggacgggaccatcaagt

SEQ ID NO: 545701 - DNA, 19 bp, Mus musculus
  siRNA target sequence for Cdh22 (NM_174988.2,752-770).
gggacgggaccatcaagta

SEQ ID NO: 545702 - DNA, 19 bp, Mus musculus
  siRNA target sequence for Cdh22 (NM_174988.2,794-812).
ggaccatcttcctgattga

SEQ ID NO: 545703 - DNA, 19 bp, Mus musculus
  siRNA target sequence for Cdh22 (NM_174988.2,1193-1211).
gctacgaggtggttattca

SEQ ID NO: 545704 - DNA, 19 bp, Mus musculus
  siRNA target sequence for Cdh22 (NM_174988.2,1396-1414).
gagaacacggacatgactt

SEQ ID NO: 545705 - DNA, 19 bp, Mus musculus
  siRNA target sequence for Cdh22 (NM_174988.2,1398-1416).
gaacacggacatgacttat

SEQ ID NO: 545706 - DNA, 19 bp, Mus musculus
  siRNA target sequence for Cdh22 (NM_174988.2,1548-1566).
ggaagccctcaacaagttt

SEQ ID NO: 545707 - DNA, 19 bp, Mus musculus
  siRNA target sequence for Cdh22 (NM_174988.2,1755-1773).
cgtccggtacgccattgat

SEQ ID NO: 545708 - DNA, 19 bp, Mus musculus
  siRNA target sequence for Cdh22 (NM_174988.2,1856-1874).
ccgctggctggcacaacat

SEQ ID NO: 545709 - DNA, 19 bp, Mus musculus
  siRNA target sequence for Cdh22 (NM_174988.2,1857-1875).
cgctggctggcacaacatt

SEQ ID NO: 545710 - DNA, 19 bp, Mus musculus
  siRNA target sequence for Cdh22 (NM_174988.2,1862-1880).
gctggcacaacattactgt

SEQ ID NO: 545711 - DNA, 19 bp, Mus musculus
  siRNA target sequence for Cdh22 (NM_174988.2,2099-2117).
cacctagcaaccctcattt

SEQ ID NO: 545712 - DNA, 19 bp, Mus musculus
  siRNA target sequence for Cdh22 (NM_174988.2,2101-2119).
cctagcaaccctcatttct

SEQ ID NO: 545713 - DNA, 19 bp, Mus musculus
  siRNA target sequence for Cdh22 (NM_174988.2,2458-2476).
gacatgcgggacaatgtga

SEQ ID NO: 545714 - DNA, 19 bp, Mus musculus
  siRNA target sequence for Cdh22 (NM_174988.2,2463-2481).
gcgggacaatgtgatcaaa

SEQ ID NO: 545715 - DNA, 19 bp, Mus musculus
  siRNA target sequence for Cdh22 (NM_174988.2,2464-2482).
cgggacaatgtgatcaaat

SEQ ID NO: 545716 - DNA, 19 bp, Mus musculus
  siRNA target sequence for Cdh22 (NM_174988.2,2465-2483).
gggacaatgtgatcaaata

SEQ ID NO: 545717 - DNA, 19 bp, Mus musculus
  siRNA target sequence for Cdh22 (NM_174988.2,2467-2485).
gacaatgtgatcaaataca

SEQ ID NO: 545718 - DNA, 19 bp, Mus musculus
  siRNA target sequence for Cdh22 (NM_174988.2,2536-2554).
ctacggagcctctacgatt

SEQ ID NO: 545719 - DNA, 19 bp, Mus musculus
  siRNA target sequence for Cdh4 (NM_009867.1,112-130).
gcccaccgtgaggatctta

SEQ ID NO: 545720 - DNA, 19 bp, Mus musculus
  siRNA target sequence for Cdh4 (NM_009867.1,114-132).
ccaccgtgaggatcttaca

SEQ ID NO: 545721 - DNA, 19 bp, Mus musculus
  siRNA target sequence for Cdh4 (NM_009867.1,169-187).
ggctacactgcgttgatct

SEQ ID NO: 545722 - DNA, 19 bp, Mus musculus
  siRNA target sequence for Cdh4 (NM_009867.1,239-257).
gcgtgggcaccaaaggtat

SEQ ID NO: 545723 - DNA, 19 bp, Mus musculus
  siRNA target sequence for Cdh4 (NM_009867.1,314-332).
ccactagggagttgaagat

SEQ ID NO: 545724 - DNA, 19 bp, Mus musculus
  siRNA target sequence for Cdh4 (NM_009867.1,620-638).
ggatcaggtcggacaaaga

SEQ ID NO: 545725 - DNA, 19 bp, Mus musculus
  siRNA target sequence for Cdh4 (NM_009867.1,624-642).
caggtcggacaaagacaat

SEQ ID NO: 545726 - DNA, 19 bp, Mus musculus
  siRNA target sequence for Cdh4 (NM_009867.1,705-723).
caacatcgactctatgtct

SEQ ID NO: 545727 - DNA, 19 bp, Mus musculus
  siRNA target sequence for Cdh4 (NM_009867.1,759-777).
ggaaagagcctcttaccat

SEQ ID NO: 545728 - DNA, 19 bp, Mus musculus
  siRNA target sequence for Cdh4 (NM_009867.1,782-800).
gagcccacgcggtggatat

SEQ ID NO: 545729 - DNA, 19 bp, Mus musculus
  siRNA target sequence for Cdh4 (NM_009867.1,784-802).
gcccacgcggtggatatga

SEQ ID NO: 545730 - DNA, 19 bp, Mus musculus
  siRNA target sequence for Cdh4 (NM_009867.1,785-803).
cccacgcggtggatatgaa

SEQ ID NO: 545731 - DNA, 19 bp, Mus musculus
  siRNA target sequence for Cdh4 (NM_009867.1,823-841).
cctattgacctgtacatct

SEQ ID NO: 545732 - DNA, 19 bp, Mus musculus
  siRNA target sequence for Cdh4 (NM_009867.1,824-842).
ctattgacctgtacatcta

SEQ ID NO: 545733 - DNA, 19 bp, Mus musculus
  siRNA target sequence for Cdh4 (NM_009867.1,911-929).
gctccaagccaggtacata

SEQ ID NO: 545734 - DNA, 19 bp, Mus musculus
  siRNA target sequence for Cdh4 (NM_009867.1,912-930).
ctccaagccaggtacatat

SEQ ID NO: 545735 - DNA, 19 bp, Mus musculus
  siRNA target sequence for Cdh4 (NM_009867.1,979-997).
ggcatggtgaggtacagaa

SEQ ID NO: 545736 - DNA, 19 bp, Mus musculus
  siRNA target sequence for Cdh4 (NM_009867.1,980-998).
gcatggtgaggtacagaat

SEQ ID NO: 545737 - DNA, 19 bp, Mus musculus
  siRNA target sequence for Cdh4 (NM_009867.1,981-999).
catggtgaggtacagaatt

SEQ ID NO: 545738 - DNA, 19 bp, Mus musculus
  siRNA target sequence for Cdh4 (NM_009867.1,1019-1037).
gcccatcccagaatatgtt

SEQ ID NO: 545739 - DNA, 19 bp, Mus musculus
  siRNA target sequence for Cdh4 (NM_009867.1,1221-1239).
caccacaagcacatttgca

SEQ ID NO: 545740 - DNA, 19 bp, Mus musculus
  siRNA target sequence for Cdh4 (NM_009867.1,1257-1275).
ccgtatagagacagtagta

SEQ ID NO: 545741 - DNA, 19 bp, Mus musculus
  siRNA target sequence for Cdh4 (NM_009867.1,1326-1344).
cgccgtctaccgaatcata

SEQ ID NO: 545742 - DNA, 19 bp, Mus musculus
  siRNA target sequence for Cdh4 (NM_009867.1,1327-1345).
gccgtctaccgaatcataa

SEQ ID NO: 545743 - DNA, 19 bp, Mus musculus
  siRNA target sequence for Cdh4 (NM_009867.1,1329-1347).
cgtctaccgaatcataagt

SEQ ID NO: 545744 - DNA, 19 bp, Mus musculus
  siRNA target sequence for Cdh4 (NM_009867.1,1514-1532).
ccacagcaggggtaaccat

SEQ ID NO: 545745 - DNA, 19 bp, Mus musculus
  siRNA target sequence for Cdh4 (NM_009867.1,1669-1687).
gtgaggtactccaaactgt

SEQ ID NO: 545746 - DNA, 19 bp, Mus musculus
  siRNA target sequence for Cdh4 (NM_009867.1,1838-1856).
ctgggaccctgcagatcta

SEQ ID NO: 545747 - DNA, 19 bp, Mus musculus
  siRNA target sequence for Cdh4 (NM_009867.1,1848-1866).
gcagatctacctcattgat

SEQ ID NO: 545748 - DNA, 19 bp, Mus musculus
  siRNA target sequence for Cdh4 (NM_009867.1,1849-1867).
cagatctacctcattgata

SEQ ID NO: 545749 - DNA, 19 bp, Mus musculus
  siRNA target sequence for Cdh4 (NM_009867.1,1979-1997).
gcccctatgtctttgagtt

SEQ ID NO: 545750 - DNA, 19 bp, Mus musculus
  siRNA target sequence for Cdh4 (NM_009867.1,2010-2028).
cactacagtgaggaagaat

SEQ ID NO: 545751 - DNA, 19 bp, Mus musculus
  siRNA target sequence for Cdh4 (NM_009867.1,2031-2049).
gaccatcacccgcctaaat

SEQ ID NO: 545752 - DNA, 19 bp, Mus musculus
  siRNA target sequence for Cdh4 (NM_009867.1,2034-2052).
catcacccgcctaaatggt

SEQ ID NO: 545753 - DNA, 19 bp, Mus musculus
  siRNA target sequence for Cdh4 (NM_009867.1,2136-2154).
ccctcccttgtccaataca

SEQ ID NO: 545754 - DNA, 19 bp, Mus musculus
  siRNA target sequence for Cdh4 (NM_009867.1,2137-2155).
cctcccttgtccaatacat

SEQ ID NO: 545755 - DNA, 19 bp, Mus musculus
  siRNA target sequence for Cdh4 (NM_009867.1,2169-2187).
caaggtgtgcccatgtgat

SEQ ID NO: 545756 - DNA, 19 bp, Mus musculus
  siRNA target sequence for Cdh4 (NM_009867.1,2640-2658).
gctagtcttcgactatgaa

SEQ ID NO: 545757 - DNA, 19 bp, Mus musculus
  siRNA target sequence for Cdh4 (NM_009867.1,2702-2720).
ccagctccggggatcaaga

SEQ ID NO: 545758 - DNA, 19 bp, Mus musculus
  siRNA target sequence for Cdh4 (NM_009867.1,2703-2721).
cagctccggggatcaagat

SEQ ID NO: 545759 - DNA, 19 bp, Mus musculus
  siRNA target sequence for Cdh4 (NM_009867.1,2705-2723).
gctccggggatcaagatta

SEQ ID NO: 545760 - DNA, 19 bp, Mus musculus
  siRNA target sequence for Cdh4 (NM_009867.1,2708-2726).
ccggggatcaagattacga

SEQ ID NO: 545761 - DNA, 19 bp, Mus musculus
  siRNA target sequence for Cdh4 (NM_009867.1,2716-2734).
caagattacgactacttaa

SEQ ID NO: 545762 - DNA, 19 bp, Mus musculus
  siRNA target sequence for Cdh5 (NM_009868.3,168-186).
gcccaccatcgccaaaaga

SEQ ID NO: 545763 - DNA, 19 bp, Mus musculus
  siRNA target sequence for Cdh5 (NM_009868.3,270-288).
gtgaaccgccagaatgcta

SEQ ID NO: 545764 - DNA, 19 bp, Mus musculus
  siRNA target sequence for Cdh5 (NM_009868.3,326-344).
cggggtcgatgctaacaca

SEQ ID NO: 545765 - DNA, 19 bp, Mus musculus
  siRNA target sequence for Cdh5 (NM_009868.3,367-385).
ggctagaccgggagaaagt

SEQ ID NO: 545766 - DNA, 19 bp, Mus musculus
  siRNA target sequence for Cdh5 (NM_009868.3,369-387).
ctagaccgggagaaagtct

SEQ ID NO: 545767 - DNA, 19 bp, Mus musculus
  siRNA target sequence for Cdh5 (NM_009868.3,460-478).
ctgtcaaggtgcatgatat

SEQ ID NO: 545768 - DNA, 19 bp, Mus musculus
  siRNA target sequence for Cdh5 (NM_009868.3,462-480).
gtcaaggtgcatgatataa

SEQ ID NO: 545769 - DNA, 19 bp, Mus musculus
  siRNA target sequence for Cdh5 (NM_009868.3,464-482).
caaggtgcatgatataaat

SEQ ID NO: 545770 - DNA, 19 bp, Mus musculus
  siRNA target sequence for Cdh5 (NM_009868.3,607-625).
ccactgtcttgtaccaaat

SEQ ID NO: 545771 - DNA, 19 bp, Mus musculus
  siRNA target sequence for Cdh5 (NM_009868.3,639-657).
gagtatttcagcattgata

SEQ ID NO: 545772 - DNA, 19 bp, Mus musculus
  siRNA target sequence for Cdh5 (NM_009868.3,699-717).
gagaaacaggctgaataca

SEQ ID NO: 545773 - DNA, 19 bp, Mus musculus
  siRNA target sequence for Cdh5 (NM_009868.3,722-740).
cgtggtggaaacacaagat

SEQ ID NO: 545774 - DNA, 19 bp, Mus musculus
  siRNA target sequence for Cdh5 (NM_009868.3,806-824).
caacttccccgtctttact

SEQ ID NO: 545775 - DNA, 19 bp, Mus musculus
  siRNA target sequence for Cdh5 (NM_009868.3,809-827).
cttccccgtctttactcaa

SEQ ID NO: 545776 - DNA, 19 bp, Mus musculus
  siRNA target sequence for Cdh5 (NM_009868.3,987-1005).
cgtaacgagggtatcatca

SEQ ID NO: 545777 - DNA, 19 bp, Mus musculus
  siRNA target sequence for Cdh5 (NM_009868.3,988-1006).
gtaacgagggtatcatcaa

SEQ ID NO: 545778 - DNA, 19 bp, Mus musculus
  siRNA target sequence for Cdh5 (NM_009868.3,1012-1030).
cgaagtccctggactatga

SEQ ID NO: 545779 - DNA, 19 bp, Mus musculus
  siRNA target sequence for Cdh5 (NM_009868.3,1032-1050).
gtcatccagcagtacacat

SEQ ID NO: 545780 - DNA, 19 bp, Mus musculus
  siRNA target sequence for Cdh5 (NM_009868.3,1040-1058).
gcagtacacattctacatt

SEQ ID NO: 545781 - DNA, 19 bp, Mus musculus
  siRNA target sequence for Cdh5 (NM_009868.3,1070-1088).
ccccactatccgatacgaa

SEQ ID NO: 545782 - DNA, 19 bp, Mus musculus
  siRNA target sequence for Cdh5 (NM_009868.3,1071-1089).
cccactatccgatacgaat

SEQ ID NO: 545783 - DNA, 19 bp, Mus musculus
  siRNA target sequence for Cdh5 (NM_009868.3,1072-1090).
ccactatccgatacgaata

SEQ ID NO: 545784 - DNA, 19 bp, Mus musculus
  siRNA target sequence for Cdh5 (NM_009868.3,1075-1093).
ctatccgatacgaatacct

SEQ ID NO: 545785 - DNA, 19 bp, Mus musculus
  siRNA target sequence for Cdh5 (NM_009868.3,1099-1117).
gcacttcaggcaaaaacaa

SEQ ID NO: 545786 - DNA, 19 bp, Mus musculus
  siRNA target sequence for Cdh5 (NM_009868.3,1100-1118).
cacttcaggcaaaaacaaa

SEQ ID NO: 545787 - DNA, 19 bp, Mus musculus
  siRNA target sequence for Cdh5 (NM_009868.3,1299-1317).
caattcttccgaataacca

SEQ ID NO: 545788 - DNA, 19 bp, Mus musculus
  siRNA target sequence for Cdh5 (NM_009868.3,1315-1333).
ccaagcagggaaacatcta

SEQ ID NO: 545789 - DNA, 19 bp, Mus musculus
  siRNA target sequence for Cdh5 (NM_009868.3,1356-1374).
gaaacctacgcctggtata

SEQ ID NO: 545790 - DNA, 19 bp, Mus musculus
  siRNA target sequence for Cdh5 (NM_009868.3,1360-1378).
cctacgcctggtataacct

SEQ ID NO: 545791 - DNA, 19 bp, Mus musculus
  siRNA target sequence for Cdh5 (NM_009868.3,1433-1451).
cattgtgcaggtttacatt

SEQ ID NO: 545792 - DNA, 19 bp, Mus musculus
  siRNA target sequence for Cdh5 (NM_009868.3,1494-1512).
ccctacgaacctaaagtgt

SEQ ID NO: 545793 - DNA, 19 bp, Mus musculus
  siRNA target sequence for Cdh5 (NM_009868.3,1576-1594).
cagtaaacccaaagttcaa

SEQ ID NO: 545794 - DNA, 19 bp, Mus musculus
  siRNA target sequence for Cdh5 (NM_009868.3,1654-1672).
ccaacatcacggtcaagta

SEQ ID NO: 545795 - DNA, 19 bp, Mus musculus
  siRNA target sequence for Cdh5 (NM_009868.3,1655-1673).
caacatcacggtcaagtat

SEQ ID NO: 545796 - DNA, 19 bp, Mus musculus
  siRNA target sequence for Cdh5 (NM_009868.3,1973-1991).
gcagttggtcacttacgat

SEQ ID NO: 545797 - DNA, 19 bp, Mus musculus
  siRNA target sequence for Cdh5 (NM_009868.3,2028-2046).
gatgtgtcagtgcttaatt

SEQ ID NO: 545798 - DNA, 19 bp, Mus musculus
  siRNA target sequence for Cdh5 (NM_009868.3,2305-2323).
ccgactctgacatcgatta

SEQ ID NO: 545799 - DNA, 19 bp, Mus musculus
  siRNA target sequence for Cdh6 (NM_007666.1,5-23).
gaacttaccggtacttctt

SEQ ID NO: 545800 - DNA, 19 bp, Mus musculus
  siRNA target sequence for Cdh6 (NM_007666.1,47-65).
cctacccaactttctcaaa

SEQ ID NO: 545801 - DNA, 19 bp, Mus musculus
  siRNA target sequence for Cdh6 (NM_007666.1,139-157).
gagctgagccgttcgaaaa

SEQ ID NO: 545802 - DNA, 19 bp, Mus musculus
  siRNA target sequence for Cdh6 (NM_007666.1,200-218).
cgggatccgattatcagta

SEQ ID NO: 545803 - DNA, 19 bp, Mus musculus
  siRNA target sequence for Cdh6 (NM_007666.1,216-234).
gtacgtgggcaagttacat

SEQ ID NO: 545804 - DNA, 19 bp, Mus musculus
  siRNA target sequence for Cdh6 (NM_007666.1,219-237).
cgtgggcaagttacattca

SEQ ID NO: 545805 - DNA, 19 bp, Mus musculus
  siRNA target sequence for Cdh6 (NM_007666.1,248-266).
gaggagatggatcacttaa

SEQ ID NO: 545806 - DNA, 19 bp, Mus musculus
  siRNA target sequence for Cdh6 (NM_007666.1,292-310).
ggcgatctcttcattatca

SEQ ID NO: 545807 - DNA, 19 bp, Mus musculus
  siRNA target sequence for Cdh6 (NM_007666.1,294-312).
cgatctcttcattatcaat

SEQ ID NO: 545808 - DNA, 19 bp, Mus musculus
  siRNA target sequence for Cdh6 (NM_007666.1,513-531).
ggctgatgttggcacattt

SEQ ID NO: 545809 - DNA, 19 bp, Mus musculus
  siRNA target sequence for Cdh6 (NM_007666.1,515-533).
ctgatgttggcacatttgt

SEQ ID NO: 545810 - DNA, 19 bp, Mus musculus
  siRNA target sequence for Cdh6 (NM_007666.1,583-601).
gctaaagtcgtctatagca

SEQ ID NO: 545811 - DNA, 19 bp, Mus musculus
  siRNA target sequence for Cdh6 (NM_007666.1,606-624).
gcagggacagccctacttt

SEQ ID NO: 545812 - DNA, 19 bp, Mus musculus
  siRNA target sequence for Cdh6 (NM_007666.1,607-625).
cagggacagccctactttt

SEQ ID NO: 545813 - DNA, 19 bp, Mus musculus
  siRNA target sequence for Cdh6 (NM_007666.1,609-627).
gggacagccctacttttca

SEQ ID NO: 545814 - DNA, 19 bp, Mus musculus
  siRNA target sequence for Cdh6 (NM_007666.1,749-767).
ggactacgaccgtgaacat

SEQ ID NO: 545815 - DNA, 19 bp, Mus musculus
  siRNA target sequence for Cdh6 (NM_007666.1,808-826).
cagagtacctaccagttta

SEQ ID NO: 545816 - DNA, 19 bp, Mus musculus
  siRNA target sequence for Cdh6 (NM_007666.1,929-947).
gtgagggacacgagatgtt

SEQ ID NO: 545817 - DNA, 19 bp, Mus musculus
  siRNA target sequence for Cdh6 (NM_007666.1,933-951).
gggacacgagatgtttgat

SEQ ID NO: 545818 - DNA, 19 bp, Mus musculus
  siRNA target sequence for Cdh6 (NM_007666.1,935-953).
gacacgagatgtttgatgt

SEQ ID NO: 545819 - DNA, 19 bp, Mus musculus
  siRNA target sequence for Cdh6 (NM_007666.1,972-990).
ccaggaagggatcataact

SEQ ID NO: 545820 - DNA, 19 bp, Mus musculus
  siRNA target sequence for Cdh6 (NM_007666.1,979-997).
gggatcataactgtcaaaa

SEQ ID NO: 545821 - DNA, 19 bp, Mus musculus
  siRNA target sequence for Cdh6 (NM_007666.1,980-998).
ggatcataactgtcaaaaa

SEQ ID NO: 545822 - DNA, 19 bp, Mus musculus
  siRNA target sequence for Cdh6 (NM_007666.1,991-1009).
gtcaaaaagctcttggatt

SEQ ID NO: 545823 - DNA, 19 bp, Mus musculus
  siRNA target sequence for Cdh6 (NM_007666.1,1060-1078).
gtcgaaccccgatttctct

SEQ ID NO: 545824 - DNA, 19 bp, Mus musculus
  siRNA target sequence for Cdh6 (NM_007666.1,1180-1198).
gaggatgcccggataaata

SEQ ID NO: 545825 - DNA, 19 bp, Mus musculus
  siRNA target sequence for Cdh6 (NM_007666.1,1183-1201).
gatgcccggataaatacga

SEQ ID NO: 545826 - DNA, 19 bp, Mus musculus
  siRNA target sequence for Cdh6 (NM_007666.1,1238-1256).
ccaggaatcctgtcaagta

SEQ ID NO: 545827 - DNA, 19 bp, Mus musculus
  siRNA target sequence for Cdh6 (NM_007666.1,1242-1260).
gaatcctgtcaagtattct

SEQ ID NO: 545828 - DNA, 19 bp, Mus musculus
  siRNA target sequence for Cdh6 (NM_007666.1,1281-1299).
ggacaggatattcaacatt

SEQ ID NO: 545829 - DNA, 19 bp, Mus musculus
  siRNA target sequence for Cdh6 (NM_007666.1,1284-1302).
caggatattcaacattgat

SEQ ID NO: 545830 - DNA, 19 bp, Mus musculus
  siRNA target sequence for Cdh6 (NM_007666.1,1351-1369).
ctgctgtggcacaacatca

SEQ ID NO: 545831 - DNA, 19 bp, Mus musculus
  siRNA target sequence for Cdh6 (NM_007666.1,1372-1390).
gtgatcgcaacggagatta

SEQ ID NO: 545832 - DNA, 19 bp, Mus musculus
  siRNA target sequence for Cdh6 (NM_007666.1,1406-1424).
gcagccgcgttcctctata

SEQ ID NO: 545833 - DNA, 19 bp, Mus musculus
  siRNA target sequence for Cdh6 (NM_007666.1,1407-1425).
cagccgcgttcctctatat

SEQ ID NO: 545834 - DNA, 19 bp, Mus musculus
  siRNA target sequence for Cdh6 (NM_007666.1,1409-1427).
gccgcgttcctctatatat

SEQ ID NO: 545835 - DNA, 19 bp, Mus musculus
  siRNA target sequence for Cdh6 (NM_007666.1,1410-1428).
ccgcgttcctctatatatt

SEQ ID NO: 545836 - DNA, 19 bp, Mus musculus
  siRNA target sequence for Cdh6 (NM_007666.1,1411-1429).
cgcgttcctctatatatta

SEQ ID NO: 545837 - DNA, 19 bp, Mus musculus
  siRNA target sequence for Cdh6 (NM_007666.1,1412-1430).
gcgttcctctatatattaa

SEQ ID NO: 545838 - DNA, 19 bp, Mus musculus
  siRNA target sequence for Cdh6 (NM_007666.1,1466-1484).
ctgagttctatgaaacttt

SEQ ID NO: 545839 - DNA, 19 bp, Mus musculus
  siRNA target sequence for Cdh6 (NM_007666.1,1504-1522).
gcagatcagctgattcaga

SEQ ID NO: 545840 - DNA, 19 bp, Mus musculus
  siRNA target sequence for Cdh6 (NM_007666.1,1550-1568).
cttacagcggacaccaatt

SEQ ID NO: 545841 - DNA, 19 bp, Mus musculus
  siRNA target sequence for Cdh6 (NM_007666.1,1556-1574).
gcggacaccaattttcctt

SEQ ID NO: 545842 - DNA, 19 bp, Mus musculus
  siRNA target sequence for Cdh6 (NM_007666.1,1596-1614).
cagcagctcaaactttact

SEQ ID NO: 545843 - DNA, 19 bp, Mus musculus
  siRNA target sequence for Cdh6 (NM_007666.1,1598-1616).
gcagctcaaactttactat

SEQ ID NO: 545844 - DNA, 19 bp, Mus musculus
  siRNA target sequence for Cdh6 (NM_007666.1,1599-1617).
cagctcaaactttactata

SEQ ID NO: 545845 - DNA, 19 bp, Mus musculus
  siRNA target sequence for Cdh6 (NM_007666.1,1643-1661).
ggatcctaactcggaaaaa

SEQ ID NO: 545846 - DNA, 19 bp, Mus musculus
  siRNA target sequence for Cdh6 (NM_007666.1,1652-1670).
ctcggaaaaatggctataa

SEQ ID NO: 545847 - DNA, 19 bp, Mus musculus
  siRNA target sequence for Cdh6 (NM_007666.1,1654-1672).
cggaaaaatggctataaca

SEQ ID NO: 545848 - DNA, 19 bp, Mus musculus
  siRNA target sequence for Cdh6 (NM_007666.1,1923-1941).
gaaagagcctttgatcatt

SEQ ID NO: 545849 - DNA, 19 bp, Mus musculus
  siRNA target sequence for Cdh6 (NM_007666.1,2348-2366).
ggatggacagtgacaaaga

SEQ ID NO: 545850 - DNA, 19 bp, Mus musculus
  siRNA target sequence for Cdh7 (NM_172853.1,367-385).
ggagttgtgccattttcta

SEQ ID NO: 545851 - DNA, 19 bp, Mus musculus
  siRNA target sequence for Cdh7 (NM_172853.1,444-462).
ccagatccaagccatactt

SEQ ID NO: 545852 - DNA, 19 bp, Mus musculus
  siRNA target sequence for Cdh7 (NM_172853.1,534-552).
gttcagatcccctctatgt

SEQ ID NO: 545853 - DNA, 19 bp, Mus musculus
  siRNA target sequence for Cdh7 (NM_172853.1,556-574).
gaagctccactctgatgtt

SEQ ID NO: 545854 - DNA, 19 bp, Mus musculus
  siRNA target sequence for Cdh7 (NM_172853.1,581-599).
ggagacggttccatcaagt

SEQ ID NO: 545855 - DNA, 19 bp, Mus musculus
  siRNA target sequence for Cdh7 (NM_172853.1,582-600).
gagacggttccatcaagta

SEQ ID NO: 545856 - DNA, 19 bp, Mus musculus
  siRNA target sequence for Cdh7 (NM_172853.1,587-605).
ggttccatcaagtacatct

SEQ ID NO: 545857 - DNA, 19 bp, Mus musculus
  siRNA target sequence for Cdh7 (NM_172853.1,588-606).
gttccatcaagtacatctt

SEQ ID NO: 545858 - DNA, 19 bp, Mus musculus
  siRNA target sequence for Cdh7 (NM_172853.1,612-630).
gcgaaggggcaagttcaat

SEQ ID NO: 545859 - DNA, 19 bp, Mus musculus
  siRNA target sequence for Cdh7 (NM_172853.1,613-631).
cgaaggggcaagttcaatt

SEQ ID NO: 545860 - DNA, 19 bp, Mus musculus
  siRNA target sequence for Cdh7 (NM_172853.1,614-632).
gaaggggcaagttcaattt

SEQ ID NO: 545861 - DNA, 19 bp, Mus musculus
  siRNA target sequence for Cdh7 (NM_172853.1,618-636).
gggcaagttcaattttcat

SEQ ID NO: 545862 - DNA, 19 bp, Mus musculus
  siRNA target sequence for Cdh7 (NM_172853.1,620-638).
gcaagttcaattttcatta

SEQ ID NO: 545863 - DNA, 19 bp, Mus musculus
  siRNA target sequence for Cdh7 (NM_172853.1,627-645).
caattttcattattgatga

SEQ ID NO: 545864 - DNA, 19 bp, Mus musculus
  siRNA target sequence for Cdh7 (NM_172853.1,646-664).
gaacactggtgatatccat

SEQ ID NO: 545865 - DNA, 19 bp, Mus musculus
  siRNA target sequence for Cdh7 (NM_172853.1,684-702).
gggaggagcaggcctatta

SEQ ID NO: 545866 - DNA, 19 bp, Mus musculus
  siRNA target sequence for Cdh7 (NM_172853.1,685-703).
ggaggagcaggcctattat

SEQ ID NO: 545867 - DNA, 19 bp, Mus musculus
  siRNA target sequence for Cdh7 (NM_172853.1,752-770).
cctgaatcagagtttgtta

SEQ ID NO: 545868 - DNA, 19 bp, Mus musculus
  siRNA target sequence for Cdh7 (NM_172853.1,914-932).
gctcgagtggtgtatagta

SEQ ID NO: 545869 - DNA, 19 bp, Mus musculus
  siRNA target sequence for Cdh7 (NM_172853.1,915-933).
ctcgagtggtgtatagtat

SEQ ID NO: 545870 - DNA, 19 bp, Mus musculus
  siRNA target sequence for Cdh7 (NM_172853.1,918-936).
gagtggtgtatagtattct

SEQ ID NO: 545871 - DNA, 19 bp, Mus musculus
  siRNA target sequence for Cdh7 (NM_172853.1,1010-1028).
gaggctaaagaccagtatt

SEQ ID NO: 545872 - DNA, 19 bp, Mus musculus
  siRNA target sequence for Cdh7 (NM_172853.1,1014-1032).
ctaaagaccagtatttgct

SEQ ID NO: 545873 - DNA, 19 bp, Mus musculus
  siRNA target sequence for Cdh7 (NM_172853.1,1034-1052).
gtcattcaggcaaaggata

SEQ ID NO: 545874 - DNA, 19 bp, Mus musculus
  siRNA target sequence for Cdh7 (NM_172853.1,1048-1066).
ggatatggttggtcaaaat

SEQ ID NO: 545875 - DNA, 19 bp, Mus musculus
  siRNA target sequence for Cdh7 (NM_172853.1,1130-1148).
cgatttccacgaagatctt

SEQ ID NO: 545876 - DNA, 19 bp, Mus musculus
  siRNA target sequence for Cdh7 (NM_172853.1,1139-1157).
cgaagatcttatcagtata

SEQ ID NO: 545877 - DNA, 19 bp, Mus musculus
  siRNA target sequence for Cdh7 (NM_172853.1,1153-1171).
gtataatgttccagaatct

SEQ ID NO: 545878 - DNA, 19 bp, Mus musculus
  siRNA target sequence for Cdh7 (NM_172853.1,1226-1244).
gtcaatgcagaaatggaat

SEQ ID NO: 545879 - DNA, 19 bp, Mus musculus
  siRNA target sequence for Cdh7 (NM_172853.1,1260-1278).
gtgatggactgggcatttt

SEQ ID NO: 545880 - DNA, 19 bp, Mus musculus
  siRNA target sequence for Cdh7 (NM_172853.1,1262-1280).
gatggactgggcattttca

SEQ ID NO: 545881 - DNA, 19 bp, Mus musculus
  siRNA target sequence for Cdh7 (NM_172853.1,1266-1284).
gactgggcattttcaagat

SEQ ID NO: 545882 - DNA, 19 bp, Mus musculus
  siRNA target sequence for Cdh7 (NM_172853.1,1268-1286).
ctgggcattttcaagatat

SEQ ID NO: 545883 - DNA, 19 bp, Mus musculus
  siRNA target sequence for Cdh7 (NM_172853.1,1310-1328).
ggaatcattacaatacaaa

SEQ ID NO: 545884 - DNA, 19 bp, Mus musculus
  siRNA target sequence for Cdh7 (NM_172853.1,1337-1355).
gattttgaagccaaaacga

SEQ ID NO: 545885 - DNA, 19 bp, Mus musculus
  siRNA target sequence for Cdh7 (NM_172853.1,1343-1361).
gaagccaaaacgagttata

SEQ ID NO: 545886 - DNA, 19 bp, Mus musculus
  siRNA target sequence for Cdh7 (NM_172853.1,1347-1365).
ccaaaacgagttatacact

SEQ ID NO: 545887 - DNA, 19 bp, Mus musculus
  siRNA target sequence for Cdh7 (NM_172853.1,1366-1384).
gcgcatagaagctgcaaat

SEQ ID NO: 545888 - DNA, 19 bp, Mus musculus
  siRNA target sequence for Cdh7 (NM_172853.1,1427-1445).
gacacaacaacggttaaga

SEQ ID NO: 545889 - DNA, 19 bp, Mus musculus
  siRNA target sequence for Cdh7 (NM_172853.1,1429-1447).
cacaacaacggttaagata

SEQ ID NO: 545890 - DNA, 19 bp, Mus musculus
  siRNA target sequence for Cdh7 (NM_172853.1,1431-1449).
caacaacggttaagataat

SEQ ID NO: 545891 - DNA, 19 bp, Mus musculus
  siRNA target sequence for Cdh7 (NM_172853.1,1434-1452).
caacggttaagataattgt

SEQ ID NO: 545892 - DNA, 19 bp, Mus musculus
  siRNA target sequence for Cdh7 (NM_172853.1,1573-1591).
cagccctgtgagatattca

SEQ ID NO: 545893 - DNA, 19 bp, Mus musculus
  siRNA target sequence for Cdh7 (NM_172853.1,1576-1594).
ccctgtgagatattcaatt

SEQ ID NO: 545894 - DNA, 19 bp, Mus musculus
  siRNA target sequence for Cdh7 (NM_172853.1,1578-1596).
ctgtgagatattcaattga

SEQ ID NO: 545895 - DNA, 19 bp, Mus musculus
  siRNA target sequence for Cdh7 (NM_172853.1,1580-1598).
gtgagatattcaattgaca

SEQ ID NO: 545896 - DNA, 19 bp, Mus musculus
  siRNA target sequence for Cdh7 (NM_172853.1,1636-1654).
caacagtggagttattact

SEQ ID NO: 545897 - DNA, 19 bp, Mus musculus
  siRNA target sequence for Cdh7 (NM_172853.1,1639-1657).
cagtggagttattactact

SEQ ID NO: 545898 - DNA, 19 bp, Mus musculus
  siRNA target sequence for Cdh7 (NM_172853.1,1686-1704).
cggttcataacattacagt

SEQ ID NO: 545899 - DNA, 19 bp, Mus musculus
  siRNA target sequence for Cdh7 (NM_172853.1,1746-1764).
gctacgtggccattactat

SEQ ID NO: 545900 - DNA, 19 bp, Mus musculus
  siRNA target sequence for Cdh7 (NM_172853.1,1747-1765).
ctacgtggccattactata

SEQ ID NO: 545901 - DNA, 19 bp, Mus musculus
  siRNA target sequence for Cdh7 (NM_172853.1,1756-1774).
cattactatactggatatt

SEQ ID NO: 545902 - DNA, 19 bp, Mus musculus
  siRNA target sequence for Cdh7 (NM_172853.1,1761-1779).
ctatactggatattaacga

SEQ ID NO: 545903 - DNA, 19 bp, Mus musculus
  siRNA target sequence for Cdh7 (NM_172853.1,1792-1810).
gttcgccatggactatgaa

SEQ ID NO: 545904 - DNA, 19 bp, Mus musculus
  siRNA target sequence for Cdh7 (NM_172853.1,1841-1859).
caggttatccagaaaatca

SEQ ID NO: 545905 - DNA, 19 bp, Mus musculus
  siRNA target sequence for Cdh7 (NM_172853.1,1884-1902).
ccaatggacaccagtttta

SEQ ID NO: 545906 - DNA, 19 bp, Mus musculus
  siRNA target sequence for Cdh7 (NM_172853.1,1924-1942).
gacaaataaccacaacttt

SEQ ID NO: 545907 - DNA, 19 bp, Mus musculus
  siRNA target sequence for Cdh7 (NM_172853.1,1974-1992).
caatactcacgagaagaaa

SEQ ID NO: 545908 - DNA, 19 bp, Mus musculus
  siRNA target sequence for Cdh7 (NM_172853.1,2047-2065).
cagtggatctccttcacta

SEQ ID NO: 545909 - DNA, 19 bp, Mus musculus
  siRNA target sequence for Cdh7 (NM_172853.1,2070-2088).
gtaccaacacacttaccat

SEQ ID NO: 545910 - DNA, 19 bp, Mus musculus
  siRNA target sequence for Cdh7 (NM_172853.1,2172-2190).
gggccttgatagcaatact

SEQ ID NO: 545911 - DNA, 19 bp, Mus musculus
  siRNA target sequence for Cdh7 (NM_172853.1,2222-2240).
ctcctcattgtcactatga

SEQ ID NO: 545912 - DNA, 19 bp, Mus musculus
  siRNA target sequence for Cdh7 (NM_172853.1,2224-2242).
cctcattgtcactatgaga

SEQ ID NO: 545913 - DNA, 19 bp, Mus musculus
  siRNA target sequence for Cdh7 (NM_172853.1,2225-2243).
ctcattgtcactatgagaa

SEQ ID NO: 545914 - DNA, 19 bp, Mus musculus
  siRNA target sequence for Cdh7 (NM_172853.1,2405-2423).
gtgactcctgaaattcagt

SEQ ID NO: 545915 - DNA, 19 bp, Mus musculus
  siRNA target sequence for Cdh7 (NM_172853.1,2409-2427).
ctcctgaaattcagttctt

SEQ ID NO: 545916 - DNA, 19 bp, Mus musculus
  siRNA target sequence for Cdh7 (NM_172853.1,2411-2429).
cctgaaattcagttcttga

SEQ ID NO: 545917 - DNA, 19 bp, Mus musculus
  siRNA target sequence for Cdh7 (NM_172853.1,2425-2443).
cttgagtcgaccgactttt

SEQ ID NO: 545918 - DNA, 19 bp, Mus musculus
  siRNA target sequence for Cdh7 (NM_172853.1,2428-2446).
gagtcgaccgacttttaaa

SEQ ID NO: 545919 - DNA, 19 bp, Mus musculus
  siRNA target sequence for Cdh7 (NM_172853.1,2430-2448).
gtcgaccgacttttaaaaa

SEQ ID NO: 545920 - DNA, 19 bp, Mus musculus
  siRNA target sequence for Cdh7 (NM_172853.1,2449-2467).
catcccagataatgtcatt

SEQ ID NO: 545921 - DNA, 19 bp, Mus musculus
  siRNA target sequence for Cdh7 (NM_172853.1,2516-2534).
ggggctccaccatatgact

SEQ ID NO: 545922 - DNA, 19 bp, Mus musculus
  siRNA target sequence for Cdh7 (NM_172853.1,2544-2562).
cttatgcatttgaaggaaa

SEQ ID NO: 545923 - DNA, 19 bp, Mus musculus
  siRNA target sequence for Cdh7 (NM_172853.1,2604-2622).
gctcaaactctgatcagaa

SEQ ID NO: 545924 - DNA, 19 bp, Mus musculus
  siRNA target sequence for Cdh7 (NM_172853.1,2605-2623).
ctcaaactctgatcagaat

SEQ ID NO: 545925 - DNA, 19 bp, Mus musculus
  siRNA target sequence for Cdh7 (NM_172853.1,2607-2625).
caaactctgatcagaatta

SEQ ID NO: 545926 - DNA, 19 bp, Mus musculus
  siRNA target sequence for Cdh7 (NM_172853.1,2644-2662).
gggtccccgttttaaacga

SEQ ID NO: 545927 - DNA, 19 bp, Mus musculus
  siRNA target sequence for Cdh7 (NM_172853.1,2663-2681).
ctagctgaaatgtatggaa

SEQ ID NO: 545928 - DNA, 19 bp, Mus musculus
  siRNA target sequence for Cdh7 (NM_172853.1,2687-2705).
caagagagtttgtactcat

SEQ ID NO: 545929 - DNA, 19 bp, Mus musculus
  siRNA target sequence for Cdh8 (NM_007667.1,261-279).
gacctctggactccattaa

SEQ ID NO: 545930 - DNA, 19 bp, Mus musculus
  siRNA target sequence for Cdh8 (NM_007667.1,264-282).
ctctggactccattaataa

SEQ ID NO: 545931 - DNA, 19 bp, Mus musculus
  siRNA target sequence for Cdh8 (NM_007667.1,269-287).
gactccattaataatatta

SEQ ID NO: 545932 - DNA, 19 bp, Mus musculus
  siRNA target sequence for Cdh8 (NM_007667.1,290-308).
gattaccctcccttcttgt

SEQ ID NO: 545933 - DNA, 19 bp, Mus musculus
  siRNA target sequence for Cdh8 (NM_007667.1,326-344).
gaatcaggctcacgtttta

SEQ ID NO: 545934 - DNA, 19 bp, Mus musculus
  siRNA target sequence for Cdh8 (NM_007667.1,330-348).
caggctcacgttttaacta

SEQ ID NO: 545935 - DNA, 19 bp, Mus musculus
  siRNA target sequence for Cdh8 (NM_007667.1,379-397).
gtgaagacatgcggatttt

SEQ ID NO: 545936 - DNA, 19 bp, Mus musculus
  siRNA target sequence for Cdh8 (NM_007667.1,471-489).
ctcgttggccggttacaca

SEQ ID NO: 545937 - DNA, 19 bp, Mus musculus
  siRNA target sequence for Cdh8 (NM_007667.1,537-555).
gatggagctggcacaatct

SEQ ID NO: 545938 - DNA, 19 bp, Mus musculus
  siRNA target sequence for Cdh8 (NM_007667.1,541-559).
gagctggcacaatctttca

SEQ ID NO: 545939 - DNA, 19 bp, Mus musculus
  siRNA target sequence for Cdh8 (NM_007667.1,543-561).
gctggcacaatctttcaaa

SEQ ID NO: 545940 - DNA, 19 bp, Mus musculus
  siRNA target sequence for Cdh8 (NM_007667.1,544-562).
ctggcacaatctttcaaat

SEQ ID NO: 545941 - DNA, 19 bp, Mus musculus
  siRNA target sequence for Cdh8 (NM_007667.1,546-564).
ggcacaatctttcaaataa

SEQ ID NO: 545942 - DNA, 19 bp, Mus musculus
  siRNA target sequence for Cdh8 (NM_007667.1,584-602).
ccatgctatcaaaagactt

SEQ ID NO: 545943 - DNA, 19 bp, Mus musculus
  siRNA target sequence for Cdh8 (NM_007667.1,598-616).
gacttgaccgagaggaaaa

SEQ ID NO: 545944 - DNA, 19 bp, Mus musculus
  siRNA target sequence for Cdh8 (NM_007667.1,609-627).
gaggaaaaggctgaatata

SEQ ID NO: 545945 - DNA, 19 bp, Mus musculus
  siRNA target sequence for Cdh8 (NM_007667.1,612-630).
gaaaaggctgaatatacgt

SEQ ID NO: 545946 - DNA, 19 bp, Mus musculus
  siRNA target sequence for Cdh8 (NM_007667.1,672-690).
gagcctccttctgaattta

SEQ ID NO: 545947 - DNA, 19 bp, Mus musculus
  siRNA target sequence for Cdh8 (NM_007667.1,675-693).
cctccttctgaatttatta

SEQ ID NO: 545948 - DNA, 19 bp, Mus musculus
  siRNA target sequence for Cdh8 (NM_007667.1,728-746).
gttcctcaatggaccttat

SEQ ID NO: 545949 - DNA, 19 bp, Mus musculus
  siRNA target sequence for Cdh8 (NM_007667.1,731-749).
cctcaatggaccttatcat

SEQ ID NO: 545950 - DNA, 19 bp, Mus musculus
  siRNA target sequence for Cdh8 (NM_007667.1,776-794).
gggtacatctgtcactaat

SEQ ID NO: 545951 - DNA, 19 bp, Mus musculus
  siRNA target sequence for Cdh8 (NM_007667.1,837-855).
gcaaagttggtttacagta

SEQ ID NO: 545952 - DNA, 19 bp, Mus musculus
  siRNA target sequence for Cdh8 (NM_007667.1,864-882).
ggacagccgtatttttcca

SEQ ID NO: 545953 - DNA, 19 bp, Mus musculus
  siRNA target sequence for Cdh8 (NM_007667.1,865-883).
gacagccgtatttttccat

SEQ ID NO: 545954 - DNA, 19 bp, Mus musculus
  siRNA target sequence for Cdh8 (NM_007667.1,887-905).
gcctgaaacagccattata

SEQ ID NO: 545955 - DNA, 19 bp, Mus musculus
  siRNA target sequence for Cdh8 (NM_007667.1,888-906).
cctgaaacagccattataa

SEQ ID NO: 545956 - DNA, 19 bp, Mus musculus
  siRNA target sequence for Cdh8 (NM_007667.1,891-909).
gaaacagccattataaaaa

SEQ ID NO: 545957 - DNA, 19 bp, Mus musculus
  siRNA target sequence for Cdh8 (NM_007667.1,944-962).
ggaatacctggtcgtaata

SEQ ID NO: 545958 - DNA, 19 bp, Mus musculus
  siRNA target sequence for Cdh8 (NM_007667.1,1043-1061).
caatcctccaaaatttgct

SEQ ID NO: 545959 - DNA, 19 bp, Mus musculus
  siRNA target sequence for Cdh8 (NM_007667.1,1120-1138).
gggttaaggctaatgatca

SEQ ID NO: 545960 - DNA, 19 bp, Mus musculus
  siRNA target sequence for Cdh8 (NM_007667.1,1127-1145).
ggctaatgatcaggatatt

SEQ ID NO: 545961 - DNA, 19 bp, Mus musculus
  siRNA target sequence for Cdh8 (NM_007667.1,1146-1164).
ggtgaaaatgcacaatcat

SEQ ID NO: 545962 - DNA, 19 bp, Mus musculus
  siRNA target sequence for Cdh8 (NM_007667.1,1155-1173).
gcacaatcatcctatgaca

SEQ ID NO: 545963 - DNA, 19 bp, Mus musculus
  siRNA target sequence for Cdh8 (NM_007667.1,1156-1174).
cacaatcatcctatgacat

SEQ ID NO: 545964 - DNA, 19 bp, Mus musculus
  siRNA target sequence for Cdh8 (NM_007667.1,1194-1212).
gcactattcgaaatcactt

SEQ ID NO: 545965 - DNA, 19 bp, Mus musculus
  siRNA target sequence for Cdh8 (NM_007667.1,1223-1241).
ggcccaggatggtgttata

SEQ ID NO: 545966 - DNA, 19 bp, Mus musculus
  siRNA target sequence for Cdh8 (NM_007667.1,1224-1242).
gcccaggatggtgttataa

SEQ ID NO: 545967 - DNA, 19 bp, Mus musculus
  siRNA target sequence for Cdh8 (NM_007667.1,1266-1284).
gagaccaaaaaatcctata

SEQ ID NO: 545968 - DNA, 19 bp, Mus musculus
  siRNA target sequence for Cdh8 (NM_007667.1,1268-1286).
gaccaaaaaatcctatact

SEQ ID NO: 545969 - DNA, 19 bp, Mus musculus
  siRNA target sequence for Cdh8 (NM_007667.1,1313-1331).
catcgacccacgtttcagt

SEQ ID NO: 545970 - DNA, 19 bp, Mus musculus
  siRNA target sequence for Cdh8 (NM_007667.1,1330-1348).
gtagcaggggaccctttaa

SEQ ID NO: 545971 - DNA, 19 bp, Mus musculus
  siRNA target sequence for Cdh8 (NM_007667.1,1334-1352).
caggggaccctttaaggat

SEQ ID NO: 545972 - DNA, 19 bp, Mus musculus
  siRNA target sequence for Cdh8 (NM_007667.1,1349-1367).
ggatacagcaacagtcaaa

SEQ ID NO: 545973 - DNA, 19 bp, Mus musculus
  siRNA target sequence for Cdh8 (NM_007667.1,1350-1368).
gatacagcaacagtcaaaa

SEQ ID NO: 545974 - DNA, 19 bp, Mus musculus
  siRNA target sequence for Cdh8 (NM_007667.1,1473-1491).
gctcgtgaccctgatatca

SEQ ID NO: 545975 - DNA, 19 bp, Mus musculus
  siRNA target sequence for Cdh8 (NM_007667.1,1476-1494).
cgtgaccctgatatcactt

SEQ ID NO: 545976 - DNA, 19 bp, Mus musculus
  siRNA target sequence for Cdh8 (NM_007667.1,1498-1516).
gtccaataaggttttccat

SEQ ID NO: 545977 - DNA, 19 bp, Mus musculus
  siRNA target sequence for Cdh8 (NM_007667.1,1593-1611).
gacagagaactaagtgttt

SEQ ID NO: 545978 - DNA, 19 bp, Mus musculus
  siRNA target sequence for Cdh8 (NM_007667.1,1646-1664).
gaaccacagtcagatatct

SEQ ID NO: 545979 - DNA, 19 bp, Mus musculus
  siRNA target sequence for Cdh8 (NM_007667.1,1724-1742).
cgaatatgaggcattttta

SEQ ID NO: 545980 - DNA, 19 bp, Mus musculus
  siRNA target sequence for Cdh8 (NM_007667.1,1725-1743).
gaatatgaggcatttttat

SEQ ID NO: 545981 - DNA, 19 bp, Mus musculus
  siRNA target sequence for Cdh8 (NM_007667.1,1762-1780).
gccaagtaattcaaacagt

SEQ ID NO: 545982 - DNA, 19 bp, Mus musculus
  siRNA target sequence for Cdh8 (NM_007667.1,1763-1781).
ccaagtaattcaaacagta

SEQ ID NO: 545983 - DNA, 19 bp, Mus musculus
  siRNA target sequence for Cdh8 (NM_007667.1,1848-1866).
gtcaacaacccaaatttca

SEQ ID NO: 545984 - DNA, 19 bp, Mus musculus
  siRNA target sequence for Cdh8 (NM_007667.1,1897-1915).
gcattctggcaaaacataa

SEQ ID NO: 545985 - DNA, 19 bp, Mus musculus
  siRNA target sequence for Cdh8 (NM_007667.1,2042-2060).
ggtccagtcgtgcaatgtt

SEQ ID NO: 545986 - DNA, 19 bp, Mus musculus
  siRNA target sequence for Cdh8 (NM_007667.1,2045-2063).
ccagtcgtgcaatgttgaa

SEQ ID NO: 545987 - DNA, 19 bp, Mus musculus
  siRNA target sequence for Cdh8 (NM_007667.1,2050-2068).
cgtgcaatgttgaagctta

SEQ ID NO: 545988 - DNA, 19 bp, Mus musculus
  siRNA target sequence for Cdh8 (NM_007667.1,2051-2069).
gtgcaatgttgaagcttat

SEQ ID NO: 545989 - DNA, 19 bp, Mus musculus
  siRNA target sequence for Cdh8 (NM_007667.1,2096-2114).
cgccttaattgctatatta

SEQ ID NO: 545990 - DNA, 19 bp, Mus musculus
  siRNA target sequence for Cdh8 (NM_007667.1,2099-2117).
cttaattgctatattagca

SEQ ID NO: 545991 - DNA, 19 bp, Mus musculus
  siRNA target sequence for Cdh8 (NM_007667.1,2159-2177).
cctgaggaggcacaaaaat

SEQ ID NO: 545992 - DNA, 19 bp, Mus musculus
  siRNA target sequence for Cdh8 (NM_007667.1,2205-2223).
gacgttcgagaaaacatca

SEQ ID NO: 545993 - DNA, 19 bp, Mus musculus
  siRNA target sequence for Cdh8 (NM_007667.1,2271-2289).
gacattgcaactttgcaaa

SEQ ID NO: 545994 - DNA, 19 bp, Mus musculus
  siRNA target sequence for Cdh8 (NM_007667.1,2292-2310).
ccagatggaattaatggat

SEQ ID NO: 545995 - DNA, 19 bp, Mus musculus
  siRNA target sequence for Cdh8 (NM_007667.1,2293-2311).
cagatggaattaatggatt

SEQ ID NO: 545996 - DNA, 19 bp, Mus musculus
  siRNA target sequence for Cdh8 (NM_007667.1,2318-2336).
ccgtaaggatattaaacca

SEQ ID NO: 545997 - DNA, 19 bp, Mus musculus
  siRNA target sequence for Cdh8 (NM_007667.1,2363-2381).
gcttgctccagttccaaat

SEQ ID NO: 545998 - DNA, 19 bp, Mus musculus
  siRNA target sequence for Cdh8 (NM_007667.1,2382-2400).
ggtgttgatgtcgatgaat

SEQ ID NO: 545999 - DNA, 19 bp, Mus musculus
  siRNA target sequence for Cdh8 (NM_007667.1,2383-2401).
gtgttgatgtcgatgaatt

SEQ ID NO: 546000 - DNA, 19 bp, Mus musculus
  siRNA target sequence for Cdh8 (NM_007667.1,2385-2403).
gttgatgtcgatgaattta

SEQ ID NO: 546001 - DNA, 19 bp, Mus musculus
  siRNA target sequence for Cdh8 (NM_007667.1,2388-2406).
gatgtcgatgaatttataa

SEQ ID NO: 546002 - DNA, 19 bp, Mus musculus
  siRNA target sequence for Cdh8 (NM_007667.1,2413-2431).
ggctgcatgaggcagataa

SEQ ID NO: 546003 - DNA, 19 bp, Mus musculus
  siRNA target sequence for Cdh8 (NM_007667.1,2414-2432).
gctgcatgaggcagataat

SEQ ID NO: 546004 - DNA, 19 bp, Mus musculus
  siRNA target sequence for Cdh8 (NM_007667.1,2448-2466).
ccatatgactccatacaga

SEQ ID NO: 546005 - DNA, 19 bp, Mus musculus
  siRNA target sequence for Cdh8 (NM_007667.1,2449-2467).
catatgactccatacagat

SEQ ID NO: 546006 - DNA, 19 bp, Mus musculus
  siRNA target sequence for Cdh8 (NM_007667.1,2530-2548).
cagactcagaccagaattt

SEQ ID NO: 546007 - DNA, 19 bp, Mus musculus
  siRNA target sequence for Cdh8 (NM_007667.1,2567-2585).
gggtccccgctttaagaga

SEQ ID NO: 546008 - DNA, 19 bp, Mus musculus
  siRNA target sequence for Celsr1 (NM_009886.1,695-713).
gtgtcgccatcgttgctta

SEQ ID NO: 546009 - DNA, 19 bp, Mus musculus
  siRNA target sequence for Celsr1 (NM_009886.1,699-717).
cgccatcgttgcttaacct

SEQ ID NO: 546010 - DNA, 19 bp, Mus musculus
  siRNA target sequence for Celsr1 (NM_009886.1,805-823).
ggtgtcagtgcctgagaat

SEQ ID NO: 546011 - DNA, 19 bp, Mus musculus
  siRNA target sequence for Celsr1 (NM_009886.1,913-931).
gttcgatgagcgctctaat

SEQ ID NO: 546012 - DNA, 19 bp, Mus musculus
  siRNA target sequence for Celsr1 (NM_009886.1,1000-1018).
ggacactcatgtactcaaa

SEQ ID NO: 546013 - DNA, 19 bp, Mus musculus
  siRNA target sequence for Celsr1 (NM_009886.1,1003-1021).
cactcatgtactcaaagtt

SEQ ID NO: 546014 - DNA, 19 bp, Mus musculus
  siRNA target sequence for Celsr1 (NM_009886.1,1123-1141).
gtatcgagagcgaattcga

SEQ ID NO: 546015 - DNA, 19 bp, Mus musculus
  siRNA target sequence for Celsr1 (NM_009886.1,1128-1146).
gagagcgaattcgagaaaa

SEQ ID NO: 546016 - DNA, 19 bp, Mus musculus
  siRNA target sequence for Celsr1 (NM_009886.1,1377-1395).
cagccaccgtccacatagt

SEQ ID NO: 546017 - DNA, 19 bp, Mus musculus
  siRNA target sequence for Celsr1 (NM_009886.1,1590-1608).
gtgggagcctggatgttat

SEQ ID NO: 546018 - DNA, 19 bp, Mus musculus
  siRNA target sequence for Celsr1 (NM_009886.1,1705-1723).
ctcggtgcaggtgttagat

SEQ ID NO: 546019 - DNA, 19 bp, Mus musculus
  siRNA target sequence for Celsr1 (NM_009886.1,1707-1725).
cggtgcaggtgttagatgt

SEQ ID NO: 546020 - DNA, 19 bp, Mus musculus
  siRNA target sequence for Celsr1 (NM_009886.1,1729-1747).
cgacaatgcgcccatcttt

SEQ ID NO: 546021 - DNA, 19 bp, Mus musculus
  siRNA target sequence for Celsr1 (NM_009886.1,1765-1783).
ggctgccgtgctagagaat

SEQ ID NO: 546022 - DNA, 19 bp, Mus musculus
  siRNA target sequence for Celsr1 (NM_009886.1,1767-1785).
ctgccgtgctagagaatgt

SEQ ID NO: 546023 - DNA, 19 bp, Mus musculus
  siRNA target sequence for Celsr1 (NM_009886.1,1951-1969).
caacagctccggttggatt

SEQ ID NO: 546024 - DNA, 19 bp, Mus musculus
  siRNA target sequence for Celsr1 (NM_009886.1,1954-1972).
cagctccggttggattact

SEQ ID NO: 546025 - DNA, 19 bp, Mus musculus
  siRNA target sequence for Celsr1 (NM_009886.1,1956-1974).
gctccggttggattactgt

SEQ ID NO: 546026 - DNA, 19 bp, Mus musculus
  siRNA target sequence for Celsr1 (NM_009886.1,1997-2015).
gaggtggaacactatagct

SEQ ID NO: 546027 - DNA, 19 bp, Mus musculus
  siRNA target sequence for Celsr1 (NM_009886.1,1999-2017).
ggtggaacactatagcttt

SEQ ID NO: 546028 - DNA, 19 bp, Mus musculus
  siRNA target sequence for Celsr1 (NM_009886.1,2110-2128).
gttcacgcagcctgtgtat

SEQ ID NO: 546029 - DNA, 19 bp, Mus musculus
  siRNA target sequence for Celsr1 (NM_009886.1,2125-2143).
gtatgagctgcgtctgaat

SEQ ID NO: 546030 - DNA, 19 bp, Mus musculus
  siRNA target sequence for Celsr1 (NM_009886.1,2292-2310).
cactgcccctggactacaa

SEQ ID NO: 546031 - DNA, 19 bp, Mus musculus
  siRNA target sequence for Celsr1 (NM_009886.1,2363-2381).
cacaccgcgcaggtcttta

SEQ ID NO: 546032 - DNA, 19 bp, Mus musculus
  siRNA target sequence for Celsr1 (NM_009886.1,2367-2385).
ccgcgcaggtctttatcaa

SEQ ID NO: 546033 - DNA, 19 bp, Mus musculus
  siRNA target sequence for Celsr1 (NM_009886.1,2372-2390).
caggtctttatcaacgtta

SEQ ID NO: 546034 - DNA, 19 bp, Mus musculus
  siRNA target sequence for Celsr1 (NM_009886.1,2679-2697).
cctctctggagatccttat

SEQ ID NO: 546035 - DNA, 19 bp, Mus musculus
  siRNA target sequence for Celsr1 (NM_009886.1,2724-2742).
ggttcctgcgagatttcta

SEQ ID NO: 546036 - DNA, 19 bp, Mus musculus
  siRNA target sequence for Celsr1 (NM_009886.1,2991-3009).
gtgcgtcagtgggaattca

SEQ ID NO: 546037 - DNA, 19 bp, Mus musculus
  siRNA target sequence for Celsr1 (NM_009886.1,3015-3033).
gtgtgttggacattaacga

SEQ ID NO: 546038 - DNA, 19 bp, Mus musculus
  siRNA target sequence for Celsr1 (NM_009886.1,3096-3114).
gttcagtggtagcaagaat

SEQ ID NO: 546039 - DNA, 19 bp, Mus musculus
  siRNA target sequence for Celsr1 (NM_009886.1,3138-3156).
gtccgaatgctcagatcat

SEQ ID NO: 546040 - DNA, 19 bp, Mus musculus
  siRNA target sequence for Celsr1 (NM_009886.1,3224-3242).
gccctggtcgagttggatt

SEQ ID NO: 546041 - DNA, 19 bp, Mus musculus
  siRNA target sequence for Celsr1 (NM_009886.1,3225-3243).
ccctggtcgagttggattt

SEQ ID NO: 546042 - DNA, 19 bp, Mus musculus
  siRNA target sequence for Celsr1 (NM_009886.1,3245-3263).
gaggtccggagggactata

SEQ ID NO: 546043 - DNA, 19 bp, Mus musculus
  siRNA target sequence for Celsr1 (NM_009886.1,3248-3266).
gtccggagggactatatgt

SEQ ID NO: 546044 - DNA, 19 bp, Mus musculus
  siRNA target sequence for Celsr1 (NM_009886.1,3452-3470).
ctatctgacagcctcaatt

SEQ ID NO: 546045 - DNA, 19 bp, Mus musculus
  siRNA target sequence for Celsr1 (NM_009886.1,3629-3647).
ctgcgcgtgaccatcatta

SEQ ID NO: 546046 - DNA, 19 bp, Mus musculus
  siRNA target sequence for Celsr1 (NM_009886.1,3631-3649).
gcgcgtgaccatcattaca

SEQ ID NO: 546047 - DNA, 19 bp, Mus musculus
  siRNA target sequence for Celsr1 (NM_009886.1,4124-4142).
gactactgcgagactgaaa

SEQ ID NO: 546048 - DNA, 19 bp, Mus musculus
  siRNA target sequence for Celsr1 (NM_009886.1,4129-4147).
ctgcgagactgaaattgat

SEQ ID NO: 546049 - DNA, 19 bp, Mus musculus
  siRNA target sequence for Celsr1 (NM_009886.1,4131-4149).
gcgagactgaaattgatct

SEQ ID NO: 546050 - DNA, 19 bp, Mus musculus
  siRNA target sequence for Celsr1 (NM_009886.1,4132-4150).
cgagactgaaattgatctt

SEQ ID NO: 546051 - DNA, 19 bp, Mus musculus
  siRNA target sequence for Celsr1 (NM_009886.1,4137-4155).
ctgaaattgatctttgcta

SEQ ID NO: 546052 - DNA, 19 bp, Mus musculus
  siRNA target sequence for Celsr1 (NM_009886.1,4193-4211).
cgtgagggtggctacactt

SEQ ID NO: 546053 - DNA, 19 bp, Mus musculus
  siRNA target sequence for Celsr1 (NM_009886.1,4398-4416).
cccagtccttcgttacctt

SEQ ID NO: 546054 - DNA, 19 bp, Mus musculus
  siRNA target sequence for Celsr1 (NM_009886.1,4638-4656).
cggtgctggtgcagtacta

SEQ ID NO: 546055 - DNA, 19 bp, Mus musculus
  siRNA target sequence for Celsr1 (NM_009886.1,4752-4770).
ccgtgcactttggaagtta

SEQ ID NO: 546056 - DNA, 19 bp, Mus musculus
  siRNA target sequence for Celsr1 (NM_009886.1,4885-4903).
cgtgcacagccgtcagttt

SEQ ID NO: 546057 - DNA, 19 bp, Mus musculus
  siRNA target sequence for Celsr1 (NM_009886.1,4945-4963).
ggacatggctgcgtttatt

SEQ ID NO: 546058 - DNA, 19 bp, Mus musculus
  siRNA target sequence for Celsr1 (NM_009886.1,5050-5068).
caggtggaacacgtactta

SEQ ID NO: 546059 - DNA, 19 bp, Mus musculus
  siRNA target sequence for Celsr1 (NM_009886.1,5055-5073).
ggaacacgtacttatgtga

SEQ ID NO: 546060 - DNA, 19 bp, Mus musculus
  siRNA target sequence for Celsr1 (NM_009886.1,5084-5102).
cgctttggtggaaagaact

SEQ ID NO: 546061 - DNA, 19 bp, Mus musculus
  siRNA target sequence for Celsr1 (NM_009886.1,5344-5362).
gtccaagtcccggataact

SEQ ID NO: 546062 - DNA, 19 bp, Mus musculus
  siRNA target sequence for Celsr1 (NM_009886.1,5497-5515).
gttgaagatgcggactatt

SEQ ID NO: 546063 - DNA, 19 bp, Mus musculus
  siRNA target sequence for Celsr1 (NM_009886.1,5747-5765).
gacagagggtactttggaa

SEQ ID NO: 546064 - DNA, 19 bp, Mus musculus
  siRNA target sequence for Celsr1 (NM_009886.1,5753-5771).
gggtactttggaaaaaagt

SEQ ID NO: 546065 - DNA, 19 bp, Mus musculus
  siRNA target sequence for Celsr1 (NM_009886.1,5755-5773).
gtactttggaaaaaagtgt

SEQ ID NO: 546066 - DNA, 19 bp, Mus musculus
  siRNA target sequence for Celsr1 (NM_009886.1,6148-6166).
gtgcaaccgctgtgataat

SEQ ID NO: 546067 - DNA, 19 bp, Mus musculus
  siRNA target sequence for Celsr1 (NM_009886.1,6151-6169).
caaccgctgtgataatcct

SEQ ID NO: 546068 - DNA, 19 bp, Mus musculus
  siRNA target sequence for Celsr1 (NM_009886.1,6186-6204).
cgctcggctgtgaagtgat

SEQ ID NO: 546069 - DNA, 19 bp, Mus musculus
  siRNA target sequence for Celsr1 (NM_009886.1,6213-6231).
ggtgtcccagagcatttga

SEQ ID NO: 546070 - DNA, 19 bp, Mus musculus
  siRNA target sequence for Celsr1 (NM_009886.1,6244-6262).
gtggccacagacgaaattt

SEQ ID NO: 546071 - DNA, 19 bp, Mus musculus
  siRNA target sequence for Celsr1 (NM_009886.1,6581-6599).
gccacccgagaggctaatt

SEQ ID NO: 546072 - DNA, 19 bp, Mus musculus
  siRNA target sequence for Celsr1 (NM_009886.1,6583-6601).
cacccgagaggctaatttt

SEQ ID NO: 546073 - DNA, 19 bp, Mus musculus
  siRNA target sequence for Celsr1 (NM_009886.1,6724-6742).
cagcaacgtggcacgaaat

SEQ ID NO: 546074 - DNA, 19 bp, Mus musculus
  siRNA target sequence for Celsr1 (NM_009886.1,6726-6744).
gcaacgtggcacgaaatgt

SEQ ID NO: 546075 - DNA, 19 bp, Mus musculus
  siRNA target sequence for Celsr1 (NM_009886.1,6775-6793).
cgtcaccgccaacatgatt

SEQ ID NO: 546076 - DNA, 19 bp, Mus musculus
  siRNA target sequence for Celsr1 (NM_009886.1,7258-7276).
gacggaggaacgaagcaaa

SEQ ID NO: 546077 - DNA, 19 bp, Mus musculus
  siRNA target sequence for Celsr1 (NM_009886.1,7409-7427).
gtgctcatggacatttcca

SEQ ID NO: 546078 - DNA, 19 bp, Mus musculus
  siRNA target sequence for Celsr1 (NM_009886.1,7903-7921).
gcctgtcggaacggttata

SEQ ID NO: 546079 - DNA, 19 bp, Mus musculus
  siRNA target sequence for Celsr1 (NM_009886.1,7904-7922).
cctgtcggaacggttataa

SEQ ID NO: 546080 - DNA, 19 bp, Mus musculus
  siRNA target sequence for Celsr1 (NM_009886.1,7905-7923).
ctgtcggaacggttataat

SEQ ID NO: 546081 - DNA, 19 bp, Mus musculus
  siRNA target sequence for Celsr1 (NM_009886.1,7907-7925).
gtcggaacggttataatca

SEQ ID NO: 546082 - DNA, 19 bp, Mus musculus
  siRNA target sequence for Celsr1 (NM_009886.1,7910-7928).
ggaacggttataatcatca

SEQ ID NO: 546083 - DNA, 19 bp, Mus musculus
  siRNA target sequence for Celsr1 (NM_009886.1,7911-7929).
gaacggttataatcatcaa

SEQ ID NO: 546084 - DNA, 19 bp, Mus musculus
  siRNA target sequence for Celsr1 (NM_009886.1,7966-7984).
ccaaagaaagcaccattat

SEQ ID NO: 546085 - DNA, 19 bp, Mus musculus
  siRNA target sequence for Celsr1 (NM_009886.1,7971-7989).
gaaagcaccattattatga

SEQ ID NO: 546086 - DNA, 19 bp, Mus musculus
  siRNA target sequence for Celsr1 (NM_009886.1,8124-8142).
gcttgcagggcatctttgt

SEQ ID NO: 546087 - DNA, 19 bp, Mus musculus
  siRNA target sequence for Celsr1 (NM_009886.1,8357-8375).
gaaggggtccagaaactca

SEQ ID NO: 546088 - DNA, 19 bp, Mus musculus
  siRNA target sequence for Celsr1 (NM_009886.1,8735-8753).
caggcgcagggcaatcact

SEQ ID NO: 546089 - DNA, 19 bp, Mus musculus
  siRNA target sequence for Celsr1 (NM_009886.1,9027-9045).
caggccgtgagcatctcaa

SEQ ID NO: 546090 - DNA, 19 bp, Mus musculus
  siRNA target sequence for Celsr1 (NM_009886.1,9043-9061).
caatggggtggccatgaat

SEQ ID NO: 546091 - DNA, 19 bp, Mus musculus
  siRNA target sequence for Celsr1 (NM_009886.1,9088-9106).
cggttctgactcagagaaa

SEQ ID NO: 546092 - DNA, 19 bp, Mus musculus
  siRNA target sequence for Celsr2 (NM_017392.2,83-101).
cactactgggagatcaagt

SEQ ID NO: 546093 - DNA, 19 bp, Mus musculus
  siRNA target sequence for Celsr2 (NM_017392.2,284-302).
cagaatcaggggctcatat

SEQ ID NO: 546094 - DNA, 19 bp, Mus musculus
  siRNA target sequence for Celsr2 (NM_017392.2,397-415).
gaagagcacccttgcttaa

SEQ ID NO: 546095 - DNA, 19 bp, Mus musculus
  siRNA target sequence for Celsr2 (NM_017392.2,482-500).
gctcaccagaggaatctct

SEQ ID NO: 546096 - DNA, 19 bp, Mus musculus
  siRNA target sequence for Celsr2 (NM_017392.2,673-691).
gatagccgctccaatcatt

SEQ ID NO: 546097 - DNA, 19 bp, Mus musculus
  siRNA target sequence for Celsr2 (NM_017392.2,677-695).
gccgctccaatcatttctt

SEQ ID NO: 546098 - DNA, 19 bp, Mus musculus
  siRNA target sequence for Celsr2 (NM_017392.2,679-697).
cgctccaatcatttcttct

SEQ ID NO: 546099 - DNA, 19 bp, Mus musculus
  siRNA target sequence for Celsr2 (NM_017392.2,812-830).
ccttggccacgcttaccat

SEQ ID NO: 546100 - DNA, 19 bp, Mus musculus
  siRNA target sequence for Celsr2 (NM_017392.2,849-867).
cgatcacgaccctgttttt

SEQ ID NO: 546101 - DNA, 19 bp, Mus musculus
  siRNA target sequence for Celsr2 (NM_017392.2,958-976).
cccaatgccaacattctgt

SEQ ID NO: 546102 - DNA, 19 bp, Mus musculus
  siRNA target sequence for Celsr2 (NM_017392.2,1006-1024).
ccctcagacgcctttgaga

SEQ ID NO: 546103 - DNA, 19 bp, Mus musculus
  siRNA target sequence for Celsr2 (NM_017392.2,1007-1025).
cctcagacgcctttgagat

SEQ ID NO: 546104 - DNA, 19 bp, Mus musculus
  siRNA target sequence for Celsr2 (NM_017392.2,1137-1155).
gagttccacagccattgtt

SEQ ID NO: 546105 - DNA, 19 bp, Mus musculus
  siRNA target sequence for Celsr2 (NM_017392.2,1163-1181).
cggtggaggatgataatga

SEQ ID NO: 546106 - DNA, 19 bp, Mus musculus
  siRNA target sequence for Celsr2 (NM_017392.2,1444-1462).
cctccactctccaatgtct

SEQ ID NO: 546107 - DNA, 19 bp, Mus musculus
  siRNA target sequence for Celsr2 (NM_017392.2,1578-1596).
gcacgtccaggcaattgat

SEQ ID NO: 546108 - DNA, 19 bp, Mus musculus
  siRNA target sequence for Celsr2 (NM_017392.2,1960-1978).
cgcaaccgcttctctatca

SEQ ID NO: 546109 - DNA, 19 bp, Mus musculus
  siRNA target sequence for Celsr2 (NM_017392.2,2012-2030).
ccttaccgctagactacaa

SEQ ID NO: 546110 - DNA, 19 bp, Mus musculus
  siRNA target sequence for Celsr2 (NM_017392.2,2013-2031).
cttaccgctagactacaaa

SEQ ID NO: 546111 - DNA, 19 bp, Mus musculus
  siRNA target sequence for Celsr2 (NM_017392.2,2079-2097).
gcaggacacagctcagata

SEQ ID NO: 546112 - DNA, 19 bp, Mus musculus
  siRNA target sequence for Celsr2 (NM_017392.2,2082-2100).
ggacacagctcagatagta

SEQ ID NO: 546113 - DNA, 19 bp, Mus musculus
  siRNA target sequence for Celsr2 (NM_017392.2,2240-2258).
gaatcacctactttatgga

SEQ ID NO: 546114 - DNA, 19 bp, Mus musculus
  siRNA target sequence for Celsr2 (NM_017392.2,2390-2408).
ctgacaccacctatttgga

SEQ ID NO: 546115 - DNA, 19 bp, Mus musculus
  siRNA target sequence for Celsr2 (NM_017392.2,2583-2601).
ggacggtgactttattgta

SEQ ID NO: 546116 - DNA, 19 bp, Mus musculus
  siRNA target sequence for Celsr2 (NM_017392.2,2715-2733).
catggaagtgacagttact

SEQ ID NO: 546117 - DNA, 19 bp, Mus musculus
  siRNA target sequence for Celsr2 (NM_017392.2,2855-2873).
ggaccaacgcacagatcat

SEQ ID NO: 546118 - DNA, 19 bp, Mus musculus
  siRNA target sequence for Celsr2 (NM_017392.2,2858-2876).
ccaacgcacagatcatgta

SEQ ID NO: 546119 - DNA, 19 bp, Mus musculus
  siRNA target sequence for Celsr2 (NM_017392.2,2902-2920).
gaggtctttcagttggata

SEQ ID NO: 546120 - DNA, 19 bp, Mus musculus
  siRNA target sequence for Celsr2 (NM_017392.2,2904-2922).
ggtctttcagttggatata

SEQ ID NO: 546121 - DNA, 19 bp, Mus musculus
  siRNA target sequence for Celsr2 (NM_017392.2,2935-2953).
ctaactgccctggtagatt

SEQ ID NO: 546122 - DNA, 19 bp, Mus musculus
  siRNA target sequence for Celsr2 (NM_017392.2,3039-3057).
cctccttgaccgcaatgat

SEQ ID NO: 546123 - DNA, 19 bp, Mus musculus
  siRNA target sequence for Celsr2 (NM_017392.2,3040-3058).
ctccttgaccgcaatgata

SEQ ID NO: 546124 - DNA, 19 bp, Mus musculus
  siRNA target sequence for Celsr2 (NM_017392.2,3069-3087).
gctgggcaactttgagatt

SEQ ID NO: 546125 - DNA, 19 bp, Mus musculus
  siRNA target sequence for Celsr2 (NM_017392.2,3154-3172).
gcccacgaccccgatatct

SEQ ID NO: 546126 - DNA, 19 bp, Mus musculus
  siRNA target sequence for Celsr2 (NM_017392.2,3156-3174).
ccacgaccccgatatctca

SEQ ID NO: 546127 - DNA, 19 bp, Mus musculus
  siRNA target sequence for Celsr2 (NM_017392.2,3189-3207).
cagcttcgagcgaggaaat

SEQ ID NO: 546128 - DNA, 19 bp, Mus musculus
  siRNA target sequence for Celsr2 (NM_017392.2,3191-3209).
gcttcgagcgaggaaatga

SEQ ID NO: 546129 - DNA, 19 bp, Mus musculus
  siRNA target sequence for Celsr2 (NM_017392.2,3192-3210).
cttcgagcgaggaaatgaa

SEQ ID NO: 546130 - DNA, 19 bp, Mus musculus
  siRNA target sequence for Celsr2 (NM_017392.2,3392-3410).
cgctgcgcttggaagacat

SEQ ID NO: 546131 - DNA, 19 bp, Mus musculus
  siRNA target sequence for Celsr2 (NM_017392.2,3535-3553).
ggccatatcctcaacgtaa

SEQ ID NO: 546132 - DNA, 19 bp, Mus musculus
  siRNA target sequence for Celsr2 (NM_017392.2,3919-3937).
cgagagggtggctatacct

SEQ ID NO: 546133 - DNA, 19 bp, Mus musculus
  siRNA target sequence for Celsr2 (NM_017392.2,4174-4192).
ctggccctctcgtttgcta

SEQ ID NO: 546134 - DNA, 19 bp, Mus musculus
  siRNA target sequence for Celsr2 (NM_017392.2,4206-4224).
cgggctactgctgtacaat

SEQ ID NO: 546135 - DNA, 19 bp, Mus musculus
  siRNA target sequence for Celsr2 (NM_017392.2,4364-4382).
cagtgcagctgaagtacta

SEQ ID NO: 546136 - DNA, 19 bp, Mus musculus
  siRNA target sequence for Celsr2 (NM_017392.2,4671-4689).
cgacatggccgacttcatt

SEQ ID NO: 546137 - DNA, 19 bp, Mus musculus
  siRNA target sequence for Celsr2 (NM_017392.2,4680-4698).
cgacttcattgccaacaat

SEQ ID NO: 546138 - DNA, 19 bp, Mus musculus
  siRNA target sequence for Celsr2 (NM_017392.2,5073-5091).
gccaggccgagccaatgat

SEQ ID NO: 546139 - DNA, 19 bp, Mus musculus
  siRNA target sequence for Celsr2 (NM_017392.2,5209-5227).
ggactgcacctgagcaata

SEQ ID NO: 546140 - DNA, 19 bp, Mus musculus
  siRNA target sequence for Celsr2 (NM_017392.2,5210-5228).
gactgcacctgagcaatat

SEQ ID NO: 546141 - DNA, 19 bp, Mus musculus
  siRNA target sequence for Celsr2 (NM_017392.2,5212-5230).
ctgcacctgagcaatatta

SEQ ID NO: 546142 - DNA, 19 bp, Mus musculus
  siRNA target sequence for Celsr2 (NM_017392.2,5214-5232).
gcacctgagcaatattaca

SEQ ID NO: 546143 - DNA, 19 bp, Mus musculus
  siRNA target sequence for Celsr2 (NM_017392.2,5456-5474).
gctgtgttctaggttacta

SEQ ID NO: 546144 - DNA, 19 bp, Mus musculus
  siRNA target sequence for Celsr2 (NM_017392.2,5558-5576).
gctacatctgcgagtgttt

SEQ ID NO: 546145 - DNA, 19 bp, Mus musculus
  siRNA target sequence for Celsr2 (NM_017392.2,5559-5577).
ctacatctgcgagtgttta

SEQ ID NO: 546146 - DNA, 19 bp, Mus musculus
  siRNA target sequence for Celsr2 (NM_017392.2,5565-5583).
ctgcgagtgtttaccaaat

SEQ ID NO: 546147 - DNA, 19 bp, Mus musculus
  siRNA target sequence for Celsr2 (NM_017392.2,5567-5585).
gcgagtgtttaccaaatta

SEQ ID NO: 546148 - DNA, 19 bp, Mus musculus
  siRNA target sequence for Celsr2 (NM_017392.2,5684-5702).
gctttgacccagattgcaa

SEQ ID NO: 546149 - DNA, 19 bp, Mus musculus
  siRNA target sequence for Celsr2 (NM_017392.2,5689-5707).
gacccagattgcaacaaga

SEQ ID NO: 546150 - DNA, 19 bp, Mus musculus
  siRNA target sequence for Celsr2 (NM_017392.2,5692-5710).
ccagattgcaacaagacaa

SEQ ID NO: 546151 - DNA, 19 bp, Mus musculus
  siRNA target sequence for Celsr2 (NM_017392.2,5765-5783).
gtctcttgtgtgactgtta

SEQ ID NO: 546152 - DNA, 19 bp, Mus musculus
  siRNA target sequence for Celsr2 (NM_017392.2,5780-5798).
gttaccccactggttcttt

SEQ ID NO: 546153 - DNA, 19 bp, Mus musculus
  siRNA target sequence for Celsr2 (NM_017392.2,5835-5853).
gtgcaagcctggagtcatt

SEQ ID NO: 546154 - DNA, 19 bp, Mus musculus
  siRNA target sequence for Celsr2 (NM_017392.2,5871-5889).
ctgtgacaacccttttgct

SEQ ID NO: 546155 - DNA, 19 bp, Mus musculus
  siRNA target sequence for Celsr2 (NM_017392.2,5906-5924).
gctgtgaagtgaattacga

SEQ ID NO: 546156 - DNA, 19 bp, Mus musculus
  siRNA target sequence for Celsr2 (NM_017392.2,6118-6136).
cggctgcagaggaacgaat

SEQ ID NO: 546157 - DNA, 19 bp, Mus musculus
  siRNA target sequence for Celsr2 (NM_017392.2,6440-6458).
gcgcccttgcccagaatat

SEQ ID NO: 546158 - DNA, 19 bp, Mus musculus
  siRNA target sequence for Celsr2 (NM_017392.2,6512-6530).
ctgtagtgcgcctggataa

SEQ ID NO: 546159 - DNA, 19 bp, Mus musculus
  siRNA target sequence for Celsr2 (NM_017392.2,6548-6566).
ccaagctgccccgttatga

SEQ ID NO: 546160 - DNA, 19 bp, Mus musculus
  siRNA target sequence for Celsr2 (NM_017392.2,6773-6791).
gactgctgccccacaacta

SEQ ID NO: 546161 - DNA, 19 bp, Mus musculus
  siRNA target sequence for Celsr2 (NM_017392.2,7052-7070).
gctgccagtgcaaccatat

SEQ ID NO: 546162 - DNA, 19 bp, Mus musculus
  siRNA target sequence for Celsr2 (NM_017392.2,7057-7075).
cagtgcaaccatatgacaa

SEQ ID NO: 546163 - DNA, 19 bp, Mus musculus
  siRNA target sequence for Celsr2 (NM_017392.2,7062-7080).
caaccatatgacaagcttt

SEQ ID NO: 546164 - DNA, 19 bp, Mus musculus
  siRNA target sequence for Celsr2 (NM_017392.2,7081-7099).
gctgtgcttatggatatgt

SEQ ID NO: 546165 - DNA, 19 bp, Mus musculus
  siRNA target sequence for Celsr2 (NM_017392.2,7127-7145).
cactgaagaccctgacata

SEQ ID NO: 546166 - DNA, 19 bp, Mus musculus
  siRNA target sequence for Celsr2 (NM_017392.2,7430-7448).
ccagtcccatgcgtttcta

SEQ ID NO: 546167 - DNA, 19 bp, Mus musculus
  siRNA target sequence for Celsr2 (NM_017392.2,7433-7451).
gtcccatgcgtttctacta

SEQ ID NO: 546168 - DNA, 19 bp, Mus musculus
  siRNA target sequence for Celsr2 (NM_017392.2,7436-7454).
ccatgcgtttctactacat

SEQ ID NO: 546169 - DNA, 19 bp, Mus musculus
  siRNA target sequence for Celsr2 (NM_017392.2,7463-7481).
ggggcgtccctgctttcat

SEQ ID NO: 546170 - DNA, 19 bp, Mus musculus
  siRNA target sequence for Celsr2 (NM_017392.2,7652-7670).
ggcagggcttcgagaagaa

SEQ ID NO: 546171 - DNA, 19 bp, Mus musculus
  siRNA target sequence for Celsr2 (NM_017392.2,7780-7798).
ctcttcgctgcctgcaatt

SEQ ID NO: 546172 - DNA, 19 bp, Mus musculus
  siRNA target sequence for Celsr2 (NM_017392.2,7782-7800).
cttcgctgcctgcaattgt

SEQ ID NO: 546173 - DNA, 19 bp, Mus musculus
  siRNA target sequence for Celsr2 (NM_017392.2,7919-7937).
ccctgacctcgtcctataa

SEQ ID NO: 546174 - DNA, 19 bp, Mus musculus
  siRNA target sequence for Celsr2 (NM_017392.2,7921-7939).
ctgacctcgtcctataact

SEQ ID NO: 546175 - DNA, 19 bp, Mus musculus
  siRNA target sequence for Celsr2 (NM_017392.2,8130-8148).
ccaagcccaacaacatgat

SEQ ID NO: 546176 - DNA, 19 bp, Mus musculus
  siRNA target sequence for Celsr2 (NM_017392.2,8368-8386).
gactttgggaccacaacaa

SEQ ID NO: 546177 - DNA, 19 bp, Mus musculus
  siRNA target sequence for Celsr2 (NM_017392.2,8524-8542).
cccaccatcagcgaaaaga

SEQ ID NO: 546178 - DNA, 19 bp, Mus musculus
  siRNA target sequence for Celsr3 (NM_080437.1,38-56).
cgtcgaccccggtactact

SEQ ID NO: 546179 - DNA, 19 bp, Mus musculus
  siRNA target sequence for Celsr3 (NM_080437.1,126-144).
cccaggggttgctactact

SEQ ID NO: 546180 - DNA, 19 bp, Mus musculus
  siRNA target sequence for Celsr3 (NM_080437.1,127-145).
ccaggggttgctactacta

SEQ ID NO: 546181 - DNA, 19 bp, Mus musculus
  siRNA target sequence for Celsr3 (NM_080437.1,364-382).
cagggtccagggtatctgt

SEQ ID NO: 546182 - DNA, 19 bp, Mus musculus
  siRNA target sequence for Celsr3 (NM_080437.1,366-384).
gggtccagggtatctgtta

SEQ ID NO: 546183 - DNA, 19 bp, Mus musculus
  siRNA target sequence for Celsr3 (NM_080437.1,370-388).
ccagggtatctgttatgtt

SEQ ID NO: 546184 - DNA, 19 bp, Mus musculus
  siRNA target sequence for Celsr3 (NM_080437.1,540-558).
ggccttccagcgtaatgct

SEQ ID NO: 546185 - DNA, 19 bp, Mus musculus
  siRNA target sequence for Celsr3 (NM_080437.1,541-559).
gccttccagcgtaatgcta

SEQ ID NO: 546186 - DNA, 19 bp, Mus musculus
  siRNA target sequence for Celsr3 (NM_080437.1,563-581).
gaagcatccgcaaaagagt

SEQ ID NO: 546187 - DNA, 19 bp, Mus musculus
  siRNA target sequence for Celsr3 (NM_080437.1,874-892).
ggtcctgaagccaagcaaa

SEQ ID NO: 546188 - DNA, 19 bp, Mus musculus
  siRNA target sequence for Celsr3 (NM_080437.1,880-898).
gaagccaagcaaatactct

SEQ ID NO: 546189 - DNA, 19 bp, Mus musculus
  siRNA target sequence for Celsr3 (NM_080437.1,940-958).
ccgcagtttcctcaataca

SEQ ID NO: 546190 - DNA, 19 bp, Mus musculus
  siRNA target sequence for Celsr3 (NM_080437.1,941-959).
cgcagtttcctcaatacaa

SEQ ID NO: 546191 - DNA, 19 bp, Mus musculus
  siRNA target sequence for Celsr3 (NM_080437.1,943-961).
cagtttcctcaatacaact

SEQ ID NO: 546192 - DNA, 19 bp, Mus musculus
  siRNA target sequence for Celsr3 (NM_080437.1,987-1005).
ggcagcgggcacatcagta

SEQ ID NO: 546193 - DNA, 19 bp, Mus musculus
  siRNA target sequence for Celsr3 (NM_080437.1,1082-1100).
gccgctcgctggagctttt

SEQ ID NO: 546194 - DNA, 19 bp, Mus musculus
  siRNA target sequence for Celsr3 (NM_080437.1,1084-1102).
cgctcgctggagcttttca

SEQ ID NO: 546195 - DNA, 19 bp, Mus musculus
  siRNA target sequence for Celsr3 (NM_080437.1,1088-1106).
cgctggagcttttcagtat

SEQ ID NO: 546196 - DNA, 19 bp, Mus musculus
  siRNA target sequence for Celsr3 (NM_080437.1,1089-1107).
gctggagcttttcagtatt

SEQ ID NO: 546197 - DNA, 19 bp, Mus musculus
  siRNA target sequence for Celsr3 (NM_080437.1,1092-1110).
ggagcttttcagtattgat

SEQ ID NO: 546198 - DNA, 19 bp, Mus musculus
  siRNA target sequence for Celsr3 (NM_080437.1,1142-1160).
ctctggatcgtgagagtat

SEQ ID NO: 546199 - DNA, 19 bp, Mus musculus
  siRNA target sequence for Celsr3 (NM_080437.1,1146-1164).
ggatcgtgagagtatggaa

SEQ ID NO: 546200 - DNA, 19 bp, Mus musculus
  siRNA target sequence for Celsr3 (NM_080437.1,1167-1185).
ccactaccttcgagtaaca

SEQ ID NO: 546201 - DNA, 19 bp, Mus musculus
  siRNA target sequence for Celsr3 (NM_080437.1,1254-1272).
cgatcacgcgccagtgttt

SEQ ID NO: 546202 - DNA, 19 bp, Mus musculus
  siRNA target sequence for Celsr3 (NM_080437.1,1280-1298).
cccagtatcgggaaacact

SEQ ID NO: 546203 - DNA, 19 bp, Mus musculus
  siRNA target sequence for Celsr3 (NM_080437.1,1281-1299).
ccagtatcgggaaacactt

SEQ ID NO: 546204 - DNA, 19 bp, Mus musculus
  siRNA target sequence for Celsr3 (NM_080437.1,1290-1308).
ggaaacacttcgtgagaat

SEQ ID NO: 546205 - DNA, 19 bp, Mus musculus
  siRNA target sequence for Celsr3 (NM_080437.1,1441-1459).
ccacgttcgggtcttatca

SEQ ID NO: 546206 - DNA, 19 bp, Mus musculus
  siRNA target sequence for Celsr3 (NM_080437.1,1481-1499).
gggaacacatggaaagcta

SEQ ID NO: 546207 - DNA, 19 bp, Mus musculus
  siRNA target sequence for Celsr3 (NM_080437.1,1482-1500).
ggaacacatggaaagctat

SEQ ID NO: 546208 - DNA, 19 bp, Mus musculus
  siRNA target sequence for Celsr3 (NM_080437.1,1496-1514).
gctatgagctagtagtaga

SEQ ID NO: 546209 - DNA, 19 bp, Mus musculus
  siRNA target sequence for Celsr3 (NM_080437.1,1700-1718).
ccaatggtttggtgcatta

SEQ ID NO: 546210 - DNA, 19 bp, Mus musculus
  siRNA target sequence for Celsr3 (NM_080437.1,1706-1724).
gtttggtgcattataacat

SEQ ID NO: 546211 - DNA, 19 bp, Mus musculus
  siRNA target sequence for Celsr3 (NM_080437.1,1761-1779).
cagtctcacgggtgagata

SEQ ID NO: 546212 - DNA, 19 bp, Mus musculus
  siRNA target sequence for Celsr3 (NM_080437.1,1763-1781).
gtctcacgggtgagataca

SEQ ID NO: 546213 - DNA, 19 bp, Mus musculus
  siRNA target sequence for Celsr3 (NM_080437.1,1827-1845).
gcgaatccgggcacaagat

SEQ ID NO: 546214 - DNA, 19 bp, Mus musculus
  siRNA target sequence for Celsr3 (NM_080437.1,1855-1873).
ccacctttgtccaacaaca

SEQ ID NO: 546215 - DNA, 19 bp, Mus musculus
  siRNA target sequence for Celsr3 (NM_080437.1,1972-1990).
ggtcactcagtaattcaca

SEQ ID NO: 546216 - DNA, 19 bp, Mus musculus
  siRNA target sequence for Celsr3 (NM_080437.1,1973-1991).
gtcactcagtaattcacat

SEQ ID NO: 546217 - DNA, 19 bp, Mus musculus
  siRNA target sequence for Celsr3 (NM_080437.1,2022-2040).
ctccaggttagagtattct

SEQ ID NO: 546218 - DNA, 19 bp, Mus musculus
  siRNA target sequence for Celsr3 (NM_080437.1,2025-2043).
caggttagagtattctcta

SEQ ID NO: 546219 - DNA, 19 bp, Mus musculus
  siRNA target sequence for Celsr3 (NM_080437.1,2028-2046).
gttagagtattctctaact

SEQ ID NO: 546220 - DNA, 19 bp, Mus musculus
  siRNA target sequence for Celsr3 (NM_080437.1,2111-2129).
ccctggaccgtgaatctgt

SEQ ID NO: 546221 - DNA, 19 bp, Mus musculus
  siRNA target sequence for Celsr3 (NM_080437.1,2192-2210).
ccagtgtcaccgtaactgt

SEQ ID NO: 546222 - DNA, 19 bp, Mus musculus
  siRNA target sequence for Celsr3 (NM_080437.1,2312-2330).
cggtagatcgagatgctaa

SEQ ID NO: 546223 - DNA, 19 bp, Mus musculus
  siRNA target sequence for Celsr3 (NM_080437.1,2333-2351).
gcgccatcagctaccaaat

SEQ ID NO: 546224 - DNA, 19 bp, Mus musculus
  siRNA target sequence for Celsr3 (NM_080437.1,2335-2353).
gccatcagctaccaaatca

SEQ ID NO: 546225 - DNA, 19 bp, Mus musculus
  siRNA target sequence for Celsr3 (NM_080437.1,2460-2478).
ggtgcttactgcatctgat

SEQ ID NO: 546226 - DNA, 19 bp, Mus musculus
  siRNA target sequence for Celsr3 (NM_080437.1,2494-2512).
cactgctatgtgcatatca

SEQ ID NO: 546227 - DNA, 19 bp, Mus musculus
  siRNA target sequence for Celsr3 (NM_080437.1,2559-2577).
ctactcggtgagcatgaat

SEQ ID NO: 546228 - DNA, 19 bp, Mus musculus
  siRNA target sequence for Celsr3 (NM_080437.1,2562-2580).
ctcggtgagcatgaatgaa

SEQ ID NO: 546229 - DNA, 19 bp, Mus musculus
  siRNA target sequence for Celsr3 (NM_080437.1,2676-2694).
gccccagttccgaattgat

SEQ ID NO: 546230 - DNA, 19 bp, Mus musculus
  siRNA target sequence for Celsr3 (NM_080437.1,2739-2757).
ggaccaagtgacctataca

SEQ ID NO: 546231 - DNA, 19 bp, Mus musculus
  siRNA target sequence for Celsr3 (NM_080437.1,2769-2787).
cgctcgggacaatggtata

SEQ ID NO: 546232 - DNA, 19 bp, Mus musculus
  siRNA target sequence for Celsr3 (NM_080437.1,2804-2822).
ccacctacgtggaggtaat

SEQ ID NO: 546233 - DNA, 19 bp, Mus musculus
  siRNA target sequence for Celsr3 (NM_080437.1,2807-2825).
cctacgtggaggtaatggt

SEQ ID NO: 546234 - DNA, 19 bp, Mus musculus
  siRNA target sequence for Celsr3 (NM_080437.1,2808-2826).
ctacgtggaggtaatggta

SEQ ID NO: 546235 - DNA, 19 bp, Mus musculus
  siRNA target sequence for Celsr3 (NM_080437.1,2811-2829).
cgtggaggtaatggtaaat

SEQ ID NO: 546236 - DNA, 19 bp, Mus musculus
  siRNA target sequence for Celsr3 (NM_080437.1,3140-3158).
ctgtacaggacgtaaacga

SEQ ID NO: 546237 - DNA, 19 bp, Mus musculus
  siRNA target sequence for Celsr3 (NM_080437.1,3262-3280).
ggccccaacgctcatataa

SEQ ID NO: 546238 - DNA, 19 bp, Mus musculus
  siRNA target sequence for Celsr3 (NM_080437.1,3263-3281).
gccccaacgctcatataat

SEQ ID NO: 546239 - DNA, 19 bp, Mus musculus
  siRNA target sequence for Celsr3 (NM_080437.1,3266-3284).
ccaacgctcatataatgta

SEQ ID NO: 546240 - DNA, 19 bp, Mus musculus
  siRNA target sequence for Celsr3 (NM_080437.1,3299-3317).
ggaacatccccgagttgtt

SEQ ID NO: 546241 - DNA, 19 bp, Mus musculus
  siRNA target sequence for Celsr3 (NM_080437.1,3309-3327).
cgagttgttccaaatggat

SEQ ID NO: 546242 - DNA, 19 bp, Mus musculus
  siRNA target sequence for Celsr3 (NM_080437.1,3310-3328).
gagttgttccaaatggata

SEQ ID NO: 546243 - DNA, 19 bp, Mus musculus
  siRNA target sequence for Celsr3 (NM_080437.1,3373-3391).
gctcgtcaggaatatgtga

SEQ ID NO: 546244 - DNA, 19 bp, Mus musculus
  siRNA target sequence for Celsr3 (NM_080437.1,3374-3392).
ctcgtcaggaatatgtgat

SEQ ID NO: 546245 - DNA, 19 bp, Mus musculus
  siRNA target sequence for Celsr3 (NM_080437.1,3446-3464).
gcctagtcgaccagaatga

SEQ ID NO: 546246 - DNA, 19 bp, Mus musculus
  siRNA target sequence for Celsr3 (NM_080437.1,3448-3466).
ctagtcgaccagaatgaca

SEQ ID NO: 546247 - DNA, 19 bp, Mus musculus
  siRNA target sequence for Celsr3 (NM_080437.1,3515-3533).
ccaaccgctccgacacttt

SEQ ID NO: 546248 - DNA, 19 bp, Mus musculus
  siRNA target sequence for Celsr3 (NM_080437.1,3551-3569).
ggcgaatcccagcttatga

SEQ ID NO: 546249 - DNA, 19 bp, Mus musculus
  siRNA target sequence for Celsr3 (NM_080437.1,3665-3683).
gcaggaagttggacaacaa

SEQ ID NO: 546250 - DNA, 19 bp, Mus musculus
  siRNA target sequence for Celsr3 (NM_080437.1,3698-3716).
cctccatgctggtaactgt

SEQ ID NO: 546251 - DNA, 19 bp, Mus musculus
  siRNA target sequence for Celsr3 (NM_080437.1,3699-3717).
ctccatgctggtaactgta

SEQ ID NO: 546252 - DNA, 19 bp, Mus musculus
  siRNA target sequence for Celsr3 (NM_080437.1,3702-3720).
catgctggtaactgtaaca

SEQ ID NO: 546253 - DNA, 19 bp, Mus musculus
  siRNA target sequence for Celsr3 (NM_080437.1,3839-3857).
caccgctgctgggtcattt

SEQ ID NO: 546254 - DNA, 19 bp, Mus musculus
  siRNA target sequence for Celsr3 (NM_080437.1,3887-3905).
caccaaccgaggacgtttt

SEQ ID NO: 546255 - DNA, 19 bp, Mus musculus
  siRNA target sequence for Celsr3 (NM_080437.1,3889-3907).
ccaaccgaggacgttttca

SEQ ID NO: 546256 - DNA, 19 bp, Mus musculus
  siRNA target sequence for Celsr3 (NM_080437.1,3890-3908).
caaccgaggacgttttcat

SEQ ID NO: 546257 - DNA, 19 bp, Mus musculus
  siRNA target sequence for Celsr3 (NM_080437.1,4274-4292).
cagagctcgacctctgtta

SEQ ID NO: 546258 - DNA, 19 bp, Mus musculus
  siRNA target sequence for Celsr3 (NM_080437.1,4582-4600).
ctctccctctcgtttgcaa

SEQ ID NO: 546259 - DNA, 19 bp, Mus musculus
  siRNA target sequence for Celsr3 (NM_080437.1,4610-4628).
ccagcgggctactcttcta

SEQ ID NO: 546260 - DNA, 19 bp, Mus musculus
  siRNA target sequence for Celsr3 (NM_080437.1,4613-4631).
gcgggctactcttctacaa

SEQ ID NO: 546261 - DNA, 19 bp, Mus musculus
  siRNA target sequence for Celsr3 (NM_080437.1,4681-4699).
ggccaagtgcggcttacat

SEQ ID NO: 546262 - DNA, 19 bp, Mus musculus
  siRNA target sequence for Celsr3 (NM_080437.1,4682-4700).
gccaagtgcggcttacata

SEQ ID NO: 546263 - DNA, 19 bp, Mus musculus
  siRNA target sequence for Celsr3 (NM_080437.1,4683-4701).
ccaagtgcggcttacatat

SEQ ID NO: 546264 - DNA, 19 bp, Mus musculus
  siRNA target sequence for Celsr3 (NM_080437.1,4684-4702).
caagtgcggcttacatatt

SEQ ID NO: 546265 - DNA, 19 bp, Mus musculus
  siRNA target sequence for Celsr3 (NM_080437.1,4687-4705).
gtgcggcttacatattcca

SEQ ID NO: 546266 - DNA, 19 bp, Mus musculus
  siRNA target sequence for Celsr3 (NM_080437.1,4772-4790).
cagtgcatctgagatacta

SEQ ID NO: 546267 - DNA, 19 bp, Mus musculus
  siRNA target sequence for Celsr3 (NM_080437.1,4777-4795).
catctgagatactacaaca

SEQ ID NO: 546268 - DNA, 19 bp, Mus musculus
  siRNA target sequence for Celsr3 (NM_080437.1,4900-4918).
gccgagattggcaactact

SEQ ID NO: 546269 - DNA, 19 bp, Mus musculus
  siRNA target sequence for Celsr3 (NM_080437.1,4939-4957).
caaacaagctccaagaagt

SEQ ID NO: 546270 - DNA, 19 bp, Mus musculus
  siRNA target sequence for Celsr3 (NM_080437.1,5049-5067).
gcgagacttgcacattgat

SEQ ID NO: 546271 - DNA, 19 bp, Mus musculus
  siRNA target sequence for Celsr3 (NM_080437.1,5263-5281).
catttccaaggcaatggaa

SEQ ID NO: 546272 - DNA, 19 bp, Mus musculus
  siRNA target sequence for Celsr3 (NM_080437.1,5327-5345).
ggtacctgggactatcatt

SEQ ID NO: 546273 - DNA, 19 bp, Mus musculus
  siRNA target sequence for Celsr3 (NM_080437.1,5328-5346).
gtacctgggactatcattt

SEQ ID NO: 546274 - DNA, 19 bp, Mus musculus
  siRNA target sequence for Celsr3 (NM_080437.1,5366-5384).
ggatcctgatgcaagtaca

SEQ ID NO: 546275 - DNA, 19 bp, Mus musculus
  siRNA target sequence for Celsr3 (NM_080437.1,5549-5567).
gccgaaggggccaccatat

SEQ ID NO: 546276 - DNA, 19 bp, Mus musculus
  siRNA target sequence for Celsr3 (NM_080437.1,5552-5570).
gaaggggccaccatatctt

SEQ ID NO: 546277 - DNA, 19 bp, Mus musculus
  siRNA target sequence for Celsr3 (NM_080437.1,5559-5577).
ccaccatatctttatggtt

SEQ ID NO: 546278 - DNA, 19 bp, Mus musculus
  siRNA target sequence for Celsr3 (NM_080437.1,5560-5578).
caccatatctttatggttt

SEQ ID NO: 546279 - DNA, 19 bp, Mus musculus
  siRNA target sequence for Celsr3 (NM_080437.1,5628-5646).
gcagggcctgaaagtaaaa

SEQ ID NO: 546280 - DNA, 19 bp, Mus musculus
  siRNA target sequence for Celsr3 (NM_080437.1,5834-5852).
ctccccacgctgattgcaa

SEQ ID NO: 546281 - DNA, 19 bp, Mus musculus
  siRNA target sequence for Celsr3 (NM_080437.1,5857-5875).
ctctggcagaccttttcct

SEQ ID NO: 546282 - DNA, 19 bp, Mus musculus
  siRNA target sequence for Celsr3 (NM_080437.1,5879-5897).
cctgtcggccaggttacta

SEQ ID NO: 546283 - DNA, 19 bp, Mus musculus
  siRNA target sequence for Celsr3 (NM_080437.1,5880-5898).
ctgtcggccaggttactat

SEQ ID NO: 546284 - DNA, 19 bp, Mus musculus
  siRNA target sequence for Celsr3 (NM_080437.1,6086-6104).
gcaactgtgatgttcacaa

SEQ ID NO: 546285 - DNA, 19 bp, Mus musculus
  siRNA target sequence for Celsr3 (NM_080437.1,6380-6398).
ggtggccccagactaagtt

SEQ ID NO: 546286 - DNA, 19 bp, Mus musculus
  siRNA target sequence for Celsr3 (NM_080437.1,6476-6494).
ggttggagcctgatctctt

SEQ ID NO: 546287 - DNA, 19 bp, Mus musculus
  siRNA target sequence for Celsr3 (NM_080437.1,6512-6530).
ccttccgagagcttagtct

SEQ ID NO: 546288 - DNA, 19 bp, Mus musculus
  siRNA target sequence for Celsr3 (NM_080437.1,6671-6689).
cctacttgctagcttttga

SEQ ID NO: 546289 - DNA, 19 bp, Mus musculus
  siRNA target sequence for Celsr3 (NM_080437.1,6732-6750).
ccacttcaatgagaatctt

SEQ ID NO: 546290 - DNA, 19 bp, Mus musculus
  siRNA target sequence for Celsr3 (NM_080437.1,6855-6873).
gcatctggaggaatatgca

SEQ ID NO: 546291 - DNA, 19 bp, Mus musculus
  siRNA target sequence for Celsr3 (NM_080437.1,6875-6893).
ccacccttgcaaggaatat

SEQ ID NO: 546292 - DNA, 19 bp, Mus musculus
  siRNA target sequence for Celsr3 (NM_080437.1,6878-6896).
cccttgcaaggaatatgga

SEQ ID NO: 546293 - DNA, 19 bp, Mus musculus
  siRNA target sequence for Celsr3 (NM_080437.1,6920-6938).
gactagtcacacccaatat

SEQ ID NO: 546294 - DNA, 19 bp, Mus musculus
  siRNA target sequence for Celsr3 (NM_080437.1,6960-6978).
ggagcatcctagttcaact

SEQ ID NO: 546295 - DNA, 19 bp, Mus musculus
  siRNA target sequence for Celsr3 (NM_080437.1,7000-7018).
cgttaccacagcaaccttt

SEQ ID NO: 546296 - DNA, 19 bp, Mus musculus
  siRNA target sequence for Celsr3 (NM_080437.1,7001-7019).
gttaccacagcaacctttt

SEQ ID NO: 546297 - DNA, 19 bp, Mus musculus
  siRNA target sequence for Celsr3 (NM_080437.1,7080-7098).
gccatcgccatctgaagtt

SEQ ID NO: 546298 - DNA, 19 bp, Mus musculus
  siRNA target sequence for Celsr3 (NM_080437.1,7082-7100).
catcgccatctgaagttct

SEQ ID NO: 546299 - DNA, 19 bp, Mus musculus
  siRNA target sequence for Celsr3 (NM_080437.1,7181-7199).
ctgggatttccatagtcat

SEQ ID NO: 546300 - DNA, 19 bp, Mus musculus
  siRNA target sequence for Celsr3 (NM_080437.1,7436-7454).
cgacagaccagcatggtat

SEQ ID NO: 546301 - DNA, 19 bp, Mus musculus
  siRNA target sequence for Celsr3 (NM_080437.1,7518-7536).
ccgcacgggcacttttgga

SEQ ID NO: 546302 - DNA, 19 bp, Mus musculus
  siRNA target sequence for Celsr3 (NM_080437.1,7526-7544).
gcacttttggagtccttat

SEQ ID NO: 546303 - DNA, 19 bp, Mus musculus
  siRNA target sequence for Celsr3 (NM_080437.1,7529-7547).
cttttggagtccttatgga

SEQ ID NO: 546304 - DNA, 19 bp, Mus musculus
  siRNA target sequence for Celsr3 (NM_080437.1,7622-7640).
ctgtaacggcgctagtact

SEQ ID NO: 546305 - DNA, 19 bp, Mus musculus
  siRNA target sequence for Celsr3 (NM_080437.1,7863-7881).
gcaggttgagcctcgaaat

SEQ ID NO: 546306 - DNA, 19 bp, Mus musculus
  siRNA target sequence for Celsr3 (NM_080437.1,7925-7943).
gcgtccctgctgtgttgtt

SEQ ID NO: 546307 - DNA, 19 bp, Mus musculus
  siRNA target sequence for Celsr3 (NM_080437.1,8036-8054).
gccctatcgtcctcgttat

SEQ ID NO: 546308 - DNA, 19 bp, Mus musculus
  siRNA target sequence for Celsr3 (NM_080437.1,8037-8055).
ccctatcgtcctcgttatt

SEQ ID NO: 546309 - DNA, 19 bp, Mus musculus
  siRNA target sequence for Celsr3 (NM_080437.1,8039-8057).
ctatcgtcctcgttattgt

SEQ ID NO: 546310 - DNA, 19 bp, Mus musculus
  siRNA target sequence for Celsr3 (NM_080437.1,8394-8412).
caacaacacggctctcttt

SEQ ID NO: 546311 - DNA, 19 bp, Mus musculus
  siRNA target sequence for Celsr3 (NM_080437.1,8727-8745).
gactcgagggcgtttccaa

SEQ ID NO: 546312 - DNA, 19 bp, Mus musculus
  siRNA target sequence for Celsr3 (NM_080437.1,8946-8964).
cttgaccagtggagatgaa

SEQ ID NO: 546313 - DNA, 19 bp, Mus musculus
  siRNA target sequence for Celsr3 (NM_080437.1,9133-9151).
gggggtacaggtagtcttt

SEQ ID NO: 546314 - DNA, 19 bp, Mus musculus
  siRNA target sequence for Celsr3 (NM_080437.1,9419-9437).
gggcaccccgagaatggtt

SEQ ID NO: 546315 - DNA, 19 bp, Mus musculus
  siRNA target sequence for Celsr3 (NM_080437.1,9858-9876).
ggagttgtcacctgattca

SEQ ID NO: 546316 - DNA, 19 bp, Mus musculus
  siRNA target sequence for Celsr3 (NM_080437.1,9864-9882).
gtcacctgattcagaagtt

SEQ ID NO: 546317 - DNA, 19 bp, Mus musculus
  siRNA target sequence for Cetn1 (NM_007593.1,457-475).
ccaccttcaggaagtcaaa

SEQ ID NO: 546318 - DNA, 19 bp, Mus musculus
  siRNA target sequence for Cetn1 (NM_007593.1,517-535).
ctgaactcaccgaagatca

SEQ ID NO: 546319 - DNA, 19 bp, Mus musculus
  siRNA target sequence for Cetn1 (NM_007593.1,519-537).
gaactcaccgaagatcaaa

SEQ ID NO: 546320 - DNA, 19 bp, Mus musculus
  siRNA target sequence for Cetn1 (NM_007593.1,620-638).
gagagcacttggctttgaa

SEQ ID NO: 546321 - DNA, 19 bp, Mus musculus
  siRNA target sequence for Cetn1 (NM_007593.1,740-758).
ggccgagaaagataccaaa

SEQ ID NO: 546322 - DNA, 19 bp, Mus musculus
  siRNA target sequence for Cetn1 (NM_007593.1,773-791).
ggctttcaggttgtttgat

SEQ ID NO: 546323 - DNA, 19 bp, Mus musculus
  siRNA target sequence for Cetn1 (NM_007593.1,794-812).
cgacgaaactgggaaaatt

SEQ ID NO: 546324 - DNA, 19 bp, Mus musculus
  siRNA target sequence for Cetn1 (NM_007593.1,795-813).
gacgaaactgggaaaattt

SEQ ID NO: 546325 - DNA, 19 bp, Mus musculus
  siRNA target sequence for Cetn1 (NM_007593.1,932-950).
gtttcttaagatcatgaaa

SEQ ID NO: 546326 - DNA, 19 bp, Mus musculus
  siRNA target sequence for Cetn1 (NM_007593.1,936-954).
cttaagatcatgaaaaaga

SEQ ID NO: 546327 - DNA, 19 bp, Mus musculus
  siRNA target sequence for Cetn2 (NM_019405.5,154-172).
ctgatggaactggaactat

SEQ ID NO: 546328 - DNA, 19 bp, Mus musculus
  siRNA target sequence for Cetn2 (NM_019405.5,510-528).
gagttcctgcgcatcatga

SEQ ID NO: 546329 - DNA, 19 bp, Mus musculus
  siRNA target sequence for Cetn2 (NM_019405.5,516-534).
ctgcgcatcatgaaaaaga

SEQ ID NO: 546330 - DNA, 19 bp, Mus musculus
  siRNA target sequence for Cetn3 (NM_007684.2,64-82).
gagaggtgagcttgtagta

SEQ ID NO: 546331 - DNA, 19 bp, Mus musculus
  siRNA target sequence for Cetn3 (NM_007684.2,69-87).
gtgagcttgtagtagacaa

SEQ ID NO: 546332 - DNA, 19 bp, Mus musculus
  siRNA target sequence for Cetn3 (NM_007684.2,73-91).
gcttgtagtagacaaaaca

SEQ ID NO: 546333 - DNA, 19 bp, Mus musculus
  siRNA target sequence for Cetn3 (NM_007684.2,175-193).
ccaagccatagattatcat

SEQ ID NO: 546334 - DNA, 19 bp, Mus musculus
  siRNA target sequence for Cetn3 (NM_007684.2,179-197).
gccatagattatcatgaat

SEQ ID NO: 546335 - DNA, 19 bp, Mus musculus
  siRNA target sequence for Cetn3 (NM_007684.2,242-260).
gatgtgttgaagattctta

SEQ ID NO: 546336 - DNA, 19 bp, Mus musculus
  siRNA target sequence for Cetn3 (NM_007684.2,386-404).
gacgattcaggaaagataa

SEQ ID NO: 546337 - DNA, 19 bp, Mus musculus
  siRNA target sequence for Cetn3 (NM_007684.2,389-407).
gattcaggaaagataagct

SEQ ID NO: 546338 - DNA, 19 bp, Mus musculus
  siRNA target sequence for Cetn3 (NM_007684.2,400-418).
gataagcttgaggaattta

SEQ ID NO: 546339 - DNA, 19 bp, Mus musculus
  siRNA target sequence for Chga (NM_007693.1,239-257).
gggacaccaaggtgatgaa

SEQ ID NO: 546340 - DNA, 19 bp, Mus musculus
  siRNA target sequence for Chga (NM_007693.1,526-544).
ctctcagaagtgtttgaga

SEQ ID NO: 546341 - DNA, 19 bp, Mus musculus
  siRNA target sequence for Chga (NM_007693.1,966-984).
caaagcgatccagaaagat

SEQ ID NO: 546342 - DNA, 19 bp, Mus musculus
  siRNA target sequence for Chga (NM_007693.1,1154-1172).
gggagctggaacataagca

SEQ ID NO: 546343 - DNA, 19 bp, Mus musculus
  siRNA target sequence for Chga (NM_007693.1,1195-1213).
gagcgtctgtccagagaat

SEQ ID NO: 546344 - DNA, 19 bp, Mus musculus
  siRNA target sequence for Chga (NM_007693.1,1401-1419).
ggaggcccgaagtgacttt

SEQ ID NO: 546345 - DNA, 19 bp, Mus musculus
  siRNA target sequence for Cib1 (NM_011870.2,68-86).
cgggcagtcgcctgtctaa

SEQ ID NO: 546346 - DNA, 19 bp, Mus musculus
  siRNA target sequence for Cib1 (NM_011870.2,146-164).
cccacagacgcttttgtga

SEQ ID NO: 546347 - DNA, 19 bp, Mus musculus
  siRNA target sequence for Cib1 (NM_011870.2,204-222).
gcacacccgagtatcgttt

SEQ ID NO: 546348 - DNA, 19 bp, Mus musculus
  siRNA target sequence for Cib1 (NM_011870.2,361-379).
gcaaccccagacatcaagt

SEQ ID NO: 546349 - DNA, 19 bp, Mus musculus
  siRNA target sequence for Cib1 (NM_011870.2,439-457).
ctgagccagcttgtgaatt

SEQ ID NO: 546350 - DNA, 19 bp, Mus musculus
  siRNA target sequence for Cib1 (NM_011870.2,549-567).
ggatgggaccatcaatctt

SEQ ID NO: 546351 - DNA, 19 bp, Mus musculus
  siRNA target sequence for Cib1 (NM_011870.2,550-568).
gatgggaccatcaatcttt

SEQ ID NO: 546352 - DNA, 19 bp, Mus musculus
  siRNA target sequence for Cib1 (NM_011870.2,588-606).
ctcgcgctcaccagacttt

SEQ ID NO: 546353 - DNA, 19 bp, Mus musculus
  siRNA target sequence for Cib1 (NM_011870.2,601-619).
gactttgccagctccttta

SEQ ID NO: 546354 - DNA, 19 bp, Mus musculus
  siRNA target sequence for Clstn1 (NM_023051.1,181-199).
gtcaccgagaacgataaca

SEQ ID NO: 546355 - DNA, 19 bp, Mus musculus
  siRNA target sequence for Clstn1 (NM_023051.1,218-236).
ccctcatcgccctggataa

SEQ ID NO: 546356 - DNA, 19 bp, Mus musculus
  siRNA target sequence for Clstn1 (NM_023051.1,225-243).
cgccctggataaagattca

SEQ ID NO: 546357 - DNA, 19 bp, Mus musculus
  siRNA target sequence for Clstn1 (NM_023051.1,249-267).
ccgctttgcagagagtttt

SEQ ID NO: 546358 - DNA, 19 bp, Mus musculus
  siRNA target sequence for Clstn1 (NM_023051.1,356-374).
ccacgggtgagggaataat

SEQ ID NO: 546359 - DNA, 19 bp, Mus musculus
  siRNA target sequence for Clstn1 (NM_023051.1,366-384).
gggaataatccggtcaaaa

SEQ ID NO: 546360 - DNA, 19 bp, Mus musculus
  siRNA target sequence for Clstn1 (NM_023051.1,456-474).
cgatggcaccggtgtgaaa

SEQ ID NO: 546361 - DNA, 19 bp, Mus musculus
  siRNA target sequence for Clstn1 (NM_023051.1,457-475).
gatggcaccggtgtgaaaa

SEQ ID NO: 546362 - DNA, 19 bp, Mus musculus
  siRNA target sequence for Clstn1 (NM_023051.1,460-478).
ggcaccggtgtgaaaaagt

SEQ ID NO: 546363 - DNA, 19 bp, Mus musculus
  siRNA target sequence for Clstn1 (NM_023051.1,462-480).
caccggtgtgaaaaagtct

SEQ ID NO: 546364 - DNA, 19 bp, Mus musculus
  siRNA target sequence for Clstn1 (NM_023051.1,682-700).
gtggacaaagacggttata

SEQ ID NO: 546365 - DNA, 19 bp, Mus musculus
  siRNA target sequence for Clstn1 (NM_023051.1,684-702).
ggacaaagacggttatatt

SEQ ID NO: 546366 - DNA, 19 bp, Mus musculus
  siRNA target sequence for Clstn1 (NM_023051.1,691-709).
gacggttatattaagaaca

SEQ ID NO: 546367 - DNA, 19 bp, Mus musculus
  siRNA target sequence for Clstn1 (NM_023051.1,727-745).
ggcaaagagcatcagtata

SEQ ID NO: 546368 - DNA, 19 bp, Mus musculus
  siRNA target sequence for Clstn1 (NM_023051.1,728-746).
gcaaagagcatcagtataa

SEQ ID NO: 546369 - DNA, 19 bp, Mus musculus
  siRNA target sequence for Clstn1 (NM_023051.1,788-806).
ccgaggacgtcctagtgaa

SEQ ID NO: 546370 - DNA, 19 bp, Mus musculus
  siRNA target sequence for Clstn1 (NM_023051.1,792-810).
ggacgtcctagtgaagata

SEQ ID NO: 546371 - DNA, 19 bp, Mus musculus
  siRNA target sequence for Clstn1 (NM_023051.1,793-811).
gacgtcctagtgaagataa

SEQ ID NO: 546372 - DNA, 19 bp, Mus musculus
  siRNA target sequence for Clstn1 (NM_023051.1,851-869).
gcagcagaattgagtatga

SEQ ID NO: 546373 - DNA, 19 bp, Mus musculus
  siRNA target sequence for Clstn1 (NM_023051.1,1179-1197).
gacccttgaccctaaagaa

SEQ ID NO: 546374 - DNA, 19 bp, Mus musculus
  siRNA target sequence for Clstn1 (NM_023051.1,1189-1207).
cctaaagaaccctttacaa

SEQ ID NO: 546375 - DNA, 19 bp, Mus musculus
  siRNA target sequence for Clstn1 (NM_023051.1,1190-1208).
ctaaagaaccctttacaat

SEQ ID NO: 546376 - DNA, 19 bp, Mus musculus
  siRNA target sequence for Clstn1 (NM_023051.1,1265-1283).
gttcggataagacagatat

SEQ ID NO: 546377 - DNA, 19 bp, Mus musculus
  siRNA target sequence for Clstn1 (NM_023051.1,1268-1286).
cggataagacagatatgaa

SEQ ID NO: 546378 - DNA, 19 bp, Mus musculus
  siRNA target sequence for Clstn1 (NM_023051.1,1312-1330).
cacgggtgcaggctagttt

SEQ ID NO: 546379 - DNA, 19 bp, Mus musculus
  siRNA target sequence for Clstn1 (NM_023051.1,1316-1334).
ggtgcaggctagttttcct

SEQ ID NO: 546380 - DNA, 19 bp, Mus musculus
  siRNA target sequence for Clstn1 (NM_023051.1,1348-1366).
ccgtctgaggagaagaaat

SEQ ID NO: 546381 - DNA, 19 bp, Mus musculus
  siRNA target sequence for Clstn1 (NM_023051.1,1509-1527).
cccgcttcatccaaccaaa

SEQ ID NO: 546382 - DNA, 19 bp, Mus musculus
  siRNA target sequence for Clstn1 (NM_023051.1,1510-1528).
ccgcttcatccaaccaaaa

SEQ ID NO: 546383 - DNA, 19 bp, Mus musculus
  siRNA target sequence for Clstn1 (NM_023051.1,1511-1529).
cgcttcatccaaccaaaat

SEQ ID NO: 546384 - DNA, 19 bp, Mus musculus
  siRNA target sequence for Clstn1 (NM_023051.1,1512-1530).
gcttcatccaaccaaaata

SEQ ID NO: 546385 - DNA, 19 bp, Mus musculus
  siRNA target sequence for Clstn1 (NM_023051.1,1516-1534).
catccaaccaaaatagaga

SEQ ID NO: 546386 - DNA, 19 bp, Mus musculus
  siRNA target sequence for Clstn1 (NM_023051.1,1576-1594).
gtggagagtggcaatgaga

SEQ ID NO: 546387 - DNA, 19 bp, Mus musculus
  siRNA target sequence for Clstn1 (NM_023051.1,1696-1714).
gataagaaggtgattgact

SEQ ID NO: 546388 - DNA, 19 bp, Mus musculus
  siRNA target sequence for Clstn1 (NM_023051.1,1894-1912).
ggcatccgcaggctcaaaa

SEQ ID NO: 546389 - DNA, 19 bp, Mus musculus
  siRNA target sequence for Clstn1 (NM_023051.1,1895-1913).
gcatccgcaggctcaaaat

SEQ ID NO: 546390 - DNA, 19 bp, Mus musculus
  siRNA target sequence for Clstn1 (NM_023051.1,1919-1937).
gcaccgtcaagtgtttcaa

SEQ ID NO: 546391 - DNA, 19 bp, Mus musculus
  siRNA target sequence for Clstn1 (NM_023051.1,1973-1991).
gctacgtgatggttttgca

SEQ ID NO: 546392 - DNA, 19 bp, Mus musculus
  siRNA target sequence for Clstn1 (NM_023051.1,1993-2011).
ccggaggagcctaagatca

SEQ ID NO: 546393 - DNA, 19 bp, Mus musculus
  siRNA target sequence for Clstn1 (NM_023051.1,2039-2057).
gcgcagcttctgagtttga

SEQ ID NO: 546394 - DNA, 19 bp, Mus musculus
  siRNA target sequence for Clstn1 (NM_023051.1,2056-2074).
gagagcgcggagggtattt

SEQ ID NO: 546395 - DNA, 19 bp, Mus musculus
  siRNA target sequence for Clstn1 (NM_023051.1,2342-2360).
caagctacgaggaggtttt

SEQ ID NO: 546396 - DNA, 19 bp, Mus musculus
  siRNA target sequence for Clstn1 (NM_023051.1,2398-2416).
ctgctggatcgcaagttca

SEQ ID NO: 546397 - DNA, 19 bp, Mus musculus
  siRNA target sequence for Clstn1 (NM_023051.1,2407-2425).
cgcaagttcaagctcattt

SEQ ID NO: 546398 - DNA, 19 bp, Mus musculus
  siRNA target sequence for Clstn1 (NM_023051.1,2535-2553).
gttcgtccaccctgaacat

SEQ ID NO: 546399 - DNA, 19 bp, Mus musculus
  siRNA target sequence for Clstn2 (NM_022319.2,292-310).
ctcctcgtggcgaaagtca

SEQ ID NO: 546400 - DNA, 19 bp, Mus musculus
  siRNA target sequence for Clstn2 (NM_022319.2,294-312).
cctcgtggcgaaagtcaat

SEQ ID NO: 546401 - DNA, 19 bp, Mus musculus
  siRNA target sequence for Clstn2 (NM_022319.2,295-313).
ctcgtggcgaaagtcaata

SEQ ID NO: 546402 - DNA, 19 bp, Mus musculus
  siRNA target sequence for Clstn2 (NM_022319.2,297-315).
cgtggcgaaagtcaataaa

SEQ ID NO: 546403 - DNA, 19 bp, Mus musculus
  siRNA target sequence for Clstn2 (NM_022319.2,302-320).
cgaaagtcaataaacacaa

SEQ ID NO: 546404 - DNA, 19 bp, Mus musculus
  siRNA target sequence for Clstn2 (NM_022319.2,339-357).
gtatcacggagtcataact

SEQ ID NO: 546405 - DNA, 19 bp, Mus musculus
  siRNA target sequence for Clstn2 (NM_022319.2,389-407).
cactggttgccctggataa

SEQ ID NO: 546406 - DNA, 19 bp, Mus musculus
  siRNA target sequence for Clstn2 (NM_022319.2,421-439).
ccttttgcaggggaaatct

SEQ ID NO: 546407 - DNA, 19 bp, Mus musculus
  siRNA target sequence for Clstn2 (NM_022319.2,475-493).
gaggctgtggtgctcaata

SEQ ID NO: 546408 - DNA, 19 bp, Mus musculus
  siRNA target sequence for Clstn2 (NM_022319.2,478-496).
gctgtggtgctcaataaga

SEQ ID NO: 546409 - DNA, 19 bp, Mus musculus
  siRNA target sequence for Clstn2 (NM_022319.2,481-499).
gtggtgctcaataagacat

SEQ ID NO: 546410 - DNA, 19 bp, Mus musculus
  siRNA target sequence for Clstn2 (NM_022319.2,663-681).
gtttgcacccaccttcaaa

SEQ ID NO: 546411 - DNA, 19 bp, Mus musculus
  siRNA target sequence for Clstn2 (NM_022319.2,705-723).
cacggagggcaagatctat

SEQ ID NO: 546412 - DNA, 19 bp, Mus musculus
  siRNA target sequence for Clstn2 (NM_022319.2,707-725).
cggagggcaagatctatga

SEQ ID NO: 546413 - DNA, 19 bp, Mus musculus
  siRNA target sequence for Clstn2 (NM_022319.2,777-795).
ccagatttgcaactatgaa

SEQ ID NO: 546414 - DNA, 19 bp, Mus musculus
  siRNA target sequence for Clstn2 (NM_022319.2,815-833).
cttttgccattgacagaaa

SEQ ID NO: 546415 - DNA, 19 bp, Mus musculus
  siRNA target sequence for Clstn2 (NM_022319.2,853-871).
gagaagctgagctatgaca

SEQ ID NO: 546416 - DNA, 19 bp, Mus musculus
  siRNA target sequence for Clstn2 (NM_022319.2,892-910).
ctggtaaccgcttatgact

SEQ ID NO: 546417 - DNA, 19 bp, Mus musculus
  siRNA target sequence for Clstn2 (NM_022319.2,1091-1109).
ctgcggagctgcagactaa

SEQ ID NO: 546418 - DNA, 19 bp, Mus musculus
  siRNA target sequence for Clstn2 (NM_022319.2,1093-1111).
gcggagctgcagactaatt

SEQ ID NO: 546419 - DNA, 19 bp, Mus musculus
  siRNA target sequence for Clstn2 (NM_022319.2,1094-1112).
cggagctgcagactaatta

SEQ ID NO: 546420 - DNA, 19 bp, Mus musculus
  siRNA target sequence for Clstn2 (NM_022319.2,1172-1190).
gcgcatcctcgggtatcat

SEQ ID NO: 546421 - DNA, 19 bp, Mus musculus
  siRNA target sequence for Clstn2 (NM_022319.2,1181-1199).
cgggtatcatcgatctctt

SEQ ID NO: 546422 - DNA, 19 bp, Mus musculus
  siRNA target sequence for Clstn2 (NM_022319.2,1341-1359).
caccatgtggatgaaacat

SEQ ID NO: 546423 - DNA, 19 bp, Mus musculus
  siRNA target sequence for Clstn2 (NM_022319.2,1379-1397).
gagccgagaaggaaactat

SEQ ID NO: 546424 - DNA, 19 bp, Mus musculus
  siRNA target sequence for Clstn2 (NM_022319.2,1403-1421).
gtaactcagataaaactga

SEQ ID NO: 546425 - DNA, 19 bp, Mus musculus
  siRNA target sequence for Clstn2 (NM_022319.2,1530-1548).
gaagctggaccagatttgt

SEQ ID NO: 546426 - DNA, 19 bp, Mus musculus
  siRNA target sequence for Clstn2 (NM_022319.2,1536-1554).
ggaccagatttgtgacaaa

SEQ ID NO: 546427 - DNA, 19 bp, Mus musculus
  siRNA target sequence for Clstn2 (NM_022319.2,1540-1558).
cagatttgtgacaaagagt

SEQ ID NO: 546428 - DNA, 19 bp, Mus musculus
  siRNA target sequence for Clstn2 (NM_022319.2,1549-1567).
gacaaagagtggcattact

SEQ ID NO: 546429 - DNA, 19 bp, Mus musculus
  siRNA target sequence for Clstn2 (NM_022319.2,1551-1569).
caaagagtggcattactat

SEQ ID NO: 546430 - DNA, 19 bp, Mus musculus
  siRNA target sequence for Clstn2 (NM_022319.2,1555-1573).
gagtggcattactatgtca

SEQ ID NO: 546431 - DNA, 19 bp, Mus musculus
  siRNA target sequence for Clstn2 (NM_022319.2,1559-1577).
ggcattactatgtcatcaa

SEQ ID NO: 546432 - DNA, 19 bp, Mus musculus
  siRNA target sequence for Clstn2 (NM_022319.2,1589-1607).
ctgtggttaccctgtacat

SEQ ID NO: 546433 - DNA, 19 bp, Mus musculus
  siRNA target sequence for Clstn2 (NM_022319.2,1605-1623).
catggatggagcaacatat

SEQ ID NO: 546434 - DNA, 19 bp, Mus musculus
  siRNA target sequence for Clstn2 (NM_022319.2,1613-1631).
gagcaacatatgaaccata

SEQ ID NO: 546435 - DNA, 19 bp, Mus musculus
  siRNA target sequence for Clstn2 (NM_022319.2,1653-1671).
cattcatccatctcacata

SEQ ID NO: 546436 - DNA, 19 bp, Mus musculus
  siRNA target sequence for Clstn2 (NM_022319.2,1723-1741).
ccacggtttgcacaatttt

SEQ ID NO: 546437 - DNA, 19 bp, Mus musculus
  siRNA target sequence for Clstn2 (NM_022319.2,1724-1742).
cacggtttgcacaattttt

SEQ ID NO: 546438 - DNA, 19 bp, Mus musculus
  siRNA target sequence for Clstn2 (NM_022319.2,1751-1769).
gccttgccagtctcacaat

SEQ ID NO: 546439 - DNA, 19 bp, Mus musculus
  siRNA target sequence for Clstn2 (NM_022319.2,1766-1784).
caatccgtcctggcaaaat

SEQ ID NO: 546440 - DNA, 19 bp, Mus musculus
  siRNA target sequence for Clstn2 (NM_022319.2,1828-1846).
gggctggatattaattcct

SEQ ID NO: 546441 - DNA, 19 bp, Mus musculus
  siRNA target sequence for Clstn2 (NM_022319.2,1829-1847).
ggctggatattaattcctt

SEQ ID NO: 546442 - DNA, 19 bp, Mus musculus
  siRNA target sequence for Clstn2 (NM_022319.2,1853-1871).
gccttgggcgagggataaa

SEQ ID NO: 546443 - DNA, 19 bp, Mus musculus
  siRNA target sequence for Clstn2 (NM_022319.2,1855-1873).
cttgggcgagggataaagt

SEQ ID NO: 546444 - DNA, 19 bp, Mus musculus
  siRNA target sequence for Clstn2 (NM_022319.2,1859-1877).
ggcgagggataaagtatca

SEQ ID NO: 546445 - DNA, 19 bp, Mus musculus
  siRNA target sequence for Clstn2 (NM_022319.2,1861-1879).
cgagggataaagtatcact

SEQ ID NO: 546446 - DNA, 19 bp, Mus musculus
  siRNA target sequence for Clstn2 (NM_022319.2,1862-1880).
gagggataaagtatcactt

SEQ ID NO: 546447 - DNA, 19 bp, Mus musculus
  siRNA target sequence for Clstn2 (NM_022319.2,1865-1883).
ggataaagtatcacttcaa

SEQ ID NO: 546448 - DNA, 19 bp, Mus musculus
  siRNA target sequence for Clstn2 (NM_022319.2,1905-1923).
gatggaaggcgatgacatt

SEQ ID NO: 546449 - DNA, 19 bp, Mus musculus
  siRNA target sequence for Clstn2 (NM_022319.2,1936-1954).
cgagccctccagaaagtct

SEQ ID NO: 546450 - DNA, 19 bp, Mus musculus
  siRNA target sequence for Clstn2 (NM_022319.2,2066-2084).
cctacatcatggtcttaca

SEQ ID NO: 546451 - DNA, 19 bp, Mus musculus
  siRNA target sequence for Clstn2 (NM_022319.2,2176-2194).
cctgacatcaagattgtga

SEQ ID NO: 546452 - DNA, 19 bp, Mus musculus
  siRNA target sequence for Clstn2 (NM_022319.2,2266-2284).
gaagaaatgctacacaatt

SEQ ID NO: 546453 - DNA, 19 bp, Mus musculus
  siRNA target sequence for Clstn2 (NM_022319.2,2377-2395).
cttgatgccaccaactcaa

SEQ ID NO: 546454 - DNA, 19 bp, Mus musculus
  siRNA target sequence for Clstn2 (NM_022319.2,2497-2515).
cggaggttccggatcaagt

SEQ ID NO: 546455 - DNA, 19 bp, Mus musculus
  siRNA target sequence for Clstn2 (NM_022319.2,2524-2542).
ctcaacgggcgttacacta

SEQ ID NO: 546456 - DNA, 19 bp, Mus musculus
  siRNA target sequence for Clstn2 (NM_022319.2,2529-2547).
cgggcgttacactagcaat

SEQ ID NO: 546457 - DNA, 19 bp, Mus musculus
  siRNA target sequence for Clstn2 (NM_022319.2,2653-2671).
cctgagacccggagtagta

SEQ ID NO: 546458 - DNA, 19 bp, Mus musculus
  siRNA target sequence for Clstn2 (NM_022319.2,2700-2718).
cgccactgtcgtcatcatt

SEQ ID NO: 546459 - DNA, 19 bp, Mus musculus
  siRNA target sequence for Clstn2 (NM_022319.2,2727-2745).
gtgcatgctagtgtttgtt

SEQ ID NO: 546460 - DNA, 19 bp, Mus musculus
  siRNA target sequence for Clstn2 (NM_022319.2,2729-2747).
gcatgctagtgtttgttgt

SEQ ID NO: 546461 - DNA, 19 bp, Mus musculus
  siRNA target sequence for Clstn2 (NM_022319.2,2862-2880).
ccctatggagaaacatgaa

SEQ ID NO: 546462 - DNA, 19 bp, Mus musculus
  siRNA target sequence for Clstn2 (NM_022319.2,3071-3089).
gagtcataaacatttggaa

SEQ ID NO: 546463 - DNA, 19 bp, Mus musculus
  siRNA target sequence for Clstn3 (NM_153508.2,273-291).
gcctctctgcttcaaatca

SEQ ID NO: 546464 - DNA, 19 bp, Mus musculus
  siRNA target sequence for Clstn3 (NM_153508.2,336-354).
gagtaccagggcattgtca

SEQ ID NO: 546465 - DNA, 19 bp, Mus musculus
  siRNA target sequence for Clstn3 (NM_153508.2,377-395).
gttgaacccaccactcttt

SEQ ID NO: 546466 - DNA, 19 bp, Mus musculus
  siRNA target sequence for Clstn3 (NM_153508.2,392-410).
ctttgccttggataaagat

SEQ ID NO: 546467 - DNA, 19 bp, Mus musculus
  siRNA target sequence for Clstn3 (NM_153508.2,595-613).
ccgatggcaccaataccaa

SEQ ID NO: 546468 - DNA, 19 bp, Mus musculus
  siRNA target sequence for Clstn3 (NM_153508.2,635-653).
gcatgttcgggtcaatgat

SEQ ID NO: 546469 - DNA, 19 bp, Mus musculus
  siRNA target sequence for Clstn3 (NM_153508.2,716-734).
gctgtatgatcggatctta

SEQ ID NO: 546470 - DNA, 19 bp, Mus musculus
  siRNA target sequence for Clstn3 (NM_153508.2,814-832).
ctttcctcattgacaatga

SEQ ID NO: 546471 - DNA, 19 bp, Mus musculus
  siRNA target sequence for Clstn3 (NM_153508.2,917-935).
gaagcgagcggcagatgat

SEQ ID NO: 546472 - DNA, 19 bp, Mus musculus
  siRNA target sequence for Clstn3 (NM_153508.2,1018-1036).
ccgggagcttggctttgtt

SEQ ID NO: 546473 - DNA, 19 bp, Mus musculus
  siRNA target sequence for Clstn3 (NM_153508.2,1124-1142).
ctgcgaccgagacaactat

SEQ ID NO: 546474 - DNA, 19 bp, Mus musculus
  siRNA target sequence for Clstn3 (NM_153508.2,1127-1145).
cgaccgagacaactattca

SEQ ID NO: 546475 - DNA, 19 bp, Mus musculus
  siRNA target sequence for Clstn3 (NM_153508.2,1492-1510).
gcagaattgcctttctcta

SEQ ID NO: 546476 - DNA, 19 bp, Mus musculus
  siRNA target sequence for Clstn3 (NM_153508.2,1610-1628).
ccccacggtcacactgtat

SEQ ID NO: 546477 - DNA, 19 bp, Mus musculus
  siRNA target sequence for Clstn3 (NM_153508.2,1611-1629).
cccacggtcacactgtata

SEQ ID NO: 546478 - DNA, 19 bp, Mus musculus
  siRNA target sequence for Clstn3 (NM_153508.2,1613-1631).
cacggtcacactgtatact

SEQ ID NO: 546479 - DNA, 19 bp, Mus musculus
  siRNA target sequence for Clstn3 (NM_153508.2,1615-1633).
cggtcacactgtatactga

SEQ ID NO: 546480 - DNA, 19 bp, Mus musculus
  siRNA target sequence for Clstn3 (NM_153508.2,1694-1712).
ggaacctgcactcatgatt

SEQ ID NO: 546481 - DNA, 19 bp, Mus musculus
  siRNA target sequence for Clstn3 (NM_153508.2,1890-1908).
cgggaggggctggactata

SEQ ID NO: 546482 - DNA, 19 bp, Mus musculus
  siRNA target sequence for Clstn3 (NM_153508.2,2081-2099).
cgctgtcaagtgctttagt

SEQ ID NO: 546483 - DNA, 19 bp, Mus musculus
  siRNA target sequence for Clstn3 (NM_153508.2,2236-2254).
ccttgttccccgatcttca

SEQ ID NO: 546484 - DNA, 19 bp, Mus musculus
  siRNA target sequence for Clstn3 (NM_153508.2,2326-2344).
cacgcatgtcagatgagat

SEQ ID NO: 546485 - DNA, 19 bp, Mus musculus
  siRNA target sequence for Clstn3 (NM_153508.2,2329-2347).
gcatgtcagatgagattgt

SEQ ID NO: 546486 - DNA, 19 bp, Mus musculus
  siRNA target sequence for Clstn3 (NM_153508.2,2330-2348).
catgtcagatgagattgta

SEQ ID NO: 546487 - DNA, 19 bp, Mus musculus
  siRNA target sequence for Clstn3 (NM_153508.2,2354-2372).
cttggacggctgtgagatt

SEQ ID NO: 546488 - DNA, 19 bp, Mus musculus
  siRNA target sequence for Clstn3 (NM_153508.2,2357-2375).
ggacggctgtgagatttct

SEQ ID NO: 546489 - DNA, 19 bp, Mus musculus
  siRNA target sequence for Clstn3 (NM_153508.2,2519-2537).
cctgaggcaggctcgttat

SEQ ID NO: 546490 - DNA, 19 bp, Mus musculus
  siRNA target sequence for Clstn3 (NM_153508.2,2556-2574).
gccctttatgccaggaaat

SEQ ID NO: 546491 - DNA, 19 bp, Mus musculus
  siRNA target sequence for Clstn3 (NM_153508.2,2604-2622).
cgatactccagcaacgaat

SEQ ID NO: 546492 - DNA, 19 bp, Mus musculus
  siRNA target sequence for Clstn3 (NM_153508.2,2605-2623).
gatactccagcaacgaatt

SEQ ID NO: 546493 - DNA, 19 bp, Mus musculus
  siRNA target sequence for Clstn3 (NM_153508.2,2611-2629).
ccagcaacgaattcattgt

SEQ ID NO: 546494 - DNA, 19 bp, Mus musculus
  siRNA target sequence for Clstn3 (NM_153508.2,2779-2797).
gtgctgcgactctcatcat

SEQ ID NO: 546495 - DNA, 19 bp, Mus musculus
  siRNA target sequence for Clstn3 (NM_153508.2,2943-2961).
gctctcaccattattgtca

SEQ ID NO: 546496 - DNA, 19 bp, Mus musculus
  siRNA target sequence for Clstn3 (NM_153508.2,2950-2968).
ccattattgtcaatcctat

SEQ ID NO: 546497 - DNA, 19 bp, Mus musculus
  siRNA target sequence for Clta (NM_016760.1,337-355).
gtgatgaatggtgaatact

SEQ ID NO: 546498 - DNA, 19 bp, Mus musculus
  siRNA target sequence for Clta (NM_016760.1,381-399).
cagttacgcagccatttca

SEQ ID NO: 546499 - DNA, 19 bp, Mus musculus
  siRNA target sequence for Clta (NM_016760.1,659-677).
cctttgtaaacgacattga

SEQ ID NO: 546500 - DNA, 19 bp, Mus musculus
  siRNA target sequence for Comp (NM_016685.1,709-727).
ccagcccgtgccatgagaa

SEQ ID NO: 546501 - DNA, 19 bp, Mus musculus
  siRNA target sequence for Comp (NM_016685.1,710-728).
cagcccgtgccatgagaaa

SEQ ID NO: 546502 - DNA, 19 bp, Mus musculus
  siRNA target sequence for Comp (NM_016685.1,714-732).
ccgtgccatgagaaagcaa

SEQ ID NO: 546503 - DNA, 19 bp, Mus musculus
  siRNA target sequence for Comp (NM_016685.1,715-733).
cgtgccatgagaaagcaaa

SEQ ID NO: 546504 - DNA, 19 bp, Mus musculus
  siRNA target sequence for Comp (NM_016685.1,818-836).
ggacctggacggttttcct

SEQ ID NO: 546505 - DNA, 19 bp, Mus musculus
  siRNA target sequence for Comp (NM_016685.1,971-989).
ccctaacgagcaagacaat

SEQ ID NO: 546506 - DNA, 19 bp, Mus musculus
  siRNA target sequence for Comp (NM_016685.1,972-990).
cctaacgagcaagacaatt

SEQ ID NO: 546507 - DNA, 19 bp, Mus musculus
  siRNA target sequence for Comp (NM_016685.1,1017-1035).
cgtaactcggacagtgata

SEQ ID NO: 546508 - DNA, 19 bp, Mus musculus
  siRNA target sequence for Comp (NM_016685.1,1018-1036).
gtaactcggacagtgataa

SEQ ID NO: 546509 - DNA, 19 bp, Mus musculus
  siRNA target sequence for Comp (NM_016685.1,1058-1076).
ctgccggtccaagaagaat

SEQ ID NO: 546510 - DNA, 19 bp, Mus musculus
  siRNA target sequence for Comp (NM_016685.1,1060-1078).
gccggtccaagaagaatga

SEQ ID NO: 546511 - DNA, 19 bp, Mus musculus
  siRNA target sequence for Comp (NM_016685.1,1286-1304).
gggtgatgcctgtgatagt

SEQ ID NO: 546512 - DNA, 19 bp, Mus musculus
  siRNA target sequence for Comp (NM_016685.1,1376-1394).
gcaggactcagatcatgat

SEQ ID NO: 546513 - DNA, 19 bp, Mus musculus
  siRNA target sequence for Comp (NM_016685.1,1532-1550).
cgatgctgacaaggttata

SEQ ID NO: 546514 - DNA, 19 bp, Mus musculus
  siRNA target sequence for Comp (NM_016685.1,1606-1624).
ccttccagacggttgtgtt

SEQ ID NO: 546515 - DNA, 19 bp, Mus musculus
  siRNA target sequence for Comp (NM_016685.1,1751-1769).
cttcgagggcacattccat

SEQ ID NO: 546516 - DNA, 19 bp, Mus musculus
  siRNA target sequence for Comp (NM_016685.1,1755-1773).
gagggcacattccatgtaa

SEQ ID NO: 546517 - DNA, 19 bp, Mus musculus
  siRNA target sequence for Crb1 (NM_133239.1,181-199).
cactgctcatctgcataaa

SEQ ID NO: 546518 - DNA, 19 bp, Mus musculus
  siRNA target sequence for Crb1 (NM_133239.1,243-261).
ccttgccaaaacaattcta

SEQ ID NO: 546519 - DNA, 19 bp, Mus musculus
  siRNA target sequence for Crb1 (NM_133239.1,437-455).
cgggctgaactgtgaaact

SEQ ID NO: 546520 - DNA, 19 bp, Mus musculus
  siRNA target sequence for Crb1 (NM_133239.1,904-922).
gtgaactcagcgttaatga

SEQ ID NO: 546521 - DNA, 19 bp, Mus musculus
  siRNA target sequence for Crb1 (NM_133239.1,1016-1034).
gcactgtgagtccttgatt

SEQ ID NO: 546522 - DNA, 19 bp, Mus musculus
  siRNA target sequence for Crb1 (NM_133239.1,1061-1079).
caacgacgcgacatgtgaa

SEQ ID NO: 546523 - DNA, 19 bp, Mus musculus
  siRNA target sequence for Crb1 (NM_133239.1,1064-1082).
cgacgcgacatgtgaagat

SEQ ID NO: 546524 - DNA, 19 bp, Mus musculus
  siRNA target sequence for Crb1 (NM_133239.1,1067-1085).
cgcgacatgtgaagatact

SEQ ID NO: 546525 - DNA, 19 bp, Mus musculus
  siRNA target sequence for Crb1 (NM_133239.1,1069-1087).
cgacatgtgaagatactgt

SEQ ID NO: 546526 - DNA, 19 bp, Mus musculus
  siRNA target sequence for Crb1 (NM_133239.1,1204-1222).
cagagggtctatatggaaa

SEQ ID NO: 546527 - DNA, 19 bp, Mus musculus
  siRNA target sequence for Crb1 (NM_133239.1,1208-1226).
gggtctatatggaaacact

SEQ ID NO: 546528 - DNA, 19 bp, Mus musculus
  siRNA target sequence for Crb1 (NM_133239.1,1265-1283).
gggctatgtgtgtatctgt

SEQ ID NO: 546529 - DNA, 19 bp, Mus musculus
  siRNA target sequence for Crb1 (NM_133239.1,1337-1355).
gcacccttgcctaaatggt

SEQ ID NO: 546530 - DNA, 19 bp, Mus musculus
  siRNA target sequence for Crb1 (NM_133239.1,1346-1364).
cctaaatggtggtacttgt

SEQ ID NO: 546531 - DNA, 19 bp, Mus musculus
  siRNA target sequence for Crb1 (NM_133239.1,1398-1416).
ccctttgatgacacttcta

SEQ ID NO: 546532 - DNA, 19 bp, Mus musculus
  siRNA target sequence for Crb1 (NM_133239.1,1407-1425).
gacacttctaggacatttt

SEQ ID NO: 546533 - DNA, 19 bp, Mus musculus
  siRNA target sequence for Crb1 (NM_133239.1,1409-1427).
cacttctaggacattttat

SEQ ID NO: 546534 - DNA, 19 bp, Mus musculus
  siRNA target sequence for Crb1 (NM_133239.1,1479-1497).
ctgaacaatggaaaatgta

SEQ ID NO: 546535 - DNA, 19 bp, Mus musculus
  siRNA target sequence for Crb1 (NM_133239.1,1515-1533).
ggccagcatggattcactt

SEQ ID NO: 546536 - DNA, 19 bp, Mus musculus
  siRNA target sequence for Crb1 (NM_133239.1,1635-1653).
ggcatagggccagaatgta

SEQ ID NO: 546537 - DNA, 19 bp, Mus musculus
  siRNA target sequence for Crb1 (NM_133239.1,1636-1654).
gcatagggccagaatgtaa

SEQ ID NO: 546538 - DNA, 19 bp, Mus musculus
  siRNA target sequence for Crb1 (NM_133239.1,1645-1663).
cagaatgtaacatatcctt

SEQ ID NO: 546539 - DNA, 19 bp, Mus musculus
  siRNA target sequence for Crb1 (NM_133239.1,1664-1682).
gaggtttcacactgttcaa

SEQ ID NO: 546540 - DNA, 19 bp, Mus musculus
  siRNA target sequence for Crb1 (NM_133239.1,1746-1764).
ggttgtgttcacttatcaa

SEQ ID NO: 546541 - DNA, 19 bp, Mus musculus
  siRNA target sequence for Crb1 (NM_133239.1,1830-1848).
catttcgtggaggtaacaa

SEQ ID NO: 546542 - DNA, 19 bp, Mus musculus
  siRNA target sequence for Crb1 (NM_133239.1,1841-1859).
ggtaacaatcgcagaaact

SEQ ID NO: 546543 - DNA, 19 bp, Mus musculus
  siRNA target sequence for Crb1 (NM_133239.1,1912-1930).
cttctgttccagttgagaa

SEQ ID NO: 546544 - DNA, 19 bp, Mus musculus
  siRNA target sequence for Crb1 (NM_133239.1,1915-1933).
ctgttccagttgagaatca

SEQ ID NO: 546545 - DNA, 19 bp, Mus musculus
  siRNA target sequence for Crb1 (NM_133239.1,1926-1944).
gagaatcatcaatcaatat

SEQ ID NO: 546546 - DNA, 19 bp, Mus musculus
  siRNA target sequence for Crb1 (NM_133239.1,1928-1946).
gaatcatcaatcaatatgt

SEQ ID NO: 546547 - DNA, 19 bp, Mus musculus
  siRNA target sequence for Crb1 (NM_133239.1,2005-2023).
ctgtgcttaacatctataa

SEQ ID NO: 546548 - DNA, 19 bp, Mus musculus
  siRNA target sequence for Crb1 (NM_133239.1,2057-2075).
ccaagacattagatttgat

SEQ ID NO: 546549 - DNA, 19 bp, Mus musculus
  siRNA target sequence for Crb1 (NM_133239.1,2058-2076).
caagacattagatttgatt

SEQ ID NO: 546550 - DNA, 19 bp, Mus musculus
  siRNA target sequence for Crb1 (NM_133239.1,2107-2125).
ctggcctgtcatcaaatgt

SEQ ID NO: 546551 - DNA, 19 bp, Mus musculus
  siRNA target sequence for Crb1 (NM_133239.1,2109-2127).
ggcctgtcatcaaatgtta

SEQ ID NO: 546552 - DNA, 19 bp, Mus musculus
  siRNA target sequence for Crb1 (NM_133239.1,2110-2128).
gcctgtcatcaaatgttaa

SEQ ID NO: 546553 - DNA, 19 bp, Mus musculus
  siRNA target sequence for Crb1 (NM_133239.1,2179-2197).
gaggacgctgcatcaactt

SEQ ID NO: 546554 - DNA, 19 bp, Mus musculus
  siRNA target sequence for Crb1 (NM_133239.1,2181-2199).
ggacgctgcatcaacttgt

SEQ ID NO: 546555 - DNA, 19 bp, Mus musculus
  siRNA target sequence for Crb1 (NM_133239.1,2242-2260).
ccaactgcctgaaagagta

SEQ ID NO: 546556 - DNA, 19 bp, Mus musculus
  siRNA target sequence for Crb1 (NM_133239.1,2246-2264).
ctgcctgaaagagtatgta

SEQ ID NO: 546557 - DNA, 19 bp, Mus musculus
  siRNA target sequence for Crb1 (NM_133239.1,2258-2276).
gtatgtagcgggaagattt

SEQ ID NO: 546558 - DNA, 19 bp, Mus musculus
  siRNA target sequence for Crb1 (NM_133239.1,2296-2314).
gatatgcggcctttagtgt

SEQ ID NO: 546559 - DNA, 19 bp, Mus musculus
  siRNA target sequence for Crb1 (NM_133239.1,2302-2320).
cggcctttagtgttaatga

SEQ ID NO: 546560 - DNA, 19 bp, Mus musculus
  siRNA target sequence for Crb1 (NM_133239.1,2304-2322).
gcctttagtgttaatgata

SEQ ID NO: 546561 - DNA, 19 bp, Mus musculus
  siRNA target sequence for Crb1 (NM_133239.1,2494-2512).
gtgatggaaatgttcactt

SEQ ID NO: 546562 - DNA, 19 bp, Mus musculus
  siRNA target sequence for Crb1 (NM_133239.1,2496-2514).
gatggaaatgttcacttaa

SEQ ID NO: 546563 - DNA, 19 bp, Mus musculus
  siRNA target sequence for Crb1 (NM_133239.1,2505-2523).
gttcacttaatatctttga

SEQ ID NO: 546564 - DNA, 19 bp, Mus musculus
  siRNA target sequence for Crb1 (NM_133239.1,2538-2556).
gaaattgaactgtatcagt

SEQ ID NO: 546565 - DNA, 19 bp, Mus musculus
  siRNA target sequence for Crb1 (NM_133239.1,2586-2604).
cctacatggacaattcgaa

SEQ ID NO: 546566 - DNA, 19 bp, Mus musculus
  siRNA target sequence for Crb1 (NM_133239.1,2602-2620).
gaagaggagacgtcatctt

SEQ ID NO: 546567 - DNA, 19 bp, Mus musculus
  siRNA target sequence for Crb1 (NM_133239.1,2605-2623).
gaggagacgtcatcttcat

SEQ ID NO: 546568 - DNA, 19 bp, Mus musculus
  siRNA target sequence for Crb1 (NM_133239.1,2645-2663).
gaagactgaagtttatggt

SEQ ID NO: 546569 - DNA, 19 bp, Mus musculus
  siRNA target sequence for Crb1 (NM_133239.1,2672-2690).
caaaggctgtgttcaagat

SEQ ID NO: 546570 - DNA, 19 bp, Mus musculus
  siRNA target sequence for Crb1 (NM_133239.1,2682-2700).
gttcaagatgtcagattaa

SEQ ID NO: 546571 - DNA, 19 bp, Mus musculus
  siRNA target sequence for Crb1 (NM_133239.1,2704-2722).
gccagactctggaattctt

SEQ ID NO: 546572 - DNA, 19 bp, Mus musculus
  siRNA target sequence for Crb1 (NM_133239.1,2743-2761).
catacgatgacccaattct

SEQ ID NO: 546573 - DNA, 19 bp, Mus musculus
  siRNA target sequence for Crb1 (NM_133239.1,2784-2802).
cccggagacaacacatgta

SEQ ID NO: 546574 - DNA, 19 bp, Mus musculus
  siRNA target sequence for Crb1 (NM_133239.1,2861-2879).
ctcctgccctacaaacaca

SEQ ID NO: 546575 - DNA, 19 bp, Mus musculus
  siRNA target sequence for Crb1 (NM_133239.1,2952-2970).
ctccctcaagggtttgaat

SEQ ID NO: 546576 - DNA, 19 bp, Mus musculus
  siRNA target sequence for Crb1 (NM_133239.1,2955-2973).
cctcaagggtttgaatgta

SEQ ID NO: 546577 - DNA, 19 bp, Mus musculus
  siRNA target sequence for Crb1 (NM_133239.1,2971-2989).
gtatcgcaaacgctgtttt

SEQ ID NO: 546578 - DNA, 19 bp, Mus musculus
  siRNA target sequence for Crb1 (NM_133239.1,2982-3000).
gctgttttcagcggattaa

SEQ ID NO: 546579 - DNA, 19 bp, Mus musculus
  siRNA target sequence for Crb1 (NM_133239.1,2985-3003).
gttttcagcggattaagca

SEQ ID NO: 546580 - DNA, 19 bp, Mus musculus
  siRNA target sequence for Crb1 (NM_133239.1,3042-3060).
gaactcaccaatatcacat

SEQ ID NO: 546581 - DNA, 19 bp, Mus musculus
  siRNA target sequence for Crb1 (NM_133239.1,3047-3065).
caccaatatcacatttgct

SEQ ID NO: 546582 - DNA, 19 bp, Mus musculus
  siRNA target sequence for Crb1 (NM_133239.1,3049-3067).
ccaatatcacatttgcttt

SEQ ID NO: 546583 - DNA, 19 bp, Mus musculus
  siRNA target sequence for Crb1 (NM_133239.1,3144-3162).
gccagattattctttcaat

SEQ ID NO: 546584 - DNA, 19 bp, Mus musculus
  siRNA target sequence for Crb1 (NM_133239.1,3145-3163).
ccagattattctttcaatt

SEQ ID NO: 546585 - DNA, 19 bp, Mus musculus
  siRNA target sequence for Crb1 (NM_133239.1,3202-3220).
gttcccaattggtgaatga

SEQ ID NO: 546586 - DNA, 19 bp, Mus musculus
  siRNA target sequence for Crb1 (NM_133239.1,3299-3317).
ccagacaccctttgtgata

SEQ ID NO: 546587 - DNA, 19 bp, Mus musculus
  siRNA target sequence for Crb1 (NM_133239.1,3302-3320).
gacaccctttgtgataagt

SEQ ID NO: 546588 - DNA, 19 bp, Mus musculus
  siRNA target sequence for Crb1 (NM_133239.1,3304-3322).
caccctttgtgataagtga

SEQ ID NO: 546589 - DNA, 19 bp, Mus musculus
  siRNA target sequence for Crb1 (NM_133239.1,3308-3326).
ctttgtgataagtgaagtt

SEQ ID NO: 546590 - DNA, 19 bp, Mus musculus
  siRNA target sequence for Crb1 (NM_133239.1,3331-3349).
ctggaagcctgaacttttt

SEQ ID NO: 546591 - DNA, 19 bp, Mus musculus
  siRNA target sequence for Crb1 (NM_133239.1,3344-3362).
ctttttgaaggacaataca

SEQ ID NO: 546592 - DNA, 19 bp, Mus musculus
  siRNA target sequence for Crb1 (NM_133239.1,3353-3371).
ggacaatacagacatctat

SEQ ID NO: 546593 - DNA, 19 bp, Mus musculus
  siRNA target sequence for Crb1 (NM_133239.1,3415-3433).
gtctgagcacaatagagat

SEQ ID NO: 546594 - DNA, 19 bp, Mus musculus
  siRNA target sequence for Crb1 (NM_133239.1,3431-3449).
gattggaggcatatatctt

SEQ ID NO: 546595 - DNA, 19 bp, Mus musculus
  siRNA target sequence for Crb1 (NM_133239.1,3435-3453).
ggaggcatatatctttctt

SEQ ID NO: 546596 - DNA, 19 bp, Mus musculus
  siRNA target sequence for Crb1 (NM_133239.1,3485-3503).
gcctcaggaagagcaattt

SEQ ID NO: 546597 - DNA, 19 bp, Mus musculus
  siRNA target sequence for Crb1 (NM_133239.1,3487-3505).
ctcaggaagagcaatttct

SEQ ID NO: 546598 - DNA, 19 bp, Mus musculus
  siRNA target sequence for Crb1 (NM_133239.1,3495-3513).
gagcaatttctcaaagttt

SEQ ID NO: 546599 - DNA, 19 bp, Mus musculus
  siRNA target sequence for Crb1 (NM_133239.1,3497-3515).
gcaatttctcaaagtttct

SEQ ID NO: 546600 - DNA, 19 bp, Mus musculus
  siRNA target sequence for Crb1 (NM_133239.1,3762-3780).
gaggtggatgtagacaatt

SEQ ID NO: 546601 - DNA, 19 bp, Mus musculus
  siRNA target sequence for Crb1 (NM_133239.1,3980-3998).
gtgctggccaggtttcact

SEQ ID NO: 546602 - DNA, 19 bp, Mus musculus
  siRNA target sequence for Crb1 (NM_133239.1,4168-4186).
ctgttggctccggaacttt

SEQ ID NO: 546603 - DNA, 19 bp, Mus musculus
  siRNA target sequence for Crb1 (NM_133239.1,4288-4306).
ctggccctcgagtggaaat

SEQ ID NO: 546604 - DNA, 19 bp, Mus musculus
  siRNA target sequence for Crb1 (NM_133239.1,4290-4308).
ggccctcgagtggaaatgt

SEQ ID NO: 546605 - DNA, 19 bp, Mus musculus
  siRNA target sequence for Creld1 (NM_133930.1,566-584).
gagaagttgtccaaataca

SEQ ID NO: 546606 - DNA, 19 bp, Mus musculus
  siRNA target sequence for Creld1 (NM_133930.1,916-934).
gtgtggccttggctacttt

SEQ ID NO: 546607 - DNA, 19 bp, Mus musculus
  siRNA target sequence for Creld1 (NM_133930.1,918-936).
gtggccttggctactttga

SEQ ID NO: 546608 - DNA, 19 bp, Mus musculus
  siRNA target sequence for Creld1 (NM_133930.1,961-979).
ggtatgttcggcgtgtttt

SEQ ID NO: 546609 - DNA, 19 bp, Mus musculus
  siRNA target sequence for Creld1 (NM_133930.1,1187-1205).
gggccagggcgctgcaaaa

SEQ ID NO: 546610 - DNA, 19 bp, Mus musculus
  siRNA target sequence for Creld1 (NM_133930.1,1188-1206).
ggccagggcgctgcaaaaa

SEQ ID NO: 546611 - DNA, 19 bp, Mus musculus
  siRNA target sequence for Creld1 (NM_133930.1,1190-1208).
ccagggcgctgcaaaaagt

SEQ ID NO: 546612 - DNA, 19 bp, Mus musculus
  siRNA target sequence for Creld1 (NM_133930.1,1283-1301).
gagaatgagaagtgtgaaa

SEQ ID NO: 546613 - DNA, 19 bp, Mus musculus
  siRNA target sequence for Crtac1 (NM_145123.2,315-333).
gcgcagctcaccctactat

SEQ ID NO: 546614 - DNA, 19 bp, Mus musculus
  siRNA target sequence for Crtac1 (NM_145123.2,394-412).
ggccgtgaggagatctact

SEQ ID NO: 546615 - DNA, 19 bp, Mus musculus
  siRNA target sequence for Crtac1 (NM_145123.2,395-413).
gccgtgaggagatctactt

SEQ ID NO: 546616 - DNA, 19 bp, Mus musculus
  siRNA target sequence for Crtac1 (NM_145123.2,396-414).
ccgtgaggagatctacttt

SEQ ID NO: 546617 - DNA, 19 bp, Mus musculus
  siRNA target sequence for Crtac1 (NM_145123.2,400-418).
gaggagatctactttctca

SEQ ID NO: 546618 - DNA, 19 bp, Mus musculus
  siRNA target sequence for Crtac1 (NM_145123.2,631-649).
cctgatgccctcatcgaaa

SEQ ID NO: 546619 - DNA, 19 bp, Mus musculus
  siRNA target sequence for Crtac1 (NM_145123.2,632-650).
ctgatgccctcatcgaaat

SEQ ID NO: 546620 - DNA, 19 bp, Mus musculus
  siRNA target sequence for Crtac1 (NM_145123.2,767-785).
gcagcagtgcctcagatat

SEQ ID NO: 546621 - DNA, 19 bp, Mus musculus
  siRNA target sequence for Crtac1 (NM_145123.2,828-846).
ccaaggcaacggtaccttt

SEQ ID NO: 546622 - DNA, 19 bp, Mus musculus
  siRNA target sequence for Crtac1 (NM_145123.2,918-936).
caaccgtgacggcaaagta

SEQ ID NO: 546623 - DNA, 19 bp, Mus musculus
  siRNA target sequence for Crtac1 (NM_145123.2,923-941).
gtgacggcaaagtagacat

SEQ ID NO: 546624 - DNA, 19 bp, Mus musculus
  siRNA target sequence for Crtac1 (NM_145123.2,962-980).
gcccacatcgcctctatct

SEQ ID NO: 546625 - DNA, 19 bp, Mus musculus
  siRNA target sequence for Crtac1 (NM_145123.2,963-981).
cccacatcgcctctatcta

SEQ ID NO: 546626 - DNA, 19 bp, Mus musculus
  siRNA target sequence for Crtac1 (NM_145123.2,965-983).
cacatcgcctctatctaca

SEQ ID NO: 546627 - DNA, 19 bp, Mus musculus
  siRNA target sequence for Crtac1 (NM_145123.2,1047-1065).
ccctgtccggactgtcatt

SEQ ID NO: 546628 - DNA, 19 bp, Mus musculus
  siRNA target sequence for Crtac1 (NM_145123.2,1433-1451).
cgcacctacggatcattga

SEQ ID NO: 546629 - DNA, 19 bp, Mus musculus
  siRNA target sequence for Crtac1 (NM_145123.2,1434-1452).
gcacctacggatcattgat

SEQ ID NO: 546630 - DNA, 19 bp, Mus musculus
  siRNA target sequence for Crtac1 (NM_145123.2,1460-1478).
ccggctacctgtgtgaaat

SEQ ID NO: 546631 - DNA, 19 bp, Mus musculus
  siRNA target sequence for Crtac1 (NM_145123.2,1770-1788).
caggtgccggaccaataaa

SEQ ID NO: 546632 - DNA, 19 bp, Mus musculus
  siRNA target sequence for Crtac1 (NM_145123.2,1773-1791).
gtgccggaccaataaaaga

SEQ ID NO: 546633 - DNA, 19 bp, Mus musculus
  siRNA target sequence for Crtac1 (NM_145123.2,1800-1818).
gggctatgaacccaatgaa

SEQ ID NO: 546634 - DNA, 19 bp, Mus musculus
  siRNA target sequence for Crtac1 (NM_145123.2,1802-1820).
gctatgaacccaatgaaga

SEQ ID NO: 546635 - DNA, 19 bp, Mus musculus
  siRNA target sequence for Crtac1 (NM_145123.2,1863-1881).
ctcatcggctgcctttaga

SEQ ID NO: 546636 - DNA, 19 bp, Mus musculus
  siRNA target sequence for Crtac1 (NM_145123.2,1865-1883).
catcggctgcctttagact

SEQ ID NO: 546637 - DNA, 19 bp, Mus musculus
  siRNA target sequence for Crtac1 (NM_145123.2,1927-1945).
ggactttgccttcagttat

SEQ ID NO: 546638 - DNA, 19 bp, Mus musculus
  siRNA target sequence for Csen (NM_019789.2,242-260).
ctgatgcgttgctgcttaa

SEQ ID NO: 546639 - DNA, 19 bp, Mus musculus
  siRNA target sequence for Csen (NM_019789.2,248-266).
cgttgctgcttaatcaagt

SEQ ID NO: 546640 - DNA, 19 bp, Mus musculus
  siRNA target sequence for Csen (NM_019789.2,763-781).
ggagaggttctttcagaaa

SEQ ID NO: 546641 - DNA, 19 bp, Mus musculus
  siRNA target sequence for Csen (NM_019789.2,764-782).
gagaggttctttcagaaaa

SEQ ID NO: 546642 - DNA, 19 bp, Mus musculus
  siRNA target sequence for Cspg2 (NM_019389.1,35-53).
ggatgtgctcaaccttatt

SEQ ID NO: 546643 - DNA, 19 bp, Mus musculus
  siRNA target sequence for Cspg2 (NM_019389.1,65-83).
cactacatcaagccaaaat

SEQ ID NO: 546644 - DNA, 19 bp, Mus musculus
  siRNA target sequence for Cspg2 (NM_019389.1,126-144).
ggtcctaccttgtcatttt

SEQ ID NO: 546645 - DNA, 19 bp, Mus musculus
  siRNA target sequence for Cspg2 (NM_019389.1,139-157).
catttttcaaccttaccta

SEQ ID NO: 546646 - DNA, 19 bp, Mus musculus
  siRNA target sequence for Cspg2 (NM_019389.1,263-281).
cccagaacggaaatatcaa

SEQ ID NO: 546647 - DNA, 19 bp, Mus musculus
  siRNA target sequence for Cspg2 (NM_019389.1,265-283).
cagaacggaaatatcaaga

SEQ ID NO: 546648 - DNA, 19 bp, Mus musculus
  siRNA target sequence for Cspg2 (NM_019389.1,317-335).
ctacacatcccgatgatgt

SEQ ID NO: 546649 - DNA, 19 bp, Mus musculus
  siRNA target sequence for Cspg2 (NM_019389.1,360-378).
caaactccgggctagtgat

SEQ ID NO: 546650 - DNA, 19 bp, Mus musculus
  siRNA target sequence for Cspg2 (NM_019389.1,506-524).
ctgctcaacaggcttgttt

SEQ ID NO: 546651 - DNA, 19 bp, Mus musculus
  siRNA target sequence for Cspg2 (NM_019389.1,511-529).
caacaggcttgtttggata

SEQ ID NO: 546652 - DNA, 19 bp, Mus musculus
  siRNA target sequence for Cspg2 (NM_019389.1,567-585).
cgcctatgaggatggattt

SEQ ID NO: 546653 - DNA, 19 bp, Mus musculus
  siRNA target sequence for Cspg2 (NM_019389.1,601-619).
ggatggctgtctgatcaaa

SEQ ID NO: 546654 - DNA, 19 bp, Mus musculus
  siRNA target sequence for Cspg2 (NM_019389.1,611-629).
ctgatcaaactgtcagata

SEQ ID NO: 546655 - DNA, 19 bp, Mus musculus
  siRNA target sequence for Cspg2 (NM_019389.1,653-671).
gctgttacggagacatgat

SEQ ID NO: 546656 - DNA, 19 bp, Mus musculus
  siRNA target sequence for Cspg2 (NM_019389.1,682-700).
ggggttcggacctatggat

SEQ ID NO: 546657 - DNA, 19 bp, Mus musculus
  siRNA target sequence for Cspg2 (NM_019389.1,683-701).
gggttcggacctatggatt

SEQ ID NO: 546658 - DNA, 19 bp, Mus musculus
  siRNA target sequence for Cspg2 (NM_019389.1,704-722).
gctctccccaggaaaccta

SEQ ID NO: 546659 - DNA, 19 bp, Mus musculus
  siRNA target sequence for Cspg2 (NM_019389.1,719-737).
cctatgatgtgtattgtta

SEQ ID NO: 546660 - DNA, 19 bp, Mus musculus
  siRNA target sequence for Cspg2 (NM_019389.1,802-820).
gccgaagcagagtgtacaa

SEQ ID NO: 546661 - DNA, 19 bp, Mus musculus
  siRNA target sequence for Cspg2 (NM_019389.1,837-855).
ggcgactgttggagaactt

SEQ ID NO: 546662 - DNA, 19 bp, Mus musculus
  siRNA target sequence for Cspg2 (NM_019389.1,839-857).
cgactgttggagaacttca

SEQ ID NO: 546663 - DNA, 19 bp, Mus musculus
  siRNA target sequence for Cspg2 (NM_019389.1,972-990).
gagaaccctgtatcgtttt

SEQ ID NO: 546664 - DNA, 19 bp, Mus musculus
  siRNA target sequence for Cspg2 (NM_019389.1,974-992).
gaaccctgtatcgttttga

SEQ ID NO: 546665 - DNA, 19 bp, Mus musculus
  siRNA target sequence for Cspg2 (NM_019389.1,977-995).
ccctgtatcgttttgagaa

SEQ ID NO: 546666 - DNA, 19 bp, Mus musculus
  siRNA target sequence for Cspg2 (NM_019389.1,1014-1032).
ccctgatagcagatttgat

SEQ ID NO: 546667 - DNA, 19 bp, Mus musculus
  siRNA target sequence for Cspg2 (NM_019389.1,1041-1059).
ctttaaacgtcgattgagt

SEQ ID NO: 546668 - DNA, 19 bp, Mus musculus
  siRNA target sequence for Cspg2 (NM_019389.1,1078-1096).
catccaatagattcagaat

SEQ ID NO: 546669 - DNA, 19 bp, Mus musculus
  siRNA target sequence for Cspg2 (NM_019389.1,1081-1099).
ccaatagattcagaatcta

SEQ ID NO: 546670 - DNA, 19 bp, Mus musculus
  siRNA target sequence for Cspg2 (NM_019389.1,1127-1145).
cagatccactgcatgatct

SEQ ID NO: 546671 - DNA, 19 bp, Mus musculus
  siRNA target sequence for Cspg2 (NM_019389.1,1167-1185).
gttaccagactcatttgaa

SEQ ID NO: 546672 - DNA, 19 bp, Mus musculus
  siRNA target sequence for Cspg2 (NM_019389.1,1176-1194).
ctcatttgaaatagacata

SEQ ID NO: 546673 - DNA, 19 bp, Mus musculus
  siRNA target sequence for Cspg2 (NM_019389.1,1234-1252).
gtaaatgcaacggatgtaa

SEQ ID NO: 546674 - DNA, 19 bp, Mus musculus
  siRNA target sequence for Cspg2 (NM_019389.1,1240-1258).
gcaacggatgtaacaacta

SEQ ID NO: 546675 - DNA, 19 bp, Mus musculus
  siRNA target sequence for Cspg2 (NM_019389.1,1259-1277).
ctccgtcagtgcagtatat

SEQ ID NO: 546676 - DNA, 19 bp, Mus musculus
  siRNA target sequence for Cspg2 (NM_019389.1,1261-1279).
ccgtcagtgcagtatatca

SEQ ID NO: 546677 - DNA, 19 bp, Mus musculus
  siRNA target sequence for Cspg2 (NM_019389.1,1262-1280).
cgtcagtgcagtatatcaa

SEQ ID NO: 546678 - DNA, 19 bp, Mus musculus
  siRNA target sequence for Cspg2 (NM_019389.1,1263-1281).
gtcagtgcagtatatcaat

SEQ ID NO: 546679 - DNA, 19 bp, Mus musculus
  siRNA target sequence for Cspg2 (NM_019389.1,1337-1355).
gtggccagtacgaaagtgt

SEQ ID NO: 546680 - DNA, 19 bp, Mus musculus
  siRNA target sequence for Cspg2 (NM_019389.1,1391-1409).
ctgacacccatcagtttat

SEQ ID NO: 546681 - DNA, 19 bp, Mus musculus
  siRNA target sequence for Cspg2 (NM_019389.1,1404-1422).
gtttatactagcagaaaca

SEQ ID NO: 546682 - DNA, 19 bp, Mus musculus
  siRNA target sequence for Cspg2 (NM_019389.1,1417-1435).
gaaacagaatcgtcaacta

SEQ ID NO: 546683 - DNA, 19 bp, Mus musculus
  siRNA target sequence for Cspg2 (NM_019389.1,1427-1445).
cgtcaactaccatgcaatt

SEQ ID NO: 546684 - DNA, 19 bp, Mus musculus
  siRNA target sequence for Cspg2 (NM_019389.1,1430-1448).
caactaccatgcaatttaa

SEQ ID NO: 546685 - DNA, 19 bp, Mus musculus
  siRNA target sequence for Cspg2 (NM_019389.1,1433-1451).
ctaccatgcaatttaagaa

SEQ ID NO: 546686 - DNA, 19 bp, Mus musculus
  siRNA target sequence for Cspg2 (NM_019389.1,1462-1480).
ggcacggaattgttagaaa

SEQ ID NO: 546687 - DNA, 19 bp, Mus musculus
  siRNA target sequence for Cspg2 (NM_019389.1,1463-1481).
gcacggaattgttagaaat

SEQ ID NO: 546688 - DNA, 19 bp, Mus musculus
  siRNA target sequence for Cspg2 (NM_019389.1,1494-1512).
cgagacctaccctgaaaca

SEQ ID NO: 546689 - DNA, 19 bp, Mus musculus
  siRNA target sequence for Cspg2 (NM_019389.1,1507-1525).
gaaacaccagaccatgttt

SEQ ID NO: 546690 - DNA, 19 bp, Mus musculus
  siRNA target sequence for Cspg2 (NM_019389.1,1557-1575).
ctcatcccatgatggtaaa

SEQ ID NO: 546691 - DNA, 19 bp, Mus musculus
  siRNA target sequence for Cspg2 (NM_019389.1,1607-1625).
gcagtccaaaccttgaaaa

SEQ ID NO: 546692 - DNA, 19 bp, Mus musculus
  siRNA target sequence for Cspg2 (NM_019389.1,1608-1626).
cagtccaaaccttgaaaat

SEQ ID NO: 546693 - DNA, 19 bp, Mus musculus
  siRNA target sequence for Cspg2 (NM_019389.1,1705-1723).
caggaaacaatcttatcta

SEQ ID NO: 546694 - DNA, 19 bp, Mus musculus
  siRNA target sequence for Cspg2 (NM_019389.1,1730-1748).
cagaagtagcacttggtaa

SEQ ID NO: 546695 - DNA, 19 bp, Mus musculus
  siRNA target sequence for Cspg2 (NM_019389.1,1735-1753).
gtagcacttggtaaagaga

SEQ ID NO: 546696 - DNA, 19 bp, Mus musculus
  siRNA target sequence for Cspg2 (NM_019389.1,1756-1774).
gaccaaagtcctaccttat

SEQ ID NO: 546697 - DNA, 19 bp, Mus musculus
  siRNA target sequence for Cspg2 (NM_019389.1,1770-1788).
cttatctacctctagcata

SEQ ID NO: 546698 - DNA, 19 bp, Mus musculus
  siRNA target sequence for Cspg2 (NM_019389.1,1793-1811).
caagttctgtgtcagtaaa

SEQ ID NO: 546699 - DNA, 19 bp, Mus musculus
  siRNA target sequence for Cspg2 (NM_019389.1,1796-1814).
gttctgtgtcagtaaatgt

SEQ ID NO: 546700 - DNA, 19 bp, Mus musculus
  siRNA target sequence for Cspg2 (NM_019389.1,1799-1817).
ctgtgtcagtaaatgtctt

SEQ ID NO: 546701 - DNA, 19 bp, Mus musculus
  siRNA target sequence for Cspg2 (NM_019389.1,1850-1868).
cacagactgatgaatccat

SEQ ID NO: 546702 - DNA, 19 bp, Mus musculus
  siRNA target sequence for Cspg2 (NM_019389.1,1900-1918).
cctagccaaactgtaaagt

SEQ ID NO: 546703 - DNA, 19 bp, Mus musculus
  siRNA target sequence for Cspg2 (NM_019389.1,1952-1970).
ggtctggggaagtagaaga

SEQ ID NO: 546704 - DNA, 19 bp, Mus musculus
  siRNA target sequence for Cspg2 (NM_019389.1,1992-2010).
catggtaactgatttacca

SEQ ID NO: 546705 - DNA, 19 bp, Mus musculus
  siRNA target sequence for Cspg2 (NM_019389.1,2044-2062).
gatatgagcaagataatga

SEQ ID NO: 546706 - DNA, 19 bp, Mus musculus
  siRNA target sequence for Cspg2 (NM_019389.1,2061-2079).
gatcacaaaccatcacatt

SEQ ID NO: 546707 - DNA, 19 bp, Mus musculus
  siRNA target sequence for Cspg2 (NM_019389.1,2070-2088).
ccatcacatttatattcct

SEQ ID NO: 546708 - DNA, 19 bp, Mus musculus
  siRNA target sequence for Cspg2 (NM_019389.1,2097-2115).
cgctcctttggattcaaaa

SEQ ID NO: 546709 - DNA, 19 bp, Mus musculus
  siRNA target sequence for Cspg2 (NM_019389.1,2170-2188).
gagtgggtttccgataagt

SEQ ID NO: 546710 - DNA, 19 bp, Mus musculus
  siRNA target sequence for Cspg2 (NM_019389.1,2174-2192).
gggtttccgataagtcttt

SEQ ID NO: 546711 - DNA, 19 bp, Mus musculus
  siRNA target sequence for Cspg2 (NM_019389.1,2175-2193).
ggtttccgataagtctttt

SEQ ID NO: 546712 - DNA, 19 bp, Mus musculus
  siRNA target sequence for Cspg2 (NM_019389.1,2279-2297).
ggtcagatcacttactttt

SEQ ID NO: 546713 - DNA, 19 bp, Mus musculus
  siRNA target sequence for Cspg2 (NM_019389.1,2280-2298).
gtcagatcacttactttta

SEQ ID NO: 546714 - DNA, 19 bp, Mus musculus
  siRNA target sequence for Cspg2 (NM_019389.1,2323-2341).
gtagatgcatctagtgatt

SEQ ID NO: 546715 - DNA, 19 bp, Mus musculus
  siRNA target sequence for Cspg2 (NM_019389.1,2394-2412).
ggaaatggcaaattcaact

SEQ ID NO: 546716 - DNA, 19 bp, Mus musculus
  siRNA target sequence for Cspg2 (NM_019389.1,2466-2484).
gcatagcagtagtagtcat

SEQ ID NO: 546717 - DNA, 19 bp, Mus musculus
  siRNA target sequence for Cspg2 (NM_019389.1,2505-2523).
gaccactctctcaggaaat

SEQ ID NO: 546718 - DNA, 19 bp, Mus musculus
  siRNA target sequence for Cspg2 (NM_019389.1,2550-2568).
ctcaggagatgctagtact

SEQ ID NO: 546719 - DNA, 19 bp, Mus musculus
  siRNA target sequence for Cspg2 (NM_019389.1,2699-2717).
ccccgagtactgtactaga

SEQ ID NO: 546720 - DNA, 19 bp, Mus musculus
  siRNA target sequence for Cspg2 (NM_019389.1,2702-2720).
cgagtactgtactagacat

SEQ ID NO: 546721 - DNA, 19 bp, Mus musculus
  siRNA target sequence for Cspg2 (NM_019389.1,2703-2721).
gagtactgtactagacata

SEQ ID NO: 546722 - DNA, 19 bp, Mus musculus
  siRNA target sequence for Cspg2 (NM_019389.1,2705-2723).
gtactgtactagacataga

SEQ ID NO: 546723 - DNA, 19 bp, Mus musculus
  siRNA target sequence for Cspg2 (NM_019389.1,2757-2775).
gacactgatttctgaaata

SEQ ID NO: 546724 - DNA, 19 bp, Mus musculus
  siRNA target sequence for Cspg2 (NM_019389.1,2798-2816).
caggagtaagggatttgta

SEQ ID NO: 546725 - DNA, 19 bp, Mus musculus
  siRNA target sequence for Cspg2 (NM_019389.1,2823-2841).
ctttccaatgggagaagat

SEQ ID NO: 546726 - DNA, 19 bp, Mus musculus
  siRNA target sequence for Cspg2 (NM_019389.1,2851-2869).
gacttcagtgaatatccaa

SEQ ID NO: 546727 - DNA, 19 bp, Mus musculus
  siRNA target sequence for Cspg2 (NM_019389.1,2866-2884).
ccaacagtgtcttatccaa

SEQ ID NO: 546728 - DNA, 19 bp, Mus musculus
  siRNA target sequence for Cspg2 (NM_019389.1,2876-2894).
cttatccaacgatgaaaga

SEQ ID NO: 546729 - DNA, 19 bp, Mus musculus
  siRNA target sequence for Cspg2 (NM_019389.1,2938-2956).
gatacacagacttcatcat

SEQ ID NO: 546730 - DNA, 19 bp, Mus musculus
  siRNA target sequence for Cspg2 (NM_019389.1,2942-2960).
cacagacttcatcatctat

SEQ ID NO: 546731 - DNA, 19 bp, Mus musculus
  siRNA target sequence for Cspg2 (NM_019389.1,2963-2981).
cgactacctcagacaacat

SEQ ID NO: 546732 - DNA, 19 bp, Mus musculus
  siRNA target sequence for Cspg2 (NM_019389.1,2988-3006).
cgtgcctgactcaaaagga

SEQ ID NO: 546733 - DNA, 19 bp, Mus musculus
  siRNA target sequence for Cspg2 (NM_019389.1,3121-3139).
ccactagctgtggacattt

SEQ ID NO: 546734 - DNA, 19 bp, Mus musculus
  siRNA target sequence for Cspg2 (NM_019389.1,3145-3163).
ggaacagagtctccatatt

SEQ ID NO: 546735 - DNA, 19 bp, Mus musculus
  siRNA target sequence for Cspg2 (NM_019389.1,3146-3164).
gaacagagtctccatattt

SEQ ID NO: 546736 - DNA, 19 bp, Mus musculus
  siRNA target sequence for Cspg2 (NM_019389.1,3239-3257).
gtggaaatactgtagatct

SEQ ID NO: 546737 - DNA, 19 bp, Mus musculus
  siRNA target sequence for Cspg2 (NM_019389.1,3260-3278).
cagaaaatgggtacataga

SEQ ID NO: 546738 - DNA, 19 bp, Mus musculus
  siRNA target sequence for Cspg2 (NM_019389.1,3314-3332).
caatggagccatccaaatt

SEQ ID NO: 546739 - DNA, 19 bp, Mus musculus
  siRNA target sequence for Cspg2 (NM_019389.1,3335-3353).
ggtctaaaccagaagtcaa

SEQ ID NO: 546740 - DNA, 19 bp, Mus musculus
  siRNA target sequence for Cspg2 (NM_019389.1,3344-3362).
cagaagtcaatcttgataa

SEQ ID NO: 546741 - DNA, 19 bp, Mus musculus
  siRNA target sequence for Cspg2 (NM_019389.1,3468-3486).
ccaatcacttattgaaact

SEQ ID NO: 546742 - DNA, 19 bp, Mus musculus
  siRNA target sequence for Cspg2 (NM_019389.1,3492-3510).
ccaaacttccgattactct

SEQ ID NO: 546743 - DNA, 19 bp, Mus musculus
  siRNA target sequence for Cspg2 (NM_019389.1,3493-3511).
caaacttccgattactcta

SEQ ID NO: 546744 - DNA, 19 bp, Mus musculus
  siRNA target sequence for Cspg2 (NM_019389.1,3497-3515).
cttccgattactctatgtt

SEQ ID NO: 546745 - DNA, 19 bp, Mus musculus
  siRNA target sequence for Cspg2 (NM_019389.1,3501-3519).
cgattactctatgttaaca

SEQ ID NO: 546746 - DNA, 19 bp, Mus musculus
  siRNA target sequence for Cspg2 (NM_019389.1,3530-3548).
cgtacattactaataagga

SEQ ID NO: 546747 - DNA, 19 bp, Mus musculus
  siRNA target sequence for Cspg2 (NM_019389.1,3567-3585).
gtccatagcgcatatgtct

SEQ ID NO: 546748 - DNA, 19 bp, Mus musculus
  siRNA target sequence for Cspg2 (NM_019389.1,3592-3610).
ggtccagggatcaaagact

SEQ ID NO: 546749 - DNA, 19 bp, Mus musculus
  siRNA target sequence for Cspg2 (NM_019389.1,3598-3616).
gggatcaaagacttggaat

SEQ ID NO: 546750 - DNA, 19 bp, Mus musculus
  siRNA target sequence for Cspg2 (NM_019389.1,3603-3621).
caaagacttggaatcatat

SEQ ID NO: 546751 - DNA, 19 bp, Mus musculus
  siRNA target sequence for Cspg2 (NM_019389.1,3607-3625).
gacttggaatcatatacta

SEQ ID NO: 546752 - DNA, 19 bp, Mus musculus
  siRNA target sequence for Cspg2 (NM_019389.1,3751-3769).
caaaagggtgtgaaactaa

SEQ ID NO: 546753 - DNA, 19 bp, Mus musculus
  siRNA target sequence for Cspg2 (NM_019389.1,3782-3800).
caaatgctgatctctcatt

SEQ ID NO: 546754 - DNA, 19 bp, Mus musculus
  siRNA target sequence for Cspg2 (NM_019389.1,3871-3889).
cagatcattagcacattgt

SEQ ID NO: 546755 - DNA, 19 bp, Mus musculus
  siRNA target sequence for Cspg2 (NM_019389.1,3873-3891).
gatcattagcacattgtat

SEQ ID NO: 546756 - DNA, 19 bp, Mus musculus
  siRNA target sequence for Cspg2 (NM_019389.1,3915-3933).
cttaggaacaagcatctta

SEQ ID NO: 546757 - DNA, 19 bp, Mus musculus
  siRNA target sequence for Cspg2 (NM_019389.1,3985-4003).
gttagaatgctcatttcca

SEQ ID NO: 546758 - DNA, 19 bp, Mus musculus
  siRNA target sequence for Cspg2 (NM_019389.1,4033-4051).
gaggcactcgacacaactt

SEQ ID NO: 546759 - DNA, 19 bp, Mus musculus
  siRNA target sequence for Cspg2 (NM_019389.1,4036-4054).
gcactcgacacaactttga

SEQ ID NO: 546760 - DNA, 19 bp, Mus musculus
  siRNA target sequence for Cspg2 (NM_019389.1,4053-4071).
gagtcataccggaacagaa

SEQ ID NO: 546761 - DNA, 19 bp, Mus musculus
  siRNA target sequence for Cspg2 (NM_019389.1,4069-4087).
gaagaacctacaacttcaa

SEQ ID NO: 546762 - DNA, 19 bp, Mus musculus
  siRNA target sequence for Cspg2 (NM_019389.1,4164-4182).
gacccatagaccacaaact

SEQ ID NO: 546763 - DNA, 19 bp, Mus musculus
  siRNA target sequence for Cspg2 (NM_019389.1,4166-4184).
cccatagaccacaaactat

SEQ ID NO: 546764 - DNA, 19 bp, Mus musculus
  siRNA target sequence for Cspg2 (NM_019389.1,4185-4203).
gagtggactgatctctaat

SEQ ID NO: 546765 - DNA, 19 bp, Mus musculus
  siRNA target sequence for Cspg2 (NM_019389.1,4187-4205).
gtggactgatctctaatga

SEQ ID NO: 546766 - DNA, 19 bp, Mus musculus
  siRNA target sequence for Cspg2 (NM_019389.1,4194-4212).
gatctctaatgaaaattct

SEQ ID NO: 546767 - DNA, 19 bp, Mus musculus
  siRNA target sequence for Cspg2 (NM_019389.1,4264-4282).
caaacttacagtgttgaaa

SEQ ID NO: 546768 - DNA, 19 bp, Mus musculus
  siRNA target sequence for Cspg2 (NM_019389.1,4276-4294).
gttgaaatgaccaaacact

SEQ ID NO: 546769 - DNA, 19 bp, Mus musculus
  siRNA target sequence for Cspg2 (NM_019389.1,4310-4328).
cacaaccatccgacttgtt

SEQ ID NO: 546770 - DNA, 19 bp, Mus musculus
  siRNA target sequence for Cspg2 (NM_019389.1,4312-4330).
caaccatccgacttgttta

SEQ ID NO: 546771 - DNA, 19 bp, Mus musculus
  siRNA target sequence for Cspg2 (NM_019389.1,4321-4339).
gacttgtttaatgtaaact

SEQ ID NO: 546772 - DNA, 19 bp, Mus musculus
  siRNA target sequence for Cspg2 (NM_019389.1,4352-4370).
ctggagaagtggatactct

SEQ ID NO: 546773 - DNA, 19 bp, Mus musculus
  siRNA target sequence for Cspg2 (NM_019389.1,4363-4381).
gatactcttgacttagtgt

SEQ ID NO: 546774 - DNA, 19 bp, Mus musculus
  siRNA target sequence for Cspg2 (NM_019389.1,4380-4398).
gtacacttctggaactact

SEQ ID NO: 546775 - DNA, 19 bp, Mus musculus
  siRNA target sequence for Cspg2 (NM_019389.1,4453-4471).
catccagaggtgtcaaaga

SEQ ID NO: 546776 - DNA, 19 bp, Mus musculus
  siRNA target sequence for Cspg2 (NM_019389.1,4533-4551).
gtacaagagttctctgtat

SEQ ID NO: 546777 - DNA, 19 bp, Mus musculus
  siRNA target sequence for Cspg2 (NM_019389.1,4617-4635).
gcaagacaatatccaattt

SEQ ID NO: 546778 - DNA, 19 bp, Mus musculus
  siRNA target sequence for Cspg2 (NM_019389.1,4639-4657).
ggttctaccttgaaaccta

SEQ ID NO: 546779 - DNA, 19 bp, Mus musculus
  siRNA target sequence for Cspg2 (NM_019389.1,4673-4691).
ctgaaagcattattataga

SEQ ID NO: 546780 - DNA, 19 bp, Mus musculus
  siRNA target sequence for Cspg2 (NM_019389.1,4758-4776).
ccctgagctgacatcagat

SEQ ID NO: 546781 - DNA, 19 bp, Mus musculus
  siRNA target sequence for Cspg2 (NM_019389.1,4759-4777).
cctgagctgacatcagata

SEQ ID NO: 546782 - DNA, 19 bp, Mus musculus
  siRNA target sequence for Cspg2 (NM_019389.1,4979-4997).
ctggctatactcaagcaat

SEQ ID NO: 546783 - DNA, 19 bp, Mus musculus
  siRNA target sequence for Cspg2 (NM_019389.1,4981-4999).
ggctatactcaagcaatat

SEQ ID NO: 546784 - DNA, 19 bp, Mus musculus
  siRNA target sequence for Cspg2 (NM_019389.1,4982-5000).
gctatactcaagcaatata

SEQ ID NO: 546785 - DNA, 19 bp, Mus musculus
  siRNA target sequence for Cspg2 (NM_019389.1,5078-5096).
ctagcacagagacagaatt

SEQ ID NO: 546786 - DNA, 19 bp, Mus musculus
  siRNA target sequence for Cspg2 (NM_019389.1,5123-5141).
ccctgcacattcctagtaa

SEQ ID NO: 546787 - DNA, 19 bp, Mus musculus
  siRNA target sequence for Cspg2 (NM_019389.1,5124-5142).
cctgcacattcctagtaaa

SEQ ID NO: 546788 - DNA, 19 bp, Mus musculus
  siRNA target sequence for Cspg2 (NM_019389.1,5128-5146).
cacattcctagtaaactaa

SEQ ID NO: 546789 - DNA, 19 bp, Mus musculus
  siRNA target sequence for Cspg2 (NM_019389.1,5150-5168).
cagctagtccggagattga

SEQ ID NO: 546790 - DNA, 19 bp, Mus musculus
  siRNA target sequence for Cspg2 (NM_019389.1,5152-5170).
gctagtccggagattgata

SEQ ID NO: 546791 - DNA, 19 bp, Mus musculus
  siRNA target sequence for Cspg2 (NM_019389.1,5153-5171).
ctagtccggagattgataa

SEQ ID NO: 546792 - DNA, 19 bp, Mus musculus
  siRNA target sequence for Cspg2 (NM_019389.1,5185-5203).
gcaatatctctggatgata

SEQ ID NO: 546793 - DNA, 19 bp, Mus musculus
  siRNA target sequence for Cspg2 (NM_019389.1,5223-5241).
gtctgatggccaagctatt

SEQ ID NO: 546794 - DNA, 19 bp, Mus musculus
  siRNA target sequence for Cspg2 (NM_019389.1,5243-5261).
cagaccagagtgaagtaat

SEQ ID NO: 546795 - DNA, 19 bp, Mus musculus
  siRNA target sequence for Cspg2 (NM_019389.1,5371-5389).
gatccccctgcttatgtaa

SEQ ID NO: 546796 - DNA, 19 bp, Mus musculus
  siRNA target sequence for Cspg2 (NM_019389.1,5386-5404).
gtaagtattggtagtacat

SEQ ID NO: 546797 - DNA, 19 bp, Mus musculus
  siRNA target sequence for Cspg2 (NM_019389.1,5406-5424).
ccttatagctcagacttta

SEQ ID NO: 546798 - DNA, 19 bp, Mus musculus
  siRNA target sequence for Cspg2 (NM_019389.1,5407-5425).
cttatagctcagactttaa

SEQ ID NO: 546799 - DNA, 19 bp, Mus musculus
  siRNA target sequence for Cspg2 (NM_019389.1,5615-5633).
catcacaaaagtctataga

SEQ ID NO: 546800 - DNA, 19 bp, Mus musculus
  siRNA target sequence for Cspg2 (NM_019389.1,5625-5643).
gtctatagagagtcctttt

SEQ ID NO: 546801 - DNA, 19 bp, Mus musculus
  siRNA target sequence for Cspg2 (NM_019389.1,5627-5645).
ctatagagagtccttttaa

SEQ ID NO: 546802 - DNA, 19 bp, Mus musculus
  siRNA target sequence for Cspg2 (NM_019389.1,5646-5664).
ggaagtccatgctaatatt

SEQ ID NO: 546803 - DNA, 19 bp, Mus musculus
  siRNA target sequence for Cspg2 (NM_019389.1,5657-5675).
ctaatattgaagaaaccat

SEQ ID NO: 546804 - DNA, 19 bp, Mus musculus
  siRNA target sequence for Cspg2 (NM_019389.1,5676-5694).
caagccattgggtggaaat

SEQ ID NO: 546805 - DNA, 19 bp, Mus musculus
  siRNA target sequence for Cspg2 (NM_019389.1,5723-5741).
ctcgtgaccctgctttaga

SEQ ID NO: 546806 - DNA, 19 bp, Mus musculus
  siRNA target sequence for Cspg2 (NM_019389.1,5759-5777).
gtaagcataagttactaga

SEQ ID NO: 546807 - DNA, 19 bp, Mus musculus
  siRNA target sequence for Cspg2 (NM_019389.1,5818-5836).
gacttcccaaacaaagcaa

SEQ ID NO: 546808 - DNA, 19 bp, Mus musculus
  siRNA target sequence for Cspg2 (NM_019389.1,5865-5883).
gatgcttgctggtatcaga

SEQ ID NO: 546809 - DNA, 19 bp, Mus musculus
  siRNA target sequence for Cspg2 (NM_019389.1,5890-5908).
gagagcgaacctgtcatta

SEQ ID NO: 546810 - DNA, 19 bp, Mus musculus
  siRNA target sequence for Cspg2 (NM_019389.1,6012-6030).
gcctgagaggccaaccttt

SEQ ID NO: 546811 - DNA, 19 bp, Mus musculus
  siRNA target sequence for Cspg2 (NM_019389.1,6149-6167).
gtagtactctggatctaca

SEQ ID NO: 546812 - DNA, 19 bp, Mus musculus
  siRNA target sequence for Cspg2 (NM_019389.1,6179-6197).
cattatcaccattttccat

SEQ ID NO: 546813 - DNA, 19 bp, Mus musculus
  siRNA target sequence for Cspg2 (NM_019389.1,6225-6243).
cctgattggcattagtgaa

SEQ ID NO: 546814 - DNA, 19 bp, Mus musculus
  siRNA target sequence for Cspg2 (NM_019389.1,6277-6295).
ggacctgatctctgcaaaa

SEQ ID NO: 546815 - DNA, 19 bp, Mus musculus
  siRNA target sequence for Cspg2 (NM_019389.1,6313-6331).
ggaggcacctgttatccta

SEQ ID NO: 546816 - DNA, 19 bp, Mus musculus
  siRNA target sequence for Cspg2 (NM_019389.1,6372-6390).
cggagaccagtgtgaactt

SEQ ID NO: 546817 - DNA, 19 bp, Mus musculus
  siRNA target sequence for Cspg2 (NM_019389.1,6374-6392).
gagaccagtgtgaacttga

SEQ ID NO: 546818 - DNA, 19 bp, Mus musculus
  siRNA target sequence for Cspg2 (NM_019389.1,6378-6396).
ccagtgtgaacttgatttt

SEQ ID NO: 546819 - DNA, 19 bp, Mus musculus
  siRNA target sequence for Cspg2 (NM_019389.1,6385-6403).
gaacttgattttgatgaat

SEQ ID NO: 546820 - DNA, 19 bp, Mus musculus
  siRNA target sequence for Cspg2 (NM_019389.1,6468-6486).
ctgtctcccaagttatgtt

SEQ ID NO: 546821 - DNA, 19 bp, Mus musculus
  siRNA target sequence for Cspg2 (NM_019389.1,6541-6559).
caaggacagtgctacaagt

SEQ ID NO: 546822 - DNA, 19 bp, Mus musculus
  siRNA target sequence for Cspg2 (NM_019389.1,6544-6562).
ggacagtgctacaagtact

SEQ ID NO: 546823 - DNA, 19 bp, Mus musculus
  siRNA target sequence for Cspg2 (NM_019389.1,6665-6683).
gtgtgggccatgattacca

SEQ ID NO: 546824 - DNA, 19 bp, Mus musculus
  siRNA target sequence for Cspg2 (NM_019389.1,6735-6753).
cggcagtgcactgcaatat

SEQ ID NO: 546825 - DNA, 19 bp, Mus musculus
  siRNA target sequence for Cspg2 (NM_019389.1,6740-6758).
gtgcactgcaatatgagaa

SEQ ID NO: 546826 - DNA, 19 bp, Mus musculus
  siRNA target sequence for Cspg2 (NM_019389.1,6900-6918).
cggccaaccccctgttgta

SEQ ID NO: 546827 - DNA, 19 bp, Mus musculus
  siRNA target sequence for Cspg2 (NM_019389.1,6902-6920).
gccaaccccctgttgtaga

SEQ ID NO: 546828 - DNA, 19 bp, Mus musculus
  siRNA target sequence for Cspg2 (NM_019389.1,6903-6921).
ccaaccccctgttgtagaa

SEQ ID NO: 546829 - DNA, 19 bp, Mus musculus
  siRNA target sequence for Cspg2 (NM_019389.1,6904-6922).
caaccccctgttgtagaaa

SEQ ID NO: 546830 - DNA, 19 bp, Mus musculus
  siRNA target sequence for Cspg2 (NM_019389.1,6942-6960).
gatgaaaccacgctatgaa

SEQ ID NO: 546831 - DNA, 19 bp, Mus musculus
  siRNA target sequence for Cspg2 (NM_019389.1,6949-6967).
ccacgctatgaaatcaact

SEQ ID NO: 546832 - DNA, 19 bp, Mus musculus
  siRNA target sequence for Cspg2 (NM_019389.1,7019-7037).
ctatccggtgcctaggaaa

SEQ ID NO: 546833 - DNA, 19 bp, Mus musculus
  siRNA target sequence for Cspg2 (NM_019389.1,7087-7105).
caaaggacttattctaaga

SEQ ID NO: 546834 - DNA, 19 bp, Mus musculus
  siRNA target sequence for Cspg2 (NM_019389.1,7091-7109).
ggacttattctaagaaata

SEQ ID NO: 546835 - DNA, 19 bp, Mus musculus
  siRNA target sequence for Cspg3 (NM_007789.2,312-330).
gatcaagtggactaaggtt

SEQ ID NO: 546836 - DNA, 19 bp, Mus musculus
  siRNA target sequence for Cspg3 (NM_007789.2,407-425).
ggcagggacgggtgtcatt

SEQ ID NO: 546837 - DNA, 19 bp, Mus musculus
  siRNA target sequence for Cspg3 (NM_007789.2,417-435).
ggtgtcattgcctgcttat

SEQ ID NO: 546838 - DNA, 19 bp, Mus musculus
  siRNA target sequence for Cspg3 (NM_007789.2,439-457).
cggcacagagccaatgcta

SEQ ID NO: 546839 - DNA, 19 bp, Mus musculus
  siRNA target sequence for Cspg3 (NM_007789.2,560-578).
caggcgtcgtgttccatta

SEQ ID NO: 546840 - DNA, 19 bp, Mus musculus
  siRNA target sequence for Cspg3 (NM_007789.2,753-771).
gtcgcgtcctggttgctat

SEQ ID NO: 546841 - DNA, 19 bp, Mus musculus
  siRNA target sequence for Cspg3 (NM_007789.2,815-833).
gcgacccgcaggaactcta

SEQ ID NO: 546842 - DNA, 19 bp, Mus musculus
  siRNA target sequence for Cspg3 (NM_007789.2,858-876).
gctagggggtgaagtcttt

SEQ ID NO: 546843 - DNA, 19 bp, Mus musculus
  siRNA target sequence for Cspg3 (NM_007789.2,863-881).
ggggtgaagtcttttacgt

SEQ ID NO: 546844 - DNA, 19 bp, Mus musculus
  siRNA target sequence for Cspg3 (NM_007789.2,1239-1257).
gcctccaggccgagaacta

SEQ ID NO: 546845 - DNA, 19 bp, Mus musculus
  siRNA target sequence for Cspg3 (NM_007789.2,1241-1259).
ctccaggccgagaactaaa

SEQ ID NO: 546846 - DNA, 19 bp, Mus musculus
  siRNA target sequence for Cspg3 (NM_007789.2,1470-1488).
cagcgacatgggagtagat

SEQ ID NO: 546847 - DNA, 19 bp, Mus musculus
  siRNA target sequence for Cspg3 (NM_007789.2,1472-1490).
gcgacatgggagtagatat

SEQ ID NO: 546848 - DNA, 19 bp, Mus musculus
  siRNA target sequence for Cspg3 (NM_007789.2,1476-1494).
catgggagtagatatggaa

SEQ ID NO: 546849 - DNA, 19 bp, Mus musculus
  siRNA target sequence for Cspg3 (NM_007789.2,2054-2072).
ctacacttgtccccaatat

SEQ ID NO: 546850 - DNA, 19 bp, Mus musculus
  siRNA target sequence for Cspg3 (NM_007789.2,2109-2127).
ctcctgggtcccagaagaa

SEQ ID NO: 546851 - DNA, 19 bp, Mus musculus
  siRNA target sequence for Cspg3 (NM_007789.2,2219-2237).
cccctgatgcagattctat

SEQ ID NO: 546852 - DNA, 19 bp, Mus musculus
  siRNA target sequence for Cspg3 (NM_007789.2,2220-2238).
ccctgatgcagattctata

SEQ ID NO: 546853 - DNA, 19 bp, Mus musculus
  siRNA target sequence for Cspg3 (NM_007789.2,2255-2273).
gctccatgcgggctacaaa

SEQ ID NO: 546854 - DNA, 19 bp, Mus musculus
  siRNA target sequence for Cspg3 (NM_007789.2,2599-2617).
gccacttgggagtctgaat

SEQ ID NO: 546855 - DNA, 19 bp, Mus musculus
  siRNA target sequence for Cspg3 (NM_007789.2,2861-2879).
ctctgatacctgtatcctt

SEQ ID NO: 546856 - DNA, 19 bp, Mus musculus
  siRNA target sequence for Cspg3 (NM_007789.2,3030-3048).
cgtgtatggctgtagttgt

SEQ ID NO: 546857 - DNA, 19 bp, Mus musculus
  siRNA target sequence for Cspg3 (NM_007789.2,3055-3073).
ggctatgctggggagaatt

SEQ ID NO: 546858 - DNA, 19 bp, Mus musculus
  siRNA target sequence for Cspg3 (NM_007789.2,3329-3347).
cgccagaagagcacaagtt

SEQ ID NO: 546859 - DNA, 19 bp, Mus musculus
  siRNA target sequence for Cspg3 (NM_007789.2,3334-3352).
gaagagcacaagttcatta

SEQ ID NO: 546860 - DNA, 19 bp, Mus musculus
  siRNA target sequence for Cspg3 (NM_007789.2,3339-3357).
gcacaagttcattaacagt

SEQ ID NO: 546861 - DNA, 19 bp, Mus musculus
  siRNA target sequence for Cspg3 (NM_007789.2,3457-3475).
gagaagcagccggataatt

SEQ ID NO: 546862 - DNA, 19 bp, Mus musculus
  siRNA target sequence for Cspg3 (NM_007789.2,3519-3537).
gagtgggcgctggaatgat

SEQ ID NO: 546863 - DNA, 19 bp, Mus musculus
  siRNA target sequence for Cspg3 (NM_007789.2,3521-3539).
gtgggcgctggaatgatgt

SEQ ID NO: 546864 - DNA, 19 bp, Mus musculus
  siRNA target sequence for Cspg3 (NM_007789.2,3628-3646).
ggtgtgcgcaagatcaagt

SEQ ID NO: 546865 - DNA, 19 bp, Mus musculus
  siRNA target sequence for Cspg3 (NM_007789.2,3631-3649).
gtgcgcaagatcaagtaca

SEQ ID NO: 546866 - DNA, 19 bp, Mus musculus
  siRNA target sequence for Cspg3 (NM_007789.2,3633-3651).
gcgcaagatcaagtacaat

SEQ ID NO: 546867 - DNA, 19 bp, Mus musculus
  siRNA target sequence for Cspg3 (NM_007789.2,3710-3728).
ctatccgctgccgtaacaa

SEQ ID NO: 546868 - DNA, 19 bp, Mus musculus
  siRNA target sequence for Cspg3 (NM_007789.2,3737-3755).
gggaccggcctcagatcat

SEQ ID NO: 546869 - DNA, 19 bp, Mus musculus
  siRNA target sequence for Cspg3 (NM_007789.2,3739-3757).
gaccggcctcagatcatgt

SEQ ID NO: 546870 - DNA, 19 bp, Mus musculus
  siRNA target sequence for Cx3cl1 (NM_009142.2,78-96).
cgcgttcttccatttgtgt

SEQ ID NO: 546871 - DNA, 19 bp, Mus musculus
  siRNA target sequence for Cx3cl1 (NM_009142.2,115-133).
cacctcggcatgacgaaat

SEQ ID NO: 546872 - DNA, 19 bp, Mus musculus
  siRNA target sequence for Cx3cl1 (NM_009142.2,715-733).
cctcaggtgtccactactt

SEQ ID NO: 546873 - DNA, 19 bp, Mus musculus
  siRNA target sequence for Cx3cl1 (NM_009142.2,817-835).
ctagggtctgaggagataa

SEQ ID NO: 546874 - DNA, 19 bp, Mus musculus
  siRNA target sequence for Cx3cl1 (NM_009142.2,829-847).
gagataaacccagttcata

SEQ ID NO: 546875 - DNA, 19 bp, Mus musculus
  siRNA target sequence for Cx3cl1 (NM_009142.2,831-849).
gataaacccagttcatact

SEQ ID NO: 546876 - DNA, 19 bp, Mus musculus
  siRNA target sequence for Cx3cl1 (NM_009142.2,1186-1204).
cgtagctgtggcagtaact

SEQ ID NO: 546877 - DNA, 19 bp, Mus musculus
  siRNA target sequence for D430029O09Rik (NM_022814.1,226-244).
gtcgcgcctggccttttgt

SEQ ID NO: 546878 - DNA, 19 bp, Mus musculus
  siRNA target sequence for D430029O09Rik (NM_022814.1,590-608).
gccatcgtcaccttctcat

SEQ ID NO: 546879 - DNA, 19 bp, Mus musculus
  siRNA target sequence for D430029O09Rik (NM_022814.1,710-728).
cgcggtggtggcacctata

SEQ ID NO: 546880 - DNA, 19 bp, Mus musculus
  siRNA target sequence for D430029O09Rik (NM_022814.1,713-731).
ggtggtggcacctatacca

SEQ ID NO: 546881 - DNA, 19 bp, Mus musculus
  siRNA target sequence for D430029O09Rik (NM_022814.1,764-782).
cgtcactctagagaaaact

SEQ ID NO: 546882 - DNA, 19 bp, Mus musculus
  siRNA target sequence for D430029O09Rik (NM_022814.1,786-804).
ccaaagtcatatttctcat

SEQ ID NO: 546883 - DNA, 19 bp, Mus musculus
  siRNA target sequence for D430029O09Rik (NM_022814.1,826-844).
cggagaccccagacctatt

SEQ ID NO: 546884 - DNA, 19 bp, Mus musculus
  siRNA target sequence for D430029O09Rik (NM_022814.1,900-918).
ggaatatccgggaactgaa

SEQ ID NO: 546885 - DNA, 19 bp, Mus musculus
  siRNA target sequence for D430029O09Rik (NM_022814.1,935-953).
ccgaaggaagaacattgtt

SEQ ID NO: 546886 - DNA, 19 bp, Mus musculus
  siRNA target sequence for D430029O09Rik (NM_022814.1,936-954).
cgaaggaagaacattgtta

SEQ ID NO: 546887 - DNA, 19 bp, Mus musculus
  siRNA target sequence for D430029O09Rik (NM_022814.1,951-969).
gttacctgctccacagttt

SEQ ID NO: 546888 - DNA, 19 bp, Mus musculus
  siRNA target sequence for D430029O09Rik (NM_022814.1,993-1011).
gcagggcgttgcatgaaga

SEQ ID NO: 546889 - DNA, 19 bp, Mus musculus
  siRNA target sequence for D430029O09Rik (NM_022814.1,994-1012).
cagggcgttgcatgaagat

SEQ ID NO: 546890 - DNA, 19 bp, Mus musculus
  siRNA target sequence for D430029O09Rik (NM_022814.1,1017-1035).
cttctgggagttttatcca

SEQ ID NO: 546891 - DNA, 19 bp, Mus musculus
  siRNA target sequence for D430029O09Rik (NM_022814.1,1113-1131).
ggacacacacgggtcaatt

SEQ ID NO: 546892 - DNA, 19 bp, Mus musculus
  siRNA target sequence for D430029O09Rik (NM_022814.1,1114-1132).
gacacacacgggtcaattt

SEQ ID NO: 546893 - DNA, 19 bp, Mus musculus
  siRNA target sequence for D430029O09Rik (NM_022814.1,1116-1134).
cacacacgggtcaatttga

SEQ ID NO: 546894 - DNA, 19 bp, Mus musculus
  siRNA target sequence for D430029O09Rik (NM_022814.1,1118-1136).
cacacgggtcaatttgaat

SEQ ID NO: 546895 - DNA, 19 bp, Mus musculus
  siRNA target sequence for D430029O09Rik (NM_022814.1,1122-1140).
cgggtcaatttgaatgcat

SEQ ID NO: 546896 - DNA, 19 bp, Mus musculus
  siRNA target sequence for D430029O09Rik (NM_022814.1,1363-1381).
cctgaagcctcctgaaaat

SEQ ID NO: 546897 - DNA, 19 bp, Mus musculus
  siRNA target sequence for D430029O09Rik (NM_022814.1,1654-1672).
gcttacctgtcaaggaaat

SEQ ID NO: 546898 - DNA, 19 bp, Mus musculus
  siRNA target sequence for D430029O09Rik (NM_022814.1,1732-1750).
gcccaaaggcgtcatcatt

SEQ ID NO: 546899 - DNA, 19 bp, Mus musculus
  siRNA target sequence for D430029O09Rik (NM_022814.1,1733-1751).
cccaaaggcgtcatcattt

SEQ ID NO: 546900 - DNA, 19 bp, Mus musculus
  siRNA target sequence for D430029O09Rik (NM_022814.1,1807-1825).
ctgccgccagggatacatt

SEQ ID NO: 546901 - DNA, 19 bp, Mus musculus
  siRNA target sequence for D430029O09Rik (NM_022814.1,1809-1827).
gccgccagggatacatttt

SEQ ID NO: 546902 - DNA, 19 bp, Mus musculus
  siRNA target sequence for D430029O09Rik (NM_022814.1,1810-1828).
ccgccagggatacatttta

SEQ ID NO: 546903 - DNA, 19 bp, Mus musculus
  siRNA target sequence for D430029O09Rik (NM_022814.1,1811-1829).
cgccagggatacattttat

SEQ ID NO: 546904 - DNA, 19 bp, Mus musculus
  siRNA target sequence for D430029O09Rik (NM_022814.1,1887-1905).
cagctgtgtgcaaagatgt

SEQ ID NO: 546905 - DNA, 19 bp, Mus musculus
  siRNA target sequence for D430029O09Rik (NM_022814.1,1904-1922).
gtggaggctccacaaatca

SEQ ID NO: 546906 - DNA, 19 bp, Mus musculus
  siRNA target sequence for D430029O09Rik (NM_022814.1,1923-1941).
gctgtccaaatgacattga

SEQ ID NO: 546907 - DNA, 19 bp, Mus musculus
  siRNA target sequence for D430029O09Rik (NM_022814.1,1957-1975).
gcagcaggactctgctaat

SEQ ID NO: 546908 - DNA, 19 bp, Mus musculus
  siRNA target sequence for D430029O09Rik (NM_022814.1,1984-2002).
gcaagtcccaacagctaaa

SEQ ID NO: 546909 - DNA, 19 bp, Mus musculus
  siRNA target sequence for D430029O09Rik (NM_022814.1,2101-2119).
cgactcatccggtaaccaa

SEQ ID NO: 546910 - DNA, 19 bp, Mus musculus
  siRNA target sequence for D430029O09Rik (NM_022814.1,2155-2173).
ggaaccgcctgtcatagat

SEQ ID NO: 546911 - DNA, 19 bp, Mus musculus
  siRNA target sequence for D430029O09Rik (NM_022814.1,2156-2174).
gaaccgcctgtcatagatt

SEQ ID NO: 546912 - DNA, 19 bp, Mus musculus
  siRNA target sequence for D430029O09Rik (NM_022814.1,2261-2279).
gctgaattggtcattacca

SEQ ID NO: 546913 - DNA, 19 bp, Mus musculus
  siRNA target sequence for D430029O09Rik (NM_022814.1,2375-2393).
cacattgtcataaaaggtt

SEQ ID NO: 546914 - DNA, 19 bp, Mus musculus
  siRNA target sequence for D430029O09Rik (NM_022814.1,2420-2438).
gtaaacggggactttatct

SEQ ID NO: 546915 - DNA, 19 bp, Mus musculus
  siRNA target sequence for D430029O09Rik (NM_022814.1,2447-2465).
gatagtgctggagttaact

SEQ ID NO: 546916 - DNA, 19 bp, Mus musculus
  siRNA target sequence for D430029O09Rik (NM_022814.1,2482-2500).
ggagggctatgatttcaca

SEQ ID NO: 546917 - DNA, 19 bp, Mus musculus
  siRNA target sequence for D430029O09Rik (NM_022814.1,2504-2522).
gggtcaactgagaagtact

SEQ ID NO: 546918 - DNA, 19 bp, Mus musculus
  siRNA target sequence for D430029O09Rik (NM_022814.1,2505-2523).
ggtcaactgagaagtacta

SEQ ID NO: 546919 - DNA, 19 bp, Mus musculus
  siRNA target sequence for D430029O09Rik (NM_022814.1,2518-2536).
gtactactgtgcttttgaa

SEQ ID NO: 546920 - DNA, 19 bp, Mus musculus
  siRNA target sequence for D430029O09Rik (NM_022814.1,2552-2570).
ccaccatactctacagaat

SEQ ID NO: 546921 - DNA, 19 bp, Mus musculus
  siRNA target sequence for D430029O09Rik (NM_022814.1,2704-2722).
catggtcccgtccttttgt

SEQ ID NO: 546922 - DNA, 19 bp, Mus musculus
  siRNA target sequence for D430029O09Rik (NM_022814.1,2710-2728).
cccgtccttttgtaacgat

SEQ ID NO: 546923 - DNA, 19 bp, Mus musculus
  siRNA target sequence for D430029O09Rik (NM_022814.1,2775-2793).
gcatcgagtataattacaa

SEQ ID NO: 546924 - DNA, 19 bp, Mus musculus
  siRNA target sequence for D430029O09Rik (NM_022814.1,2779-2797).
cgagtataattacaactat

SEQ ID NO: 546925 - DNA, 19 bp, Mus musculus
  siRNA target sequence for D430029O09Rik (NM_022814.1,2835-2853).
caggcaacaggctggatta

SEQ ID NO: 546926 - DNA, 19 bp, Mus musculus
  siRNA target sequence for D430029O09Rik (NM_022814.1,2837-2855).
ggcaacaggctggattatt

SEQ ID NO: 546927 - DNA, 19 bp, Mus musculus
  siRNA target sequence for D430029O09Rik (NM_022814.1,2911-2929).
cagatcgtcacggattaaa

SEQ ID NO: 546928 - DNA, 19 bp, Mus musculus
  siRNA target sequence for D430029O09Rik (NM_022814.1,2917-2935).
gtcacggattaaaagaact

SEQ ID NO: 546929 - DNA, 19 bp, Mus musculus
  siRNA target sequence for D430029O09Rik (NM_022814.1,2950-2968).
ccccaaaattcagctaatt

SEQ ID NO: 546930 - DNA, 19 bp, Mus musculus
  siRNA target sequence for D430029O09Rik (NM_022814.1,3006-3024).
gaaacgatacccttgaatt

SEQ ID NO: 546931 - DNA, 19 bp, Mus musculus
  siRNA target sequence for D430029O09Rik (NM_022814.1,3034-3052).
gcagcgactcattaagaca

SEQ ID NO: 546932 - DNA, 19 bp, Mus musculus
  siRNA target sequence for D430029O09Rik (NM_022814.1,3035-3053).
cagcgactcattaagacat

SEQ ID NO: 546933 - DNA, 19 bp, Mus musculus
  siRNA target sequence for D430029O09Rik (NM_022814.1,3041-3059).
ctcattaagacattggaaa

SEQ ID NO: 546934 - DNA, 19 bp, Mus musculus
  siRNA target sequence for D430029O09Rik (NM_022814.1,3088-3106).
gaataaagagcccatgtat

SEQ ID NO: 546935 - DNA, 19 bp, Mus musculus
  siRNA target sequence for D430029O09Rik (NM_022814.1,3224-3242).
cccctgggaacctcttact

SEQ ID NO: 546936 - DNA, 19 bp, Mus musculus
  siRNA target sequence for D430029O09Rik (NM_022814.1,3226-3244).
cctgggaacctcttactct

SEQ ID NO: 546937 - DNA, 19 bp, Mus musculus
  siRNA target sequence for D430029O09Rik (NM_022814.1,3248-3266).
gagcattccacctgtgaaa

SEQ ID NO: 546938 - DNA, 19 bp, Mus musculus
  siRNA target sequence for D430029O09Rik (NM_022814.1,3340-3358).
ggaatacctccattcaaga

SEQ ID NO: 546939 - DNA, 19 bp, Mus musculus
  siRNA target sequence for D430029O09Rik (NM_022814.1,3357-3375).
gaagcgtctctgaatgcaa

SEQ ID NO: 546940 - DNA, 19 bp, Mus musculus
  siRNA target sequence for D430029O09Rik (NM_022814.1,3429-3447).
cgtgtccgctgggtactta

SEQ ID NO: 546941 - DNA, 19 bp, Mus musculus
  siRNA target sequence for D430029O09Rik (NM_022814.1,3430-3448).
gtgtccgctgggtacttat

SEQ ID NO: 546942 - DNA, 19 bp, Mus musculus
  siRNA target sequence for D430029O09Rik (NM_022814.1,3432-3450).
gtccgctgggtacttatca

SEQ ID NO: 546943 - DNA, 19 bp, Mus musculus
  siRNA target sequence for D430029O09Rik (NM_022814.1,3543-3561).
cctgcccagtaggagaatt

SEQ ID NO: 546944 - DNA, 19 bp, Mus musculus
  siRNA target sequence for D430029O09Rik (NM_022814.1,3589-3607).
cccttgccctcgagactat

SEQ ID NO: 546945 - DNA, 19 bp, Mus musculus
  siRNA target sequence for D430029O09Rik (NM_022814.1,3591-3609).
cttgccctcgagactatta

SEQ ID NO: 546946 - DNA, 19 bp, Mus musculus
  siRNA target sequence for D430029O09Rik (NM_022814.1,3594-3612).
gccctcgagactattacca

SEQ ID NO: 546947 - DNA, 19 bp, Mus musculus
  siRNA target sequence for D430029O09Rik (NM_022814.1,3640-3658).
cgcttgtcccttttatgga

SEQ ID NO: 546948 - DNA, 19 bp, Mus musculus
  siRNA target sequence for D430029O09Rik (NM_022814.1,3641-3659).
gcttgtcccttttatggaa

SEQ ID NO: 546949 - DNA, 19 bp, Mus musculus
  siRNA target sequence for D430029O09Rik (NM_022814.1,3692-3710).
gactgctcaagttttagct

SEQ ID NO: 546950 - DNA, 19 bp, Mus musculus
  siRNA target sequence for D430029O09Rik (NM_022814.1,3848-3866).
cttgggcgtggttatgtct

SEQ ID NO: 546951 - DNA, 19 bp, Mus musculus
  siRNA target sequence for D430029O09Rik (NM_022814.1,3881-3899).
ggatacacaggcttaaagt

SEQ ID NO: 546952 - DNA, 19 bp, Mus musculus
  siRNA target sequence for D430029O09Rik (NM_022814.1,3891-3909).
gcttaaagtgtgaaacaga

SEQ ID NO: 546953 - DNA, 19 bp, Mus musculus
  siRNA target sequence for D430029O09Rik (NM_022814.1,3938-3956).
ctcaatggtggaatttgta

SEQ ID NO: 546954 - DNA, 19 bp, Mus musculus
  siRNA target sequence for D430029O09Rik (NM_022814.1,3940-3958).
caatggtggaatttgtaga

SEQ ID NO: 546955 - DNA, 19 bp, Mus musculus
  siRNA target sequence for D430029O09Rik (NM_022814.1,3995-4013).
ggctattcaggtcaaatat

SEQ ID NO: 546956 - DNA, 19 bp, Mus musculus
  siRNA target sequence for D430029O09Rik (NM_022814.1,4045-4063).
cccttgcttaaataaagga

SEQ ID NO: 546957 - DNA, 19 bp, Mus musculus
  siRNA target sequence for D430029O09Rik (NM_022814.1,4098-4116).
cctgtgtgaaaggatacat

SEQ ID NO: 546958 - DNA, 19 bp, Mus musculus
  siRNA target sequence for D430029O09Rik (NM_022814.1,4128-4146).
gtgaaacagacgtcaatga

SEQ ID NO: 546959 - DNA, 19 bp, Mus musculus
  siRNA target sequence for D430029O09Rik (NM_022814.1,4165-4183).
cttaaacaacgcagtttgt

SEQ ID NO: 546960 - DNA, 19 bp, Mus musculus
  siRNA target sequence for D430029O09Rik (NM_022814.1,4231-4249).
gggtactcggtgtgaaaaa

SEQ ID NO: 546961 - DNA, 19 bp, Mus musculus
  siRNA target sequence for D430029O09Rik (NM_022814.1,4267-4285).
cagtcagccatgccaaaat

SEQ ID NO: 546962 - DNA, 19 bp, Mus musculus
  siRNA target sequence for D430029O09Rik (NM_022814.1,4405-4423).
cacctgtgtggatgaacta

SEQ ID NO: 546963 - DNA, 19 bp, Mus musculus
  siRNA target sequence for D430029O09Rik (NM_022814.1,4407-4425).
cctgtgtggatgaactaaa

SEQ ID NO: 546964 - DNA, 19 bp, Mus musculus
  siRNA target sequence for D430029O09Rik (NM_022814.1,4415-4433).
gatgaactaaactcataca

SEQ ID NO: 546965 - DNA, 19 bp, Mus musculus
  siRNA target sequence for D430029O09Rik (NM_022814.1,4428-4446).
catacagttgtaaatgtca

SEQ ID NO: 546966 - DNA, 19 bp, Mus musculus
  siRNA target sequence for D430029O09Rik (NM_022814.1,4488-4506).
ccggttttaacctggattt

SEQ ID NO: 546967 - DNA, 19 bp, Mus musculus
  siRNA target sequence for D430029O09Rik (NM_022814.1,4489-4507).
cggttttaacctggatttt

SEQ ID NO: 546968 - DNA, 19 bp, Mus musculus
  siRNA target sequence for D430029O09Rik (NM_022814.1,4717-4735).
caactgcccctccgtaaat

SEQ ID NO: 546969 - DNA, 19 bp, Mus musculus
  siRNA target sequence for D430029O09Rik (NM_022814.1,4720-4738).
ctgcccctccgtaaatgat

SEQ ID NO: 546970 - DNA, 19 bp, Mus musculus
  siRNA target sequence for D430029O09Rik (NM_022814.1,4741-4759).
catttggcatcatattgca

SEQ ID NO: 546971 - DNA, 19 bp, Mus musculus
  siRNA target sequence for D430029O09Rik (NM_022814.1,4747-4765).
gcatcatattgcaatcaca

SEQ ID NO: 546972 - DNA, 19 bp, Mus musculus
  siRNA target sequence for D430029O09Rik (NM_022814.1,4748-4766).
catcatattgcaatcacat

SEQ ID NO: 546973 - DNA, 19 bp, Mus musculus
  siRNA target sequence for D430029O09Rik (NM_022814.1,4781-4799).
ggagcctggagggtctata

SEQ ID NO: 546974 - DNA, 19 bp, Mus musculus
  siRNA target sequence for D430029O09Rik (NM_022814.1,4782-4800).
gagcctggagggtctatat

SEQ ID NO: 546975 - DNA, 19 bp, Mus musculus
  siRNA target sequence for D430029O09Rik (NM_022814.1,4857-4875).
gtggcggtgcattagttct

SEQ ID NO: 546976 - DNA, 19 bp, Mus musculus
  siRNA target sequence for D430029O09Rik (NM_022814.1,4971-4989).
ctccacagcaggtgaagtt

SEQ ID NO: 546977 - DNA, 19 bp, Mus musculus
  siRNA target sequence for D430029O09Rik (NM_022814.1,5021-5039).
cggggaaacgtgttagcat

SEQ ID NO: 546978 - DNA, 19 bp, Mus musculus
  siRNA target sequence for D430029O09Rik (NM_022814.1,5066-5084).
gggaaggtgaaggttgatt

SEQ ID NO: 546979 - DNA, 19 bp, Mus musculus
  siRNA target sequence for D430029O09Rik (NM_022814.1,5101-5119).
ctctgattgtccgtcttta

SEQ ID NO: 546980 - DNA, 19 bp, Mus musculus
  siRNA target sequence for D430029O09Rik (NM_022814.1,5103-5121).
ctgattgtccgtctttaga

SEQ ID NO: 546981 - DNA, 19 bp, Mus musculus
  siRNA target sequence for D430029O09Rik (NM_022814.1,5144-5162).
cctgcatcaggaaatcgaa

SEQ ID NO: 546982 - DNA, 19 bp, Mus musculus
  siRNA target sequence for D430029O09Rik (NM_022814.1,5145-5163).
ctgcatcaggaaatcgaaa

SEQ ID NO: 546983 - DNA, 19 bp, Mus musculus
  siRNA target sequence for D430029O09Rik (NM_022814.1,5213-5231).
gggaatcctgtgcagtatt

SEQ ID NO: 546984 - DNA, 19 bp, Mus musculus
  siRNA target sequence for D430029O09Rik (NM_022814.1,5387-5405).
ggtgattcccgaatgttct

SEQ ID NO: 546985 - DNA, 19 bp, Mus musculus
  siRNA target sequence for D430029O09Rik (NM_022814.1,5419-5437).
gagctggaacggcatttca

SEQ ID NO: 546986 - DNA, 19 bp, Mus musculus
  siRNA target sequence for D430029O09Rik (NM_022814.1,5567-5585).
gcagaacctgtaaaatgta

SEQ ID NO: 546987 - DNA, 19 bp, Mus musculus
  siRNA target sequence for D430029O09Rik (NM_022814.1,5611-5629).
ccactcttctggtgagatt

SEQ ID NO: 546988 - DNA, 19 bp, Mus musculus
  siRNA target sequence for D430029O09Rik (NM_022814.1,5638-5656).
gggtactgcagtcacattt

SEQ ID NO: 546989 - DNA, 19 bp, Mus musculus
  siRNA target sequence for D430029O09Rik (NM_022814.1,5792-5810).
gacgggtcggcattcacat

SEQ ID NO: 546990 - DNA, 19 bp, Mus musculus
  siRNA target sequence for D430029O09Rik (NM_022814.1,5830-5848).
caggtgtgataaaggatat

SEQ ID NO: 546991 - DNA, 19 bp, Mus musculus
  siRNA target sequence for D430029O09Rik (NM_022814.1,5910-5928).
ctgtgtgcgagctagtgaa

SEQ ID NO: 546992 - DNA, 19 bp, Mus musculus
  siRNA target sequence for D430029O09Rik (NM_022814.1,5936-5954).
cagcctgaggacataaata

SEQ ID NO: 546993 - DNA, 19 bp, Mus musculus
  siRNA target sequence for D430029O09Rik (NM_022814.1,5956-5974).
cggcaaatacatcttaagt

SEQ ID NO: 546994 - DNA, 19 bp, Mus musculus
  siRNA target sequence for D430029O09Rik (NM_022814.1,5977-5995).
gctcacctacctttctatt

SEQ ID NO: 546995 - DNA, 19 bp, Mus musculus
  siRNA target sequence for D430029O09Rik (NM_022814.1,5980-5998).
cacctacctttctattgca

SEQ ID NO: 546996 - DNA, 19 bp, Mus musculus
  siRNA target sequence for D430029O09Rik (NM_022814.1,6009-6027).
gtgagaacggatacagttt

SEQ ID NO: 546997 - DNA, 19 bp, Mus musculus
  siRNA target sequence for D430029O09Rik (NM_022814.1,6112-6130).
gcctccaatcgtcaaagat

SEQ ID NO: 546998 - DNA, 19 bp, Mus musculus
  siRNA target sequence for D430029O09Rik (NM_022814.1,6206-6224).
gggcctgacaccatcgtat

SEQ ID NO: 546999 - DNA, 19 bp, Mus musculus
  siRNA target sequence for D430029O09Rik (NM_022814.1,6229-6247).
ggccaacggcaaatggaat

SEQ ID NO: 547000 - DNA, 19 bp, Mus musculus
  siRNA target sequence for D430029O09Rik (NM_022814.1,6230-6248).
gccaacggcaaatggaatt

SEQ ID NO: 547001 - DNA, 19 bp, Mus musculus
  siRNA target sequence for D430029O09Rik (NM_022814.1,6232-6250).
caacggcaaatggaattca

SEQ ID NO: 547002 - DNA, 19 bp, Mus musculus
  siRNA target sequence for D430029O09Rik (NM_022814.1,6235-6253).
cggcaaatggaattcaagt

SEQ ID NO: 547003 - DNA, 19 bp, Mus musculus
  siRNA target sequence for D430029O09Rik (NM_022814.1,6335-6353).
ggagacaccgcgttttact

SEQ ID NO: 547004 - DNA, 19 bp, Mus musculus
  siRNA target sequence for D430029O09Rik (NM_022814.1,6336-6354).
gagacaccgcgttttacta

SEQ ID NO: 547005 - DNA, 19 bp, Mus musculus
  siRNA target sequence for D430029O09Rik (NM_022814.1,6338-6356).
gacaccgcgttttactact

SEQ ID NO: 547006 - DNA, 19 bp, Mus musculus
  siRNA target sequence for D430029O09Rik (NM_022814.1,6366-6384).
gttacagcctggctgataa

SEQ ID NO: 547007 - DNA, 19 bp, Mus musculus
  siRNA target sequence for D430029O09Rik (NM_022814.1,6571-6589).
gaacacctcagcgaagatt

SEQ ID NO: 547008 - DNA, 19 bp, Mus musculus
  siRNA target sequence for D430029O09Rik (NM_022814.1,6574-6592).
cacctcagcgaagattgaa

SEQ ID NO: 547009 - DNA, 19 bp, Mus musculus
  siRNA target sequence for D430029O09Rik (NM_022814.1,6686-6704).
ccgagtgggacaaactaca

SEQ ID NO: 547010 - DNA, 19 bp, Mus musculus
  siRNA target sequence for D430029O09Rik (NM_022814.1,6732-6750).
gccacaagggattctatat

SEQ ID NO: 547011 - DNA, 19 bp, Mus musculus
  siRNA target sequence for D430029O09Rik (NM_022814.1,7065-7083).
ggtccaaggttcagtttgt

SEQ ID NO: 547012 - DNA, 19 bp, Mus musculus
  siRNA target sequence for D430029O09Rik (NM_022814.1,7072-7090).
ggttcagtttgtctgtaat

SEQ ID NO: 547013 - DNA, 19 bp, Mus musculus
  siRNA target sequence for D430029O09Rik (NM_022814.1,7100-7118).
gagctcgttggtgataatt

SEQ ID NO: 547014 - DNA, 19 bp, Mus musculus
  siRNA target sequence for D430029O09Rik (NM_022814.1,7103-7121).
ctcgttggtgataattctt

SEQ ID NO: 547015 - DNA, 19 bp, Mus musculus
  siRNA target sequence for D430029O09Rik (NM_022814.1,7188-7206).
cagagcctcctctcttaga

SEQ ID NO: 547016 - DNA, 19 bp, Mus musculus
  siRNA target sequence for D430029O09Rik (NM_022814.1,7213-7231).
gctcgtattgaaggaatta

SEQ ID NO: 547017 - DNA, 19 bp, Mus musculus
  siRNA target sequence for D430029O09Rik (NM_022814.1,7216-7234).
cgtattgaaggaattagct

SEQ ID NO: 547018 - DNA, 19 bp, Mus musculus
  siRNA target sequence for D430029O09Rik (NM_022814.1,7217-7235).
gtattgaaggaattagctt

SEQ ID NO: 547019 - DNA, 19 bp, Mus musculus
  siRNA target sequence for D430029O09Rik (NM_022814.1,7241-7259).
gtaggagtgatgaccattt

SEQ ID NO: 547020 - DNA, 19 bp, Mus musculus
  siRNA target sequence for D430029O09Rik (NM_022814.1,7244-7262).
ggagtgatgaccatttcct

SEQ ID NO: 547021 - DNA, 19 bp, Mus musculus
  siRNA target sequence for D430029O09Rik (NM_022814.1,7249-7267).
gatgaccatttcctgtaaa

SEQ ID NO: 547022 - DNA, 19 bp, Mus musculus
  siRNA target sequence for D430029O09Rik (NM_022814.1,7309-7327).
gccatccgggcaatggaat

SEQ ID NO: 547023 - DNA, 19 bp, Mus musculus
  siRNA target sequence for D430029O09Rik (NM_022814.1,7318-7336).
gcaatggaatggttccttt

SEQ ID NO: 547024 - DNA, 19 bp, Mus musculus
  siRNA target sequence for D430029O09Rik (NM_022814.1,7419-7437).
gcagtactgtcaagtatct

SEQ ID NO: 547025 - DNA, 19 bp, Mus musculus
  siRNA target sequence for D430029O09Rik (NM_022814.1,7440-7458).
gtgtcgacgggtttttctt

SEQ ID NO: 547026 - DNA, 19 bp, Mus musculus
  siRNA target sequence for D430029O09Rik (NM_022814.1,7442-7460).
gtcgacgggtttttcttaa

SEQ ID NO: 547027 - DNA, 19 bp, Mus musculus
  siRNA target sequence for D430029O09Rik (NM_022814.1,7444-7462).
cgacgggtttttcttaaga

SEQ ID NO: 547028 - DNA, 19 bp, Mus musculus
  siRNA target sequence for D430029O09Rik (NM_022814.1,7577-7595).
caagggcttgcctatctca

SEQ ID NO: 547029 - DNA, 19 bp, Mus musculus
  siRNA target sequence for D430029O09Rik (NM_022814.1,7648-7666).
caccctctgtggggaaaat

SEQ ID NO: 547030 - DNA, 19 bp, Mus musculus
  siRNA target sequence for D430029O09Rik (NM_022814.1,7713-7731).
cagagcccaaggagatttt

SEQ ID NO: 547031 - DNA, 19 bp, Mus musculus
  siRNA target sequence for D430029O09Rik (NM_022814.1,7746-7764).
cttccgtgagctttcagta

SEQ ID NO: 547032 - DNA, 19 bp, Mus musculus
  siRNA target sequence for D430029O09Rik (NM_022814.1,7766-7784).
ggacaaaccatcacatact

SEQ ID NO: 547033 - DNA, 19 bp, Mus musculus
  siRNA target sequence for D430029O09Rik (NM_022814.1,7767-7785).
gacaaaccatcacatactt

SEQ ID NO: 547034 - DNA, 19 bp, Mus musculus
  siRNA target sequence for D430029O09Rik (NM_022814.1,7855-7873).
ggatcccccctcttgtgat

SEQ ID NO: 547035 - DNA, 19 bp, Mus musculus
  siRNA target sequence for D430029O09Rik (NM_022814.1,7916-7934).
gtagaaggtgcggattaca

SEQ ID NO: 547036 - DNA, 19 bp, Mus musculus
  siRNA target sequence for D430029O09Rik (NM_022814.1,7935-7953).
gatacggtgccatgatcat

SEQ ID NO: 547037 - DNA, 19 bp, Mus musculus
  siRNA target sequence for D430029O09Rik (NM_022814.1,7943-7961).
gccatgatcatctatagct

SEQ ID NO: 547038 - DNA, 19 bp, Mus musculus
  siRNA target sequence for D430029O09Rik (NM_022814.1,8056-8074).
cggtctccctcctcacata

SEQ ID NO: 547039 - DNA, 19 bp, Mus musculus
  siRNA target sequence for D430029O09Rik (NM_022814.1,8058-8076).
gtctccctcctcacataga

SEQ ID NO: 547040 - DNA, 19 bp, Mus musculus
  siRNA target sequence for D430029O09Rik (NM_022814.1,8060-8078).
ctccctcctcacatagact

SEQ ID NO: 547041 - DNA, 19 bp, Mus musculus
  siRNA target sequence for D430029O09Rik (NM_022814.1,8077-8095).
ctttggtgactgtactaaa

SEQ ID NO: 547042 - DNA, 19 bp, Mus musculus
  siRNA target sequence for D430029O09Rik (NM_022814.1,8153-8171).
ctggctcaccctcaacatt

SEQ ID NO: 547043 - DNA, 19 bp, Mus musculus
  siRNA target sequence for D430029O09Rik (NM_022814.1,8237-8255).
ctctatggcacgatggttt

SEQ ID NO: 547044 - DNA, 19 bp, Mus musculus
  siRNA target sequence for D430029O09Rik (NM_022814.1,8368-8386).
gcctgttgctcccgaaaat

SEQ ID NO: 547045 - DNA, 19 bp, Mus musculus
  siRNA target sequence for D430029O09Rik (NM_022814.1,8516-8534).
cgctgtgaagccatctcat

SEQ ID NO: 547046 - DNA, 19 bp, Mus musculus
  siRNA target sequence for D430029O09Rik (NM_022814.1,8554-8572).
ctggaatggatccatcaaa

SEQ ID NO: 547047 - DNA, 19 bp, Mus musculus
  siRNA target sequence for D430029O09Rik (NM_022814.1,8584-8602).
ctcctacctgggtgtgtta

SEQ ID NO: 547048 - DNA, 19 bp, Mus musculus
  siRNA target sequence for D430029O09Rik (NM_022814.1,8630-8648).
ctcaatggctctaagaaga

SEQ ID NO: 547049 - DNA, 19 bp, Mus musculus
  siRNA target sequence for D430029O09Rik (NM_022814.1,8765-8783).
caaaaggagattacatact

SEQ ID NO: 547050 - DNA, 19 bp, Mus musculus
  siRNA target sequence for D430029O09Rik (NM_022814.1,8787-8805).
gccgtgaagggttcatact

SEQ ID NO: 547051 - DNA, 19 bp, Mus musculus
  siRNA target sequence for D430029O09Rik (NM_022814.1,9085-9103).
cttccctaatggcttttct

SEQ ID NO: 547052 - DNA, 19 bp, Mus musculus
  siRNA target sequence for D430029O09Rik (NM_022814.1,9116-9134).
ggccacatacagtatcagt

SEQ ID NO: 547053 - DNA, 19 bp, Mus musculus
  siRNA target sequence for D430029O09Rik (NM_022814.1,9131-9149).
cagtgttttactggttata

SEQ ID NO: 547054 - DNA, 19 bp, Mus musculus
  siRNA target sequence for D430029O09Rik (NM_022814.1,9135-9153).
gttttactggttataagct

SEQ ID NO: 547055 - DNA, 19 bp, Mus musculus
  siRNA target sequence for D430029O09Rik (NM_022814.1,9144-9162).
gttataagcttcatggaaa

SEQ ID NO: 547056 - DNA, 19 bp, Mus musculus
  siRNA target sequence for D430029O09Rik (NM_022814.1,9155-9173).
catggaaacccatcaagaa

SEQ ID NO: 547057 - DNA, 19 bp, Mus musculus
  siRNA target sequence for D430029O09Rik (NM_022814.1,9231-9249).
gttccacacccatcattca

SEQ ID NO: 547058 - DNA, 19 bp, Mus musculus
  siRNA target sequence for D430029O09Rik (NM_022814.1,9258-9276).
ccatcaacgcaactgattt

SEQ ID NO: 547059 - DNA, 19 bp, Mus musculus
  siRNA target sequence for D430029O09Rik (NM_022814.1,9285-9303).
gaaagacggtccagattga

SEQ ID NO: 547060 - DNA, 19 bp, Mus musculus
  siRNA target sequence for D430029O09Rik (NM_022814.1,9295-9313).
ccagattgagtgcttcaaa

SEQ ID NO: 547061 - DNA, 19 bp, Mus musculus
  siRNA target sequence for D430029O09Rik (NM_022814.1,9319-9337).
caagctgcttggactttct

SEQ ID NO: 547062 - DNA, 19 bp, Mus musculus
  siRNA target sequence for D430029O09Rik (NM_022814.1,9444-9462).
gcctttcggaggacaatgt

SEQ ID NO: 547063 - DNA, 19 bp, Mus musculus
  siRNA target sequence for D430029O09Rik (NM_022814.1,9452-9470).
gaggacaatgtggtaactt

SEQ ID NO: 547064 - DNA, 19 bp, Mus musculus
  siRNA target sequence for D430029O09Rik (NM_022814.1,9455-9473).
gacaatgtggtaacttaca

SEQ ID NO: 547065 - DNA, 19 bp, Mus musculus
  siRNA target sequence for D430029O09Rik (NM_022814.1,9493-9511).
catgcaaggtagttcagat

SEQ ID NO: 547066 - DNA, 19 bp, Mus musculus
  siRNA target sequence for D430029O09Rik (NM_022814.1,9500-9518).
ggtagttcagatctgattt

SEQ ID NO: 547067 - DNA, 19 bp, Mus musculus
  siRNA target sequence for D430029O09Rik (NM_022814.1,9651-9669).
gtctggaagggtatgtgat

SEQ ID NO: 547068 - DNA, 19 bp, Mus musculus
  siRNA target sequence for D430029O09Rik (NM_022814.1,9656-9674).
gaagggtatgtgatggatt

SEQ ID NO: 547069 - DNA, 19 bp, Mus musculus
  siRNA target sequence for D430029O09Rik (NM_022814.1,9667-9685).
gatggattcggatacagat

SEQ ID NO: 547070 - DNA, 19 bp, Mus musculus
  siRNA target sequence for D430029O09Rik (NM_022814.1,9670-9688).
ggattcggatacagataca

SEQ ID NO: 547071 - DNA, 19 bp, Mus musculus
  siRNA target sequence for D430029O09Rik (NM_022814.1,9671-9689).
gattcggatacagatacat

SEQ ID NO: 547072 - DNA, 19 bp, Mus musculus
  siRNA target sequence for D430029O09Rik (NM_022814.1,9709-9727).
ccattgggtccctgaaaga

SEQ ID NO: 547073 - DNA, 19 bp, Mus musculus
  siRNA target sequence for D430029O09Rik (NM_022814.1,9710-9728).
cattgggtccctgaaagaa

SEQ ID NO: 547074 - DNA, 19 bp, Mus musculus
  siRNA target sequence for D430029O09Rik (NM_022814.1,9752-9770).
cctgtgccatccaacatga

SEQ ID NO: 547075 - DNA, 19 bp, Mus musculus
  siRNA target sequence for D430029O09Rik (NM_022814.1,9766-9784).
catgacacgcatacgtttt

SEQ ID NO: 547076 - DNA, 19 bp, Mus musculus
  siRNA target sequence for D430029O09Rik (NM_022814.1,9799-9817).
ccaggtgaacagacaagtt

SEQ ID NO: 547077 - DNA, 19 bp, Mus musculus
  siRNA target sequence for D430029O09Rik (NM_022814.1,9800-9818).
caggtgaacagacaagttt

SEQ ID NO: 547078 - DNA, 19 bp, Mus musculus
  siRNA target sequence for D430029O09Rik (NM_022814.1,9802-9820).
ggtgaacagacaagtttct

SEQ ID NO: 547079 - DNA, 19 bp, Mus musculus
  siRNA target sequence for D430029O09Rik (NM_022814.1,9851-9869).
ggagtgaactggtcaacat

SEQ ID NO: 547080 - DNA, 19 bp, Mus musculus
  siRNA target sequence for D430029O09Rik (NM_022814.1,9957-9975).
gctccgtggttggcaataa

SEQ ID NO: 547081 - DNA, 19 bp, Mus musculus
  siRNA target sequence for D430029O09Rik (NM_022814.1,10334-10352).
gtcgaccagaatgtatcta

SEQ ID NO: 547082 - DNA, 19 bp, Mus musculus
  siRNA target sequence for D430029O09Rik (NM_022814.1,10337-10355).
gaccagaatgtatctatca

SEQ ID NO: 547083 - DNA, 19 bp, Mus musculus
  siRNA target sequence for D430029O09Rik (NM_022814.1,10433-10451).
gccagatgtgaaaaaatct

SEQ ID NO: 547084 - DNA, 19 bp, Mus musculus
  siRNA target sequence for D430029O09Rik (NM_022814.1,10467-10485).
gtcacgtagagaatgcaat

SEQ ID NO: 547085 - DNA, 19 bp, Mus musculus
  siRNA target sequence for D430029O09Rik (NM_022814.1,10471-10489).
cgtagagaatgcaattgct

SEQ ID NO: 547086 - DNA, 19 bp, Mus musculus
  siRNA target sequence for D430029O09Rik (NM_022814.1,10488-10506).
ctcgaggagtgtattacca

SEQ ID NO: 547087 - DNA, 19 bp, Mus musculus
  siRNA target sequence for D430029O09Rik (NM_022814.1,10505-10523).
cagtatggggacatgatca

SEQ ID NO: 547088 - DNA, 19 bp, Mus musculus
  siRNA target sequence for D430029O09Rik (NM_022814.1,10522-10540).
cacctactcctgttacagt

SEQ ID NO: 547089 - DNA, 19 bp, Mus musculus
  siRNA target sequence for D430029O09Rik (NM_022814.1,10556-10574).
ggttccctccggagtgttt

SEQ ID NO: 547090 - DNA, 19 bp, Mus musculus
  siRNA target sequence for D430029O09Rik (NM_022814.1,10651-10669).
ctgtcaacgtccaaatgct

SEQ ID NO: 547091 - DNA, 19 bp, Mus musculus
  siRNA target sequence for D430029O09Rik (NM_022814.1,10719-10737).
gcatactcccctgtttgaa

SEQ ID NO: 547092 - DNA, 19 bp, Mus musculus
  siRNA target sequence for D430029O09Rik (NM_022814.1,10720-10738).
catactcccctgtttgaat

SEQ ID NO: 547093 - DNA, 19 bp, Mus musculus
  siRNA target sequence for D430029O09Rik (NM_022814.1,10854-10872).
caaaccgatgccattgtct

SEQ ID NO: 547094 - DNA, 19 bp, Mus musculus
  siRNA target sequence for D430029O09Rik (NM_022814.1,10889-10907).
catgattgttccaggaaaa

SEQ ID NO: 547095 - DNA, 19 bp, Mus musculus
  siRNA target sequence for D630008K06 (NM_177863.2,95-113).
ggcttcacacattaactat

SEQ ID NO: 547096 - DNA, 19 bp, Mus musculus
  siRNA target sequence for D630008K06 (NM_177863.2,97-115).
cttcacacattaactatgt

SEQ ID NO: 547097 - DNA, 19 bp, Mus musculus
  siRNA target sequence for D630008K06 (NM_177863.2,147-165).
gctgaccagttcacagtat

SEQ ID NO: 547098 - DNA, 19 bp, Mus musculus
  siRNA target sequence for D630008K06 (NM_177863.2,199-217).
caacatttcacgttatcat

SEQ ID NO: 547099 - DNA, 19 bp, Mus musculus
  siRNA target sequence for D630008K06 (NM_177863.2,202-220).
catttcacgttatcatcaa

SEQ ID NO: 547100 - DNA, 19 bp, Mus musculus
  siRNA target sequence for D630008K06 (NM_177863.2,215-233).
catcaaccccacaaacgat

SEQ ID NO: 547101 - DNA, 19 bp, Mus musculus
  siRNA target sequence for D630008K06 (NM_177863.2,452-470).
cgtggaccttctcaagaat

SEQ ID NO: 547102 - DNA, 19 bp, Mus musculus
  siRNA target sequence for D630008K06 (NM_177863.2,533-551).
gttgtcagacgggaaacat

SEQ ID NO: 547103 - DNA, 19 bp, Mus musculus
  siRNA target sequence for D630008K06 (NM_177863.2,536-554).
gtcagacgggaaacataaa

SEQ ID NO: 547104 - DNA, 19 bp, Mus musculus
  siRNA target sequence for D630008K06 (NM_177863.2,538-556).
cagacgggaaacataaaat

SEQ ID NO: 547105 - DNA, 19 bp, Mus musculus
  siRNA target sequence for D630008K06 (NM_177863.2,542-560).
cgggaaacataaaatcctt

SEQ ID NO: 547106 - DNA, 19 bp, Mus musculus
  siRNA target sequence for D630008K06 (NM_177863.2,558-576).
cttaaaaccatctcagtaa

SEQ ID NO: 547107 - DNA, 19 bp, Mus musculus
  siRNA target sequence for D630008K06 (NM_177863.2,656-674).
cctgtctagtgctgttctt

SEQ ID NO: 547108 - DNA, 19 bp, Mus musculus
  siRNA target sequence for D630008K06 (NM_177863.2,657-675).
ctgtctagtgctgttcttt

SEQ ID NO: 547109 - DNA, 19 bp, Mus musculus
  siRNA target sequence for D630008K06 (NM_177863.2,659-677).
gtctagtgctgttctttca

SEQ ID NO: 547110 - DNA, 19 bp, Mus musculus
  siRNA target sequence for D630008K06 (NM_177863.2,696-714).
cccagagagaagattcact

SEQ ID NO: 547111 - DNA, 19 bp, Mus musculus
  siRNA target sequence for D630008K06 (NM_177863.2,733-751).
cccaaaatggacaacttca

SEQ ID NO: 547112 - DNA, 19 bp, Mus musculus
  siRNA target sequence for D630008K06 (NM_177863.2,734-752).
ccaaaatggacaacttcaa

SEQ ID NO: 547113 - DNA, 19 bp, Mus musculus
  siRNA target sequence for D630008K06 (NM_177863.2,742-760).
gacaacttcaacttaagat

SEQ ID NO: 547114 - DNA, 19 bp, Mus musculus
  siRNA target sequence for D630008K06 (NM_177863.2,813-831).
gtggacctgaacttgctaa

SEQ ID NO: 547115 - DNA, 19 bp, Mus musculus
  siRNA target sequence for D630008K06 (NM_177863.2,819-837).
ctgaacttgctaagataca

SEQ ID NO: 547116 - DNA, 19 bp, Mus musculus
  siRNA target sequence for D630008K06 (NM_177863.2,916-934).
catttgactgtcacatcat

SEQ ID NO: 547117 - DNA, 19 bp, Mus musculus
  siRNA target sequence for D630008K06 (NM_177863.2,944-962).
catgggcaaaggtgatatt

SEQ ID NO: 547118 - DNA, 19 bp, Mus musculus
  siRNA target sequence for D630008K06 (NM_177863.2,949-967).
gcaaaggtgatattgtcat

SEQ ID NO: 547119 - DNA, 19 bp, Mus musculus
  siRNA target sequence for D7Ertd671e (NM_026555.1,92-110).
cgtttctgttgcttctctt

SEQ ID NO: 547120 - DNA, 19 bp, Mus musculus
  siRNA target sequence for D7Ertd671e (NM_026555.1,544-562).
gatgccgagacctacaaga

SEQ ID NO: 547121 - DNA, 19 bp, Mus musculus
  siRNA target sequence for Def6 (NM_027185.1,199-217).
cggtgtccagtcaaggtta

SEQ ID NO: 547122 - DNA, 19 bp, Mus musculus
  siRNA target sequence for Def6 (NM_027185.1,254-272).
ggaggagggagctttcgtt

SEQ ID NO: 547123 - DNA, 19 bp, Mus musculus
  siRNA target sequence for Def6 (NM_027185.1,341-359).
gagcagcccactctctaat

SEQ ID NO: 547124 - DNA, 19 bp, Mus musculus
  siRNA target sequence for Def6 (NM_027185.1,430-448).
ccgatgaggtagagtatct

SEQ ID NO: 547125 - DNA, 19 bp, Mus musculus
  siRNA target sequence for Def6 (NM_027185.1,622-640).
gcatggccatccaagaagt

SEQ ID NO: 547126 - DNA, 19 bp, Mus musculus
  siRNA target sequence for Def6 (NM_027185.1,840-858).
ggaaagcgctgcatgtttt

SEQ ID NO: 547127 - DNA, 19 bp, Mus musculus
  siRNA target sequence for Def6 (NM_027185.1,1341-1359).
caactagaggtgaaagcta

SEQ ID NO: 547128 - DNA, 19 bp, Mus musculus
  siRNA target sequence for Def6 (NM_027185.1,1621-1639).
ccagcaccaacgtgaaaca

SEQ ID NO: 547129 - DNA, 19 bp, Mus musculus
  siRNA target sequence for Def6 (NM_027185.1,1672-1690).
cgatcgagccaggagataa

SEQ ID NO: 547130 - DNA, 19 bp, Mus musculus
  siRNA target sequence for Def6 (NM_027185.1,1778-1796).
gggttcccaaggtaacaga

SEQ ID NO: 547131 - DNA, 19 bp, Mus musculus
  siRNA target sequence for Def6 (NM_027185.1,1793-1811).
cagaaccctctcagtcaat

SEQ ID NO: 547132 - DNA, 19 bp, Mus musculus
  siRNA target sequence for Dgka (NM_016811.2,378-396).
gctgcaaaagtacatagaa

SEQ ID NO: 547133 - DNA, 19 bp, Mus musculus
  siRNA target sequence for Dgka (NM_016811.2,382-400).
caaaagtacatagaatact

SEQ ID NO: 547134 - DNA, 19 bp, Mus musculus
  siRNA target sequence for Dgka (NM_016811.2,473-491).
ccattgggtacctaggatt

SEQ ID NO: 547135 - DNA, 19 bp, Mus musculus
  siRNA target sequence for Dgka (NM_016811.2,480-498).
gtacctaggatttgaacaa

SEQ ID NO: 547136 - DNA, 19 bp, Mus musculus
  siRNA target sequence for Dgka (NM_016811.2,484-502).
ctaggatttgaacaattca

SEQ ID NO: 547137 - DNA, 19 bp, Mus musculus
  siRNA target sequence for Dgka (NM_016811.2,487-505).
ggatttgaacaattcatga

SEQ ID NO: 547138 - DNA, 19 bp, Mus musculus
  siRNA target sequence for Dgka (NM_016811.2,628-646).
gatgtgtactgctacttca

SEQ ID NO: 547139 - DNA, 19 bp, Mus musculus
  siRNA target sequence for Dgka (NM_016811.2,682-700).
gagttcaccttcaagctat

SEQ ID NO: 547140 - DNA, 19 bp, Mus musculus
  siRNA target sequence for Dgka (NM_016811.2,734-752).
cggaagtggaaaaaatcat

SEQ ID NO: 547141 - DNA, 19 bp, Mus musculus
  siRNA target sequence for Dgka (NM_016811.2,762-780).
gatgcgagtggccgaatat

SEQ ID NO: 547142 - DNA, 19 bp, Mus musculus
  siRNA target sequence for Dgka (NM_016811.2,765-783).
gcgagtggccgaatatcta

SEQ ID NO: 547143 - DNA, 19 bp, Mus musculus
  siRNA target sequence for Dgka (NM_016811.2,767-785).
gagtggccgaatatctaga

SEQ ID NO: 547144 - DNA, 19 bp, Mus musculus
  siRNA target sequence for Dgka (NM_016811.2,920-938).
ggatggacgtgactatgaa

SEQ ID NO: 547145 - DNA, 19 bp, Mus musculus
  siRNA target sequence for Dgka (NM_016811.2,1044-1062).
cttctgtaagtacattgtt

SEQ ID NO: 547146 - DNA, 19 bp, Mus musculus
  siRNA target sequence for Dgka (NM_016811.2,1112-1130).
ccaagtctcggaaagacat

SEQ ID NO: 547147 - DNA, 19 bp, Mus musculus
  siRNA target sequence for Dgka (NM_016811.2,1132-1150).
ggtgtccagtcacacttat

SEQ ID NO: 547148 - DNA, 19 bp, Mus musculus
  siRNA target sequence for Dgka (NM_016811.2,1153-1171).
gttcgaggaggctgtcatt

SEQ ID NO: 547149 - DNA, 19 bp, Mus musculus
  siRNA target sequence for Dgka (NM_016811.2,1181-1199).
gtgaccgctgccagaaaaa

SEQ ID NO: 547150 - DNA, 19 bp, Mus musculus
  siRNA target sequence for Dgka (NM_016811.2,1183-1201).
gaccgctgccagaaaaaga

SEQ ID NO: 547151 - DNA, 19 bp, Mus musculus
  siRNA target sequence for Dgka (NM_016811.2,1301-1319).
ggttgctccgtgatcatat

SEQ ID NO: 547152 - DNA, 19 bp, Mus musculus
  siRNA target sequence for Dgka (NM_016811.2,1375-1393).
cacaagaccacagatgata

SEQ ID NO: 547153 - DNA, 19 bp, Mus musculus
  siRNA target sequence for Dgka (NM_016811.2,1377-1395).
caagaccacagatgataca

SEQ ID NO: 547154 - DNA, 19 bp, Mus musculus
  siRNA target sequence for Dgka (NM_016811.2,1447-1465).
ccccttctagtcttcatca

SEQ ID NO: 547155 - DNA, 19 bp, Mus musculus
  siRNA target sequence for Dgka (NM_016811.2,1449-1467).
ccttctagtcttcatcaat

SEQ ID NO: 547156 - DNA, 19 bp, Mus musculus
  siRNA target sequence for Dgka (NM_016811.2,1563-1581).
gccagggctcagattcttt

SEQ ID NO: 547157 - DNA, 19 bp, Mus musculus
  siRNA target sequence for Dgka (NM_016811.2,1592-1610).
ctcagttccggatattggt

SEQ ID NO: 547158 - DNA, 19 bp, Mus musculus
  siRNA target sequence for Dgka (NM_016811.2,1733-1751).
gatggggaagaggttatga

SEQ ID NO: 547159 - DNA, 19 bp, Mus musculus
  siRNA target sequence for Dgka (NM_016811.2,1871-1889).
ctcaaatcatcaataacta

SEQ ID NO: 547160 - DNA, 19 bp, Mus musculus
  siRNA target sequence for Dgka (NM_016811.2,2046-2064).
gtctgtaaccgttgagata

SEQ ID NO: 547161 - DNA, 19 bp, Mus musculus
  siRNA target sequence for Dgka (NM_016811.2,2104-2122).
ggcattgcggtattgaaca

SEQ ID NO: 547162 - DNA, 19 bp, Mus musculus
  siRNA target sequence for Dgka (NM_016811.2,2105-2123).
gcattgcggtattgaacat

SEQ ID NO: 547163 - DNA, 19 bp, Mus musculus
  siRNA target sequence for Dgka (NM_016811.2,2206-2224).
ggcagtgcggccaaaataa

SEQ ID NO: 547164 - DNA, 19 bp, Mus musculus
  siRNA target sequence for Dgka (NM_016811.2,2207-2225).
gcagtgcggccaaaataat

SEQ ID NO: 547165 - DNA, 19 bp, Mus musculus
  siRNA target sequence for Dgka (NM_016811.2,2291-2309).
gaatagagggtgcaattga

SEQ ID NO: 547166 - DNA, 19 bp, Mus musculus
  siRNA target sequence for Dgka (NM_016811.2,2373-2391).
cacattccagaccacaaaa

SEQ ID NO: 547167 - DNA, 19 bp, Mus musculus
  siRNA target sequence for Dgka (NM_016811.2,2393-2411).
ccctccccatgcaaattga

SEQ ID NO: 547168 - DNA, 19 bp, Mus musculus
  siRNA target sequence for Dgka (NM_016811.2,2431-2449).
gcaccctgtacaatcaaga

SEQ ID NO: 547169 - DNA, 19 bp, Mus musculus
  siRNA target sequence for Dgka (NM_016811.2,2432-2450).
caccctgtacaatcaagat

SEQ ID NO: 547170 - DNA, 19 bp, Mus musculus
  siRNA target sequence for Dgkb (NM_178681.2,464-482).
cagaattttcccaacttca

SEQ ID NO: 547171 - DNA, 19 bp, Mus musculus
  siRNA target sequence for Dgkb (NM_178681.2,483-501).
gaaatatgctgagtattct

SEQ ID NO: 547172 - DNA, 19 bp, Mus musculus
  siRNA target sequence for Dgkb (NM_178681.2,539-557).
gtaatggcgtgcttgcaaa

SEQ ID NO: 547173 - DNA, 19 bp, Mus musculus
  siRNA target sequence for Dgkb (NM_178681.2,544-562).
ggcgtgcttgcaaagtata

SEQ ID NO: 547174 - DNA, 19 bp, Mus musculus
  siRNA target sequence for Dgkb (NM_178681.2,545-563).
gcgtgcttgcaaagtataa

SEQ ID NO: 547175 - DNA, 19 bp, Mus musculus
  siRNA target sequence for Dgkb (NM_178681.2,546-564).
cgtgcttgcaaagtataat

SEQ ID NO: 547176 - DNA, 19 bp, Mus musculus
  siRNA target sequence for Dgkb (NM_178681.2,566-584).
ctgaagggaaacaagatat

SEQ ID NO: 547177 - DNA, 19 bp, Mus musculus
  siRNA target sequence for Dgkb (NM_178681.2,586-604).
cttaaccaaaccatagatt

SEQ ID NO: 547178 - DNA, 19 bp, Mus musculus
  siRNA target sequence for Dgkb (NM_178681.2,607-625).
gaaggcttcaagctattca

SEQ ID NO: 547179 - DNA, 19 bp, Mus musculus
  siRNA target sequence for Dgkb (NM_178681.2,644-662).
ctgagctgcctgacgattt

SEQ ID NO: 547180 - DNA, 19 bp, Mus musculus
  siRNA target sequence for Dgkb (NM_178681.2,646-664).
gagctgcctgacgatttca

SEQ ID NO: 547181 - DNA, 19 bp, Mus musculus
  siRNA target sequence for Dgkb (NM_178681.2,666-684).
cgcccacctttttatgtca

SEQ ID NO: 547182 - DNA, 19 bp, Mus musculus
  siRNA target sequence for Dgkb (NM_178681.2,667-685).
gcccacctttttatgtcat

SEQ ID NO: 547183 - DNA, 19 bp, Mus musculus
  siRNA target sequence for Dgkb (NM_178681.2,701-719).
cccattctagcccaaatgt

SEQ ID NO: 547184 - DNA, 19 bp, Mus musculus
  siRNA target sequence for Dgkb (NM_178681.2,702-720).
ccattctagcccaaatgta

SEQ ID NO: 547185 - DNA, 19 bp, Mus musculus
  siRNA target sequence for Dgkb (NM_178681.2,703-721).
cattctagcccaaatgtaa

SEQ ID NO: 547186 - DNA, 19 bp, Mus musculus
  siRNA target sequence for Dgkb (NM_178681.2,710-728).
gcccaaatgtaaagagtaa

SEQ ID NO: 547187 - DNA, 19 bp, Mus musculus
  siRNA target sequence for Dgkb (NM_178681.2,803-821).
catgctccccagaagtgat

SEQ ID NO: 547188 - DNA, 19 bp, Mus musculus
  siRNA target sequence for Dgkb (NM_178681.2,863-881).
gaggaagacccgaggataa

SEQ ID NO: 547189 - DNA, 19 bp, Mus musculus
  siRNA target sequence for Dgkb (NM_178681.2,866-884).
gaagacccgaggataagct

SEQ ID NO: 547190 - DNA, 19 bp, Mus musculus
  siRNA target sequence for Dgkb (NM_178681.2,927-945).
cctggacagctcggaatta

SEQ ID NO: 547191 - DNA, 19 bp, Mus musculus
  siRNA target sequence for Dgkb (NM_178681.2,930-948).
ggacagctcggaattagaa

SEQ ID NO: 547192 - DNA, 19 bp, Mus musculus
  siRNA target sequence for Dgkb (NM_178681.2,933-951).
cagctcggaattagaaaat

SEQ ID NO: 547193 - DNA, 19 bp, Mus musculus
  siRNA target sequence for Dgkb (NM_178681.2,935-953).
gctcggaattagaaaatat

SEQ ID NO: 547194 - DNA, 19 bp, Mus musculus
  siRNA target sequence for Dgkb (NM_178681.2,936-954).
ctcggaattagaaaatatt

SEQ ID NO: 547195 - DNA, 19 bp, Mus musculus
  siRNA target sequence for Dgkb (NM_178681.2,1084-1102).
caaggaggaatgacaacta

SEQ ID NO: 547196 - DNA, 19 bp, Mus musculus
  siRNA target sequence for Dgkb (NM_178681.2,1097-1115).
caactatcccacttctagt

SEQ ID NO: 547197 - DNA, 19 bp, Mus musculus
  siRNA target sequence for Dgkb (NM_178681.2,1119-1137).
gctgggcttggagaataat

SEQ ID NO: 547198 - DNA, 19 bp, Mus musculus
  siRNA target sequence for Dgkb (NM_178681.2,1163-1181).
ggcgactcaagcactttaa

SEQ ID NO: 547199 - DNA, 19 bp, Mus musculus
  siRNA target sequence for Dgkb (NM_178681.2,1165-1183).
cgactcaagcactttaaca

SEQ ID NO: 547200 - DNA, 19 bp, Mus musculus
  siRNA target sequence for Dgkb (NM_178681.2,1186-1204).
cctgcctactgcaatctct

SEQ ID NO: 547201 - DNA, 19 bp, Mus musculus
  siRNA target sequence for Dgkb (NM_178681.2,1375-1393).
ccaaccaagtgcgataagt

SEQ ID NO: 547202 - DNA, 19 bp, Mus musculus
  siRNA target sequence for Dgkb (NM_178681.2,1386-1404).
cgataagtgccacaaaaca

SEQ ID NO: 547203 - DNA, 19 bp, Mus musculus
  siRNA target sequence for Dgkb (NM_178681.2,1425-1443).
gacgggcctgcattgtgtt

SEQ ID NO: 547204 - DNA, 19 bp, Mus musculus
  siRNA target sequence for Dgkb (NM_178681.2,1505-1523).
gacccttgaaggaccatat

SEQ ID NO: 547205 - DNA, 19 bp, Mus musculus
  siRNA target sequence for Dgkb (NM_178681.2,1538-1556).
caatctgtccagttgtatt

SEQ ID NO: 547206 - DNA, 19 bp, Mus musculus
  siRNA target sequence for Dgkb (NM_178681.2,1542-1560).
ctgtccagttgtattgact

SEQ ID NO: 547207 - DNA, 19 bp, Mus musculus
  siRNA target sequence for Dgkb (NM_178681.2,1544-1562).
gtccagttgtattgactat

SEQ ID NO: 547208 - DNA, 19 bp, Mus musculus
  siRNA target sequence for Dgkb (NM_178681.2,1595-1613).
gacagtccacagctaaaaa

SEQ ID NO: 547209 - DNA, 19 bp, Mus musculus
  siRNA target sequence for Dgkb (NM_178681.2,1629-1647).
ccagcagccaaataaagca

SEQ ID NO: 547210 - DNA, 19 bp, Mus musculus
  siRNA target sequence for Dgkb (NM_178681.2,1685-1703).
ctatggatggacaaggttt

SEQ ID NO: 547211 - DNA, 19 bp, Mus musculus
  siRNA target sequence for Dgkb (NM_178681.2,1705-1723).
caggtaatggattcaaagt

SEQ ID NO: 547212 - DNA, 19 bp, Mus musculus
  siRNA target sequence for Dgkb (NM_178681.2,1708-1726).
gtaatggattcaaagttca

SEQ ID NO: 547213 - DNA, 19 bp, Mus musculus
  siRNA target sequence for Dgkb (NM_178681.2,1713-1731).
ggattcaaagttcaaatta

SEQ ID NO: 547214 - DNA, 19 bp, Mus musculus
  siRNA target sequence for Dgkg (NM_138650.1,119-137).
gatgtattggctgagttta

SEQ ID NO: 547215 - DNA, 19 bp, Mus musculus
  siRNA target sequence for Dgkg (NM_138650.1,326-344).
gagcccaatgtctcagatt

SEQ ID NO: 547216 - DNA, 19 bp, Mus musculus
  siRNA target sequence for Dgkg (NM_138650.1,328-346).
gcccaatgtctcagattat

SEQ ID NO: 547217 - DNA, 19 bp, Mus musculus
  siRNA target sequence for Dgkg (NM_138650.1,330-348).
ccaatgtctcagattataa

SEQ ID NO: 547218 - DNA, 19 bp, Mus musculus
  siRNA target sequence for Dgkg (NM_138650.1,383-401).
gctccagacactgaatcaa

SEQ ID NO: 547219 - DNA, 19 bp, Mus musculus
  siRNA target sequence for Dgkg (NM_138650.1,384-402).
ctccagacactgaatcaaa

SEQ ID NO: 547220 - DNA, 19 bp, Mus musculus
  siRNA target sequence for Dgkg (NM_138650.1,420-438).
caccatctaaagaactaga

SEQ ID NO: 547221 - DNA, 19 bp, Mus musculus
  siRNA target sequence for Dgkg (NM_138650.1,483-501).
cagatgctcccgtagtgta

SEQ ID NO: 547222 - DNA, 19 bp, Mus musculus
  siRNA target sequence for Dgkg (NM_138650.1,543-561).
ggcgacctcaggataagct

SEQ ID NO: 547223 - DNA, 19 bp, Mus musculus
  siRNA target sequence for Dgkg (NM_138650.1,544-562).
gcgacctcaggataagcta

SEQ ID NO: 547224 - DNA, 19 bp, Mus musculus
  siRNA target sequence for Dgkg (NM_138650.1,548-566).
cctcaggataagctagaat

SEQ ID NO: 547225 - DNA, 19 bp, Mus musculus
  siRNA target sequence for Dgkg (NM_138650.1,578-596).
ctctatgattcggatgaaa

SEQ ID NO: 547226 - DNA, 19 bp, Mus musculus
  siRNA target sequence for Dgkg (NM_138650.1,580-598).
ctatgattcggatgaaaat

SEQ ID NO: 547227 - DNA, 19 bp, Mus musculus
  siRNA target sequence for Dgkg (NM_138650.1,678-696).
cagagctcagacctatact

SEQ ID NO: 547228 - DNA, 19 bp, Mus musculus
  siRNA target sequence for Dgkg (NM_138650.1,680-698).
gagctcagacctatactga

SEQ ID NO: 547229 - DNA, 19 bp, Mus musculus
  siRNA target sequence for Dgkg (NM_138650.1,843-861).
ggaccctgaagcacttcaa

SEQ ID NO: 547230 - DNA, 19 bp, Mus musculus
  siRNA target sequence for Dgkg (NM_138650.1,920-938).
ctgtgctgcatctactgta

SEQ ID NO: 547231 - DNA, 19 bp, Mus musculus
  siRNA target sequence for Dgkg (NM_138650.1,922-940).
gtgctgcatctactgtaaa

SEQ ID NO: 547232 - DNA, 19 bp, Mus musculus
  siRNA target sequence for Dgkg (NM_138650.1,924-942).
gctgcatctactgtaaata

SEQ ID NO: 547233 - DNA, 19 bp, Mus musculus
  siRNA target sequence for Dgkg (NM_138650.1,928-946).
catctactgtaaatataca

SEQ ID NO: 547234 - DNA, 19 bp, Mus musculus
  siRNA target sequence for Dgkg (NM_138650.1,947-965).
gtccaccaacgctgtgtat

SEQ ID NO: 547235 - DNA, 19 bp, Mus musculus
  siRNA target sequence for Dgkg (NM_138650.1,952-970).
ccaacgctgtgtatccaaa

SEQ ID NO: 547236 - DNA, 19 bp, Mus musculus
  siRNA target sequence for Dgkg (NM_138650.1,953-971).
caacgctgtgtatccaaaa

SEQ ID NO: 547237 - DNA, 19 bp, Mus musculus
  siRNA target sequence for Dgkg (NM_138650.1,956-974).
cgctgtgtatccaaaacca

SEQ ID NO: 547238 - DNA, 19 bp, Mus musculus
  siRNA target sequence for Dgkg (NM_138650.1,980-998).
ggatgtgtgaaaacaaact

SEQ ID NO: 547239 - DNA, 19 bp, Mus musculus
  siRNA target sequence for Dgkg (NM_138650.1,1067-1085).
gaccggtgccacaaaagta

SEQ ID NO: 547240 - DNA, 19 bp, Mus musculus
  siRNA target sequence for Dgkg (NM_138650.1,1070-1088).
cggtgccacaaaagtatca

SEQ ID NO: 547241 - DNA, 19 bp, Mus musculus
  siRNA target sequence for Dgkg (NM_138650.1,1071-1089).
ggtgccacaaaagtatcaa

SEQ ID NO: 547242 - DNA, 19 bp, Mus musculus
  siRNA target sequence for Dgkg (NM_138650.1,1135-1153).
gacgtttcaccgcaaatgt

SEQ ID NO: 547243 - DNA, 19 bp, Mus musculus
  siRNA target sequence for Dgkg (NM_138650.1,1137-1155).
cgtttcaccgcaaatgtga

SEQ ID NO: 547244 - DNA, 19 bp, Mus musculus
  siRNA target sequence for Dgkg (NM_138650.1,1142-1160).
caccgcaaatgtgaattat

SEQ ID NO: 547245 - DNA, 19 bp, Mus musculus
  siRNA target sequence for Dgkg (NM_138650.1,1145-1163).
cgcaaatgtgaattatcga

SEQ ID NO: 547246 - DNA, 19 bp, Mus musculus
  siRNA target sequence for Dgkg (NM_138650.1,1277-1295).
gaacttgtaactcagtata

SEQ ID NO: 547247 - DNA, 19 bp, Mus musculus
  siRNA target sequence for Dgkg (NM_138650.1,1280-1298).
cttgtaactcagtataaga

SEQ ID NO: 547248 - DNA, 19 bp, Mus musculus
  siRNA target sequence for Dgkg (NM_138650.1,1283-1301).
gtaactcagtataagatca

SEQ ID NO: 547249 - DNA, 19 bp, Mus musculus
  siRNA target sequence for Dgkg (NM_138650.1,1345-1363).
caagagtggaggaagacaa

SEQ ID NO: 547250 - DNA, 19 bp, Mus musculus
  siRNA target sequence for Dgkg (NM_138650.1,1434-1452).
gacctacaccaggattgaa

SEQ ID NO: 547251 - DNA, 19 bp, Mus musculus
  siRNA target sequence for Dgkg (NM_138650.1,1736-1754).
gaccaagtcccatacaaca

SEQ ID NO: 547252 - DNA, 19 bp, Mus musculus
  siRNA target sequence for Dgkg (NM_138650.1,1739-1757).
caagtcccatacaacatca

SEQ ID NO: 547253 - DNA, 19 bp, Mus musculus
  siRNA target sequence for Dgkg (NM_138650.1,1742-1760).
gtcccatacaacatcatga

SEQ ID NO: 547254 - DNA, 19 bp, Mus musculus
  siRNA target sequence for Dgkg (NM_138650.1,1746-1764).
catacaacatcatgaacaa

SEQ ID NO: 547255 - DNA, 19 bp, Mus musculus
  siRNA target sequence for Dgkg (NM_138650.1,1858-1876).
caagctgtggtatttcgaa

SEQ ID NO: 547256 - DNA, 19 bp, Mus musculus
  siRNA target sequence for Dgkg (NM_138650.1,1979-1997).
gaaggcatcgccattctta

SEQ ID NO: 547257 - DNA, 19 bp, Mus musculus
  siRNA target sequence for Dgkg (NM_138650.1,1982-2000).
ggcatcgccattcttaata

SEQ ID NO: 547258 - DNA, 19 bp, Mus musculus
  siRNA target sequence for Dgkg (NM_138650.1,1983-2001).
gcatcgccattcttaatat

SEQ ID NO: 547259 - DNA, 19 bp, Mus musculus
  siRNA target sequence for Dgkg (NM_138650.1,2285-2303).
cagccacaatgcacgatta

SEQ ID NO: 547260 - DNA, 19 bp, Mus musculus
  siRNA target sequence for Dgkg (NM_138650.1,2287-2305).
gccacaatgcacgattaaa

SEQ ID NO: 547261 - DNA, 19 bp, Mus musculus
  siRNA target sequence for Dgkg (NM_138650.1,2288-2306).
ccacaatgcacgattaaaa

SEQ ID NO: 547262 - DNA, 19 bp, Mus musculus
  siRNA target sequence for Dgkg (NM_138650.1,2289-2307).
cacaatgcacgattaaaat

SEQ ID NO: 547263 - DNA, 19 bp, Mus musculus
  siRNA target sequence for Dlk1 (NM_010052.1,439-457).
ccctgcgccaacaatggaa

SEQ ID NO: 547264 - DNA, 19 bp, Mus musculus
  siRNA target sequence for Dlk1 (NM_010052.1,472-490).
gagaaaggccagtacgaat

SEQ ID NO: 547265 - DNA, 19 bp, Mus musculus
  siRNA target sequence for Dlk1 (NM_010052.1,1011-1029).
cctgaaggtgtccatgaaa

SEQ ID NO: 547266 - DNA, 19 bp, Mus musculus
  siRNA target sequence for Dlk1 (NM_010052.1,1022-1040).
ccatgaaagagctcaacaa

SEQ ID NO: 547267 - DNA, 19 bp, Mus musculus
  siRNA target sequence for Dlk1 (NM_010052.1,1179-1197).
cacatgcttcgcaagaaga

SEQ ID NO: 547268 - DNA, 19 bp, Mus musculus
  siRNA target sequence for Dlk1 (NM_010052.1,1203-1221).
ctcctgttgcagtataaca

SEQ ID NO: 547269 - DNA, 19 bp, Mus musculus
  siRNA target sequence for Dlk1 (NM_010052.1,1230-1248).
gagctggcggtcaatatca

SEQ ID NO: 547270 - DNA, 19 bp, Mus musculus
  siRNA target sequence for Dll1 (NM_007865.2,740-758).
cgatgacctcgcaacagaa

SEQ ID NO: 547271 - DNA, 19 bp, Mus musculus
  siRNA target sequence for Dll1 (NM_007865.2,741-759).
gatgacctcgcaacagaaa

SEQ ID NO: 547272 - DNA, 19 bp, Mus musculus
  siRNA target sequence for Dll1 (NM_007865.2,754-772).
cagaaaacccagaaagact

SEQ ID NO: 547273 - DNA, 19 bp, Mus musculus
  siRNA target sequence for Dll1 (NM_007865.2,800-818).
cctcactgtgggagaagaa

SEQ ID NO: 547274 - DNA, 19 bp, Mus musculus
  siRNA target sequence for Dll1 (NM_007865.2,850-868).
cagacctccggtactctta

SEQ ID NO: 547275 - DNA, 19 bp, Mus musculus
  siRNA target sequence for Dll1 (NM_007865.2,1266-1284).
ggccaggggagctacacat

SEQ ID NO: 547276 - DNA, 19 bp, Mus musculus
  siRNA target sequence for Dll1 (NM_007865.2,1269-1287).
caggggagctacacatgtt

SEQ ID NO: 547277 - DNA, 19 bp, Mus musculus
  siRNA target sequence for Dll1 (NM_007865.2,1289-1307).
ctgccgacctgggtataca

SEQ ID NO: 547278 - DNA, 19 bp, Mus musculus
  siRNA target sequence for Dll1 (NM_007865.2,1571-1589).
cggctcttccccttgttct

SEQ ID NO: 547279 - DNA, 19 bp, Mus musculus
  siRNA target sequence for Dll1 (NM_007865.2,1605-1623).
gtggacctcggcaactctt

SEQ ID NO: 547280 - DNA, 19 bp, Mus musculus
  siRNA target sequence for Dll1 (NM_007865.2,1657-1675).
ggtactgcgaggacaatgt

SEQ ID NO: 547281 - DNA, 19 bp, Mus musculus
  siRNA target sequence for Dll1 (NM_007865.2,2140-2158).
gcgagaaggacgtttctgt

SEQ ID NO: 547282 - DNA, 19 bp, Mus musculus
  siRNA target sequence for Dll1 (NM_007865.2,2141-2159).
cgagaaggacgtttctgtt

SEQ ID NO: 547283 - DNA, 19 bp, Mus musculus
  siRNA target sequence for Dll1 (NM_007865.2,2226-2244).
gccgagaagagcagcttta

SEQ ID NO: 547284 - DNA, 19 bp, Mus musculus
  siRNA target sequence for Dll1 (NM_007865.2,2227-2245).
ccgagaagagcagctttaa

SEQ ID NO: 547285 - DNA, 19 bp, Mus musculus
  siRNA target sequence for Dll1 (NM_007865.2,2257-2275).
ccactgtggactataacct

SEQ ID NO: 547286 - DNA, 19 bp, Mus musculus
  siRNA target sequence for Dll1 (NM_007865.2,2369-2387).
gaagatcgccccaacactt

SEQ ID NO: 547287 - DNA, 19 bp, Mus musculus
  siRNA target sequence for Dll1 (NM_007865.2,2418-2436).
ccagagtctgtctactcta

SEQ ID NO: 547288 - DNA, 19 bp, Mus musculus
  siRNA target sequence for Dll1 (NM_007865.2,2425-2443).
ctgtctactctacttcaaa

SEQ ID NO: 547289 - DNA, 19 bp, Mus musculus
  siRNA target sequence for Dll3 (NM_007866.1,215-233).
ggtgtcttcgagctacaaa

SEQ ID NO: 547290 - DNA, 19 bp, Mus musculus
  siRNA target sequence for Dll3 (NM_007866.1,294-312).
gcccttgccgcctcttctt

SEQ ID NO: 547291 - DNA, 19 bp, Mus musculus
  siRNA target sequence for Dll3 (NM_007866.1,1111-1129).
gtgtgttggcggtgaagat

SEQ ID NO: 547292 - DNA, 19 bp, Mus musculus
  siRNA target sequence for Dll3 (NM_007866.1,1765-1783).
caacaacctgaggttacaa

SEQ ID NO: 547293 - DNA, 19 bp, Mus musculus
  siRNA target sequence for Dll3 (NM_007866.1,1819-1837).
ctggaatcatcctgaagat

SEQ ID NO: 547294 - DNA, 19 bp, Mus musculus
  siRNA target sequence for Dll3 (NM_007866.1,1838-1856).
ggagactctagatccattt

SEQ ID NO: 547295 - DNA, 19 bp, Mus musculus
  siRNA target sequence for Dll3 (NM_007866.1,1839-1857).
gagactctagatccattta

SEQ ID NO: 547296 - DNA, 19 bp, Mus musculus
  siRNA target sequence for Dll3 (NM_007866.1,1845-1863).
ctagatccatttatgtcat

SEQ ID NO: 547297 - DNA, 19 bp, Mus musculus
  siRNA target sequence for Dll4 (NM_019454.1,582-600).
cgtcgtcagggacaagaat

SEQ ID NO: 547298 - DNA, 19 bp, Mus musculus
  siRNA target sequence for Dll4 (NM_019454.1,583-601).
gtcgtcagggacaagaata

SEQ ID NO: 547299 - DNA, 19 bp, Mus musculus
  siRNA target sequence for Dll4 (NM_019454.1,711-729).
gacttcgccaggaaactct

SEQ ID NO: 547300 - DNA, 19 bp, Mus musculus
  siRNA target sequence for Dll4 (NM_019454.1,779-797).
ggcgaacagacgagcaaaa

SEQ ID NO: 547301 - DNA, 19 bp, Mus musculus
  siRNA target sequence for Dll4 (NM_019454.1,780-798).
gcgaacagacgagcaaaat

SEQ ID NO: 547302 - DNA, 19 bp, Mus musculus
  siRNA target sequence for Dll4 (NM_019454.1,895-913).
cacttcggacattatgagt

SEQ ID NO: 547303 - DNA, 19 bp, Mus musculus
  siRNA target sequence for Dll4 (NM_019454.1,965-983).
gtgaccagcctatatgtct

SEQ ID NO: 547304 - DNA, 19 bp, Mus musculus
  siRNA target sequence for Dll4 (NM_019454.1,1053-1071).
gggtcgcctgtgcaatgaa

SEQ ID NO: 547305 - DNA, 19 bp, Mus musculus
  siRNA target sequence for Dll4 (NM_019454.1,1054-1072).
ggtcgcctgtgcaatgaat

SEQ ID NO: 547306 - DNA, 19 bp, Mus musculus
  siRNA target sequence for Dll4 (NM_019454.1,1057-1075).
cgcctgtgcaatgaatgta

SEQ ID NO: 547307 - DNA, 19 bp, Mus musculus
  siRNA target sequence for Dll4 (NM_019454.1,1138-1156).
ggatggggaggtctgtttt

SEQ ID NO: 547308 - DNA, 19 bp, Mus musculus
  siRNA target sequence for Dll4 (NM_019454.1,1157-1175).
gtgaccaagatctcaacta

SEQ ID NO: 547309 - DNA, 19 bp, Mus musculus
  siRNA target sequence for Dll4 (NM_019454.1,1494-1512).
ctttaccggctctaactgt

SEQ ID NO: 547310 - DNA, 19 bp, Mus musculus
  siRNA target sequence for Dll4 (NM_019454.1,1770-1788).
ctccggaccctgcttcaat

SEQ ID NO: 547311 - DNA, 19 bp, Mus musculus
  siRNA target sequence for Dll4 (NM_019454.1,1805-1823).
ctggcctctccccaaacaa

SEQ ID NO: 547312 - DNA, 19 bp, Mus musculus
  siRNA target sequence for Dll4 (NM_019454.1,1807-1825).
ggcctctccccaaacaact

SEQ ID NO: 547313 - DNA, 19 bp, Mus musculus
  siRNA target sequence for Dll4 (NM_019454.1,1808-1826).
gcctctccccaaacaactt

SEQ ID NO: 547314 - DNA, 19 bp, Mus musculus
  siRNA target sequence for Dll4 (NM_019454.1,1827-1845).
cgtctgcaactgtccttat

SEQ ID NO: 547315 - DNA, 19 bp, Mus musculus
  siRNA target sequence for Dll4 (NM_019454.1,2006-2024).
gcagggaagccatgaacaa

SEQ ID NO: 547316 - DNA, 19 bp, Mus musculus
  siRNA target sequence for Dll4 (NM_019454.1,2007-2025).
cagggaagccatgaacaat

SEQ ID NO: 547317 - DNA, 19 bp, Mus musculus
  siRNA target sequence for Dll4 (NM_019454.1,2110-2128).
ggtctggacaagtccaatt

SEQ ID NO: 547318 - DNA, 19 bp, Mus musculus
  siRNA target sequence for Dll4 (NM_019454.1,2262-2280).
gaagccagagtgtcgaata

SEQ ID NO: 547319 - DNA, 19 bp, Mus musculus
  siRNA target sequence for Dll4 (NM_019454.1,2340-2358).
gaggaacgagtgtgtgatt

SEQ ID NO: 547320 - DNA, 19 bp, Mus musculus
  siRNA target sequence for Dner (NM_152915.1,757-775).
cacctattgtcagtttgtt

SEQ ID NO: 547321 - DNA, 19 bp, Mus musculus
  siRNA target sequence for Dner (NM_152915.1,846-864).
gctacctctgcatttgcaa

SEQ ID NO: 547322 - DNA, 19 bp, Mus musculus
  siRNA target sequence for Dner (NM_152915.1,896-914).
ccacttcccagtattccaa

SEQ ID NO: 547323 - DNA, 19 bp, Mus musculus
  siRNA target sequence for Dner (NM_152915.1,1134-1152).
gcctagtgtcttttgaagt

SEQ ID NO: 547324 - DNA, 19 bp, Mus musculus
  siRNA target sequence for Dner (NM_152915.1,1159-1177).
gaacacctctgtaaagatt

SEQ ID NO: 547325 - DNA, 19 bp, Mus musculus
  siRNA target sequence for Dner (NM_152915.1,1178-1196).
cggcaggatgccaattctt

SEQ ID NO: 547326 - DNA, 19 bp, Mus musculus
  siRNA target sequence for Dner (NM_152915.1,1321-1339).
gggacccaaccacttcatt

SEQ ID NO: 547327 - DNA, 19 bp, Mus musculus
  siRNA target sequence for Dner (NM_152915.1,1325-1343).
cccaaccacttcattggtt

SEQ ID NO: 547328 - DNA, 19 bp, Mus musculus
  siRNA target sequence for Dner (NM_152915.1,1348-1366).
gaatgactctgttgctaaa

SEQ ID NO: 547329 - DNA, 19 bp, Mus musculus
  siRNA target sequence for Dner (NM_152915.1,1375-1393).
ggctttgcgtttaacactt

SEQ ID NO: 547330 - DNA, 19 bp, Mus musculus
  siRNA target sequence for Dner (NM_152915.1,1428-1446).
gccactcaaatgacttaga

SEQ ID NO: 547331 - DNA, 19 bp, Mus musculus
  siRNA target sequence for Dner (NM_152915.1,1430-1448).
cactcaaatgacttagagt

SEQ ID NO: 547332 - DNA, 19 bp, Mus musculus
  siRNA target sequence for Dner (NM_152915.1,1477-1495).
gccatcagaggcaaccttt

SEQ ID NO: 547333 - DNA, 19 bp, Mus musculus
  siRNA target sequence for Dner (NM_152915.1,1478-1496).
ccatcagaggcaacctttt

SEQ ID NO: 547334 - DNA, 19 bp, Mus musculus
  siRNA target sequence for Dner (NM_152915.1,1503-1521).
cctgccaggaccagtacat

SEQ ID NO: 547335 - DNA, 19 bp, Mus musculus
  siRNA target sequence for Dner (NM_152915.1,1504-1522).
ctgccaggaccagtacatt

SEQ ID NO: 547336 - DNA, 19 bp, Mus musculus
  siRNA target sequence for Dner (NM_152915.1,1570-1588).
gaatgaggcgagctgtatt

SEQ ID NO: 547337 - DNA, 19 bp, Mus musculus
  siRNA target sequence for Dner (NM_152915.1,1578-1596).
cgagctgtattgatgcaaa

SEQ ID NO: 547338 - DNA, 19 bp, Mus musculus
  siRNA target sequence for Dner (NM_152915.1,1606-1624).
ggatgggagcaatttcact

SEQ ID NO: 547339 - DNA, 19 bp, Mus musculus
  siRNA target sequence for Dner (NM_152915.1,1607-1625).
gatgggagcaatttcactt

SEQ ID NO: 547340 - DNA, 19 bp, Mus musculus
  siRNA target sequence for Dner (NM_152915.1,1654-1672).
gctttgccagtccaagatt

SEQ ID NO: 547341 - DNA, 19 bp, Mus musculus
  siRNA target sequence for Dner (NM_152915.1,1659-1677).
gccagtccaagattgatta

SEQ ID NO: 547342 - DNA, 19 bp, Mus musculus
  siRNA target sequence for Dner (NM_152915.1,1684-1702).
cctagacccatgcagaaat

SEQ ID NO: 547343 - DNA, 19 bp, Mus musculus
  siRNA target sequence for Dner (NM_152915.1,1759-1777).
cttcggctccgcttgtgaa

SEQ ID NO: 547344 - DNA, 19 bp, Mus musculus
  siRNA target sequence for Dner (NM_152915.1,1764-1782).
gctccgcttgtgaagagaa

SEQ ID NO: 547345 - DNA, 19 bp, Mus musculus
  siRNA target sequence for Dner (NM_152915.1,1996-2014).
ctgtgaggaggaatacaat

SEQ ID NO: 547346 - DNA, 19 bp, Mus musculus
  siRNA target sequence for Dner (NM_152915.1,1998-2016).
gtgaggaggaatacaatga

SEQ ID NO: 547347 - DNA, 19 bp, Mus musculus
  siRNA target sequence for Dner (NM_152915.1,2103-2121).
gaacacactgcgaactgta

SEQ ID NO: 547348 - DNA, 19 bp, Mus musculus
  siRNA target sequence for Dner (NM_152915.1,2126-2144).
gacccctgtgctaacatca

SEQ ID NO: 547349 - DNA, 19 bp, Mus musculus
  siRNA target sequence for Dner (NM_152915.1,2228-2246).
gacattgacatcaatgaat

SEQ ID NO: 547350 - DNA, 19 bp, Mus musculus
  siRNA target sequence for Dner (NM_152915.1,2236-2254).
catcaatgaatgtgatagt

SEQ ID NO: 547351 - DNA, 19 bp, Mus musculus
  siRNA target sequence for Dner (NM_152915.1,2327-2345).
gtgggagcaaactgtgaaa

SEQ ID NO: 547352 - DNA, 19 bp, Mus musculus
  siRNA target sequence for Dner (NM_152915.1,2331-2349).
gagcaaactgtgaaatcca

SEQ ID NO: 547353 - DNA, 19 bp, Mus musculus
  siRNA target sequence for Dner (NM_152915.1,2397-2415).
ctcggcactccctctacat

SEQ ID NO: 547354 - DNA, 19 bp, Mus musculus
  siRNA target sequence for Dner (NM_152915.1,2399-2417).
cggcactccctctacatca

SEQ ID NO: 547355 - DNA, 19 bp, Mus musculus
  siRNA target sequence for Dner (NM_152915.1,2402-2420).
cactccctctacatcatca

SEQ ID NO: 547356 - DNA, 19 bp, Mus musculus
  siRNA target sequence for Dner (NM_152915.1,2520-2538).
cctatgaggagttctacaa

SEQ ID NO: 547357 - DNA, 19 bp, Mus musculus
  siRNA target sequence for Dner (NM_152915.1,2672-2690).
cccttggtcacactgatta

SEQ ID NO: 547358 - DNA, 19 bp, Mus musculus
  siRNA target sequence for Dner (NM_152915.1,2674-2692).
cttggtcacactgattaaa

SEQ ID NO: 547359 - DNA, 19 bp, Mus musculus
  siRNA target sequence for Dsc1 (NM_013504.2,147-165).
ccagggagcaccttctcta

SEQ ID NO: 547360 - DNA, 19 bp, Mus musculus
  siRNA target sequence for Dsc1 (NM_013504.2,231-249).
cacgttccctctcatctta

SEQ ID NO: 547361 - DNA, 19 bp, Mus musculus
  siRNA target sequence for Dsc1 (NM_013504.2,259-277).
cacctgtaggcaaagtgaa

SEQ ID NO: 547362 - DNA, 19 bp, Mus musculus
  siRNA target sequence for Dsc1 (NM_013504.2,339-357).
ctagaagacggcacaattt

SEQ ID NO: 547363 - DNA, 19 bp, Mus musculus
  siRNA target sequence for Dsc1 (NM_013504.2,342-360).
gaagacggcacaatttaca

SEQ ID NO: 547364 - DNA, 19 bp, Mus musculus
  siRNA target sequence for Dsc1 (NM_013504.2,345-363).
gacggcacaatttacacaa

SEQ ID NO: 547365 - DNA, 19 bp, Mus musculus
  siRNA target sequence for Dsc1 (NM_013504.2,420-438).
ggtcaagggcaggaacaaa

SEQ ID NO: 547366 - DNA, 19 bp, Mus musculus
  siRNA target sequence for Dsc1 (NM_013504.2,453-471).
gtactgtcagcaagagaaa

SEQ ID NO: 547367 - DNA, 19 bp, Mus musculus
  siRNA target sequence for Dsc1 (NM_013504.2,496-514).
ccaaagagccagtacacaa

SEQ ID NO: 547368 - DNA, 19 bp, Mus musculus
  siRNA target sequence for Dsc1 (NM_013504.2,510-528).
cacaaccgcagtaagagaa

SEQ ID NO: 547369 - DNA, 19 bp, Mus musculus
  siRNA target sequence for Dsc1 (NM_013504.2,560-578).
gaactctttgggtccattt

SEQ ID NO: 547370 - DNA, 19 bp, Mus musculus
  siRNA target sequence for Dsc1 (NM_013504.2,614-632).
ccagaattacaccatcttt

SEQ ID NO: 547371 - DNA, 19 bp, Mus musculus
  siRNA target sequence for Dsc1 (NM_013504.2,657-675).
gacaaagagccttacaatt

SEQ ID NO: 547372 - DNA, 19 bp, Mus musculus
  siRNA target sequence for Dsc1 (NM_013504.2,693-711).
gacaccggggacatctatt

SEQ ID NO: 547373 - DNA, 19 bp, Mus musculus
  siRNA target sequence for Dsc1 (NM_013504.2,695-713).
caccggggacatctattgt

SEQ ID NO: 547374 - DNA, 19 bp, Mus musculus
  siRNA target sequence for Dsc1 (NM_013504.2,707-725).
ctattgtacccgaagcatt

SEQ ID NO: 547375 - DNA, 19 bp, Mus musculus
  siRNA target sequence for Dsc1 (NM_013504.2,721-739).
gcattgaccgtgaacagta

SEQ ID NO: 547376 - DNA, 19 bp, Mus musculus
  siRNA target sequence for Dsc1 (NM_013504.2,722-740).
cattgaccgtgaacagtat

SEQ ID NO: 547377 - DNA, 19 bp, Mus musculus
  siRNA target sequence for Dsc1 (NM_013504.2,730-748).
gtgaacagtatgaccaatt

SEQ ID NO: 547378 - DNA, 19 bp, Mus musculus
  siRNA target sequence for Dsc1 (NM_013504.2,799-817).
ctctccccctgctgtttaa

SEQ ID NO: 547379 - DNA, 19 bp, Mus musculus
  siRNA target sequence for Dsc1 (NM_013504.2,809-827).
gctgtttaaggttgaagat

SEQ ID NO: 547380 - DNA, 19 bp, Mus musculus
  siRNA target sequence for Dsc1 (NM_013504.2,836-854).
caatgccccatattttgaa

SEQ ID NO: 547381 - DNA, 19 bp, Mus musculus
  siRNA target sequence for Dsc1 (NM_013504.2,912-930).
caagtgactgccatagaca

SEQ ID NO: 547382 - DNA, 19 bp, Mus musculus
  siRNA target sequence for Dsc1 (NM_013504.2,932-950).
ggatgagccaggaactcta

SEQ ID NO: 547383 - DNA, 19 bp, Mus musculus
  siRNA target sequence for Dsc1 (NM_013504.2,951-969).
cacactcgtctgaagtaca

SEQ ID NO: 547384 - DNA, 19 bp, Mus musculus
  siRNA target sequence for Dsc1 (NM_013504.2,953-971).
cactcgtctgaagtacaaa

SEQ ID NO: 547385 - DNA, 19 bp, Mus musculus
  siRNA target sequence for Dsc1 (NM_013504.2,955-973).
ctcgtctgaagtacaaaat

SEQ ID NO: 547386 - DNA, 19 bp, Mus musculus
  siRNA target sequence for Dsc1 (NM_013504.2,957-975).
cgtctgaagtacaaaatct

SEQ ID NO: 547387 - DNA, 19 bp, Mus musculus
  siRNA target sequence for Dsc1 (NM_013504.2,1036-1054).
ctaccaccacacctttact

SEQ ID NO: 547388 - DNA, 19 bp, Mus musculus
  siRNA target sequence for Dsc1 (NM_013504.2,1060-1078).
gagagaaatgtgacactta

SEQ ID NO: 547389 - DNA, 19 bp, Mus musculus
  siRNA target sequence for Dsc1 (NM_013504.2,1062-1080).
gagaaatgtgacacttaca

SEQ ID NO: 547390 - DNA, 19 bp, Mus musculus
  siRNA target sequence for Dsc1 (NM_013504.2,1170-1188).
gacaactcgccatacttca

SEQ ID NO: 547391 - DNA, 19 bp, Mus musculus
  siRNA target sequence for Dsc1 (NM_013504.2,1187-1205).
cacccaaacttcttatact

SEQ ID NO: 547392 - DNA, 19 bp, Mus musculus
  siRNA target sequence for Dsc1 (NM_013504.2,1190-1208).
ccaaacttcttatactaca

SEQ ID NO: 547393 - DNA, 19 bp, Mus musculus
  siRNA target sequence for Dsc1 (NM_013504.2,1225-1243).
gaattgatgttgagattct

SEQ ID NO: 547394 - DNA, 19 bp, Mus musculus
  siRNA target sequence for Dsc1 (NM_013504.2,1251-1269).
gtggtgcacgaccaagatt

SEQ ID NO: 547395 - DNA, 19 bp, Mus musculus
  siRNA target sequence for Dsc1 (NM_013504.2,1284-1302).
cactcgaaggcggtataca

SEQ ID NO: 547396 - DNA, 19 bp, Mus musculus
  siRNA target sequence for Dsc1 (NM_013504.2,1286-1304).
ctcgaaggcggtatacaca

SEQ ID NO: 547397 - DNA, 19 bp, Mus musculus
  siRNA target sequence for Dsc1 (NM_013504.2,1288-1306).
cgaaggcggtatacacaat

SEQ ID NO: 547398 - DNA, 19 bp, Mus musculus
  siRNA target sequence for Dsc1 (NM_013504.2,1292-1310).
ggcggtatacacaatccta

SEQ ID NO: 547399 - DNA, 19 bp, Mus musculus
  siRNA target sequence for Dsc1 (NM_013504.2,1293-1311).
gcggtatacacaatcctaa

SEQ ID NO: 547400 - DNA, 19 bp, Mus musculus
  siRNA target sequence for Dsc1 (NM_013504.2,1294-1312).
cggtatacacaatcctaaa

SEQ ID NO: 547401 - DNA, 19 bp, Mus musculus
  siRNA target sequence for Dsc1 (NM_013504.2,1319-1337).
cgaaaacgggaacttcaaa

SEQ ID NO: 547402 - DNA, 19 bp, Mus musculus
  siRNA target sequence for Dsc1 (NM_013504.2,1325-1343).
cgggaacttcaaaatcaca

SEQ ID NO: 547403 - DNA, 19 bp, Mus musculus
  siRNA target sequence for Dsc1 (NM_013504.2,1340-1358).
cacaacggatccaaataca

SEQ ID NO: 547404 - DNA, 19 bp, Mus musculus
  siRNA target sequence for Dsc1 (NM_013504.2,1345-1363).
cggatccaaatacaaatga

SEQ ID NO: 547405 - DNA, 19 bp, Mus musculus
  siRNA target sequence for Dsc1 (NM_013504.2,1408-1426).
gccaagtcactctgcaaat

SEQ ID NO: 547406 - DNA, 19 bp, Mus musculus
  siRNA target sequence for Dsc1 (NM_013504.2,1421-1439).
gcaaattggtgtccttaat

SEQ ID NO: 547407 - DNA, 19 bp, Mus musculus
  siRNA target sequence for Dsc1 (NM_013504.2,1541-1559).
gccaccagtcaaagtcatt

SEQ ID NO: 547408 - DNA, 19 bp, Mus musculus
  siRNA target sequence for Dsc1 (NM_013504.2,1635-1653).
gaaggcttaaggtatgaga

SEQ ID NO: 547409 - DNA, 19 bp, Mus musculus
  siRNA target sequence for Dsc1 (NM_013504.2,1665-1683).
gaagataattggtttgaga

SEQ ID NO: 547410 - DNA, 19 bp, Mus musculus
  siRNA target sequence for Dsc1 (NM_013504.2,1668-1686).
gataattggtttgagatta

SEQ ID NO: 547411 - DNA, 19 bp, Mus musculus
  siRNA target sequence for Dsc1 (NM_013504.2,1724-1742).
ggacagagagtcgaagttt

SEQ ID NO: 547412 - DNA, 19 bp, Mus musculus
  siRNA target sequence for Dsc1 (NM_013504.2,1729-1747).
gagagtcgaagtttgtgaa

SEQ ID NO: 547413 - DNA, 19 bp, Mus musculus
  siRNA target sequence for Dsc1 (NM_013504.2,1731-1749).
gagtcgaagtttgtgaaaa

SEQ ID NO: 547414 - DNA, 19 bp, Mus musculus
  siRNA target sequence for Dsc1 (NM_013504.2,1804-1822).
caggaacactggtagttct

SEQ ID NO: 547415 - DNA, 19 bp, Mus musculus
  siRNA target sequence for Dsc1 (NM_013504.2,1857-1875).
gacaaggaagtgaccattt

SEQ ID NO: 547416 - DNA, 19 bp, Mus musculus
  siRNA target sequence for Dsc1 (NM_013504.2,1899-1917).
gttttggaacctatagatt

SEQ ID NO: 547417 - DNA, 19 bp, Mus musculus
  siRNA target sequence for Dsc1 (NM_013504.2,1973-1991).
caaactttggactctagaa

SEQ ID NO: 547418 - DNA, 19 bp, Mus musculus
  siRNA target sequence for Dsc1 (NM_013504.2,2019-2037).
cgtcaacgacacaatctta

SEQ ID NO: 547419 - DNA, 19 bp, Mus musculus
  siRNA target sequence for Dsc1 (NM_013504.2,2020-2038).
gtcaacgacacaatcttaa

SEQ ID NO: 547420 - DNA, 19 bp, Mus musculus
  siRNA target sequence for Dsc1 (NM_013504.2,2022-2040).
caacgacacaatcttaatt

SEQ ID NO: 547421 - DNA, 19 bp, Mus musculus
  siRNA target sequence for Dsc1 (NM_013504.2,2025-2043).
cgacacaatcttaattata

SEQ ID NO: 547422 - DNA, 19 bp, Mus musculus
  siRNA target sequence for Dsc1 (NM_013504.2,2030-2048).
caatcttaattataactat

SEQ ID NO: 547423 - DNA, 19 bp, Mus musculus
  siRNA target sequence for Dsc1 (NM_013504.2,2083-2101).
gtttttccgcaaaacatgt

SEQ ID NO: 547424 - DNA, 19 bp, Mus musculus
  siRNA target sequence for Dsc1 (NM_013504.2,2090-2108).
cgcaaaacatgtattatca

SEQ ID NO: 547425 - DNA, 19 bp, Mus musculus
  siRNA target sequence for Dsc1 (NM_013504.2,2112-2130).
cgagtgtgtgactgtacaa

SEQ ID NO: 547426 - DNA, 19 bp, Mus musculus
  siRNA target sequence for Dsc1 (NM_013504.2,2131-2149).
ctccaacagaatgtagaat

SEQ ID NO: 547427 - DNA, 19 bp, Mus musculus
  siRNA target sequence for Dsc1 (NM_013504.2,2163-2181).
gagagggatgctaaaccaa

SEQ ID NO: 547428 - DNA, 19 bp, Mus musculus
  siRNA target sequence for Dsc1 (NM_013504.2,2165-2183).
gagggatgctaaaccaaat

SEQ ID NO: 547429 - DNA, 19 bp, Mus musculus
  siRNA target sequence for Dsc1 (NM_013504.2,2167-2185).
gggatgctaaaccaaatat

SEQ ID NO: 547430 - DNA, 19 bp, Mus musculus
  siRNA target sequence for Dsc1 (NM_013504.2,2168-2186).
ggatgctaaaccaaatata

SEQ ID NO: 547431 - DNA, 19 bp, Mus musculus
  siRNA target sequence for Dsc1 (NM_013504.2,2173-2191).
ctaaaccaaatataatcct

SEQ ID NO: 547432 - DNA, 19 bp, Mus musculus
  siRNA target sequence for Dsc1 (NM_013504.2,2310-2328).
gtagctcagcaaaatttaa

SEQ ID NO: 547433 - DNA, 19 bp, Mus musculus
  siRNA target sequence for Dsc1 (NM_013504.2,2361-2379).
gtgacggaagccaatatta

SEQ ID NO: 547434 - DNA, 19 bp, Mus musculus
  siRNA target sequence for Dsc1 (NM_013504.2,2365-2383).
cggaagccaatattagact

SEQ ID NO: 547435 - DNA, 19 bp, Mus musculus
  siRNA target sequence for Dsc1 (NM_013504.2,2431-2449).
ctcttggtggtcaaggaat

SEQ ID NO: 547436 - DNA, 19 bp, Mus musculus
  siRNA target sequence for Dsc1 (NM_013504.2,2529-2547).
gagcctggccgatatgctt

SEQ ID NO: 547437 - DNA, 19 bp, Mus musculus
  siRNA target sequence for Dsc1 (NM_013504.2,2574-2592).
cctcggcttggtgaagaat

SEQ ID NO: 547438 - DNA, 19 bp, Mus musculus
  siRNA target sequence for Dsc2 (NM_013505.2,338-356).
ctctgatgcctgtaaagaa

SEQ ID NO: 547439 - DNA, 19 bp, Mus musculus
  siRNA target sequence for Dsc2 (NM_013505.2,340-358).
ctgatgcctgtaaagaagt

SEQ ID NO: 547440 - DNA, 19 bp, Mus musculus
  siRNA target sequence for Dsc2 (NM_013505.2,413-431).
cctgatggactgccttaaa

SEQ ID NO: 547441 - DNA, 19 bp, Mus musculus
  siRNA target sequence for Dsc2 (NM_013505.2,433-451).
cagcagacatagttcatct

SEQ ID NO: 547442 - DNA, 19 bp, Mus musculus
  siRNA target sequence for Dsc2 (NM_013505.2,574-592).
gggagatatctgtccattt

SEQ ID NO: 547443 - DNA, 19 bp, Mus musculus
  siRNA target sequence for Dsc2 (NM_013505.2,598-616).
gcccagtagaggtactaaa

SEQ ID NO: 547444 - DNA, 19 bp, Mus musculus
  siRNA target sequence for Dsc2 (NM_013505.2,599-617).
cccagtagaggtactaaat

SEQ ID NO: 547445 - DNA, 19 bp, Mus musculus
  siRNA target sequence for Dsc2 (NM_013505.2,601-619).
cagtagaggtactaaataa

SEQ ID NO: 547446 - DNA, 19 bp, Mus musculus
  siRNA target sequence for Dsc2 (NM_013505.2,603-621).
gtagaggtactaaataaaa

SEQ ID NO: 547447 - DNA, 19 bp, Mus musculus
  siRNA target sequence for Dsc2 (NM_013505.2,676-694).
cttgttccatgctagagaa

SEQ ID NO: 547448 - DNA, 19 bp, Mus musculus
  siRNA target sequence for Dsc2 (NM_013505.2,682-700).
ccatgctagagaattcatt

SEQ ID NO: 547449 - DNA, 19 bp, Mus musculus
  siRNA target sequence for Dsc2 (NM_013505.2,738-756).
gacacagctcaaaactata

SEQ ID NO: 547450 - DNA, 19 bp, Mus musculus
  siRNA target sequence for Dsc2 (NM_013505.2,773-791).
cagaggtccaggagttgat

SEQ ID NO: 547451 - DNA, 19 bp, Mus musculus
  siRNA target sequence for Dsc2 (NM_013505.2,775-793).
gaggtccaggagttgataa

SEQ ID NO: 547452 - DNA, 19 bp, Mus musculus
  siRNA target sequence for Dsc2 (NM_013505.2,789-807).
gataaagaacctctaaact

SEQ ID NO: 547453 - DNA, 19 bp, Mus musculus
  siRNA target sequence for Dsc2 (NM_013505.2,858-876).
gatcgtgagcagtatgagt

SEQ ID NO: 547454 - DNA, 19 bp, Mus musculus
  siRNA target sequence for Dsc2 (NM_013505.2,931-949).
cactgccgctcctcattaa

SEQ ID NO: 547455 - DNA, 19 bp, Mus musculus
  siRNA target sequence for Dsc2 (NM_013505.2,937-955).
cgctcctcattaaaataga

SEQ ID NO: 547456 - DNA, 19 bp, Mus musculus
  siRNA target sequence for Dsc2 (NM_013505.2,954-972).
gaggacgagaacgataatt

SEQ ID NO: 547457 - DNA, 19 bp, Mus musculus
  siRNA target sequence for Dsc2 (NM_013505.2,965-983).
cgataattacccgatcttt

SEQ ID NO: 547458 - DNA, 19 bp, Mus musculus
  siRNA target sequence for Dsc2 (NM_013505.2,966-984).
gataattacccgatcttta

SEQ ID NO: 547459 - DNA, 19 bp, Mus musculus
  siRNA target sequence for Dsc2 (NM_013505.2,976-994).
cgatctttacacagaaact

SEQ ID NO: 547460 - DNA, 19 bp, Mus musculus
  siRNA target sequence for Dsc2 (NM_013505.2,1000-1018).
gcttcacagttcaggaaaa

SEQ ID NO: 547461 - DNA, 19 bp, Mus musculus
  siRNA target sequence for Dsc2 (NM_013505.2,1014-1032).
gaaaatagtcgcattggtt

SEQ ID NO: 547462 - DNA, 19 bp, Mus musculus
  siRNA target sequence for Dsc2 (NM_013505.2,1021-1039).
gtcgcattggttctattgt

SEQ ID NO: 547463 - DNA, 19 bp, Mus musculus
  siRNA target sequence for Dsc2 (NM_013505.2,1125-1143).
ccacccatgctatttacta

SEQ ID NO: 547464 - DNA, 19 bp, Mus musculus
  siRNA target sequence for Dsc2 (NM_013505.2,1184-1202).
gctggacagagagttaatt

SEQ ID NO: 547465 - DNA, 19 bp, Mus musculus
  siRNA target sequence for Dsc2 (NM_013505.2,1192-1210).
gagagttaattgacaagta

SEQ ID NO: 547466 - DNA, 19 bp, Mus musculus
  siRNA target sequence for Dsc2 (NM_013505.2,1203-1221).
gacaagtaccagttgctaa

SEQ ID NO: 547467 - DNA, 19 bp, Mus musculus
  siRNA target sequence for Dsc2 (NM_013505.2,1274-1292).
gtgcatcattactattgaa

SEQ ID NO: 547468 - DNA, 19 bp, Mus musculus
  siRNA target sequence for Dsc2 (NM_013505.2,1316-1334).
gttcactcgcactacgtat

SEQ ID NO: 547469 - DNA, 19 bp, Mus musculus
  siRNA target sequence for Dsc2 (NM_013505.2,1367-1385).
ggaaatcttgcgacttact

SEQ ID NO: 547470 - DNA, 19 bp, Mus musculus
  siRNA target sequence for Dsc2 (NM_013505.2,1378-1396).
gacttactgttcaggataa

SEQ ID NO: 547471 - DNA, 19 bp, Mus musculus
  siRNA target sequence for Dsc2 (NM_013505.2,1384-1402).
ctgttcaggataaagattt

SEQ ID NO: 547472 - DNA, 19 bp, Mus musculus
  siRNA target sequence for Dsc2 (NM_013505.2,1404-1422).
gttaactcacctaattgga

SEQ ID NO: 547473 - DNA, 19 bp, Mus musculus
  siRNA target sequence for Dsc2 (NM_013505.2,1414-1432).
ctaattggagagctaatta

SEQ ID NO: 547474 - DNA, 19 bp, Mus musculus
  siRNA target sequence for Dsc2 (NM_013505.2,1436-1454).
cattttgaagggcaatgaa

SEQ ID NO: 547475 - DNA, 19 bp, Mus musculus
  siRNA target sequence for Dsc2 (NM_013505.2,1497-1515).
ggcattctgtgtgtgatta

SEQ ID NO: 547476 - DNA, 19 bp, Mus musculus
  siRNA target sequence for Dsc2 (NM_013505.2,1498-1516).
gcattctgtgtgtgattaa

SEQ ID NO: 547477 - DNA, 19 bp, Mus musculus
  siRNA target sequence for Dsc2 (NM_013505.2,1550-1568).
cctgcaaattggagtagtt

SEQ ID NO: 547478 - DNA, 19 bp, Mus musculus
  siRNA target sequence for Dsc2 (NM_013505.2,1551-1569).
ctgcaaattggagtagtta

SEQ ID NO: 547479 - DNA, 19 bp, Mus musculus
  siRNA target sequence for Dsc2 (NM_013505.2,1553-1571).
gcaaattggagtagttaat

SEQ ID NO: 547480 - DNA, 19 bp, Mus musculus
  siRNA target sequence for Dsc2 (NM_013505.2,1628-1646).
gactgtcaccgtgacaaat

SEQ ID NO: 547481 - DNA, 19 bp, Mus musculus
  siRNA target sequence for Dsc2 (NM_013505.2,1679-1697).
gcaaactgtgaggattcaa

SEQ ID NO: 547482 - DNA, 19 bp, Mus musculus
  siRNA target sequence for Dsc2 (NM_013505.2,1708-1726).
cagttgggactagaaatga

SEQ ID NO: 547483 - DNA, 19 bp, Mus musculus
  siRNA target sequence for Dsc2 (NM_013505.2,1714-1732).
ggactagaaatgatggata

SEQ ID NO: 547484 - DNA, 19 bp, Mus musculus
  siRNA target sequence for Dsc2 (NM_013505.2,1715-1733).
gactagaaatgatggatat

SEQ ID NO: 547485 - DNA, 19 bp, Mus musculus
  siRNA target sequence for Dsc2 (NM_013505.2,1759-1777).
gcagcagtggcataaggta

SEQ ID NO: 547486 - DNA, 19 bp, Mus musculus
  siRNA target sequence for Dsc2 (NM_013505.2,1805-1823).
ggtcactgttaatgaagat

SEQ ID NO: 547487 - DNA, 19 bp, Mus musculus
  siRNA target sequence for Dsc2 (NM_013505.2,1821-1839).
gattcaggatcgatcacta

SEQ ID NO: 547488 - DNA, 19 bp, Mus musculus
  siRNA target sequence for Dsc2 (NM_013505.2,1825-1843).
caggatcgatcactatttt

SEQ ID NO: 547489 - DNA, 19 bp, Mus musculus
  siRNA target sequence for Dsc2 (NM_013505.2,1862-1880).
ggctgagactgtcagaaat

SEQ ID NO: 547490 - DNA, 19 bp, Mus musculus
  siRNA target sequence for Dsc2 (NM_013505.2,1945-1963).
gaatcatacttgaagatgt

SEQ ID NO: 547491 - DNA, 19 bp, Mus musculus
  siRNA target sequence for Dsc2 (NM_013505.2,2018-2036).
catgtcctctgctgaaatt

SEQ ID NO: 547492 - DNA, 19 bp, Mus musculus
  siRNA target sequence for Dsc2 (NM_013505.2,2063-2081).
gaatggcccaccatttgat

SEQ ID NO: 547493 - DNA, 19 bp, Mus musculus
  siRNA target sequence for Dsc2 (NM_013505.2,2067-2085).
ggcccaccatttgatttca

SEQ ID NO: 547494 - DNA, 19 bp, Mus musculus
  siRNA target sequence for Dsc2 (NM_013505.2,2095-2113).
gctctgattcggaagttca

SEQ ID NO: 547495 - DNA, 19 bp, Mus musculus
  siRNA target sequence for Dsc2 (NM_013505.2,2122-2140).
ggaggctaacaagaatcaa

SEQ ID NO: 547496 - DNA, 19 bp, Mus musculus
  siRNA target sequence for Dsc2 (NM_013505.2,2127-2145).
ctaacaagaatcaatgata

SEQ ID NO: 547497 - DNA, 19 bp, Mus musculus
  siRNA target sequence for Dsc2 (NM_013505.2,2146-2164).
cagcagctcgtctttccta

SEQ ID NO: 547498 - DNA, 19 bp, Mus musculus
  siRNA target sequence for Dsc2 (NM_013505.2,2152-2170).
ctcgtctttcctatcagaa

SEQ ID NO: 547499 - DNA, 19 bp, Mus musculus
  siRNA target sequence for Dsc2 (NM_013505.2,2168-2186).
gaacgacccttcatttgga

SEQ ID NO: 547500 - DNA, 19 bp, Mus musculus
  siRNA target sequence for Dsc2 (NM_013505.2,2174-2192).
cccttcatttggatcctat

SEQ ID NO: 547501 - DNA, 19 bp, Mus musculus
  siRNA target sequence for Dsc2 (NM_013505.2,2220-2238).
cttggtctgtcctcagtaa

SEQ ID NO: 547502 - DNA, 19 bp, Mus musculus
  siRNA target sequence for Dsc2 (NM_013505.2,2335-2353).
catgggccatccttgctat

SEQ ID NO: 547503 - DNA, 19 bp, Mus musculus
  siRNA target sequence for Dsc2 (NM_013505.2,2338-2356).
gggccatccttgctatact

SEQ ID NO: 547504 - DNA, 19 bp, Mus musculus
  siRNA target sequence for Dsc2 (NM_013505.2,2340-2358).
gccatccttgctatactgt

SEQ ID NO: 547505 - DNA, 19 bp, Mus musculus
  siRNA target sequence for Dsc2 (NM_013505.2,2341-2359).
ccatccttgctatactgtt

SEQ ID NO: 547506 - DNA, 19 bp, Mus musculus
  siRNA target sequence for Dsc2 (NM_013505.2,2361-2379).
ggcatagccttgctatttt

SEQ ID NO: 547507 - DNA, 19 bp, Mus musculus
  siRNA target sequence for Dsc2 (NM_013505.2,2363-2381).
catagccttgctattttgt

SEQ ID NO: 547508 - DNA, 19 bp, Mus musculus
  siRNA target sequence for Dsc2 (NM_013505.2,2413-2431).
gggcatcaaaacaacagaa

SEQ ID NO: 547509 - DNA, 19 bp, Mus musculus
  siRNA target sequence for Dsc2 (NM_013505.2,2457-2475).
cagaacctaattgtatcaa

SEQ ID NO: 547510 - DNA, 19 bp, Mus musculus
  siRNA target sequence for Dsc2 (NM_013505.2,2493-2511).
gatgacaaagtttattcca

SEQ ID NO: 547511 - DNA, 19 bp, Mus musculus
  siRNA target sequence for Dsc2 (NM_013505.2,2516-2534).
cggcttgacaactcaaact

SEQ ID NO: 547512 - DNA, 19 bp, Mus musculus
  siRNA target sequence for Dsc2 (NM_013505.2,2518-2536).
gcttgacaactcaaactat

SEQ ID NO: 547513 - DNA, 19 bp, Mus musculus
  siRNA target sequence for Dsc2 (NM_013505.2,2600-2618).
gaccattgagatggtaaaa

SEQ ID NO: 547514 - DNA, 19 bp, Mus musculus
  siRNA target sequence for Dsc2 (NM_013505.2,2645-2663).
cagaggggctggctatcat

SEQ ID NO: 547515 - DNA, 19 bp, Mus musculus
  siRNA target sequence for Dsc2 (NM_013505.2,2728-2746).
cagagtggtacaatttcat

SEQ ID NO: 547516 - DNA, 19 bp, Mus musculus
  siRNA target sequence for Dsc2 (NM_013505.2,2750-2768).
gccccgacttggtgatgaa

SEQ ID NO: 547517 - DNA, 19 bp, Mus musculus
  siRNA target sequence for Dsc2 (NM_013505.2,2751-2769).
ccccgacttggtgatgaaa

SEQ ID NO: 547518 - DNA, 19 bp, Mus musculus
  siRNA target sequence for Dsc3 (NM_007882.2,234-252).
ccctctgggtcttcagttt

SEQ ID NO: 547519 - DNA, 19 bp, Mus musculus
  siRNA target sequence for Dsc3 (NM_007882.2,254-272).
gttggtgaagcctgtaaaa

SEQ ID NO: 547520 - DNA, 19 bp, Mus musculus
  siRNA target sequence for Dsc3 (NM_007882.2,294-312).
caacactagaggtagacaa

SEQ ID NO: 547521 - DNA, 19 bp, Mus musculus
  siRNA target sequence for Dsc3 (NM_007882.2,297-315).
cactagaggtagacaagat

SEQ ID NO: 547522 - DNA, 19 bp, Mus musculus
  siRNA target sequence for Dsc3 (NM_007882.2,299-317).
ctagaggtagacaagatca

SEQ ID NO: 547523 - DNA, 19 bp, Mus musculus
  siRNA target sequence for Dsc3 (NM_007882.2,319-337).
cggaagagttagtttgaaa

SEQ ID NO: 547524 - DNA, 19 bp, Mus musculus
  siRNA target sequence for Dsc3 (NM_007882.2,368-386).
ccaagtgatcctgatttca

SEQ ID NO: 547525 - DNA, 19 bp, Mus musculus
  siRNA target sequence for Dsc3 (NM_007882.2,392-410).
ctagatgatgggtcagttt

SEQ ID NO: 547526 - DNA, 19 bp, Mus musculus
  siRNA target sequence for Dsc3 (NM_007882.2,418-436).
cagagctgttgtattgtct

SEQ ID NO: 547527 - DNA, 19 bp, Mus musculus
  siRNA target sequence for Dsc3 (NM_007882.2,428-446).
gtattgtctgatgagaaaa

SEQ ID NO: 547528 - DNA, 19 bp, Mus musculus
  siRNA target sequence for Dsc3 (NM_007882.2,585-603).
cgccaataccgtgttcaat

SEQ ID NO: 547529 - DNA, 19 bp, Mus musculus
  siRNA target sequence for Dsc3 (NM_007882.2,593-611).
ccgtgttcaatgcaagaaa

SEQ ID NO: 547530 - DNA, 19 bp, Mus musculus
  siRNA target sequence for Dsc3 (NM_007882.2,670-688).
ctacacagtcttctattca

SEQ ID NO: 547531 - DNA, 19 bp, Mus musculus
  siRNA target sequence for Dsc3 (NM_007882.2,673-691).
cacagtcttctattcaata

SEQ ID NO: 547532 - DNA, 19 bp, Mus musculus
  siRNA target sequence for Dsc3 (NM_007882.2,707-725).
gatcaagaaccacttaact

SEQ ID NO: 547533 - DNA, 19 bp, Mus musculus
  siRNA target sequence for Dsc3 (NM_007882.2,771-789).
ctgtggatcgtgaggaata

SEQ ID NO: 547534 - DNA, 19 bp, Mus musculus
  siRNA target sequence for Dsc3 (NM_007882.2,779-797).
cgtgaggaatatgatgttt

SEQ ID NO: 547535 - DNA, 19 bp, Mus musculus
  siRNA target sequence for Dsc3 (NM_007882.2,800-818).
gatttgattgcctatgcat

SEQ ID NO: 547536 - DNA, 19 bp, Mus musculus
  siRNA target sequence for Dsc3 (NM_007882.2,832-850).
ctattcagcagatttacct

SEQ ID NO: 547537 - DNA, 19 bp, Mus musculus
  siRNA target sequence for Dsc3 (NM_007882.2,884-902).
gacaattaccctcttttta

SEQ ID NO: 547538 - DNA, 19 bp, Mus musculus
  siRNA target sequence for Dsc3 (NM_007882.2,937-955).
cagtagacttggtactgta

SEQ ID NO: 547539 - DNA, 19 bp, Mus musculus
  siRNA target sequence for Dsc3 (NM_007882.2,1120-1138).
ggacaagtacaaactgata

SEQ ID NO: 547540 - DNA, 19 bp, Mus musculus
  siRNA target sequence for Dsc3 (NM_007882.2,1126-1144).
gtacaaactgataatgaaa

SEQ ID NO: 547541 - DNA, 19 bp, Mus musculus
  siRNA target sequence for Dsc3 (NM_007882.2,1156-1174).
gaatggccaattttttgga

SEQ ID NO: 547542 - DNA, 19 bp, Mus musculus
  siRNA target sequence for Dsc3 (NM_007882.2,1163-1181).
caattttttggactaatca

SEQ ID NO: 547543 - DNA, 19 bp, Mus musculus
  siRNA target sequence for Dsc3 (NM_007882.2,1172-1190).
ggactaatcagtacatcaa

SEQ ID NO: 547544 - DNA, 19 bp, Mus musculus
  siRNA target sequence for Dsc3 (NM_007882.2,1188-1206).
caacttgtatcataactgt

SEQ ID NO: 547545 - DNA, 19 bp, Mus musculus
  siRNA target sequence for Dsc3 (NM_007882.2,1205-1223).
gtgcaagattccaatgaca

SEQ ID NO: 547546 - DNA, 19 bp, Mus musculus
  siRNA target sequence for Dsc3 (NM_007882.2,1207-1225).
gcaagattccaatgacaat

SEQ ID NO: 547547 - DNA, 19 bp, Mus musculus
  siRNA target sequence for Dsc3 (NM_007882.2,1229-1247).
cccacattcagacaaaata

SEQ ID NO: 547548 - DNA, 19 bp, Mus musculus
  siRNA target sequence for Dsc3 (NM_007882.2,1260-1278).
ctgtggaggaaaatacata

SEQ ID NO: 547549 - DNA, 19 bp, Mus musculus
  siRNA target sequence for Dsc3 (NM_007882.2,1291-1309).
cttgcgcatacctgtagat

SEQ ID NO: 547550 - DNA, 19 bp, Mus musculus
  siRNA target sequence for Dsc3 (NM_007882.2,1294-1312).
gcgcatacctgtagatgat

SEQ ID NO: 547551 - DNA, 19 bp, Mus musculus
  siRNA target sequence for Dsc3 (NM_007882.2,1295-1313).
cgcatacctgtagatgata

SEQ ID NO: 547552 - DNA, 19 bp, Mus musculus
  siRNA target sequence for Dsc3 (NM_007882.2,1296-1314).
gcatacctgtagatgataa

SEQ ID NO: 547553 - DNA, 19 bp, Mus musculus
  siRNA target sequence for Dsc3 (NM_007882.2,1307-1325).
gatgataaggacatgatta

SEQ ID NO: 547554 - DNA, 19 bp, Mus musculus
  siRNA target sequence for Dsc3 (NM_007882.2,1310-1328).
gataaggacatgattaaca

SEQ ID NO: 547555 - DNA, 19 bp, Mus musculus
  siRNA target sequence for Dsc3 (NM_007882.2,1342-1360).
ggcaaatttcaccatctta

SEQ ID NO: 547556 - DNA, 19 bp, Mus musculus
  siRNA target sequence for Dsc3 (NM_007882.2,1343-1361).
gcaaatttcaccatcttaa

SEQ ID NO: 547557 - DNA, 19 bp, Mus musculus
  siRNA target sequence for Dsc3 (NM_007882.2,1370-1388).
gaaaatggatggttcaaaa

SEQ ID NO: 547558 - DNA, 19 bp, Mus musculus
  siRNA target sequence for Dsc3 (NM_007882.2,1486-1504).
caacgaagctccattcatt

SEQ ID NO: 547559 - DNA, 19 bp, Mus musculus
  siRNA target sequence for Dsc3 (NM_007882.2,1489-1507).
cgaagctccattcattaaa

SEQ ID NO: 547560 - DNA, 19 bp, Mus musculus
  siRNA target sequence for Dsc3 (NM_007882.2,1537-1555).
ccgggctatggttacagta

SEQ ID NO: 547561 - DNA, 19 bp, Mus musculus
  siRNA target sequence for Dsc3 (NM_007882.2,1588-1606).
caagcccccagagcaatat

SEQ ID NO: 547562 - DNA, 19 bp, Mus musculus
  siRNA target sequence for Dsc3 (NM_007882.2,1629-1647).
cagttgggtctaagatcaa

SEQ ID NO: 547563 - DNA, 19 bp, Mus musculus
  siRNA target sequence for Dsc3 (NM_007882.2,1659-1677).
cctacgaccctgaaaccaa

SEQ ID NO: 547564 - DNA, 19 bp, Mus musculus
  siRNA target sequence for Dsc3 (NM_007882.2,1664-1682).
gaccctgaaaccaagaata

SEQ ID NO: 547565 - DNA, 19 bp, Mus musculus
  siRNA target sequence for Dsc3 (NM_007882.2,1684-1702).
caatggcttaaggtacaaa

SEQ ID NO: 547566 - DNA, 19 bp, Mus musculus
  siRNA target sequence for Dsc3 (NM_007882.2,1688-1706).
ggcttaaggtacaaaaaat

SEQ ID NO: 547567 - DNA, 19 bp, Mus musculus
  siRNA target sequence for Dsc3 (NM_007882.2,1689-1707).
gcttaaggtacaaaaaatt

SEQ ID NO: 547568 - DNA, 19 bp, Mus musculus
  siRNA target sequence for Dsc3 (NM_007882.2,1727-1745).
gtcagcattgaagaagttt

SEQ ID NO: 547569 - DNA, 19 bp, Mus musculus
  siRNA target sequence for Dsc3 (NM_007882.2,1832-1850).
gaccaagagggtaaatcat

SEQ ID NO: 547570 - DNA, 19 bp, Mus musculus
  siRNA target sequence for Dsc3 (NM_007882.2,1857-1875).
gaacacttgcagtgaacat

SEQ ID NO: 547571 - DNA, 19 bp, Mus musculus
  siRNA target sequence for Dsc3 (NM_007882.2,1891-1909).
caacgcaccagagataatt

SEQ ID NO: 547572 - DNA, 19 bp, Mus musculus
  siRNA target sequence for Dsc3 (NM_007882.2,1894-1912).
cgcaccagagataattcaa

SEQ ID NO: 547573 - DNA, 19 bp, Mus musculus
  siRNA target sequence for Dsc3 (NM_007882.2,1896-1914).
caccagagataattcaaga

SEQ ID NO: 547574 - DNA, 19 bp, Mus musculus
  siRNA target sequence for Dsc3 (NM_007882.2,1898-1916).
ccagagataattcaagatt

SEQ ID NO: 547575 - DNA, 19 bp, Mus musculus
  siRNA target sequence for Dsc3 (NM_007882.2,1899-1917).
cagagataattcaagatta

SEQ ID NO: 547576 - DNA, 19 bp, Mus musculus
  siRNA target sequence for Dsc3 (NM_007882.2,1942-1960).
ggggtacacggacatttca

SEQ ID NO: 547577 - DNA, 19 bp, Mus musculus
  siRNA target sequence for Dsc3 (NM_007882.2,2002-2020).
gttcaacttggcaaacact

SEQ ID NO: 547578 - DNA, 19 bp, Mus musculus
  siRNA target sequence for Dsc3 (NM_007882.2,2043-2061).
ggaccatcaaccaagttaa

SEQ ID NO: 547579 - DNA, 19 bp, Mus musculus
  siRNA target sequence for Dsc3 (NM_007882.2,2044-2062).
gaccatcaaccaagttaat

SEQ ID NO: 547580 - DNA, 19 bp, Mus musculus
  siRNA target sequence for Dsc3 (NM_007882.2,2094-2112).
ctgcggatgttcaaatata

SEQ ID NO: 547581 - DNA, 19 bp, Mus musculus
  siRNA target sequence for Dsc3 (NM_007882.2,2144-2162).
ggccaatctgcaaccaaaa

SEQ ID NO: 547582 - DNA, 19 bp, Mus musculus
  siRNA target sequence for Dsc3 (NM_007882.2,2145-2163).
gccaatctgcaaccaaaat

SEQ ID NO: 547583 - DNA, 19 bp, Mus musculus
  siRNA target sequence for Dsc3 (NM_007882.2,2147-2165).
caatctgcaaccaaaatct

SEQ ID NO: 547584 - DNA, 19 bp, Mus musculus
  siRNA target sequence for Dsc3 (NM_007882.2,2171-2189).
gttaacctgtgtgattgta

SEQ ID NO: 547585 - DNA, 19 bp, Mus musculus
  siRNA target sequence for Dsc3 (NM_007882.2,2201-2219).
caatgtccgctcagatcaa

SEQ ID NO: 547586 - DNA, 19 bp, Mus musculus
  siRNA target sequence for Dsc3 (NM_007882.2,2269-2287).
gggcattgctctgctattt

SEQ ID NO: 547587 - DNA, 19 bp, Mus musculus
  siRNA target sequence for Dsc3 (NM_007882.2,2290-2308).
ggtactgctaactttggta

SEQ ID NO: 547588 - DNA, 19 bp, Mus musculus
  siRNA target sequence for Dsc3 (NM_007882.2,2291-2309).
gtactgctaactttggtat

SEQ ID NO: 547589 - DNA, 19 bp, Mus musculus
  siRNA target sequence for Dsc3 (NM_007882.2,2305-2323).
ggtatgtggagttgttact

SEQ ID NO: 547590 - DNA, 19 bp, Mus musculus
  siRNA target sequence for Dsc3 (NM_007882.2,2318-2336).
gttactgcccgaaaaggaa

SEQ ID NO: 547591 - DNA, 19 bp, Mus musculus
  siRNA target sequence for Dsc3 (NM_007882.2,2351-2369).
gatttagcgcacgaaaatt

SEQ ID NO: 547592 - DNA, 19 bp, Mus musculus
  siRNA target sequence for Dsc3 (NM_007882.2,2357-2375).
gcgcacgaaaatttaatta

SEQ ID NO: 547593 - DNA, 19 bp, Mus musculus
  siRNA target sequence for Dsc3 (NM_007882.2,2359-2377).
gcacgaaaatttaattata

SEQ ID NO: 547594 - DNA, 19 bp, Mus musculus
  siRNA target sequence for Dsc3 (NM_007882.2,2648-2666).
ccccgacttggtgaaaaat

SEQ ID NO: 547595 - DNA, 19 bp, Mus musculus
  siRNA target sequence for Dsc3 (NM_007882.2,2649-2667).
cccgacttggtgaaaaatt

SEQ ID NO: 547596 - DNA, 19 bp, Mus musculus
  siRNA target sequence for Dsc3 (NM_007882.2,2759-2777).
gtaggttgctgcagtgaaa

SEQ ID NO: 547597 - DNA, 19 bp, Mus musculus
  siRNA target sequence for Dsc3 (NM_007882.2,2789-2807).
gagggacttgacttcttaa

SEQ ID NO: 547598 - DNA, 19 bp, Mus musculus
  siRNA target sequence for Dsc3 (NM_007882.2,2809-2827).
caacttggaacccaaattt

SEQ ID NO: 547599 - DNA, 19 bp, Mus musculus
  siRNA target sequence for Dsc3 (NM_007882.2,2828-2846).
cttacattggcaaaaacct

SEQ ID NO: 547600 - DNA, 19 bp, Mus musculus
  siRNA target sequence for Dsg3 (NM_030596.1,314-332).
ccaagatcacttcagattt

SEQ ID NO: 547601 - DNA, 19 bp, Mus musculus
  siRNA target sequence for Dsg3 (NM_030596.1,412-430).
ccaaacaatggtgatatca

SEQ ID NO: 547602 - DNA, 19 bp, Mus musculus
  siRNA target sequence for Dsg3 (NM_030596.1,432-450).
cataacagccatagttgat

SEQ ID NO: 547603 - DNA, 19 bp, Mus musculus
  siRNA target sequence for Dsg3 (NM_030596.1,477-495).
cacatgccgtgcactaaat

SEQ ID NO: 547604 - DNA, 19 bp, Mus musculus
  siRNA target sequence for Dsg3 (NM_030596.1,497-515).
ccctgggacaggatgtaga

SEQ ID NO: 547605 - DNA, 19 bp, Mus musculus
  siRNA target sequence for Dsg3 (NM_030596.1,514-532).
gagagaccacttatattaa

SEQ ID NO: 547606 - DNA, 19 bp, Mus musculus
  siRNA target sequence for Dsg3 (NM_030596.1,516-534).
gagaccacttatattaaca

SEQ ID NO: 547607 - DNA, 19 bp, Mus musculus
  siRNA target sequence for Dsg3 (NM_030596.1,518-536).
gaccacttatattaacagt

SEQ ID NO: 547608 - DNA, 19 bp, Mus musculus
  siRNA target sequence for Dsg3 (NM_030596.1,556-574).
gataaccctccaatatttt

SEQ ID NO: 547609 - DNA, 19 bp, Mus musculus
  siRNA target sequence for Dsg3 (NM_030596.1,561-579).
ccctccaatattttcacaa

SEQ ID NO: 547610 - DNA, 19 bp, Mus musculus
  siRNA target sequence for Dsg3 (NM_030596.1,623-641).
ccctggtaatgatcctaaa

SEQ ID NO: 547611 - DNA, 19 bp, Mus musculus
  siRNA target sequence for Dsg3 (NM_030596.1,624-642).
cctggtaatgatcctaaat

SEQ ID NO: 547612 - DNA, 19 bp, Mus musculus
  siRNA target sequence for Dsg3 (NM_030596.1,652-670).
gcagatgaaccaaaccata

SEQ ID NO: 547613 - DNA, 19 bp, Mus musculus
  siRNA target sequence for Dsg3 (NM_030596.1,658-676).
gaaccaaaccatatgaact

SEQ ID NO: 547614 - DNA, 19 bp, Mus musculus
  siRNA target sequence for Dsg3 (NM_030596.1,661-679).
ccaaaccatatgaactcta

SEQ ID NO: 547615 - DNA, 19 bp, Mus musculus
  siRNA target sequence for Dsg3 (NM_030596.1,666-684).
ccatatgaactctaaaatt

SEQ ID NO: 547616 - DNA, 19 bp, Mus musculus
  siRNA target sequence for Dsg3 (NM_030596.1,748-766).
ggagaagtccgcactttga

SEQ ID NO: 547617 - DNA, 19 bp, Mus musculus
  siRNA target sequence for Dsg3 (NM_030596.1,778-796).
gatcgagagcaaattagta

SEQ ID NO: 547618 - DNA, 19 bp, Mus musculus
  siRNA target sequence for Dsg3 (NM_030596.1,841-859).
ctgtcaactcagtgtgaat

SEQ ID NO: 547619 - DNA, 19 bp, Mus musculus
  siRNA target sequence for Dsg3 (NM_030596.1,850-868).
cagtgtgaatgtagtatta

SEQ ID NO: 547620 - DNA, 19 bp, Mus musculus
  siRNA target sequence for Dsg3 (NM_030596.1,852-870).
gtgtgaatgtagtattaaa

SEQ ID NO: 547621 - DNA, 19 bp, Mus musculus
  siRNA target sequence for Dsg3 (NM_030596.1,856-874).
gaatgtagtattaaaatta

SEQ ID NO: 547622 - DNA, 19 bp, Mus musculus
  siRNA target sequence for Dsg3 (NM_030596.1,900-918).
gctcagagagtctcagtat

SEQ ID NO: 547623 - DNA, 19 bp, Mus musculus
  siRNA target sequence for Dsg3 (NM_030596.1,903-921).
cagagagtctcagtattca

SEQ ID NO: 547624 - DNA, 19 bp, Mus musculus
  siRNA target sequence for Dsg3 (NM_030596.1,988-1006).
gaatacacagataattggt

SEQ ID NO: 547625 - DNA, 19 bp, Mus musculus
  siRNA target sequence for Dsg3 (NM_030596.1,1082-1100).
gcatcctgaaggtggttaa

SEQ ID NO: 547626 - DNA, 19 bp, Mus musculus
  siRNA target sequence for Dsg3 (NM_030596.1,1122-1140).
gcagagtatgcagtttagt

SEQ ID NO: 547627 - DNA, 19 bp, Mus musculus
  siRNA target sequence for Dsg3 (NM_030596.1,1200-1218).
gtcaacgccagtcacaatt

SEQ ID NO: 547628 - DNA, 19 bp, Mus musculus
  siRNA target sequence for Dsg3 (NM_030596.1,1205-1223).
cgccagtcacaattcaagt

SEQ ID NO: 547629 - DNA, 19 bp, Mus musculus
  siRNA target sequence for Dsg3 (NM_030596.1,1212-1230).
cacaattcaagtcattgat

SEQ ID NO: 547630 - DNA, 19 bp, Mus musculus
  siRNA target sequence for Dsg3 (NM_030596.1,1214-1232).
caattcaagtcattgatgt

SEQ ID NO: 547631 - DNA, 19 bp, Mus musculus
  siRNA target sequence for Dsg3 (NM_030596.1,1231-1249).
gtccgagagggaatctcat

SEQ ID NO: 547632 - DNA, 19 bp, Mus musculus
  siRNA target sequence for Dsg3 (NM_030596.1,1259-1277).
cttccaagacatttactgt

SEQ ID NO: 547633 - DNA, 19 bp, Mus musculus
  siRNA target sequence for Dsg3 (NM_030596.1,1283-1301).
ggggtgtaagcactaacaa

SEQ ID NO: 547634 - DNA, 19 bp, Mus musculus
  siRNA target sequence for Dsg3 (NM_030596.1,1284-1302).
gggtgtaagcactaacaaa

SEQ ID NO: 547635 - DNA, 19 bp, Mus musculus
  siRNA target sequence for Dsg3 (NM_030596.1,1286-1304).
gtgtaagcactaacaaatt

SEQ ID NO: 547636 - DNA, 19 bp, Mus musculus
  siRNA target sequence for Dsg3 (NM_030596.1,1295-1313).
ctaacaaattagttggtta

SEQ ID NO: 547637 - DNA, 19 bp, Mus musculus
  siRNA target sequence for Dsg3 (NM_030596.1,1323-1341).
gacataccaagctactgat

SEQ ID NO: 547638 - DNA, 19 bp, Mus musculus
  siRNA target sequence for Dsg3 (NM_030596.1,1358-1376).
ctgcctcctctgtcagata

SEQ ID NO: 547639 - DNA, 19 bp, Mus musculus
  siRNA target sequence for Dsg3 (NM_030596.1,1397-1415).
gtggtttgcttgttattga

SEQ ID NO: 547640 - DNA, 19 bp, Mus musculus
  siRNA target sequence for Dsg3 (NM_030596.1,1399-1417).
ggtttgcttgttattgatt

SEQ ID NO: 547641 - DNA, 19 bp, Mus musculus
  siRNA target sequence for Dsg3 (NM_030596.1,1405-1423).
cttgttattgattcaaaga

SEQ ID NO: 547642 - DNA, 19 bp, Mus musculus
  siRNA target sequence for Dsg3 (NM_030596.1,1424-1442).
ctgctcagatcaaatttgt

SEQ ID NO: 547643 - DNA, 19 bp, Mus musculus
  siRNA target sequence for Dsg3 (NM_030596.1,1426-1444).
gctcagatcaaatttgtca

SEQ ID NO: 547644 - DNA, 19 bp, Mus musculus
  siRNA target sequence for Dsg3 (NM_030596.1,1449-1467).
catcgaccgagattctact

SEQ ID NO: 547645 - DNA, 19 bp, Mus musculus
  siRNA target sequence for Dsg3 (NM_030596.1,1453-1471).
gaccgagattctactttca

SEQ ID NO: 547646 - DNA, 19 bp, Mus musculus
  siRNA target sequence for Dsg3 (NM_030596.1,1455-1473).
ccgagattctactttcata

SEQ ID NO: 547647 - DNA, 19 bp, Mus musculus
  siRNA target sequence for Dsg3 (NM_030596.1,1459-1477).
gattctactttcatagtta

SEQ ID NO: 547648 - DNA, 19 bp, Mus musculus
  siRNA target sequence for Dsg3 (NM_030596.1,1463-1481).
ctactttcatagttaacaa

SEQ ID NO: 547649 - DNA, 19 bp, Mus musculus
  siRNA target sequence for Dsg3 (NM_030596.1,1501-1519).
ctggccatagacgaaaaca

SEQ ID NO: 547650 - DNA, 19 bp, Mus musculus
  siRNA target sequence for Dsg3 (NM_030596.1,1503-1521).
ggccatagacgaaaacact

SEQ ID NO: 547651 - DNA, 19 bp, Mus musculus
  siRNA target sequence for Dsg3 (NM_030596.1,1555-1573).
gtgcccagttttaatgaaa

SEQ ID NO: 547652 - DNA, 19 bp, Mus musculus
  siRNA target sequence for Dsg3 (NM_030596.1,1558-1576).
cccagttttaatgaaaact

SEQ ID NO: 547653 - DNA, 19 bp, Mus musculus
  siRNA target sequence for Dsg3 (NM_030596.1,1731-1749).
gacgctgaatgctacatca

SEQ ID NO: 547654 - DNA, 19 bp, Mus musculus
  siRNA target sequence for Dsg3 (NM_030596.1,1776-1794).
gtctccaggagtgtacaat

SEQ ID NO: 547655 - DNA, 19 bp, Mus musculus
  siRNA target sequence for Dsg3 (NM_030596.1,1778-1796).
ctccaggagtgtacaatgt

SEQ ID NO: 547656 - DNA, 19 bp, Mus musculus
  siRNA target sequence for Dsg3 (NM_030596.1,1978-1996).
ggactcctgatgttgctat

SEQ ID NO: 547657 - DNA, 19 bp, Mus musculus
  siRNA target sequence for Dsg3 (NM_030596.1,1979-1997).
gactcctgatgttgctatt

SEQ ID NO: 547658 - DNA, 19 bp, Mus musculus
  siRNA target sequence for Dsg3 (NM_030596.1,2087-2105).
cggaaggtacaattcatca

SEQ ID NO: 547659 - DNA, 19 bp, Mus musculus
  siRNA target sequence for Dsg3 (NM_030596.1,2120-2138).
gagctcagcccgaagacaa

SEQ ID NO: 547660 - DNA, 19 bp, Mus musculus
  siRNA target sequence for Dsg3 (NM_030596.1,2136-2154).
caaggaaatcacaaatatt

SEQ ID NO: 547661 - DNA, 19 bp, Mus musculus
  siRNA target sequence for Dsg3 (NM_030596.1,2174-2192).
ccaatggagccgattttat

SEQ ID NO: 547662 - DNA, 19 bp, Mus musculus
  siRNA target sequence for Dsg3 (NM_030596.1,2179-2197).
ggagccgattttatggaaa

SEQ ID NO: 547663 - DNA, 19 bp, Mus musculus
  siRNA target sequence for Dsg3 (NM_030596.1,2380-2398).
gctgcgccagtcaacatga

SEQ ID NO: 547664 - DNA, 19 bp, Mus musculus
  siRNA target sequence for Dsg3 (NM_030596.1,2383-2401).
gcgccagtcaacatgactt

SEQ ID NO: 547665 - DNA, 19 bp, Mus musculus
  siRNA target sequence for Dsg3 (NM_030596.1,2384-2402).
cgccagtcaacatgacttt

SEQ ID NO: 547666 - DNA, 19 bp, Mus musculus
  siRNA target sequence for Dsg3 (NM_030596.1,2459-2477).
gcgaagtgaacgactgttt

SEQ ID NO: 547667 - DNA, 19 bp, Mus musculus
  siRNA target sequence for Dsg3 (NM_030596.1,2478-2496).
gctgatctacgatgatgaa

SEQ ID NO: 547668 - DNA, 19 bp, Mus musculus
  siRNA target sequence for Dsg3 (NM_030596.1,2529-2547).
cagctcctgcagcattttt

SEQ ID NO: 547669 - DNA, 19 bp, Mus musculus
  siRNA target sequence for Dsg3 (NM_030596.1,2554-2572).
gacctagacgacaacttct

SEQ ID NO: 547670 - DNA, 19 bp, Mus musculus
  siRNA target sequence for Dsg3 (NM_030596.1,2560-2578).
gacgacaacttcttggatt

SEQ ID NO: 547671 - DNA, 19 bp, Mus musculus
  siRNA target sequence for Dsg3 (NM_030596.1,2610-2628).
gatctgtctcggtattgat

SEQ ID NO: 547672 - DNA, 19 bp, Mus musculus
  siRNA target sequence for Dsg3 (NM_030596.1,2707-2725).
cctcagtcaggttctaaca

SEQ ID NO: 547673 - DNA, 19 bp, Mus musculus
  siRNA target sequence for Dsg3 (NM_030596.1,2757-2775).
cacccaaacgggttctaaa

SEQ ID NO: 547674 - DNA, 19 bp, Mus musculus
  siRNA target sequence for Dsg3 (NM_030596.1,2759-2777).
cccaaacgggttctaaaat

SEQ ID NO: 547675 - DNA, 19 bp, Mus musculus
  siRNA target sequence for Dsg3 (NM_030596.1,2947-2965).
catgtcacacaaaatgtca

SEQ ID NO: 547676 - DNA, 19 bp, Mus musculus
  siRNA target sequence for Dsg3 (NM_030596.1,2968-2986).
gtaacagaaagggtcattt

SEQ ID NO: 547677 - DNA, 19 bp, Mus musculus
  siRNA target sequence for Dsg3 (NM_030596.1,3028-3046).
gaactgcgaggctcataca

SEQ ID NO: 547678 - DNA, 19 bp, Mus musculus
  siRNA target sequence for Dsg3 (NM_030596.1,3031-3049).
ctgcgaggctcatacaata

SEQ ID NO: 547679 - DNA, 19 bp, Mus musculus
  siRNA target sequence for Dsg3 (NM_030596.1,3035-3053).
gaggctcatacaatatgct

SEQ ID NO: 547680 - DNA, 19 bp, Mus musculus
  siRNA target sequence for Dsg3 (NM_030596.1,3045-3063).
caatatgctctatacaaaa

SEQ ID NO: 547681 - DNA, 19 bp, Mus musculus
  siRNA target sequence for E430002G05Rik (NM_173749.3,168-186).
cagctccttctcatctcat

SEQ ID NO: 547682 - DNA, 19 bp, Mus musculus
  siRNA target sequence for E430002G05Rik (NM_173749.3,196-214).
gagagtacacggtcattaa

SEQ ID NO: 547683 - DNA, 19 bp, Mus musculus
  siRNA target sequence for E430002G05Rik (NM_173749.3,229-247).
gagctgagtggaacatcat

SEQ ID NO: 547684 - DNA, 19 bp, Mus musculus
  siRNA target sequence for E430002G05Rik (NM_173749.3,231-249).
gctgagtggaacatcatgt

SEQ ID NO: 547685 - DNA, 19 bp, Mus musculus
  siRNA target sequence for E430002G05Rik (NM_173749.3,234-252).
gagtggaacatcatgtgta

SEQ ID NO: 547686 - DNA, 19 bp, Mus musculus
  siRNA target sequence for E430002G05Rik (NM_173749.3,259-277).
gttgtgaatatgatcagat

SEQ ID NO: 547687 - DNA, 19 bp, Mus musculus
  siRNA target sequence for E430002G05Rik (NM_173749.3,262-280).
gtgaatatgatcagattga

SEQ ID NO: 547688 - DNA, 19 bp, Mus musculus
  siRNA target sequence for E430002G05Rik (NM_173749.3,328-346).
gctgcaggaatgaggataa

SEQ ID NO: 547689 - DNA, 19 bp, Mus musculus
  siRNA target sequence for E430002G05Rik (NM_173749.3,352-370).
gtgactcctgtctaattca

SEQ ID NO: 547690 - DNA, 19 bp, Mus musculus
  siRNA target sequence for E430002G05Rik (NM_173749.3,371-389).
cccaggttgtaccatcttt

SEQ ID NO: 547691 - DNA, 19 bp, Mus musculus
  siRNA target sequence for E430002G05Rik (NM_173749.3,424-442).
gcggaactctggatgactt

SEQ ID NO: 547692 - DNA, 19 bp, Mus musculus
  siRNA target sequence for E430002G05Rik (NM_173749.3,674-692).
ggtccgcgatggggataat

SEQ ID NO: 547693 - DNA, 19 bp, Mus musculus
  siRNA target sequence for E430002G05Rik (NM_173749.3,675-693).
gtccgcgatggggataata

SEQ ID NO: 547694 - DNA, 19 bp, Mus musculus
  siRNA target sequence for E430002G05Rik (NM_173749.3,677-695).
ccgcgatggggataatagt

SEQ ID NO: 547695 - DNA, 19 bp, Mus musculus
  siRNA target sequence for E430002G05Rik (NM_173749.3,694-712).
gtgacagccctatcatcaa

SEQ ID NO: 547696 - DNA, 19 bp, Mus musculus
  siRNA target sequence for E430002G05Rik (NM_173749.3,981-999).
ccagtcaatgggtacaaga

SEQ ID NO: 547697 - DNA, 19 bp, Mus musculus
  siRNA target sequence for E430002G05Rik (NM_173749.3,1023-1041).
ctcaatgagcgccatgtaa

SEQ ID NO: 547698 - DNA, 19 bp, Mus musculus
  siRNA target sequence for E430002G05Rik (NM_173749.3,1048-1066).
gcacggttgtgtctttctt

SEQ ID NO: 547699 - DNA, 19 bp, Mus musculus
  siRNA target sequence for E430002G05Rik (NM_173749.3,1083-1101).
gttctgagtggcaatgaga

SEQ ID NO: 547700 - DNA, 19 bp, Mus musculus
  siRNA target sequence for E430002G05Rik (NM_173749.3,1139-1157).
gcaacctgtctgcatgaaa

SEQ ID NO: 547701 - DNA, 19 bp, Mus musculus
  siRNA target sequence for E430002G05Rik (NM_173749.3,1220-1238).
gtcaagggagacaccatta

SEQ ID NO: 547702 - DNA, 19 bp, Mus musculus
  siRNA target sequence for E430002G05Rik (NM_173749.3,1231-1249).
caccattacatcagcttta

SEQ ID NO: 547703 - DNA, 19 bp, Mus musculus
  siRNA target sequence for E430002G05Rik (NM_173749.3,1277-1295).
gcaggatgcctctaccaaa

SEQ ID NO: 547704 - DNA, 19 bp, Mus musculus
  siRNA target sequence for E430002G05Rik (NM_173749.3,1278-1296).
caggatgcctctaccaaaa

SEQ ID NO: 547705 - DNA, 19 bp, Mus musculus
  siRNA target sequence for E430002G05Rik (NM_173749.3,1298-1316).
gccagcccttccatttgga

SEQ ID NO: 547706 - DNA, 19 bp, Mus musculus
  siRNA target sequence for E430002G05Rik (NM_173749.3,1678-1696).
cagacctcaaggttgtctt

SEQ ID NO: 547707 - DNA, 19 bp, Mus musculus
  siRNA target sequence for E430002G05Rik (NM_173749.3,1692-1710).
gtcttgggaaaattctaca

SEQ ID NO: 547708 - DNA, 19 bp, Mus musculus
  siRNA target sequence for E430002G05Rik (NM_173749.3,1750-1768).
gggtttctgctatcattct

SEQ ID NO: 547709 - DNA, 19 bp, Mus musculus
  siRNA target sequence for E430002G05Rik (NM_173749.3,1827-1845).
gacaaagctcgcatcagta

SEQ ID NO: 547710 - DNA, 19 bp, Mus musculus
  siRNA target sequence for E430002G05Rik (NM_173749.3,1953-1971).
cctggctttaagaatgata

SEQ ID NO: 547711 - DNA, 19 bp, Mus musculus
  siRNA target sequence for E430002G05Rik (NM_173749.3,1957-1975).
gctttaagaatgatacctt

SEQ ID NO: 547712 - DNA, 19 bp, Mus musculus
  siRNA target sequence for E430002G05Rik (NM_173749.3,1964-1982).
gaatgataccttacattat

SEQ ID NO: 547713 - DNA, 19 bp, Mus musculus
  siRNA target sequence for E430002G05Rik (NM_173749.3,1995-2013).
gtggtagacccaatgcttt

SEQ ID NO: 547714 - DNA, 19 bp, Mus musculus
  siRNA target sequence for E430002G05Rik (NM_173749.3,2014-2032).
gtgaggaacagcatgaaga

SEQ ID NO: 547715 - DNA, 19 bp, Mus musculus
  siRNA target sequence for E430002G05Rik (NM_173749.3,2033-2051).
ccatggcattccagttagt

SEQ ID NO: 547716 - DNA, 19 bp, Mus musculus
  siRNA target sequence for E430002G05Rik (NM_173749.3,2066-2084).
gttctgtgccagcaaagat

SEQ ID NO: 547717 - DNA, 19 bp, Mus musculus
  siRNA target sequence for E430002G05Rik (NM_173749.3,2247-2265).
gtgttgccgttcaaagact

SEQ ID NO: 547718 - DNA, 19 bp, Mus musculus
  siRNA target sequence for Edem1 (NM_138677.1,571-589).
ccgcggagacccttccaat

SEQ ID NO: 547719 - DNA, 19 bp, Mus musculus
  siRNA target sequence for Edem1 (NM_138677.1,575-593).
ggagacccttccaatctga

SEQ ID NO: 547720 - DNA, 19 bp, Mus musculus
  siRNA target sequence for Edem1 (NM_138677.1,576-594).
gagacccttccaatctgaa

SEQ ID NO: 547721 - DNA, 19 bp, Mus musculus
  siRNA target sequence for Edem1 (NM_138677.1,585-603).
ccaatctgaacatcaatga

SEQ ID NO: 547722 - DNA, 19 bp, Mus musculus
  siRNA target sequence for Edem1 (NM_138677.1,689-707).
gtcaagttagtgatcaaca

SEQ ID NO: 547723 - DNA, 19 bp, Mus musculus
  siRNA target sequence for Edem1 (NM_138677.1,698-716).
gtgatcaacactgtttcat

SEQ ID NO: 547724 - DNA, 19 bp, Mus musculus
  siRNA target sequence for Edem1 (NM_138677.1,739-757).
ggtcttcgaagctacgata

SEQ ID NO: 547725 - DNA, 19 bp, Mus musculus
  siRNA target sequence for Edem1 (NM_138677.1,740-758).
gtcttcgaagctacgataa

SEQ ID NO: 547726 - DNA, 19 bp, Mus musculus
  siRNA target sequence for Edem1 (NM_138677.1,789-807).
gaataataactgattccaa

SEQ ID NO: 547727 - DNA, 19 bp, Mus musculus
  siRNA target sequence for Edem1 (NM_138677.1,823-841).
catgacaattgaggattat

SEQ ID NO: 547728 - DNA, 19 bp, Mus musculus
  siRNA target sequence for Edem1 (NM_138677.1,828-846).
caattgaggattatgataa

SEQ ID NO: 547729 - DNA, 19 bp, Mus musculus
  siRNA target sequence for Edem1 (NM_138677.1,1093-1111).
gagcaacgatacaggatta

SEQ ID NO: 547730 - DNA, 19 bp, Mus musculus
  siRNA target sequence for Edem1 (NM_138677.1,1095-1113).
gcaacgatacaggattatt

SEQ ID NO: 547731 - DNA, 19 bp, Mus musculus
  siRNA target sequence for Edem1 (NM_138677.1,1096-1114).
caacgatacaggattatta

SEQ ID NO: 547732 - DNA, 19 bp, Mus musculus
  siRNA target sequence for Edem1 (NM_138677.1,1107-1125).
gattattaggcaatgttgt

SEQ ID NO: 547733 - DNA, 19 bp, Mus musculus
  siRNA target sequence for Edem1 (NM_138677.1,1137-1155).
caggccattgggttggaaa

SEQ ID NO: 547734 - DNA, 19 bp, Mus musculus
  siRNA target sequence for Edem1 (NM_138677.1,1193-1211).
gagtacctcttgaaatctt

SEQ ID NO: 547735 - DNA, 19 bp, Mus musculus
  siRNA target sequence for Edem1 (NM_138677.1,1198-1216).
cctcttgaaatcttacatt

SEQ ID NO: 547736 - DNA, 19 bp, Mus musculus
  siRNA target sequence for Edem1 (NM_138677.1,1334-1352).
gtcaacgtgaacatgttca

SEQ ID NO: 547737 - DNA, 19 bp, Mus musculus
  siRNA target sequence for Edem1 (NM_138677.1,1443-1461).
gcctacacgccttctacta

SEQ ID NO: 547738 - DNA, 19 bp, Mus musculus
  siRNA target sequence for Edem1 (NM_138677.1,1444-1462).
cctacacgccttctactat

SEQ ID NO: 547739 - DNA, 19 bp, Mus musculus
  siRNA target sequence for Edem1 (NM_138677.1,1485-1503).
ccctccctgagcgctataa

SEQ ID NO: 547740 - DNA, 19 bp, Mus musculus
  siRNA target sequence for Edem1 (NM_138677.1,1487-1505).
ctccctgagcgctataact

SEQ ID NO: 547741 - DNA, 19 bp, Mus musculus
  siRNA target sequence for Edem1 (NM_138677.1,1652-1670).
gtcaaatgtggatatgcta

SEQ ID NO: 547742 - DNA, 19 bp, Mus musculus
  siRNA target sequence for Edem1 (NM_138677.1,1671-1689).
cgctgcatcacgtcataga

SEQ ID NO: 547743 - DNA, 19 bp, Mus musculus
  siRNA target sequence for Edem1 (NM_138677.1,1673-1691).
ctgcatcacgtcatagaca

SEQ ID NO: 547744 - DNA, 19 bp, Mus musculus
  siRNA target sequence for Edem1 (NM_138677.1,1684-1702).
catagacaagtctaaagaa

SEQ ID NO: 547745 - DNA, 19 bp, Mus musculus
  siRNA target sequence for Edem1 (NM_138677.1,1705-1723).
ccggatggaaagcttcttt

SEQ ID NO: 547746 - DNA, 19 bp, Mus musculus
  siRNA target sequence for Edem1 (NM_138677.1,1724-1742).
ctcagcgagacttgcaaat

SEQ ID NO: 547747 - DNA, 19 bp, Mus musculus
  siRNA target sequence for Edem1 (NM_138677.1,1728-1746).
gcgagacttgcaaatactt

SEQ ID NO: 547748 - DNA, 19 bp, Mus musculus
  siRNA target sequence for Edem1 (NM_138677.1,1730-1748).
gagacttgcaaatacttgt

SEQ ID NO: 547749 - DNA, 19 bp, Mus musculus
  siRNA target sequence for Edem1 (NM_138677.1,1732-1750).
gacttgcaaatacttgtat

SEQ ID NO: 547750 - DNA, 19 bp, Mus musculus
  siRNA target sequence for Edem1 (NM_138677.1,1734-1752).
cttgcaaatacttgtatct

SEQ ID NO: 547751 - DNA, 19 bp, Mus musculus
  siRNA target sequence for Edem1 (NM_138677.1,1747-1765).
gtatctgctatttgatgaa

SEQ ID NO: 547752 - DNA, 19 bp, Mus musculus
  siRNA target sequence for Edem1 (NM_138677.1,1792-1810).
cagatacatgtttacaact

SEQ ID NO: 547753 - DNA, 19 bp, Mus musculus
  siRNA target sequence for Edem1 (NM_138677.1,1948-1966).
cagttctaattgtaatcgt

SEQ ID NO: 547754 - DNA, 19 bp, Mus musculus
  siRNA target sequence for Edem1 (NM_138677.1,1983-2001).
gatactccttgcccttaaa

SEQ ID NO: 547755 - DNA, 19 bp, Mus musculus
  siRNA target sequence for Edem1 (NM_138677.1,2027-2045).
cagatggttggcttgattt

SEQ ID NO: 547756 - DNA, 19 bp, Mus musculus
  siRNA target sequence for Efemp1 (NM_146015.1,138-156).
gttcaaactggccgaaata

SEQ ID NO: 547757 - DNA, 19 bp, Mus musculus
  siRNA target sequence for Efemp1 (NM_146015.1,141-159).
caaactggccgaaataact

SEQ ID NO: 547758 - DNA, 19 bp, Mus musculus
  siRNA target sequence for Efemp1 (NM_146015.1,145-163).
ctggccgaaataactttgt

SEQ ID NO: 547759 - DNA, 19 bp, Mus musculus
  siRNA target sequence for Efemp1 (NM_146015.1,147-165).
ggccgaaataactttgtca

SEQ ID NO: 547760 - DNA, 19 bp, Mus musculus
  siRNA target sequence for Efemp1 (NM_146015.1,252-270).
cataatgtgtgccaagata

SEQ ID NO: 547761 - DNA, 19 bp, Mus musculus
  siRNA target sequence for Efemp1 (NM_146015.1,304-322).
gaacggaccaagtatgcat

SEQ ID NO: 547762 - DNA, 19 bp, Mus musculus
  siRNA target sequence for Efemp1 (NM_146015.1,308-326).
ggaccaagtatgcatcaat

SEQ ID NO: 547763 - DNA, 19 bp, Mus musculus
  siRNA target sequence for Efemp1 (NM_146015.1,309-327).
gaccaagtatgcatcaatt

SEQ ID NO: 547764 - DNA, 19 bp, Mus musculus
  siRNA target sequence for Efemp1 (NM_146015.1,311-329).
ccaagtatgcatcaattta

SEQ ID NO: 547765 - DNA, 19 bp, Mus musculus
  siRNA target sequence for Efemp1 (NM_146015.1,486-504).
gcagcaaacaactacactt

SEQ ID NO: 547766 - DNA, 19 bp, Mus musculus
  siRNA target sequence for Efemp1 (NM_146015.1,497-515).
ctacacttgtgtggatata

SEQ ID NO: 547767 - DNA, 19 bp, Mus musculus
  siRNA target sequence for Efemp1 (NM_146015.1,500-518).
cacttgtgtggatataaat

SEQ ID NO: 547768 - DNA, 19 bp, Mus musculus
  siRNA target sequence for Efemp1 (NM_146015.1,571-589).
cattcatctgtcagtgtaa

SEQ ID NO: 547769 - DNA, 19 bp, Mus musculus
  siRNA target sequence for Efemp1 (NM_146015.1,575-593).
catctgtcagtgtaatcaa

SEQ ID NO: 547770 - DNA, 19 bp, Mus musculus
  siRNA target sequence for Efemp1 (NM_146015.1,580-598).
gtcagtgtaatcaaggata

SEQ ID NO: 547771 - DNA, 19 bp, Mus musculus
  siRNA target sequence for Efemp1 (NM_146015.1,584-602).
gtgtaatcaaggatatgaa

SEQ ID NO: 547772 - DNA, 19 bp, Mus musculus
  siRNA target sequence for Efemp1 (NM_146015.1,655-673).
gctacctatgccaatatca

SEQ ID NO: 547773 - DNA, 19 bp, Mus musculus
  siRNA target sequence for Efemp1 (NM_146015.1,656-674).
ctacctatgccaatatcaa

SEQ ID NO: 547774 - DNA, 19 bp, Mus musculus
  siRNA target sequence for Efemp1 (NM_146015.1,687-705).
cctgggaagttctcatgta

SEQ ID NO: 547775 - DNA, 19 bp, Mus musculus
  siRNA target sequence for Efemp1 (NM_146015.1,736-754).
gcagaacctgtcaggatat

SEQ ID NO: 547776 - DNA, 19 bp, Mus musculus
  siRNA target sequence for Efemp1 (NM_146015.1,739-757).
gaacctgtcaggatataaa

SEQ ID NO: 547777 - DNA, 19 bp, Mus musculus
  siRNA target sequence for Efemp1 (NM_146015.1,742-760).
cctgtcaggatataaatga

SEQ ID NO: 547778 - DNA, 19 bp, Mus musculus
  siRNA target sequence for Efemp1 (NM_146015.1,773-791).
caatgaatgccgagaagat

SEQ ID NO: 547779 - DNA, 19 bp, Mus musculus
  siRNA target sequence for Efemp1 (NM_146015.1,849-867).
gatcactatgttctaacat

SEQ ID NO: 547780 - DNA, 19 bp, Mus musculus
  siRNA target sequence for Efemp1 (NM_146015.1,919-937).
cccagtccattgtctacaa

SEQ ID NO: 547781 - DNA, 19 bp, Mus musculus
  siRNA target sequence for Efemp1 (NM_146015.1,921-939).
cagtccattgtctacaaat

SEQ ID NO: 547782 - DNA, 19 bp, Mus musculus
  siRNA target sequence for Efemp1 (NM_146015.1,964-982).
ccgtgccttcagacatctt

SEQ ID NO: 547783 - DNA, 19 bp, Mus musculus
  siRNA target sequence for Efemp1 (NM_146015.1,986-1004).
gatacaggcaacaatgatt

SEQ ID NO: 547784 - DNA, 19 bp, Mus musculus
  siRNA target sequence for Efemp1 (NM_146015.1,992-1010).
ggcaacaatgatttatgca

SEQ ID NO: 547785 - DNA, 19 bp, Mus musculus
  siRNA target sequence for Efemp1 (NM_146015.1,1058-1076).
gttctacctacgacaaaca

SEQ ID NO: 547786 - DNA, 19 bp, Mus musculus
  siRNA target sequence for Efemp1 (NM_146015.1,1100-1118).
gcttgtgaagtctctatca

SEQ ID NO: 547787 - DNA, 19 bp, Mus musculus
  siRNA target sequence for Efemp1 (NM_146015.1,1151-1169).
gctgacagtcagtagtata

SEQ ID NO: 547788 - DNA, 19 bp, Mus musculus
  siRNA target sequence for Efemp1 (NM_146015.1,1189-1207).
ctgtgttaagattgacaat

SEQ ID NO: 547789 - DNA, 19 bp, Mus musculus
  siRNA target sequence for Efemp1 (NM_146015.1,1191-1209).
gtgttaagattgacaataa

SEQ ID NO: 547790 - DNA, 19 bp, Mus musculus
  siRNA target sequence for Efemp1 (NM_146015.1,1193-1211).
gttaagattgacaataata

SEQ ID NO: 547791 - DNA, 19 bp, Mus musculus
  siRNA target sequence for Efemp2 (NM_021474.2,641-659).
gctacgagcctgatgaaca

SEQ ID NO: 547792 - DNA, 19 bp, Mus musculus
  siRNA target sequence for Efemp2 (NM_021474.2,684-702).
gtgtacccaggctttgcat

SEQ ID NO: 547793 - DNA, 19 bp, Mus musculus
  siRNA target sequence for Efemp2 (NM_021474.2,761-779).
ctgatggttaccgaaaaat

SEQ ID NO: 547794 - DNA, 19 bp, Mus musculus
  siRNA target sequence for Efemp2 (NM_021474.2,785-803).
ccgaatgtgtggacataga

SEQ ID NO: 547795 - DNA, 19 bp, Mus musculus
  siRNA target sequence for Efemp2 (NM_021474.2,786-804).
cgaatgtgtggacatagat

SEQ ID NO: 547796 - DNA, 19 bp, Mus musculus
  siRNA target sequence for Efemp2 (NM_021474.2,946-964).
gagcagcgctgcttcaact

SEQ ID NO: 547797 - DNA, 19 bp, Mus musculus
  siRNA target sequence for Efemp2 (NM_021474.2,1023-1041).
ctcctgcagcgatatcgat

SEQ ID NO: 547798 - DNA, 19 bp, Mus musculus
  siRNA target sequence for Efemp2 (NM_021474.2,1196-1214).
cccaaacctgtgtcaactt

SEQ ID NO: 547799 - DNA, 19 bp, Mus musculus
  siRNA target sequence for Efemp2 (NM_021474.2,1376-1394).
ctgctgacgtgtttcagat

SEQ ID NO: 547800 - DNA, 19 bp, Mus musculus
  siRNA target sequence for Efemp2 (NM_021474.2,1410-1428).
ctaccctggtgcctacaat

SEQ ID NO: 547801 - DNA, 19 bp, Mus musculus
  siRNA target sequence for Efemp2 (NM_021474.2,1437-1455).
gatccgttctggaaacaca

SEQ ID NO: 547802 - DNA, 19 bp, Mus musculus
  siRNA target sequence for Efemp2 (NM_021474.2,1454-1472).
cacagggggacttctacat

SEQ ID NO: 547803 - DNA, 19 bp, Mus musculus
  siRNA target sequence for Efemp2 (NM_021474.2,1456-1474).
cagggggacttctacatta

SEQ ID NO: 547804 - DNA, 19 bp, Mus musculus
  siRNA target sequence for Egf (NM_010113.1,504-522).
cctgcccccttcctagttt

SEQ ID NO: 547805 - DNA, 19 bp, Mus musculus
  siRNA target sequence for Egf (NM_010113.1,565-583).
caaatcaccagcaattggt

SEQ ID NO: 547806 - DNA, 19 bp, Mus musculus
  siRNA target sequence for Egf (NM_010113.1,737-755).
ggccatagactggatagat

SEQ ID NO: 547807 - DNA, 19 bp, Mus musculus
  siRNA target sequence for Egf (NM_010113.1,739-757).
ccatagactggatagatga

SEQ ID NO: 547808 - DNA, 19 bp, Mus musculus
  siRNA target sequence for Egf (NM_010113.1,740-758).
catagactggatagatgat

SEQ ID NO: 547809 - DNA, 19 bp, Mus musculus
  siRNA target sequence for Egf (NM_010113.1,789-807).
gtcatcaccgtaacagata

SEQ ID NO: 547810 - DNA, 19 bp, Mus musculus
  siRNA target sequence for Egf (NM_010113.1,794-812).
caccgtaacagatatgaca

SEQ ID NO: 547811 - DNA, 19 bp, Mus musculus
  siRNA target sequence for Egf (NM_010113.1,815-833).
gaaaaattcccgagttctt

SEQ ID NO: 547812 - DNA, 19 bp, Mus musculus
  siRNA target sequence for Egf (NM_010113.1,842-860).
cttaaaacatccgtcaaat

SEQ ID NO: 547813 - DNA, 19 bp, Mus musculus
  siRNA target sequence for Egf (NM_010113.1,873-891).
ccaatagagaggttgatgt

SEQ ID NO: 547814 - DNA, 19 bp, Mus musculus
  siRNA target sequence for Egf (NM_010113.1,932-950).
cctcaaaggtgttgatgta

SEQ ID NO: 547815 - DNA, 19 bp, Mus musculus
  siRNA target sequence for Egf (NM_010113.1,940-958).
gtgttgatgtaaaaacact

SEQ ID NO: 547816 - DNA, 19 bp, Mus musculus
  siRNA target sequence for Egf (NM_010113.1,960-978).
ctggagacagggggaatat

SEQ ID NO: 547817 - DNA, 19 bp, Mus musculus
  siRNA target sequence for Egf (NM_010113.1,1039-1057).
gaagccacgcttacattca

SEQ ID NO: 547818 - DNA, 19 bp, Mus musculus
  siRNA target sequence for Egf (NM_010113.1,1052-1070).
cattcattcctgtgattat

SEQ ID NO: 547819 - DNA, 19 bp, Mus musculus
  siRNA target sequence for Egf (NM_010113.1,1075-1093).
gtggctccgtccgtcttat

SEQ ID NO: 547820 - DNA, 19 bp, Mus musculus
  siRNA target sequence for Egf (NM_010113.1,1107-1125).
cggcacagtttgtcttcaa

SEQ ID NO: 547821 - DNA, 19 bp, Mus musculus
  siRNA target sequence for Egf (NM_010113.1,1108-1126).
ggcacagtttgtcttcaat

SEQ ID NO: 547822 - DNA, 19 bp, Mus musculus
  siRNA target sequence for Egf (NM_010113.1,1137-1155).
ggtgatcggatcttctact

SEQ ID NO: 547823 - DNA, 19 bp, Mus musculus
  siRNA target sequence for Egf (NM_010113.1,1148-1166).
cttctactcagtgttgaaa

SEQ ID NO: 547824 - DNA, 19 bp, Mus musculus
  siRNA target sequence for Egf (NM_010113.1,1224-1242).
ctccatccatcctttgtga

SEQ ID NO: 547825 - DNA, 19 bp, Mus musculus
  siRNA target sequence for Egf (NM_010113.1,1309-1327).
ctgaccccgaacttctcaa

SEQ ID NO: 547826 - DNA, 19 bp, Mus musculus
  siRNA target sequence for Egf (NM_010113.1,1314-1332).
cccgaacttctcaaacaga

SEQ ID NO: 547827 - DNA, 19 bp, Mus musculus
  siRNA target sequence for Egf (NM_010113.1,1427-1445).
gtactgcgaagatgtcaat

SEQ ID NO: 547828 - DNA, 19 bp, Mus musculus
  siRNA target sequence for Egf (NM_010113.1,1460-1478).
gaatcacggctgtactctt

SEQ ID NO: 547829 - DNA, 19 bp, Mus musculus
  siRNA target sequence for Egf (NM_010113.1,1471-1489).
gtactcttgggtgtgaaaa

SEQ ID NO: 547830 - DNA, 19 bp, Mus musculus
  siRNA target sequence for Egf (NM_010113.1,1536-1554).
cttcctgatgggaaacaat

SEQ ID NO: 547831 - DNA, 19 bp, Mus musculus
  siRNA target sequence for Egf (NM_010113.1,1551-1569).
caatgtcacgaacttgttt

SEQ ID NO: 547832 - DNA, 19 bp, Mus musculus
  siRNA target sequence for Egf (NM_010113.1,1575-1593).
ccaggcaacgtatcaaagt

SEQ ID NO: 547833 - DNA, 19 bp, Mus musculus
  siRNA target sequence for Egf (NM_010113.1,1819-1837).
cacttttactgtttgcaaa

SEQ ID NO: 547834 - DNA, 19 bp, Mus musculus
  siRNA target sequence for Egf (NM_010113.1,1845-1863).
gacatccgacacatgcatt

SEQ ID NO: 547835 - DNA, 19 bp, Mus musculus
  siRNA target sequence for Egf (NM_010113.1,1850-1868).
ccgacacatgcattttgat

SEQ ID NO: 547836 - DNA, 19 bp, Mus musculus
  siRNA target sequence for Egf (NM_010113.1,1896-1914).
cggcagatgggaatggttt

SEQ ID NO: 547837 - DNA, 19 bp, Mus musculus
  siRNA target sequence for Egf (NM_010113.1,1999-2017).
ggtcccagcgagaaagact

SEQ ID NO: 547838 - DNA, 19 bp, Mus musculus
  siRNA target sequence for Egf (NM_010113.1,2062-2080).
ggattggccggagaatcta

SEQ ID NO: 547839 - DNA, 19 bp, Mus musculus
  siRNA target sequence for Egf (NM_010113.1,2125-2143).
gcgggaagcatcatcgaat

SEQ ID NO: 547840 - DNA, 19 bp, Mus musculus
  siRNA target sequence for Egf (NM_010113.1,2126-2144).
cgggaagcatcatcgaata

SEQ ID NO: 547841 - DNA, 19 bp, Mus musculus
  siRNA target sequence for Egf (NM_010113.1,2127-2145).
gggaagcatcatcgaataa

SEQ ID NO: 547842 - DNA, 19 bp, Mus musculus
  siRNA target sequence for Egf (NM_010113.1,2128-2146).
ggaagcatcatcgaataat

SEQ ID NO: 547843 - DNA, 19 bp, Mus musculus
  siRNA target sequence for Egf (NM_010113.1,2305-2323).
gtggaatcacgattgacta

SEQ ID NO: 547844 - DNA, 19 bp, Mus musculus
  siRNA target sequence for Egf (NM_010113.1,2312-2330).
cacgattgactacttaaca

SEQ ID NO: 547845 - DNA, 19 bp, Mus musculus
  siRNA target sequence for Egf (NM_010113.1,2314-2332).
cgattgactacttaacaga

SEQ ID NO: 547846 - DNA, 19 bp, Mus musculus
  siRNA target sequence for Egf (NM_010113.1,2351-2369).
caccaagaggtctgtgatt

SEQ ID NO: 547847 - DNA, 19 bp, Mus musculus
  siRNA target sequence for Egf (NM_010113.1,2353-2371).
ccaagaggtctgtgattga

SEQ ID NO: 547848 - DNA, 19 bp, Mus musculus
  siRNA target sequence for Egf (NM_010113.1,2390-2408).
ctccaaacgccgaagactt

SEQ ID NO: 547849 - DNA, 19 bp, Mus musculus
  siRNA target sequence for Egf (NM_010113.1,2392-2410).
ccaaacgccgaagacttat

SEQ ID NO: 547850 - DNA, 19 bp, Mus musculus
  siRNA target sequence for Egf (NM_010113.1,2477-2495).
ggctatcccatcggtaata

SEQ ID NO: 547851 - DNA, 19 bp, Mus musculus
  siRNA target sequence for Egf (NM_010113.1,2478-2496).
gctatcccatcggtaataa

SEQ ID NO: 547852 - DNA, 19 bp, Mus musculus
  siRNA target sequence for Egf (NM_010113.1,2593-2611).
gtgcagatccctgcttata

SEQ ID NO: 547853 - DNA, 19 bp, Mus musculus
  siRNA target sequence for Egf (NM_010113.1,2595-2613).
gcagatccctgcttataca

SEQ ID NO: 547854 - DNA, 19 bp, Mus musculus
  siRNA target sequence for Egf (NM_010113.1,2671-2689).
gtcgtgaaggttttgtgaa

SEQ ID NO: 547855 - DNA, 19 bp, Mus musculus
  siRNA target sequence for Egf (NM_010113.1,2691-2709).
gcctgggatgggaaaatgt

SEQ ID NO: 547856 - DNA, 19 bp, Mus musculus
  siRNA target sequence for Egf (NM_010113.1,2693-2711).
ctgggatgggaaaatgtgt

SEQ ID NO: 547857 - DNA, 19 bp, Mus musculus
  siRNA target sequence for Egf (NM_010113.1,2708-2726).
gtgtctccctcaggattat

SEQ ID NO: 547858 - DNA, 19 bp, Mus musculus
  siRNA target sequence for Egf (NM_010113.1,2849-2867).
ggtgtcaggcatgaactat

SEQ ID NO: 547859 - DNA, 19 bp, Mus musculus
  siRNA target sequence for Egf (NM_010113.1,2854-2872).
caggcatgaactatgaaga

SEQ ID NO: 547860 - DNA, 19 bp, Mus musculus
  siRNA target sequence for Egf (NM_010113.1,2953-2971).
ggtttgccagggatggaaa

SEQ ID NO: 547861 - DNA, 19 bp, Mus musculus
  siRNA target sequence for Egf (NM_010113.1,2972-2990).
cctgtgttctgatatagat

SEQ ID NO: 547862 - DNA, 19 bp, Mus musculus
  siRNA target sequence for Egf (NM_010113.1,3092-3110).
cgggatctcctgtttcgat

SEQ ID NO: 547863 - DNA, 19 bp, Mus musculus
  siRNA target sequence for Egf (NM_010113.1,3093-3111).
gggatctcctgtttcgata

SEQ ID NO: 547864 - DNA, 19 bp, Mus musculus
  siRNA target sequence for Egf (NM_010113.1,3094-3112).
ggatctcctgtttcgatat

SEQ ID NO: 547865 - DNA, 19 bp, Mus musculus
  siRNA target sequence for Egf (NM_010113.1,3095-3113).
gatctcctgtttcgatatt

SEQ ID NO: 547866 - DNA, 19 bp, Mus musculus
  siRNA target sequence for Egf (NM_010113.1,3269-3287).
ccatttggaccgaaatagt

SEQ ID NO: 547867 - DNA, 19 bp, Mus musculus
  siRNA target sequence for Egf (NM_010113.1,3270-3288).
catttggaccgaaatagtt

SEQ ID NO: 547868 - DNA, 19 bp, Mus musculus
  siRNA target sequence for Egf (NM_010113.1,3275-3293).
ggaccgaaatagttatcca

SEQ ID NO: 547869 - DNA, 19 bp, Mus musculus
  siRNA target sequence for Egf (NM_010113.1,3295-3313).
gatgcccatcctcatatga

SEQ ID NO: 547870 - DNA, 19 bp, Mus musculus
  siRNA target sequence for Egf (NM_010113.1,3334-3352).
gcgtgtgcatgcatattga

SEQ ID NO: 547871 - DNA, 19 bp, Mus musculus
  siRNA target sequence for Egf (NM_010113.1,3335-3353).
cgtgtgcatgcatattgaa

SEQ ID NO: 547872 - DNA, 19 bp, Mus musculus
  siRNA target sequence for Egf (NM_010113.1,3338-3356).
gtgcatgcatattgaatca

SEQ ID NO: 547873 - DNA, 19 bp, Mus musculus
  siRNA target sequence for Egf (NM_010113.1,3520-3538).
ggatgtgggggacttacta

SEQ ID NO: 547874 - DNA, 19 bp, Mus musculus
  siRNA target sequence for Egf (NM_010113.1,3547-3565).
ctcggaagcagctatcaaa

SEQ ID NO: 547875 - DNA, 19 bp, Mus musculus
  siRNA target sequence for Egf (NM_010113.1,3569-3587).
cccaaagaacccttgtgat

SEQ ID NO: 547876 - DNA, 19 bp, Mus musculus
  siRNA target sequence for Egf (NM_010113.1,3665-3683).
gtttgtggtcctagagaaa

SEQ ID NO: 547877 - DNA, 19 bp, Mus musculus
  siRNA target sequence for Egf (NM_010113.1,3710-3728).
gcctgcggatggtacgaat

SEQ ID NO: 547878 - DNA, 19 bp, Mus musculus
  siRNA target sequence for Egf (NM_010113.1,3724-3742).
cgaatggtgcagtagtaga

SEQ ID NO: 547879 - DNA, 19 bp, Mus musculus
  siRNA target sequence for Egf (NM_010113.1,3725-3743).
gaatggtgcagtagtagat

SEQ ID NO: 547880 - DNA, 19 bp, Mus musculus
  siRNA target sequence for Egfl6 (NM_019397.1,258-276).
gaccagtccatgggattat

SEQ ID NO: 547881 - DNA, 19 bp, Mus musculus
  siRNA target sequence for Egfl6 (NM_019397.1,311-329).
gtcagtatggaactaagat

SEQ ID NO: 547882 - DNA, 19 bp, Mus musculus
  siRNA target sequence for Egfl6 (NM_019397.1,408-426).
gtgtgtgggaccgaataaa

SEQ ID NO: 547883 - DNA, 19 bp, Mus musculus
  siRNA target sequence for Egfl6 (NM_019397.1,412-430).
gtgggaccgaataaatgta

SEQ ID NO: 547884 - DNA, 19 bp, Mus musculus
  siRNA target sequence for Egfl6 (NM_019397.1,414-432).
gggaccgaataaatgtaga

SEQ ID NO: 547885 - DNA, 19 bp, Mus musculus
  siRNA target sequence for Egfl6 (NM_019397.1,415-433).
ggaccgaataaatgtagat

SEQ ID NO: 547886 - DNA, 19 bp, Mus musculus
  siRNA target sequence for Egfl6 (NM_019397.1,526-544).
catggtagctacaaatgct

SEQ ID NO: 547887 - DNA, 19 bp, Mus musculus
  siRNA target sequence for Egfl6 (NM_019397.1,574-592).
gatgctacatgttcaaact

SEQ ID NO: 547888 - DNA, 19 bp, Mus musculus
  siRNA target sequence for Egfl6 (NM_019397.1,596-614).
ggacgtgtgccagactaaa

SEQ ID NO: 547889 - DNA, 19 bp, Mus musculus
  siRNA target sequence for Egfl6 (NM_019397.1,678-696).
ccgcctgggcccaaatgga

SEQ ID NO: 547890 - DNA, 19 bp, Mus musculus
  siRNA target sequence for Egfl6 (NM_019397.1,684-702).
gggcccaaatggaagagta

SEQ ID NO: 547891 - DNA, 19 bp, Mus musculus
  siRNA target sequence for Egfl6 (NM_019397.1,739-757).
gtctgcccttccaatcgaa

SEQ ID NO: 547892 - DNA, 19 bp, Mus musculus
  siRNA target sequence for Egfl6 (NM_019397.1,775-793).
ggaagctactactgcaaat

SEQ ID NO: 547893 - DNA, 19 bp, Mus musculus
  siRNA target sequence for Egfl6 (NM_019397.1,783-801).
ctactgcaaatgtcacatt

SEQ ID NO: 547894 - DNA, 19 bp, Mus musculus
  siRNA target sequence for Egfl6 (NM_019397.1,822-840).
cggtcgccgatatgattgt

SEQ ID NO: 547895 - DNA, 19 bp, Mus musculus
  siRNA target sequence for Egfl6 (NM_019397.1,824-842).
gtcgccgatatgattgtgt

SEQ ID NO: 547896 - DNA, 19 bp, Mus musculus
  siRNA target sequence for Egfl6 (NM_019397.1,886-904).
catgccaattgcctcaata

SEQ ID NO: 547897 - DNA, 19 bp, Mus musculus
  siRNA target sequence for Egfl6 (NM_019397.1,1013-1031).
ccatcaaagaccgaatcaa

SEQ ID NO: 547898 - DNA, 19 bp, Mus musculus
  siRNA target sequence for Egfl6 (NM_019397.1,1109-1127).
gtgtccctaaggtcaactt

SEQ ID NO: 547899 - DNA, 19 bp, Mus musculus
  siRNA target sequence for Egfl6 (NM_019397.1,1155-1173).
caggggcagaaactatgat

SEQ ID NO: 547900 - DNA, 19 bp, Mus musculus
  siRNA target sequence for Egfl6 (NM_019397.1,1268-1286).
ccctccgaggggatgtatt

SEQ ID NO: 547901 - DNA, 19 bp, Mus musculus
  siRNA target sequence for Egfl6 (NM_019397.1,1282-1300).
gtattctcccctaaggtaa

SEQ ID NO: 547902 - DNA, 19 bp, Mus musculus
  siRNA target sequence for Egfl6 (NM_019397.1,1287-1305).
ctcccctaaggtaaatgaa

SEQ ID NO: 547903 - DNA, 19 bp, Mus musculus
  siRNA target sequence for Egfl6 (NM_019397.1,1323-1341).
ggtctacgtccaaagaaaa

SEQ ID NO: 547904 - DNA, 19 bp, Mus musculus
  siRNA target sequence for Egfl6 (NM_019397.1,1425-1443).
ggatagagaagatgatttt

SEQ ID NO: 547905 - DNA, 19 bp, Mus musculus
  siRNA target sequence for Egfl6 (NM_019397.1,1463-1481).
gagacaatgatgttggtta

SEQ ID NO: 547906 - DNA, 19 bp, Mus musculus
  siRNA target sequence for Egfl6 (NM_019397.1,1467-1485).
caatgatgttggttactat

SEQ ID NO: 547907 - DNA, 19 bp, Mus musculus
  siRNA target sequence for Egfl6 (NM_019397.1,1518-1536).
gaatattggccgattgaaa

SEQ ID NO: 547908 - DNA, 19 bp, Mus musculus
  siRNA target sequence for Egfl6 (NM_019397.1,1601-1619).
gggacaaagtaggaaaact

SEQ ID NO: 547909 - DNA, 19 bp, Mus musculus
  siRNA target sequence for Egfl6 (NM_019397.1,1621-1639).
cgagtgttcgtgaaaaata

SEQ ID NO: 547910 - DNA, 19 bp, Mus musculus
  siRNA target sequence for Egfl6 (NM_019397.1,1624-1642).
gtgttcgtgaaaaatagca

SEQ ID NO: 547911 - DNA, 19 bp, Mus musculus
  siRNA target sequence for Egfl6 (NM_019397.1,1629-1647).
cgtgaaaaatagcaacaat

SEQ ID NO: 547912 - DNA, 19 bp, Mus musculus
  siRNA target sequence for Egfl6 (NM_019397.1,1688-1706).
ggaggacaggaaaaatcca

SEQ ID NO: 547913 - DNA, 19 bp, Mus musculus
  siRNA target sequence for Egfl6 (NM_019397.1,1717-1735).
gggatcgatactaccaaaa

SEQ ID NO: 547914 - DNA, 19 bp, Mus musculus
  siRNA target sequence for Egfl6 (NM_019397.1,1719-1737).
gatcgatactaccaaaagt

SEQ ID NO: 547915 - DNA, 19 bp, Mus musculus
  siRNA target sequence for Egfl6 (NM_019397.1,1815-1833).
gtgtcccgatgacttttta

SEQ ID NO: 547916 - DNA, 19 bp, Mus musculus
  siRNA target sequence for Egfl7 (NM_178444.3,337-355).
ggcagcagatggtactact

SEQ ID NO: 547917 - DNA, 19 bp, Mus musculus
  siRNA target sequence for Egfl7 (NM_178444.3,348-366).
gtactactgagcatgtcta

SEQ ID NO: 547918 - DNA, 19 bp, Mus musculus
  siRNA target sequence for Egfl7 (NM_178444.3,423-441).
cctttgtgcagcgtgtata

SEQ ID NO: 547919 - DNA, 19 bp, Mus musculus
  siRNA target sequence for Egfl7 (NM_178444.3,539-557).
gcaaggcctcgctatgctt

SEQ ID NO: 547920 - DNA, 19 bp, Mus musculus
  siRNA target sequence for Egfl7 (NM_178444.3,595-613).
ggcttgtggagcagcaata

SEQ ID NO: 547921 - DNA, 19 bp, Mus musculus
  siRNA target sequence for Egfl7 (NM_178444.3,915-933).
gggttgatgtgctagaaca

SEQ ID NO: 547922 - DNA, 19 bp, Mus musculus
  siRNA target sequence for Egfl7 (NM_178444.3,1034-1052).
cagctggaccgaattgatt

SEQ ID NO: 547923 - DNA, 19 bp, Mus musculus
  siRNA target sequence for Egfl7 (NM_178444.3,1036-1054).
gctggaccgaattgattca

SEQ ID NO: 547924 - DNA, 19 bp, Mus musculus
  siRNA target sequence for Egfl8 (NM_152922.1,29-47).
ccctacgaggactctcatt

SEQ ID NO: 547925 - DNA, 19 bp, Mus musculus
  siRNA target sequence for Egfl8 (NM_152922.1,31-49).
ctacgaggactctcattct

SEQ ID NO: 547926 - DNA, 19 bp, Mus musculus
  siRNA target sequence for Egfl8 (NM_152922.1,82-100).
ggaggatctttcaaagaga

SEQ ID NO: 547927 - DNA, 19 bp, Mus musculus
  siRNA target sequence for Egfl8 (NM_152922.1,142-160).
cgttacaacgagtcctata

SEQ ID NO: 547928 - DNA, 19 bp, Mus musculus
  siRNA target sequence for Egfl8 (NM_152922.1,147-165).
caacgagtcctatagtcaa

SEQ ID NO: 547929 - DNA, 19 bp, Mus musculus
  siRNA target sequence for Egfl8 (NM_152922.1,196-214).
gcggggaggcgcatatgta

SEQ ID NO: 547930 - DNA, 19 bp, Mus musculus
  siRNA target sequence for Egfl8 (NM_152922.1,341-359).
gctccaagccttgtcttaa

SEQ ID NO: 547931 - DNA, 19 bp, Mus musculus
  siRNA target sequence for Egfl8 (NM_152922.1,342-360).
ctccaagccttgtcttaat

SEQ ID NO: 547932 - DNA, 19 bp, Mus musculus
  siRNA target sequence for Egfl8 (NM_152922.1,424-442).
cacgtggatgtcgatgaat

SEQ ID NO: 547933 - DNA, 19 bp, Mus musculus
  siRNA target sequence for Ehd2 (NM_153068.1,118-136).
gctgtatcgcacgaaactt

SEQ ID NO: 547934 - DNA, 19 bp, Mus musculus
  siRNA target sequence for Ehd2 (NM_153068.1,121-139).
gtatcgcacgaaacttctt

SEQ ID NO: 547935 - DNA, 19 bp, Mus musculus
  siRNA target sequence for Ehd2 (NM_153068.1,157-175).
ccgttttgggtctttccat

SEQ ID NO: 547936 - DNA, 19 bp, Mus musculus
  siRNA target sequence for Ehd2 (NM_153068.1,406-424).
caaactcaacccttttgga

SEQ ID NO: 547937 - DNA, 19 bp, Mus musculus
  siRNA target sequence for Ehd2 (NM_153068.1,429-447).
cttttctcaacaggtttat

SEQ ID NO: 547938 - DNA, 19 bp, Mus musculus
  siRNA target sequence for Ehd2 (NM_153068.1,494-512).
gacacgcctggcatcctat

SEQ ID NO: 547939 - DNA, 19 bp, Mus musculus
  siRNA target sequence for Ehd2 (NM_153068.1,509-527).
ctatcaggtgcaaaacaga

SEQ ID NO: 547940 - DNA, 19 bp, Mus musculus
  siRNA target sequence for Ehd2 (NM_153068.1,617-635).
ctggagatttccgatgaat

SEQ ID NO: 547941 - DNA, 19 bp, Mus musculus
  siRNA target sequence for Ehd2 (NM_153068.1,659-677).
cgtggccacgaggataaga

SEQ ID NO: 547942 - DNA, 19 bp, Mus musculus
  siRNA target sequence for Ehd2 (NM_153068.1,781-799).
ggtccttcgcgtctacatt

SEQ ID NO: 547943 - DNA, 19 bp, Mus musculus
  siRNA target sequence for Ehd2 (NM_153068.1,831-849).
cggacaaccggcgtctttt

SEQ ID NO: 547944 - DNA, 19 bp, Mus musculus
  siRNA target sequence for Ehd2 (NM_153068.1,916-934).
gctcaacgacctagtgaaa

SEQ ID NO: 547945 - DNA, 19 bp, Mus musculus
  siRNA target sequence for Ehd2 (NM_153068.1,950-968).
cgggtacacgcttacatca

SEQ ID NO: 547946 - DNA, 19 bp, Mus musculus
  siRNA target sequence for Ehd2 (NM_153068.1,951-969).
gggtacacgcttacatcat

SEQ ID NO: 547947 - DNA, 19 bp, Mus musculus
  siRNA target sequence for Ehd2 (NM_153068.1,1381-1399).
ggacaagtccaaatacgat

SEQ ID NO: 547948 - DNA, 19 bp, Mus musculus
  siRNA target sequence for Ehd2 (NM_153068.1,1442-1460).
ggctctaaggccaaaacct

SEQ ID NO: 547949 - DNA, 19 bp, Mus musculus
  siRNA target sequence for Eltd1 (NM_133222.1,109-127).
gactcctcccgcttctagt

SEQ ID NO: 547950 - DNA, 19 bp, Mus musculus
  siRNA target sequence for Eltd1 (NM_133222.1,261-279).
gtcacgatttgtgaagata

SEQ ID NO: 547951 - DNA, 19 bp, Mus musculus
  siRNA target sequence for Eltd1 (NM_133222.1,263-281).
cacgatttgtgaagatata

SEQ ID NO: 547952 - DNA, 19 bp, Mus musculus
  siRNA target sequence for Eltd1 (NM_133222.1,265-283).
cgatttgtgaagatataga

SEQ ID NO: 547953 - DNA, 19 bp, Mus musculus
  siRNA target sequence for Eltd1 (NM_133222.1,412-430).
gctcttactgccaagatat

SEQ ID NO: 547954 - DNA, 19 bp, Mus musculus
  siRNA target sequence for Eltd1 (NM_133222.1,415-433).
cttactgccaagatataga

SEQ ID NO: 547955 - DNA, 19 bp, Mus musculus
  siRNA target sequence for Eltd1 (NM_133222.1,610-628).
cctgcatcgctgcaaacat

SEQ ID NO: 547956 - DNA, 19 bp, Mus musculus
  siRNA target sequence for Eltd1 (NM_133222.1,673-691).
ctttactccaagaaatcta

SEQ ID NO: 547957 - DNA, 19 bp, Mus musculus
  siRNA target sequence for Eltd1 (NM_133222.1,678-696).
ctccaagaaatctacagaa

SEQ ID NO: 547958 - DNA, 19 bp, Mus musculus
  siRNA target sequence for Eltd1 (NM_133222.1,741-759).
gagatcctaactgaatcat

SEQ ID NO: 547959 - DNA, 19 bp, Mus musculus
  siRNA target sequence for Eltd1 (NM_133222.1,777-795).
ccgaacagcaccacttcat

SEQ ID NO: 547960 - DNA, 19 bp, Mus musculus
  siRNA target sequence for Eltd1 (NM_133222.1,778-796).
cgaacagcaccacttcata

SEQ ID NO: 547961 - DNA, 19 bp, Mus musculus
  siRNA target sequence for Eltd1 (NM_133222.1,806-824).
ccacttcaactcaactctt

SEQ ID NO: 547962 - DNA, 19 bp, Mus musculus
  siRNA target sequence for Eltd1 (NM_133222.1,807-825).
cacttcaactcaactctta

SEQ ID NO: 547963 - DNA, 19 bp, Mus musculus
  siRNA target sequence for Eltd1 (NM_133222.1,834-852).
ggggaaaccatcaataatt

SEQ ID NO: 547964 - DNA, 19 bp, Mus musculus
  siRNA target sequence for Eltd1 (NM_133222.1,855-873).
gttgaaaggagtacacata

SEQ ID NO: 547965 - DNA, 19 bp, Mus musculus
  siRNA target sequence for Eltd1 (NM_133222.1,881-899).
ggaccagttaccgacaaat

SEQ ID NO: 547966 - DNA, 19 bp, Mus musculus
  siRNA target sequence for Eltd1 (NM_133222.1,885-903).
cagttaccgacaaatcaca

SEQ ID NO: 547967 - DNA, 19 bp, Mus musculus
  siRNA target sequence for Eltd1 (NM_133222.1,1054-1072).
ctcacccccacatgaatgt

SEQ ID NO: 547968 - DNA, 19 bp, Mus musculus
  siRNA target sequence for Eltd1 (NM_133222.1,1120-1138).
gcacaactggcaatgtagt

SEQ ID NO: 547969 - DNA, 19 bp, Mus musculus
  siRNA target sequence for Eltd1 (NM_133222.1,1123-1141).
caactggcaatgtagtagt

SEQ ID NO: 547970 - DNA, 19 bp, Mus musculus
  siRNA target sequence for Eltd1 (NM_133222.1,1129-1147).
gcaatgtagtagttgcatt

SEQ ID NO: 547971 - DNA, 19 bp, Mus musculus
  siRNA target sequence for Eltd1 (NM_133222.1,1143-1161).
gcattcctctgctataaga

SEQ ID NO: 547972 - DNA, 19 bp, Mus musculus
  siRNA target sequence for Eltd1 (NM_133222.1,1183-1201).
catctgacaacttcttact

SEQ ID NO: 547973 - DNA, 19 bp, Mus musculus
  siRNA target sequence for Eltd1 (NM_133222.1,1196-1214).
cttactggacactcaaaat

SEQ ID NO: 547974 - DNA, 19 bp, Mus musculus
  siRNA target sequence for Eltd1 (NM_133222.1,1262-1280).
ctcaattagctcaaatcca

SEQ ID NO: 547975 - DNA, 19 bp, Mus musculus
  siRNA target sequence for Eltd1 (NM_133222.1,1279-1297).
cacccacattatatgaact

SEQ ID NO: 547976 - DNA, 19 bp, Mus musculus
  siRNA target sequence for Eltd1 (NM_133222.1,1315-1333).
cactaagtcatgtaaagct

SEQ ID NO: 547977 - DNA, 19 bp, Mus musculus
  siRNA target sequence for Eltd1 (NM_133222.1,1375-1393).
cagttgatgccatgaacaa

SEQ ID NO: 547978 - DNA, 19 bp, Mus musculus
  siRNA target sequence for Eltd1 (NM_133222.1,1471-1489).
cacactttgcgattttgat

SEQ ID NO: 547979 - DNA, 19 bp, Mus musculus
  siRNA target sequence for Eltd1 (NM_133222.1,1473-1491).
cactttgcgattttgatgt

SEQ ID NO: 547980 - DNA, 19 bp, Mus musculus
  siRNA target sequence for Eltd1 (NM_133222.1,1498-1516).
cttcttccattgggattaa

SEQ ID NO: 547981 - DNA, 19 bp, Mus musculus
  siRNA target sequence for Eltd1 (NM_133222.1,1501-1519).
cttccattgggattaagga

SEQ ID NO: 547982 - DNA, 19 bp, Mus musculus
  siRNA target sequence for Eltd1 (NM_133222.1,1504-1522).
ccattgggattaaggatta

SEQ ID NO: 547983 - DNA, 19 bp, Mus musculus
  siRNA target sequence for Eltd1 (NM_133222.1,1505-1523).
cattgggattaaggattat

SEQ ID NO: 547984 - DNA, 19 bp, Mus musculus
  siRNA target sequence for Eltd1 (NM_133222.1,1509-1527).
gggattaaggattataata

SEQ ID NO: 547985 - DNA, 19 bp, Mus musculus
  siRNA target sequence for Eltd1 (NM_133222.1,1543-1561).
ctcaactcgggataatcat

SEQ ID NO: 547986 - DNA, 19 bp, Mus musculus
  siRNA target sequence for Eltd1 (NM_133222.1,1545-1563).
caactcgggataatcatct

SEQ ID NO: 547987 - DNA, 19 bp, Mus musculus
  siRNA target sequence for Eltd1 (NM_133222.1,1624-1642).
ccaggaccacgattcacaa

SEQ ID NO: 547988 - DNA, 19 bp, Mus musculus
  siRNA target sequence for Eltd1 (NM_133222.1,1627-1645).
ggaccacgattcacaagaa

SEQ ID NO: 547989 - DNA, 19 bp, Mus musculus
  siRNA target sequence for Eltd1 (NM_133222.1,1661-1679).
ctttcttgcagaacttgtt

SEQ ID NO: 547990 - DNA, 19 bp, Mus musculus
  siRNA target sequence for Eltd1 (NM_133222.1,1683-1701).
cttattgggatcaacataa

SEQ ID NO: 547991 - DNA, 19 bp, Mus musculus
  siRNA target sequence for Eltd1 (NM_133222.1,1689-1707).
gggatcaacataaatacga

SEQ ID NO: 547992 - DNA, 19 bp, Mus musculus
  siRNA target sequence for Eltd1 (NM_133222.1,1690-1708).
ggatcaacataaatacgaa

SEQ ID NO: 547993 - DNA, 19 bp, Mus musculus
  siRNA target sequence for Eltd1 (NM_133222.1,1691-1709).
gatcaacataaatacgaat

SEQ ID NO: 547994 - DNA, 19 bp, Mus musculus
  siRNA target sequence for Eltd1 (NM_133222.1,1735-1753).
gcctgctccattacttctt

SEQ ID NO: 547995 - DNA, 19 bp, Mus musculus
  siRNA target sequence for Eltd1 (NM_133222.1,1739-1757).
gctccattacttcttctta

SEQ ID NO: 547996 - DNA, 19 bp, Mus musculus
  siRNA target sequence for Eltd1 (NM_133222.1,1806-1824).
gttgtcggcgtcatctaca

SEQ ID NO: 547997 - DNA, 19 bp, Mus musculus
  siRNA target sequence for Eltd1 (NM_133222.1,1809-1827).
gtcggcgtcatctacaaca

SEQ ID NO: 547998 - DNA, 19 bp, Mus musculus
  siRNA target sequence for Eltd1 (NM_133222.1,1841-1859).
caagaacttttatatcttt

SEQ ID NO: 547999 - DNA, 19 bp, Mus musculus
  siRNA target sequence for Eltd1 (NM_133222.1,1920-1938).
ggaaccacgaaagtatgtt

SEQ ID NO: 548000 - DNA, 19 bp, Mus musculus
  siRNA target sequence for Eltd1 (NM_133222.1,1936-1954).
gttggctgagcactgaaaa

SEQ ID NO: 548001 - DNA, 19 bp, Mus musculus
  siRNA target sequence for Eltd1 (NM_133222.1,1977-1995).
ggaccagcgtgtctaatca

SEQ ID NO: 548002 - DNA, 19 bp, Mus musculus
  siRNA target sequence for Eltd1 (NM_133222.1,1978-1996).
gaccagcgtgtctaatcat

SEQ ID NO: 548003 - DNA, 19 bp, Mus musculus
  siRNA target sequence for Eltd1 (NM_133222.1,1981-1999).
cagcgtgtctaatcattct

SEQ ID NO: 548004 - DNA, 19 bp, Mus musculus
  siRNA target sequence for Eltd1 (NM_133222.1,1984-2002).
cgtgtctaatcattcttgt

SEQ ID NO: 548005 - DNA, 19 bp, Mus musculus
  siRNA target sequence for Eltd1 (NM_133222.1,2012-2030).
ggcttttggagttatcata

SEQ ID NO: 548006 - DNA, 19 bp, Mus musculus
  siRNA target sequence for Eltd1 (NM_133222.1,2014-2032).
cttttggagttatcatata

SEQ ID NO: 548007 - DNA, 19 bp, Mus musculus
  siRNA target sequence for Eltd1 (NM_133222.1,2058-2076).
ctgaaaccagaagttagtt

SEQ ID NO: 548008 - DNA, 19 bp, Mus musculus
  siRNA target sequence for Eltd1 (NM_133222.1,2067-2085).
gaagttagttgctatgaga

SEQ ID NO: 548009 - DNA, 19 bp, Mus musculus
  siRNA target sequence for Eltd1 (NM_133222.1,2211-2229).
gctttccaagggatgttca

SEQ ID NO: 548010 - DNA, 19 bp, Mus musculus
  siRNA target sequence for Eltd1 (NM_133222.1,2212-2230).
ctttccaagggatgttcat

SEQ ID NO: 548011 - DNA, 19 bp, Mus musculus
  siRNA target sequence for Eltd1 (NM_133222.1,2220-2238).
gggatgttcattttcttat

SEQ ID NO: 548012 - DNA, 19 bp, Mus musculus
  siRNA target sequence for Eltd1 (NM_133222.1,2245-2263).
gcgttttgtctagaaagat

SEQ ID NO: 548013 - DNA, 19 bp, Mus musculus
  siRNA target sequence for Eltd1 (NM_133222.1,2246-2264).
cgttttgtctagaaagatt

SEQ ID NO: 548014 - DNA, 19 bp, Mus musculus
  siRNA target sequence for Eltd1 (NM_133222.1,2261-2279).
gattcaagaggaatattat

SEQ ID NO: 548015 - DNA, 19 bp, Mus musculus
  siRNA target sequence for Emr1 (NM_010130.1,122-140).
cacttggtggtgtgaatga

SEQ ID NO: 548016 - DNA, 19 bp, Mus musculus
  siRNA target sequence for Emr1 (NM_010130.1,124-142).
cttggtggtgtgaatgagt

SEQ ID NO: 548017 - DNA, 19 bp, Mus musculus
  siRNA target sequence for Emr1 (NM_010130.1,133-151).
gtgaatgagtgtcaagata

SEQ ID NO: 548018 - DNA, 19 bp, Mus musculus
  siRNA target sequence for Emr1 (NM_010130.1,263-281).
gagtggaatgtcaagatgt

SEQ ID NO: 548019 - DNA, 19 bp, Mus musculus
  siRNA target sequence for Emr1 (NM_010130.1,349-367).
gccaagtgcagctgtctta

SEQ ID NO: 548020 - DNA, 19 bp, Mus musculus
  siRNA target sequence for Emr1 (NM_010130.1,399-417).
gattctgggaagtttggat

SEQ ID NO: 548021 - DNA, 19 bp, Mus musculus
  siRNA target sequence for Emr1 (NM_010130.1,405-423).
gggaagtttggataatttt

SEQ ID NO: 548022 - DNA, 19 bp, Mus musculus
  siRNA target sequence for Emr1 (NM_010130.1,457-475).
gggatctgccctaagtatt

SEQ ID NO: 548023 - DNA, 19 bp, Mus musculus
  siRNA target sequence for Emr1 (NM_010130.1,529-547).
gtcttgaatggctccattt

SEQ ID NO: 548024 - DNA, 19 bp, Mus musculus
  siRNA target sequence for Emr1 (NM_010130.1,534-552).
gaatggctccatttgtgaa

SEQ ID NO: 548025 - DNA, 19 bp, Mus musculus
  siRNA target sequence for Emr1 (NM_010130.1,606-624).
caacactctcggaagctat

SEQ ID NO: 548026 - DNA, 19 bp, Mus musculus
  siRNA target sequence for Emr1 (NM_010130.1,609-627).
cactctcggaagctattat

SEQ ID NO: 548027 - DNA, 19 bp, Mus musculus
  siRNA target sequence for Emr1 (NM_010130.1,613-631).
ctcggaagctattattgta

SEQ ID NO: 548028 - DNA, 19 bp, Mus musculus
  siRNA target sequence for Emr1 (NM_010130.1,636-654).
caactcaggacttgaatct

SEQ ID NO: 548029 - DNA, 19 bp, Mus musculus
  siRNA target sequence for Emr1 (NM_010130.1,639-657).
ctcaggacttgaatctagt

SEQ ID NO: 548030 - DNA, 19 bp, Mus musculus
  siRNA target sequence for Emr1 (NM_010130.1,706-724).
gatgagtgctccaggaatt

SEQ ID NO: 548031 - DNA, 19 bp, Mus musculus
  siRNA target sequence for Emr1 (NM_010130.1,736-754).
ggtcccaccttcatttgca

SEQ ID NO: 548032 - DNA, 19 bp, Mus musculus
  siRNA target sequence for Emr1 (NM_010130.1,785-803).
gcccagctggattctcttt

SEQ ID NO: 548033 - DNA, 19 bp, Mus musculus
  siRNA target sequence for Emr1 (NM_010130.1,835-853).
gatgggaattgtacagata

SEQ ID NO: 548034 - DNA, 19 bp, Mus musculus
  siRNA target sequence for Emr1 (NM_010130.1,839-857).
ggaattgtacagatatcga

SEQ ID NO: 548035 - DNA, 19 bp, Mus musculus
  siRNA target sequence for Emr1 (NM_010130.1,840-858).
gaattgtacagatatcgat

SEQ ID NO: 548036 - DNA, 19 bp, Mus musculus
  siRNA target sequence for Emr1 (NM_010130.1,947-965).
gcaatggacagctgaattt

SEQ ID NO: 548037 - DNA, 19 bp, Mus musculus
  siRNA target sequence for Emr1 (NM_010130.1,1002-1020).
gtgcacccaagatccatta

SEQ ID NO: 548038 - DNA, 19 bp, Mus musculus
  siRNA target sequence for Emr1 (NM_010130.1,1152-1170).
gtgtaaggaagacttgata

SEQ ID NO: 548039 - DNA, 19 bp, Mus musculus
  siRNA target sequence for Emr1 (NM_010130.1,1209-1227).
gggcagggatcttggttat

SEQ ID NO: 548040 - DNA, 19 bp, Mus musculus
  siRNA target sequence for Emr1 (NM_010130.1,1232-1250).
ccttctgtacacttgtgaa

SEQ ID NO: 548041 - DNA, 19 bp, Mus musculus
  siRNA target sequence for Emr1 (NM_010130.1,1246-1264).
gtgaatgctaccttcacaa

SEQ ID NO: 548042 - DNA, 19 bp, Mus musculus
  siRNA target sequence for Emr1 (NM_010130.1,1256-1274).
ccttcacaatccttgataa

SEQ ID NO: 548043 - DNA, 19 bp, Mus musculus
  siRNA target sequence for Emr1 (NM_010130.1,1257-1275).
cttcacaatccttgataat

SEQ ID NO: 548044 - DNA, 19 bp, Mus musculus
  siRNA target sequence for Emr1 (NM_010130.1,1454-1472).
ggaatgccagtcagatgat

SEQ ID NO: 548045 - DNA, 19 bp, Mus musculus
  siRNA target sequence for Emr1 (NM_010130.1,1455-1473).
gaatgccagtcagatgatt

SEQ ID NO: 548046 - DNA, 19 bp, Mus musculus
  siRNA target sequence for Emr1 (NM_010130.1,1480-1498).
gagtacctagacatcgaaa

SEQ ID NO: 548047 - DNA, 19 bp, Mus musculus
  siRNA target sequence for Emr1 (NM_010130.1,1489-1507).
gacatcgaaagcaaagtca

SEQ ID NO: 548048 - DNA, 19 bp, Mus musculus
  siRNA target sequence for Emr1 (NM_010130.1,1516-1534).
gagtgcaaggagaatgagt

SEQ ID NO: 548049 - DNA, 19 bp, Mus musculus
  siRNA target sequence for Emr1 (NM_010130.1,1525-1543).
gagaatgagtccattaact

SEQ ID NO: 548050 - DNA, 19 bp, Mus musculus
  siRNA target sequence for Emr1 (NM_010130.1,1553-1571).
gaggggacaagatgaatgt

SEQ ID NO: 548051 - DNA, 19 bp, Mus musculus
  siRNA target sequence for Emr1 (NM_010130.1,1581-1599).
cataatcaaagaatcagta

SEQ ID NO: 548052 - DNA, 19 bp, Mus musculus
  siRNA target sequence for Emr1 (NM_010130.1,1587-1605).
caaagaatcagtatctaca

SEQ ID NO: 548053 - DNA, 19 bp, Mus musculus
  siRNA target sequence for Emr1 (NM_010130.1,1620-1638).
ggcttttgtctcatttgca

SEQ ID NO: 548054 - DNA, 19 bp, Mus musculus
  siRNA target sequence for Emr1 (NM_010130.1,1701-1719).
gatgaattcccgtgttgtt

SEQ ID NO: 548055 - DNA, 19 bp, Mus musculus
  siRNA target sequence for Emr1 (NM_010130.1,1755-1773).
ctccaagcctattatctat

SEQ ID NO: 548056 - DNA, 19 bp, Mus musculus
  siRNA target sequence for Emr1 (NM_010130.1,1803-1821).
gtctgagaggcctatctgt

SEQ ID NO: 548057 - DNA, 19 bp, Mus musculus
  siRNA target sequence for Emr1 (NM_010130.1,1862-1880).
cctcgggctgtgagattgt

SEQ ID NO: 548058 - DNA, 19 bp, Mus musculus
  siRNA target sequence for Emr1 (NM_010130.1,1946-1964).
cttctggggagcttacgat

SEQ ID NO: 548059 - DNA, 19 bp, Mus musculus
  siRNA target sequence for Emr1 (NM_010130.1,1951-1969).
ggggagcttacgatggaat

SEQ ID NO: 548060 - DNA, 19 bp, Mus musculus
  siRNA target sequence for Emr1 (NM_010130.1,2059-2077).
gttcagaaccacaatacct

SEQ ID NO: 548061 - DNA, 19 bp, Mus musculus
  siRNA target sequence for Emr1 (NM_010130.1,2157-2175).
gacggcttgtgccatcatt

SEQ ID NO: 548062 - DNA, 19 bp, Mus musculus
  siRNA target sequence for Emr1 (NM_010130.1,2169-2187).
catcattgcgggattccta

SEQ ID NO: 548063 - DNA, 19 bp, Mus musculus
  siRNA target sequence for Emr1 (NM_010130.1,2177-2195).
cgggattcctacactatct

SEQ ID NO: 548064 - DNA, 19 bp, Mus musculus
  siRNA target sequence for Emr1 (NM_010130.1,2282-2300).
gctctcgcaacatcaagat

SEQ ID NO: 548065 - DNA, 19 bp, Mus musculus
  siRNA target sequence for Emr1 (NM_010130.1,2335-2353).
gtcctggtggtcataatct

SEQ ID NO: 548066 - DNA, 19 bp, Mus musculus
  siRNA target sequence for Emr1 (NM_010130.1,2337-2355).
cctggtggtcataatctct

SEQ ID NO: 548067 - DNA, 19 bp, Mus musculus
  siRNA target sequence for Emr1 (NM_010130.1,2371-2389).
cggggctatgggatgcata

SEQ ID NO: 548068 - DNA, 19 bp, Mus musculus
  siRNA target sequence for Emr1 (NM_010130.1,2372-2390).
ggggctatgggatgcataa

SEQ ID NO: 548069 - DNA, 19 bp, Mus musculus
  siRNA target sequence for Emr1 (NM_010130.1,2437-2455).
gggcctgtctgcatgatca

SEQ ID NO: 548070 - DNA, 19 bp, Mus musculus
  siRNA target sequence for Emr1 (NM_010130.1,2447-2465).
gcatgatcatcacgataaa

SEQ ID NO: 548071 - DNA, 19 bp, Mus musculus
  siRNA target sequence for Emr1 (NM_010130.1,2451-2469).
gatcatcacgataaactct

SEQ ID NO: 548072 - DNA, 19 bp, Mus musculus
  siRNA target sequence for Emr1 (NM_010130.1,2570-2588).
ccattgcccagattttcat

SEQ ID NO: 548073 - DNA, 19 bp, Mus musculus
  siRNA target sequence for Emr1 (NM_010130.1,2672-2690).
gtctgcagggggctttcat

SEQ ID NO: 548074 - DNA, 19 bp, Mus musculus
  siRNA target sequence for Emr1 (NM_010130.1,2716-2734).
cgtcaggtacgggatgaat

SEQ ID NO: 548075 - DNA, 19 bp, Mus musculus
  siRNA target sequence for Emr1 (NM_010130.1,2719-2737).
caggtacgggatgaatata

SEQ ID NO: 548076 - DNA, 19 bp, Mus musculus
  siRNA target sequence for Emr1 (NM_010130.1,2722-2740).
gtacgggatgaatataaga

SEQ ID NO: 548077 - DNA, 19 bp, Mus musculus
  siRNA target sequence for Emr4 (NM_139138.1,216-234).
gtccccagtgcaatgaaaa

SEQ ID NO: 548078 - DNA, 19 bp, Mus musculus
  siRNA target sequence for Emr4 (NM_139138.1,250-268).
cagcacccactgtgtttgt

SEQ ID NO: 548079 - DNA, 19 bp, Mus musculus
  siRNA target sequence for Emr4 (NM_139138.1,252-270).
gcacccactgtgtttgtaa

SEQ ID NO: 548080 - DNA, 19 bp, Mus musculus
  siRNA target sequence for Emr4 (NM_139138.1,280-298).
ctggacgggctctgagaat

SEQ ID NO: 548081 - DNA, 19 bp, Mus musculus
  siRNA target sequence for Emr4 (NM_139138.1,288-306).
gctctgagaatagaagaat

SEQ ID NO: 548082 - DNA, 19 bp, Mus musculus
  siRNA target sequence for Emr4 (NM_139138.1,320-338).
gagaaatgtcaagatatta

SEQ ID NO: 548083 - DNA, 19 bp, Mus musculus
  siRNA target sequence for Emr4 (NM_139138.1,376-394).
gtcgtactgcagaaataaa

SEQ ID NO: 548084 - DNA, 19 bp, Mus musculus
  siRNA target sequence for Emr4 (NM_139138.1,378-396).
cgtactgcagaaataaaat

SEQ ID NO: 548085 - DNA, 19 bp, Mus musculus
  siRNA target sequence for Emr4 (NM_139138.1,406-424).
catatgcagctgtgtagta

SEQ ID NO: 548086 - DNA, 19 bp, Mus musculus
  siRNA target sequence for Emr4 (NM_139138.1,411-429).
gcagctgtgtagtaaaata

SEQ ID NO: 548087 - DNA, 19 bp, Mus musculus
  siRNA target sequence for Emr4 (NM_139138.1,412-430).
cagctgtgtagtaaaatat

SEQ ID NO: 548088 - DNA, 19 bp, Mus musculus
  siRNA target sequence for Emr4 (NM_139138.1,422-440).
gtaaaatatcctttgttca

SEQ ID NO: 548089 - DNA, 19 bp, Mus musculus
  siRNA target sequence for Emr4 (NM_139138.1,506-524).
ggatcaaaaacacatactt

SEQ ID NO: 548090 - DNA, 19 bp, Mus musculus
  siRNA target sequence for Emr4 (NM_139138.1,507-525).
gatcaaaaacacatacttt

SEQ ID NO: 548091 - DNA, 19 bp, Mus musculus
  siRNA target sequence for Emr4 (NM_139138.1,526-544).
gggagtactgagtgaattt

SEQ ID NO: 548092 - DNA, 19 bp, Mus musculus
  siRNA target sequence for Emr4 (NM_139138.1,588-606).
gcaaagtggaacatcacat

SEQ ID NO: 548093 - DNA, 19 bp, Mus musculus
  siRNA target sequence for Emr4 (NM_139138.1,621-639).
cagatataccaaaaaagga

SEQ ID NO: 548094 - DNA, 19 bp, Mus musculus
  siRNA target sequence for Emr4 (NM_139138.1,647-665).
cctttattggatatagtgt

SEQ ID NO: 548095 - DNA, 19 bp, Mus musculus
  siRNA target sequence for Emr4 (NM_139138.1,648-666).
ctttattggatatagtgta

SEQ ID NO: 548096 - DNA, 19 bp, Mus musculus
  siRNA target sequence for Emr4 (NM_139138.1,685-703).
gacgatgactcttctagaa

SEQ ID NO: 548097 - DNA, 19 bp, Mus musculus
  siRNA target sequence for Emr4 (NM_139138.1,704-722).
gctggcaacaacacaatga

SEQ ID NO: 548098 - DNA, 19 bp, Mus musculus
  siRNA target sequence for Emr4 (NM_139138.1,730-748).
ctgcactagtggtttcaaa

SEQ ID NO: 548099 - DNA, 19 bp, Mus musculus
  siRNA target sequence for Emr4 (NM_139138.1,774-792).
cagtggctttcattgcata

SEQ ID NO: 548100 - DNA, 19 bp, Mus musculus
  siRNA target sequence for Emr4 (NM_139138.1,779-797).
gctttcattgcatataagt

SEQ ID NO: 548101 - DNA, 19 bp, Mus musculus
  siRNA target sequence for Emr4 (NM_139138.1,803-821).
gggaatcttctaaatggtt

SEQ ID NO: 548102 - DNA, 19 bp, Mus musculus
  siRNA target sequence for Emr4 (NM_139138.1,860-878).
ctgaactctcacatcgtta

SEQ ID NO: 548103 - DNA, 19 bp, Mus musculus
  siRNA target sequence for Emr4 (NM_139138.1,1034-1052).
cacgtgtacaccaataatt

SEQ ID NO: 548104 - DNA, 19 bp, Mus musculus
  siRNA target sequence for Emr4 (NM_139138.1,1211-1229).
ctgtgccgacccattcaga

SEQ ID NO: 548105 - DNA, 19 bp, Mus musculus
  siRNA target sequence for Emr4 (NM_139138.1,1213-1231).
gtgccgacccattcagaat

SEQ ID NO: 548106 - DNA, 19 bp, Mus musculus
  siRNA target sequence for Emr4 (NM_139138.1,1321-1339).
ggtgctgtgctccatcata

SEQ ID NO: 548107 - DNA, 19 bp, Mus musculus
  siRNA target sequence for Emr4 (NM_139138.1,1411-1429).
cactgtgagcaatctcaaa

SEQ ID NO: 548108 - DNA, 19 bp, Mus musculus
  siRNA target sequence for Emr4 (NM_139138.1,1471-1489).
catgtatcctgtaggatat

SEQ ID NO: 548109 - DNA, 19 bp, Mus musculus
  siRNA target sequence for Emr4 (NM_139138.1,1521-1539).
caatagctggccacaagaa

SEQ ID NO: 548110 - DNA, 19 bp, Mus musculus
  siRNA target sequence for Emr4 (NM_139138.1,1569-1587).
gccttcatcgaggattcat

SEQ ID NO: 548111 - DNA, 19 bp, Mus musculus
  siRNA target sequence for Emr4 (NM_139138.1,1571-1589).
cttcatcgaggattcatct

SEQ ID NO: 548112 - DNA, 19 bp, Mus musculus
  siRNA target sequence for Emr4 (NM_139138.1,1607-1625).
gcggcagccattatcttga

SEQ ID NO: 548113 - DNA, 19 bp, Mus musculus
  siRNA target sequence for Emr4 (NM_139138.1,1608-1626).
cggcagccattatcttgat

SEQ ID NO: 548114 - DNA, 19 bp, Mus musculus
  siRNA target sequence for Emr4 (NM_139138.1,1609-1627).
ggcagccattatcttgata

SEQ ID NO: 548115 - DNA, 19 bp, Mus musculus
  siRNA target sequence for Emr4 (NM_139138.1,1642-1660).
ctttctaataatatggatt

SEQ ID NO: 548116 - DNA, 19 bp, Mus musculus
  siRNA target sequence for Emr4 (NM_139138.1,1657-1675).
gattttgagaagcaaactt

SEQ ID NO: 548117 - DNA, 19 bp, Mus musculus
  siRNA target sequence for Emr4 (NM_139138.1,1669-1687).
caaactttcttctctcaat

SEQ ID NO: 548118 - DNA, 19 bp, Mus musculus
  siRNA target sequence for Emr4 (NM_139138.1,1698-1716).
ctacacttcaagacacaaa

SEQ ID NO: 548119 - DNA, 19 bp, Mus musculus
  siRNA target sequence for Emr4 (NM_139138.1,1703-1721).
cttcaagacacaaaggtta

SEQ ID NO: 548120 - DNA, 19 bp, Mus musculus
  siRNA target sequence for Emr4 (NM_139138.1,1709-1727).
gacacaaaggttatgacat

SEQ ID NO: 548121 - DNA, 19 bp, Mus musculus
  siRNA target sequence for Emr4 (NM_139138.1,1713-1731).
caaaggttatgacatttaa

SEQ ID NO: 548122 - DNA, 19 bp, Mus musculus
  siRNA target sequence for Emr4 (NM_139138.1,1767-1785).
ggggcattggcttgtttat

SEQ ID NO: 548123 - DNA, 19 bp, Mus musculus
  siRNA target sequence for Emr4 (NM_139138.1,1864-1882).
gatatttatggtacattgt

SEQ ID NO: 548124 - DNA, 19 bp, Mus musculus
  siRNA target sequence for Emr4 (NM_139138.1,1898-1916).
gtgcggatggaatataaga

SEQ ID NO: 548125 - DNA, 19 bp, Mus musculus
  siRNA target sequence for Emr4 (NM_139138.1,1929-1947).
gactgcggaaggaagttga

SEQ ID NO: 548126 - DNA, 19 bp, Mus musculus
  siRNA target sequence for Emr4 (NM_139138.1,2001-2019).
ctctgaacctggaaaattt

SEQ ID NO: 548127 - DNA, 19 bp, Mus musculus
  siRNA target sequence for Emr4 (NM_139138.1,2003-2021).
ctgaacctggaaaatttct

SEQ ID NO: 548128 - DNA, 19 bp, Mus musculus
  siRNA target sequence for Emr4 (NM_139138.1,2070-2088).
ctgaagtagcaggtgtata

SEQ ID NO: 548129 - DNA, 19 bp, Mus musculus
  siRNA target sequence for Emr4 (NM_139138.1,2144-2162).
gcttactggagcagaacta

SEQ ID NO: 548130 - DNA, 19 bp, Mus musculus
  siRNA target sequence for Emr4 (NM_139138.1,2145-2163).
cttactggagcagaactat

SEQ ID NO: 548131 - DNA, 19 bp, Mus musculus
  siRNA target sequence for Emr4 (NM_139138.1,2149-2167).
ctggagcagaactattagt

SEQ ID NO: 548132 - DNA, 19 bp, Mus musculus
  siRNA target sequence for Eps15 (NM_007943.1,185-203).
ggttgaggcaggcaatact

SEQ ID NO: 548133 - DNA, 19 bp, Mus musculus
  siRNA target sequence for Eps15 (NM_007943.1,228-246).
gctgcattcctgaaaaagt

SEQ ID NO: 548134 - DNA, 19 bp, Mus musculus
  siRNA target sequence for Eps15 (NM_007943.1,312-330).
ctgagcaaacaagaattct

SEQ ID NO: 548135 - DNA, 19 bp, Mus musculus
  siRNA target sequence for Eps15 (NM_007943.1,314-332).
gagcaaacaagaattcttt

SEQ ID NO: 548136 - DNA, 19 bp, Mus musculus
  siRNA target sequence for Eps15 (NM_007943.1,360-378).
cagaatggactggaagttt

SEQ ID NO: 548137 - DNA, 19 bp, Mus musculus
  siRNA target sequence for Eps15 (NM_007943.1,362-380).
gaatggactggaagtttca

SEQ ID NO: 548138 - DNA, 19 bp, Mus musculus
  siRNA target sequence for Eps15 (NM_007943.1,468-486).
ctcccgtgggctgtaaagt

SEQ ID NO: 548139 - DNA, 19 bp, Mus musculus
  siRNA target sequence for Eps15 (NM_007943.1,568-586).
cagtgttgctcaactctaa

SEQ ID NO: 548140 - DNA, 19 bp, Mus musculus
  siRNA target sequence for Eps15 (NM_007943.1,570-588).
gtgttgctcaactctaagt

SEQ ID NO: 548141 - DNA, 19 bp, Mus musculus
  siRNA target sequence for Eps15 (NM_007943.1,572-590).
gttgctcaactctaagtta

SEQ ID NO: 548142 - DNA, 19 bp, Mus musculus
  siRNA target sequence for Eps15 (NM_007943.1,583-601).
ctaagttacctgtggaaat

SEQ ID NO: 548143 - DNA, 19 bp, Mus musculus
  siRNA target sequence for Eps15 (NM_007943.1,672-690).
gccatgtttttggtatact

SEQ ID NO: 548144 - DNA, 19 bp, Mus musculus
  siRNA target sequence for Eps15 (NM_007943.1,674-692).
catgtttttggtatactgt

SEQ ID NO: 548145 - DNA, 19 bp, Mus musculus
  siRNA target sequence for Eps15 (NM_007943.1,733-751).
ccttggtgccaccttctaa

SEQ ID NO: 548146 - DNA, 19 bp, Mus musculus
  siRNA target sequence for Eps15 (NM_007943.1,744-762).
ccttctaagagaaaaacgt

SEQ ID NO: 548147 - DNA, 19 bp, Mus musculus
  siRNA target sequence for Eps15 (NM_007943.1,775-793).
ctgcagaaaaagctaaata

SEQ ID NO: 548148 - DNA, 19 bp, Mus musculus
  siRNA target sequence for Eps15 (NM_007943.1,807-825).
ctgaaaactgataaggata

SEQ ID NO: 548149 - DNA, 19 bp, Mus musculus
  siRNA target sequence for Eps15 (NM_007943.1,855-873).
cgtgaaaccttcctgaaaa

SEQ ID NO: 548150 - DNA, 19 bp, Mus musculus
  siRNA target sequence for Eps15 (NM_007943.1,888-906).
gccttgctagcccacattt

SEQ ID NO: 548151 - DNA, 19 bp, Mus musculus
  siRNA target sequence for Eps15 (NM_007943.1,897-915).
gcccacatttggtcactat

SEQ ID NO: 548152 - DNA, 19 bp, Mus musculus
  siRNA target sequence for Eps15 (NM_007943.1,899-917).
ccacatttggtcactatgt

SEQ ID NO: 548153 - DNA, 19 bp, Mus musculus
  siRNA target sequence for Eps15 (NM_007943.1,907-925).
ggtcactatgtgacacaaa

SEQ ID NO: 548154 - DNA, 19 bp, Mus musculus
  siRNA target sequence for Eps15 (NM_007943.1,962-980).
ggcttttcacttaatcaat

SEQ ID NO: 548155 - DNA, 19 bp, Mus musculus
  siRNA target sequence for Eps15 (NM_007943.1,1048-1066).
gatccagtttacaaaagaa

SEQ ID NO: 548156 - DNA, 19 bp, Mus musculus
  siRNA target sequence for Eps15 (NM_007943.1,1064-1082).
gaacatcacaggatcaagt

SEQ ID NO: 548157 - DNA, 19 bp, Mus musculus
  siRNA target sequence for Eps15 (NM_007943.1,1110-1128).
gaactagatacccttaaca

SEQ ID NO: 548158 - DNA, 19 bp, Mus musculus
  siRNA target sequence for Eps15 (NM_007943.1,1116-1134).
gatacccttaacaatgaaa

SEQ ID NO: 548159 - DNA, 19 bp, Mus musculus
  siRNA target sequence for Eps15 (NM_007943.1,1120-1138).
cccttaacaatgaaatagt

SEQ ID NO: 548160 - DNA, 19 bp, Mus musculus
  siRNA target sequence for Eps15 (NM_007943.1,1121-1139).
ccttaacaatgaaatagtt

SEQ ID NO: 548161 - DNA, 19 bp, Mus musculus
  siRNA target sequence for Eps15 (NM_007943.1,1213-1231).
gtgaggttcaggatcttca

SEQ ID NO: 548162 - DNA, 19 bp, Mus musculus
  siRNA target sequence for Eps15 (NM_007943.1,1223-1241).
ggatcttcaagatgaagtt

SEQ ID NO: 548163 - DNA, 19 bp, Mus musculus
  siRNA target sequence for Eps15 (NM_007943.1,1246-1264).
gggagagtattaatctaca

SEQ ID NO: 548164 - DNA, 19 bp, Mus musculus
  siRNA target sequence for Eps15 (NM_007943.1,1252-1270).
gtattaatctacaaaaact

SEQ ID NO: 548165 - DNA, 19 bp, Mus musculus
  siRNA target sequence for Eps15 (NM_007943.1,1423-1441).
ctcagatctccagttatga

SEQ ID NO: 548166 - DNA, 19 bp, Mus musculus
  siRNA target sequence for Eps15 (NM_007943.1,1560-1578).
gagtcacaacaggaaatca

SEQ ID NO: 548167 - DNA, 19 bp, Mus musculus
  siRNA target sequence for Eps15 (NM_007943.1,1571-1589).
ggaaatcagctcaatgcaa

SEQ ID NO: 548168 - DNA, 19 bp, Mus musculus
  siRNA target sequence for Eps15 (NM_007943.1,1572-1590).
gaaatcagctcaatgcaaa

SEQ ID NO: 548169 - DNA, 19 bp, Mus musculus
  siRNA target sequence for Eps15 (NM_007943.1,1608-1626).
gatctggaaactgataata

SEQ ID NO: 548170 - DNA, 19 bp, Mus musculus
  siRNA target sequence for Eps15 (NM_007943.1,1613-1631).
ggaaactgataataaccaa

SEQ ID NO: 548171 - DNA, 19 bp, Mus musculus
  siRNA target sequence for Eps15 (NM_007943.1,1614-1632).
gaaactgataataaccaat

SEQ ID NO: 548172 - DNA, 19 bp, Mus musculus
  siRNA target sequence for Eps15 (NM_007943.1,1618-1636).
ctgataataaccaatcaaa

SEQ ID NO: 548173 - DNA, 19 bp, Mus musculus
  siRNA target sequence for Eps15 (NM_007943.1,1620-1638).
gataataaccaatcaaatt

SEQ ID NO: 548174 - DNA, 19 bp, Mus musculus
  siRNA target sequence for Eps15 (NM_007943.1,1648-1666).
gcccacaaagcgttcttgt

SEQ ID NO: 548175 - DNA, 19 bp, Mus musculus
  siRNA target sequence for Eps15 (NM_007943.1,1649-1667).
cccacaaagcgttcttgtt

SEQ ID NO: 548176 - DNA, 19 bp, Mus musculus
  siRNA target sequence for Eps15 (NM_007943.1,1665-1683).
gttaatggtgctacagatt

SEQ ID NO: 548177 - DNA, 19 bp, Mus musculus
  siRNA target sequence for Eps15 (NM_007943.1,1671-1689).
ggtgctacagattactgta

SEQ ID NO: 548178 - DNA, 19 bp, Mus musculus
  siRNA target sequence for Eps15 (NM_007943.1,1773-1791).
caggagtcctcagtaagaa

SEQ ID NO: 548179 - DNA, 19 bp, Mus musculus
  siRNA target sequence for Eps15 (NM_007943.1,1848-1866).
gctggtaatgagaaagtta

SEQ ID NO: 548180 - DNA, 19 bp, Mus musculus
  siRNA target sequence for Eps15 (NM_007943.1,1859-1877).
gaaagttactccgagattt

SEQ ID NO: 548181 - DNA, 19 bp, Mus musculus
  siRNA target sequence for Eps15 (NM_007943.1,1870-1888).
cgagatttgacgatgacaa

SEQ ID NO: 548182 - DNA, 19 bp, Mus musculus
  siRNA target sequence for Eps15 (NM_007943.1,1880-1898).
cgatgacaagcactcaaaa

SEQ ID NO: 548183 - DNA, 19 bp, Mus musculus
  siRNA target sequence for Eps15 (NM_007943.1,1905-1923).
gatccatttaatgtagaat

SEQ ID NO: 548184 - DNA, 19 bp, Mus musculus
  siRNA target sequence for Eps15 (NM_007943.1,1941-1959).
gcagttgcagatacaaact

SEQ ID NO: 548185 - DNA, 19 bp, Mus musculus
  siRNA target sequence for Eps15 (NM_007943.1,1942-1960).
cagttgcagatacaaactt

SEQ ID NO: 548186 - DNA, 19 bp, Mus musculus
  siRNA target sequence for Eps15 (NM_007943.1,2065-2083).
cttttgcgtctgattgctt

SEQ ID NO: 548187 - DNA, 19 bp, Mus musculus
  siRNA target sequence for Eps15 (NM_007943.1,2070-2088).
gcgtctgattgcttcttta

SEQ ID NO: 548188 - DNA, 19 bp, Mus musculus
  siRNA target sequence for Eps15 (NM_007943.1,2071-2089).
cgtctgattgcttctttaa

SEQ ID NO: 548189 - DNA, 19 bp, Mus musculus
  siRNA target sequence for Eps15 (NM_007943.1,2180-2198).
gcacaatgacccatttgct

SEQ ID NO: 548190 - DNA, 19 bp, Mus musculus
  siRNA target sequence for Eps15 (NM_007943.1,2302-2320).
cattatcaaaggtcaacaa

SEQ ID NO: 548191 - DNA, 19 bp, Mus musculus
  siRNA target sequence for Eps15 (NM_007943.1,2318-2336).
caatgaagatgcttttaat

SEQ ID NO: 548192 - DNA, 19 bp, Mus musculus
  siRNA target sequence for Eps15 (NM_007943.1,2364-2382).
gtgaccattgcaaaaccta

SEQ ID NO: 548193 - DNA, 19 bp, Mus musculus
  siRNA target sequence for Eps15 (NM_007943.1,2368-2386).
ccattgcaaaacctatgtt

SEQ ID NO: 548194 - DNA, 19 bp, Mus musculus
  siRNA target sequence for Eps15 (NM_007943.1,2369-2387).
cattgcaaaacctatgtta

SEQ ID NO: 548195 - DNA, 19 bp, Mus musculus
  siRNA target sequence for Eps15 (NM_007943.1,2465-2483).
gccaccccctgggaaaaga

SEQ ID NO: 548196 - DNA, 19 bp, Mus musculus
  siRNA target sequence for Eps15 (NM_007943.1,2475-2493).
gggaaaagacccatcaaca

SEQ ID NO: 548197 - DNA, 19 bp, Mus musculus
  siRNA target sequence for Eps15 (NM_007943.1,2492-2510).
caaattggattcttctgat

SEQ ID NO: 548198 - DNA, 19 bp, Mus musculus
  siRNA target sequence for Eps15 (NM_007943.1,2537-2555).
gcctttcccaggcaatgat

SEQ ID NO: 548199 - DNA, 19 bp, Mus musculus
  siRNA target sequence for Eps15 (NM_007943.1,2549-2567).
caatgatagtcccaaagaa

SEQ ID NO: 548200 - DNA, 19 bp, Mus musculus
  siRNA target sequence for Eps15 (NM_007943.1,2565-2583).
gaaaaagatcctgatatgt

SEQ ID NO: 548201 - DNA, 19 bp, Mus musculus
  siRNA target sequence for Eps15 (NM_007943.1,2582-2600).
gttttgtgatccattcact

SEQ ID NO: 548202 - DNA, 19 bp, Mus musculus
  siRNA target sequence for Eps15 (NM_007943.1,2624-2642).
ggctgacccaagcaatttt

SEQ ID NO: 548203 - DNA, 19 bp, Mus musculus
  siRNA target sequence for Eps15 (NM_007943.1,2628-2646).
gacccaagcaattttgcta

SEQ ID NO: 548204 - DNA, 19 bp, Mus musculus
  siRNA target sequence for Eps15 (NM_007943.1,2718-2736).
cagaggcttgccagactaa

SEQ ID NO: 548205 - DNA, 19 bp, Mus musculus
  siRNA target sequence for Eps15 (NM_007943.1,2720-2738).
gaggcttgccagactaaat

SEQ ID NO: 548206 - DNA, 19 bp, Mus musculus
  siRNA target sequence for Eps15 (NM_007943.1,2722-2740).
ggcttgccagactaaatca

SEQ ID NO: 548207 - DNA, 19 bp, Mus musculus
  siRNA target sequence for Eps15-rs (NM_007944.1,65-83).
gtggaaatccgttatacga

SEQ ID NO: 548208 - DNA, 19 bp, Mus musculus
  siRNA target sequence for Eps15-rs (NM_007944.1,73-91).
ccgttatacgagtcttatt

SEQ ID NO: 548209 - DNA, 19 bp, Mus musculus
  siRNA target sequence for Eps15-rs (NM_007944.1,74-92).
cgttatacgagtcttatta

SEQ ID NO: 548210 - DNA, 19 bp, Mus musculus
  siRNA target sequence for Eps15-rs (NM_007944.1,134-152).
gcgaggctgcgctgtttct

SEQ ID NO: 548211 - DNA, 19 bp, Mus musculus
  siRNA target sequence for Eps15-rs (NM_007944.1,312-330).
caccatgccaccaccaaaa

SEQ ID NO: 548212 - DNA, 19 bp, Mus musculus
  siRNA target sequence for Eps15-rs (NM_007944.1,483-501).
cctcatgaactcgaaacta

SEQ ID NO: 548213 - DNA, 19 bp, Mus musculus
  siRNA target sequence for Eps15-rs (NM_007944.1,1432-1450).
gatgagacccagacaatct

SEQ ID NO: 548214 - DNA, 19 bp, Mus musculus
  siRNA target sequence for Eps15-rs (NM_007944.1,1794-1812).
cggctttggagctatggat

SEQ ID NO: 548215 - DNA, 19 bp, Mus musculus
  siRNA target sequence for Eps15-rs (NM_007944.1,1805-1823).
ctatggatgatcctttcaa

SEQ ID NO: 548216 - DNA, 19 bp, Mus musculus
  siRNA target sequence for Eps15-rs (NM_007944.1,2637-2655).
caagcgggagagtgaaaaa

SEQ ID NO: 548217 - DNA, 19 bp, Mus musculus
  siRNA target sequence for Eps15-rs (NM_007944.1,2720-2738).
ccctcagcaaggctgatat

SEQ ID NO: 548218 - DNA, 19 bp, Mus musculus
  siRNA target sequence for F10 (NM_007972.2,455-473).
gggaaaggtgtgtttatta

SEQ ID NO: 548219 - DNA, 19 bp, Mus musculus
  siRNA target sequence for F10 (NM_007972.2,456-474).
ggaaaggtgtgtttattaa

SEQ ID NO: 548220 - DNA, 19 bp, Mus musculus
  siRNA target sequence for F10 (NM_007972.2,475-493).
ccgggaacgtgccaacaat

SEQ ID NO: 548221 - DNA, 19 bp, Mus musculus
  siRNA target sequence for F10 (NM_007972.2,507-525).
ctcggagggcaaactcatt

SEQ ID NO: 548222 - DNA, 19 bp, Mus musculus
  siRNA target sequence for F10 (NM_007972.2,509-527).
cggagggcaaactcatttt

SEQ ID NO: 548223 - DNA, 19 bp, Mus musculus
  siRNA target sequence for F10 (NM_007972.2,513-531).
gggcaaactcattttttga

SEQ ID NO: 548224 - DNA, 19 bp, Mus musculus
  siRNA target sequence for F10 (NM_007972.2,514-532).
ggcaaactcattttttgaa

SEQ ID NO: 548225 - DNA, 19 bp, Mus musculus
  siRNA target sequence for F10 (NM_007972.2,522-540).
cattttttgaagagttcaa

SEQ ID NO: 548226 - DNA, 19 bp, Mus musculus
  siRNA target sequence for F10 (NM_007972.2,587-605).
gaagaggtccgtgaaatct

SEQ ID NO: 548227 - DNA, 19 bp, Mus musculus
  siRNA target sequence for F10 (NM_007972.2,629-647).
gaatactggaccaaatata

SEQ ID NO: 548228 - DNA, 19 bp, Mus musculus
  siRNA target sequence for F10 (NM_007972.2,843-861).
cctgcgccagcggttactt

SEQ ID NO: 548229 - DNA, 19 bp, Mus musculus
  siRNA target sequence for F10 (NM_007972.2,855-873).
gttacttcctgggtaatga

SEQ ID NO: 548230 - DNA, 19 bp, Mus musculus
  siRNA target sequence for F10 (NM_007972.2,899-917).
cccttcccctgtggaaaaa

SEQ ID NO: 548231 - DNA, 19 bp, Mus musculus
  siRNA target sequence for F10 (NM_007972.2,966-984).
gtgagcttgaccttgaaga

SEQ ID NO: 548232 - DNA, 19 bp, Mus musculus
  siRNA target sequence for F10 (NM_007972.2,1012-1030).
ccctacggagaatcctatt

SEQ ID NO: 548233 - DNA, 19 bp, Mus musculus
  siRNA target sequence for F10 (NM_007972.2,1167-1185).
gtgggggcaccatcttgaa

SEQ ID NO: 548234 - DNA, 19 bp, Mus musculus
  siRNA target sequence for F10 (NM_007972.2,1172-1190).
ggcaccatcttgaatgagt

SEQ ID NO: 548235 - DNA, 19 bp, Mus musculus
  siRNA target sequence for F10 (NM_007972.2,1176-1194).
ccatcttgaatgagttcta

SEQ ID NO: 548236 - DNA, 19 bp, Mus musculus
  siRNA target sequence for F10 (NM_007972.2,1307-1325).
gtcattaagcacaacaagt

SEQ ID NO: 548237 - DNA, 19 bp, Mus musculus
  siRNA target sequence for F10 (NM_007972.2,1332-1350).
gggacacctacgactatga

SEQ ID NO: 548238 - DNA, 19 bp, Mus musculus
  siRNA target sequence for F10 (NM_007972.2,1333-1351).
ggacacctacgactatgat

SEQ ID NO: 548239 - DNA, 19 bp, Mus musculus
  siRNA target sequence for F10 (NM_007972.2,1334-1352).
gacacctacgactatgata

SEQ ID NO: 548240 - DNA, 19 bp, Mus musculus
  siRNA target sequence for F10 (NM_007972.2,1600-1618).
gggctatgaggccaagtta

SEQ ID NO: 548241 - DNA, 19 bp, Mus musculus
  siRNA target sequence for F10 (NM_007972.2,1651-1669).
ccatgtcacacggttcaaa

SEQ ID NO: 548242 - DNA, 19 bp, Mus musculus
  siRNA target sequence for F10 (NM_007972.2,1652-1670).
catgtcacacggttcaaaa

SEQ ID NO: 548243 - DNA, 19 bp, Mus musculus
  siRNA target sequence for F2 (NM_010168.1,302-320).
ggaaacctcgagagacttt

SEQ ID NO: 548244 - DNA, 19 bp, Mus musculus
  siRNA target sequence for F2 (NM_010168.1,431-449).
cccacaagcctgaaatcaa

SEQ ID NO: 548245 - DNA, 19 bp, Mus musculus
  siRNA target sequence for F2 (NM_010168.1,433-451).
cacaagcctgaaatcaact

SEQ ID NO: 548246 - DNA, 19 bp, Mus musculus
  siRNA target sequence for F2 (NM_010168.1,668-686).
ctgagcgtggccgactata

SEQ ID NO: 548247 - DNA, 19 bp, Mus musculus
  siRNA target sequence for F2 (NM_010168.1,787-805).
gtgaaactcgtggaaaact

SEQ ID NO: 548248 - DNA, 19 bp, Mus musculus
  siRNA target sequence for F2 (NM_010168.1,834-852).
gggcgcatggtgctatgtt

SEQ ID NO: 548249 - DNA, 19 bp, Mus musculus
  siRNA target sequence for F2 (NM_010168.1,857-875).
ggcagcctggcgactttga

SEQ ID NO: 548250 - DNA, 19 bp, Mus musculus
  siRNA target sequence for F2 (NM_010168.1,859-877).
cagcctggcgactttgaat

SEQ ID NO: 548251 - DNA, 19 bp, Mus musculus
  siRNA target sequence for F2 (NM_010168.1,862-880).
cctggcgactttgaatact

SEQ ID NO: 548252 - DNA, 19 bp, Mus musculus
  siRNA target sequence for F2 (NM_010168.1,905-923).
cggtgggagaggagaacta

SEQ ID NO: 548253 - DNA, 19 bp, Mus musculus
  siRNA target sequence for F2 (NM_010168.1,909-927).
gggagaggagaactatgat

SEQ ID NO: 548254 - DNA, 19 bp, Mus musculus
  siRNA target sequence for F2 (NM_010168.1,1027-1045).
cctttgttcgagaagaagt

SEQ ID NO: 548255 - DNA, 19 bp, Mus musculus
  siRNA target sequence for F2 (NM_010168.1,1069-1087).
gagcttcttgactcttaca

SEQ ID NO: 548256 - DNA, 19 bp, Mus musculus
  siRNA target sequence for F2 (NM_010168.1,1279-1297).
gtgcgcattggcaagcatt

SEQ ID NO: 548257 - DNA, 19 bp, Mus musculus
  siRNA target sequence for F2 (NM_010168.1,1293-1311).
gcattcccgaaccagatat

SEQ ID NO: 548258 - DNA, 19 bp, Mus musculus
  siRNA target sequence for F2 (NM_010168.1,1305-1323).
cagatatgagcggaatgtt

SEQ ID NO: 548259 - DNA, 19 bp, Mus musculus
  siRNA target sequence for F2 (NM_010168.1,1312-1330).
gagcggaatgttgaaaaga

SEQ ID NO: 548260 - DNA, 19 bp, Mus musculus
  siRNA target sequence for F2 (NM_010168.1,1315-1333).
cggaatgttgaaaagatct

SEQ ID NO: 548261 - DNA, 19 bp, Mus musculus
  siRNA target sequence for F2 (NM_010168.1,1427-1445).
ccttcagtgactatattca

SEQ ID NO: 548262 - DNA, 19 bp, Mus musculus
  siRNA target sequence for F2 (NM_010168.1,1482-1500).
cttgctccgggctggttat

SEQ ID NO: 548263 - DNA, 19 bp, Mus musculus
  siRNA target sequence for F2 (NM_010168.1,1485-1503).
gctccgggctggttataaa

SEQ ID NO: 548264 - DNA, 19 bp, Mus musculus
  siRNA target sequence for F2 (NM_010168.1,1538-1556).
catggacaaccaacatcaa

SEQ ID NO: 548265 - DNA, 19 bp, Mus musculus
  siRNA target sequence for F2 (NM_010168.1,1544-1562).
caaccaacatcaatgagat

SEQ ID NO: 548266 - DNA, 19 bp, Mus musculus
  siRNA target sequence for F2 (NM_010168.1,1584-1602).
ggtgaacctgcccattgta

SEQ ID NO: 548267 - DNA, 19 bp, Mus musculus
  siRNA target sequence for F2 (NM_010168.1,1621-1639).
gcctccacccggattcgaa

SEQ ID NO: 548268 - DNA, 19 bp, Mus musculus
  siRNA target sequence for F2 (NM_010168.1,1622-1640).
cctccacccggattcgaat

SEQ ID NO: 548269 - DNA, 19 bp, Mus musculus
  siRNA target sequence for F2 (NM_010168.1,1623-1641).
ctccacccggattcgaatt

SEQ ID NO: 548270 - DNA, 19 bp, Mus musculus
  siRNA target sequence for F2 (NM_010168.1,1626-1644).
cacccggattcgaattact

SEQ ID NO: 548271 - DNA, 19 bp, Mus musculus
  siRNA target sequence for F2 (NM_010168.1,1628-1646).
cccggattcgaattactga

SEQ ID NO: 548272 - DNA, 19 bp, Mus musculus
  siRNA target sequence for F2 (NM_010168.1,1637-1655).
gaattactgacaacatgtt

SEQ ID NO: 548273 - DNA, 19 bp, Mus musculus
  siRNA target sequence for F2 (NM_010168.1,1686-1704).
gcgaggagatgcttgtgaa

SEQ ID NO: 548274 - DNA, 19 bp, Mus musculus
  siRNA target sequence for F2 (NM_010168.1,1715-1733).
gaggaccttttgtcatgaa

SEQ ID NO: 548275 - DNA, 19 bp, Mus musculus
  siRNA target sequence for F2 (NM_010168.1,1811-1829).
gcttctacacgcatgtgtt

SEQ ID NO: 548276 - DNA, 19 bp, Mus musculus
  siRNA target sequence for F2 (NM_010168.1,1821-1839).
gcatgtgttccgtctgaaa

SEQ ID NO: 548277 - DNA, 19 bp, Mus musculus
  siRNA target sequence for F2 (NM_010168.1,1822-1840).
catgtgttccgtctgaaaa

SEQ ID NO: 548278 - DNA, 19 bp, Mus musculus
  siRNA target sequence for F2 (NM_010168.1,1825-1843).
gtgttccgtctgaaaaggt

SEQ ID NO: 548279 - DNA, 19 bp, Mus musculus
  siRNA target sequence for F2 (NM_010168.1,1841-1859).
ggtggatacagaaagtcat

SEQ ID NO: 548280 - DNA, 19 bp, Mus musculus
  siRNA target sequence for F2 (NM_010168.1,1842-1860).
gtggatacagaaagtcatt

SEQ ID NO: 548281 - DNA, 19 bp, Mus musculus
  siRNA target sequence for F7 (NM_010172.1,76-94).
ctagggactgcagttttca

SEQ ID NO: 548282 - DNA, 19 bp, Mus musculus
  siRNA target sequence for F7 (NM_010172.1,79-97).
gggactgcagttttcataa

SEQ ID NO: 548283 - DNA, 19 bp, Mus musculus
  siRNA target sequence for F7 (NM_010172.1,253-271).
cagttctggattgtttaca

SEQ ID NO: 548284 - DNA, 19 bp, Mus musculus
  siRNA target sequence for F7 (NM_010172.1,283-301).
cagtgtgcctcgaatccat

SEQ ID NO: 548285 - DNA, 19 bp, Mus musculus
  siRNA target sequence for F7 (NM_010172.1,314-332).
gtacctgccaggatcatct

SEQ ID NO: 548286 - DNA, 19 bp, Mus musculus
  siRNA target sequence for F7 (NM_010172.1,322-340).
caggatcatctcaagtctt

SEQ ID NO: 548287 - DNA, 19 bp, Mus musculus
  siRNA target sequence for F7 (NM_010172.1,369-387).
gggtcggaactgtgagaaa

SEQ ID NO: 548288 - DNA, 19 bp, Mus musculus
  siRNA target sequence for F7 (NM_010172.1,370-388).
ggtcggaactgtgagaaaa

SEQ ID NO: 548289 - DNA, 19 bp, Mus musculus
  siRNA target sequence for F7 (NM_010172.1,515-533).
cctgcaaaccaaaagttga

SEQ ID NO: 548290 - DNA, 19 bp, Mus musculus
  siRNA target sequence for F7 (NM_010172.1,518-536).
gcaaaccaaaagttgagta

SEQ ID NO: 548291 - DNA, 19 bp, Mus musculus
  siRNA target sequence for F7 (NM_010172.1,534-552).
gtacccgtgtgggagaata

SEQ ID NO: 548292 - DNA, 19 bp, Mus musculus
  siRNA target sequence for F7 (NM_010172.1,537-555).
cccgtgtgggagaatacct

SEQ ID NO: 548293 - DNA, 19 bp, Mus musculus
  siRNA target sequence for F7 (NM_010172.1,545-563).
ggagaatacctgttgtaga

SEQ ID NO: 548294 - DNA, 19 bp, Mus musculus
  siRNA target sequence for F7 (NM_010172.1,546-564).
gagaatacctgttgtagaa

SEQ ID NO: 548295 - DNA, 19 bp, Mus musculus
  siRNA target sequence for F7 (NM_010172.1,684-702).
gctggacgccagatggata

SEQ ID NO: 548296 - DNA, 19 bp, Mus musculus
  siRNA target sequence for F7 (NM_010172.1,688-706).
gacgccagatggatagtga

SEQ ID NO: 548297 - DNA, 19 bp, Mus musculus
  siRNA target sequence for F7 (NM_010172.1,809-827).
gggtgacacaggtcatcat

SEQ ID NO: 548298 - DNA, 19 bp, Mus musculus
  siRNA target sequence for F7 (NM_010172.1,917-935).
ccctgtgtctgcctgaaaa

SEQ ID NO: 548299 - DNA, 19 bp, Mus musculus
  siRNA target sequence for F7 (NM_010172.1,958-976).
gccagaatccgcttctcaa

SEQ ID NO: 548300 - DNA, 19 bp, Mus musculus
  siRNA target sequence for Fbln1 (NM_010180.1,277-295).
ctgccgtacacctcagaat

SEQ ID NO: 548301 - DNA, 19 bp, Mus musculus
  siRNA target sequence for Fbln1 (NM_010180.1,281-299).
cgtacacctcagaatccaa

SEQ ID NO: 548302 - DNA, 19 bp, Mus musculus
  siRNA target sequence for Fbln1 (NM_010180.1,497-515).
cctgtgaacccattgtcat

SEQ ID NO: 548303 - DNA, 19 bp, Mus musculus
  siRNA target sequence for Fbln1 (NM_010180.1,500-518).
gtgaacccattgtcatgat

SEQ ID NO: 548304 - DNA, 19 bp, Mus musculus
  siRNA target sequence for Fbln1 (NM_010180.1,502-520).
gaacccattgtcatgataa

SEQ ID NO: 548305 - DNA, 19 bp, Mus musculus
  siRNA target sequence for Fbln1 (NM_010180.1,505-523).
cccattgtcatgataagct

SEQ ID NO: 548306 - DNA, 19 bp, Mus musculus
  siRNA target sequence for Fbln1 (NM_010180.1,763-781).
gtctcctgcgaagatatca

SEQ ID NO: 548307 - DNA, 19 bp, Mus musculus
  siRNA target sequence for Fbln1 (NM_010180.1,817-835).
ggagaatcctgcatcaata

SEQ ID NO: 548308 - DNA, 19 bp, Mus musculus
  siRNA target sequence for Fbln1 (NM_010180.1,886-904).
gagctcacagaggataata

SEQ ID NO: 548309 - DNA, 19 bp, Mus musculus
  siRNA target sequence for Fbln1 (NM_010180.1,898-916).
gataataactgcaaagata

SEQ ID NO: 548310 - DNA, 19 bp, Mus musculus
  siRNA target sequence for Fbln1 (NM_010180.1,921-939).
cgaatgtgagactggtatt

SEQ ID NO: 548311 - DNA, 19 bp, Mus musculus
  siRNA target sequence for Fbln1 (NM_010180.1,928-946).
gagactggtattcataact

SEQ ID NO: 548312 - DNA, 19 bp, Mus musculus
  siRNA target sequence for Fbln1 (NM_010180.1,954-972).
cgattttatctgtcagaat

SEQ ID NO: 548313 - DNA, 19 bp, Mus musculus
  siRNA target sequence for Fbln1 (NM_010180.1,1008-1026).
gtgcaagagcggcttcata

SEQ ID NO: 548314 - DNA, 19 bp, Mus musculus
  siRNA target sequence for Fbln1 (NM_010180.1,1036-1054).
ctaggcaactgcattgata

SEQ ID NO: 548315 - DNA, 19 bp, Mus musculus
  siRNA target sequence for Fbln1 (NM_010180.1,1040-1058).
gcaactgcattgatatcaa

SEQ ID NO: 548316 - DNA, 19 bp, Mus musculus
  siRNA target sequence for Fbln1 (NM_010180.1,1051-1069).
gatatcaatgagtgtttaa

SEQ ID NO: 548317 - DNA, 19 bp, Mus musculus
  siRNA target sequence for Fbln1 (NM_010180.1,1092-1110).
ggggcagacatgcatcaat

SEQ ID NO: 548318 - DNA, 19 bp, Mus musculus
  siRNA target sequence for Fbln1 (NM_010180.1,1146-1164).
caactgtggccgtggttat

SEQ ID NO: 548319 - DNA, 19 bp, Mus musculus
  siRNA target sequence for Fbln1 (NM_010180.1,1154-1172).
gccgtggttatcatctcaa

SEQ ID NO: 548320 - DNA, 19 bp, Mus musculus
  siRNA target sequence for Fbln1 (NM_010180.1,1155-1173).
ccgtggttatcatctcaat

SEQ ID NO: 548321 - DNA, 19 bp, Mus musculus
  siRNA target sequence for Fbln1 (NM_010180.1,1181-1199).
ggacccgctgtgttgatgt

SEQ ID NO: 548322 - DNA, 19 bp, Mus musculus
  siRNA target sequence for Fbln1 (NM_010180.1,1278-1296).
gtgcaaggctggcttctat

SEQ ID NO: 548323 - DNA, 19 bp, Mus musculus
  siRNA target sequence for Fbln1 (NM_010180.1,1481-1499).
gccaggagtgtgctaatgt

SEQ ID NO: 548324 - DNA, 19 bp, Mus musculus
  siRNA target sequence for Fbln1 (NM_010180.1,1485-1503).
ggagtgtgctaatgtctat

SEQ ID NO: 548325 - DNA, 19 bp, Mus musculus
  siRNA target sequence for Fbln1 (NM_010180.1,1613-1631).
cctaccgctgcatcaacat

SEQ ID NO: 548326 - DNA, 19 bp, Mus musculus
  siRNA target sequence for Fbln1 (NM_010180.1,1689-1707).
ccgcaactgccaagacatt

SEQ ID NO: 548327 - DNA, 19 bp, Mus musculus
  siRNA target sequence for Fbln1 (NM_010180.1,1692-1710).
caactgccaagacattgat

SEQ ID NO: 548328 - DNA, 19 bp, Mus musculus
  siRNA target sequence for Fbln1 (NM_010180.1,1715-1733).
gtgtgaccggcatccataa

SEQ ID NO: 548329 - DNA, 19 bp, Mus musculus
  siRNA target sequence for Fbln1 (NM_010180.1,1719-1737).
gaccggcatccataactgt

SEQ ID NO: 548330 - DNA, 19 bp, Mus musculus
  siRNA target sequence for Fbln1 (NM_010180.1,1852-1870).
gtccgctgcatcaagtctt

SEQ ID NO: 548331 - DNA, 19 bp, Mus musculus
  siRNA target sequence for Fbln1 (NM_010180.1,1893-1911).
cgtgcgggaccctgtacat

SEQ ID NO: 548332 - DNA, 19 bp, Mus musculus
  siRNA target sequence for Fbln1 (NM_010180.1,1958-1976).
cccgtcctgaggagatcat

SEQ ID NO: 548333 - DNA, 19 bp, Mus musculus
  siRNA target sequence for Fbln1 (NM_010180.1,2009-2027).
ccaaccaggccgacatcat

SEQ ID NO: 548334 - DNA, 19 bp, Mus musculus
  siRNA target sequence for Fbln1 (NM_010180.1,2050-2068).
cttcgagactcctttgata

SEQ ID NO: 548335 - DNA, 19 bp, Mus musculus
  siRNA target sequence for Fbln1 (NM_010180.1,2170-2188).
gtgttgggaggcgtagttt

SEQ ID NO: 548336 - DNA, 19 bp, Mus musculus
  siRNA target sequence for Fbln1 (NM_010180.1,2193-2211).
ccggaacgtcgtcaatgta

SEQ ID NO: 548337 - DNA, 19 bp, Mus musculus
  siRNA target sequence for Fbln1 (NM_010180.1,2195-2213).
ggaacgtcgtcaatgtaca

SEQ ID NO: 548338 - DNA, 19 bp, Mus musculus
  siRNA target sequence for Fbln2 (NM_007992.1,241-259).
gcgaaggctaccagtacta

SEQ ID NO: 548339 - DNA, 19 bp, Mus musculus
  siRNA target sequence for Fbln2 (NM_007992.1,351-369).
cccggtggtggcaagatca

SEQ ID NO: 548340 - DNA, 19 bp, Mus musculus
  siRNA target sequence for Fbln2 (NM_007992.1,467-485).
ccacagtggccgtaagtat

SEQ ID NO: 548341 - DNA, 19 bp, Mus musculus
  siRNA target sequence for Fbln2 (NM_007992.1,611-629).
ctctgagaggcagtatgaa

SEQ ID NO: 548342 - DNA, 19 bp, Mus musculus
  siRNA target sequence for Fbln2 (NM_007992.1,669-687).
gctactacggccattgtga

SEQ ID NO: 548343 - DNA, 19 bp, Mus musculus
  siRNA target sequence for Fbln2 (NM_007992.1,670-688).
ctactacggccattgtgaa

SEQ ID NO: 548344 - DNA, 19 bp, Mus musculus
  siRNA target sequence for Fbln2 (NM_007992.1,939-957).
gacagcctgcccacaagat

SEQ ID NO: 548345 - DNA, 19 bp, Mus musculus
  siRNA target sequence for Fbln2 (NM_007992.1,1012-1030).
ggcctgaggaaaaccttat

SEQ ID NO: 548346 - DNA, 19 bp, Mus musculus
  siRNA target sequence for Fbln2 (NM_007992.1,1160-1178).
cgatcaccccactctatct

SEQ ID NO: 548347 - DNA, 19 bp, Mus musculus
  siRNA target sequence for Fbln2 (NM_007992.1,1161-1179).
gatcaccccactctatcta

SEQ ID NO: 548348 - DNA, 19 bp, Mus musculus
  siRNA target sequence for Fbln2 (NM_007992.1,1261-1279).
gattccgggcagaagaaga

SEQ ID NO: 548349 - DNA, 19 bp, Mus musculus
  siRNA target sequence for Fbln2 (NM_007992.1,1284-1302).
gaccccaactcagtacatt

SEQ ID NO: 548350 - DNA, 19 bp, Mus musculus
  siRNA target sequence for Fbln2 (NM_007992.1,1327-1345).
gctccaccaaggacctaat

SEQ ID NO: 548351 - DNA, 19 bp, Mus musculus
  siRNA target sequence for Fbln2 (NM_007992.1,1373-1391).
gtgggccatcgacaatgat

SEQ ID NO: 548352 - DNA, 19 bp, Mus musculus
  siRNA target sequence for Fbln2 (NM_007992.1,1424-1442).
gagtgacatctgtaggata

SEQ ID NO: 548353 - DNA, 19 bp, Mus musculus
  siRNA target sequence for Fbln2 (NM_007992.1,1549-1567).
gcggcgtctcactctacaa

SEQ ID NO: 548354 - DNA, 19 bp, Mus musculus
  siRNA target sequence for Fbln2 (NM_007992.1,1554-1572).
gtctcactctacaagcaat

SEQ ID NO: 548355 - DNA, 19 bp, Mus musculus
  siRNA target sequence for Fbln2 (NM_007992.1,2175-2193).
gaccaagacgagtgtttga

SEQ ID NO: 548356 - DNA, 19 bp, Mus musculus
  siRNA target sequence for Fbln2 (NM_007992.1,2275-2293).
gtgcagagggctatatcct

SEQ ID NO: 548357 - DNA, 19 bp, Mus musculus
  siRNA target sequence for Fbln2 (NM_007992.1,2594-2612).
caacgaatgcacatcgtta

SEQ ID NO: 548358 - DNA, 19 bp, Mus musculus
  siRNA target sequence for Fbln2 (NM_007992.1,2687-2705).
ctgcggtcgcggttaccat

SEQ ID NO: 548359 - DNA, 19 bp, Mus musculus
  siRNA target sequence for Fbln2 (NM_007992.1,2692-2710).
gtcgcggttaccatgctaa

SEQ ID NO: 548360 - DNA, 19 bp, Mus musculus
  siRNA target sequence for Fbln2 (NM_007992.1,2846-2864).
cggcaggacttgcattgat

SEQ ID NO: 548361 - DNA, 19 bp, Mus musculus
  siRNA target sequence for Fbln2 (NM_007992.1,2963-2981).
ggccgcagatggcaaacat

SEQ ID NO: 548362 - DNA, 19 bp, Mus musculus
  siRNA target sequence for Fbln2 (NM_007992.1,2964-2982).
gccgcagatggcaaacatt

SEQ ID NO: 548363 - DNA, 19 bp, Mus musculus
  siRNA target sequence for Fbln2 (NM_007992.1,3023-3041).
ggaatgtgccaacatctat

SEQ ID NO: 548364 - DNA, 19 bp, Mus musculus
  siRNA target sequence for Fbln2 (NM_007992.1,3188-3206).
cccagagcaagggtataca

SEQ ID NO: 548365 - DNA, 19 bp, Mus musculus
  siRNA target sequence for Fbln2 (NM_007992.1,3192-3210).
gagcaagggtatacaatga

SEQ ID NO: 548366 - DNA, 19 bp, Mus musculus
  siRNA target sequence for Fbln2 (NM_007992.1,3308-3326).
ccgctgcctgcgctttgat

SEQ ID NO: 548367 - DNA, 19 bp, Mus musculus
  siRNA target sequence for Fbln2 (NM_007992.1,3309-3327).
cgctgcctgcgctttgatt

SEQ ID NO: 548368 - DNA, 19 bp, Mus musculus
  siRNA target sequence for Fbln2 (NM_007992.1,3311-3329).
ctgcctgcgctttgattgt

SEQ ID NO: 548369 - DNA, 19 bp, Mus musculus
  siRNA target sequence for Fbln2 (NM_007992.1,3383-3401).
ggatatcacggaatgtcaa

SEQ ID NO: 548370 - DNA, 19 bp, Mus musculus
  siRNA target sequence for Fbln2 (NM_007992.1,3384-3402).
gatatcacggaatgtcaaa

SEQ ID NO: 548371 - DNA, 19 bp, Mus musculus
  siRNA target sequence for Fbln2 (NM_007992.1,3421-3439).
cgcactaccagctcaattt

SEQ ID NO: 548372 - DNA, 19 bp, Mus musculus
  siRNA target sequence for Fbln2 (NM_007992.1,3551-3569).
cgtcacacgcagactcaat

SEQ ID NO: 548373 - DNA, 19 bp, Mus musculus
  siRNA target sequence for Fbln2 (NM_007992.1,3689-3707).
catcttcttcaccactttt

SEQ ID NO: 548374 - DNA, 19 bp, Mus musculus
  siRNA target sequence for Fbln5 (NM_011812.2,325-343).
ggatactcactgttaccat

SEQ ID NO: 548375 - DNA, 19 bp, Mus musculus
  siRNA target sequence for Fbln5 (NM_011812.2,416-434).
gtcaggacagtgtctagat

SEQ ID NO: 548376 - DNA, 19 bp, Mus musculus
  siRNA target sequence for Fbln5 (NM_011812.2,492-510).
cagaatggcgggtatttgt

SEQ ID NO: 548377 - DNA, 19 bp, Mus musculus
  siRNA target sequence for Fbln5 (NM_011812.2,533-551).
gtatcgagggccttactca

SEQ ID NO: 548378 - DNA, 19 bp, Mus musculus
  siRNA target sequence for Fbln5 (NM_011812.2,614-632).
caactaccccacgatttca

SEQ ID NO: 548379 - DNA, 19 bp, Mus musculus
  siRNA target sequence for Fbln5 (NM_011812.2,795-813).
gaagggcagtgcctagata

SEQ ID NO: 548380 - DNA, 19 bp, Mus musculus
  siRNA target sequence for Fbln5 (NM_011812.2,816-834).
gatgaatgtcgctatggtt

SEQ ID NO: 548381 - DNA, 19 bp, Mus musculus
  siRNA target sequence for Fbln5 (NM_011812.2,913-931).
gaaggtcttgccaagatgt

SEQ ID NO: 548382 - DNA, 19 bp, Mus musculus
  siRNA target sequence for Fbln5 (NM_011812.2,935-953).
cgagtgcgaaactgagaat

SEQ ID NO: 548383 - DNA, 19 bp, Mus musculus
  siRNA target sequence for Fbln5 (NM_011812.2,1032-1050).
ggcattcactgcagtgata

SEQ ID NO: 548384 - DNA, 19 bp, Mus musculus
  siRNA target sequence for Fbln5 (NM_011812.2,1033-1051).
gcattcactgcagtgatat

SEQ ID NO: 548385 - DNA, 19 bp, Mus musculus
  siRNA target sequence for Fbln5 (NM_011812.2,1158-1176).
cgaagctgccaggatatca

SEQ ID NO: 548386 - DNA, 19 bp, Mus musculus
  siRNA target sequence for Fbln5 (NM_011812.2,1214-1232).
gcagacttgctacaatcta

SEQ ID NO: 548387 - DNA, 19 bp, Mus musculus
  siRNA target sequence for Fbln5 (NM_011812.2,1217-1235).
gacttgctacaatctacaa

SEQ ID NO: 548388 - DNA, 19 bp, Mus musculus
  siRNA target sequence for Fbln5 (NM_011812.2,1233-1251).
caagggggcttcaaatgta

SEQ ID NO: 548389 - DNA, 19 bp, Mus musculus
  siRNA target sequence for Fbln5 (NM_011812.2,1237-1255).
ggggcttcaaatgtattga

SEQ ID NO: 548390 - DNA, 19 bp, Mus musculus
  siRNA target sequence for Fbln5 (NM_011812.2,1238-1256).
gggcttcaaatgtattgat

SEQ ID NO: 548391 - DNA, 19 bp, Mus musculus
  siRNA target sequence for Fbln5 (NM_011812.2,1426-1444).
gataccctggtgcctatta

SEQ ID NO: 548392 - DNA, 19 bp, Mus musculus
  siRNA target sequence for Fbln5 (NM_011812.2,1435-1453).
gtgcctattacattttcca

SEQ ID NO: 548393 - DNA, 19 bp, Mus musculus
  siRNA target sequence for Fbln5 (NM_011812.2,1469-1487).
cgagggtcgagagttctat

SEQ ID NO: 548394 - DNA, 19 bp, Mus musculus
  siRNA target sequence for Fbln5 (NM_011812.2,1470-1488).
gagggtcgagagttctata

SEQ ID NO: 548395 - DNA, 19 bp, Mus musculus
  siRNA target sequence for Fbln5 (NM_011812.2,1493-1511).
gcaaacagggcctatcagt

SEQ ID NO: 548396 - DNA, 19 bp, Mus musculus
  siRNA target sequence for Fbln5 (NM_011812.2,1523-1541).
gatgacacgccccatcaaa

SEQ ID NO: 548397 - DNA, 19 bp, Mus musculus
  siRNA target sequence for Fbln5 (NM_011812.2,1616-1634).
gatccgactgcggatatat

SEQ ID NO: 548398 - DNA, 19 bp, Mus musculus
  siRNA target sequence for Fbln5 (NM_011812.2,1620-1638).
cgactgcggatatatgtgt

SEQ ID NO: 548399 - DNA, 19 bp, Mus musculus
  siRNA target sequence for Fbn1 (NM_007993.1,376-394).
ctgaaaggacccaatgtct

SEQ ID NO: 548400 - DNA, 19 bp, Mus musculus
  siRNA target sequence for Fbn1 (NM_007993.1,393-411).
ctgtggatcacgttataat

SEQ ID NO: 548401 - DNA, 19 bp, Mus musculus
  siRNA target sequence for Fbn1 (NM_007993.1,397-415).
ggatcacgttataatgcat

SEQ ID NO: 548402 - DNA, 19 bp, Mus musculus
  siRNA target sequence for Fbn1 (NM_007993.1,398-416).
gatcacgttataatgcata

SEQ ID NO: 548403 - DNA, 19 bp, Mus musculus
  siRNA target sequence for Fbn1 (NM_007993.1,403-421).
cgttataatgcatactgtt

SEQ ID NO: 548404 - DNA, 19 bp, Mus musculus
  siRNA target sequence for Fbn1 (NM_007993.1,525-543).
cccgtctggtcagatatct

SEQ ID NO: 548405 - DNA, 19 bp, Mus musculus
  siRNA target sequence for Fbn1 (NM_007993.1,575-593).
gcagcatccgctgtatgaa

SEQ ID NO: 548406 - DNA, 19 bp, Mus musculus
  siRNA target sequence for Fbn1 (NM_007993.1,576-594).
cagcatccgctgtatgaat

SEQ ID NO: 548407 - DNA, 19 bp, Mus musculus
  siRNA target sequence for Fbn1 (NM_007993.1,811-829).
cagctcagcgggattgtct

SEQ ID NO: 548408 - DNA, 19 bp, Mus musculus
  siRNA target sequence for Fbn1 (NM_007993.1,820-838).
gggattgtctgcaccaaaa

SEQ ID NO: 548409 - DNA, 19 bp, Mus musculus
  siRNA target sequence for Fbn1 (NM_007993.1,1018-1036).
ggatcttttgagtgcaaat

SEQ ID NO: 548410 - DNA, 19 bp, Mus musculus
  siRNA target sequence for Fbn1 (NM_007993.1,1046-1064).
gacacaaatttaatgaagt

SEQ ID NO: 548411 - DNA, 19 bp, Mus musculus
  siRNA target sequence for Fbn1 (NM_007993.1,1264-1282).
ctgccacagtccataacca

SEQ ID NO: 548412 - DNA, 19 bp, Mus musculus
  siRNA target sequence for Fbn1 (NM_007993.1,1386-1404).
ctctgtccctctggtaatt

SEQ ID NO: 548413 - DNA, 19 bp, Mus musculus
  siRNA target sequence for Fbn1 (NM_007993.1,1407-1425).
cgggagaccagaatatcct

SEQ ID NO: 548414 - DNA, 19 bp, Mus musculus
  siRNA target sequence for Fbn1 (NM_007993.1,1506-1524).
gccaccgccagaatatcca

SEQ ID NO: 548415 - DNA, 19 bp, Mus musculus
  siRNA target sequence for Fbn1 (NM_007993.1,1507-1525).
ccaccgccagaatatccat

SEQ ID NO: 548416 - DNA, 19 bp, Mus musculus
  siRNA target sequence for Fbn1 (NM_007993.1,1508-1526).
caccgccagaatatccata

SEQ ID NO: 548417 - DNA, 19 bp, Mus musculus
  siRNA target sequence for Fbn1 (NM_007993.1,1513-1531).
ccagaatatccatatccat

SEQ ID NO: 548418 - DNA, 19 bp, Mus musculus
  siRNA target sequence for Fbn1 (NM_007993.1,1585-1603).
caactggtccgctatctct

SEQ ID NO: 548419 - DNA, 19 bp, Mus musculus
  siRNA target sequence for Fbn1 (NM_007993.1,1593-1611).
ccgctatctctgtcaaaat

SEQ ID NO: 548420 - DNA, 19 bp, Mus musculus
  siRNA target sequence for Fbn1 (NM_007993.1,1881-1899).
cttccactgcgtatgcaat

SEQ ID NO: 548421 - DNA, 19 bp, Mus musculus
  siRNA target sequence for Fbn1 (NM_007993.1,1895-1913).
gcaatgcgggctttcatgt

SEQ ID NO: 548422 - DNA, 19 bp, Mus musculus
  siRNA target sequence for Fbn1 (NM_007993.1,1968-1986).
gtgcctaaacggaatgtgt

SEQ ID NO: 548423 - DNA, 19 bp, Mus musculus
  siRNA target sequence for Fbn1 (NM_007993.1,1972-1990).
ctaaacggaatgtgtatta

SEQ ID NO: 548424 - DNA, 19 bp, Mus musculus
  siRNA target sequence for Fbn1 (NM_007993.1,1977-1995).
cggaatgtgtattaatgaa

SEQ ID NO: 548425 - DNA, 19 bp, Mus musculus
  siRNA target sequence for Fbn1 (NM_007993.1,2028-2046).
gttccaactggcatcagat

SEQ ID NO: 548426 - DNA, 19 bp, Mus musculus
  siRNA target sequence for Fbn1 (NM_007993.1,2050-2068).
cgctactgcaaagatatca

SEQ ID NO: 548427 - DNA, 19 bp, Mus musculus
  siRNA target sequence for Fbn1 (NM_007993.1,2126-2144).
cctacagatgcgaatgctt

SEQ ID NO: 548428 - DNA, 19 bp, Mus musculus
  siRNA target sequence for Fbn1 (NM_007993.1,2232-2250).
gtgcgtgaagccgttgttt

SEQ ID NO: 548429 - DNA, 19 bp, Mus musculus
  siRNA target sequence for Fbn1 (NM_007993.1,2247-2265).
gtttggtgctgttaccaaa

SEQ ID NO: 548430 - DNA, 19 bp, Mus musculus
  siRNA target sequence for Fbn1 (NM_007993.1,2384-2402).
caggcactgatataaacga

SEQ ID NO: 548431 - DNA, 19 bp, Mus musculus
  siRNA target sequence for Fbn1 (NM_007993.1,2386-2404).
ggcactgatataaacgaat

SEQ ID NO: 548432 - DNA, 19 bp, Mus musculus
  siRNA target sequence for Fbn1 (NM_007993.1,2426-2444).
gcccaaatggaatttgtga

SEQ ID NO: 548433 - DNA, 19 bp, Mus musculus
  siRNA target sequence for Fbn1 (NM_007993.1,2449-2467).
ctccgtgggacctacaaat

SEQ ID NO: 548434 - DNA, 19 bp, Mus musculus
  siRNA target sequence for Fbn1 (NM_007993.1,2451-2469).
ccgtgggacctacaaatgt

SEQ ID NO: 548435 - DNA, 19 bp, Mus musculus
  siRNA target sequence for Fbn1 (NM_007993.1,2452-2470).
cgtgggacctacaaatgta

SEQ ID NO: 548436 - DNA, 19 bp, Mus musculus
  siRNA target sequence for Fbn1 (NM_007993.1,2453-2471).
gtgggacctacaaatgtat

SEQ ID NO: 548437 - DNA, 19 bp, Mus musculus
  siRNA target sequence for Fbn1 (NM_007993.1,2455-2473).
gggacctacaaatgtatat

SEQ ID NO: 548438 - DNA, 19 bp, Mus musculus
  siRNA target sequence for Fbn1 (NM_007993.1,2474-2492).
gcaactcgggatatgaagt

SEQ ID NO: 548439 - DNA, 19 bp, Mus musculus
  siRNA target sequence for Fbn1 (NM_007993.1,2475-2493).
caactcgggatatgaagta

SEQ ID NO: 548440 - DNA, 19 bp, Mus musculus
  siRNA target sequence for Fbn1 (NM_007993.1,2481-2499).
gggatatgaagtagacata

SEQ ID NO: 548441 - DNA, 19 bp, Mus musculus
  siRNA target sequence for Fbn1 (NM_007993.1,2482-2500).
ggatatgaagtagacataa

SEQ ID NO: 548442 - DNA, 19 bp, Mus musculus
  siRNA target sequence for Fbn1 (NM_007993.1,2504-2522).
ggaaaaactgtgtcgatat

SEQ ID NO: 548443 - DNA, 19 bp, Mus musculus
  siRNA target sequence for Fbn1 (NM_007993.1,2535-2553).
gctgaacagtctactttgt

SEQ ID NO: 548444 - DNA, 19 bp, Mus musculus
  siRNA target sequence for Fbn1 (NM_007993.1,2659-2677).
gaatcgagtccttgcatta

SEQ ID NO: 548445 - DNA, 19 bp, Mus musculus
  siRNA target sequence for Fbn1 (NM_007993.1,2883-2901).
gtgcaccatctgtcaactt

SEQ ID NO: 548446 - DNA, 19 bp, Mus musculus
  siRNA target sequence for Fbn1 (NM_007993.1,2914-2932).
ggtaaagggttctcaagaa

SEQ ID NO: 548447 - DNA, 19 bp, Mus musculus
  siRNA target sequence for Fbn1 (NM_007993.1,2915-2933).
gtaaagggttctcaagaat

SEQ ID NO: 548448 - DNA, 19 bp, Mus musculus
  siRNA target sequence for Fbn1 (NM_007993.1,2942-2960).
cgcaatgtgaagatatcaa

SEQ ID NO: 548449 - DNA, 19 bp, Mus musculus
  siRNA target sequence for Fbn1 (NM_007993.1,3029-3047).
gcgagtgtcccaatggaat

SEQ ID NO: 548450 - DNA, 19 bp, Mus musculus
  siRNA target sequence for Fbn1 (NM_007993.1,3208-3226).
gagtgtccattgagaaaca

SEQ ID NO: 548451 - DNA, 19 bp, Mus musculus
  siRNA target sequence for Fbn1 (NM_007993.1,3221-3239).
gaaacagccgggagtatga

SEQ ID NO: 548452 - DNA, 19 bp, Mus musculus
  siRNA target sequence for Fbn1 (NM_007993.1,3260-3278).
ctgggtttgccacaaaaga

SEQ ID NO: 548453 - DNA, 19 bp, Mus musculus
  siRNA target sequence for Fbn1 (NM_007993.1,3262-3280).
gggtttgccacaaaagaca

SEQ ID NO: 548454 - DNA, 19 bp, Mus musculus
  siRNA target sequence for Fbn1 (NM_007993.1,3263-3281).
ggtttgccacaaaagacat

SEQ ID NO: 548455 - DNA, 19 bp, Mus musculus
  siRNA target sequence for Fbn1 (NM_007993.1,3268-3286).
gccacaaaagacattacaa

SEQ ID NO: 548456 - DNA, 19 bp, Mus musculus
  siRNA target sequence for Fbn1 (NM_007993.1,3677-3695).
ctgcatgcattgacatcaa

SEQ ID NO: 548457 - DNA, 19 bp, Mus musculus
  siRNA target sequence for Fbn1 (NM_007993.1,3703-3721).
gagctgagtgcgaatctct

SEQ ID NO: 548458 - DNA, 19 bp, Mus musculus
  siRNA target sequence for Fbn1 (NM_007993.1,3800-3818).
ggctcttctgtgtcgatat

SEQ ID NO: 548459 - DNA, 19 bp, Mus musculus
  siRNA target sequence for Fbn1 (NM_007993.1,3801-3819).
gctcttctgtgtcgatatt

SEQ ID NO: 548460 - DNA, 19 bp, Mus musculus
  siRNA target sequence for Fbn1 (NM_007993.1,3820-3838).
gatgaatgcagcataatga

SEQ ID NO: 548461 - DNA, 19 bp, Mus musculus
  siRNA target sequence for Fbn1 (NM_007993.1,3924-3942).
gcgatcgtgcacagacatt

SEQ ID NO: 548462 - DNA, 19 bp, Mus musculus
  siRNA target sequence for Fbn1 (NM_007993.1,4105-4123).
gggacctgtgaaaatacta

SEQ ID NO: 548463 - DNA, 19 bp, Mus musculus
  siRNA target sequence for Fbn1 (NM_007993.1,4106-4124).
ggacctgtgaaaatactaa

SEQ ID NO: 548464 - DNA, 19 bp, Mus musculus
  siRNA target sequence for Fbn1 (NM_007993.1,4231-4249).
catgctgtatgcacaaata

SEQ ID NO: 548465 - DNA, 19 bp, Mus musculus
  siRNA target sequence for Fbn1 (NM_007993.1,4286-4304).
ggattggagacggcattaa

SEQ ID NO: 548466 - DNA, 19 bp, Mus musculus
  siRNA target sequence for Fbn1 (NM_007993.1,4317-4335).
ggatgaatgctctaatgga

SEQ ID NO: 548467 - DNA, 19 bp, Mus musculus
  siRNA target sequence for Fbn1 (NM_007993.1,4318-4336).
gatgaatgctctaatggaa

SEQ ID NO: 548468 - DNA, 19 bp, Mus musculus
  siRNA target sequence for Fbn1 (NM_007993.1,4368-4386).
gaacaccatggggtcatat

SEQ ID NO: 548469 - DNA, 19 bp, Mus musculus
  siRNA target sequence for Fbn1 (NM_007993.1,4382-4400).
catatcgctgtctctgtaa

SEQ ID NO: 548470 - DNA, 19 bp, Mus musculus
  siRNA target sequence for Fbn1 (NM_007993.1,4395-4413).
ctgtaaggatggctataca

SEQ ID NO: 548471 - DNA, 19 bp, Mus musculus
  siRNA target sequence for Fbn1 (NM_007993.1,4638-4656).
gtgtgagattggctatgaa

SEQ ID NO: 548472 - DNA, 19 bp, Mus musculus
  siRNA target sequence for Fbn1 (NM_007993.1,4713-4731).
ctgcatcagtggaaactgt

SEQ ID NO: 548473 - DNA, 19 bp, Mus musculus
  siRNA target sequence for Fbn1 (NM_007993.1,4865-4883).
cagcctgcagcaatgaaat

SEQ ID NO: 548474 - DNA, 19 bp, Mus musculus
  siRNA target sequence for Fbn1 (NM_007993.1,5200-5218).
ggtccggggacctgttaca

SEQ ID NO: 548475 - DNA, 19 bp, Mus musculus
  siRNA target sequence for Fbn1 (NM_007993.1,5201-5219).
gtccggggacctgttacaa

SEQ ID NO: 548476 - DNA, 19 bp, Mus musculus
  siRNA target sequence for Fbn1 (NM_007993.1,5203-5221).
ccggggacctgttacaaca

SEQ ID NO: 548477 - DNA, 19 bp, Mus musculus
  siRNA target sequence for Fbn1 (NM_007993.1,5217-5235).
caacaccgttggcaactat

SEQ ID NO: 548478 - DNA, 19 bp, Mus musculus
  siRNA target sequence for Fbn1 (NM_007993.1,5263-5281).
caagtgaacgggggaaata

SEQ ID NO: 548479 - DNA, 19 bp, Mus musculus
  siRNA target sequence for Fbn1 (NM_007993.1,5266-5284).
gtgaacgggggaaataatt

SEQ ID NO: 548480 - DNA, 19 bp, Mus musculus
  siRNA target sequence for Fbn1 (NM_007993.1,5286-5304).
catggacatgagaagaagt

SEQ ID NO: 548481 - DNA, 19 bp, Mus musculus
  siRNA target sequence for Fbn1 (NM_007993.1,5290-5308).
gacatgagaagaagtctat

SEQ ID NO: 548482 - DNA, 19 bp, Mus musculus
  siRNA target sequence for Fbn1 (NM_007993.1,5486-5504).
gcttcgtgattgacattta

SEQ ID NO: 548483 - DNA, 19 bp, Mus musculus
  siRNA target sequence for Fbn1 (NM_007993.1,5487-5505).
cttcgtgattgacatttat

SEQ ID NO: 548484 - DNA, 19 bp, Mus musculus
  siRNA target sequence for Fbn1 (NM_007993.1,5507-5525).
cgggtttacccgtggatat

SEQ ID NO: 548485 - DNA, 19 bp, Mus musculus
  siRNA target sequence for Fbn1 (NM_007993.1,5508-5526).
gggtttacccgtggatatt

SEQ ID NO: 548486 - DNA, 19 bp, Mus musculus
  siRNA target sequence for Fbn1 (NM_007993.1,5510-5528).
gtttacccgtggatattga

SEQ ID NO: 548487 - DNA, 19 bp, Mus musculus
  siRNA target sequence for Fbn1 (NM_007993.1,5603-5621).
gtcccgtgggattcttcta

SEQ ID NO: 548488 - DNA, 19 bp, Mus musculus
  siRNA target sequence for Fbn1 (NM_007993.1,5605-5623).
cccgtgggattcttctata

SEQ ID NO: 548489 - DNA, 19 bp, Mus musculus
  siRNA target sequence for Fbn1 (NM_007993.1,5606-5624).
ccgtgggattcttctataa

SEQ ID NO: 548490 - DNA, 19 bp, Mus musculus
  siRNA target sequence for Fbn1 (NM_007993.1,5759-5777).
gtcaatgcaacgatcgaaa

SEQ ID NO: 548491 - DNA, 19 bp, Mus musculus
  siRNA target sequence for Fbn1 (NM_007993.1,5784-5802).
ccaagaaatcccgaacata

SEQ ID NO: 548492 - DNA, 19 bp, Mus musculus
  siRNA target sequence for Fbn1 (NM_007993.1,5961-5979).
caactgtcgctgtaaccat

SEQ ID NO: 548493 - DNA, 19 bp, Mus musculus
  siRNA target sequence for Fbn1 (NM_007993.1,5972-5990).
gtaaccatggcttcatact

SEQ ID NO: 548494 - DNA, 19 bp, Mus musculus
  siRNA target sequence for Fbn1 (NM_007993.1,5997-6015).
caacaatgactgcatagat

SEQ ID NO: 548495 - DNA, 19 bp, Mus musculus
  siRNA target sequence for Fbn1 (NM_007993.1,6039-6057).
cgggaacctttgcagaaat

SEQ ID NO: 548496 - DNA, 19 bp, Mus musculus
  siRNA target sequence for Fbn1 (NM_007993.1,6230-6248).
ctgggtatagtctacagaa

SEQ ID NO: 548497 - DNA, 19 bp, Mus musculus
  siRNA target sequence for Fbn1 (NM_007993.1,6275-6293).
gtgttgaagagccagaaat

SEQ ID NO: 548498 - DNA, 19 bp, Mus musculus
  siRNA target sequence for Fbn1 (NM_007993.1,6277-6295).
gttgaagagccagaaatct

SEQ ID NO: 548499 - DNA, 19 bp, Mus musculus
  siRNA target sequence for Fbn1 (NM_007993.1,6405-6423).
ctgctatgcgaagtttgaa

SEQ ID NO: 548500 - DNA, 19 bp, Mus musculus
  siRNA target sequence for Fbn1 (NM_007993.1,6442-6460).
cccaaatccagaaaccatt

SEQ ID NO: 548501 - DNA, 19 bp, Mus musculus
  siRNA target sequence for Fbn1 (NM_007993.1,6775-6793).
gtgattggaggttttgaat

SEQ ID NO: 548502 - DNA, 19 bp, Mus musculus
  siRNA target sequence for Fbn1 (NM_007993.1,6814-6832).
gagcctggcccaatgatga

SEQ ID NO: 548503 - DNA, 19 bp, Mus musculus
  siRNA target sequence for Fbn1 (NM_007993.1,6822-6840).
cccaatgatgacttgtgaa

SEQ ID NO: 548504 - DNA, 19 bp, Mus musculus
  siRNA target sequence for Fbn1 (NM_007993.1,6875-6893).
gcgccttccgctgtgtaaa

SEQ ID NO: 548505 - DNA, 19 bp, Mus musculus
  siRNA target sequence for Fbn1 (NM_007993.1,6900-6918).
cgggtcctatgaatgcaaa

SEQ ID NO: 548506 - DNA, 19 bp, Mus musculus
  siRNA target sequence for Fbn1 (NM_007993.1,7163-7181).
gctacacttgtgagtgtaa

SEQ ID NO: 548507 - DNA, 19 bp, Mus musculus
  siRNA target sequence for Fbn1 (NM_007993.1,7167-7185).
cacttgtgagtgtaacgat

SEQ ID NO: 548508 - DNA, 19 bp, Mus musculus
  siRNA target sequence for Fbn1 (NM_007993.1,7247-7265).
cggaggtcttgcaaaacat

SEQ ID NO: 548509 - DNA, 19 bp, Mus musculus
  siRNA target sequence for Fbn1 (NM_007993.1,7397-7415).
cccacggccgaggattcat

SEQ ID NO: 548510 - DNA, 19 bp, Mus musculus
  siRNA target sequence for Fbn1 (NM_007993.1,7399-7417).
cacggccgaggattcatga

SEQ ID NO: 548511 - DNA, 19 bp, Mus musculus
  siRNA target sequence for Fbn1 (NM_007993.1,7416-7434).
gaccaacggagcagatatt

SEQ ID NO: 548512 - DNA, 19 bp, Mus musculus
  siRNA target sequence for Fbn1 (NM_007993.1,7442-7460).
gcaaggttattcatgatgt

SEQ ID NO: 548513 - DNA, 19 bp, Mus musculus
  siRNA target sequence for Fbn1 (NM_007993.1,7443-7461).
caaggttattcatgatgtt

SEQ ID NO: 548514 - DNA, 19 bp, Mus musculus
  siRNA target sequence for Fbn1 (NM_007993.1,7519-7537).
ggctacactccggatataa

SEQ ID NO: 548515 - DNA, 19 bp, Mus musculus
  siRNA target sequence for Fbn1 (NM_007993.1,7521-7539).
ctacactccggatataaca

SEQ ID NO: 548516 - DNA, 19 bp, Mus musculus
  siRNA target sequence for Fbn1 (NM_007993.1,7541-7559).
ggaccgcctgtgtagatct

SEQ ID NO: 548517 - DNA, 19 bp, Mus musculus
  siRNA target sequence for Fbn1 (NM_007993.1,7545-7563).
cgcctgtgtagatctgaat

SEQ ID NO: 548518 - DNA, 19 bp, Mus musculus
  siRNA target sequence for Fbn1 (NM_007993.1,7576-7594).
gctcccaaaccctgcaatt

SEQ ID NO: 548519 - DNA, 19 bp, Mus musculus
  siRNA target sequence for Fbn1 (NM_007993.1,7579-7597).
cccaaaccctgcaatttta

SEQ ID NO: 548520 - DNA, 19 bp, Mus musculus
  siRNA target sequence for Fbn1 (NM_007993.1,7585-7603).
ccctgcaattttatatgca

SEQ ID NO: 548521 - DNA, 19 bp, Mus musculus
  siRNA target sequence for Fbn1 (NM_007993.1,7586-7604).
cctgcaattttatatgcaa

SEQ ID NO: 548522 - DNA, 19 bp, Mus musculus
  siRNA target sequence for Fbn1 (NM_007993.1,7632-7650).
ctgcccgaagggctacatt

SEQ ID NO: 548523 - DNA, 19 bp, Mus musculus
  siRNA target sequence for Fbn1 (NM_007993.1,7712-7730).
gtcagttcctgtgtgttaa

SEQ ID NO: 548524 - DNA, 19 bp, Mus musculus
  siRNA target sequence for Fbn1 (NM_007993.1,7737-7755).
cggtggcttcacatgcaaa

SEQ ID NO: 548525 - DNA, 19 bp, Mus musculus
  siRNA target sequence for Fbn1 (NM_007993.1,7738-7756).
ggtggcttcacatgcaaat

SEQ ID NO: 548526 - DNA, 19 bp, Mus musculus
  siRNA target sequence for Fbn1 (NM_007993.1,7784-7802).
ctgcctgcattgataacaa

SEQ ID NO: 548527 - DNA, 19 bp, Mus musculus
  siRNA target sequence for Fbn1 (NM_007993.1,7804-7822).
gagtgcacgtctgatatca

SEQ ID NO: 548528 - DNA, 19 bp, Mus musculus
  siRNA target sequence for Fbn1 (NM_007993.1,8156-8174).
gaggctgccaagacatcaa

SEQ ID NO: 548529 - DNA, 19 bp, Mus musculus
  siRNA target sequence for Fbn1 (NM_007993.1,8202-8220).
cagttacggttgctctaat

SEQ ID NO: 548530 - DNA, 19 bp, Mus musculus
  siRNA target sequence for Fbn1 (NM_007993.1,8385-8403).
caacggctacccaaaacga

SEQ ID NO: 548531 - DNA, 19 bp, Mus musculus
  siRNA target sequence for Fbn1 (NM_007993.1,8499-8517).
ggagaagccggctagcttt

SEQ ID NO: 548532 - DNA, 19 bp, Mus musculus
  siRNA target sequence for Fbn1 (NM_007993.1,8598-8616).
cagatacttgattgaatct

SEQ ID NO: 548533 - DNA, 19 bp, Mus musculus
  siRNA target sequence for Fbn1 (NM_007993.1,8668-8686).
ctccacttcacgaagaaga

SEQ ID NO: 548534 - DNA, 19 bp, Mus musculus
  siRNA target sequence for Fbn1 (NM_007993.1,8699-8717).
ggacctactccttacaaat

SEQ ID NO: 548535 - DNA, 19 bp, Mus musculus
  siRNA target sequence for Fbn1 (NM_007993.1,8800-8818).
ggcgataacctgaagatga

SEQ ID NO: 548536 - DNA, 19 bp, Mus musculus
  siRNA target sequence for Fbn2 (NM_010181.1,337-355).
cccatttgcaggaacagtt

SEQ ID NO: 548537 - DNA, 19 bp, Mus musculus
  siRNA target sequence for Fbn2 (NM_010181.1,505-523).
ggatacatcggaacttact

SEQ ID NO: 548538 - DNA, 19 bp, Mus musculus
  siRNA target sequence for Fbn2 (NM_010181.1,532-550).
cctgtctgtgagaatggat

SEQ ID NO: 548539 - DNA, 19 bp, Mus musculus
  siRNA target sequence for Fbn2 (NM_010181.1,582-600).
ccgctgtgcttgcgtttat

SEQ ID NO: 548540 - DNA, 19 bp, Mus musculus
  siRNA target sequence for Fbn2 (NM_010181.1,585-603).
ctgtgcttgcgtttatgga

SEQ ID NO: 548541 - DNA, 19 bp, Mus musculus
  siRNA target sequence for Fbn2 (NM_010181.1,587-605).
gtgcttgcgtttatggatt

SEQ ID NO: 548542 - DNA, 19 bp, Mus musculus
  siRNA target sequence for Fbn2 (NM_010181.1,636-654).
gacaggcccgtgtttcact

SEQ ID NO: 548543 - DNA, 19 bp, Mus musculus
  siRNA target sequence for Fbn2 (NM_010181.1,647-665).
gtttcactcaagtcaataa

SEQ ID NO: 548544 - DNA, 19 bp, Mus musculus
  siRNA target sequence for Fbn2 (NM_010181.1,653-671).
ctcaagtcaataatcagat

SEQ ID NO: 548545 - DNA, 19 bp, Mus musculus
  siRNA target sequence for Fbn2 (NM_010181.1,693-711).
catcgtctgcacaaagaca

SEQ ID NO: 548546 - DNA, 19 bp, Mus musculus
  siRNA target sequence for Fbn2 (NM_010181.1,1011-1029).
cgtgggaagctatttttgt

SEQ ID NO: 548547 - DNA, 19 bp, Mus musculus
  siRNA target sequence for Fbn2 (NM_010181.1,1044-1062).
cttcgtaacctcaacagat

SEQ ID NO: 548548 - DNA, 19 bp, Mus musculus
  siRNA target sequence for Fbn2 (NM_010181.1,1064-1082).
gctcgcgttgcattgatca

SEQ ID NO: 548549 - DNA, 19 bp, Mus musculus
  siRNA target sequence for Fbn2 (NM_010181.1,1149-1167).
ggcaaaagctcaatgttgt

SEQ ID NO: 548550 - DNA, 19 bp, Mus musculus
  siRNA target sequence for Fbn2 (NM_010181.1,1150-1168).
gcaaaagctcaatgttgtt

SEQ ID NO: 548551 - DNA, 19 bp, Mus musculus
  siRNA target sequence for Fbn2 (NM_010181.1,1221-1239).
cagaggttccgaggaatat

SEQ ID NO: 548552 - DNA, 19 bp, Mus musculus
  siRNA target sequence for Fbn2 (NM_010181.1,1225-1243).
ggttccgaggaatatcgta

SEQ ID NO: 548553 - DNA, 19 bp, Mus musculus
  siRNA target sequence for Fbn2 (NM_010181.1,1356-1374).
ccccatccctggagacaat

SEQ ID NO: 548554 - DNA, 19 bp, Mus musculus
  siRNA target sequence for Fbn2 (NM_010181.1,1431-1449).
catcacgggactaacaatt

SEQ ID NO: 548555 - DNA, 19 bp, Mus musculus
  siRNA target sequence for Fbn2 (NM_010181.1,1436-1454).
cgggactaacaattctcaa

SEQ ID NO: 548556 - DNA, 19 bp, Mus musculus
  siRNA target sequence for Fbn2 (NM_010181.1,1450-1468).
ctcaaccagacaatagaca

SEQ ID NO: 548557 - DNA, 19 bp, Mus musculus
  siRNA target sequence for Fbn2 (NM_010181.1,1554-1572).
caagcaggatgctaatgga

SEQ ID NO: 548558 - DNA, 19 bp, Mus musculus
  siRNA target sequence for Fbn2 (NM_010181.1,1561-1579).
gatgctaatggagattgta

SEQ ID NO: 548559 - DNA, 19 bp, Mus musculus
  siRNA target sequence for Fbn2 (NM_010181.1,1565-1583).
ctaatggagattgtataga

SEQ ID NO: 548560 - DNA, 19 bp, Mus musculus
  siRNA target sequence for Fbn2 (NM_010181.1,1602-1620).
caatccctgcagtaatgga

SEQ ID NO: 548561 - DNA, 19 bp, Mus musculus
  siRNA target sequence for Fbn2 (NM_010181.1,1610-1628).
gcagtaatggagattgtgt

SEQ ID NO: 548562 - DNA, 19 bp, Mus musculus
  siRNA target sequence for Fbn2 (NM_010181.1,1643-1661).
cctattactgtaaatgtca

SEQ ID NO: 548563 - DNA, 19 bp, Mus musculus
  siRNA target sequence for Fbn2 (NM_010181.1,1671-1689).
ccagaggactcctacgaaa

SEQ ID NO: 548564 - DNA, 19 bp, Mus musculus
  siRNA target sequence for Fbn2 (NM_010181.1,1674-1692).
gaggactcctacgaaacaa

SEQ ID NO: 548565 - DNA, 19 bp, Mus musculus
  siRNA target sequence for Fbn2 (NM_010181.1,1773-1791).
ccagtgcatttgtaatgct

SEQ ID NO: 548566 - DNA, 19 bp, Mus musculus
  siRNA target sequence for Fbn2 (NM_010181.1,1825-1843).
gttgaccatgatgaatgta

SEQ ID NO: 548567 - DNA, 19 bp, Mus musculus
  siRNA target sequence for Fbn2 (NM_010181.1,1828-1846).
gaccatgatgaatgtacaa

SEQ ID NO: 548568 - DNA, 19 bp, Mus musculus
  siRNA target sequence for Fbn2 (NM_010181.1,1848-1866).
gaccaacatgtgcttgaat

SEQ ID NO: 548569 - DNA, 19 bp, Mus musculus
  siRNA target sequence for Fbn2 (NM_010181.1,2065-2083).
gtatgtgttgacactcata

SEQ ID NO: 548570 - DNA, 19 bp, Mus musculus
  siRNA target sequence for Fbn2 (NM_010181.1,2170-2188).
gctaatccagactatggtt

SEQ ID NO: 548571 - DNA, 19 bp, Mus musculus
  siRNA target sequence for Fbn2 (NM_010181.1,2171-2189).
ctaatccagactatggttt

SEQ ID NO: 548572 - DNA, 19 bp, Mus musculus
  siRNA target sequence for Fbn2 (NM_010181.1,2396-2414).
gaaattgcattgacattga

SEQ ID NO: 548573 - DNA, 19 bp, Mus musculus
  siRNA target sequence for Fbn2 (NM_010181.1,2445-2463).
caacggcctatgcagaaat

SEQ ID NO: 548574 - DNA, 19 bp, Mus musculus
  siRNA target sequence for Fbn2 (NM_010181.1,2695-2713).
cgctgtgaggtgaacatta

SEQ ID NO: 548575 - DNA, 19 bp, Mus musculus
  siRNA target sequence for Fbn2 (NM_010181.1,2832-2850).
gacttgcgaagacgttaat

SEQ ID NO: 548576 - DNA, 19 bp, Mus musculus
  siRNA target sequence for Fbn2 (NM_010181.1,2834-2852).
cttgcgaagacgttaatga

SEQ ID NO: 548577 - DNA, 19 bp, Mus musculus
  siRNA target sequence for Fbn2 (NM_010181.1,2905-2923).
ggctctttccactgtgaat

SEQ ID NO: 548578 - DNA, 19 bp, Mus musculus
  siRNA target sequence for Fbn2 (NM_010181.1,3078-3096).
gggcacagagtgtgaagaa

SEQ ID NO: 548579 - DNA, 19 bp, Mus musculus
  siRNA target sequence for Fbn2 (NM_010181.1,3079-3097).
ggcacagagtgtgaagaat

SEQ ID NO: 548580 - DNA, 19 bp, Mus musculus
  siRNA target sequence for Fbn2 (NM_010181.1,3105-3123).
gcctggcaccaaggaatat

SEQ ID NO: 548581 - DNA, 19 bp, Mus musculus
  siRNA target sequence for Fbn2 (NM_010181.1,3144-3162).
cccaggctttgctaacaga

SEQ ID NO: 548582 - DNA, 19 bp, Mus musculus
  siRNA target sequence for Fbn2 (NM_010181.1,3171-3189).
cctcactgggcgtccattt

SEQ ID NO: 548583 - DNA, 19 bp, Mus musculus
  siRNA target sequence for Fbn2 (NM_010181.1,3172-3190).
ctcactgggcgtccatttt

SEQ ID NO: 548584 - DNA, 19 bp, Mus musculus
  siRNA target sequence for Fbn2 (NM_010181.1,3267-3285).
caagtgccgttgcaataat

SEQ ID NO: 548585 - DNA, 19 bp, Mus musculus
  siRNA target sequence for Fbn2 (NM_010181.1,3378-3396).
cacgccaggcagctttgaa

SEQ ID NO: 548586 - DNA, 19 bp, Mus musculus
  siRNA target sequence for Fbn2 (NM_010181.1,3469-3487).
cgtaaccctctcctttgta

SEQ ID NO: 548587 - DNA, 19 bp, Mus musculus
  siRNA target sequence for Fbn2 (NM_010181.1,3561-3579).
ccgtgaggactgtgtagat

SEQ ID NO: 548588 - DNA, 19 bp, Mus musculus
  siRNA target sequence for Fbn2 (NM_010181.1,3562-3580).
cgtgaggactgtgtagata

SEQ ID NO: 548589 - DNA, 19 bp, Mus musculus
  siRNA target sequence for Fbn2 (NM_010181.1,3599-3617).
gcgacaacctctgtagaaa

SEQ ID NO: 548590 - DNA, 19 bp, Mus musculus
  siRNA target sequence for Fbn2 (NM_010181.1,3600-3618).
cgacaacctctgtagaaat

SEQ ID NO: 548591 - DNA, 19 bp, Mus musculus
  siRNA target sequence for Fbn2 (NM_010181.1,3701-3719).
cagatatcgacgagtgtat

SEQ ID NO: 548592 - DNA, 19 bp, Mus musculus
  siRNA target sequence for Fbn2 (NM_010181.1,3709-3727).
gacgagtgtatgataatga

SEQ ID NO: 548593 - DNA, 19 bp, Mus musculus
  siRNA target sequence for Fbn2 (NM_010181.1,3815-3833).
ggtcgtgcgcagatattga

SEQ ID NO: 548594 - DNA, 19 bp, Mus musculus
  siRNA target sequence for Fbn2 (NM_010181.1,3816-3834).
gtcgtgcgcagatattgat

SEQ ID NO: 548595 - DNA, 19 bp, Mus musculus
  siRNA target sequence for Fbn2 (NM_010181.1,3894-3912).
gtatcgctgtctctgttat

SEQ ID NO: 548596 - DNA, 19 bp, Mus musculus
  siRNA target sequence for Fbn2 (NM_010181.1,3986-4004).
gcatgtttggggaatgtga

SEQ ID NO: 548597 - DNA, 19 bp, Mus musculus
  siRNA target sequence for Fbn2 (NM_010181.1,4008-4026).
cacgaagggctctttcatt

SEQ ID NO: 548598 - DNA, 19 bp, Mus musculus
  siRNA target sequence for Fbn2 (NM_010181.1,4207-4225).
gatgagtgcgcgaatggaa

SEQ ID NO: 548599 - DNA, 19 bp, Mus musculus
  siRNA target sequence for Fbn2 (NM_010181.1,4311-4329).
ctttacttgctcagatgtt

SEQ ID NO: 548600 - DNA, 19 bp, Mus musculus
  siRNA target sequence for Fbn2 (NM_010181.1,4333-4351).
gagtgtgcggaaaacacaa

SEQ ID NO: 548601 - DNA, 19 bp, Mus musculus
  siRNA target sequence for Fbn2 (NM_010181.1,4339-4357).
gcggaaaacacaaaccttt

SEQ ID NO: 548602 - DNA, 19 bp, Mus musculus
  siRNA target sequence for Fbn2 (NM_010181.1,4436-4454).
gcaggtcctgccaagatat

SEQ ID NO: 548603 - DNA, 19 bp, Mus musculus
  siRNA target sequence for Fbn2 (NM_010181.1,4459-4477).
gaatgctccttccaaaata

SEQ ID NO: 548604 - DNA, 19 bp, Mus musculus
  siRNA target sequence for Fbn2 (NM_010181.1,4483-4501).
gtctttggaacctgtaaca

SEQ ID NO: 548605 - DNA, 19 bp, Mus musculus
  siRNA target sequence for Fbn2 (NM_010181.1,4523-4541).
gtatctgtgatgatggtta

SEQ ID NO: 548606 - DNA, 19 bp, Mus musculus
  siRNA target sequence for Fbn2 (NM_010181.1,4587-4605).
cgcagaccccataaactgt

SEQ ID NO: 548607 - DNA, 19 bp, Mus musculus
  siRNA target sequence for Fbn2 (NM_010181.1,4593-4611).
ccccataaactgtgtcaat

SEQ ID NO: 548608 - DNA, 19 bp, Mus musculus
  siRNA target sequence for Fbn2 (NM_010181.1,4631-4649).
ctggtcgctatgagtgtaa

SEQ ID NO: 548609 - DNA, 19 bp, Mus musculus
  siRNA target sequence for Fbn2 (NM_010181.1,4633-4651).
ggtcgctatgagtgtaact

SEQ ID NO: 548610 - DNA, 19 bp, Mus musculus
  siRNA target sequence for Fbn2 (NM_010181.1,4682-4700).
gcgtgggttgcgttgacaa

SEQ ID NO: 548611 - DNA, 19 bp, Mus musculus
  siRNA target sequence for Fbn2 (NM_010181.1,5039-5057).
cccgcatctgtgaagatat

SEQ ID NO: 548612 - DNA, 19 bp, Mus musculus
  siRNA target sequence for Fbn2 (NM_010181.1,5042-5060).
gcatctgtgaagatatcga

SEQ ID NO: 548613 - DNA, 19 bp, Mus musculus
  siRNA target sequence for Fbn2 (NM_010181.1,5109-5127).
caccctgggaaattacact

SEQ ID NO: 548614 - DNA, 19 bp, Mus musculus
  siRNA target sequence for Fbn2 (NM_010181.1,5115-5133).
gggaaattacacttgcatt

SEQ ID NO: 548615 - DNA, 19 bp, Mus musculus
  siRNA target sequence for Fbn2 (NM_010181.1,5141-5159).
ctgagtacatgcaagtcaa

SEQ ID NO: 548616 - DNA, 19 bp, Mus musculus
  siRNA target sequence for Fbn2 (NM_010181.1,5196-5214).
ctgctaccgaagctataat

SEQ ID NO: 548617 - DNA, 19 bp, Mus musculus
  siRNA target sequence for Fbn2 (NM_010181.1,5227-5245).
gaaaacgagctgcctttta

SEQ ID NO: 548618 - DNA, 19 bp, Mus musculus
  siRNA target sequence for Fbn2 (NM_010181.1,5264-5282).
gctgctgcacatacaatgt

SEQ ID NO: 548619 - DNA, 19 bp, Mus musculus
  siRNA target sequence for Fbn2 (NM_010181.1,5362-5380).
cctggattcacctttgaca

SEQ ID NO: 548620 - DNA, 19 bp, Mus musculus
  siRNA target sequence for Fbn2 (NM_010181.1,5438-5456).
caaacggtgtgtgcattaa

SEQ ID NO: 548621 - DNA, 19 bp, Mus musculus
  siRNA target sequence for Fbn2 (NM_010181.1,5540-5558).
gtagcaacggcgacaatct

SEQ ID NO: 548622 - DNA, 19 bp, Mus musculus
  siRNA target sequence for Fbn2 (NM_010181.1,5566-5584).
cgaaacgcggactgtatca

SEQ ID NO: 548623 - DNA, 19 bp, Mus musculus
  siRNA target sequence for Fbn2 (NM_010181.1,5567-5585).
gaaacgcggactgtatcaa

SEQ ID NO: 548624 - DNA, 19 bp, Mus musculus
  siRNA target sequence for Fbn2 (NM_010181.1,5656-5674).
cgcaatgaatgcttggaaa

SEQ ID NO: 548625 - DNA, 19 bp, Mus musculus
  siRNA target sequence for Fbn2 (NM_010181.1,5667-5685).
cttggaaattcctaatgtt

SEQ ID NO: 548626 - DNA, 19 bp, Mus musculus
  siRNA target sequence for Fbn2 (NM_010181.1,5840-5858).
cctacaactgtctgtgtta

SEQ ID NO: 548627 - DNA, 19 bp, Mus musculus
  siRNA target sequence for Fbn2 (NM_010181.1,5902-5920).
gacgagtgcagctcgtttt

SEQ ID NO: 548628 - DNA, 19 bp, Mus musculus
  siRNA target sequence for Fbn2 (NM_010181.1,5904-5922).
cgagtgcagctcgtttttt

SEQ ID NO: 548629 - DNA, 19 bp, Mus musculus
  siRNA target sequence for Fbn2 (NM_010181.1,5956-5974).
gaaatcggctccttcaagt

SEQ ID NO: 548630 - DNA, 19 bp, Mus musculus
  siRNA target sequence for Fbn2 (NM_010181.1,5979-5997).
gtgcaacgagggttacgaa

SEQ ID NO: 548631 - DNA, 19 bp, Mus musculus
  siRNA target sequence for Fbn2 (NM_010181.1,6004-6022).
ccagacggcaaaaactgta

SEQ ID NO: 548632 - DNA, 19 bp, Mus musculus
  siRNA target sequence for Fbn2 (NM_010181.1,6068-6086).
ggacctgtcagaatttgga

SEQ ID NO: 548633 - DNA, 19 bp, Mus musculus
  siRNA target sequence for Fbn2 (NM_010181.1,6121-6139).
gaagtgagaagcgaaaatt

SEQ ID NO: 548634 - DNA, 19 bp, Mus musculus
  siRNA target sequence for Fbn2 (NM_010181.1,6124-6142).
gtgagaagcgaaaattgca

SEQ ID NO: 548635 - DNA, 19 bp, Mus musculus
  siRNA target sequence for Fbn2 (NM_010181.1,6126-6144).
gagaagcgaaaattgcatt

SEQ ID NO: 548636 - DNA, 19 bp, Mus musculus
  siRNA target sequence for Fbn2 (NM_010181.1,6160-6178).
gatgaggaccccaacattt

SEQ ID NO: 548637 - DNA, 19 bp, Mus musculus
  siRNA target sequence for Fbn2 (NM_010181.1,6322-6340).
gtacccaaagccttcaaca

SEQ ID NO: 548638 - DNA, 19 bp, Mus musculus
  siRNA target sequence for Fbn2 (NM_010181.1,6402-6420).
gctgtgccccaaagatgat

SEQ ID NO: 548639 - DNA, 19 bp, Mus musculus
  siRNA target sequence for Fbn2 (NM_010181.1,6582-6600).
ctacaacctggattacact

SEQ ID NO: 548640 - DNA, 19 bp, Mus musculus
  siRNA target sequence for Fbn2 (NM_010181.1,6789-6807).
cactttcggatcttatgaa

SEQ ID NO: 548641 - DNA, 19 bp, Mus musculus
  siRNA target sequence for Fbn2 (NM_010181.1,6838-6856).
gaagaccaaaagatgtgta

SEQ ID NO: 548642 - DNA, 19 bp, Mus musculus
  siRNA target sequence for Fbn2 (NM_010181.1,6843-6861).
ccaaaagatgtgtaaagat

SEQ ID NO: 548643 - DNA, 19 bp, Mus musculus
  siRNA target sequence for Fbn2 (NM_010181.1,6895-6913).
gagtctagaggcatgatgt

SEQ ID NO: 548644 - DNA, 19 bp, Mus musculus
  siRNA target sequence for Fbn2 (NM_010181.1,6977-6995).
gcgagggctgtgtagatga

SEQ ID NO: 548645 - DNA, 19 bp, Mus musculus
  siRNA target sequence for Fbn2 (NM_010181.1,7033-7051).
ggacgctgcgttaacatca

SEQ ID NO: 548646 - DNA, 19 bp, Mus musculus
  siRNA target sequence for Fbn2 (NM_010181.1,7034-7052).
gacgctgcgttaacatcat

SEQ ID NO: 548647 - DNA, 19 bp, Mus musculus
  siRNA target sequence for Fbn2 (NM_010181.1,7181-7199).
gccgcaacctcgtcacaaa

SEQ ID NO: 548648 - DNA, 19 bp, Mus musculus
  siRNA target sequence for Fbn2 (NM_010181.1,7183-7201).
cgcaacctcgtcacaaagt

SEQ ID NO: 548649 - DNA, 19 bp, Mus musculus
  siRNA target sequence for Fbn2 (NM_010181.1,7264-7282).
ggaaccgcccagtacaaaa

SEQ ID NO: 548650 - DNA, 19 bp, Mus musculus
  siRNA target sequence for Fbn2 (NM_010181.1,7265-7283).
gaaccgcccagtacaaaaa

SEQ ID NO: 548651 - DNA, 19 bp, Mus musculus
  siRNA target sequence for Fbn2 (NM_010181.1,7268-7286).
ccgcccagtacaaaaagat

SEQ ID NO: 548652 - DNA, 19 bp, Mus musculus
  siRNA target sequence for Fbn2 (NM_010181.1,7269-7287).
cgcccagtacaaaaagata

SEQ ID NO: 548653 - DNA, 19 bp, Mus musculus
  siRNA target sequence for Fbn2 (NM_010181.1,7272-7290).
ccagtacaaaaagatatgt

SEQ ID NO: 548654 - DNA, 19 bp, Mus musculus
  siRNA target sequence for Fbn2 (NM_010181.1,7308-7326).
cgccactgatggaagagat

SEQ ID NO: 548655 - DNA, 19 bp, Mus musculus
  siRNA target sequence for Fbn2 (NM_010181.1,7318-7336).
ggaagagatatcgatgaat

SEQ ID NO: 548656 - DNA, 19 bp, Mus musculus
  siRNA target sequence for Fbn2 (NM_010181.1,7322-7340).
gagatatcgatgaatgtaa

SEQ ID NO: 548657 - DNA, 19 bp, Mus musculus
  siRNA target sequence for Fbn2 (NM_010181.1,7395-7413).
ccggtgcttctgcaaagtt

SEQ ID NO: 548658 - DNA, 19 bp, Mus musculus
  siRNA target sequence for Fbn2 (NM_010181.1,7431-7449).
cagcggaacagcttgtgta

SEQ ID NO: 548659 - DNA, 19 bp, Mus musculus
  siRNA target sequence for Fbn2 (NM_010181.1,7474-7492).
ccaaagccatgcaacttca

SEQ ID NO: 548660 - DNA, 19 bp, Mus musculus
  siRNA target sequence for Fbn2 (NM_010181.1,7475-7493).
caaagccatgcaacttcat

SEQ ID NO: 548661 - DNA, 19 bp, Mus musculus
  siRNA target sequence for Fbn2 (NM_010181.1,7578-7596).
cgacgaatgtcaaaccaaa

SEQ ID NO: 548662 - DNA, 19 bp, Mus musculus
  siRNA target sequence for Fbn2 (NM_010181.1,7633-7651).
gggggattcacctgtaaat

SEQ ID NO: 548663 - DNA, 19 bp, Mus musculus
  siRNA target sequence for Fbn2 (NM_010181.1,7635-7653).
gggattcacctgtaaatgt

SEQ ID NO: 548664 - DNA, 19 bp, Mus musculus
  siRNA target sequence for Fbn2 (NM_010181.1,7679-7697).
cggcttgcatcgataacaa

SEQ ID NO: 548665 - DNA, 19 bp, Mus musculus
  siRNA target sequence for Fbn2 (NM_010181.1,7686-7704).
catcgataacaatgaatgt

SEQ ID NO: 548666 - DNA, 19 bp, Mus musculus
  siRNA target sequence for Fbn2 (NM_010181.1,8263-8281).
gcatgctacgagtgcaaaa

SEQ ID NO: 548667 - DNA, 19 bp, Mus musculus
  siRNA target sequence for Fbn2 (NM_010181.1,8264-8282).
catgctacgagtgcaaaat

SEQ ID NO: 548668 - DNA, 19 bp, Mus musculus
  siRNA target sequence for Fbn2 (NM_010181.1,8268-8286).
ctacgagtgcaaaatcaat

SEQ ID NO: 548669 - DNA, 19 bp, Mus musculus
  siRNA target sequence for Fbn2 (NM_010181.1,8572-8590).
ctcgctcccggcacataca

SEQ ID NO: 548670 - DNA, 19 bp, Mus musculus
  siRNA target sequence for Fbn2 (NM_010181.1,8574-8592).
cgctcccggcacatacaca

SEQ ID NO: 548671 - DNA, 19 bp, Mus musculus
  siRNA target sequence for Fkbp10 (NM_010221.1,203-221).
gagcccccttggaagatgt

SEQ ID NO: 548672 - DNA, 19 bp, Mus musculus
  siRNA target sequence for Fkbp10 (NM_010221.1,305-323).
ctttcgaagacgggaaaaa

SEQ ID NO: 548673 - DNA, 19 bp, Mus musculus
  siRNA target sequence for Fkbp10 (NM_010221.1,309-327).
cgaagacgggaaaaagttt

SEQ ID NO: 548674 - DNA, 19 bp, Mus musculus
  siRNA target sequence for Fkbp10 (NM_010221.1,313-331).
gacgggaaaaagtttgact

SEQ ID NO: 548675 - DNA, 19 bp, Mus musculus
  siRNA target sequence for Fkbp10 (NM_010221.1,550-568).
gacacggtgcagtcaacta

SEQ ID NO: 548676 - DNA, 19 bp, Mus musculus
  siRNA target sequence for Fkbp10 (NM_010221.1,675-693).
cagtaggggaggcacttat

SEQ ID NO: 548677 - DNA, 19 bp, Mus musculus
  siRNA target sequence for Fkbp10 (NM_010221.1,964-982).
cactacaatggctctttga

SEQ ID NO: 548678 - DNA, 19 bp, Mus musculus
  siRNA target sequence for Fkbp10 (NM_010221.1,984-1002).
ggatggtaccctctttgat

SEQ ID NO: 548679 - DNA, 19 bp, Mus musculus
  siRNA target sequence for Fkbp10 (NM_010221.1,1014-1032).
ccgaaaccacacctacaat

SEQ ID NO: 548680 - DNA, 19 bp, Mus musculus
  siRNA target sequence for Fkbp10 (NM_010221.1,1015-1033).
cgaaaccacacctacaata

SEQ ID NO: 548681 - DNA, 19 bp, Mus musculus
  siRNA target sequence for Fkbp10 (NM_010221.1,1020-1038).
ccacacctacaatacctat

SEQ ID NO: 548682 - DNA, 19 bp, Mus musculus
  siRNA target sequence for Fkbp10 (NM_010221.1,1039-1057).
gtcgggcagggttacatca

SEQ ID NO: 548683 - DNA, 19 bp, Mus musculus
  siRNA target sequence for Fkbp10 (NM_010221.1,1077-1095).
gctgcaaggcgcatgcata

SEQ ID NO: 548684 - DNA, 19 bp, Mus musculus
  siRNA target sequence for Fkbp10 (NM_010221.1,1096-1114).
ggggagcgaaggaggatta

SEQ ID NO: 548685 - DNA, 19 bp, Mus musculus
  siRNA target sequence for Fkbp10 (NM_010221.1,1098-1116).
ggagcgaaggaggattact

SEQ ID NO: 548686 - DNA, 19 bp, Mus musculus
  siRNA target sequence for Fkbp10 (NM_010221.1,1220-1238).
cggaccctgtggaaatcaa

SEQ ID NO: 548687 - DNA, 19 bp, Mus musculus
  siRNA target sequence for Fkbp10 (NM_010221.1,1263-1281).
ctgcaatgagacatccaaa

SEQ ID NO: 548688 - DNA, 19 bp, Mus musculus
  siRNA target sequence for Fkbp10 (NM_010221.1,1297-1315).
cgctaccactacaactgtt

SEQ ID NO: 548689 - DNA, 19 bp, Mus musculus
  siRNA target sequence for Fkbp10 (NM_010221.1,1378-1396).
ctcggagccaacaaagtga

SEQ ID NO: 548690 - DNA, 19 bp, Mus musculus
  siRNA target sequence for Fkbp10 (NM_010221.1,1559-1577).
ccacaggctacctgtttgt

SEQ ID NO: 548691 - DNA, 19 bp, Mus musculus
  siRNA target sequence for Fkbp10 (NM_010221.1,1598-1616).
ctagcctttttgaagacat

SEQ ID NO: 548692 - DNA, 19 bp, Mus musculus
  siRNA target sequence for Fkbp10 (NM_010221.1,1668-1686).
caaggctcaagtgaatgaa

SEQ ID NO: 548693 - DNA, 19 bp, Mus musculus
  siRNA target sequence for Fkbp7 (NM_010222.1,87-105).
cttagcctgtggtgttgtt

SEQ ID NO: 548694 - DNA, 19 bp, Mus musculus
  siRNA target sequence for Fkbp7 (NM_010222.1,209-227).
gctaaatgcccattacgat

SEQ ID NO: 548695 - DNA, 19 bp, Mus musculus
  siRNA target sequence for Fkbp7 (NM_010222.1,237-255).
gctaaagacggctccaaat

SEQ ID NO: 548696 - DNA, 19 bp, Mus musculus
  siRNA target sequence for Fkbp7 (NM_010222.1,238-256).
ctaaagacggctccaaatt

SEQ ID NO: 548697 - DNA, 19 bp, Mus musculus
  siRNA target sequence for Fkbp7 (NM_010222.1,243-261).
gacggctccaaattctact

SEQ ID NO: 548698 - DNA, 19 bp, Mus musculus
  siRNA target sequence for Fkbp7 (NM_010222.1,260-278).
ctgcagccggacacaagat

SEQ ID NO: 548699 - DNA, 19 bp, Mus musculus
  siRNA target sequence for Fkbp7 (NM_010222.1,262-280).
gcagccggacacaagatga

SEQ ID NO: 548700 - DNA, 19 bp, Mus musculus
  siRNA target sequence for Fkbp7 (NM_010222.1,287-305).
ccccaaatggtttgttctt

SEQ ID NO: 548701 - DNA, 19 bp, Mus musculus
  siRNA target sequence for Fkbp7 (NM_010222.1,306-324).
ggtgtcggacatgtcataa

SEQ ID NO: 548702 - DNA, 19 bp, Mus musculus
  siRNA target sequence for Fkbp7 (NM_010222.1,307-325).
gtgtcggacatgtcataaa

SEQ ID NO: 548703 - DNA, 19 bp, Mus musculus
  siRNA target sequence for Fkbp7 (NM_010222.1,441-459).
gcaactctgatgtttgaga

SEQ ID NO: 548704 - DNA, 19 bp, Mus musculus
  siRNA target sequence for Fkbp7 (NM_010222.1,483-501).
ggaccaaggagcattgaaa

SEQ ID NO: 548705 - DNA, 19 bp, Mus musculus
  siRNA target sequence for Fkbp7 (NM_010222.1,486-504).
ccaaggagcattgaaacat

SEQ ID NO: 548706 - DNA, 19 bp, Mus musculus
  siRNA target sequence for Fkbp7 (NM_010222.1,509-527).
gcaaatagacacggataat

SEQ ID NO: 548707 - DNA, 19 bp, Mus musculus
  siRNA target sequence for Fkbp7 (NM_010222.1,593-611).
cccccgtgacaagtcatat

SEQ ID NO: 548708 - DNA, 19 bp, Mus musculus
  siRNA target sequence for Fkbp7 (NM_010222.1,595-613).
cccgtgacaagtcatatca

SEQ ID NO: 548709 - DNA, 19 bp, Mus musculus
  siRNA target sequence for Fkbp7 (NM_010222.1,597-615).
cgtgacaagtcatatcaga

SEQ ID NO: 548710 - DNA, 19 bp, Mus musculus
  siRNA target sequence for Fkbp9 (NM_012056.1,218-236).
ctgtgagctcggaacttca

SEQ ID NO: 548711 - DNA, 19 bp, Mus musculus
  siRNA target sequence for Fkbp9 (NM_012056.1,356-374).
gggactctaccttcaatgt

SEQ ID NO: 548712 - DNA, 19 bp, Mus musculus
  siRNA target sequence for Fkbp9 (NM_012056.1,362-380).
ctaccttcaatgtgtttgt

SEQ ID NO: 548713 - DNA, 19 bp, Mus musculus
  siRNA target sequence for Fkbp9 (NM_012056.1,453-471).
gacgattcccccaaacctt

SEQ ID NO: 548714 - DNA, 19 bp, Mus musculus
  siRNA target sequence for Fkbp9 (NM_012056.1,532-550).
gtactcttggtggatatct

SEQ ID NO: 548715 - DNA, 19 bp, Mus musculus
  siRNA target sequence for Fkbp9 (NM_012056.1,571-589).
cacattcagacctatttca

SEQ ID NO: 548716 - DNA, 19 bp, Mus musculus
  siRNA target sequence for Fkbp9 (NM_012056.1,604-622).
cctcggactatccaagtat

SEQ ID NO: 548717 - DNA, 19 bp, Mus musculus
  siRNA target sequence for Fkbp9 (NM_012056.1,685-703).
cataatcgcatgaaaacct

SEQ ID NO: 548718 - DNA, 19 bp, Mus musculus
  siRNA target sequence for Fkbp9 (NM_012056.1,691-709).
cgcatgaaaacctatgaca

SEQ ID NO: 548719 - DNA, 19 bp, Mus musculus
  siRNA target sequence for Fkbp9 (NM_012056.1,772-790).
ggcgagaagcgtatcatca

SEQ ID NO: 548720 - DNA, 19 bp, Mus musculus
  siRNA target sequence for Fkbp9 (NM_012056.1,846-864).
gcaggcatccttagtcttt

SEQ ID NO: 548721 - DNA, 19 bp, Mus musculus
  siRNA target sequence for Fkbp9 (NM_012056.1,849-867).
ggcatccttagtctttgat

SEQ ID NO: 548722 - DNA, 19 bp, Mus musculus
  siRNA target sequence for Fkbp9 (NM_012056.1,872-890).
cattgttggacctccataa

SEQ ID NO: 548723 - DNA, 19 bp, Mus musculus
  siRNA target sequence for Fkbp9 (NM_012056.1,892-910).
cccaaggataccatttcca

SEQ ID NO: 548724 - DNA, 19 bp, Mus musculus
  siRNA target sequence for Fkbp9 (NM_012056.1,893-911).
ccaaggataccatttccat

SEQ ID NO: 548725 - DNA, 19 bp, Mus musculus
  siRNA target sequence for Fkbp9 (NM_012056.1,894-912).
caaggataccatttccatt

SEQ ID NO: 548726 - DNA, 19 bp, Mus musculus
  siRNA target sequence for Fkbp9 (NM_012056.1,902-920).
ccatttccattgagaataa

SEQ ID NO: 548727 - DNA, 19 bp, Mus musculus
  siRNA target sequence for Fkbp9 (NM_012056.1,960-978).
ggacttcctcaggtatcat

SEQ ID NO: 548728 - DNA, 19 bp, Mus musculus
  siRNA target sequence for Fkbp9 (NM_012056.1,961-979).
gacttcctcaggtatcatt

SEQ ID NO: 548729 - DNA, 19 bp, Mus musculus
  siRNA target sequence for Fkbp9 (NM_012056.1,1008-1026).
ctttgactccagctattca

SEQ ID NO: 548730 - DNA, 19 bp, Mus musculus
  siRNA target sequence for Fkbp9 (NM_012056.1,1035-1053).
cacctttgacacatacatt

SEQ ID NO: 548731 - DNA, 19 bp, Mus musculus
  siRNA target sequence for Fkbp9 (NM_012056.1,1292-1310).
gggattacctcaaatacca

SEQ ID NO: 548732 - DNA, 19 bp, Mus musculus
  siRNA target sequence for Fkbp9 (NM_012056.1,1344-1362).
ggactccacgtggaactta

SEQ ID NO: 548733 - DNA, 19 bp, Mus musculus
  siRNA target sequence for Fkbp9 (NM_012056.1,1355-1373).
ggaacttaggcaaaacgta

SEQ ID NO: 548734 - DNA, 19 bp, Mus musculus
  siRNA target sequence for Fkbp9 (NM_012056.1,1356-1374).
gaacttaggcaaaacgtat

SEQ ID NO: 548735 - DNA, 19 bp, Mus musculus
  siRNA target sequence for Fkbp9 (NM_012056.1,1364-1382).
gcaaaacgtataacattgt

SEQ ID NO: 548736 - DNA, 19 bp, Mus musculus
  siRNA target sequence for Fkbp9 (NM_012056.1,1514-1532).
gcagtgccgtcctagtgtt

SEQ ID NO: 548737 - DNA, 19 bp, Mus musculus
  siRNA target sequence for Fkbp9 (NM_012056.1,1520-1538).
ccgtcctagtgtttgacat

SEQ ID NO: 548738 - DNA, 19 bp, Mus musculus
  siRNA target sequence for Fkbp9 (NM_012056.1,1564-1582).
cttccggaggggtacatgt

SEQ ID NO: 548739 - DNA, 19 bp, Mus musculus
  siRNA target sequence for Fkbp9 (NM_012056.1,1567-1585).
ccggaggggtacatgttca

SEQ ID NO: 548740 - DNA, 19 bp, Mus musculus
  siRNA target sequence for Fkbp9 (NM_012056.1,1568-1586).
cggaggggtacatgttcat

SEQ ID NO: 548741 - DNA, 19 bp, Mus musculus
  siRNA target sequence for Fkbp9 (NM_012056.1,1569-1587).
ggaggggtacatgttcata

SEQ ID NO: 548742 - DNA, 19 bp, Mus musculus
  siRNA target sequence for Fkbp9 (NM_012056.1,1570-1588).
gaggggtacatgttcatat

SEQ ID NO: 548743 - DNA, 19 bp, Mus musculus
  siRNA target sequence for Fkbp9 (NM_012056.1,1602-1620).
gtctcccaacctctttgaa

SEQ ID NO: 548744 - DNA, 19 bp, Mus musculus
  siRNA target sequence for Fkbp9 (NM_012056.1,1718-1736).
gctttaatgctgaaatgat

SEQ ID NO: 548745 - DNA, 19 bp, Mus musculus
  siRNA target sequence for Fkbp9 (NM_012056.1,1729-1747).
gaaatgatcgtgaagaata

SEQ ID NO: 548746 - DNA, 19 bp, Mus musculus
  siRNA target sequence for Fkbp9 (NM_012056.1,1782-1800).
ggtcacggctgaggaattt

SEQ ID NO: 548747 - DNA, 19 bp, Mus musculus
  siRNA target sequence for Fkbp9 (NM_012056.1,1785-1803).
cacggctgaggaatttaaa

SEQ ID NO: 548748 - DNA, 19 bp, Mus musculus
  siRNA target sequence for Fkbp9 (NM_012056.1,1787-1805).
cggctgaggaatttaaact

SEQ ID NO: 548749 - DNA, 19 bp, Mus musculus
  siRNA target sequence for Flrt3 (NM_178382.2,493-511).
cttcctcatcgggactaaa

SEQ ID NO: 548750 - DNA, 19 bp, Mus musculus
  siRNA target sequence for Flrt3 (NM_178382.2,496-514).
cctcatcgggactaaaatt

SEQ ID NO: 548751 - DNA, 19 bp, Mus musculus
  siRNA target sequence for Flrt3 (NM_178382.2,579-597).
gtgacgcaggcttcattta

SEQ ID NO: 548752 - DNA, 19 bp, Mus musculus
  siRNA target sequence for Flrt3 (NM_178382.2,584-602).
gcaggcttcatttactgta

SEQ ID NO: 548753 - DNA, 19 bp, Mus musculus
  siRNA target sequence for Flrt3 (NM_178382.2,589-607).
cttcatttactgtaacgat

SEQ ID NO: 548754 - DNA, 19 bp, Mus musculus
  siRNA target sequence for Flrt3 (NM_178382.2,651-669).
caacactctaccttcagaa

SEQ ID NO: 548755 - DNA, 19 bp, Mus musculus
  siRNA target sequence for Flrt3 (NM_178382.2,690-708).
ggattccttccgatttgaa

SEQ ID NO: 548756 - DNA, 19 bp, Mus musculus
  siRNA target sequence for Flrt3 (NM_178382.2,696-714).
cttccgatttgaagaactt

SEQ ID NO: 548757 - DNA, 19 bp, Mus musculus
  siRNA target sequence for Flrt3 (NM_178382.2,712-730).
cttgctgaaagtacaaaga

SEQ ID NO: 548758 - DNA, 19 bp, Mus musculus
  siRNA target sequence for Flrt3 (NM_178382.2,715-733).
gctgaaagtacaaagaata

SEQ ID NO: 548759 - DNA, 19 bp, Mus musculus
  siRNA target sequence for Flrt3 (NM_178382.2,722-740).
gtacaaagaatatacctat

SEQ ID NO: 548760 - DNA, 19 bp, Mus musculus
  siRNA target sequence for Flrt3 (NM_178382.2,736-754).
cctataccacaacagttta

SEQ ID NO: 548761 - DNA, 19 bp, Mus musculus
  siRNA target sequence for Flrt3 (NM_178382.2,743-761).
cacaacagtttagatgaat

SEQ ID NO: 548762 - DNA, 19 bp, Mus musculus
  siRNA target sequence for Flrt3 (NM_178382.2,765-783).
ctaccaaccttccaaagta

SEQ ID NO: 548763 - DNA, 19 bp, Mus musculus
  siRNA target sequence for Flrt3 (NM_178382.2,768-786).
ccaaccttccaaagtatgt

SEQ ID NO: 548764 - DNA, 19 bp, Mus musculus
  siRNA target sequence for Flrt3 (NM_178382.2,772-790).
ccttccaaagtatgtcaaa

SEQ ID NO: 548765 - DNA, 19 bp, Mus musculus
  siRNA target sequence for Flrt3 (NM_178382.2,781-799).
gtatgtcaaagagttacat

SEQ ID NO: 548766 - DNA, 19 bp, Mus musculus
  siRNA target sequence for Flrt3 (NM_178382.2,793-811).
gttacatttgcaagagaat

SEQ ID NO: 548767 - DNA, 19 bp, Mus musculus
  siRNA target sequence for Flrt3 (NM_178382.2,820-838).
gactatcacctatgattca

SEQ ID NO: 548768 - DNA, 19 bp, Mus musculus
  siRNA target sequence for Flrt3 (NM_178382.2,822-840).
ctatcacctatgattcact

SEQ ID NO: 548769 - DNA, 19 bp, Mus musculus
  siRNA target sequence for Flrt3 (NM_178382.2,828-846).
cctatgattcactttcgaa

SEQ ID NO: 548770 - DNA, 19 bp, Mus musculus
  siRNA target sequence for Flrt3 (NM_178382.2,829-847).
ctatgattcactttcgaaa

SEQ ID NO: 548771 - DNA, 19 bp, Mus musculus
  siRNA target sequence for Flrt3 (NM_178382.2,852-870).
cgtatctggaagagttaca

SEQ ID NO: 548772 - DNA, 19 bp, Mus musculus
  siRNA target sequence for Flrt3 (NM_178382.2,863-881).
gagttacacttggatgata

SEQ ID NO: 548773 - DNA, 19 bp, Mus musculus
  siRNA target sequence for Flrt3 (NM_178382.2,904-922).
cgaagagggagcatttcga

SEQ ID NO: 548774 - DNA, 19 bp, Mus musculus
  siRNA target sequence for Flrt3 (NM_178382.2,912-930).
gagcatttcgagacagtaa

SEQ ID NO: 548775 - DNA, 19 bp, Mus musculus
  siRNA target sequence for Flrt3 (NM_178382.2,990-1008).
ccaggactattgaggaatt

SEQ ID NO: 548776 - DNA, 19 bp, Mus musculus
  siRNA target sequence for Flrt3 (NM_178382.2,1015-1033).
ggatgacaatcgcatatca

SEQ ID NO: 548777 - DNA, 19 bp, Mus musculus
  siRNA target sequence for Flrt3 (NM_178382.2,1016-1034).
gatgacaatcgcatatcaa

SEQ ID NO: 548778 - DNA, 19 bp, Mus musculus
  siRNA target sequence for Flrt3 (NM_178382.2,1025-1043).
cgcatatcaacgatctctt

SEQ ID NO: 548779 - DNA, 19 bp, Mus musculus
  siRNA target sequence for Flrt3 (NM_178382.2,1072-1090).
gaaacgcctggttttagat

SEQ ID NO: 548780 - DNA, 19 bp, Mus musculus
  siRNA target sequence for Flrt3 (NM_178382.2,1118-1136).
ggtgacaaagttttcttca

SEQ ID NO: 548781 - DNA, 19 bp, Mus musculus
  siRNA target sequence for Flrt3 (NM_178382.2,1119-1137).
gtgacaaagttttcttcaa

SEQ ID NO: 548782 - DNA, 19 bp, Mus musculus
  siRNA target sequence for Flrt3 (NM_178382.2,1127-1145).
gttttcttcaacttagtaa

SEQ ID NO: 548783 - DNA, 19 bp, Mus musculus
  siRNA target sequence for Flrt3 (NM_178382.2,1132-1150).
cttcaacttagtaaactta

SEQ ID NO: 548784 - DNA, 19 bp, Mus musculus
  siRNA target sequence for Flrt3 (NM_178382.2,1161-1179).
ccctggtgaggaattcctt

SEQ ID NO: 548785 - DNA, 19 bp, Mus musculus
  siRNA target sequence for Flrt3 (NM_178382.2,1218-1236).
ggaagctttaccttcaaga

SEQ ID NO: 548786 - DNA, 19 bp, Mus musculus
  siRNA target sequence for Flrt3 (NM_178382.2,1229-1247).
cttcaagacaaccatatca

SEQ ID NO: 548787 - DNA, 19 bp, Mus musculus
  siRNA target sequence for Flrt3 (NM_178382.2,1250-1268).
cgggtacccccaaatgctt

SEQ ID NO: 548788 - DNA, 19 bp, Mus musculus
  siRNA target sequence for Flrt3 (NM_178382.2,1253-1271).
gtacccccaaatgcttttt

SEQ ID NO: 548789 - DNA, 19 bp, Mus musculus
  siRNA target sequence for Flrt3 (NM_178382.2,1286-1304).
ctgtatcgactcgatatgt

SEQ ID NO: 548790 - DNA, 19 bp, Mus musculus
  siRNA target sequence for Flrt3 (NM_178382.2,1288-1306).
gtatcgactcgatatgtct

SEQ ID NO: 548791 - DNA, 19 bp, Mus musculus
  siRNA target sequence for Flrt3 (NM_178382.2,1292-1310).
cgactcgatatgtctaata

SEQ ID NO: 548792 - DNA, 19 bp, Mus musculus
  siRNA target sequence for Flrt3 (NM_178382.2,1293-1311).
gactcgatatgtctaataa

SEQ ID NO: 548793 - DNA, 19 bp, Mus musculus
  siRNA target sequence for Flrt3 (NM_178382.2,1295-1313).
ctcgatatgtctaataata

SEQ ID NO: 548794 - DNA, 19 bp, Mus musculus
  siRNA target sequence for Flrt3 (NM_178382.2,1331-1349).
cagggtatctttgatgatt

SEQ ID NO: 548795 - DNA, 19 bp, Mus musculus
  siRNA target sequence for Flrt3 (NM_178382.2,1343-1361).
gatgatttggacaatataa

SEQ ID NO: 548796 - DNA, 19 bp, Mus musculus
  siRNA target sequence for Flrt3 (NM_178382.2,1376-1394).
cgcaacaatccttggtatt

SEQ ID NO: 548797 - DNA, 19 bp, Mus musculus
  siRNA target sequence for Flrt3 (NM_178382.2,1378-1396).
caacaatccttggtattgt

SEQ ID NO: 548798 - DNA, 19 bp, Mus musculus
  siRNA target sequence for Flrt3 (NM_178382.2,1415-1433).
gtacgagactggttacagt

SEQ ID NO: 548799 - DNA, 19 bp, Mus musculus
  siRNA target sequence for Flrt3 (NM_178382.2,1518-1536).
cagaactgtttgattgtaa

SEQ ID NO: 548800 - DNA, 19 bp, Mus musculus
  siRNA target sequence for Flrt3 (NM_178382.2,1683-1701).
gcccctcacggaaaacaat

SEQ ID NO: 548801 - DNA, 19 bp, Mus musculus
  siRNA target sequence for Flrt3 (NM_178382.2,1685-1703).
ccctcacggaaaacaattt

SEQ ID NO: 548802 - DNA, 19 bp, Mus musculus
  siRNA target sequence for Flrt3 (NM_178382.2,1686-1704).
cctcacggaaaacaatttt

SEQ ID NO: 548803 - DNA, 19 bp, Mus musculus
  siRNA target sequence for Flrt3 (NM_178382.2,1687-1705).
ctcacggaaaacaatttta

SEQ ID NO: 548804 - DNA, 19 bp, Mus musculus
  siRNA target sequence for Flrt3 (NM_178382.2,1730-1748).
gacacaatccacatatcct

SEQ ID NO: 548805 - DNA, 19 bp, Mus musculus
  siRNA target sequence for Flrt3 (NM_178382.2,1777-1795).
gcgactcagctggcttaaa

SEQ ID NO: 548806 - DNA, 19 bp, Mus musculus
  siRNA target sequence for Flrt3 (NM_178382.2,1806-1824).
gcccagcctttggatctat

SEQ ID NO: 548807 - DNA, 19 bp, Mus musculus
  siRNA target sequence for Flrt3 (NM_178382.2,1807-1825).
cccagcctttggatctata

SEQ ID NO: 548808 - DNA, 19 bp, Mus musculus
  siRNA target sequence for Flrt3 (NM_178382.2,1808-1826).
ccagcctttggatctataa

SEQ ID NO: 548809 - DNA, 19 bp, Mus musculus
  siRNA target sequence for Flrt3 (NM_178382.2,1813-1831).
ctttggatctataacagaa

SEQ ID NO: 548810 - DNA, 19 bp, Mus musculus
  siRNA target sequence for Flrt3 (NM_178382.2,1881-1899).
ctgaatcaccctatagagt

SEQ ID NO: 548811 - DNA, 19 bp, Mus musculus
  siRNA target sequence for Flrt3 (NM_178382.2,1883-1901).
gaatcaccctatagagtat

SEQ ID NO: 548812 - DNA, 19 bp, Mus musculus
  siRNA target sequence for Flrt3 (NM_178382.2,1887-1905).
caccctatagagtatgcat

SEQ ID NO: 548813 - DNA, 19 bp, Mus musculus
  siRNA target sequence for Flrt3 (NM_178382.2,1912-1930).
catggaaaccagtaacctt

SEQ ID NO: 548814 - DNA, 19 bp, Mus musculus
  siRNA target sequence for Flrt3 (NM_178382.2,1973-1991).
gcccctcttcgaatgtaca

SEQ ID NO: 548815 - DNA, 19 bp, Mus musculus
  siRNA target sequence for Flrt3 (NM_178382.2,1974-1992).
cccctcttcgaatgtacaa

SEQ ID NO: 548816 - DNA, 19 bp, Mus musculus
  siRNA target sequence for Flrt3 (NM_178382.2,2008-2026).
caatcgagagcaagagaaa

SEQ ID NO: 548817 - DNA, 19 bp, Mus musculus
  siRNA target sequence for Flrt3 (NM_178382.2,2027-2045).
gaaccttacaaaaatccaa

SEQ ID NO: 548818 - DNA, 19 bp, Mus musculus
  siRNA target sequence for Flrt3 (NM_178382.2,2091-2109).
gcatcgccctccttgcttt

SEQ ID NO: 548819 - DNA, 19 bp, Mus musculus
  siRNA target sequence for Flrt3 (NM_178382.2,2131-2149).
gaacgggtcactgttttca

SEQ ID NO: 548820 - DNA, 19 bp, Mus musculus
  siRNA target sequence for Flrt3 (NM_178382.2,2175-2193).
ggaggagaaaggatgacta

SEQ ID NO: 548821 - DNA, 19 bp, Mus musculus
  siRNA target sequence for Flrt3 (NM_178382.2,2176-2194).
gaggagaaaggatgactat

SEQ ID NO: 548822 - DNA, 19 bp, Mus musculus
  siRNA target sequence for Flrt3 (NM_178382.2,2195-2213).
gcagaagccggtactaaga

SEQ ID NO: 548823 - DNA, 19 bp, Mus musculus
  siRNA target sequence for Flrt3 (NM_178382.2,2201-2219).
gccggtactaagaaagaca

SEQ ID NO: 548824 - DNA, 19 bp, Mus musculus
  siRNA target sequence for Flrt3 (NM_178382.2,2202-2220).
ccggtactaagaaagacaa

SEQ ID NO: 548825 - DNA, 19 bp, Mus musculus
  siRNA target sequence for Flrt3 (NM_178382.2,2252-2270).
cagatgctaccgataagca

SEQ ID NO: 548826 - DNA, 19 bp, Mus musculus
  siRNA target sequence for Flrt3 (NM_178382.2,2254-2272).
gatgctaccgataagcaat

SEQ ID NO: 548827 - DNA, 19 bp, Mus musculus
  siRNA target sequence for Flrt3 (NM_178382.2,2257-2275).
gctaccgataagcaatgaa

SEQ ID NO: 548828 - DNA, 19 bp, Mus musculus
  siRNA target sequence for Flrt3 (NM_178382.2,2316-2334).
ctccgaatgggatgaatct

SEQ ID NO: 548829 - DNA, 19 bp, Mus musculus
  siRNA target sequence for Flrt3 (NM_178382.2,2319-2337).
cgaatgggatgaatctgta

SEQ ID NO: 548830 - DNA, 19 bp, Mus musculus
  siRNA target sequence for Fstl1 (NM_008047.2,156-174).
ggaggaacctagaagcaaa

SEQ ID NO: 548831 - DNA, 19 bp, Mus musculus
  siRNA target sequence for Fstl1 (NM_008047.2,157-175).
gaggaacctagaagcaaat

SEQ ID NO: 548832 - DNA, 19 bp, Mus musculus
  siRNA target sequence for Fstl1 (NM_008047.2,180-198).
gatctgcgccaatgtgttt

SEQ ID NO: 548833 - DNA, 19 bp, Mus musculus
  siRNA target sequence for Fstl1 (NM_008047.2,321-339).
ctgtgaacttcatagagat

SEQ ID NO: 548834 - DNA, 19 bp, Mus musculus
  siRNA target sequence for Fstl1 (NM_008047.2,356-374).
ccaagatccaggttgatta

SEQ ID NO: 548835 - DNA, 19 bp, Mus musculus
  siRNA target sequence for Fstl1 (NM_008047.2,420-438).
cccagttgtctgctatcaa

SEQ ID NO: 548836 - DNA, 19 bp, Mus musculus
  siRNA target sequence for Fstl1 (NM_008047.2,530-548).
gtgagatcctagacaagta

SEQ ID NO: 548837 - DNA, 19 bp, Mus musculus
  siRNA target sequence for Fstl1 (NM_008047.2,577-595).
cacctggactccagtgaat

SEQ ID NO: 548838 - DNA, 19 bp, Mus musculus
  siRNA target sequence for Fstl1 (NM_008047.2,587-605).
ccagtgaattcctgaaatt

SEQ ID NO: 548839 - DNA, 19 bp, Mus musculus
  siRNA target sequence for Fstl1 (NM_008047.2,646-664).
gcagatcaggagaacaaca

SEQ ID NO: 548840 - DNA, 19 bp, Mus musculus
  siRNA target sequence for Fstl1 (NM_008047.2,683-701).
gtgttgacgccctcattga

SEQ ID NO: 548841 - DNA, 19 bp, Mus musculus
  siRNA target sequence for Fstl1 (NM_008047.2,794-812).
ccctggaggacgaaaccta

SEQ ID NO: 548842 - DNA, 19 bp, Mus musculus
  siRNA target sequence for Fstl1 (NM_008047.2,795-813).
cctggaggacgaaacctat

SEQ ID NO: 548843 - DNA, 19 bp, Mus musculus
  siRNA target sequence for Gas6 (NM_019521.1,402-420).
gaccccgagacggagtatt

SEQ ID NO: 548844 - DNA, 19 bp, Mus musculus
  siRNA target sequence for Gas6 (NM_019521.1,416-434).
gtatttctatccacgatat

SEQ ID NO: 548845 - DNA, 19 bp, Mus musculus
  siRNA target sequence for Gas6 (NM_019521.1,478-496).
cagatttcgccaaatgtgt

SEQ ID NO: 548846 - DNA, 19 bp, Mus musculus
  siRNA target sequence for Gas6 (NM_019521.1,522-540).
ccaaacccttgtgataaga

SEQ ID NO: 548847 - DNA, 19 bp, Mus musculus
  siRNA target sequence for Gas6 (NM_019521.1,534-552).
gataagaagggtactcata

SEQ ID NO: 548848 - DNA, 19 bp, Mus musculus
  siRNA target sequence for Gas6 (NM_019521.1,732-750).
ggccagacctgccaagata

SEQ ID NO: 548849 - DNA, 19 bp, Mus musculus
  siRNA target sequence for Gas6 (NM_019521.1,733-751).
gccagacctgccaagatat

SEQ ID NO: 548850 - DNA, 19 bp, Mus musculus
  siRNA target sequence for Gas6 (NM_019521.1,824-842).
ctgcgatgagggatataca

SEQ ID NO: 548851 - DNA, 19 bp, Mus musculus
  siRNA target sequence for Gas6 (NM_019521.1,826-844).
gcgatgagggatatacata

SEQ ID NO: 548852 - DNA, 19 bp, Mus musculus
  siRNA target sequence for Gas6 (NM_019521.1,971-989).
cccagacatggatacttgt

SEQ ID NO: 548853 - DNA, 19 bp, Mus musculus
  siRNA target sequence for Gas6 (NM_019521.1,1064-1082).
cgggacccccgtgattaga

SEQ ID NO: 548854 - DNA, 19 bp, Mus musculus
  siRNA target sequence for Gas6 (NM_019521.1,1066-1084).
ggacccccgtgattagact

SEQ ID NO: 548855 - DNA, 19 bp, Mus musculus
  siRNA target sequence for Gas6 (NM_019521.1,1067-1085).
gacccccgtgattagacta

SEQ ID NO: 548856 - DNA, 19 bp, Mus musculus
  siRNA target sequence for Gas6 (NM_019521.1,1111-1129).
ggctgctggctgaatttga

SEQ ID NO: 548857 - DNA, 19 bp, Mus musculus
  siRNA target sequence for Gas6 (NM_019521.1,1113-1131).
ctgctggctgaatttgact

SEQ ID NO: 548858 - DNA, 19 bp, Mus musculus
  siRNA target sequence for Gas6 (NM_019521.1,1615-1633).
ctacctacaggctcaacta

SEQ ID NO: 548859 - DNA, 19 bp, Mus musculus
  siRNA target sequence for Gas6 (NM_019521.1,1770-1788).
gtcgactaccactctacaa

SEQ ID NO: 548860 - DNA, 19 bp, Mus musculus
  siRNA target sequence for Gas6 (NM_019521.1,1773-1791).
gactaccactctacaaaga

SEQ ID NO: 548861 - DNA, 19 bp, Mus musculus
  siRNA target sequence for Gas6 (NM_019521.1,1968-1986).
gagcgactggacacactta

SEQ ID NO: 548862 - DNA, 19 bp, Mus musculus
  siRNA target sequence for Gas6 (NM_019521.1,2080-2098).
gcatgactctggaggtaaa

SEQ ID NO: 548863 - DNA, 19 bp, Mus musculus
  siRNA target sequence for Gca (NM_145523.2,127-145).
gaggggcgtttggaaactt

SEQ ID NO: 548864 - DNA, 19 bp, Mus musculus
  siRNA target sequence for Gca (NM_145523.2,193-211).
caggggcaggtcccaatat

SEQ ID NO: 548865 - DNA, 19 bp, Mus musculus
  siRNA target sequence for Gca (NM_145523.2,196-214).
gggcaggtcccaatatgtt

SEQ ID NO: 548866 - DNA, 19 bp, Mus musculus
  siRNA target sequence for Gca (NM_145523.2,198-216).
gcaggtcccaatatgttct

SEQ ID NO: 548867 - DNA, 19 bp, Mus musculus
  siRNA target sequence for Gca (NM_145523.2,232-250).
gatacctgggttattctga

SEQ ID NO: 548868 - DNA, 19 bp, Mus musculus
  siRNA target sequence for Gca (NM_145523.2,270-288).
gactccatgtggacttatt

SEQ ID NO: 548869 - DNA, 19 bp, Mus musculus
  siRNA target sequence for Gca (NM_145523.2,347-365).
gacccagtctggaattagt

SEQ ID NO: 548870 - DNA, 19 bp, Mus musculus
  siRNA target sequence for Gca (NM_145523.2,370-388).
cttacgcacctttcagttt

SEQ ID NO: 548871 - DNA, 19 bp, Mus musculus
  siRNA target sequence for Gca (NM_145523.2,526-544).
gcacggtagaacatcatga

SEQ ID NO: 548872 - DNA, 19 bp, Mus musculus
  siRNA target sequence for Gca (NM_145523.2,550-568).
gtcaagccatcgctcttat

SEQ ID NO: 548873 - DNA, 19 bp, Mus musculus
  siRNA target sequence for Gca (NM_145523.2,577-595).
ggttgagtccacagacatt

SEQ ID NO: 548874 - DNA, 19 bp, Mus musculus
  siRNA target sequence for Gca (NM_145523.2,578-596).
gttgagtccacagacatta

SEQ ID NO: 548875 - DNA, 19 bp, Mus musculus
  siRNA target sequence for Gca (NM_145523.2,581-599).
gagtccacagacattagct

SEQ ID NO: 548876 - DNA, 19 bp, Mus musculus
  siRNA target sequence for Gca (NM_145523.2,623-641).
gaatggccggattttcttt

SEQ ID NO: 548877 - DNA, 19 bp, Mus musculus
  siRNA target sequence for Gca (NM_145523.2,749-767).
gcagggcactatgacaatt

SEQ ID NO: 548878 - DNA, 19 bp, Mus musculus
  siRNA target sequence for Gca (NM_145523.2,750-768).
cagggcactatgacaattt

SEQ ID NO: 548879 - DNA, 19 bp, Mus musculus
  siRNA target sequence for Gpd2 (NM_010274.2,480-498).
gaagaacacacccgaattt

SEQ ID NO: 548880 - DNA, 19 bp, Mus musculus
  siRNA target sequence for Gpd2 (NM_010274.2,655-673).
cagaaggctatcatgaact

SEQ ID NO: 548881 - DNA, 19 bp, Mus musculus
  siRNA target sequence for Gpd2 (NM_010274.2,676-694).
gatgttgagcagtatagga

SEQ ID NO: 548882 - DNA, 19 bp, Mus musculus
  siRNA target sequence for Gpd2 (NM_010274.2,687-705).
gtataggatggtgaaagaa

SEQ ID NO: 548883 - DNA, 19 bp, Mus musculus
  siRNA target sequence for Gpd2 (NM_010274.2,714-732).
cgaacgtgccaacttacta

SEQ ID NO: 548884 - DNA, 19 bp, Mus musculus
  siRNA target sequence for Gpd2 (NM_010274.2,718-736).
cgtgccaacttactagaaa

SEQ ID NO: 548885 - DNA, 19 bp, Mus musculus
  siRNA target sequence for Gpd2 (NM_010274.2,719-737).
gtgccaacttactagaaat

SEQ ID NO: 548886 - DNA, 19 bp, Mus musculus
  siRNA target sequence for Gpd2 (NM_010274.2,733-751).
gaaatcgctcctcatttat

SEQ ID NO: 548887 - DNA, 19 bp, Mus musculus
  siRNA target sequence for Gpd2 (NM_010274.2,786-804).
gtggtggcagttaccttat

SEQ ID NO: 548888 - DNA, 19 bp, Mus musculus
  siRNA target sequence for Gpd2 (NM_010274.2,788-806).
ggtggcagttaccttatta

SEQ ID NO: 548889 - DNA, 19 bp, Mus musculus
  siRNA target sequence for Gpd2 (NM_010274.2,809-827).
gggtgggaatcaagatgta

SEQ ID NO: 548890 - DNA, 19 bp, Mus musculus
  siRNA target sequence for Gpd2 (NM_010274.2,810-828).
ggtgggaatcaagatgtat

SEQ ID NO: 548891 - DNA, 19 bp, Mus musculus
  siRNA target sequence for Gpd2 (NM_010274.2,881-899).
cccgagccctggagcattt

SEQ ID NO: 548892 - DNA, 19 bp, Mus musculus
  siRNA target sequence for Gpd2 (NM_010274.2,882-900).
ccgagccctggagcatttt

SEQ ID NO: 548893 - DNA, 19 bp, Mus musculus
  siRNA target sequence for Gpd2 (NM_010274.2,922-940).
ctggtaggcgccattgtct

SEQ ID NO: 548894 - DNA, 19 bp, Mus musculus
  siRNA target sequence for Gpd2 (NM_010274.2,929-947).
gcgccattgtctactatga

SEQ ID NO: 548895 - DNA, 19 bp, Mus musculus
  siRNA target sequence for Gpd2 (NM_010274.2,1133-1151).
gagccaaatgcgttatcaa

SEQ ID NO: 548896 - DNA, 19 bp, Mus musculus
  siRNA target sequence for Gpd2 (NM_010274.2,1173-1191).
ctccgtgcgcaaaatggat

SEQ ID NO: 548897 - DNA, 19 bp, Mus musculus
  siRNA target sequence for Gpd2 (NM_010274.2,1177-1195).
gtgcgcaaaatggatgata

SEQ ID NO: 548898 - DNA, 19 bp, Mus musculus
  siRNA target sequence for Gpd2 (NM_010274.2,1179-1197).
gcgcaaaatggatgataaa

SEQ ID NO: 548899 - DNA, 19 bp, Mus musculus
  siRNA target sequence for Gpd2 (NM_010274.2,1240-1258).
gtgatgcccggatactaca

SEQ ID NO: 548900 - DNA, 19 bp, Mus musculus
  siRNA target sequence for Gpd2 (NM_010274.2,1368-1386).
cgtcacgcaccatcctatt

SEQ ID NO: 548901 - DNA, 19 bp, Mus musculus
  siRNA target sequence for Gpd2 (NM_010274.2,1486-1504).
ggtatccgtccccttgtta

SEQ ID NO: 548902 - DNA, 19 bp, Mus musculus
  siRNA target sequence for Gpd2 (NM_010274.2,1530-1548).
gtccatctctcgaaatcat

SEQ ID NO: 548903 - DNA, 19 bp, Mus musculus
  siRNA target sequence for Gpd2 (NM_010274.2,1532-1550).
ccatctctcgaaatcatgt

SEQ ID NO: 548904 - DNA, 19 bp, Mus musculus
  siRNA target sequence for Gpd2 (NM_010274.2,1533-1551).
catctctcgaaatcatgtt

SEQ ID NO: 548905 - DNA, 19 bp, Mus musculus
  siRNA target sequence for Gpd2 (NM_010274.2,1564-1582).
gacagcggactcatcacaa

SEQ ID NO: 548906 - DNA, 19 bp, Mus musculus
  siRNA target sequence for Gpd2 (NM_010274.2,1566-1584).
cagcggactcatcacaata

SEQ ID NO: 548907 - DNA, 19 bp, Mus musculus
  siRNA target sequence for Gpd2 (NM_010274.2,1569-1587).
cggactcatcacaatagca

SEQ ID NO: 548908 - DNA, 19 bp, Mus musculus
  siRNA target sequence for Gpd2 (NM_010274.2,1609-1627).
cgctccatggcagaagata

SEQ ID NO: 548909 - DNA, 19 bp, Mus musculus
  siRNA target sequence for Gpd2 (NM_010274.2,1644-1662).
caagtttcacaacttgaat

SEQ ID NO: 548910 - DNA, 19 bp, Mus musculus
  siRNA target sequence for Gpd2 (NM_010274.2,1731-1749).
caggcttgtccaggattat

SEQ ID NO: 548911 - DNA, 19 bp, Mus musculus
  siRNA target sequence for Gpd2 (NM_010274.2,1758-1776).
gagcgaggttgcacaacat

SEQ ID NO: 548912 - DNA, 19 bp, Mus musculus
  siRNA target sequence for Gpd2 (NM_010274.2,1760-1778).
gcgaggttgcacaacatct

SEQ ID NO: 548913 - DNA, 19 bp, Mus musculus
  siRNA target sequence for Gpd2 (NM_010274.2,1858-1876).
gtgcgtcttgtgtcagaat

SEQ ID NO: 548914 - DNA, 19 bp, Mus musculus
  siRNA target sequence for Gpd2 (NM_010274.2,1860-1878).
gcgtcttgtgtcagaattt

SEQ ID NO: 548915 - DNA, 19 bp, Mus musculus
  siRNA target sequence for Gpd2 (NM_010274.2,1955-1973).
cccgcctggcctttctcaa

SEQ ID NO: 548916 - DNA, 19 bp, Mus musculus
  siRNA target sequence for Gpd2 (NM_010274.2,1956-1974).
ccgcctggcctttctcaat

SEQ ID NO: 548917 - DNA, 19 bp, Mus musculus
  siRNA target sequence for Gpd2 (NM_010274.2,1994-2012).
ccctgcctaggattgttga

SEQ ID NO: 548918 - DNA, 19 bp, Mus musculus
  siRNA target sequence for Gpd2 (NM_010274.2,1995-2013).
cctgcctaggattgttgaa

SEQ ID NO: 548919 - DNA, 19 bp, Mus musculus
  siRNA target sequence for Gpd2 (NM_010274.2,2069-2087).
cagccacgagatttctgta

SEQ ID NO: 548920 - DNA, 19 bp, Mus musculus
  siRNA target sequence for Gpd2 (NM_010274.2,2072-2090).
ccacgagatttctgtacta

SEQ ID NO: 548921 - DNA, 19 bp, Mus musculus
  siRNA target sequence for Gpd2 (NM_010274.2,2073-2091).
cacgagatttctgtactat

SEQ ID NO: 548922 - DNA, 19 bp, Mus musculus
  siRNA target sequence for Gpd2 (NM_010274.2,2075-2093).
cgagatttctgtactatga

SEQ ID NO: 548923 - DNA, 19 bp, Mus musculus
  siRNA target sequence for Gpd2 (NM_010274.2,2106-2124).
gtctcgaacagaacaactt

SEQ ID NO: 548924 - DNA, 19 bp, Mus musculus
  siRNA target sequence for Gpd2 (NM_010274.2,2153-2171).
cttcagacatcgataggta

SEQ ID NO: 548925 - DNA, 19 bp, Mus musculus
  siRNA target sequence for Gpd2 (NM_010274.2,2158-2176).
gacatcgataggtacaaga

SEQ ID NO: 548926 - DNA, 19 bp, Mus musculus
  siRNA target sequence for Gpd2 (NM_010274.2,2164-2182).
gataggtacaagaagagat

SEQ ID NO: 548927 - DNA, 19 bp, Mus musculus
  siRNA target sequence for Gpd2 (NM_010274.2,2180-2198).
gatttcacaagtttgatga

SEQ ID NO: 548928 - DNA, 19 bp, Mus musculus
  siRNA target sequence for Gpd2 (NM_010274.2,2210-2228).
gcttcattaccattgttga

SEQ ID NO: 548929 - DNA, 19 bp, Mus musculus
  siRNA target sequence for Gpd2 (NM_010274.2,2236-2254).
cgtgtcctagagagtatca

SEQ ID NO: 548930 - DNA, 19 bp, Mus musculus
  siRNA target sequence for Gpd2 (NM_010274.2,2237-2255).
gtgtcctagagagtatcaa

SEQ ID NO: 548931 - DNA, 19 bp, Mus musculus
  siRNA target sequence for Gpd2 (NM_010274.2,2249-2267).
gtatcaatgtacaaatgga

SEQ ID NO: 548932 - DNA, 19 bp, Mus musculus
  siRNA target sequence for Gpd2 (NM_010274.2,2257-2275).
gtacaaatggacgaaaaca

SEQ ID NO: 548933 - DNA, 19 bp, Mus musculus
  siRNA target sequence for Gpd2 (NM_010274.2,2269-2287).
gaaaacacactgcatgaaa

SEQ ID NO: 548934 - DNA, 19 bp, Mus musculus
  siRNA target sequence for Gpd2 (NM_010274.2,2290-2308).
ctctgcgaagtagatttga

SEQ ID NO: 548935 - DNA, 19 bp, Mus musculus
  siRNA target sequence for Gpd2 (NM_010274.2,2294-2312).
gcgaagtagatttgaacaa

SEQ ID NO: 548936 - DNA, 19 bp, Mus musculus
  siRNA target sequence for Gpd2 (NM_010274.2,2295-2313).
cgaagtagatttgaacaaa

SEQ ID NO: 548937 - DNA, 19 bp, Mus musculus
  siRNA target sequence for Gpd2 (NM_010274.2,2349-2367).
gatgagcgcagttcagaaa

SEQ ID NO: 548938 - DNA, 19 bp, Mus musculus
  siRNA target sequence for Gpd2 (NM_010274.2,2442-2460).
ccccgtggaccgtagttgt

SEQ ID NO: 548939 - DNA, 19 bp, Mus musculus
  siRNA target sequence for Grn (NM_008175.2,180-198).
ggacacatggcctagaata

SEQ ID NO: 548940 - DNA, 19 bp, Mus musculus
  siRNA target sequence for Grn (NM_008175.2,181-199).
gacacatggcctagaataa

SEQ ID NO: 548941 - DNA, 19 bp, Mus musculus
  siRNA target sequence for Grn (NM_008175.2,194-212).
gaataacgagccatcatct

SEQ ID NO: 548942 - DNA, 19 bp, Mus musculus
  siRNA target sequence for Grn (NM_008175.2,287-305).
gctgctgcccgttctctaa

SEQ ID NO: 548943 - DNA, 19 bp, Mus musculus
  siRNA target sequence for Grn (NM_008175.2,377-395).
gcttccagatgtcagataa

SEQ ID NO: 548944 - DNA, 19 bp, Mus musculus
  siRNA target sequence for Grn (NM_008175.2,449-467).
ccacctgctgcattatggt

SEQ ID NO: 548945 - DNA, 19 bp, Mus musculus
  siRNA target sequence for Grn (NM_008175.2,450-468).
cacctgctgcattatggtt

SEQ ID NO: 548946 - DNA, 19 bp, Mus musculus
  siRNA target sequence for Grn (NM_008175.2,587-605).
gcacccacaccctactaaa

SEQ ID NO: 548947 - DNA, 19 bp, Mus musculus
  siRNA target sequence for Grn (NM_008175.2,590-608).
cccacaccctactaaagaa

SEQ ID NO: 548948 - DNA, 19 bp, Mus musculus
  siRNA target sequence for Grn (NM_008175.2,592-610).
cacaccctactaaagaagt

SEQ ID NO: 548949 - DNA, 19 bp, Mus musculus
  siRNA target sequence for Grn (NM_008175.2,678-696).
ccagtgtcccgatgattct

SEQ ID NO: 548950 - DNA, 19 bp, Mus musculus
  siRNA target sequence for Grn (NM_008175.2,679-697).
cagtgtcccgatgattcta

SEQ ID NO: 548951 - DNA, 19 bp, Mus musculus
  siRNA target sequence for Grn (NM_008175.2,799-817).
gacctgatccagagtaagt

SEQ ID NO: 548952 - DNA, 19 bp, Mus musculus
  siRNA target sequence for Grn (NM_008175.2,900-918).
gagctgccctgaaggatat

SEQ ID NO: 548953 - DNA, 19 bp, Mus musculus
  siRNA target sequence for Grn (NM_008175.2,1100-1118).
cagacccacagatcttgaa

SEQ ID NO: 548954 - DNA, 19 bp, Mus musculus
  siRNA target sequence for Grn (NM_008175.2,1108-1126).
cagatcttgaagagtgata

SEQ ID NO: 548955 - DNA, 19 bp, Mus musculus
  siRNA target sequence for Grn (NM_008175.2,1119-1137).
gagtgatacaccttgtgat

SEQ ID NO: 548956 - DNA, 19 bp, Mus musculus
  siRNA target sequence for Grn (NM_008175.2,1129-1147).
ccttgtgatgacttcacta

SEQ ID NO: 548957 - DNA, 19 bp, Mus musculus
  siRNA target sequence for Grn (NM_008175.2,1145-1163).
ctaggtgtcctacaaacaa

SEQ ID NO: 548958 - DNA, 19 bp, Mus musculus
  siRNA target sequence for Grn (NM_008175.2,1335-1353).
gacaaccccgctccaaatt

SEQ ID NO: 548959 - DNA, 19 bp, Mus musculus
  siRNA target sequence for Grn (NM_008175.2,1343-1361).
cgctccaaattggagatat

SEQ ID NO: 548960 - DNA, 19 bp, Mus musculus
  siRNA target sequence for Grn (NM_008175.2,1520-1538).
gtgagaaggatgtcgattt

SEQ ID NO: 548961 - DNA, 19 bp, Mus musculus
  siRNA target sequence for Grn (NM_008175.2,1615-1633).
gataaccagacctgttgta

SEQ ID NO: 548962 - DNA, 19 bp, Mus musculus
  siRNA target sequence for Grn (NM_008175.2,1621-1639).
cagacctgttgtaaagaca

SEQ ID NO: 548963 - DNA, 19 bp, Mus musculus
  siRNA target sequence for Grn (NM_008175.2,1654-1672).
gcctgctgtccctacctaa

SEQ ID NO: 548964 - DNA, 19 bp, Mus musculus
  siRNA target sequence for Grn (NM_008175.2,1729-1747).
gccaggggaaccaagtgtt

SEQ ID NO: 548965 - DNA, 19 bp, Mus musculus
  siRNA target sequence for Grn (NM_008175.2,1739-1757).
ccaagtgtttgcgaaagaa

SEQ ID NO: 548966 - DNA, 19 bp, Mus musculus
  siRNA target sequence for Grn (NM_008175.2,1743-1761).
gtgtttgcgaaagaagatt

SEQ ID NO: 548967 - DNA, 19 bp, Mus musculus
  siRNA target sequence for Grn (NM_008175.2,1763-1781).
ctcgctgggacatgttttt

SEQ ID NO: 548968 - DNA, 19 bp, Mus musculus
  siRNA target sequence for Grn (NM_008175.2,1765-1783).
cgctgggacatgtttttga

SEQ ID NO: 548969 - DNA, 19 bp, Mus musculus
  siRNA target sequence for Guca1a (NM_008189.2,214-232).
gagtgccatcagtggtata

SEQ ID NO: 548970 - DNA, 19 bp, Mus musculus
  siRNA target sequence for Guca1a (NM_008189.2,218-236).
gccatcagtggtataagaa

SEQ ID NO: 548971 - DNA, 19 bp, Mus musculus
  siRNA target sequence for Guca1a (NM_008189.2,219-237).
ccatcagtggtataagaaa

SEQ ID NO: 548972 - DNA, 19 bp, Mus musculus
  siRNA target sequence for Guca1a (NM_008189.2,220-238).
catcagtggtataagaaat

SEQ ID NO: 548973 - DNA, 19 bp, Mus musculus
  siRNA target sequence for Guca1a (NM_008189.2,262-280).
cagctcaccctctacgaat

SEQ ID NO: 548974 - DNA, 19 bp, Mus musculus
  siRNA target sequence for Guca1a (NM_008189.2,276-294).
cgaattccgccagttcttt

SEQ ID NO: 548975 - DNA, 19 bp, Mus musculus
  siRNA target sequence for Guca1a (NM_008189.2,433-451).
cagaagttgcgctggtatt

SEQ ID NO: 548976 - DNA, 19 bp, Mus musculus
  siRNA target sequence for Guca1a (NM_008189.2,472-490).
ggcaacgggtgcatagaca

SEQ ID NO: 548977 - DNA, 19 bp, Mus musculus
  siRNA target sequence for Guca1a (NM_008189.2,516-534).
ggccatccgaaccattaat

SEQ ID NO: 548978 - DNA, 19 bp, Mus musculus
  siRNA target sequence for Guca1a (NM_008189.2,555-573).
gagtgccgaggaattcaca

SEQ ID NO: 548979 - DNA, 19 bp, Mus musculus
  siRNA target sequence for Guca1a (NM_008189.2,559-577).
gccgaggaattcacagata

SEQ ID NO: 548980 - DNA, 19 bp, Mus musculus
  siRNA target sequence for Guca1b (NM_146079.1,218-236).
gagttcaagcgcttcttca

SEQ ID NO: 548981 - DNA, 19 bp, Mus musculus
  siRNA target sequence for Guca1b (NM_146079.1,283-301).
ccgagccttcgacaagaat

SEQ ID NO: 548982 - DNA, 19 bp, Mus musculus
  siRNA target sequence for Guca1b (NM_146079.1,302-320).
ggggacaacaccattgact

SEQ ID NO: 548983 - DNA, 19 bp, Mus musculus
  siRNA target sequence for Guca1b (NM_146079.1,384-402).
ggaccttcaagatctatga

SEQ ID NO: 548984 - DNA, 19 bp, Mus musculus
  siRNA target sequence for Guca1b (NM_146079.1,614-632).
cgcgataagtgggtaatga

SEQ ID NO: 548985 - DNA, 19 bp, Mus musculus
  siRNA target sequence for Guca1b (NM_146079.1,615-633).
gcgataagtgggtaatgaa

SEQ ID NO: 548986 - DNA, 19 bp, Mus musculus
  siRNA target sequence for Guca1b (NM_146079.1,617-635).
gataagtgggtaatgaaga

SEQ ID NO: 548987 - DNA, 19 bp, Mus musculus
  siRNA target sequence for Habp2 (NM_146101.1,249-267).
ggtgccagactgcacaaaa

SEQ ID NO: 548988 - DNA, 19 bp, Mus musculus
  siRNA target sequence for Habp2 (NM_146101.1,254-272).
cagactgcacaaaacaagt

SEQ ID NO: 548989 - DNA, 19 bp, Mus musculus
  siRNA target sequence for Habp2 (NM_146101.1,293-311).
catggtgattgcctcatta

SEQ ID NO: 548990 - DNA, 19 bp, Mus musculus
  siRNA target sequence for Habp2 (NM_146101.1,437-455).
cggagatccaggtttacct

SEQ ID NO: 548991 - DNA, 19 bp, Mus musculus
  siRNA target sequence for Habp2 (NM_146101.1,458-476).
gcctgtccagaccagtata

SEQ ID NO: 548992 - DNA, 19 bp, Mus musculus
  siRNA target sequence for Habp2 (NM_146101.1,459-477).
cctgtccagaccagtataa

SEQ ID NO: 548993 - DNA, 19 bp, Mus musculus
  siRNA target sequence for Habp2 (NM_146101.1,472-490).
gtataaggggaaattctgt

SEQ ID NO: 548994 - DNA, 19 bp, Mus musculus
  siRNA target sequence for Habp2 (NM_146101.1,498-516).
gtccggacgactgttatgt

SEQ ID NO: 548995 - DNA, 19 bp, Mus musculus
  siRNA target sequence for Habp2 (NM_146101.1,536-554).
cgaggcaaagtgagtaaga

SEQ ID NO: 548996 - DNA, 19 bp, Mus musculus
  siRNA target sequence for Habp2 (NM_146101.1,605-623).
gagacttataacatgttta

SEQ ID NO: 548997 - DNA, 19 bp, Mus musculus
  siRNA target sequence for Habp2 (NM_146101.1,645-663).
ggatcgcagagcacaactt

SEQ ID NO: 548998 - DNA, 19 bp, Mus musculus
  siRNA target sequence for Habp2 (NM_146101.1,1011-1029).
cccactgtaccgacataaa

SEQ ID NO: 548999 - DNA, 19 bp, Mus musculus
  siRNA target sequence for Habp2 (NM_146101.1,1013-1031).
cactgtaccgacataaaca

SEQ ID NO: 549000 - DNA, 19 bp, Mus musculus
  siRNA target sequence for Habp2 (NM_146101.1,1101-1119).
gggtggaaaaaatactgaa

SEQ ID NO: 549001 - DNA, 19 bp, Mus musculus
  siRNA target sequence for Habp2 (NM_146101.1,1115-1133).
ctgaagtacagtcagtata

SEQ ID NO: 549002 - DNA, 19 bp, Mus musculus
  siRNA target sequence for Habp2 (NM_146101.1,1117-1135).
gaagtacagtcagtataat

SEQ ID NO: 549003 - DNA, 19 bp, Mus musculus
  siRNA target sequence for Habp2 (NM_146101.1,1125-1143).
gtcagtataatgaaagaga

SEQ ID NO: 549004 - DNA, 19 bp, Mus musculus
  siRNA target sequence for Habp2 (NM_146101.1,1162-1180).
cattgctttgctcaagtta

SEQ ID NO: 549005 - DNA, 19 bp, Mus musculus
  siRNA target sequence for Habp2 (NM_146101.1,1203-1221).
ctctggaatccagatatgt

SEQ ID NO: 549006 - DNA, 19 bp, Mus musculus
  siRNA target sequence for Habp2 (NM_146101.1,1282-1300).
ctggggtgttacagaaaca

SEQ ID NO: 549007 - DNA, 19 bp, Mus musculus
  siRNA target sequence for Habp2 (NM_146101.1,1360-1378).
caactcccgacaactctat

SEQ ID NO: 549008 - DNA, 19 bp, Mus musculus
  siRNA target sequence for Habp2 (NM_146101.1,1387-1405).
catcgatgacagtatgatt

SEQ ID NO: 549009 - DNA, 19 bp, Mus musculus
  siRNA target sequence for Habp2 (NM_146101.1,1407-1425).
gtgcggggaaccttcagaa

SEQ ID NO: 549010 - DNA, 19 bp, Mus musculus
  siRNA target sequence for Habp2 (NM_146101.1,1492-1510).
ctacgtctacgggattgta

SEQ ID NO: 549011 - DNA, 19 bp, Mus musculus
  siRNA target sequence for Hpcal4 (NM_174998.1,681-699).
gtgtggacaagatcttcaa

SEQ ID NO: 549012 - DNA, 19 bp, Mus musculus
  siRNA target sequence for Jag1 (NM_013822.2,283-301).
gagtgtgatacgtacttca

SEQ ID NO: 549013 - DNA, 19 bp, Mus musculus
  siRNA target sequence for Jag1 (NM_013822.2,381-399).
cgggggtaacaccttcaat

SEQ ID NO: 549014 - DNA, 19 bp, Mus musculus
  siRNA target sequence for Jag1 (NM_013822.2,432-450).
catcgtactgcctttcagt

SEQ ID NO: 549015 - DNA, 19 bp, Mus musculus
  siRNA target sequence for Jag1 (NM_013822.2,517-535).
cctgatagcataattgaaa

SEQ ID NO: 549016 - DNA, 19 bp, Mus musculus
  siRNA target sequence for Jag1 (NM_013822.2,542-560).
ctcactcaggcatgataaa

SEQ ID NO: 549017 - DNA, 19 bp, Mus musculus
  siRNA target sequence for Jag1 (NM_013822.2,604-622).
gcccacttcgagtatcaga

SEQ ID NO: 549018 - DNA, 19 bp, Mus musculus
  siRNA target sequence for Jag1 (NM_013822.2,653-671).
gctttggctgcaataagtt

SEQ ID NO: 549019 - DNA, 19 bp, Mus musculus
  siRNA target sequence for Jag1 (NM_013822.2,674-692).
gtcgtcccagagatgactt

SEQ ID NO: 549020 - DNA, 19 bp, Mus musculus
  siRNA target sequence for Jag1 (NM_013822.2,715-733).
cagaacggcaacaaaactt

SEQ ID NO: 549021 - DNA, 19 bp, Mus musculus
  siRNA target sequence for Jag1 (NM_013822.2,750-768).
gggtcctgattgcaacaaa

SEQ ID NO: 549022 - DNA, 19 bp, Mus musculus
  siRNA target sequence for Jag1 (NM_013822.2,793-811).
cccaagcatgggtcttgta

SEQ ID NO: 549023 - DNA, 19 bp, Mus musculus
  siRNA target sequence for Jag1 (NM_013822.2,795-813).
caagcatgggtcttgtaaa

SEQ ID NO: 549024 - DNA, 19 bp, Mus musculus
  siRNA target sequence for Jag1 (NM_013822.2,1204-1222).
gactgttctccaaataact

SEQ ID NO: 549025 - DNA, 19 bp, Mus musculus
  siRNA target sequence for Jag1 (NM_013822.2,1243-1261).
caggatctggtgaatggat

SEQ ID NO: 549026 - DNA, 19 bp, Mus musculus
  siRNA target sequence for Jag1 (NM_013822.2,1292-1310).
gcaagacttgtcagttaga

SEQ ID NO: 549027 - DNA, 19 bp, Mus musculus
  siRNA target sequence for Jag1 (NM_013822.2,1293-1311).
caagacttgtcagttagat

SEQ ID NO: 549028 - DNA, 19 bp, Mus musculus
  siRNA target sequence for Jag1 (NM_013822.2,1298-1316).
cttgtcagttagatgcaaa

SEQ ID NO: 549029 - DNA, 19 bp, Mus musculus
  siRNA target sequence for Jag1 (NM_013822.2,1301-1319).
gtcagttagatgcaaatga

SEQ ID NO: 549030 - DNA, 19 bp, Mus musculus
  siRNA target sequence for Jag1 (NM_013822.2,1303-1321).
cagttagatgcaaatgagt

SEQ ID NO: 549031 - DNA, 19 bp, Mus musculus
  siRNA target sequence for Jag1 (NM_013822.2,1318-1336).
gagtgcgaggccaaacctt

SEQ ID NO: 549032 - DNA, 19 bp, Mus musculus
  siRNA target sequence for Jag1 (NM_013822.2,1323-1341).
cgaggccaaaccttgtgta

SEQ ID NO: 549033 - DNA, 19 bp, Mus musculus
  siRNA target sequence for Jag1 (NM_013822.2,1324-1342).
gaggccaaaccttgtgtaa

SEQ ID NO: 549034 - DNA, 19 bp, Mus musculus
  siRNA target sequence for Jag1 (NM_013822.2,1326-1344).
ggccaaaccttgtgtaaat

SEQ ID NO: 549035 - DNA, 19 bp, Mus musculus
  siRNA target sequence for Jag1 (NM_013822.2,1349-1367).
gatcctgtaagaatctgat

SEQ ID NO: 549036 - DNA, 19 bp, Mus musculus
  siRNA target sequence for Jag1 (NM_013822.2,1363-1381).
ctgattgccagctactact

SEQ ID NO: 549037 - DNA, 19 bp, Mus musculus
  siRNA target sequence for Jag1 (NM_013822.2,1404-1422).
gggtcagaactgtgacata

SEQ ID NO: 549038 - DNA, 19 bp, Mus musculus
  siRNA target sequence for Jag1 (NM_013822.2,1415-1433).
gtgacataaatatcaatga

SEQ ID NO: 549039 - DNA, 19 bp, Mus musculus
  siRNA target sequence for Jag1 (NM_013822.2,1460-1478).
cctcctgtcgggatttggt

SEQ ID NO: 549040 - DNA, 19 bp, Mus musculus
  siRNA target sequence for Jag1 (NM_013822.2,1461-1479).
ctcctgtcgggatttggtt

SEQ ID NO: 549041 - DNA, 19 bp, Mus musculus
  siRNA target sequence for Jag1 (NM_013822.2,1576-1594).
cactgtcagaatgaaatca

SEQ ID NO: 549042 - DNA, 19 bp, Mus musculus
  siRNA target sequence for Jag1 (NM_013822.2,1640-1658).
gtcagctggacatcgatta

SEQ ID NO: 549043 - DNA, 19 bp, Mus musculus
  siRNA target sequence for Jag1 (NM_013822.2,1642-1660).
cagctggacatcgattact

SEQ ID NO: 549044 - DNA, 19 bp, Mus musculus
  siRNA target sequence for Jag1 (NM_013822.2,1698-1716).
caatcgtgccagtgactat

SEQ ID NO: 549045 - DNA, 19 bp, Mus musculus
  siRNA target sequence for Jag1 (NM_013822.2,1702-1720).
cgtgccagtgactatttct

SEQ ID NO: 549046 - DNA, 19 bp, Mus musculus
  siRNA target sequence for Jag1 (NM_013822.2,1846-1864).
gtgcggtatatctcttcta

SEQ ID NO: 549047 - DNA, 19 bp, Mus musculus
  siRNA target sequence for Jag1 (NM_013822.2,1895-1913).
gccagtcgggaggcaaatt

SEQ ID NO: 549048 - DNA, 19 bp, Mus musculus
  siRNA target sequence for Jag1 (NM_013822.2,1974-1992).
cgagagcaacccctgtaaa

SEQ ID NO: 549049 - DNA, 19 bp, Mus musculus
  siRNA target sequence for Jag1 (NM_013822.2,2014-2032).
ggcgttaactcctacaagt

SEQ ID NO: 549050 - DNA, 19 bp, Mus musculus
  siRNA target sequence for Jag1 (NM_013822.2,2017-2035).
gttaactcctacaagtgta

SEQ ID NO: 549051 - DNA, 19 bp, Mus musculus
  siRNA target sequence for Jag1 (NM_013822.2,2057-2075).
gagcgcactgtgagaacaa

SEQ ID NO: 549052 - DNA, 19 bp, Mus musculus
  siRNA target sequence for Jag1 (NM_013822.2,2060-2078).
cgcactgtgagaacaacat

SEQ ID NO: 549053 - DNA, 19 bp, Mus musculus
  siRNA target sequence for Jag1 (NM_013822.2,2122-2140).
cgagacctggtcaatgact

SEQ ID NO: 549054 - DNA, 19 bp, Mus musculus
  siRNA target sequence for Jag1 (NM_013822.2,2203-2221).
gacgaagccacgtgtaata

SEQ ID NO: 549055 - DNA, 19 bp, Mus musculus
  siRNA target sequence for Jag1 (NM_013822.2,2205-2223).
cgaagccacgtgtaataat

SEQ ID NO: 549056 - DNA, 19 bp, Mus musculus
  siRNA target sequence for Jag1 (NM_013822.2,2228-2246).
gtacctgctatgatgaagt

SEQ ID NO: 549057 - DNA, 19 bp, Mus musculus
  siRNA target sequence for Jag1 (NM_013822.2,2242-2260).
gaagtggacacgtttaagt

SEQ ID NO: 549058 - DNA, 19 bp, Mus musculus
  siRNA target sequence for Jag1 (NM_013822.2,2280-2298).
ggaaggaacaacctgtaat

SEQ ID NO: 549059 - DNA, 19 bp, Mus musculus
  siRNA target sequence for Jag1 (NM_013822.2,2281-2299).
gaaggaacaacctgtaata

SEQ ID NO: 549060 - DNA, 19 bp, Mus musculus
  siRNA target sequence for Jag1 (NM_013822.2,2394-2412).
ctgggaggggcctatttgt

SEQ ID NO: 549061 - DNA, 19 bp, Mus musculus
  siRNA target sequence for Jag1 (NM_013822.2,2397-2415).
ggaggggcctatttgtact

SEQ ID NO: 549062 - DNA, 19 bp, Mus musculus
  siRNA target sequence for Jag1 (NM_013822.2,2400-2418).
ggggcctatttgtactcaa

SEQ ID NO: 549063 - DNA, 19 bp, Mus musculus
  siRNA target sequence for Jag1 (NM_013822.2,2401-2419).
gggcctatttgtactcaaa

SEQ ID NO: 549064 - DNA, 19 bp, Mus musculus
  siRNA target sequence for Jag1 (NM_013822.2,2432-2450).
gcagtccccatccttgtta

SEQ ID NO: 549065 - DNA, 19 bp, Mus musculus
  siRNA target sequence for Jag1 (NM_013822.2,2435-2453).
gtccccatccttgttacaa

SEQ ID NO: 549066 - DNA, 19 bp, Mus musculus
  siRNA target sequence for Jag1 (NM_013822.2,2523-2541).
ctgcaggataaacatcaat

SEQ ID NO: 549067 - DNA, 19 bp, Mus musculus
  siRNA target sequence for Jag1 (NM_013822.2,2630-2648).
gtgccaagtgccatgaagt

SEQ ID NO: 549068 - DNA, 19 bp, Mus musculus
  siRNA target sequence for Jag1 (NM_013822.2,2669-2687).
ccatggggagagtgatact

SEQ ID NO: 549069 - DNA, 19 bp, Mus musculus
  siRNA target sequence for Jag1 (NM_013822.2,2670-2688).
catggggagagtgatactt

SEQ ID NO: 549070 - DNA, 19 bp, Mus musculus
  siRNA target sequence for Jag1 (NM_013822.2,2673-2691).
ggggagagtgatacttgat

SEQ ID NO: 549071 - DNA, 19 bp, Mus musculus
  siRNA target sequence for Jag1 (NM_013822.2,2918-2936).
gcacatctgactcctatta

SEQ ID NO: 549072 - DNA, 19 bp, Mus musculus
  siRNA target sequence for Jag1 (NM_013822.2,2931-2949).
ctattaccaggataactgt

SEQ ID NO: 549073 - DNA, 19 bp, Mus musculus
  siRNA target sequence for Jag1 (NM_013822.2,2966-2984).
cctttaacaaagagatgat

SEQ ID NO: 549074 - DNA, 19 bp, Mus musculus
  siRNA target sequence for Jag1 (NM_013822.2,2995-3013).
cttaccaccgaacacattt

SEQ ID NO: 549075 - DNA, 19 bp, Mus musculus
  siRNA target sequence for Jag1 (NM_013822.2,3007-3025).
cacatttgcagcgaattga

SEQ ID NO: 549076 - DNA, 19 bp, Mus musculus
  siRNA target sequence for Jag1 (NM_013822.2,3045-3063).
gaatgtttctgctgaatat

SEQ ID NO: 549077 - DNA, 19 bp, Mus musculus
  siRNA target sequence for Jag1 (NM_013822.2,3049-3067).
gtttctgctgaatattcga

SEQ ID NO: 549078 - DNA, 19 bp, Mus musculus
  siRNA target sequence for Jag1 (NM_013822.2,3055-3073).
gctgaatattcgatctaca

SEQ ID NO: 549079 - DNA, 19 bp, Mus musculus
  siRNA target sequence for Jag1 (NM_013822.2,3056-3074).
ctgaatattcgatctacat

SEQ ID NO: 549080 - DNA, 19 bp, Mus musculus
  siRNA target sequence for Jag1 (NM_013822.2,3090-3108).
cctgtcagcaaacaatgaa

SEQ ID NO: 549081 - DNA, 19 bp, Mus musculus
  siRNA target sequence for Jag1 (NM_013822.2,3159-3177).
caaggaaattaccgataaa

SEQ ID NO: 549082 - DNA, 19 bp, Mus musculus
  siRNA target sequence for Jag1 (NM_013822.2,3162-3180).
ggaaattaccgataaaata

SEQ ID NO: 549083 - DNA, 19 bp, Mus musculus
  siRNA target sequence for Jag1 (NM_013822.2,3163-3181).
gaaattaccgataaaataa

SEQ ID NO: 549084 - DNA, 19 bp, Mus musculus
  siRNA target sequence for Jag1 (NM_013822.2,3170-3188).
ccgataaaataatagatct

SEQ ID NO: 549085 - DNA, 19 bp, Mus musculus
  siRNA target sequence for Jag1 (NM_013822.2,3471-3489).
cacggtccccattaaggat

SEQ ID NO: 549086 - DNA, 19 bp, Mus musculus
  siRNA target sequence for Jag1 (NM_013822.2,3473-3491).
cggtccccattaaggatta

SEQ ID NO: 549087 - DNA, 19 bp, Mus musculus
  siRNA target sequence for Jag1 (NM_013822.2,3498-3516).
caaaaactcgaaaatgtca

SEQ ID NO: 549088 - DNA, 19 bp, Mus musculus
  siRNA target sequence for Jag1 (NM_013822.2,3633-3651).
cagcggcacgccgacaaaa

SEQ ID NO: 549089 - DNA, 19 bp, Mus musculus
  siRNA target sequence for Jag1 (NM_013822.2,3635-3653).
gcggcacgccgacaaaaca

SEQ ID NO: 549090 - DNA, 19 bp, Mus musculus
  siRNA target sequence for Jag1 (NM_013822.2,3652-3670).
cacccgaactggacaaata

SEQ ID NO: 549091 - DNA, 19 bp, Mus musculus
  siRNA target sequence for Jag1 (NM_013822.2,3704-3722).
gcttgaaccggatggaata

SEQ ID NO: 549092 - DNA, 19 bp, Mus musculus
  siRNA target sequence for Jag1 (NM_013822.2,3712-3730).
cggatggaatacatcgtat

SEQ ID NO: 549093 - DNA, 19 bp, Mus musculus
  siRNA target sequence for Jag2 (NM_010588.1,399-417).
gtcgtcattccctttcagt

SEQ ID NO: 549094 - DNA, 19 bp, Mus musculus
  siRNA target sequence for Jag2 (NM_010588.1,511-529).
cgcacgctggcatgatcaa

SEQ ID NO: 549095 - DNA, 19 bp, Mus musculus
  siRNA target sequence for Jag2 (NM_010588.1,624-642).
gccacctgcaacaagttct

SEQ ID NO: 549096 - DNA, 19 bp, Mus musculus
  siRNA target sequence for Jag2 (NM_010588.1,730-748).
gcaaagaagccgtgtgtaa

SEQ ID NO: 549097 - DNA, 19 bp, Mus musculus
  siRNA target sequence for Jag2 (NM_010588.1,731-749).
caaagaagccgtgtgtaaa

SEQ ID NO: 549098 - DNA, 19 bp, Mus musculus
  siRNA target sequence for Jag2 (NM_010588.1,1153-1171).
cctgtgcgctcgacattga

SEQ ID NO: 549099 - DNA, 19 bp, Mus musculus
  siRNA target sequence for Jag2 (NM_010588.1,1154-1172).
ctgtgcgctcgacattgat

SEQ ID NO: 549100 - DNA, 19 bp, Mus musculus
  siRNA target sequence for Jag2 (NM_010588.1,1156-1174).
gtgcgctcgacattgatga

SEQ ID NO: 549101 - DNA, 19 bp, Mus musculus
  siRNA target sequence for Jag2 (NM_010588.1,1298-1316).
gaagccgtgccttaatgct

SEQ ID NO: 549102 - DNA, 19 bp, Mus musculus
  siRNA target sequence for Jag2 (NM_010588.1,1302-1320).
ccgtgccttaatgcttttt

SEQ ID NO: 549103 - DNA, 19 bp, Mus musculus
  siRNA target sequence for Jag2 (NM_010588.1,1332-1350).
ctgattggcggctattact

SEQ ID NO: 549104 - DNA, 19 bp, Mus musculus
  siRNA target sequence for Jag2 (NM_010588.1,1334-1352).
gattggcggctattactgt

SEQ ID NO: 549105 - DNA, 19 bp, Mus musculus
  siRNA target sequence for Jag2 (NM_010588.1,1338-1356).
ggcggctattactgtgatt

SEQ ID NO: 549106 - DNA, 19 bp, Mus musculus
  siRNA target sequence for Jag2 (NM_010588.1,1486-1504).
gtcgccattgcgaactaga

SEQ ID NO: 549107 - DNA, 19 bp, Mus musculus
  siRNA target sequence for Jag2 (NM_010588.1,1489-1507).
gccattgcgaactagagta

SEQ ID NO: 549108 - DNA, 19 bp, Mus musculus
  siRNA target sequence for Jag2 (NM_010588.1,1671-1689).
cttgagggtgactactact

SEQ ID NO: 549109 - DNA, 19 bp, Mus musculus
  siRNA target sequence for Jag2 (NM_010588.1,1811-1829).
cgcaccctctggtatatgt

SEQ ID NO: 549110 - DNA, 19 bp, Mus musculus
  siRNA target sequence for Jag2 (NM_010588.1,1854-1872).
ctgcctgggggaaacttct

SEQ ID NO: 549111 - DNA, 19 bp, Mus musculus
  siRNA target sequence for Jag2 (NM_010588.1,2177-2195).
caacggtggcacatgctat

SEQ ID NO: 549112 - DNA, 19 bp, Mus musculus
  siRNA target sequence for Jag2 (NM_010588.1,2279-2297).
gcccaatccctgtgtgaat

SEQ ID NO: 549113 - DNA, 19 bp, Mus musculus
  siRNA target sequence for Jag2 (NM_010588.1,2361-2379).
cgcacctgcacacataaca

SEQ ID NO: 549114 - DNA, 19 bp, Mus musculus
  siRNA target sequence for Jag2 (NM_010588.1,2473-2491).
gtcctgactgccgtatcaa

SEQ ID NO: 549115 - DNA, 19 bp, Mus musculus
  siRNA target sequence for Jag2 (NM_010588.1,2476-2494).
ctgactgccgtatcaacat

SEQ ID NO: 549116 - DNA, 19 bp, Mus musculus
  siRNA target sequence for Jag2 (NM_010588.1,2480-2498).
ctgccgtatcaacattgat

SEQ ID NO: 549117 - DNA, 19 bp, Mus musculus
  siRNA target sequence for Jag2 (NM_010588.1,2482-2500).
gccgtatcaacattgatga

SEQ ID NO: 549118 - DNA, 19 bp, Mus musculus
  siRNA target sequence for Jag2 (NM_010588.1,2598-2616).
caggaagtggtcatattca

SEQ ID NO: 549119 - DNA, 19 bp, Mus musculus
  siRNA target sequence for Jag2 (NM_010588.1,2697-2715).
gatggccaccgggattgta

SEQ ID NO: 549120 - DNA, 19 bp, Mus musculus
  siRNA target sequence for Jag2 (NM_010588.1,2706-2724).
cgggattgtagcaaggtat

SEQ ID NO: 549121 - DNA, 19 bp, Mus musculus
  siRNA target sequence for Jag2 (NM_010588.1,2905-2923).
gcagtcatttggacaacaa

SEQ ID NO: 549122 - DNA, 19 bp, Mus musculus
  siRNA target sequence for Jag2 (NM_010588.1,2942-2960).
gcgcttcaaccgtgatcaa

SEQ ID NO: 549123 - DNA, 19 bp, Mus musculus
  siRNA target sequence for Jag2 (NM_010588.1,2944-2962).
gcttcaaccgtgatcaagt

SEQ ID NO: 549124 - DNA, 19 bp, Mus musculus
  siRNA target sequence for Jag2 (NM_010588.1,3218-3236).
ggtcaaggtggaaacagtt

SEQ ID NO: 549125 - DNA, 19 bp, Mus musculus
  siRNA target sequence for Jag2 (NM_010588.1,3301-3319).
ggctcgcctgtgtggttat

SEQ ID NO: 549126 - DNA, 19 bp, Mus musculus
  siRNA target sequence for Jag2 (NM_010588.1,3303-3321).
ctcgcctgtgtggttatct

SEQ ID NO: 549127 - DNA, 19 bp, Mus musculus
  siRNA target sequence for Jag2 (NM_010588.1,3466-3484).
gccacaaggacatactcta

SEQ ID NO: 549128 - DNA, 19 bp, Mus musculus
  siRNA target sequence for Kcnip1 (NM_027398.2,344-362).
gccgtcatgggcactttct

SEQ ID NO: 549129 - DNA, 19 bp, Mus musculus
  siRNA target sequence for Kcnip1 (NM_027398.2,384-402).
ggcgaccctctaaagacaa

SEQ ID NO: 549130 - DNA, 19 bp, Mus musculus
  siRNA target sequence for Kcnip1 (NM_027398.2,390-408).
cctctaaagacaagattga

SEQ ID NO: 549131 - DNA, 19 bp, Mus musculus
  siRNA target sequence for Kcnip1 (NM_027398.2,464-482).
gaggcacagacgaacttca

SEQ ID NO: 549132 - DNA, 19 bp, Mus musculus
  siRNA target sequence for Kcnip1 (NM_027398.2,502-520).
cttgtaccggggattcaaa

SEQ ID NO: 549133 - DNA, 19 bp, Mus musculus
  siRNA target sequence for Kcnip1 (NM_027398.2,534-552).
gcggtgtggtcaatgaaga

SEQ ID NO: 549134 - DNA, 19 bp, Mus musculus
  siRNA target sequence for Kcnip1 (NM_027398.2,535-553).
cggtgtggtcaatgaagaa

SEQ ID NO: 549135 - DNA, 19 bp, Mus musculus
  siRNA target sequence for Kcnip1 (NM_027398.2,562-580).
gcagatctacgctcagttt

SEQ ID NO: 549136 - DNA, 19 bp, Mus musculus
  siRNA target sequence for Kcnip1 (NM_027398.2,563-581).
cagatctacgctcagtttt

SEQ ID NO: 549137 - DNA, 19 bp, Mus musculus
  siRNA target sequence for Kcnip1 (NM_027398.2,671-689).
gtgactgctctgtcgattt

SEQ ID NO: 549138 - DNA, 19 bp, Mus musculus
  siRNA target sequence for Kcnip1 (NM_027398.2,673-691).
gactgctctgtcgatttta

SEQ ID NO: 549139 - DNA, 19 bp, Mus musculus
  siRNA target sequence for Kcnip1 (NM_027398.2,677-695).
gctctgtcgattttactga

SEQ ID NO: 549140 - DNA, 19 bp, Mus musculus
  siRNA target sequence for Kcnip1 (NM_027398.2,700-718).
gacagtccatgaaaaacta

SEQ ID NO: 549141 - DNA, 19 bp, Mus musculus
  siRNA target sequence for Kcnip1 (NM_027398.2,716-734).
ctaaggtggacgtttaatt

SEQ ID NO: 549142 - DNA, 19 bp, Mus musculus
  siRNA target sequence for Kcnip1 (NM_027398.2,720-738).
ggtggacgtttaatttgta

SEQ ID NO: 549143 - DNA, 19 bp, Mus musculus
  siRNA target sequence for Kcnip1 (NM_027398.2,721-739).
gtggacgtttaatttgtat

SEQ ID NO: 549144 - DNA, 19 bp, Mus musculus
  siRNA target sequence for Kcnip1 (NM_027398.2,745-763).
caataaagacggctacata

SEQ ID NO: 549145 - DNA, 19 bp, Mus musculus
  siRNA target sequence for Kcnip1 (NM_027398.2,784-802).
catagtcaaagccatctat

SEQ ID NO: 549146 - DNA, 19 bp, Mus musculus
  siRNA target sequence for Kcnip1 (NM_027398.2,822-840).
cctatcctgtgctcaaaga

SEQ ID NO: 549147 - DNA, 19 bp, Mus musculus
  siRNA target sequence for Kcnip1 (NM_027398.2,900-918).
gcattgtaacgttagatga

SEQ ID NO: 549148 - DNA, 19 bp, Mus musculus
  siRNA target sequence for Kcnip1 (NM_027398.2,946-964).
caacatcatgagatctcta

SEQ ID NO: 549149 - DNA, 19 bp, Mus musculus
  siRNA target sequence for Kcnip2 (NM_030716.2,13-31).
ggccgaaaggagagtttgt

SEQ ID NO: 549150 - DNA, 19 bp, Mus musculus
  siRNA target sequence for Kcnip2 (NM_030716.2,32-50).
ccgaatcccgagatttgga

SEQ ID NO: 549151 - DNA, 19 bp, Mus musculus
  siRNA target sequence for Kcnip2 (NM_030716.2,78-96).
ccctccagggcccagtaaa

SEQ ID NO: 549152 - DNA, 19 bp, Mus musculus
  siRNA target sequence for Kcnip2 (NM_030716.2,215-233).
ctgagggtctggaacaact

SEQ ID NO: 549153 - DNA, 19 bp, Mus musculus
  siRNA target sequence for Kcnip2 (NM_030716.2,299-317).
gtcccagcggaattgtcaa

SEQ ID NO: 549154 - DNA, 19 bp, Mus musculus
  siRNA target sequence for Kcnip2 (NM_030716.2,313-331).
gtcaacgaggagaacttca

SEQ ID NO: 549155 - DNA, 19 bp, Mus musculus
  siRNA target sequence for Kcnip2 (NM_030716.2,324-342).
gaacttcaagcaaatttat

SEQ ID NO: 549156 - DNA, 19 bp, Mus musculus
  siRNA target sequence for Kcnip2 (NM_030716.2,369-387).
cagcaactacgctactttt

SEQ ID NO: 549157 - DNA, 19 bp, Mus musculus
  siRNA target sequence for Kcnip2 (NM_030716.2,371-389).
gcaactacgctacttttct

SEQ ID NO: 549158 - DNA, 19 bp, Mus musculus
  siRNA target sequence for Kcnip2 (NM_030716.2,378-396).
cgctacttttctcttcaat

SEQ ID NO: 549159 - DNA, 19 bp, Mus musculus
  siRNA target sequence for Kcnip2 (NM_030716.2,444-462).
ggctggtttgtcagtgatt

SEQ ID NO: 549160 - DNA, 19 bp, Mus musculus
  siRNA target sequence for Kcnip2 (NM_030716.2,459-477).
gattcttcggggaaccata

SEQ ID NO: 549161 - DNA, 19 bp, Mus musculus
  siRNA target sequence for Kcnip2 (NM_030716.2,466-484).
cggggaaccatagatgata

SEQ ID NO: 549162 - DNA, 19 bp, Mus musculus
  siRNA target sequence for Kcnip2 (NM_030716.2,470-488).
gaaccatagatgatagact

SEQ ID NO: 549163 - DNA, 19 bp, Mus musculus
  siRNA target sequence for Kcnip2 (NM_030716.2,530-548).
gtatcacgaaggaggaaat

SEQ ID NO: 549164 - DNA, 19 bp, Mus musculus
  siRNA target sequence for Kcnip4 (NM_030265.2,270-288).
ctctacgcgcagaacaaca

SEQ ID NO: 549165 - DNA, 19 bp, Mus musculus
  siRNA target sequence for Kcnip4 (NM_030265.2,346-364).
cgtcgtctcctgctattca

SEQ ID NO: 549166 - DNA, 19 bp, Mus musculus
  siRNA target sequence for Kcnip4 (NM_030265.2,347-365).
gtcgtctcctgctattcaa

SEQ ID NO: 549167 - DNA, 19 bp, Mus musculus
  siRNA target sequence for Kcnip4 (NM_030265.2,349-367).
cgtctcctgctattcaaaa

SEQ ID NO: 549168 - DNA, 19 bp, Mus musculus
  siRNA target sequence for Kcnip4 (NM_030265.2,429-447).
ctggaggcccagagcaaat

SEQ ID NO: 549169 - DNA, 19 bp, Mus musculus
  siRNA target sequence for Kcnip4 (NM_030265.2,459-477).
gagcttcagattctttaca

SEQ ID NO: 549170 - DNA, 19 bp, Mus musculus
  siRNA target sequence for Kcnip4 (NM_030265.2,496-514).
gccccagtggtgttgttaa

SEQ ID NO: 549171 - DNA, 19 bp, Mus musculus
  siRNA target sequence for Kcnip4 (NM_030265.2,663-681).
cgagggacagtacaagaaa

SEQ ID NO: 549172 - DNA, 19 bp, Mus musculus
  siRNA target sequence for Kcnip4 (NM_030265.2,670-688).
cagtacaagaaaaactcaa

SEQ ID NO: 549173 - DNA, 19 bp, Mus musculus
  siRNA target sequence for Kcnip4 (NM_030265.2,684-702).
ctcaactgggcatttaatt

SEQ ID NO: 549174 - DNA, 19 bp, Mus musculus
  siRNA target sequence for Kcnip4 (NM_030265.2,868-886).
gtgtcgttaccatagatga

SEQ ID NO: 549175 - DNA, 19 bp, Mus musculus
  siRNA target sequence for Kcnip4 (NM_030265.2,877-895).
ccatagatgagttcattga

SEQ ID NO: 549176 - DNA, 19 bp, Mus musculus
  siRNA target sequence for Kcnip4 (NM_030265.2,878-896).
catagatgagttcattgaa

SEQ ID NO: 549177 - DNA, 19 bp, Mus musculus
  siRNA target sequence for Kcnip4 (NM_030265.2,882-900).
gatgagttcattgaaagtt

SEQ ID NO: 549178 - DNA, 19 bp, Mus musculus
  siRNA target sequence for Lalba (NM_010679.1,51-69).
gtcgttgcctgcctttcaa

SEQ ID NO: 549179 - DNA, 19 bp, Mus musculus
  siRNA target sequence for Lalba (NM_010679.1,74-92).
cagagcttacaaaatgcaa

SEQ ID NO: 549180 - DNA, 19 bp, Mus musculus
  siRNA target sequence for Lalba (NM_010679.1,122-140).
gctatcaaggcatctcttt

SEQ ID NO: 549181 - DNA, 19 bp, Mus musculus
  siRNA target sequence for Lalba (NM_010679.1,130-148).
ggcatctctttgcttgaat

SEQ ID NO: 549182 - DNA, 19 bp, Mus musculus
  siRNA target sequence for Lamb2 (NM_008483.2,105-123).
cgcttgggcctacttctaa

SEQ ID NO: 549183 - DNA, 19 bp, Mus musculus
  siRNA target sequence for Lamb2 (NM_008483.2,265-283).
gccctcaaccctactgtat

SEQ ID NO: 549184 - DNA, 19 bp, Mus musculus
  siRNA target sequence for Lamb2 (NM_008483.2,270-288).
caaccctactgtattgtca

SEQ ID NO: 549185 - DNA, 19 bp, Mus musculus
  siRNA target sequence for Lamb2 (NM_008483.2,297-315).
caggacgaaaagaagtgtt

SEQ ID NO: 549186 - DNA, 19 bp, Mus musculus
  siRNA target sequence for Lamb2 (NM_008483.2,345-363).
gctcgagacaacccaaata

SEQ ID NO: 549187 - DNA, 19 bp, Mus musculus
  siRNA target sequence for Lamb2 (NM_008483.2,427-445).
cggagaacggggttccaat

SEQ ID NO: 549188 - DNA, 19 bp, Mus musculus
  siRNA target sequence for Lamb2 (NM_008483.2,464-482).
cctggaagctgagtttcat

SEQ ID NO: 549189 - DNA, 19 bp, Mus musculus
  siRNA target sequence for Lamb2 (NM_008483.2,465-483).
ctggaagctgagtttcatt

SEQ ID NO: 549190 - DNA, 19 bp, Mus musculus
  siRNA target sequence for Lamb2 (NM_008483.2,565-583).
ggcacgtgtaccgatattt

SEQ ID NO: 549191 - DNA, 19 bp, Mus musculus
  siRNA target sequence for Lamb2 (NM_008483.2,566-584).
gcacgtgtaccgatatttt

SEQ ID NO: 549192 - DNA, 19 bp, Mus musculus
  siRNA target sequence for Lamb2 (NM_008483.2,567-585).
cacgtgtaccgatattttt

SEQ ID NO: 549193 - DNA, 19 bp, Mus musculus
  siRNA target sequence for Lamb2 (NM_008483.2,631-649).
cacgtcgctgggatgatgt

SEQ ID NO: 549194 - DNA, 19 bp, Mus musculus
  siRNA target sequence for Lamb2 (NM_008483.2,634-652).
gtcgctgggatgatgtagt

SEQ ID NO: 549195 - DNA, 19 bp, Mus musculus
  siRNA target sequence for Lamb2 (NM_008483.2,657-675).
gagtcccgctactcagaaa

SEQ ID NO: 549196 - DNA, 19 bp, Mus musculus
  siRNA target sequence for Lamb2 (NM_008483.2,661-679).
cccgctactcagaaatcga

SEQ ID NO: 549197 - DNA, 19 bp, Mus musculus
  siRNA target sequence for Lamb2 (NM_008483.2,688-706).
cggaaggcgaggtcatcta

SEQ ID NO: 549198 - DNA, 19 bp, Mus musculus
  siRNA target sequence for Lamb2 (NM_008483.2,689-707).
ggaaggcgaggtcatctat

SEQ ID NO: 549199 - DNA, 19 bp, Mus musculus
  siRNA target sequence for Lamb2 (NM_008483.2,713-731).
gctggaccctgctattcct

SEQ ID NO: 549200 - DNA, 19 bp, Mus musculus
  siRNA target sequence for Lamb2 (NM_008483.2,779-797).
caacctacgagtgaactta

SEQ ID NO: 549201 - DNA, 19 bp, Mus musculus
  siRNA target sequence for Lamb2 (NM_008483.2,841-859).
gggagatccgggaaaaata

SEQ ID NO: 549202 - DNA, 19 bp, Mus musculus
  siRNA target sequence for Lamb2 (NM_008483.2,845-863).
gatccgggaaaaatactat

SEQ ID NO: 549203 - DNA, 19 bp, Mus musculus
  siRNA target sequence for Lamb2 (NM_008483.2,851-869).
ggaaaaatactattatgct

SEQ ID NO: 549204 - DNA, 19 bp, Mus musculus
  siRNA target sequence for Lamb2 (NM_008483.2,868-886).
ctctctatgaacttgtcat

SEQ ID NO: 549205 - DNA, 19 bp, Mus musculus
  siRNA target sequence for Lamb2 (NM_008483.2,1057-1075).
cagaggacggccatactca

SEQ ID NO: 549206 - DNA, 19 bp, Mus musculus
  siRNA target sequence for Lamb2 (NM_008483.2,1094-1112).
gtgcaacgggcatactcat

SEQ ID NO: 549207 - DNA, 19 bp, Mus musculus
  siRNA target sequence for Lamb2 (NM_008483.2,1110-1128).
catagctgccactttgaca

SEQ ID NO: 549208 - DNA, 19 bp, Mus musculus
  siRNA target sequence for Lamb2 (NM_008483.2,1136-1154).
ctacctggcatctggaaat

SEQ ID NO: 549209 - DNA, 19 bp, Mus musculus
  siRNA target sequence for Lamb2 (NM_008483.2,1289-1307).
ccctatgggttctcaagat

SEQ ID NO: 549210 - DNA, 19 bp, Mus musculus
  siRNA target sequence for Lamb2 (NM_008483.2,1309-1327).
gtggtcgctgtgattctca

SEQ ID NO: 549211 - DNA, 19 bp, Mus musculus
  siRNA target sequence for Lamb2 (NM_008483.2,1358-1376).
ccagtgtcgctgcaaagaa

SEQ ID NO: 549212 - DNA, 19 bp, Mus musculus
  siRNA target sequence for Lamb2 (NM_008483.2,1452-1470).
cagcgttgccagtgtaatt

SEQ ID NO: 549213 - DNA, 19 bp, Mus musculus
  siRNA target sequence for Lamb2 (NM_008483.2,1454-1472).
gcgttgccagtgtaattca

SEQ ID NO: 549214 - DNA, 19 bp, Mus musculus
  siRNA target sequence for Lamb2 (NM_008483.2,1675-1693).
gctgccgccaacacatgat

SEQ ID NO: 549215 - DNA, 19 bp, Mus musculus
  siRNA target sequence for Lamb2 (NM_008483.2,1676-1694).
ctgccgccaacacatgatt

SEQ ID NO: 549216 - DNA, 19 bp, Mus musculus
  siRNA target sequence for Lamb2 (NM_008483.2,1897-1915).
ctagggccatggactatga

SEQ ID NO: 549217 - DNA, 19 bp, Mus musculus
  siRNA target sequence for Lamb2 (NM_008483.2,2059-2077).
caaacaccaggtttttggt

SEQ ID NO: 549218 - DNA, 19 bp, Mus musculus
  siRNA target sequence for Lamb2 (NM_008483.2,2171-2189).
ctactctggattactcatt

SEQ ID NO: 549219 - DNA, 19 bp, Mus musculus
  siRNA target sequence for Lamb2 (NM_008483.2,2219-2237).
ggtgctagagatgtttagt

SEQ ID NO: 549220 - DNA, 19 bp, Mus musculus
  siRNA target sequence for Lamb2 (NM_008483.2,2261-2279).
gcgccgtaccacctttgaa

SEQ ID NO: 549221 - DNA, 19 bp, Mus musculus
  siRNA target sequence for Lamb2 (NM_008483.2,2314-2332).
gcaaggcccctctatctga

SEQ ID NO: 549222 - DNA, 19 bp, Mus musculus
  siRNA target sequence for Lamb2 (NM_008483.2,2356-2374).
gcgtgtccgccttgatcta

SEQ ID NO: 549223 - DNA, 19 bp, Mus musculus
  siRNA target sequence for Lamb2 (NM_008483.2,2358-2376).
gtgtccgccttgatctaca

SEQ ID NO: 549224 - DNA, 19 bp, Mus musculus
  siRNA target sequence for Lamb2 (NM_008483.2,2360-2378).
gtccgccttgatctacaat

SEQ ID NO: 549225 - DNA, 19 bp, Mus musculus
  siRNA target sequence for Lamb2 (NM_008483.2,2468-2486).
ggttggacgccgttgtgat

SEQ ID NO: 549226 - DNA, 19 bp, Mus musculus
  siRNA target sequence for Lamb2 (NM_008483.2,2646-2664).
cagtggggattccctaatt

SEQ ID NO: 549227 - DNA, 19 bp, Mus musculus
  siRNA target sequence for Lamb2 (NM_008483.2,2688-2706).
cgtgcggatgagtgtgata

SEQ ID NO: 549228 - DNA, 19 bp, Mus musculus
  siRNA target sequence for Lamb2 (NM_008483.2,2869-2887).
cttgccaccgggatggata

SEQ ID NO: 549229 - DNA, 19 bp, Mus musculus
  siRNA target sequence for Lamb2 (NM_008483.2,2884-2902).
gatattcccagcaaattgt

SEQ ID NO: 549230 - DNA, 19 bp, Mus musculus
  siRNA target sequence for Lamb2 (NM_008483.2,3001-3019).
gtgagtgcagtggaaacat

SEQ ID NO: 549231 - DNA, 19 bp, Mus musculus
  siRNA target sequence for Lamb2 (NM_008483.2,3005-3023).
gtgcagtggaaacattgat

SEQ ID NO: 549232 - DNA, 19 bp, Mus musculus
  siRNA target sequence for Lamb2 (NM_008483.2,3049-3067).
cccacacggggcaatgctt

SEQ ID NO: 549233 - DNA, 19 bp, Mus musculus
  siRNA target sequence for Lamb2 (NM_008483.2,3058-3076).
ggcaatgcttgcgttgttt

SEQ ID NO: 549234 - DNA, 19 bp, Mus musculus
  siRNA target sequence for Lamb2 (NM_008483.2,3059-3077).
gcaatgcttgcgttgttta

SEQ ID NO: 549235 - DNA, 19 bp, Mus musculus
  siRNA target sequence for Lamb2 (NM_008483.2,3064-3082).
gcttgcgttgtttacacaa

SEQ ID NO: 549236 - DNA, 19 bp, Mus musculus
  siRNA target sequence for Lamb2 (NM_008483.2,3094-3112).
cccactgtggctattgcaa

SEQ ID NO: 549237 - DNA, 19 bp, Mus musculus
  siRNA target sequence for Lamb2 (NM_008483.2,3202-3220).
ccgacctgtgccattgtga

SEQ ID NO: 549238 - DNA, 19 bp, Mus musculus
  siRNA target sequence for Lamb2 (NM_008483.2,3280-3298).
gtgcccccaacttttggaa

SEQ ID NO: 549239 - DNA, 19 bp, Mus musculus
  siRNA target sequence for Lamb2 (NM_008483.2,3354-3372).
ggccctacctgcaatgagt

SEQ ID NO: 549240 - DNA, 19 bp, Mus musculus
  siRNA target sequence for Lamb2 (NM_008483.2,3355-3373).
gccctacctgcaatgagtt

SEQ ID NO: 549241 - DNA, 19 bp, Mus musculus
  siRNA target sequence for Lamb2 (NM_008483.2,3476-3494).
ctgtgatcctagaggaata

SEQ ID NO: 549242 - DNA, 19 bp, Mus musculus
  siRNA target sequence for Lamb2 (NM_008483.2,3480-3498).
gatcctagaggaatagaca

SEQ ID NO: 549243 - DNA, 19 bp, Mus musculus
  siRNA target sequence for Lamb2 (NM_008483.2,3764-3782).
ggtgcaggccattatgagt

SEQ ID NO: 549244 - DNA, 19 bp, Mus musculus
  siRNA target sequence for Lamb2 (NM_008483.2,3805-3823).
ctacggcgaagcttgtaga

SEQ ID NO: 549245 - DNA, 19 bp, Mus musculus
  siRNA target sequence for Lamb2 (NM_008483.2,3954-3972).
gggcttgcgcttaatctca

SEQ ID NO: 549246 - DNA, 19 bp, Mus musculus
  siRNA target sequence for Lamb2 (NM_008483.2,3998-4016).
ggagatcctcaaacattca

SEQ ID NO: 549247 - DNA, 19 bp, Mus musculus
  siRNA target sequence for Lamb2 (NM_008483.2,3999-4017).
gagatcctcaaacattcaa

SEQ ID NO: 549248 - DNA, 19 bp, Mus musculus
  siRNA target sequence for Lamb2 (NM_008483.2,4001-4019).
gatcctcaaacattcaaat

SEQ ID NO: 549249 - DNA, 19 bp, Mus musculus
  siRNA target sequence for Lamb2 (NM_008483.2,4141-4159).
gtcggacggaagtgctaat

SEQ ID NO: 549250 - DNA, 19 bp, Mus musculus
  siRNA target sequence for Lamb2 (NM_008483.2,4154-4172).
gctaatgggtgcccaaaaa

SEQ ID NO: 549251 - DNA, 19 bp, Mus musculus
  siRNA target sequence for Lamb2 (NM_008483.2,4161-4179).
ggtgcccaaaaagaaaact

SEQ ID NO: 549252 - DNA, 19 bp, Mus musculus
  siRNA target sequence for Lamb2 (NM_008483.2,4162-4180).
gtgcccaaaaagaaaactt

SEQ ID NO: 549253 - DNA, 19 bp, Mus musculus
  siRNA target sequence for Lamb2 (NM_008483.2,4244-4262).
gagcctgacgggcataaat

SEQ ID NO: 549254 - DNA, 19 bp, Mus musculus
  siRNA target sequence for Lamb2 (NM_008483.2,4246-4264).
gcctgacgggcataaatga

SEQ ID NO: 549255 - DNA, 19 bp, Mus musculus
  siRNA target sequence for Lamb2 (NM_008483.2,4321-4339).
ccggatgtcgggatgaaga

SEQ ID NO: 549256 - DNA, 19 bp, Mus musculus
  siRNA target sequence for Lamb2 (NM_008483.2,4322-4340).
cggatgtcgggatgaagat

SEQ ID NO: 549257 - DNA, 19 bp, Mus musculus
  siRNA target sequence for Lamb2 (NM_008483.2,4572-4590).
caggagcttcgagaactta

SEQ ID NO: 549258 - DNA, 19 bp, Mus musculus
  siRNA target sequence for Lamb2 (NM_008483.2,4582-4600).
gagaacttatccagaatgt

SEQ ID NO: 549259 - DNA, 19 bp, Mus musculus
  siRNA target sequence for Lamb2 (NM_008483.2,4584-4602).
gaacttatccagaatgtga

SEQ ID NO: 549260 - DNA, 19 bp, Mus musculus
  siRNA target sequence for Lamb2 (NM_008483.2,4624-4642).
gagccgatcctgacagtat

SEQ ID NO: 549261 - DNA, 19 bp, Mus musculus
  siRNA target sequence for Lamb2 (NM_008483.2,4627-4645).
ccgatcctgacagtattga

SEQ ID NO: 549262 - DNA, 19 bp, Mus musculus
  siRNA target sequence for Lamb2 (NM_008483.2,4628-4646).
cgatcctgacagtattgaa

SEQ ID NO: 549263 - DNA, 19 bp, Mus musculus
  siRNA target sequence for Lamb2 (NM_008483.2,4633-4651).
ctgacagtattgaaatggt

SEQ ID NO: 549264 - DNA, 19 bp, Mus musculus
  siRNA target sequence for Lamb2 (NM_008483.2,4654-4672).
cgactcgggtgctagacat

SEQ ID NO: 549265 - DNA, 19 bp, Mus musculus
  siRNA target sequence for Lamb2 (NM_008483.2,4703-4721).
gcgcctagccagtgagatt

SEQ ID NO: 549266 - DNA, 19 bp, Mus musculus
  siRNA target sequence for Lamb2 (NM_008483.2,5058-5076).
ctgaaacgggcaggaaata

SEQ ID NO: 549267 - DNA, 19 bp, Mus musculus
  siRNA target sequence for Lamb2 (NM_008483.2,5160-5178).
gtaggtgaccaataccaaa

SEQ ID NO: 549268 - DNA, 19 bp, Mus musculus
  siRNA target sequence for Lamb2 (NM_008483.2,5164-5182).
gtgaccaataccaaacagt

SEQ ID NO: 549269 - DNA, 19 bp, Mus musculus
  siRNA target sequence for Lamb2 (NM_008483.2,5303-5321).
ggagctggagggcacatat

SEQ ID NO: 549270 - DNA, 19 bp, Mus musculus
  siRNA target sequence for Letm1 (NM_019694.1,390-408).
ggcaccgcagcaagaacaa

SEQ ID NO: 549271 - DNA, 19 bp, Mus musculus
  siRNA target sequence for Letm1 (NM_019694.1,392-410).
caccgcagcaagaacaaca

SEQ ID NO: 549272 - DNA, 19 bp, Mus musculus
  siRNA target sequence for Letm1 (NM_019694.1,798-816).
gtggtgcccttcatggaat

SEQ ID NO: 549273 - DNA, 19 bp, Mus musculus
  siRNA target sequence for Letm1 (NM_019694.1,987-1005).
gggaatgccaccaaagatt

SEQ ID NO: 549274 - DNA, 19 bp, Mus musculus
  siRNA target sequence for Letm1 (NM_019694.1,988-1006).
ggaatgccaccaaagattt

SEQ ID NO: 549275 - DNA, 19 bp, Mus musculus
  siRNA target sequence for Letm1 (NM_019694.1,1048-1066).
ccagcaatgaggaaatcat

SEQ ID NO: 549276 - DNA, 19 bp, Mus musculus
  siRNA target sequence for Letm1 (NM_019694.1,1059-1077).
gaaatcatgcgtttttcca

SEQ ID NO: 549277 - DNA, 19 bp, Mus musculus
  siRNA target sequence for Letm1 (NM_019694.1,1067-1085).
gcgtttttccaaactgttt

SEQ ID NO: 549278 - DNA, 19 bp, Mus musculus
  siRNA target sequence for Letm1 (NM_019694.1,1208-1226).
gtccataaaggctgatgat

SEQ ID NO: 549279 - DNA, 19 bp, Mus musculus
  siRNA target sequence for Letm1 (NM_019694.1,1248-1266).
gtggacagtctgactgtaa

SEQ ID NO: 549280 - DNA, 19 bp, Mus musculus
  siRNA target sequence for Letm1 (NM_019694.1,1371-1389).
cacgagatccccacatcat

SEQ ID NO: 549281 - DNA, 19 bp, Mus musculus
  siRNA target sequence for Letm1 (NM_019694.1,1511-1529).
ggtggagggcgaaaaggta

SEQ ID NO: 549282 - DNA, 19 bp, Mus musculus
  siRNA target sequence for Letm1 (NM_019694.1,1519-1537).
gcgaaaaggtagacaacaa

SEQ ID NO: 549283 - DNA, 19 bp, Mus musculus
  siRNA target sequence for Letm1 (NM_019694.1,1893-1911).
gacttacaggagatcaaga

SEQ ID NO: 549284 - DNA, 19 bp, Mus musculus
  siRNA target sequence for Letm1 (NM_019694.1,1904-1922).
gatcaagaaggaactttca

SEQ ID NO: 549285 - DNA, 19 bp, Mus musculus
  siRNA target sequence for Letm1 (NM_019694.1,1928-1946).
gggtgaggagaagtacata

SEQ ID NO: 549286 - DNA, 19 bp, Mus musculus
  siRNA target sequence for Letm1 (NM_019694.1,1935-1953).
gagaagtacatagaagaat

SEQ ID NO: 549287 - DNA, 19 bp, Mus musculus
  siRNA target sequence for Letm1 (NM_019694.1,2113-2131).
gcgccatgaagcaaatcaa

SEQ ID NO: 549288 - DNA, 19 bp, Mus musculus
  siRNA target sequence for Letm1 (NM_019694.1,2167-2185).
cagccctggatgataataa

SEQ ID NO: 549289 - DNA, 19 bp, Mus musculus
  siRNA target sequence for Letm1 (NM_019694.1,2241-2259).
gaagatgttcagatctcta

SEQ ID NO: 549290 - DNA, 19 bp, Mus musculus
  siRNA target sequence for Letm1 (NM_019694.1,2260-2278).
ccacccaggtagctgaaat

SEQ ID NO: 549291 - DNA, 19 bp, Mus musculus
  siRNA target sequence for Letm1 (NM_019694.1,2261-2279).
cacccaggtagctgaaatt

SEQ ID NO: 549292 - DNA, 19 bp, Mus musculus
  siRNA target sequence for Letm1 (NM_019694.1,2263-2281).
cccaggtagctgaaattgt

SEQ ID NO: 549293 - DNA, 19 bp, Mus musculus
  siRNA target sequence for Lrp1 (NM_008512.1,553-571).
caaatcacctgtatctcaa

SEQ ID NO: 549294 - DNA, 19 bp, Mus musculus
  siRNA target sequence for Lrp1 (NM_008512.1,579-597).
gcggtgtgacggtgaaaga

SEQ ID NO: 549295 - DNA, 19 bp, Mus musculus
  siRNA target sequence for Lrp1 (NM_008512.1,581-599).
ggtgtgacggtgaaagaga

SEQ ID NO: 549296 - DNA, 19 bp, Mus musculus
  siRNA target sequence for Lrp1 (NM_008512.1,582-600).
gtgtgacggtgaaagagat

SEQ ID NO: 549297 - DNA, 19 bp, Mus musculus
  siRNA target sequence for Lrp1 (NM_008512.1,772-790).
gagctccgagccaactgtt

SEQ ID NO: 549298 - DNA, 19 bp, Mus musculus
  siRNA target sequence for Lrp1 (NM_008512.1,832-850).
gggcccacgtgctactgta

SEQ ID NO: 549299 - DNA, 19 bp, Mus musculus
  siRNA target sequence for Lrp1 (NM_008512.1,833-851).
ggcccacgtgctactgtaa

SEQ ID NO: 549300 - DNA, 19 bp, Mus musculus
  siRNA target sequence for Lrp1 (NM_008512.1,835-853).
cccacgtgctactgtaaca

SEQ ID NO: 549301 - DNA, 19 bp, Mus musculus
  siRNA target sequence for Lrp1 (NM_008512.1,877-895).
ggcaagacgtgcaaagatt

SEQ ID NO: 549302 - DNA, 19 bp, Mus musculus
  siRNA target sequence for Lrp1 (NM_008512.1,1249-1267).
gatgagcataccatcaaca

SEQ ID NO: 549303 - DNA, 19 bp, Mus musculus
  siRNA target sequence for Lrp1 (NM_008512.1,1312-1330).
ctgacgggaaacttctact

SEQ ID NO: 549304 - DNA, 19 bp, Mus musculus
  siRNA target sequence for Lrp1 (NM_008512.1,1341-1359).
cattgacgacaggatcttt

SEQ ID NO: 549305 - DNA, 19 bp, Mus musculus
  siRNA target sequence for Lrp1 (NM_008512.1,1345-1363).
gacgacaggatctttgtct

SEQ ID NO: 549306 - DNA, 19 bp, Mus musculus
  siRNA target sequence for Lrp1 (NM_008512.1,1595-1613).
cggacgcctacctagacta

SEQ ID NO: 549307 - DNA, 19 bp, Mus musculus
  siRNA target sequence for Lrp1 (NM_008512.1,1696-1714).
gtgtttgagaactatctct

SEQ ID NO: 549308 - DNA, 19 bp, Mus musculus
  siRNA target sequence for Lrp1 (NM_008512.1,1819-1837).
ggtggtgccctgcatatct

SEQ ID NO: 549309 - DNA, 19 bp, Mus musculus
  siRNA target sequence for Lrp1 (NM_008512.1,1820-1838).
gtggtgccctgcatatcta

SEQ ID NO: 549310 - DNA, 19 bp, Mus musculus
  siRNA target sequence for Lrp1 (NM_008512.1,1866-1884).
gagtcacgcctgtgagaat

SEQ ID NO: 549311 - DNA, 19 bp, Mus musculus
  siRNA target sequence for Lrp1 (NM_008512.1,1868-1886).
gtcacgcctgtgagaatga

SEQ ID NO: 549312 - DNA, 19 bp, Mus musculus
  siRNA target sequence for Lrp1 (NM_008512.1,2040-2058).
gggccgaccaggcatcatt

SEQ ID NO: 549313 - DNA, 19 bp, Mus musculus
  siRNA target sequence for Lrp1 (NM_008512.1,2041-2059).
ggccgaccaggcatcatta

SEQ ID NO: 549314 - DNA, 19 bp, Mus musculus
  siRNA target sequence for Lrp1 (NM_008512.1,2043-2061).
ccgaccaggcatcattaga

SEQ ID NO: 549315 - DNA, 19 bp, Mus musculus
  siRNA target sequence for Lrp1 (NM_008512.1,2104-2122).
cccatcgagaaccttatga

SEQ ID NO: 549316 - DNA, 19 bp, Mus musculus
  siRNA target sequence for Lrp1 (NM_008512.1,2105-2123).
ccatcgagaaccttatgaa

SEQ ID NO: 549317 - DNA, 19 bp, Mus musculus
  siRNA target sequence for Lrp1 (NM_008512.1,2146-2164).
gccgagaccggcttcatct

SEQ ID NO: 549318 - DNA, 19 bp, Mus musculus
  siRNA target sequence for Lrp1 (NM_008512.1,2147-2165).
ccgagaccggcttcatcta

SEQ ID NO: 549319 - DNA, 19 bp, Mus musculus
  siRNA target sequence for Lrp1 (NM_008512.1,2213-2231).
gcacggagagagagactat

SEQ ID NO: 549320 - DNA, 19 bp, Mus musculus
  siRNA target sequence for Lrp1 (NM_008512.1,2271-2289).
ggactggatgggagacaat

SEQ ID NO: 549321 - DNA, 19 bp, Mus musculus
  siRNA target sequence for Lrp1 (NM_008512.1,2276-2294).
ggatgggagacaatcttta

SEQ ID NO: 549322 - DNA, 19 bp, Mus musculus
  siRNA target sequence for Lrp1 (NM_008512.1,2310-2328).
ccccaagaagaccattagt

SEQ ID NO: 549323 - DNA, 19 bp, Mus musculus
  siRNA target sequence for Lrp1 (NM_008512.1,2353-2371).
cagacccggaagactctaa

SEQ ID NO: 549324 - DNA, 19 bp, Mus musculus
  siRNA target sequence for Lrp1 (NM_008512.1,2357-2375).
cccggaagactctaattga

SEQ ID NO: 549325 - DNA, 19 bp, Mus musculus
  siRNA target sequence for Lrp1 (NM_008512.1,2368-2386).
ctaattgagggcaagatga

SEQ ID NO: 549326 - DNA, 19 bp, Mus musculus
  siRNA target sequence for Lrp1 (NM_008512.1,2416-2434).
ctcaatgggtggatgtact

SEQ ID NO: 549327 - DNA, 19 bp, Mus musculus
  siRNA target sequence for Lrp1 (NM_008512.1,2500-2518).
ggctcacaccgagatatct

SEQ ID NO: 549328 - DNA, 19 bp, Mus musculus
  siRNA target sequence for Lrp1 (NM_008512.1,2501-2519).
gctcacaccgagatatctt

SEQ ID NO: 549329 - DNA, 19 bp, Mus musculus
  siRNA target sequence for Lrp1 (NM_008512.1,2502-2520).
ctcacaccgagatatcttt

SEQ ID NO: 549330 - DNA, 19 bp, Mus musculus
  siRNA target sequence for Lrp1 (NM_008512.1,2504-2522).
cacaccgagatatctttgt

SEQ ID NO: 549331 - DNA, 19 bp, Mus musculus
  siRNA target sequence for Lrp1 (NM_008512.1,2597-2615).
ccttctatgaccgaattga

SEQ ID NO: 549332 - DNA, 19 bp, Mus musculus
  siRNA target sequence for Lrp1 (NM_008512.1,2634-2652).
cacagaccggaagattgta

SEQ ID NO: 549333 - DNA, 19 bp, Mus musculus
  siRNA target sequence for Lrp1 (NM_008512.1,2636-2654).
cagaccggaagattgtata

SEQ ID NO: 549334 - DNA, 19 bp, Mus musculus
  siRNA target sequence for Lrp1 (NM_008512.1,2795-2813).
gcgagagaccgcctatctt

SEQ ID NO: 549335 - DNA, 19 bp, Mus musculus
  siRNA target sequence for Lrp1 (NM_008512.1,2856-2874).
caacaaatgccgggtaaat

SEQ ID NO: 549336 - DNA, 19 bp, Mus musculus
  siRNA target sequence for Lrp1 (NM_008512.1,3128-3146).
gtccctcggaccgattcaa

SEQ ID NO: 549337 - DNA, 19 bp, Mus musculus
  siRNA target sequence for Lrp1 (NM_008512.1,3130-3148).
ccctcggaccgattcaagt

SEQ ID NO: 549338 - DNA, 19 bp, Mus musculus
  siRNA target sequence for Lrp1 (NM_008512.1,3210-3228).
cagcgaggacgaatccaat

SEQ ID NO: 549339 - DNA, 19 bp, Mus musculus
  siRNA target sequence for Lrp1 (NM_008512.1,3282-3300).
ccgatgcattcctatctca

SEQ ID NO: 549340 - DNA, 19 bp, Mus musculus
  siRNA target sequence for Lrp1 (NM_008512.1,3403-3421).
ggcagatgtattaacatca

SEQ ID NO: 549341 - DNA, 19 bp, Mus musculus
  siRNA target sequence for Lrp1 (NM_008512.1,3404-3422).
gcagatgtattaacatcaa

SEQ ID NO: 549342 - DNA, 19 bp, Mus musculus
  siRNA target sequence for Lrp1 (NM_008512.1,3626-3644).
gctgccactcggatgagtt

SEQ ID NO: 549343 - DNA, 19 bp, Mus musculus
  siRNA target sequence for Lrp1 (NM_008512.1,3736-3754).
gagggcgtgacccatgttt

SEQ ID NO: 549344 - DNA, 19 bp, Mus musculus
  siRNA target sequence for Lrp1 (NM_008512.1,3738-3756).
gggcgtgacccatgtttgt

SEQ ID NO: 549345 - DNA, 19 bp, Mus musculus
  siRNA target sequence for Lrp1 (NM_008512.1,3740-3758).
gcgtgacccatgtttgtga

SEQ ID NO: 549346 - DNA, 19 bp, Mus musculus
  siRNA target sequence for Lrp1 (NM_008512.1,3751-3769).
gtttgtgacccgaatgtca

SEQ ID NO: 549347 - DNA, 19 bp, Mus musculus
  siRNA target sequence for Lrp1 (NM_008512.1,3755-3773).
gtgacccgaatgtcaagtt

SEQ ID NO: 549348 - DNA, 19 bp, Mus musculus
  siRNA target sequence for Lrp1 (NM_008512.1,3993-4011).
ccagtgttctctgaataat

SEQ ID NO: 549349 - DNA, 19 bp, Mus musculus
  siRNA target sequence for Lrp1 (NM_008512.1,4324-4342).
cctggcctgcgcaacacta

SEQ ID NO: 549350 - DNA, 19 bp, Mus musculus
  siRNA target sequence for Lrp1 (NM_008512.1,4325-4343).
ctggcctgcgcaacactat

SEQ ID NO: 549351 - DNA, 19 bp, Mus musculus
  siRNA target sequence for Lrp1 (NM_008512.1,4630-4648).
cctcgggatgggattctgt

SEQ ID NO: 549352 - DNA, 19 bp, Mus musculus
  siRNA target sequence for Lrp1 (NM_008512.1,4757-4775).
ggctcaccgtggattacct

SEQ ID NO: 549353 - DNA, 19 bp, Mus musculus
  siRNA target sequence for Lrp1 (NM_008512.1,4782-4800).
gcgcatcctctggattgat

SEQ ID NO: 549354 - DNA, 19 bp, Mus musculus
  siRNA target sequence for Lrp1 (NM_008512.1,4922-4940).
ggaccgactggcgaacaaa

SEQ ID NO: 549355 - DNA, 19 bp, Mus musculus
  siRNA target sequence for Lrp1 (NM_008512.1,4923-4941).
gaccgactggcgaacaaat

SEQ ID NO: 549356 - DNA, 19 bp, Mus musculus
  siRNA target sequence for Lrp1 (NM_008512.1,4926-4944).
cgactggcgaacaaataca

SEQ ID NO: 549357 - DNA, 19 bp, Mus musculus
  siRNA target sequence for Lrp1 (NM_008512.1,5095-5113).
catctgtgcctcatcaact

SEQ ID NO: 549358 - DNA, 19 bp, Mus musculus
  siRNA target sequence for Lrp1 (NM_008512.1,5098-5116).
ctgtgcctcatcaactaca

SEQ ID NO: 549359 - DNA, 19 bp, Mus musculus
  siRNA target sequence for Lrp1 (NM_008512.1,5169-5187).
caccacctgctatgagttt

SEQ ID NO: 549360 - DNA, 19 bp, Mus musculus
  siRNA target sequence for Lrp1 (NM_008512.1,5171-5189).
ccacctgctatgagtttaa

SEQ ID NO: 549361 - DNA, 19 bp, Mus musculus
  siRNA target sequence for Lrp1 (NM_008512.1,5236-5254).
ctggatgccccgtactaca

SEQ ID NO: 549362 - DNA, 19 bp, Mus musculus
  siRNA target sequence for Lrp1 (NM_008512.1,5238-5256).
ggatgccccgtactacaat

SEQ ID NO: 549363 - DNA, 19 bp, Mus musculus
  siRNA target sequence for Lrp1 (NM_008512.1,5242-5260).
gccccgtactacaattata

SEQ ID NO: 549364 - DNA, 19 bp, Mus musculus
  siRNA target sequence for Lrp1 (NM_008512.1,5243-5261).
ccccgtactacaattatat

SEQ ID NO: 549365 - DNA, 19 bp, Mus musculus
  siRNA target sequence for Lrp1 (NM_008512.1,5245-5263).
ccgtactacaattatatca

SEQ ID NO: 549366 - DNA, 19 bp, Mus musculus
  siRNA target sequence for Lrp1 (NM_008512.1,5246-5264).
cgtactacaattatatcat

SEQ ID NO: 549367 - DNA, 19 bp, Mus musculus
  siRNA target sequence for Lrp1 (NM_008512.1,5267-5285).
ccttcacggtgcctgatat

SEQ ID NO: 549368 - DNA, 19 bp, Mus musculus
  siRNA target sequence for Lrp1 (NM_008512.1,5278-5296).
cctgatatcgacaatgtca

SEQ ID NO: 549369 - DNA, 19 bp, Mus musculus
  siRNA target sequence for Lrp1 (NM_008512.1,5295-5313).
cacggtgctggactatgat

SEQ ID NO: 549370 - DNA, 19 bp, Mus musculus
  siRNA target sequence for Lrp1 (NM_008512.1,5315-5333).
cccgagagcagcgagttta

SEQ ID NO: 549371 - DNA, 19 bp, Mus musculus
  siRNA target sequence for Lrp1 (NM_008512.1,5317-5335).
cgagagcagcgagtttact

SEQ ID NO: 549372 - DNA, 19 bp, Mus musculus
  siRNA target sequence for Lrp1 (NM_008512.1,5357-5375).
ccatcaaaagggcatttat

SEQ ID NO: 549373 - DNA, 19 bp, Mus musculus
  siRNA target sequence for Lrp1 (NM_008512.1,5444-5462).
gggtctcccgaaatctgtt

SEQ ID NO: 549374 - DNA, 19 bp, Mus musculus
  siRNA target sequence for Lrp1 (NM_008512.1,5445-5463).
ggtctcccgaaatctgttt

SEQ ID NO: 549375 - DNA, 19 bp, Mus musculus
  siRNA target sequence for Lrp1 (NM_008512.1,5446-5464).
gtctcccgaaatctgtttt

SEQ ID NO: 549376 - DNA, 19 bp, Mus musculus
  siRNA target sequence for Lrp1 (NM_008512.1,5471-5489).
gttacgacaccaacaagaa

SEQ ID NO: 549377 - DNA, 19 bp, Mus musculus
  siRNA target sequence for Lrp1 (NM_008512.1,5736-5754).
cacaatcaaccgttgcaat

SEQ ID NO: 549378 - DNA, 19 bp, Mus musculus
  siRNA target sequence for Lrp1 (NM_008512.1,5921-5939).
gtaccacgttggttatgca

SEQ ID NO: 549379 - DNA, 19 bp, Mus musculus
  siRNA target sequence for Lrp1 (NM_008512.1,5927-5945).
cgttggttatgcacatgaa

SEQ ID NO: 549380 - DNA, 19 bp, Mus musculus
  siRNA target sequence for Lrp1 (NM_008512.1,6045-6063).
gactcgctcctgtatgtgt

SEQ ID NO: 549381 - DNA, 19 bp, Mus musculus
  siRNA target sequence for Lrp1 (NM_008512.1,6192-6210).
cccagtgtccggaacttca

SEQ ID NO: 549382 - DNA, 19 bp, Mus musculus
  siRNA target sequence for Lrp1 (NM_008512.1,6235-6253).
gccgaaaatgacactattt

SEQ ID NO: 549383 - DNA, 19 bp, Mus musculus
  siRNA target sequence for Lrp1 (NM_008512.1,6236-6254).
ccgaaaatgacactattta

SEQ ID NO: 549384 - DNA, 19 bp, Mus musculus
  siRNA target sequence for Lrp1 (NM_008512.1,6525-6543).
gggtcattacccacgtatt

SEQ ID NO: 549385 - DNA, 19 bp, Mus musculus
  siRNA target sequence for Lrp1 (NM_008512.1,6527-6545).
gtcattacccacgtattga

SEQ ID NO: 549386 - DNA, 19 bp, Mus musculus
  siRNA target sequence for Lrp1 (NM_008512.1,6572-6590).
gagtggtgttggttaatgt

SEQ ID NO: 549387 - DNA, 19 bp, Mus musculus
  siRNA target sequence for Lrp1 (NM_008512.1,6574-6592).
gtggtgttggttaatgtca

SEQ ID NO: 549388 - DNA, 19 bp, Mus musculus
  siRNA target sequence for Lrp1 (NM_008512.1,6611-6629).
gcatctcagtagactatca

SEQ ID NO: 549389 - DNA, 19 bp, Mus musculus
  siRNA target sequence for Lrp1 (NM_008512.1,6712-6730).
gtcctgtccagcaataaca

SEQ ID NO: 549390 - DNA, 19 bp, Mus musculus
  siRNA target sequence for Lrp1 (NM_008512.1,6719-6737).
ccagcaataacatggatat

SEQ ID NO: 549391 - DNA, 19 bp, Mus musculus
  siRNA target sequence for Lrp1 (NM_008512.1,6749-6767).
ccgtgtttgaggacttcat

SEQ ID NO: 549392 - DNA, 19 bp, Mus musculus
  siRNA target sequence for Lrp1 (NM_008512.1,6854-6872).
gcattggtgttcagcttaa

SEQ ID NO: 549393 - DNA, 19 bp, Mus musculus
  siRNA target sequence for Lrp1 (NM_008512.1,6855-6873).
cattggtgttcagcttaaa

SEQ ID NO: 549394 - DNA, 19 bp, Mus musculus
  siRNA target sequence for Lrp1 (NM_008512.1,6897-6915).
caggcagaagggtaccaat

SEQ ID NO: 549395 - DNA, 19 bp, Mus musculus
  siRNA target sequence for Lrp1 (NM_008512.1,7112-7130).
cggtgcagccctttgaaga

SEQ ID NO: 549396 - DNA, 19 bp, Mus musculus
  siRNA target sequence for Lrp1 (NM_008512.1,7133-7151).
ccgagcacatgaaaaatgt

SEQ ID NO: 549397 - DNA, 19 bp, Mus musculus
  siRNA target sequence for Lrp1 (NM_008512.1,7196-7214).
cccctaaccgcatcttctt

SEQ ID NO: 549398 - DNA, 19 bp, Mus musculus
  siRNA target sequence for Lrp1 (NM_008512.1,7198-7216).
cctaaccgcatcttcttca

SEQ ID NO: 549399 - DNA, 19 bp, Mus musculus
  siRNA target sequence for Lrp1 (NM_008512.1,7268-7286).
ggaccaccatcgtggaaaa

SEQ ID NO: 549400 - DNA, 19 bp, Mus musculus
  siRNA target sequence for Lrp1 (NM_008512.1,7269-7287).
gaccaccatcgtggaaaat

SEQ ID NO: 549401 - DNA, 19 bp, Mus musculus
  siRNA target sequence for Lrp1 (NM_008512.1,7606-7624).
gcggagaagctgtacttct

SEQ ID NO: 549402 - DNA, 19 bp, Mus musculus
  siRNA target sequence for Lrp1 (NM_008512.1,7667-7685).
gctcccaccgctatgtgat

SEQ ID NO: 549403 - DNA, 19 bp, Mus musculus
  siRNA target sequence for Lrp1 (NM_008512.1,7675-7693).
cgctatgtgatcctaaagt

SEQ ID NO: 549404 - DNA, 19 bp, Mus musculus
  siRNA target sequence for Lrp1 (NM_008512.1,7723-7741).
gtgtacggagagcacattt

SEQ ID NO: 549405 - DNA, 19 bp, Mus musculus
  siRNA target sequence for Lrp1 (NM_008512.1,7770-7788).
gcagcgagccaacaagtat

SEQ ID NO: 549406 - DNA, 19 bp, Mus musculus
  siRNA target sequence for Lrp1 (NM_008512.1,7883-7901).
ccccctgccgtatcaacaa

SEQ ID NO: 549407 - DNA, 19 bp, Mus musculus
  siRNA target sequence for Lrp1 (NM_008512.1,7884-7902).
cccctgccgtatcaacaat

SEQ ID NO: 549408 - DNA, 19 bp, Mus musculus
  siRNA target sequence for Lrp1 (NM_008512.1,8010-8028).
ctcttgtcgggcacaagat

SEQ ID NO: 549409 - DNA, 19 bp, Mus musculus
  siRNA target sequence for Lrp1 (NM_008512.1,8012-8030).
cttgtcgggcacaagatga

SEQ ID NO: 549410 - DNA, 19 bp, Mus musculus
  siRNA target sequence for Lrp1 (NM_008512.1,8039-8057).
gtgccaatggggaatgtat

SEQ ID NO: 549411 - DNA, 19 bp, Mus musculus
  siRNA target sequence for Lrp1 (NM_008512.1,8041-8059).
gccaatggggaatgtatca

SEQ ID NO: 549412 - DNA, 19 bp, Mus musculus
  siRNA target sequence for Lrp1 (NM_008512.1,8150-8168).
ctttccgccagtgtaacaa

SEQ ID NO: 549413 - DNA, 19 bp, Mus musculus
  siRNA target sequence for Lrp1 (NM_008512.1,8309-8327).
gtcgctgcaaccagtttgt

SEQ ID NO: 549414 - DNA, 19 bp, Mus musculus
  siRNA target sequence for Lrp1 (NM_008512.1,8341-8359).
gcctcggatgagatgaatt

SEQ ID NO: 549415 - DNA, 19 bp, Mus musculus
  siRNA target sequence for Lrp1 (NM_008512.1,8524-8542).
cctaggtgcccgctcaatt

SEQ ID NO: 549416 - DNA, 19 bp, Mus musculus
  siRNA target sequence for Lrp1 (NM_008512.1,8525-8543).
ctaggtgcccgctcaatta

SEQ ID NO: 549417 - DNA, 19 bp, Mus musculus
  siRNA target sequence for Lrp1 (NM_008512.1,8528-8546).
ggtgcccgctcaattactt

SEQ ID NO: 549418 - DNA, 19 bp, Mus musculus
  siRNA target sequence for Lrp1 (NM_008512.1,8529-8547).
gtgcccgctcaattacttt

SEQ ID NO: 549419 - DNA, 19 bp, Mus musculus
  siRNA target sequence for Lrp1 (NM_008512.1,8668-8686).
cagaaccaccggtgtatct

SEQ ID NO: 549420 - DNA, 19 bp, Mus musculus
  siRNA target sequence for Lrp1 (NM_008512.1,8897-8915).
gtgatgaccgtgagttcat

SEQ ID NO: 549421 - DNA, 19 bp, Mus musculus
  siRNA target sequence for Lrp1 (NM_008512.1,8899-8917).
gatgaccgtgagttcatgt

SEQ ID NO: 549422 - DNA, 19 bp, Mus musculus
  siRNA target sequence for Lrp1 (NM_008512.1,8919-8937).
ccagaaccgcttgtgtatt

SEQ ID NO: 549423 - DNA, 19 bp, Mus musculus
  siRNA target sequence for Lrp1 (NM_008512.1,8933-8951).
gtattcccaagcatttcgt

SEQ ID NO: 549424 - DNA, 19 bp, Mus musculus
  siRNA target sequence for Lrp1 (NM_008512.1,9518-9536).
ccgatgaggagccatttct

SEQ ID NO: 549425 - DNA, 19 bp, Mus musculus
  siRNA target sequence for Lrp1 (NM_008512.1,9574-9592).
ctggacggctccaactaca

SEQ ID NO: 549426 - DNA, 19 bp, Mus musculus
  siRNA target sequence for Lrp1 (NM_008512.1,9643-9661).
cgagagcagatgatctact

SEQ ID NO: 549427 - DNA, 19 bp, Mus musculus
  siRNA target sequence for Lrp1 (NM_008512.1,9675-9693).
cacccagggcagcatgatt

SEQ ID NO: 549428 - DNA, 19 bp, Mus musculus
  siRNA target sequence for Lrp1 (NM_008512.1,9733-9751).
caccggacgggccttagta

SEQ ID NO: 549429 - DNA, 19 bp, Mus musculus
  siRNA target sequence for Lrp1 (NM_008512.1,9986-10004).
gcatcatcgtggacactaa

SEQ ID NO: 549430 - DNA, 19 bp, Mus musculus
  siRNA target sequence for Lrp1 (NM_008512.1,10039-10057).
gtcacggaacgcatctact

SEQ ID NO: 549431 - DNA, 19 bp, Mus musculus
  siRNA target sequence for Lrp1 (NM_008512.1,10146-10164).
ctttgcgctgaccctattt

SEQ ID NO: 549432 - DNA, 19 bp, Mus musculus
  siRNA target sequence for Lrp1 (NM_008512.1,10151-10169).
cgctgaccctatttgaaga

SEQ ID NO: 549433 - DNA, 19 bp, Mus musculus
  siRNA target sequence for Lrp1 (NM_008512.1,10181-10199).
ggacagactgggaaacgaa

SEQ ID NO: 549434 - DNA, 19 bp, Mus musculus
  siRNA target sequence for Lrp1 (NM_008512.1,10221-10239).
gaccacgggtgccaacaaa

SEQ ID NO: 549435 - DNA, 19 bp, Mus musculus
  siRNA target sequence for Lrp1 (NM_008512.1,10224-10242).
cacgggtgccaacaaaaca

SEQ ID NO: 549436 - DNA, 19 bp, Mus musculus
  siRNA target sequence for Lrp1 (NM_008512.1,10226-10244).
cgggtgccaacaaaacact

SEQ ID NO: 549437 - DNA, 19 bp, Mus musculus
  siRNA target sequence for Lrp1 (NM_008512.1,10267-10285).
cccatggacttacatgtat

SEQ ID NO: 549438 - DNA, 19 bp, Mus musculus
  siRNA target sequence for Lrp1 (NM_008512.1,10268-10286).
ccatggacttacatgtatt

SEQ ID NO: 549439 - DNA, 19 bp, Mus musculus
  siRNA target sequence for Lrp1 (NM_008512.1,10394-10412).
gccccaccaacttctatct

SEQ ID NO: 549440 - DNA, 19 bp, Mus musculus
  siRNA target sequence for Lrp1 (NM_008512.1,10445-10463).
gcacagcaagccagtttgt

SEQ ID NO: 549441 - DNA, 19 bp, Mus musculus
  siRNA target sequence for Lrp1 (NM_008512.1,10455-10473).
ccagtttgtgtgcaaaaat

SEQ ID NO: 549442 - DNA, 19 bp, Mus musculus
  siRNA target sequence for Lrp1 (NM_008512.1,10682-10700).
gcttgcccagccaattcaa

SEQ ID NO: 549443 - DNA, 19 bp, Mus musculus
  siRNA target sequence for Lrp1 (NM_008512.1,10857-10875).
ggtctgtgacagggataat

SEQ ID NO: 549444 - DNA, 19 bp, Mus musculus
  siRNA target sequence for Lrp1 (NM_008512.1,10894-10912).
gatgagcctgccaactgta

SEQ ID NO: 549445 - DNA, 19 bp, Mus musculus
  siRNA target sequence for Lrp1 (NM_008512.1,11062-11080).
cagttccgctgcaaaaaca

SEQ ID NO: 549446 - DNA, 19 bp, Mus musculus
  siRNA target sequence for Lrp1 (NM_008512.1,11251-11269).
ggctcagacgagaaagact

SEQ ID NO: 549447 - DNA, 19 bp, Mus musculus
  siRNA target sequence for Lrp1 (NM_008512.1,11397-11415).
gaggacctgcccattggat

SEQ ID NO: 549448 - DNA, 19 bp, Mus musculus
  siRNA target sequence for Lrp1 (NM_008512.1,11402-11420).
cctgcccattggatgagtt

SEQ ID NO: 549449 - DNA, 19 bp, Mus musculus
  siRNA target sequence for Lrp1 (NM_008512.1,11413-11431).
gatgagtttcaatgtaaca

SEQ ID NO: 549450 - DNA, 19 bp, Mus musculus
  siRNA target sequence for Lrp1 (NM_008512.1,11416-11434).
gagtttcaatgtaacaaca

SEQ ID NO: 549451 - DNA, 19 bp, Mus musculus
  siRNA target sequence for Lrp1 (NM_008512.1,11541-11559).
gcctttccgctgcaagaat

SEQ ID NO: 549452 - DNA, 19 bp, Mus musculus
  siRNA target sequence for Lrp1 (NM_008512.1,11543-11561).
ctttccgctgcaagaatga

SEQ ID NO: 549453 - DNA, 19 bp, Mus musculus
  siRNA target sequence for Lrp1 (NM_008512.1,11873-11891).
gctcgggcttccatactgt

SEQ ID NO: 549454 - DNA, 19 bp, Mus musculus
  siRNA target sequence for Lrp1 (NM_008512.1,11923-11941).
gagtgcctgcgctttggta

SEQ ID NO: 549455 - DNA, 19 bp, Mus musculus
  siRNA target sequence for Lrp1 (NM_008512.1,11990-12008).
gtgcccgcaacttcatgaa

SEQ ID NO: 549456 - DNA, 19 bp, Mus musculus
  siRNA target sequence for Lrp1 (NM_008512.1,12038-12056).
ccgagtaccaggtgctata

SEQ ID NO: 549457 - DNA, 19 bp, Mus musculus
  siRNA target sequence for Lrp1 (NM_008512.1,12181-12199).
cgtgtctactggactaact

SEQ ID NO: 549458 - DNA, 19 bp, Mus musculus
  siRNA target sequence for Lrp1 (NM_008512.1,12291-12309).
cacccacctcaatatttca

SEQ ID NO: 549459 - DNA, 19 bp, Mus musculus
  siRNA target sequence for Lrp1 (NM_008512.1,12475-12493).
ctgaggggcaccatgtact

SEQ ID NO: 549460 - DNA, 19 bp, Mus musculus
  siRNA target sequence for Lrp1 (NM_008512.1,12507-12525).
gaaccaccccaagattgaa

SEQ ID NO: 549461 - DNA, 19 bp, Mus musculus
  siRNA target sequence for Lrp1 (NM_008512.1,12557-12575).
ctctcgtgcaagacaacat

SEQ ID NO: 549462 - DNA, 19 bp, Mus musculus
  siRNA target sequence for Lrp1 (NM_008512.1,12596-12614).
ctgtggactatcacaatga

SEQ ID NO: 549463 - DNA, 19 bp, Mus musculus
  siRNA target sequence for Lrp1 (NM_008512.1,12698-12716).
gcaaacgaggcctaagtca

SEQ ID NO: 549464 - DNA, 19 bp, Mus musculus
  siRNA target sequence for Lrp1 (NM_008512.1,12719-12737).
ccttcagcatcgatgtgtt

SEQ ID NO: 549465 - DNA, 19 bp, Mus musculus
  siRNA target sequence for Lrp1 (NM_008512.1,12720-12738).
cttcagcatcgatgtgttt

SEQ ID NO: 549466 - DNA, 19 bp, Mus musculus
  siRNA target sequence for Lrp1 (NM_008512.1,12753-12771).
cggagtcacttacatcaat

SEQ ID NO: 549467 - DNA, 19 bp, Mus musculus
  siRNA target sequence for Lrp1 (NM_008512.1,12754-12772).
ggagtcacttacatcaata

SEQ ID NO: 549468 - DNA, 19 bp, Mus musculus
  siRNA target sequence for Lrp1 (NM_008512.1,12755-12773).
gagtcacttacatcaataa

SEQ ID NO: 549469 - DNA, 19 bp, Mus musculus
  siRNA target sequence for Lrp1 (NM_008512.1,12759-12777).
cacttacatcaataatcgt

SEQ ID NO: 549470 - DNA, 19 bp, Mus musculus
  siRNA target sequence for Lrp1 (NM_008512.1,12842-12860).
cctctgatgtagtccttta

SEQ ID NO: 549471 - DNA, 19 bp, Mus musculus
  siRNA target sequence for Lrp1 (NM_008512.1,12845-12863).
ctgatgtagtcctttacca

SEQ ID NO: 549472 - DNA, 19 bp, Mus musculus
  siRNA target sequence for Lrp1 (NM_008512.1,12892-12910).
ccctgtgaccgcaagaaat

SEQ ID NO: 549473 - DNA, 19 bp, Mus musculus
  siRNA target sequence for Lrp1 (NM_008512.1,13117-13135).
cgttacacaggcgataagt

SEQ ID NO: 549474 - DNA, 19 bp, Mus musculus
  siRNA target sequence for Lrp1 (NM_008512.1,13264-13282).
ggctactgctctaacaaca

SEQ ID NO: 549475 - DNA, 19 bp, Mus musculus
  siRNA target sequence for Lrp1 (NM_008512.1,13311-13329).
gccccagtgccgatgtcta

SEQ ID NO: 549476 - DNA, 19 bp, Mus musculus
  siRNA target sequence for Lrp1 (NM_008512.1,13427-13445).
gtcgctgcaccgtctactt

SEQ ID NO: 549477 - DNA, 19 bp, Mus musculus
  siRNA target sequence for Lrp1 (NM_008512.1,13454-13472).
caaggtgtgaggtgaacaa

SEQ ID NO: 549478 - DNA, 19 bp, Mus musculus
  siRNA target sequence for Lrp1 (NM_008512.1,13492-13510).
ggcgcctgtgtggtcaata

SEQ ID NO: 549479 - DNA, 19 bp, Mus musculus
  siRNA target sequence for Lrp1 (NM_008512.1,13493-13511).
gcgcctgtgtggtcaataa

SEQ ID NO: 549480 - DNA, 19 bp, Mus musculus
  siRNA target sequence for Lrp1 (NM_008512.1,13496-13514).
cctgtgtggtcaataagca

SEQ ID NO: 549481 - DNA, 19 bp, Mus musculus
  siRNA target sequence for Lrp1 (NM_008512.1,13575-13593).
catcgatcactgtagcaat

SEQ ID NO: 549482 - DNA, 19 bp, Mus musculus
  siRNA target sequence for Lrp1 (NM_008512.1,13759-13777).
ggcgtggtgttctggtata

SEQ ID NO: 549483 - DNA, 19 bp, Mus musculus
  siRNA target sequence for Lrp1 (NM_008512.1,13760-13778).
gcgtggtgttctggtataa

SEQ ID NO: 549484 - DNA, 19 bp, Mus musculus
  siRNA target sequence for Lrp1 (NM_008512.1,13856-13874).
ctacctacaagatgtatga

SEQ ID NO: 549485 - DNA, 19 bp, Mus musculus
  siRNA target sequence for Lrp1 (NM_008512.1,13877-13895).
gtggagagcccgatgatgt

SEQ ID NO: 549486 - DNA, 19 bp, Mus musculus
  siRNA target sequence for Lrp1 (NM_008512.1,13901-13919).
gcctactggatgctgattt

SEQ ID NO: 549487 - DNA, 19 bp, Mus musculus
  siRNA target sequence for Lrp1 (NM_008512.1,13902-13920).
cctactggatgctgatttt

SEQ ID NO: 549488 - DNA, 19 bp, Mus musculus
  siRNA target sequence for Lrp1b (NM_053011.1,856-874).
ccaaccaagatcagcattt

SEQ ID NO: 549489 - DNA, 19 bp, Mus musculus
  siRNA target sequence for Lrp1b (NM_053011.1,875-893).
gtgtgaccctggcgaattt

SEQ ID NO: 549490 - DNA, 19 bp, Mus musculus
  siRNA target sequence for Lrp1b (NM_053011.1,877-895).
gtgaccctggcgaatttct

SEQ ID NO: 549491 - DNA, 19 bp, Mus musculus
  siRNA target sequence for Lrp1b (NM_053011.1,962-980).
ccagtcagatgagtcttta

SEQ ID NO: 549492 - DNA, 19 bp, Mus musculus
  siRNA target sequence for Lrp1b (NM_053011.1,1010-1028).
gtgccccttgaatcacatt

SEQ ID NO: 549493 - DNA, 19 bp, Mus musculus
  siRNA target sequence for Lrp1b (NM_053011.1,1042-1060).
ctagcgcatgtgtccattt

SEQ ID NO: 549494 - DNA, 19 bp, Mus musculus
  siRNA target sequence for Lrp1b (NM_053011.1,1111-1129).
gagggcattgccaggaatt

SEQ ID NO: 549495 - DNA, 19 bp, Mus musculus
  siRNA target sequence for Lrp1b (NM_053011.1,1135-1153).
ccagttgtcagcagttgaa

SEQ ID NO: 549496 - DNA, 19 bp, Mus musculus
  siRNA target sequence for Lrp1b (NM_053011.1,1170-1188).
gcaatggtcagaaatgcta

SEQ ID NO: 549497 - DNA, 19 bp, Mus musculus
  siRNA target sequence for Lrp1b (NM_053011.1,1195-1213).
gttattgcgaggatggatt

SEQ ID NO: 549498 - DNA, 19 bp, Mus musculus
  siRNA target sequence for Lrp1b (NM_053011.1,1201-1219).
gcgaggatggatttgaagt

SEQ ID NO: 549499 - DNA, 19 bp, Mus musculus
  siRNA target sequence for Lrp1b (NM_053011.1,1254-1272).
gaatgcagcatttatggta

SEQ ID NO: 549500 - DNA, 19 bp, Mus musculus
  siRNA target sequence for Lrp1b (NM_053011.1,1321-1339).
gcgtggaaggctatataat

SEQ ID NO: 549501 - DNA, 19 bp, Mus musculus
  siRNA target sequence for Lrp1b (NM_053011.1,1383-1401).
gataaggcaccaatgttat

SEQ ID NO: 549502 - DNA, 19 bp, Mus musculus
  siRNA target sequence for Lrp1b (NM_053011.1,1420-1438).
caattgagctcttctacat

SEQ ID NO: 549503 - DNA, 19 bp, Mus musculus
  siRNA target sequence for Lrp1b (NM_053011.1,1482-1500).
gaaatccatacgctagatt

SEQ ID NO: 549504 - DNA, 19 bp, Mus musculus
  siRNA target sequence for Lrp1b (NM_053011.1,1487-1505).
ccatacgctagattttatt

SEQ ID NO: 549505 - DNA, 19 bp, Mus musculus
  siRNA target sequence for Lrp1b (NM_053011.1,1520-1538).
gatttgctggattgaatca

SEQ ID NO: 549506 - DNA, 19 bp, Mus musculus
  siRNA target sequence for Lrp1b (NM_053011.1,1533-1551).
gaatcaagagagtcttcta

SEQ ID NO: 549507 - DNA, 19 bp, Mus musculus
  siRNA target sequence for Lrp1b (NM_053011.1,1540-1558).
gagagtcttctaatcaact

SEQ ID NO: 549508 - DNA, 19 bp, Mus musculus
  siRNA target sequence for Lrp1b (NM_053011.1,1557-1575).
ctcaaatgtggccagataa

SEQ ID NO: 549509 - DNA, 19 bp, Mus musculus
  siRNA target sequence for Lrp1b (NM_053011.1,1584-1602).
ggaagattgacagatcaaa

SEQ ID NO: 549510 - DNA, 19 bp, Mus musculus
  siRNA target sequence for Lrp1b (NM_053011.1,1594-1612).
cagatcaaaggataattaa

SEQ ID NO: 549511 - DNA, 19 bp, Mus musculus
  siRNA target sequence for Lrp1b (NM_053011.1,1596-1614).
gatcaaaggataattaaca

SEQ ID NO: 549512 - DNA, 19 bp, Mus musculus
  siRNA target sequence for Lrp1b (NM_053011.1,1659-1677).
cttaccagaaatatctact

SEQ ID NO: 549513 - DNA, 19 bp, Mus musculus
  siRNA target sequence for Lrp1b (NM_053011.1,1730-1748).
gtgtgtcactctgattgaa

SEQ ID NO: 549514 - DNA, 19 bp, Mus musculus
  siRNA target sequence for Lrp1b (NM_053011.1,1750-1768).
cggagcttcacaatcctaa

SEQ ID NO: 549515 - DNA, 19 bp, Mus musculus
  siRNA target sequence for Lrp1b (NM_053011.1,1917-1935).
ctcgtcaacagattggttt

SEQ ID NO: 549516 - DNA, 19 bp, Mus musculus
  siRNA target sequence for Lrp1b (NM_053011.1,1919-1937).
cgtcaacagattggtttat

SEQ ID NO: 549517 - DNA, 19 bp, Mus musculus
  siRNA target sequence for Lrp1b (NM_053011.1,1920-1938).
gtcaacagattggtttatt

SEQ ID NO: 549518 - DNA, 19 bp, Mus musculus
  siRNA target sequence for Lrp1b (NM_053011.1,1955-1973).
ggactacgtgggagtagta

SEQ ID NO: 549519 - DNA, 19 bp, Mus musculus
  siRNA target sequence for Lrp1b (NM_053011.1,2011-2029).
gcagacaggttaaacatct

SEQ ID NO: 549520 - DNA, 19 bp, Mus musculus
  siRNA target sequence for Lrp1b (NM_053011.1,2028-2046).
ctctatggcataactgtat

SEQ ID NO: 549521 - DNA, 19 bp, Mus musculus
  siRNA target sequence for Lrp1b (NM_053011.1,2036-2054).
cataactgtatttgaagat

SEQ ID NO: 549522 - DNA, 19 bp, Mus musculus
  siRNA target sequence for Lrp1b (NM_053011.1,2071-2089).
gttctgataacttcaatat

SEQ ID NO: 549523 - DNA, 19 bp, Mus musculus
  siRNA target sequence for Lrp1b (NM_053011.1,2081-2099).
cttcaatatcatacgaata

SEQ ID NO: 549524 - DNA, 19 bp, Mus musculus
  siRNA target sequence for Lrp1b (NM_053011.1,2113-2131).
gcactgatattcactcaat

SEQ ID NO: 549525 - DNA, 19 bp, Mus musculus
  siRNA target sequence for Lrp1b (NM_053011.1,2114-2132).
cactgatattcactcaata

SEQ ID NO: 549526 - DNA, 19 bp, Mus musculus
  siRNA target sequence for Lrp1b (NM_053011.1,2116-2134).
ctgatattcactcaataat

SEQ ID NO: 549527 - DNA, 19 bp, Mus musculus
  siRNA target sequence for Lrp1b (NM_053011.1,2154-2172).
ggaatccgaacctatcaga

SEQ ID NO: 549528 - DNA, 19 bp, Mus musculus
  siRNA target sequence for Lrp1b (NM_053011.1,2160-2178).
cgaacctatcagaagagaa

SEQ ID NO: 549529 - DNA, 19 bp, Mus musculus
  siRNA target sequence for Lrp1b (NM_053011.1,2203-2221).
cctgcgaagtggatgcata

SEQ ID NO: 549530 - DNA, 19 bp, Mus musculus
  siRNA target sequence for Lrp1b (NM_053011.1,2204-2222).
ctgcgaagtggatgcatat

SEQ ID NO: 549531 - DNA, 19 bp, Mus musculus
  siRNA target sequence for Lrp1b (NM_053011.1,2207-2225).
cgaagtggatgcatatgga

SEQ ID NO: 549532 - DNA, 19 bp, Mus musculus
  siRNA target sequence for Lrp1b (NM_053011.1,2290-2308).
gcaggactggcttcaatat

SEQ ID NO: 549533 - DNA, 19 bp, Mus musculus
  siRNA target sequence for Lrp1b (NM_053011.1,2315-2333).
cgatggcaggtcatgcaaa

SEQ ID NO: 549534 - DNA, 19 bp, Mus musculus
  siRNA target sequence for Lrp1b (NM_053011.1,2329-2347).
gcaaaaggccaaagaatga

SEQ ID NO: 549535 - DNA, 19 bp, Mus musculus
  siRNA target sequence for Lrp1b (NM_053011.1,2370-2388).
ggacgcccaggaattgtta

SEQ ID NO: 549536 - DNA, 19 bp, Mus musculus
  siRNA target sequence for Lrp1b (NM_053011.1,2425-2443).
gcatgattcccatagaaaa

SEQ ID NO: 549537 - DNA, 19 bp, Mus musculus
  siRNA target sequence for Lrp1b (NM_053011.1,2447-2465).
ggtaaaccctcgtgcttta

SEQ ID NO: 549538 - DNA, 19 bp, Mus musculus
  siRNA target sequence for Lrp1b (NM_053011.1,2472-2490).
cacgcggaagctaattata

SEQ ID NO: 549539 - DNA, 19 bp, Mus musculus
  siRNA target sequence for Lrp1b (NM_053011.1,2475-2493).
gcggaagctaattatatct

SEQ ID NO: 549540 - DNA, 19 bp, Mus musculus
  siRNA target sequence for Lrp1b (NM_053011.1,2476-2494).
cggaagctaattatatcta

SEQ ID NO: 549541 - DNA, 19 bp, Mus musculus
  siRNA target sequence for Lrp1b (NM_053011.1,2499-2517).
gctgacacgaccagtttct

SEQ ID NO: 549542 - DNA, 19 bp, Mus musculus
  siRNA target sequence for Lrp1b (NM_053011.1,2500-2518).
ctgacacgaccagtttctt

SEQ ID NO: 549543 - DNA, 19 bp, Mus musculus
  siRNA target sequence for Lrp1b (NM_053011.1,2502-2520).
gacacgaccagtttcttaa

SEQ ID NO: 549544 - DNA, 19 bp, Mus musculus
  siRNA target sequence for Lrp1b (NM_053011.1,2504-2522).
cacgaccagtttcttaatt

SEQ ID NO: 549545 - DNA, 19 bp, Mus musculus
  siRNA target sequence for Lrp1b (NM_053011.1,2618-2636).
cctttattggaccaatgat

SEQ ID NO: 549546 - DNA, 19 bp, Mus musculus
  siRNA target sequence for Lrp1b (NM_053011.1,2716-2734).
ctcatccaagagcaattgt

SEQ ID NO: 549547 - DNA, 19 bp, Mus musculus
  siRNA target sequence for Lrp1b (NM_053011.1,2745-2763).
gtcaacggttggatgtact

SEQ ID NO: 549548 - DNA, 19 bp, Mus musculus
  siRNA target sequence for Lrp1b (NM_053011.1,2917-2935).
gtgatgcttactatgatca

SEQ ID NO: 549549 - DNA, 19 bp, Mus musculus
  siRNA target sequence for Lrp1b (NM_053011.1,2919-2937).
gatgcttactatgatcata

SEQ ID NO: 549550 - DNA, 19 bp, Mus musculus
  siRNA target sequence for Lrp1b (NM_053011.1,2964-2982).
cacagaaaggttgtataca

SEQ ID NO: 549551 - DNA, 19 bp, Mus musculus
  siRNA target sequence for Lrp1b (NM_053011.1,2966-2984).
cagaaaggttgtatacagt

SEQ ID NO: 549552 - DNA, 19 bp, Mus musculus
  siRNA target sequence for Lrp1b (NM_053011.1,3016-3034).
cacatcatgggaattatgt

SEQ ID NO: 549553 - DNA, 19 bp, Mus musculus
  siRNA target sequence for Lrp1b (NM_053011.1,3018-3036).
catcatgggaattatgtgt

SEQ ID NO: 549554 - DNA, 19 bp, Mus musculus
  siRNA target sequence for Lrp1b (NM_053011.1,3058-3076).
gttcaatttttcaactaga

SEQ ID NO: 549555 - DNA, 19 bp, Mus musculus
  siRNA target sequence for Lrp1b (NM_053011.1,3125-3143).
gtttgggcttcagatttat

SEQ ID NO: 549556 - DNA, 19 bp, Mus musculus
  siRNA target sequence for Lrp1b (NM_053011.1,3244-3262).
ctgataatcaacttttgga

SEQ ID NO: 549557 - DNA, 19 bp, Mus musculus
  siRNA target sequence for Lrp1b (NM_053011.1,3270-3288).
ggaactacttgcacgttta

SEQ ID NO: 549558 - DNA, 19 bp, Mus musculus
  siRNA target sequence for Lrp1b (NM_053011.1,3271-3289).
gaactacttgcacgtttaa

SEQ ID NO: 549559 - DNA, 19 bp, Mus musculus
  siRNA target sequence for Lrp1b (NM_053011.1,3281-3299).
cacgtttaatcctgaagaa

SEQ ID NO: 549560 - DNA, 19 bp, Mus musculus
  siRNA target sequence for Lrp1b (NM_053011.1,3327-3345).
gaatttcgctgcaagaaca

SEQ ID NO: 549561 - DNA, 19 bp, Mus musculus
  siRNA target sequence for Lrp1b (NM_053011.1,3333-3351).
cgctgcaagaacaaacact

SEQ ID NO: 549562 - DNA, 19 bp, Mus musculus
  siRNA target sequence for Lrp1b (NM_053011.1,3434-3452).
cagctgtccggatgatcaa

SEQ ID NO: 549563 - DNA, 19 bp, Mus musculus
  siRNA target sequence for Lrp1b (NM_053011.1,3436-3454).
gctgtccggatgatcaatt

SEQ ID NO: 549564 - DNA, 19 bp, Mus musculus
  siRNA target sequence for Lrp1b (NM_053011.1,3437-3455).
ctgtccggatgatcaattt

SEQ ID NO: 549565 - DNA, 19 bp, Mus musculus
  siRNA target sequence for Lrp1b (NM_053011.1,3439-3457).
gtccggatgatcaatttaa

SEQ ID NO: 549566 - DNA, 19 bp, Mus musculus
  siRNA target sequence for Lrp1b (NM_053011.1,3441-3459).
ccggatgatcaatttaagt

SEQ ID NO: 549567 - DNA, 19 bp, Mus musculus
  siRNA target sequence for Lrp1b (NM_053011.1,3450-3468).
caatttaagtgccagaata

SEQ ID NO: 549568 - DNA, 19 bp, Mus musculus
  siRNA target sequence for Lrp1b (NM_053011.1,3460-3478).
gccagaataatcgttgtat

SEQ ID NO: 549569 - DNA, 19 bp, Mus musculus
  siRNA target sequence for Lrp1b (NM_053011.1,3471-3489).
cgttgtatccccaagagat

SEQ ID NO: 549570 - DNA, 19 bp, Mus musculus
  siRNA target sequence for Lrp1b (NM_053011.1,3560-3578).
ctgccaggctgaccaattt

SEQ ID NO: 549571 - DNA, 19 bp, Mus musculus
  siRNA target sequence for Lrp1b (NM_053011.1,3563-3581).
ccaggctgaccaattttct

SEQ ID NO: 549572 - DNA, 19 bp, Mus musculus
  siRNA target sequence for Lrp1b (NM_053011.1,3564-3582).
caggctgaccaattttctt

SEQ ID NO: 549573 - DNA, 19 bp, Mus musculus
  siRNA target sequence for Lrp1b (NM_053011.1,3604-3622).
ccacagcatggctatgtga

SEQ ID NO: 549574 - DNA, 19 bp, Mus musculus
  siRNA target sequence for Lrp1b (NM_053011.1,3686-3704).
gcctctgactcagttcata

SEQ ID NO: 549575 - DNA, 19 bp, Mus musculus
  siRNA target sequence for Lrp1b (NM_053011.1,3801-3819).
cttgatgaccagttcagat

SEQ ID NO: 549576 - DNA, 19 bp, Mus musculus
  siRNA target sequence for Lrp1b (NM_053011.1,3804-3822).
gatgaccagttcagatgtt

SEQ ID NO: 549577 - DNA, 19 bp, Mus musculus
  siRNA target sequence for Lrp1b (NM_053011.1,3807-3825).
gaccagttcagatgttcaa

SEQ ID NO: 549578 - DNA, 19 bp, Mus musculus
  siRNA target sequence for Lrp1b (NM_053011.1,3936-3954).
ggttgcatcgggaatgaat

SEQ ID NO: 549579 - DNA, 19 bp, Mus musculus
  siRNA target sequence for Lrp1b (NM_053011.1,3937-3955).
gttgcatcgggaatgaatt

SEQ ID NO: 549580 - DNA, 19 bp, Mus musculus
  siRNA target sequence for Lrp1b (NM_053011.1,4035-4053).
gagaagggctgcaatggta

SEQ ID NO: 549581 - DNA, 19 bp, Mus musculus
  siRNA target sequence for Lrp1b (NM_053011.1,4040-4058).
gggctgcaatggtaccatt

SEQ ID NO: 549582 - DNA, 19 bp, Mus musculus
  siRNA target sequence for Lrp1b (NM_053011.1,4059-4077).
cgactgtgtgaccacaaaa

SEQ ID NO: 549583 - DNA, 19 bp, Mus musculus
  siRNA target sequence for Lrp1b (NM_053011.1,4199-4217).
caagtacccttgtgctaat

SEQ ID NO: 549584 - DNA, 19 bp, Mus musculus
  siRNA target sequence for Lrp1b (NM_053011.1,4334-4352).
caaccactgttctgttgtt

SEQ ID NO: 549585 - DNA, 19 bp, Mus musculus
  siRNA target sequence for Lrp1b (NM_053011.1,4394-4412).
gctcaagaaagacaataga

SEQ ID NO: 549586 - DNA, 19 bp, Mus musculus
  siRNA target sequence for Lrp1b (NM_053011.1,4465-4483).
gtgagcagcaaaaacatat

SEQ ID NO: 549587 - DNA, 19 bp, Mus musculus
  siRNA target sequence for Lrp1b (NM_053011.1,4583-4601).
ccatgaaattcgaaggatt

SEQ ID NO: 549588 - DNA, 19 bp, Mus musculus
  siRNA target sequence for Lrp1b (NM_053011.1,4594-4612).
gaaggattgatctgcataa

SEQ ID NO: 549589 - DNA, 19 bp, Mus musculus
  siRNA target sequence for Lrp1b (NM_053011.1,4598-4616).
gattgatctgcataaagga

SEQ ID NO: 549590 - DNA, 19 bp, Mus musculus
  siRNA target sequence for Lrp1b (NM_053011.1,4615-4633).
gagactacagcctacttgt

SEQ ID NO: 549591 - DNA, 19 bp, Mus musculus
  siRNA target sequence for Lrp1b (NM_053011.1,4636-4654).
ctggactgagaaataccat

SEQ ID NO: 549592 - DNA, 19 bp, Mus musculus
  siRNA target sequence for Lrp1b (NM_053011.1,4747-4765).
gtgtcagtgccatagaagt

SEQ ID NO: 549593 - DNA, 19 bp, Mus musculus
  siRNA target sequence for Lrp1b (NM_053011.1,4843-4861).
gcaatctggaccaaattga

SEQ ID NO: 549594 - DNA, 19 bp, Mus musculus
  siRNA target sequence for Lrp1b (NM_053011.1,4882-4900).
ccctgagggctacactaat

SEQ ID NO: 549595 - DNA, 19 bp, Mus musculus
  siRNA target sequence for Lrp1b (NM_053011.1,4883-4901).
cctgagggctacactaata

SEQ ID NO: 549596 - DNA, 19 bp, Mus musculus
  siRNA target sequence for Lrp1b (NM_053011.1,4886-4904).
gagggctacactaatagca

SEQ ID NO: 549597 - DNA, 19 bp, Mus musculus
  siRNA target sequence for Lrp1b (NM_053011.1,4937-4955).
ggatccaagatatggaatt

SEQ ID NO: 549598 - DNA, 19 bp, Mus musculus
  siRNA target sequence for Lrp1b (NM_053011.1,4979-4997).
caatttccctcgcattgaa

SEQ ID NO: 549599 - DNA, 19 bp, Mus musculus
  siRNA target sequence for Lrp1b (NM_053011.1,4990-5008).
gcattgaatctgcttcaat

SEQ ID NO: 549600 - DNA, 19 bp, Mus musculus
  siRNA target sequence for Lrp1b (NM_053011.1,5009-5027).
gagtggtgccggaagaaaa

SEQ ID NO: 549601 - DNA, 19 bp, Mus musculus
  siRNA target sequence for Lrp1b (NM_053011.1,5018-5036).
cggaagaaaaaccatctat

SEQ ID NO: 549602 - DNA, 19 bp, Mus musculus
  siRNA target sequence for Lrp1b (NM_053011.1,5075-5093).
cgtggaccactttgaaaga

SEQ ID NO: 549603 - DNA, 19 bp, Mus musculus
  siRNA target sequence for Lrp1b (NM_053011.1,5078-5096).
ggaccactttgaaagaaga

SEQ ID NO: 549604 - DNA, 19 bp, Mus musculus
  siRNA target sequence for Lrp1b (NM_053011.1,5113-5131).
ccaggtcagatgctattta

SEQ ID NO: 549605 - DNA, 19 bp, Mus musculus
  siRNA target sequence for Lrp1b (NM_053011.1,5320-5338).
cattcgaccttcagattta

SEQ ID NO: 549606 - DNA, 19 bp, Mus musculus
  siRNA target sequence for Lrp1b (NM_053011.1,5324-5342).
cgaccttcagatttaccat

SEQ ID NO: 549607 - DNA, 19 bp, Mus musculus
  siRNA target sequence for Lrp1b (NM_053011.1,5409-5427).
ctgtgcctcatcaatcata

SEQ ID NO: 549608 - DNA, 19 bp, Mus musculus
  siRNA target sequence for Lrp1b (NM_053011.1,5451-5469).
ccccacctaatgaagcttt

SEQ ID NO: 549609 - DNA, 19 bp, Mus musculus
  siRNA target sequence for Lrp1b (NM_053011.1,5535-5553).
cgaggggtggacattgaca

SEQ ID NO: 549610 - DNA, 19 bp, Mus musculus
  siRNA target sequence for Lrp1b (NM_053011.1,5642-5660).
gtactggacagacatcaaa

SEQ ID NO: 549611 - DNA, 19 bp, Mus musculus
  siRNA target sequence for Lrp1b (NM_053011.1,5669-5687).
cattacacgggctttcatt

SEQ ID NO: 549612 - DNA, 19 bp, Mus musculus
  siRNA target sequence for Lrp1b (NM_053011.1,5697-5715).
ggactagagacagttattt

SEQ ID NO: 549613 - DNA, 19 bp, Mus musculus
  siRNA target sequence for Lrp1b (NM_053011.1,5700-5718).
ctagagacagttatttcaa

SEQ ID NO: 549614 - DNA, 19 bp, Mus musculus
  siRNA target sequence for Lrp1b (NM_053011.1,5705-5723).
gacagttatttcaagagat

SEQ ID NO: 549615 - DNA, 19 bp, Mus musculus
  siRNA target sequence for Lrp1b (NM_053011.1,5750-5768).
ggactgggtttcacgtaat

SEQ ID NO: 549616 - DNA, 19 bp, Mus musculus
  siRNA target sequence for Lrp1b (NM_053011.1,5751-5769).
gactgggtttcacgtaatt

SEQ ID NO: 549617 - DNA, 19 bp, Mus musculus
  siRNA target sequence for Lrp1b (NM_053011.1,5763-5781).
cgtaatttatactggatta

SEQ ID NO: 549618 - DNA, 19 bp, Mus musculus
  siRNA target sequence for Lrp1b (NM_053011.1,5776-5794).
ggattagctcagaattcga

SEQ ID NO: 549619 - DNA, 19 bp, Mus musculus
  siRNA target sequence for Lrp1b (NM_053011.1,5777-5795).
gattagctcagaattcgat

SEQ ID NO: 549620 - DNA, 19 bp, Mus musculus
  siRNA target sequence for Lrp1b (NM_053011.1,5785-5803).
cagaattcgatgaaacaca

SEQ ID NO: 549621 - DNA, 19 bp, Mus musculus
  siRNA target sequence for Lrp1b (NM_053011.1,5787-5805).
gaattcgatgaaacacaaa

SEQ ID NO: 549622 - DNA, 19 bp, Mus musculus
  siRNA target sequence for Lrp1b (NM_053011.1,5823-5841).
gatggctctttgaaaacct

SEQ ID NO: 549623 - DNA, 19 bp, Mus musculus
  siRNA target sequence for Lrp1b (NM_053011.1,5903-5921).
gtactggacagatggaaat

SEQ ID NO: 549624 - DNA, 19 bp, Mus musculus
  siRNA target sequence for Lrp1b (NM_053011.1,5935-5953).
caaatatggatggaagtaa

SEQ ID NO: 549625 - DNA, 19 bp, Mus musculus
  siRNA target sequence for Lrp1b (NM_053011.1,5947-5965).
gaagtaacagcaagattct

SEQ ID NO: 549626 - DNA, 19 bp, Mus musculus
  siRNA target sequence for Lrp1b (NM_053011.1,5950-5968).
gtaacagcaagattctctt

SEQ ID NO: 549627 - DNA, 19 bp, Mus musculus
  siRNA target sequence for Lrp1b (NM_053011.1,5988-6006).
gttggtctatcgatagact

SEQ ID NO: 549628 - DNA, 19 bp, Mus musculus
  siRNA target sequence for Lrp1b (NM_053011.1,6062-6080).
caacctagatggtggtaat

SEQ ID NO: 549629 - DNA, 19 bp, Mus musculus
  siRNA target sequence for Lrp1b (NM_053011.1,6065-6083).
cctagatggtggtaattta

SEQ ID NO: 549630 - DNA, 19 bp, Mus musculus
  siRNA target sequence for Lrp1b (NM_053011.1,6084-6102).
gaagtaatagagtcaatga

SEQ ID NO: 549631 - DNA, 19 bp, Mus musculus
  siRNA target sequence for Lrp1b (NM_053011.1,6154-6172).
ggtgggcagatcaaaactt

SEQ ID NO: 549632 - DNA, 19 bp, Mus musculus
  siRNA target sequence for Lrp1b (NM_053011.1,6155-6173).
gtgggcagatcaaaactta

SEQ ID NO: 549633 - DNA, 19 bp, Mus musculus
  siRNA target sequence for Lrp1b (NM_053011.1,6175-6193).
ctcaactgggaacttgtaa

SEQ ID NO: 549634 - DNA, 19 bp, Mus musculus
  siRNA target sequence for Lrp1b (NM_053011.1,6184-6202).
gaacttgtaacaaaagaga

SEQ ID NO: 549635 - DNA, 19 bp, Mus musculus
  siRNA target sequence for Lrp1b (NM_053011.1,6213-6231).
cccagcattctgcgaaata

SEQ ID NO: 549636 - DNA, 19 bp, Mus musculus
  siRNA target sequence for Lrp1b (NM_053011.1,6214-6232).
ccagcattctgcgaaataa

SEQ ID NO: 549637 - DNA, 19 bp, Mus musculus
  siRNA target sequence for Lrp1b (NM_053011.1,6235-6253).
cttccggagttgttcacat

SEQ ID NO: 549638 - DNA, 19 bp, Mus musculus
  siRNA target sequence for Lrp1b (NM_053011.1,6238-6256).
ccggagttgttcacatgaa

SEQ ID NO: 549639 - DNA, 19 bp, Mus musculus
  siRNA target sequence for Lrp1b (NM_053011.1,6239-6257).
cggagttgttcacatgaaa

SEQ ID NO: 549640 - DNA, 19 bp, Mus musculus
  siRNA target sequence for Lrp1b (NM_053011.1,6241-6259).
gagttgttcacatgaaagt

SEQ ID NO: 549641 - DNA, 19 bp, Mus musculus
  siRNA target sequence for Lrp1b (NM_053011.1,6384-6402).
cagaagaaccgcatgtcat

SEQ ID NO: 549642 - DNA, 19 bp, Mus musculus
  siRNA target sequence for Lrp1b (NM_053011.1,6394-6412).
gcatgtcatgccaaggtat

SEQ ID NO: 549643 - DNA, 19 bp, Mus musculus
  siRNA target sequence for Lrp1b (NM_053011.1,6395-6413).
catgtcatgccaaggtata

SEQ ID NO: 549644 - DNA, 19 bp, Mus musculus
  siRNA target sequence for Lrp1b (NM_053011.1,6398-6416).
gtcatgccaaggtatagaa

SEQ ID NO: 549645 - DNA, 19 bp, Mus musculus
  siRNA target sequence for Lrp1b (NM_053011.1,6414-6432).
gaatcttttcttatgtact

SEQ ID NO: 549646 - DNA, 19 bp, Mus musculus
  siRNA target sequence for Lrp1b (NM_053011.1,6483-6501).
gatgccctgatgccaatat

SEQ ID NO: 549647 - DNA, 19 bp, Mus musculus
  siRNA target sequence for Lrp1b (NM_053011.1,6560-6578).
gacagacatgggccttaat

SEQ ID NO: 549648 - DNA, 19 bp, Mus musculus
  siRNA target sequence for Lrp1b (NM_053011.1,6562-6580).
cagacatgggccttaataa

SEQ ID NO: 549649 - DNA, 19 bp, Mus musculus
  siRNA target sequence for Lrp1b (NM_053011.1,6564-6582).
gacatgggccttaataaaa

SEQ ID NO: 549650 - DNA, 19 bp, Mus musculus
  siRNA target sequence for Lrp1b (NM_053011.1,6680-6698).
catatattggacagatcat

SEQ ID NO: 549651 - DNA, 19 bp, Mus musculus
  siRNA target sequence for Lrp1b (NM_053011.1,6689-6707).
gacagatcatggtttcaat

SEQ ID NO: 549652 - DNA, 19 bp, Mus musculus
  siRNA target sequence for Lrp1b (NM_053011.1,6734-6752).
ctcttttcgttatgtaatt

SEQ ID NO: 549653 - DNA, 19 bp, Mus musculus
  siRNA target sequence for Lrp1b (NM_053011.1,6765-6783).
ctggatcaaccaagatcta

SEQ ID NO: 549654 - DNA, 19 bp, Mus musculus
  siRNA target sequence for Lrp1b (NM_053011.1,6767-6785).
ggatcaaccaagatctata

SEQ ID NO: 549655 - DNA, 19 bp, Mus musculus
  siRNA target sequence for Lrp1b (NM_053011.1,6795-6813).
ccagaaaaaggcttcttgt

SEQ ID NO: 549656 - DNA, 19 bp, Mus musculus
  siRNA target sequence for Lrp1b (NM_053011.1,6826-6844).
ggggacaagtgccttgtat

SEQ ID NO: 549657 - DNA, 19 bp, Mus musculus
  siRNA target sequence for Lrp1b (NM_053011.1,6865-6883).
gttctgagaaggtcatgat

SEQ ID NO: 549658 - DNA, 19 bp, Mus musculus
  siRNA target sequence for Lrp1b (NM_053011.1,6868-6886).
ctgagaaggtcatgattgt

SEQ ID NO: 549659 - DNA, 19 bp, Mus musculus
  siRNA target sequence for Lrp1b (NM_053011.1,6885-6903).
gtaagcgtgggaataacat

SEQ ID NO: 549660 - DNA, 19 bp, Mus musculus
  siRNA target sequence for Lrp1b (NM_053011.1,6913-6931).
gcatctccattgactatga

SEQ ID NO: 549661 - DNA, 19 bp, Mus musculus
  siRNA target sequence for Lrp1b (NM_053011.1,6960-6978).
cgctcagacaagatagaga

SEQ ID NO: 549662 - DNA, 19 bp, Mus musculus
  siRNA target sequence for Lrp1b (NM_053011.1,6997-7015).
gtgcgaatcgtgaagtgtt

SEQ ID NO: 549663 - DNA, 19 bp, Mus musculus
  siRNA target sequence for Lrp1b (NM_053011.1,7051-7069).
cagtctttggggcttacat

SEQ ID NO: 549664 - DNA, 19 bp, Mus musculus
  siRNA target sequence for Lrp1b (NM_053011.1,7134-7152).
gagacagtaaccatgagaa

SEQ ID NO: 549665 - DNA, 19 bp, Mus musculus
  siRNA target sequence for Lrp1b (NM_053011.1,7153-7171).
caggacttggagttaacct

SEQ ID NO: 549666 - DNA, 19 bp, Mus musculus
  siRNA target sequence for Lrp1b (NM_053011.1,7156-7174).
gacttggagttaacctaaa

SEQ ID NO: 549667 - DNA, 19 bp, Mus musculus
  siRNA target sequence for Lrp1b (NM_053011.1,7169-7187).
cctaaaggagatcaaaatt

SEQ ID NO: 549668 - DNA, 19 bp, Mus musculus
  siRNA target sequence for Lrp1b (NM_053011.1,7170-7188).
ctaaaggagatcaaaattt

SEQ ID NO: 549669 - DNA, 19 bp, Mus musculus
  siRNA target sequence for Lrp1b (NM_053011.1,7243-7261).
gtcagcaactatgtcttta

SEQ ID NO: 549670 - DNA, 19 bp, Mus musculus
  siRNA target sequence for Lrp1b (NM_053011.1,7247-7265).
gcaactatgtctttatcga

SEQ ID NO: 549671 - DNA, 19 bp, Mus musculus
  siRNA target sequence for Lrp1b (NM_053011.1,7287-7305).
gcctgtgcccatggatatt

SEQ ID NO: 549672 - DNA, 19 bp, Mus musculus
  siRNA target sequence for Lrp1b (NM_053011.1,7313-7331).
ggatggagttacttgtcta

SEQ ID NO: 549673 - DNA, 19 bp, Mus musculus
  siRNA target sequence for Lrp1b (NM_053011.1,7327-7345).
gtctaaggcatgaaggtta

SEQ ID NO: 549674 - DNA, 19 bp, Mus musculus
  siRNA target sequence for Lrp1b (NM_053011.1,7333-7351).
ggcatgaaggttatttgct

SEQ ID NO: 549675 - DNA, 19 bp, Mus musculus
  siRNA target sequence for Lrp1b (NM_053011.1,7334-7352).
gcatgaaggttatttgcta

SEQ ID NO: 549676 - DNA, 19 bp, Mus musculus
  siRNA target sequence for Lrp1b (NM_053011.1,7335-7353).
catgaaggttatttgctat

SEQ ID NO: 549677 - DNA, 19 bp, Mus musculus
  siRNA target sequence for Lrp1b (NM_053011.1,7338-7356).
gaaggttatttgctatatt

SEQ ID NO: 549678 - DNA, 19 bp, Mus musculus
  siRNA target sequence for Lrp1b (NM_053011.1,7392-7410).
gatgaaaccaatttaaatt

SEQ ID NO: 549679 - DNA, 19 bp, Mus musculus
  siRNA target sequence for Lrp1b (NM_053011.1,7423-7441).
cctacgagaacccaaatta

SEQ ID NO: 549680 - DNA, 19 bp, Mus musculus
  siRNA target sequence for Lrp1b (NM_053011.1,7424-7442).
ctacgagaacccaaattat

SEQ ID NO: 549681 - DNA, 19 bp, Mus musculus
  siRNA target sequence for Lrp1b (NM_053011.1,7428-7446).
gagaacccaaattatttca

SEQ ID NO: 549682 - DNA, 19 bp, Mus musculus
  siRNA target sequence for Lrp1b (NM_053011.1,7491-7509).
ggtaccaatcggatctttt

SEQ ID NO: 549683 - DNA, 19 bp, Mus musculus
  siRNA target sequence for Lrp1b (NM_053011.1,7536-7554).
cagcttattaaagataact

SEQ ID NO: 549684 - DNA, 19 bp, Mus musculus
  siRNA target sequence for Lrp1b (NM_053011.1,7783-7801).
ggacaaattggaatgaaca

SEQ ID NO: 549685 - DNA, 19 bp, Mus musculus
  siRNA target sequence for Lrp1b (NM_053011.1,7854-7872).
gtcagcacagacattctta

SEQ ID NO: 549686 - DNA, 19 bp, Mus musculus
  siRNA target sequence for Lrp1b (NM_053011.1,7856-7874).
cagcacagacattcttact

SEQ ID NO: 549687 - DNA, 19 bp, Mus musculus
  siRNA target sequence for Lrp1b (NM_053011.1,7865-7883).
cattcttactccaaatgga

SEQ ID NO: 549688 - DNA, 19 bp, Mus musculus
  siRNA target sequence for Lrp1b (NM_053011.1,7927-7945).
gcagcttaggaaaaattga

SEQ ID NO: 549689 - DNA, 19 bp, Mus musculus
  siRNA target sequence for Lrp1b (NM_053011.1,7928-7946).
cagcttaggaaaaattgaa

SEQ ID NO: 549690 - DNA, 19 bp, Mus musculus
  siRNA target sequence for Lrp1b (NM_053011.1,7963-7981).
gatcacaacgacatgtgat

SEQ ID NO: 549691 - DNA, 19 bp, Mus musculus
  siRNA target sequence for Lrp1b (NM_053011.1,7968-7986).
caacgacatgtgattgtca

SEQ ID NO: 549692 - DNA, 19 bp, Mus musculus
  siRNA target sequence for Lrp1b (NM_053011.1,7988-8006).
gtctggaccaggaactttt

SEQ ID NO: 549693 - DNA, 19 bp, Mus musculus
  siRNA target sequence for Lrp1b (NM_053011.1,8137-8155).
gaatcatagctgttgctaa

SEQ ID NO: 549694 - DNA, 19 bp, Mus musculus
  siRNA target sequence for Lrp1b (NM_053011.1,8151-8169).
gctaatgacaccaatagct

SEQ ID NO: 549695 - DNA, 19 bp, Mus musculus
  siRNA target sequence for Lrp1b (NM_053011.1,8177-8195).
ctctccgtgtgcattatta

SEQ ID NO: 549696 - DNA, 19 bp, Mus musculus
  siRNA target sequence for Lrp1b (NM_053011.1,8254-8272).
gtagaggggatcgagtatt

SEQ ID NO: 549697 - DNA, 19 bp, Mus musculus
  siRNA target sequence for Lrp1b (NM_053011.1,8257-8275).
gaggggatcgagtattgct

SEQ ID NO: 549698 - DNA, 19 bp, Mus musculus
  siRNA target sequence for Lrp1b (NM_053011.1,8266-8284).
gagtattgctagctaacaa

SEQ ID NO: 549699 - DNA, 19 bp, Mus musculus
  siRNA target sequence for Lrp1b (NM_053011.1,8296-8314).
ctaaaaactcttcttgtaa

SEQ ID NO: 549700 - DNA, 19 bp, Mus musculus
  siRNA target sequence for Lrp1b (NM_053011.1,8303-8321).
ctcttcttgtaatatctat

SEQ ID NO: 549701 - DNA, 19 bp, Mus musculus
  siRNA target sequence for Lrp1b (NM_053011.1,8394-8412).
gacaaatccgatgaaaagt

SEQ ID NO: 549702 - DNA, 19 bp, Mus musculus
  siRNA target sequence for Lrp1b (NM_053011.1,8434-8452).
gttgccgaagtgggtttaa

SEQ ID NO: 549703 - DNA, 19 bp, Mus musculus
  siRNA target sequence for Lrp1b (NM_053011.1,8447-8465).
gtttaaaccgtgctacaat

SEQ ID NO: 549704 - DNA, 19 bp, Mus musculus
  siRNA target sequence for Lrp1b (NM_053011.1,8475-8493).
gttcctcatggcaaactgt

SEQ ID NO: 549705 - DNA, 19 bp, Mus musculus
  siRNA target sequence for Lrp1b (NM_053011.1,8524-8542).
ctgatgagttggattgtaa

SEQ ID NO: 549706 - DNA, 19 bp, Mus musculus
  siRNA target sequence for Lrp1b (NM_053011.1,8580-8598).
gatgggacttgcattccaa

SEQ ID NO: 549707 - DNA, 19 bp, Mus musculus
  siRNA target sequence for Lrp1b (NM_053011.1,8585-8603).
gacttgcattccaagatca

SEQ ID NO: 549708 - DNA, 19 bp, Mus musculus
  siRNA target sequence for Lrp1b (NM_053011.1,8602-8620).
cagcacggtgcaaccaaaa

SEQ ID NO: 549709 - DNA, 19 bp, Mus musculus
  siRNA target sequence for Lrp1b (NM_053011.1,8604-8622).
gcacggtgcaaccaaaaca

SEQ ID NO: 549710 - DNA, 19 bp, Mus musculus
  siRNA target sequence for Lrp1b (NM_053011.1,8646-8664).
gaaaagggttgcaataata

SEQ ID NO: 549711 - DNA, 19 bp, Mus musculus
  siRNA target sequence for Lrp1b (NM_053011.1,8651-8669).
gggttgcaataatacagat

SEQ ID NO: 549712 - DNA, 19 bp, Mus musculus
  siRNA target sequence for Lrp1b (NM_053011.1,8652-8670).
ggttgcaataatacagatt

SEQ ID NO: 549713 - DNA, 19 bp, Mus musculus
  siRNA target sequence for Lrp1b (NM_053011.1,8778-8796).
ggagactattctgatgaat

SEQ ID NO: 549714 - DNA, 19 bp, Mus musculus
  siRNA target sequence for Lrp1b (NM_053011.1,8779-8797).
gagactattctgatgaatt

SEQ ID NO: 549715 - DNA, 19 bp, Mus musculus
  siRNA target sequence for Lrp1b (NM_053011.1,8781-8799).
gactattctgatgaattaa

SEQ ID NO: 549716 - DNA, 19 bp, Mus musculus
  siRNA target sequence for Lrp1b (NM_053011.1,9018-9036).
ggagacagcttagatgaaa

SEQ ID NO: 549717 - DNA, 19 bp, Mus musculus
  siRNA target sequence for Lrp1b (NM_053011.1,9061-9079).
cttgtgctgctgacatgtt

SEQ ID NO: 549718 - DNA, 19 bp, Mus musculus
  siRNA target sequence for Lrp1b (NM_053011.1,9174-9192).
ggctgtgcacccaacaata

SEQ ID NO: 549719 - DNA, 19 bp, Mus musculus
  siRNA target sequence for Lrp1b (NM_053011.1,9176-9194).
ctgtgcacccaacaataca

SEQ ID NO: 549720 - DNA, 19 bp, Mus musculus
  siRNA target sequence for Lrp1b (NM_053011.1,9193-9211).
catgtgacgaaaatgcttt

SEQ ID NO: 549721 - DNA, 19 bp, Mus musculus
  siRNA target sequence for Lrp1b (NM_053011.1,9196-9214).
gtgacgaaaatgctttcat

SEQ ID NO: 549722 - DNA, 19 bp, Mus musculus
  siRNA target sequence for Lrp1b (NM_053011.1,9198-9216).
gacgaaaatgctttcatgt

SEQ ID NO: 549723 - DNA, 19 bp, Mus musculus
  siRNA target sequence for Lrp1b (NM_053011.1,9232-9250).
gcattcccaagcagtttgt

SEQ ID NO: 549724 - DNA, 19 bp, Mus musculus
  siRNA target sequence for Lrp1b (NM_053011.1,9345-9363).
gggcgctgcctcgtgaata

SEQ ID NO: 549725 - DNA, 19 bp, Mus musculus
  siRNA target sequence for Lrp1b (NM_053011.1,9347-9365).
gcgctgcctcgtgaatact

SEQ ID NO: 549726 - DNA, 19 bp, Mus musculus
  siRNA target sequence for Lrp1b (NM_053011.1,9406-9424).
ccgatgaggctccaatcaa

SEQ ID NO: 549727 - DNA, 19 bp, Mus musculus
  siRNA target sequence for Lrp1b (NM_053011.1,9431-9449).
gtgcaggagtgcagaacat

SEQ ID NO: 549728 - DNA, 19 bp, Mus musculus
  siRNA target sequence for Lrp1b (NM_053011.1,9434-9452).
caggagtgcagaacattca

SEQ ID NO: 549729 - DNA, 19 bp, Mus musculus
  siRNA target sequence for Lrp1b (NM_053011.1,9447-9465).
cattcatgcaacagttcat

SEQ ID NO: 549730 - DNA, 19 bp, Mus musculus
  siRNA target sequence for Lrp1b (NM_053011.1,9554-9572).
ctgccacataaatgaatgt

SEQ ID NO: 549731 - DNA, 19 bp, Mus musculus
  siRNA target sequence for Lrp1b (NM_053011.1,9618-9636).
ccagtcagttacaagtgta

SEQ ID NO: 549732 - DNA, 19 bp, Mus musculus
  siRNA target sequence for Lrp1b (NM_053011.1,9643-9661).
ggcctggattccaactgaa

SEQ ID NO: 549733 - DNA, 19 bp, Mus musculus
  siRNA target sequence for Lrp1b (NM_053011.1,9657-9675).
ctgaaggatgatggtaaaa

SEQ ID NO: 549734 - DNA, 19 bp, Mus musculus
  siRNA target sequence for Lrp1b (NM_053011.1,9659-9677).
gaaggatgatggtaaaaca

SEQ ID NO: 549735 - DNA, 19 bp, Mus musculus
  siRNA target sequence for Lrp1b (NM_053011.1,9662-9680).
ggatgatggtaaaacatgt

SEQ ID NO: 549736 - DNA, 19 bp, Mus musculus
  siRNA target sequence for Lrp1b (NM_053011.1,9722-9740).
gcaatgcatcaatacatat

SEQ ID NO: 549737 - DNA, 19 bp, Mus musculus
  siRNA target sequence for Lrp1b (NM_053011.1,9839-9857).
cgccgaccaacacgaaatt

SEQ ID NO: 549738 - DNA, 19 bp, Mus musculus
  siRNA target sequence for Lrp1b (NM_053011.1,9840-9858).
gccgaccaacacgaaatta

SEQ ID NO: 549739 - DNA, 19 bp, Mus musculus
  siRNA target sequence for Lrp1b (NM_053011.1,9842-9860).
cgaccaacacgaaattaga

SEQ ID NO: 549740 - DNA, 19 bp, Mus musculus
  siRNA target sequence for Lrp1b (NM_053011.1,9845-9863).
ccaacacgaaattagaaaa

SEQ ID NO: 549741 - DNA, 19 bp, Mus musculus
  siRNA target sequence for Lrp1b (NM_053011.1,9899-9917).
gcagggattaaacaatgtt

SEQ ID NO: 549742 - DNA, 19 bp, Mus musculus
  siRNA target sequence for Lrp1b (NM_053011.1,9900-9918).
cagggattaaacaatgtta

SEQ ID NO: 549743 - DNA, 19 bp, Mus musculus
  siRNA target sequence for Lrp1b (NM_053011.1,9921-9939).
gctctagacttcgattata

SEQ ID NO: 549744 - DNA, 19 bp, Mus musculus
  siRNA target sequence for Lrp1b (NM_053011.1,9981-9999).
ggaagtcgcataaacagaa

SEQ ID NO: 549745 - DNA, 19 bp, Mus musculus
  siRNA target sequence for Lrp1b (NM_053011.1,9982-10000).
gaagtcgcataaacagaat

SEQ ID NO: 549746 - DNA, 19 bp, Mus musculus
  siRNA target sequence for Lrp1b (NM_053011.1,10054-10072).
cacttgctgttgattggat

SEQ ID NO: 549747 - DNA, 19 bp, Mus musculus
  siRNA target sequence for Lrp1b (NM_053011.1,10108-10126).
ggataattgaagtatccaa

SEQ ID NO: 549748 - DNA, 19 bp, Mus musculus
  siRNA target sequence for Lrp1b (NM_053011.1,10109-10127).
gataattgaagtatccaaa

SEQ ID NO: 549749 - DNA, 19 bp, Mus musculus
  siRNA target sequence for Lrp1b (NM_053011.1,10136-10154).
cttataccctactgtactt

SEQ ID NO: 549750 - DNA, 19 bp, Mus musculus
  siRNA target sequence for Lrp1b (NM_053011.1,10178-10196).
cagggacctgtctttagat

SEQ ID NO: 549751 - DNA, 19 bp, Mus musculus
  siRNA target sequence for Lrp1b (NM_053011.1,10198-10216).
cacgagccgggaatttgta

SEQ ID NO: 549752 - DNA, 19 bp, Mus musculus
  siRNA target sequence for Lrp1b (NM_053011.1,10200-10218).
cgagccgggaatttgtact

SEQ ID NO: 549753 - DNA, 19 bp, Mus musculus
  siRNA target sequence for Lrp1b (NM_053011.1,10256-10274).
cggaatggatggaacaaat

SEQ ID NO: 549754 - DNA, 19 bp, Mus musculus
  siRNA target sequence for Lrp1b (NM_053011.1,10270-10288).
caaatcagagtgttgtcat

SEQ ID NO: 549755 - DNA, 19 bp, Mus musculus
  siRNA target sequence for Lrp1b (NM_053011.1,10309-10327).
ctatggcactaacaataga

SEQ ID NO: 549756 - DNA, 19 bp, Mus musculus
  siRNA target sequence for Lrp1b (NM_053011.1,10313-10331).
ggcactaacaatagattat

SEQ ID NO: 549757 - DNA, 19 bp, Mus musculus
  siRNA target sequence for Lrp1b (NM_053011.1,10315-10333).
cactaacaatagattatgt

SEQ ID NO: 549758 - DNA, 19 bp, Mus musculus
  siRNA target sequence for Lrp1b (NM_053011.1,10317-10335).
ctaacaatagattatgtca

SEQ ID NO: 549759 - DNA, 19 bp, Mus musculus
  siRNA target sequence for Lrp1b (NM_053011.1,10332-10350).
gtcaaccatagactctatt

SEQ ID NO: 549760 - DNA, 19 bp, Mus musculus
  siRNA target sequence for Lrp1b (NM_053011.1,10346-10364).
ctattgggctgatgaaaat

SEQ ID NO: 549761 - DNA, 19 bp, Mus musculus
  siRNA target sequence for Lrp1b (NM_053011.1,10354-10372).
ctgatgaaaatcacattga

SEQ ID NO: 549762 - DNA, 19 bp, Mus musculus
  siRNA target sequence for Lrp1b (NM_053011.1,10390-10408).
gatctcatagacacaaagt

SEQ ID NO: 549763 - DNA, 19 bp, Mus musculus
  siRNA target sequence for Lrp1b (NM_053011.1,10399-10417).
gacacaaagtccctaatca

SEQ ID NO: 549764 - DNA, 19 bp, Mus musculus
  siRNA target sequence for Lrp1b (NM_053011.1,10429-10447).
gggtgattgcactcacttt

SEQ ID NO: 549765 - DNA, 19 bp, Mus musculus
  siRNA target sequence for Lrp1b (NM_053011.1,10431-10449).
gtgattgcactcactttgt

SEQ ID NO: 549766 - DNA, 19 bp, Mus musculus
  siRNA target sequence for Lrp1b (NM_053011.1,10489-10507).
cactcagccgtgtccataa

SEQ ID NO: 549767 - DNA, 19 bp, Mus musculus
  siRNA target sequence for Lrp1b (NM_053011.1,10491-10509).
ctcagccgtgtccataaaa

SEQ ID NO: 549768 - DNA, 19 bp, Mus musculus
  siRNA target sequence for Lrp1b (NM_053011.1,10527-10545).
ctttcactgattaactcat

SEQ ID NO: 549769 - DNA, 19 bp, Mus musculus
  siRNA target sequence for Lrp1b (NM_053011.1,10546-10564).
ggcatgccatcacagatat

SEQ ID NO: 549770 - DNA, 19 bp, Mus musculus
  siRNA target sequence for Lrp1b (NM_053011.1,10560-10578).
gatatccaggtgtatcatt

SEQ ID NO: 549771 - DNA, 19 bp, Mus musculus
  siRNA target sequence for Lrp1b (NM_053011.1,10565-10583).
ccaggtgtatcattcttat

SEQ ID NO: 549772 - DNA, 19 bp, Mus musculus
  siRNA target sequence for Lrp1b (NM_053011.1,10566-10584).
caggtgtatcattcttata

SEQ ID NO: 549773 - DNA, 19 bp, Mus musculus
  siRNA target sequence for Lrp1b (NM_053011.1,10571-10589).
gtatcattcttatagacaa

SEQ ID NO: 549774 - DNA, 19 bp, Mus musculus
  siRNA target sequence for Lrp1b (NM_053011.1,10591-10609).
ccgatgtctccaaacatct

SEQ ID NO: 549775 - DNA, 19 bp, Mus musculus
  siRNA target sequence for Lrp1b (NM_053011.1,10592-10610).
cgatgtctccaaacatctt

SEQ ID NO: 549776 - DNA, 19 bp, Mus musculus
  siRNA target sequence for Lrp1b (NM_053011.1,10678-10696).
catgtcctaccaacttcta

SEQ ID NO: 549777 - DNA, 19 bp, Mus musculus
  siRNA target sequence for Lrp1b (NM_053011.1,10694-10712).
ctaccttgcagctgataat

SEQ ID NO: 549778 - DNA, 19 bp, Mus musculus
  siRNA target sequence for Lrp1b (NM_053011.1,10698-10716).
cttgcagctgataatagaa

SEQ ID NO: 549779 - DNA, 19 bp, Mus musculus
  siRNA target sequence for Lrp1b (NM_053011.1,10701-10719).
gcagctgataatagaactt

SEQ ID NO: 549780 - DNA, 19 bp, Mus musculus
  siRNA target sequence for Lrp1b (NM_053011.1,10745-10763).
gtttcgatgcaaaactgat

SEQ ID NO: 549781 - DNA, 19 bp, Mus musculus
  siRNA target sequence for Lrp1b (NM_053011.1,10749-10767).
cgatgcaaaactgataaat

SEQ ID NO: 549782 - DNA, 19 bp, Mus musculus
  siRNA target sequence for Lrp1b (NM_053011.1,10828-10846).
ctgacgactgtcctgaatt

SEQ ID NO: 549783 - DNA, 19 bp, Mus musculus
  siRNA target sequence for Lrp1b (NM_053011.1,10830-10848).
gacgactgtcctgaattta

SEQ ID NO: 549784 - DNA, 19 bp, Mus musculus
  siRNA target sequence for Lrp1b (NM_053011.1,10835-10853).
ctgtcctgaatttaagtgt

SEQ ID NO: 549785 - DNA, 19 bp, Mus musculus
  siRNA target sequence for Lrp1b (NM_053011.1,10852-10870).
gtcagccaggccgatttca

SEQ ID NO: 549786 - DNA, 19 bp, Mus musculus
  siRNA target sequence for Lrp1b (NM_053011.1,10932-10950).
gacaactcggatgaactta

SEQ ID NO: 549787 - DNA, 19 bp, Mus musculus
  siRNA target sequence for Lrp1b (NM_053011.1,10937-10955).
ctcggatgaacttaactgt

SEQ ID NO: 549788 - DNA, 19 bp, Mus musculus
  siRNA target sequence for Lrp1b (NM_053011.1,10971-10989).
ctggcaggtcagttcaagt

SEQ ID NO: 549789 - DNA, 19 bp, Mus musculus
  siRNA target sequence for Lrp1b (NM_053011.1,10988-11006).
gtgtaccaagaacaagaaa

SEQ ID NO: 549790 - DNA, 19 bp, Mus musculus
  siRNA target sequence for Lrp1b (NM_053011.1,11013-11031).
ccagtaaacctcagatgta

SEQ ID NO: 549791 - DNA, 19 bp, Mus musculus
  siRNA target sequence for Lrp1b (NM_053011.1,11014-11032).
cagtaaacctcagatgtaa

SEQ ID NO: 549792 - DNA, 19 bp, Mus musculus
  siRNA target sequence for Lrp1b (NM_053011.1,11095-11113).
ctgactatttccagtgtaa

SEQ ID NO: 549793 - DNA, 19 bp, Mus musculus
  siRNA target sequence for Lrp1b (NM_053011.1,11097-11115).
gactatttccagtgtaaga

SEQ ID NO: 549794 - DNA, 19 bp, Mus musculus
  siRNA target sequence for Lrp1b (NM_053011.1,11099-11117).
ctatttccagtgtaagact

SEQ ID NO: 549795 - DNA, 19 bp, Mus musculus
  siRNA target sequence for Lrp1b (NM_053011.1,11108-11126).
gtgtaagactacaaagcat

SEQ ID NO: 549796 - DNA, 19 bp, Mus musculus
  siRNA target sequence for Lrp1b (NM_053011.1,11215-11233).
ctcatgagttccagtgtaa

SEQ ID NO: 549797 - DNA, 19 bp, Mus musculus
  siRNA target sequence for Lrp1b (NM_053011.1,11217-11235).
catgagttccagtgtaaga

SEQ ID NO: 549798 - DNA, 19 bp, Mus musculus
  siRNA target sequence for Lrp1b (NM_053011.1,11230-11248).
gtaagaacaacaactgtat

SEQ ID NO: 549799 - DNA, 19 bp, Mus musculus
  siRNA target sequence for Lrp1b (NM_053011.1,11253-11271).
gatcactggcgatgtgata

SEQ ID NO: 549800 - DNA, 19 bp, Mus musculus
  siRNA target sequence for Lrp1b (NM_053011.1,11276-11294).
gaatgactgcagtgataat

SEQ ID NO: 549801 - DNA, 19 bp, Mus musculus
  siRNA target sequence for Lrp1b (NM_053011.1,11326-11344).
gtacactgaaagactttct

SEQ ID NO: 549802 - DNA, 19 bp, Mus musculus
  siRNA target sequence for Lrp1b (NM_053011.1,11355-11373).
ggagactgtgtatcatcaa

SEQ ID NO: 549803 - DNA, 19 bp, Mus musculus
  siRNA target sequence for Lrp1b (NM_053011.1,11378-11396).
ctggtgtgatggagagttt

SEQ ID NO: 549804 - DNA, 19 bp, Mus musculus
  siRNA target sequence for Lrp1b (NM_053011.1,11440-11458).
gttccaaagatcagtttca

SEQ ID NO: 549805 - DNA, 19 bp, Mus musculus
  siRNA target sequence for Lrp1b (NM_053011.1,11448-11466).
gatcagtttcagtgttcta

SEQ ID NO: 549806 - DNA, 19 bp, Mus musculus
  siRNA target sequence for Lrp1b (NM_053011.1,11503-11521).
gacatgaggactgtaaata

SEQ ID NO: 549807 - DNA, 19 bp, Mus musculus
  siRNA target sequence for Lrp1b (NM_053011.1,11599-11617).
gtctgtcagcatctttgaa

SEQ ID NO: 549808 - DNA, 19 bp, Mus musculus
  siRNA target sequence for Lrp1b (NM_053011.1,11661-11679).
gactgtgtgatagaatgta

SEQ ID NO: 549809 - DNA, 19 bp, Mus musculus
  siRNA target sequence for Lrp1b (NM_053011.1,11731-11749).
ggctgtgcgatggaattta

SEQ ID NO: 549810 - DNA, 19 bp, Mus musculus
  siRNA target sequence for Lrp1b (NM_053011.1,11732-11750).
gctgtgcgatggaatttat

SEQ ID NO: 549811 - DNA, 19 bp, Mus musculus
  siRNA target sequence for Lrp1b (NM_053011.1,11735-11753).
gtgcgatggaatttatgat

SEQ ID NO: 549812 - DNA, 19 bp, Mus musculus
  siRNA target sequence for Lrp1b (NM_053011.1,11797-11815).
gtatatgcagagatgatga

SEQ ID NO: 549813 - DNA, 19 bp, Mus musculus
  siRNA target sequence for Lrp1b (NM_053011.1,11814-11832).
gagttcctgtgcaataact

SEQ ID NO: 549814 - DNA, 19 bp, Mus musculus
  siRNA target sequence for Lrp1b (NM_053011.1,11931-11949).
cccacgaggccttacagat

SEQ ID NO: 549815 - DNA, 19 bp, Mus musculus
  siRNA target sequence for Lrp1b (NM_053011.1,11970-11988).
ctgcaacttgagaagatat

SEQ ID NO: 549816 - DNA, 19 bp, Mus musculus
  siRNA target sequence for Lrp1b (NM_053011.1,11984-12002).
gatatgcaacgggattaat

SEQ ID NO: 549817 - DNA, 19 bp, Mus musculus
  siRNA target sequence for Lrp1b (NM_053011.1,12030-12048).
cactgcagtggtaaactgt

SEQ ID NO: 549818 - DNA, 19 bp, Mus musculus
  siRNA target sequence for Lrp1b (NM_053011.1,12064-12082).
cttgtaagaaggatgagtt

SEQ ID NO: 549819 - DNA, 19 bp, Mus musculus
  siRNA target sequence for Lrp1b (NM_053011.1,12170-12188).
cctgaagactcccattgaa

SEQ ID NO: 549820 - DNA, 19 bp, Mus musculus
  siRNA target sequence for Lrp1b (NM_053011.1,12327-12345).
ctgctgtttggaatatgct

SEQ ID NO: 549821 - DNA, 19 bp, Mus musculus
  siRNA target sequence for Lrp1b (NM_053011.1,12362-12380).
cacacgaggatcatataaa

SEQ ID NO: 549822 - DNA, 19 bp, Mus musculus
  siRNA target sequence for Lrp1b (NM_053011.1,12427-12445).
caaaaggctctgaagatca

SEQ ID NO: 549823 - DNA, 19 bp, Mus musculus
  siRNA target sequence for Lrp1b (NM_053011.1,12486-12504).
gtatatccattcaactaca

SEQ ID NO: 549824 - DNA, 19 bp, Mus musculus
  siRNA target sequence for Lrp1b (NM_053011.1,12507-12525).
ggcggtcatcagcagattt

SEQ ID NO: 549825 - DNA, 19 bp, Mus musculus
  siRNA target sequence for Lrp1b (NM_053011.1,12509-12527).
cggtcatcagcagatttct

SEQ ID NO: 549826 - DNA, 19 bp, Mus musculus
  siRNA target sequence for Lrp1b (NM_053011.1,12511-12529).
gtcatcagcagatttctca

SEQ ID NO: 549827 - DNA, 19 bp, Mus musculus
  siRNA target sequence for Lrp1b (NM_053011.1,12518-12536).
gcagatttctcatgttgaa

SEQ ID NO: 549828 - DNA, 19 bp, Mus musculus
  siRNA target sequence for Lrp1b (NM_053011.1,12521-12539).
gatttctcatgttgaacat

SEQ ID NO: 549829 - DNA, 19 bp, Mus musculus
  siRNA target sequence for Lrp1b (NM_053011.1,12528-12546).
catgttgaacataattcaa

SEQ ID NO: 549830 - DNA, 19 bp, Mus musculus
  siRNA target sequence for Lrp1b (NM_053011.1,12553-12571).
cagggatggatgtacatta

SEQ ID NO: 549831 - DNA, 19 bp, Mus musculus
  siRNA target sequence for Lrp1b (NM_053011.1,12560-12578).
ggatgtacattatcaaaga

SEQ ID NO: 549832 - DNA, 19 bp, Mus musculus
  siRNA target sequence for Lrp1b (NM_053011.1,12593-12611).
gagtactcagtttaatcca

SEQ ID NO: 549833 - DNA, 19 bp, Mus musculus
  siRNA target sequence for Lrp1b (NM_053011.1,12609-12627).
ccaggcgggattttctaca

SEQ ID NO: 549834 - DNA, 19 bp, Mus musculus
  siRNA target sequence for Lrp1b (NM_053011.1,12610-12628).
caggcgggattttctacaa

SEQ ID NO: 549835 - DNA, 19 bp, Mus musculus
  siRNA target sequence for Lrp1b (NM_053011.1,12612-12630).
ggcgggattttctacaaaa

SEQ ID NO: 549836 - DNA, 19 bp, Mus musculus
  siRNA target sequence for Lrp1b (NM_053011.1,12613-12631).
gcgggattttctacaaaat

SEQ ID NO: 549837 - DNA, 19 bp, Mus musculus
  siRNA target sequence for Lrp1b (NM_053011.1,12616-12634).
ggattttctacaaaatgat

SEQ ID NO: 549838 - DNA, 19 bp, Mus musculus
  siRNA target sequence for Lrp1b (NM_053011.1,12635-12653).
cgatgccagagaaaagaga

SEQ ID NO: 549839 - DNA, 19 bp, Mus musculus
  siRNA target sequence for Lrp1b (NM_053011.1,12657-12675).
gcgaatagtggcttgattt

SEQ ID NO: 549840 - DNA, 19 bp, Mus musculus
  siRNA target sequence for Lrp1b (NM_053011.1,12667-12685).
gcttgatttgtcctgaatt

SEQ ID NO: 549841 - DNA, 19 bp, Mus musculus
  siRNA target sequence for Lrp1b (NM_053011.1,12717-12735).
gttgcaggaaatgtttact

SEQ ID NO: 549842 - DNA, 19 bp, Mus musculus
  siRNA target sequence for Lrp1b (NM_053011.1,12729-12747).
gtttactggacagatcatt

SEQ ID NO: 549843 - DNA, 19 bp, Mus musculus
  siRNA target sequence for Lrp1b (NM_053011.1,12755-12773).
gcactggttcagctactat

SEQ ID NO: 549844 - DNA, 19 bp, Mus musculus
  siRNA target sequence for Lrp1b (NM_053011.1,12758-12776).
ctggttcagctactatact

SEQ ID NO: 549845 - DNA, 19 bp, Mus musculus
  siRNA target sequence for Lrp1b (NM_053011.1,12794-12812).
gaggtactccatcaatgta

SEQ ID NO: 549846 - DNA, 19 bp, Mus musculus
  siRNA target sequence for Lrp1b (NM_053011.1,12863-12881).
ggagccctatgctattgct

SEQ ID NO: 549847 - DNA, 19 bp, Mus musculus
  siRNA target sequence for Lrp1b (NM_053011.1,12868-12886).
cctatgctattgctgtaaa

SEQ ID NO: 549848 - DNA, 19 bp, Mus musculus
  siRNA target sequence for Lrp1b (NM_053011.1,12869-12887).
ctatgctattgctgtaaat

SEQ ID NO: 549849 - DNA, 19 bp, Mus musculus
  siRNA target sequence for Lrp1b (NM_053011.1,12902-12920).
gatgtactggaccgtaatt

SEQ ID NO: 549850 - DNA, 19 bp, Mus musculus
  siRNA target sequence for Lrp1b (NM_053011.1,12959-12977).
cactctgaggagggtttta

SEQ ID NO: 549851 - DNA, 19 bp, Mus musculus
  siRNA target sequence for Lrp1b (NM_053011.1,12965-12983).
gaggagggttttagtacaa

SEQ ID NO: 549852 - DNA, 19 bp, Mus musculus
  siRNA target sequence for Lrp1b (NM_053011.1,13001-13019).
cacaggtctgactgttgat

SEQ ID NO: 549853 - DNA, 19 bp, Mus musculus
  siRNA target sequence for Lrp1b (NM_053011.1,13003-13021).
caggtctgactgttgatca

SEQ ID NO: 549854 - DNA, 19 bp, Mus musculus
  siRNA target sequence for Lrp1b (NM_053011.1,13005-13023).
ggtctgactgttgatcatt

SEQ ID NO: 549855 - DNA, 19 bp, Mus musculus
  siRNA target sequence for Lrp1b (NM_053011.1,13006-13024).
gtctgactgttgatcattt

SEQ ID NO: 549856 - DNA, 19 bp, Mus musculus
  siRNA target sequence for Lrp1b (NM_053011.1,13010-13028).
gactgttgatcattttggt

SEQ ID NO: 549857 - DNA, 19 bp, Mus musculus
  siRNA target sequence for Lrp1b (NM_053011.1,13111-13129).
gcagcaaacaaggtttgtt

SEQ ID NO: 549858 - DNA, 19 bp, Mus musculus
  siRNA target sequence for Lrp1b (NM_053011.1,13127-13145).
gttgcatcctcacagaatt

SEQ ID NO: 549859 - DNA, 19 bp, Mus musculus
  siRNA target sequence for Lrp1b (NM_053011.1,13179-13197).
cctaaaaatggtatattca

SEQ ID NO: 549860 - DNA, 19 bp, Mus musculus
  siRNA target sequence for Lrp1b (NM_053011.1,13188-13206).
ggtatattcagagttcaaa

SEQ ID NO: 549861 - DNA, 19 bp, Mus musculus
  siRNA target sequence for Lrp1b (NM_053011.1,13236-13254).
gctttaggcgttgacaaaa

SEQ ID NO: 549862 - DNA, 19 bp, Mus musculus
  siRNA target sequence for Lrp1b (NM_053011.1,13242-13260).
ggcgttgacaaaacaaaga

SEQ ID NO: 549863 - DNA, 19 bp, Mus musculus
  siRNA target sequence for Lrp1b (NM_053011.1,13268-13286).
ggtatcacatcgctataaa

SEQ ID NO: 549864 - DNA, 19 bp, Mus musculus
  siRNA target sequence for Lrp1b (NM_053011.1,13273-13291).
cacatcgctataaacaact

SEQ ID NO: 549865 - DNA, 19 bp, Mus musculus
  siRNA target sequence for Lrp1b (NM_053011.1,13275-13293).
catcgctataaacaactaa

SEQ ID NO: 549866 - DNA, 19 bp, Mus musculus
  siRNA target sequence for Lrp1b (NM_053011.1,13278-13296).
cgctataaacaactaaatt

SEQ ID NO: 549867 - DNA, 19 bp, Mus musculus
  siRNA target sequence for Lrp1b (NM_053011.1,13280-13298).
ctataaacaactaaattta

SEQ ID NO: 549868 - DNA, 19 bp, Mus musculus
  siRNA target sequence for Lrp1b (NM_053011.1,13347-13365).
ccttctggagccacatgta

SEQ ID NO: 549869 - DNA, 19 bp, Mus musculus
  siRNA target sequence for Lrp1b (NM_053011.1,13348-13366).
cttctggagccacatgtat

SEQ ID NO: 549870 - DNA, 19 bp, Mus musculus
  siRNA target sequence for Lrp1b (NM_053011.1,13369-13387).
gcccagagggaaaatatat

SEQ ID NO: 549871 - DNA, 19 bp, Mus musculus
  siRNA target sequence for Lrp1b (NM_053011.1,13410-13428).
gacagtctgttagatgatt

SEQ ID NO: 549872 - DNA, 19 bp, Mus musculus
  siRNA target sequence for Lrp1b (NM_053011.1,13456-13474).
gaagatgcattttaaatga

SEQ ID NO: 549873 - DNA, 19 bp, Mus musculus
  siRNA target sequence for Lrp1b (NM_053011.1,13560-13578).
ggagggacctgcataccat

SEQ ID NO: 549874 - DNA, 19 bp, Mus musculus
  siRNA target sequence for Lrp1b (NM_053011.1,13732-13750).
gagacagatgccagtacta

SEQ ID NO: 549875 - DNA, 19 bp, Mus musculus
  siRNA target sequence for Lrp1b (NM_053011.1,13757-13775).
ccaccactattgtgtgaat

SEQ ID NO: 549876 - DNA, 19 bp, Mus musculus
  siRNA target sequence for Lrp1b (NM_053011.1,13758-13776).
caccactattgtgtgaatt

SEQ ID NO: 549877 - DNA, 19 bp, Mus musculus
  siRNA target sequence for Lrp1b (NM_053011.1,13830-13848).
cgctatgaaggaccaaaat

SEQ ID NO: 549878 - DNA, 19 bp, Mus musculus
  siRNA target sequence for Lrp1b (NM_053011.1,13840-13858).
gaccaaaatgtgagattga

SEQ ID NO: 549879 - DNA, 19 bp, Mus musculus
  siRNA target sequence for Lrp1b (NM_053011.1,13843-13861).
caaaatgtgagattgacaa

SEQ ID NO: 549880 - DNA, 19 bp, Mus musculus
  siRNA target sequence for Lrp1b (NM_053011.1,13849-13867).
gtgagattgacaaatgtgt

SEQ ID NO: 549881 - DNA, 19 bp, Mus musculus
  siRNA target sequence for Lrp1b (NM_053011.1,13875-13893).
catgggggtcactgtatta

SEQ ID NO: 549882 - DNA, 19 bp, Mus musculus
  siRNA target sequence for Lrp1b (NM_053011.1,13878-13896).
gggggtcactgtattataa

SEQ ID NO: 549883 - DNA, 19 bp, Mus musculus
  siRNA target sequence for Lrp1b (NM_053011.1,13880-13898).
gggtcactgtattataaat

SEQ ID NO: 549884 - DNA, 19 bp, Mus musculus
  siRNA target sequence for Lrp1b (NM_053011.1,13881-13899).
ggtcactgtattataaata

SEQ ID NO: 549885 - DNA, 19 bp, Mus musculus
  siRNA target sequence for Lrp1b (NM_053011.1,13925-13943).
ctgtactaatgggaagatt

SEQ ID NO: 549886 - DNA, 19 bp, Mus musculus
  siRNA target sequence for Lrp1b (NM_053011.1,14000-14018).
ggaccctgagactagtata

SEQ ID NO: 549887 - DNA, 19 bp, Mus musculus
  siRNA target sequence for Lrp1b (NM_053011.1,14003-14021).
ccctgagactagtatacct

SEQ ID NO: 549888 - DNA, 19 bp, Mus musculus
  siRNA target sequence for Lrp1b (NM_053011.1,14028-14046).
gtgtgctccactaattggt

SEQ ID NO: 549889 - DNA, 19 bp, Mus musculus
  siRNA target sequence for Lrp1b (NM_053011.1,14136-14154).
cttttggtgaccttggtaa

SEQ ID NO: 549890 - DNA, 19 bp, Mus musculus
  siRNA target sequence for Lrp1b (NM_053011.1,14150-14168).
ggtaaccactctagtgatt

SEQ ID NO: 549891 - DNA, 19 bp, Mus musculus
  siRNA target sequence for Lrp1b (NM_053011.1,14158-14176).
ctctagtgattggtttagt

SEQ ID NO: 549892 - DNA, 19 bp, Mus musculus
  siRNA target sequence for Lrp1b (NM_053011.1,14169-14187).
ggtttagtggtttgtaaga

SEQ ID NO: 549893 - DNA, 19 bp, Mus musculus
  siRNA target sequence for Lrp1b (NM_053011.1,14244-14262).
gtagaaatcggcaatccat

SEQ ID NO: 549894 - DNA, 19 bp, Mus musculus
  siRNA target sequence for Lrp1b (NM_053011.1,14252-14270).
cggcaatccatcatacaat

SEQ ID NO: 549895 - DNA, 19 bp, Mus musculus
  siRNA target sequence for Lrp1b (NM_053011.1,14253-14271).
ggcaatccatcatacaata

SEQ ID NO: 549896 - DNA, 19 bp, Mus musculus
  siRNA target sequence for Lrp1b (NM_053011.1,14254-14272).
gcaatccatcatacaatat

SEQ ID NO: 549897 - DNA, 19 bp, Mus musculus
  siRNA target sequence for Lrp1b (NM_053011.1,14260-14278).
catcatacaatatgtatga

SEQ ID NO: 549898 - DNA, 19 bp, Mus musculus
  siRNA target sequence for Lrp1b (NM_053011.1,14294-14312).
cagtgatgggggtctttta

SEQ ID NO: 549899 - DNA, 19 bp, Mus musculus
  siRNA target sequence for Lrp1b (NM_053011.1,14296-14314).
gtgatgggggtcttttaga

SEQ ID NO: 549900 - DNA, 19 bp, Mus musculus
  siRNA target sequence for Lrp1b (NM_053011.1,14391-14409).
gcaccgcccatctacctaa

SEQ ID NO: 549901 - DNA, 19 bp, Mus musculus
  siRNA target sequence for Lrp1b (NM_053011.1,14392-14410).
caccgcccatctacctaaa

SEQ ID NO: 549902 - DNA, 19 bp, Mus musculus
  siRNA target sequence for Lrp1b (NM_053011.1,14394-14412).
ccgcccatctacctaaact

SEQ ID NO: 549903 - DNA, 19 bp, Mus musculus
  siRNA target sequence for Lrp1b (NM_053011.1,14396-14414).
gcccatctacctaaactct

SEQ ID NO: 549904 - DNA, 19 bp, Mus musculus
  siRNA target sequence for Lrp1b (NM_053011.1,14453-14471).
ctccaacccagtatatgca

SEQ ID NO: 549905 - DNA, 19 bp, Mus musculus
  siRNA target sequence for Lrp1b (NM_053011.1,14456-14474).
caacccagtatatgcaaaa

SEQ ID NO: 549906 - DNA, 19 bp, Mus musculus
  siRNA target sequence for Ltbp2 (NM_013589.1,830-848).
caccaaccactgtatcaaa

SEQ ID NO: 549907 - DNA, 19 bp, Mus musculus
  siRNA target sequence for Ltbp2 (NM_013589.1,1386-1404).
gacaccaccaccttgtaca

SEQ ID NO: 549908 - DNA, 19 bp, Mus musculus
  siRNA target sequence for Ltbp2 (NM_013589.1,1516-1534).
ccaactccacaggaaagtt

SEQ ID NO: 549909 - DNA, 19 bp, Mus musculus
  siRNA target sequence for Ltbp2 (NM_013589.1,2331-2349).
cggatcaccaagcagatat

SEQ ID NO: 549910 - DNA, 19 bp, Mus musculus
  siRNA target sequence for Ltbp2 (NM_013589.1,2803-2821).
cagactttgatccatgttt

SEQ ID NO: 549911 - DNA, 19 bp, Mus musculus
  siRNA target sequence for Ltbp2 (NM_013589.1,2807-2825).
ctttgatccatgttttgct

SEQ ID NO: 549912 - DNA, 19 bp, Mus musculus
  siRNA target sequence for Ltbp2 (NM_013589.1,2859-2877).
gtgagcctcccaaatggat

SEQ ID NO: 549913 - DNA, 19 bp, Mus musculus
  siRNA target sequence for Ltbp2 (NM_013589.1,2864-2882).
cctcccaaatggatacaga

SEQ ID NO: 549914 - DNA, 19 bp, Mus musculus
  siRNA target sequence for Ltbp2 (NM_013589.1,2865-2883).
ctcccaaatggatacagat

SEQ ID NO: 549915 - DNA, 19 bp, Mus musculus
  siRNA target sequence for Ltbp2 (NM_013589.1,2918-2936).
ccaagactactgtactgat

SEQ ID NO: 549916 - DNA, 19 bp, Mus musculus
  siRNA target sequence for Ltbp2 (NM_013589.1,2932-2950).
ctgatgacaacgagtgtat

SEQ ID NO: 549917 - DNA, 19 bp, Mus musculus
  siRNA target sequence for Ltbp2 (NM_013589.1,3049-3067).
cacaggagtgccaagatat

SEQ ID NO: 549918 - DNA, 19 bp, Mus musculus
  siRNA target sequence for Ltbp2 (NM_013589.1,3053-3071).
ggagtgccaagatatcgat

SEQ ID NO: 549919 - DNA, 19 bp, Mus musculus
  siRNA target sequence for Ltbp2 (NM_013589.1,3142-3160).
gtgatcggggctacatcat

SEQ ID NO: 549920 - DNA, 19 bp, Mus musculus
  siRNA target sequence for Ltbp2 (NM_013589.1,3287-3305).
gagtgggagctgtgtagat

SEQ ID NO: 549921 - DNA, 19 bp, Mus musculus
  siRNA target sequence for Ltbp2 (NM_013589.1,3592-3610).
gcgtctgcaccaatactgt

SEQ ID NO: 549922 - DNA, 19 bp, Mus musculus
  siRNA target sequence for Ltbp2 (NM_013589.1,3593-3611).
cgtctgcaccaatactgta

SEQ ID NO: 549923 - DNA, 19 bp, Mus musculus
  siRNA target sequence for Ltbp2 (NM_013589.1,3717-3735).
ggaggcgaatgcaagaaca

SEQ ID NO: 549924 - DNA, 19 bp, Mus musculus
  siRNA target sequence for Ltbp2 (NM_013589.1,4039-4057).
gcggagaatgtttggatat

SEQ ID NO: 549925 - DNA, 19 bp, Mus musculus
  siRNA target sequence for Ltbp2 (NM_013589.1,4157-4175).
ctatgtggcgccaaatgga

SEQ ID NO: 549926 - DNA, 19 bp, Mus musculus
  siRNA target sequence for Ltbp2 (NM_013589.1,4174-4192).
gagactgcattgacataga

SEQ ID NO: 549927 - DNA, 19 bp, Mus musculus
  siRNA target sequence for Ltbp2 (NM_013589.1,4409-4427).
ggagtacgacgcagaagaa

SEQ ID NO: 549928 - DNA, 19 bp, Mus musculus
  siRNA target sequence for Ltbp2 (NM_013589.1,4640-4658).
ggactcagttgaattcagt

SEQ ID NO: 549929 - DNA, 19 bp, Mus musculus
  siRNA target sequence for Ltbp2 (NM_013589.1,4694-4712).
ggaaggagcctggacattt

SEQ ID NO: 549930 - DNA, 19 bp, Mus musculus
  siRNA target sequence for Ltbp2 (NM_013589.1,4714-4732).
gacaaaccatgtatacaga

SEQ ID NO: 549931 - DNA, 19 bp, Mus musculus
  siRNA target sequence for Ltbp2 (NM_013589.1,4790-4808).
catagtgcctggctacatt

SEQ ID NO: 549932 - DNA, 19 bp, Mus musculus
  siRNA target sequence for Ltbp2 (NM_013589.1,5079-5097).
gggcaccataccacctata

SEQ ID NO: 549933 - DNA, 19 bp, Mus musculus
  siRNA target sequence for Ltbp2 (NM_013589.1,5081-5099).
gcaccataccacctataca

SEQ ID NO: 549934 - DNA, 19 bp, Mus musculus
  siRNA target sequence for Ltbp2 (NM_013589.1,5084-5102).
ccataccacctatacagaa

SEQ ID NO: 549935 - DNA, 19 bp, Mus musculus
  siRNA target sequence for Ltbp2 (NM_013589.1,5085-5103).
cataccacctatacagaat

SEQ ID NO: 549936 - DNA, 19 bp, Mus musculus
  siRNA target sequence for Ltbp2 (NM_013589.1,5529-5547).
gtgcgggagggctacactt

SEQ ID NO: 549937 - DNA, 19 bp, Mus musculus
  siRNA target sequence for Ltbp3 (NM_008520.1,635-653).
ctagcaaacacgccattta

SEQ ID NO: 549938 - DNA, 19 bp, Mus musculus
  siRNA target sequence for Ltbp3 (NM_008520.1,693-711).
gggtcctcctgcacaacat

SEQ ID NO: 549939 - DNA, 19 bp, Mus musculus
  siRNA target sequence for Ltbp3 (NM_008520.1,985-1003).
cttaccaagcaggaagatt

SEQ ID NO: 549940 - DNA, 19 bp, Mus musculus
  siRNA target sequence for Ltbp3 (NM_008520.1,1209-1227).
caacaaccctggctcttat

SEQ ID NO: 549941 - DNA, 19 bp, Mus musculus
  siRNA target sequence for Ltbp3 (NM_008520.1,1870-1888).
cctggcccctcggattact

SEQ ID NO: 549942 - DNA, 19 bp, Mus musculus
  siRNA target sequence for Ltbp3 (NM_008520.1,1926-1944).
gcaccgctactgtgttgat

SEQ ID NO: 549943 - DNA, 19 bp, Mus musculus
  siRNA target sequence for Ltbp3 (NM_008520.1,1998-2016).
cactggtggctcctacaat

SEQ ID NO: 549944 - DNA, 19 bp, Mus musculus
  siRNA target sequence for Ltbp3 (NM_008520.1,2003-2021).
gtggctcctacaattgtca

SEQ ID NO: 549945 - DNA, 19 bp, Mus musculus
  siRNA target sequence for Ltbp3 (NM_008520.1,2130-2148).
cttccctggtcactacaaa

SEQ ID NO: 549946 - DNA, 19 bp, Mus musculus
  siRNA target sequence for Ltbp3 (NM_008520.1,2135-2153).
ctggtcactacaaatgcaa

SEQ ID NO: 549947 - DNA, 19 bp, Mus musculus
  siRNA target sequence for Ltbp3 (NM_008520.1,2189-2207).
cgcccatttgcgaagacat

SEQ ID NO: 549948 - DNA, 19 bp, Mus musculus
  siRNA target sequence for Ltbp3 (NM_008520.1,2526-2544).
gtgcctctccggctatcat

SEQ ID NO: 549949 - DNA, 19 bp, Mus musculus
  siRNA target sequence for Ltbp3 (NM_008520.1,2886-2904).
cagcgtattggctaccaat

SEQ ID NO: 549950 - DNA, 19 bp, Mus musculus
  siRNA target sequence for Ltbp3 (NM_008520.1,2890-2908).
gtattggctaccaatgtca

SEQ ID NO: 549951 - DNA, 19 bp, Mus musculus
  siRNA target sequence for Ltbp3 (NM_008520.1,2948-2966).
gagaccactgcgaaatcta

SEQ ID NO: 549952 - DNA, 19 bp, Mus musculus
  siRNA target sequence for Ltbp3 (NM_008520.1,2979-2997).
ctacagctcagccgaattt

SEQ ID NO: 549953 - DNA, 19 bp, Mus musculus
  siRNA target sequence for Ltbp3 (NM_008520.1,3071-3089).
gtgacatcgacgaatgcat

SEQ ID NO: 549954 - DNA, 19 bp, Mus musculus
  siRNA target sequence for Ltbp3 (NM_008520.1,3078-3096).
cgacgaatgcatattgttt

SEQ ID NO: 549955 - DNA, 19 bp, Mus musculus
  siRNA target sequence for Ltbp3 (NM_008520.1,3381-3399).
ggagaggacggcatgtgta

SEQ ID NO: 549956 - DNA, 19 bp, Mus musculus
  siRNA target sequence for Ltbp3 (NM_008520.1,3413-3431).
cgggacctgccctcacttt

SEQ ID NO: 549957 - DNA, 19 bp, Mus musculus
  siRNA target sequence for Ltbp3 (NM_008520.1,3414-3432).
gggacctgccctcactttt

SEQ ID NO: 549958 - DNA, 19 bp, Mus musculus
  siRNA target sequence for Ltbp3 (NM_008520.1,3701-3719).
cccgctgcgtggacattga

SEQ ID NO: 549959 - DNA, 19 bp, Mus musculus
  siRNA target sequence for Ltbp3 (NM_008520.1,3894-3912).
cgatcatcgagggtatttt

SEQ ID NO: 549960 - DNA, 19 bp, Mus musculus
  siRNA target sequence for Ltbp4 (NM_175641.1,1079-1097).
ggggtgttcatgattgtca

SEQ ID NO: 549961 - DNA, 19 bp, Mus musculus
  siRNA target sequence for Ltbp4 (NM_175641.1,1159-1177).
cccggcttcgagagagtta

SEQ ID NO: 549962 - DNA, 19 bp, Mus musculus
  siRNA target sequence for Ltbp4 (NM_175641.1,1160-1178).
ccggcttcgagagagttaa

SEQ ID NO: 549963 - DNA, 19 bp, Mus musculus
  siRNA target sequence for Ltbp4 (NM_175641.1,1252-1270).
ggcggctacacgtgtgtat

SEQ ID NO: 549964 - DNA, 19 bp, Mus musculus
  siRNA target sequence for Ltbp4 (NM_175641.1,1254-1272).
cggctacacgtgtgtatgt

SEQ ID NO: 549965 - DNA, 19 bp, Mus musculus
  siRNA target sequence for Ltbp4 (NM_175641.1,1381-1399).
ctgcccattcttcgaaata

SEQ ID NO: 549966 - DNA, 19 bp, Mus musculus
  siRNA target sequence for Ltbp4 (NM_175641.1,1384-1402).
cccattcttcgaaatatca

SEQ ID NO: 549967 - DNA, 19 bp, Mus musculus
  siRNA target sequence for Ltbp4 (NM_175641.1,1507-1525).
ggccctggctaccactatt

SEQ ID NO: 549968 - DNA, 19 bp, Mus musculus
  siRNA target sequence for Ltbp4 (NM_175641.1,1509-1527).
ccctggctaccactattca

SEQ ID NO: 549969 - DNA, 19 bp, Mus musculus
  siRNA target sequence for Ltbp4 (NM_175641.1,1529-1547).
cttctgacctccgatacaa

SEQ ID NO: 549970 - DNA, 19 bp, Mus musculus
  siRNA target sequence for Ltbp4 (NM_175641.1,1574-1592).
ctcgagtgaccttcaatca

SEQ ID NO: 549971 - DNA, 19 bp, Mus musculus
  siRNA target sequence for Ltbp4 (NM_175641.1,2001-2019).
cactcgctgcattgacata

SEQ ID NO: 549972 - DNA, 19 bp, Mus musculus
  siRNA target sequence for Ltbp4 (NM_175641.1,2003-2021).
ctcgctgcattgacataga

SEQ ID NO: 549973 - DNA, 19 bp, Mus musculus
  siRNA target sequence for Ltbp4 (NM_175641.1,2053-2071).
cctgggcgttgcgagaata

SEQ ID NO: 549974 - DNA, 19 bp, Mus musculus
  siRNA target sequence for Ltbp4 (NM_175641.1,2364-2382).
gggctcggcgtgtgaagaa

SEQ ID NO: 549975 - DNA, 19 bp, Mus musculus
  siRNA target sequence for Ltbp4 (NM_175641.1,2736-2754).
gcaccgtggcagatgtact

SEQ ID NO: 549976 - DNA, 19 bp, Mus musculus
  siRNA target sequence for Ltbp4 (NM_175641.1,2739-2757).
ccgtggcagatgtactgat

SEQ ID NO: 549977 - DNA, 19 bp, Mus musculus
  siRNA target sequence for Ltbp4 (NM_175641.1,2797-2815).
ggccagtgcacaaatacta

SEQ ID NO: 549978 - DNA, 19 bp, Mus musculus
  siRNA target sequence for Ltbp4 (NM_175641.1,2798-2816).
gccagtgcacaaatactaa

SEQ ID NO: 549979 - DNA, 19 bp, Mus musculus
  siRNA target sequence for Ltbp4 (NM_175641.1,3172-3190).
gggtctcagcgctgtgaaa

SEQ ID NO: 549980 - DNA, 19 bp, Mus musculus
  siRNA target sequence for Ltbp4 (NM_175641.1,3512-3530).
gtcactgcgtggatgtgaa

SEQ ID NO: 549981 - DNA, 19 bp, Mus musculus
  siRNA target sequence for Ltbp4 (NM_175641.1,3559-3577).
ggctccgcgctgtgtgaaa

SEQ ID NO: 549982 - DNA, 19 bp, Mus musculus
  siRNA target sequence for Ltbp4 (NM_175641.1,3560-3578).
gctccgcgctgtgtgaaaa

SEQ ID NO: 549983 - DNA, 19 bp, Mus musculus
  siRNA target sequence for Ltbp4 (NM_175641.1,3561-3579).
ctccgcgctgtgtgaaaat

SEQ ID NO: 549984 - DNA, 19 bp, Mus musculus
  siRNA target sequence for Ltbp4 (NM_175641.1,3563-3581).
ccgcgctgtgtgaaaatgt

SEQ ID NO: 549985 - DNA, 19 bp, Mus musculus
  siRNA target sequence for Ltbp4 (NM_175641.1,3564-3582).
cgcgctgtgtgaaaatgtt

SEQ ID NO: 549986 - DNA, 19 bp, Mus musculus
  siRNA target sequence for Ltbp4 (NM_175641.1,3609-3627).
caatagccctgaggaattt

SEQ ID NO: 549987 - DNA, 19 bp, Mus musculus
  siRNA target sequence for Ltbp4 (NM_175641.1,3793-3811).
cgcgagtgctactttgata

SEQ ID NO: 549988 - DNA, 19 bp, Mus musculus
  siRNA target sequence for Ltbp4 (NM_175641.1,3795-3813).
cgagtgctactttgataca

SEQ ID NO: 549989 - DNA, 19 bp, Mus musculus
  siRNA target sequence for Ltbp4 (NM_175641.1,3820-3838).
ccagatgcgtgtgacaata

SEQ ID NO: 549990 - DNA, 19 bp, Mus musculus
  siRNA target sequence for Ltbp4 (NM_175641.1,3823-3841).
gatgcgtgtgacaatatct

SEQ ID NO: 549991 - DNA, 19 bp, Mus musculus
  siRNA target sequence for Ltbp4 (NM_175641.1,3926-3944).
gcaccgagacagctgaata

SEQ ID NO: 549992 - DNA, 19 bp, Mus musculus
  siRNA target sequence for Ltbp4 (NM_175641.1,4074-4092).
cccaggctactcttgctat

SEQ ID NO: 549993 - DNA, 19 bp, Mus musculus
  siRNA target sequence for Ltbp4 (NM_175641.1,4078-4096).
ggctactcttgctattgca

SEQ ID NO: 549994 - DNA, 19 bp, Mus musculus
  siRNA target sequence for Ltbp4 (NM_175641.1,4094-4112).
gcagcaacgggttctacta

SEQ ID NO: 549995 - DNA, 19 bp, Mus musculus
  siRNA target sequence for Ltbp4 (NM_175641.1,4095-4113).
cagcaacgggttctactat

SEQ ID NO: 549996 - DNA, 19 bp, Mus musculus
  siRNA target sequence for Ltbp4 (NM_175641.1,4097-4115).
gcaacgggttctactatca

SEQ ID NO: 549997 - DNA, 19 bp, Mus musculus
  siRNA target sequence for Ltbp4 (NM_175641.1,4125-4143).
gctggagtgcgttgataat

SEQ ID NO: 549998 - DNA, 19 bp, Mus musculus
  siRNA target sequence for Ltbp4 (NM_175641.1,4559-4577).
cctatgggccagatctgta

SEQ ID NO: 549999 - DNA, 19 bp, Mus musculus
  siRNA target sequence for Ltbp4 (NM_175641.1,4560-4578).
ctatgggccagatctgtat

SEQ ID NO: 550000 - DNA, 19 bp, Mus musculus
  siRNA target sequence for Ltbp4 (NM_175641.1,4797-4815).
ctctgagcgtggaagctat

SEQ ID NO: 550001 - DNA, 19 bp, Mus musculus
  siRNA target sequence for Ltbp4 (NM_175641.1,4917-4935).
cacctgcgattgtttcgat

SEQ ID NO: 550002 - DNA, 19 bp, Mus musculus
  siRNA target sequence for Man1a (NM_008548.2,1133-1151).
gacccatgcttggaataat

SEQ ID NO: 550003 - DNA, 19 bp, Mus musculus
  siRNA target sequence for Man1a (NM_008548.2,1137-1155).
catgcttggaataattata

SEQ ID NO: 550004 - DNA, 19 bp, Mus musculus
  siRNA target sequence for Man1a (NM_008548.2,1168-1186).
ggggcttgaacgaactgaa

SEQ ID NO: 550005 - DNA, 19 bp, Mus musculus
  siRNA target sequence for Man1a (NM_008548.2,1169-1187).
gggcttgaacgaactgaaa

SEQ ID NO: 550006 - DNA, 19 bp, Mus musculus
  siRNA target sequence for Man1a (NM_008548.2,1175-1193).
gaacgaactgaaacctata

SEQ ID NO: 550007 - DNA, 19 bp, Mus musculus
  siRNA target sequence for Man1a (NM_008548.2,1178-1196).
cgaactgaaacctatatca

SEQ ID NO: 550008 - DNA, 19 bp, Mus musculus
  siRNA target sequence for Man1a (NM_008548.2,1203-1221).
ggccattcaagcagtttgt

SEQ ID NO: 550009 - DNA, 19 bp, Mus musculus
  siRNA target sequence for Man1a (NM_008548.2,1205-1223).
ccattcaagcagtttgttt

SEQ ID NO: 550010 - DNA, 19 bp, Mus musculus
  siRNA target sequence for Man1a (NM_008548.2,1256-1274).
cctggatacccttttcatt

SEQ ID NO: 550011 - DNA, 19 bp, Mus musculus
  siRNA target sequence for Man1a (NM_008548.2,1257-1275).
ctggatacccttttcatta

SEQ ID NO: 550012 - DNA, 19 bp, Mus musculus
  siRNA target sequence for Man1a (NM_008548.2,1279-1297).
gcatgaagactgaatttca

SEQ ID NO: 550013 - DNA, 19 bp, Mus musculus
  siRNA target sequence for Man1a (NM_008548.2,1299-1317).
gaagctaaatcgtggatta

SEQ ID NO: 550014 - DNA, 19 bp, Mus musculus
  siRNA target sequence for Man1a (NM_008548.2,1302-1320).
gctaaatcgtggattaaaa

SEQ ID NO: 550015 - DNA, 19 bp, Mus musculus
  siRNA target sequence for Man1a (NM_008548.2,1303-1321).
ctaaatcgtggattaaaaa

SEQ ID NO: 550016 - DNA, 19 bp, Mus musculus
  siRNA target sequence for Man1a (NM_008548.2,1389-1407).
ctgctgtcagcctactatt

SEQ ID NO: 550017 - DNA, 19 bp, Mus musculus
  siRNA target sequence for Man1a (NM_008548.2,1392-1410).
ctgtcagcctactatttgt

SEQ ID NO: 550018 - DNA, 19 bp, Mus musculus
  siRNA target sequence for Man1a (NM_008548.2,1409-1427).
gtccggagaggagatattt

SEQ ID NO: 550019 - DNA, 19 bp, Mus musculus
  siRNA target sequence for Man1a (NM_008548.2,1414-1432).
gagaggagatatttcgaaa

SEQ ID NO: 550020 - DNA, 19 bp, Mus musculus
  siRNA target sequence for Man1a (NM_008548.2,1418-1436).
ggagatatttcgaaagaaa

SEQ ID NO: 550021 - DNA, 19 bp, Mus musculus
  siRNA target sequence for Man1a (NM_008548.2,1575-1593).
ggaactctgcatttagagt

SEQ ID NO: 550022 - DNA, 19 bp, Mus musculus
  siRNA target sequence for Man1a (NM_008548.2,1632-1650).
gccgaaaaggttatgaaaa

SEQ ID NO: 550023 - DNA, 19 bp, Mus musculus
  siRNA target sequence for Man1a (NM_008548.2,1654-1672).
gaacagtgttgaacaaact

SEQ ID NO: 550024 - DNA, 19 bp, Mus musculus
  siRNA target sequence for Man1a (NM_008548.2,1687-1705).
gcctttatcctaactatct

SEQ ID NO: 550025 - DNA, 19 bp, Mus musculus
  siRNA target sequence for Man1a (NM_008548.2,1782-1800).
cttaaggcgtggttaatgt

SEQ ID NO: 550026 - DNA, 19 bp, Mus musculus
  siRNA target sequence for Man1a (NM_008548.2,1815-1833).
ctcgaagccaagaagatgt

SEQ ID NO: 550027 - DNA, 19 bp, Mus musculus
  siRNA target sequence for Man1a (NM_008548.2,1852-1870).
ccatcgagactcacttgat

SEQ ID NO: 550028 - DNA, 19 bp, Mus musculus
  siRNA target sequence for Man1a (NM_008548.2,1863-1881).
cacttgatccgcaagtcaa

SEQ ID NO: 550029 - DNA, 19 bp, Mus musculus
  siRNA target sequence for Man1a (NM_008548.2,1879-1897).
caagtgggggactaacgta

SEQ ID NO: 550030 - DNA, 19 bp, Mus musculus
  siRNA target sequence for Man1a (NM_008548.2,2039-2057).
ccgcacttgtcatgaatct

SEQ ID NO: 550031 - DNA, 19 bp, Mus musculus
  siRNA target sequence for Man1a (NM_008548.2,2049-2067).
catgaatcttataatcgta

SEQ ID NO: 550032 - DNA, 19 bp, Mus musculus
  siRNA target sequence for Man1a (NM_008548.2,2056-2074).
cttataatcgtacatatgt

SEQ ID NO: 550033 - DNA, 19 bp, Mus musculus
  siRNA target sequence for Man1a (NM_008548.2,2082-2100).
ggaccggaagcgtttcgat

SEQ ID NO: 550034 - DNA, 19 bp, Mus musculus
  siRNA target sequence for Man1a (NM_008548.2,2083-2101).
gaccggaagcgtttcgatt

SEQ ID NO: 550035 - DNA, 19 bp, Mus musculus
  siRNA target sequence for Man1a (NM_008548.2,2087-2105).
ggaagcgtttcgatttgat

SEQ ID NO: 550036 - DNA, 19 bp, Mus musculus
  siRNA target sequence for Man1a (NM_008548.2,2124-2142).
gccacgaggcaaaatgaaa

SEQ ID NO: 550037 - DNA, 19 bp, Mus musculus
  siRNA target sequence for Man1a (NM_008548.2,2161-2179).
ccgaggtcatcgagacata

SEQ ID NO: 550038 - DNA, 19 bp, Mus musculus
  siRNA target sequence for Man1a (NM_008548.2,2163-2181).
gaggtcatcgagacataca

SEQ ID NO: 550039 - DNA, 19 bp, Mus musculus
  siRNA target sequence for Man1a (NM_008548.2,2235-2253).
gccgtggaggctctagaaa

SEQ ID NO: 550040 - DNA, 19 bp, Mus musculus
  siRNA target sequence for Man1a (NM_008548.2,2237-2255).
cgtggaggctctagaaagt

SEQ ID NO: 550041 - DNA, 19 bp, Mus musculus
  siRNA target sequence for Man1a (NM_008548.2,2281-2299).
caggcttacgggatgttta

SEQ ID NO: 550042 - DNA, 19 bp, Mus musculus
  siRNA target sequence for Man1a (NM_008548.2,2283-2301).
ggcttacgggatgtttaca

SEQ ID NO: 550043 - DNA, 19 bp, Mus musculus
  siRNA target sequence for Man1a (NM_008548.2,2284-2302).
gcttacgggatgtttacat

SEQ ID NO: 550044 - DNA, 19 bp, Mus musculus
  siRNA target sequence for Man1a (NM_008548.2,2319-2337).
gacgatgtccagcaaagtt

SEQ ID NO: 550045 - DNA, 19 bp, Mus musculus
  siRNA target sequence for Man1a (NM_008548.2,2428-2446).
ctcatcctttccctatact

SEQ ID NO: 550046 - DNA, 19 bp, Mus musculus
  siRNA target sequence for Man1a (NM_008548.2,2440-2458).
ctatactccgtgaacagaa

SEQ ID NO: 550047 - DNA, 19 bp, Mus musculus
  siRNA target sequence for Man1b (NM_010763.1,390-408).
cctctctggtcgtaggata

SEQ ID NO: 550048 - DNA, 19 bp, Mus musculus
  siRNA target sequence for Man1b (NM_010763.1,401-419).
gtaggataccacctttgaa

SEQ ID NO: 550049 - DNA, 19 bp, Mus musculus
  siRNA target sequence for Man1b (NM_010763.1,465-483).
ctccgagaagtttatcctt

SEQ ID NO: 550050 - DNA, 19 bp, Mus musculus
  siRNA target sequence for Man1b (NM_010763.1,501-519).
cttcatcaccctgtgtttt

SEQ ID NO: 550051 - DNA, 19 bp, Mus musculus
  siRNA target sequence for Man1b (NM_010763.1,571-589).
ggcttagaagatgtgttaa

SEQ ID NO: 550052 - DNA, 19 bp, Mus musculus
  siRNA target sequence for Man1b (NM_010763.1,572-590).
gcttagaagatgtgttaat

SEQ ID NO: 550053 - DNA, 19 bp, Mus musculus
  siRNA target sequence for Man1b (NM_010763.1,604-622).
gccggcaaaggagctaaaa

SEQ ID NO: 550054 - DNA, 19 bp, Mus musculus
  siRNA target sequence for Man1b (NM_010763.1,676-694).
gaagagcgtctgagaaata

SEQ ID NO: 550055 - DNA, 19 bp, Mus musculus
  siRNA target sequence for Man1b (NM_010763.1,681-699).
gcgtctgagaaataagatt

SEQ ID NO: 550056 - DNA, 19 bp, Mus musculus
  siRNA target sequence for Man1b (NM_010763.1,682-700).
cgtctgagaaataagatta

SEQ ID NO: 550057 - DNA, 19 bp, Mus musculus
  siRNA target sequence for Man1b (NM_010763.1,937-955).
gcctgggataattacagaa

SEQ ID NO: 550058 - DNA, 19 bp, Mus musculus
  siRNA target sequence for Man1b (NM_010763.1,941-959).
gggataattacagaacata

SEQ ID NO: 550059 - DNA, 19 bp, Mus musculus
  siRNA target sequence for Man1b (NM_010763.1,956-974).
catacggatggggacataa

SEQ ID NO: 550060 - DNA, 19 bp, Mus musculus
  siRNA target sequence for Man1b (NM_010763.1,976-994).
gaactaaggcctattgcaa

SEQ ID NO: 550061 - DNA, 19 bp, Mus musculus
  siRNA target sequence for Man1b (NM_010763.1,1000-1018).
ggccattccactaacatat

SEQ ID NO: 550062 - DNA, 19 bp, Mus musculus
  siRNA target sequence for Man1b (NM_010763.1,1001-1019).
gccattccactaacatatt

SEQ ID NO: 550063 - DNA, 19 bp, Mus musculus
  siRNA target sequence for Man1b (NM_010763.1,1044-1062).
catagtggatgctttggat

SEQ ID NO: 550064 - DNA, 19 bp, Mus musculus
  siRNA target sequence for Man1b (NM_010763.1,1055-1073).
ctttggataccctttatat

SEQ ID NO: 550065 - DNA, 19 bp, Mus musculus
  siRNA target sequence for Man1b (NM_010763.1,1074-1092).
catggggcttcatgatgaa

SEQ ID NO: 550066 - DNA, 19 bp, Mus musculus
  siRNA target sequence for Man1b (NM_010763.1,1186-1204).
gggctcctcgctgcatatt

SEQ ID NO: 550067 - DNA, 19 bp, Mus musculus
  siRNA target sequence for Man1b (NM_010763.1,1187-1205).
ggctcctcgctgcatatta

SEQ ID NO: 550068 - DNA, 19 bp, Mus musculus
  siRNA target sequence for Man1b (NM_010763.1,1415-1433).
ccggtgacttgacttacta

SEQ ID NO: 550069 - DNA, 19 bp, Mus musculus
  siRNA target sequence for Man1b (NM_010763.1,1416-1434).
cggtgacttgacttactat

SEQ ID NO: 550070 - DNA, 19 bp, Mus musculus
  siRNA target sequence for Man1b (NM_010763.1,1417-1435).
ggtgacttgacttactata

SEQ ID NO: 550071 - DNA, 19 bp, Mus musculus
  siRNA target sequence for Man1b (NM_010763.1,1418-1436).
gtgacttgacttactataa

SEQ ID NO: 550072 - DNA, 19 bp, Mus musculus
  siRNA target sequence for Man1b (NM_010763.1,1522-1540).
cgctggggtcagtatcaca

SEQ ID NO: 550073 - DNA, 19 bp, Mus musculus
  siRNA target sequence for Man1b (NM_010763.1,1549-1567).
ggtggtctgggagatagtt

SEQ ID NO: 550074 - DNA, 19 bp, Mus musculus
  siRNA target sequence for Man1b (NM_010763.1,1550-1568).
gtggtctgggagatagttt

SEQ ID NO: 550075 - DNA, 19 bp, Mus musculus
  siRNA target sequence for Man1b (NM_010763.1,1617-1635).
cgaggcaagaaggatgtat

SEQ ID NO: 550076 - DNA, 19 bp, Mus musculus
  siRNA target sequence for Man1b (NM_010763.1,1642-1660).
gctgttgaggctatagaaa

SEQ ID NO: 550077 - DNA, 19 bp, Mus musculus
  siRNA target sequence for Man1b (NM_010763.1,1651-1669).
gctatagaaaaacatctta

SEQ ID NO: 550078 - DNA, 19 bp, Mus musculus
  siRNA target sequence for Man1b (NM_010763.1,1679-1697).
cccgaggaggtctggtttt

SEQ ID NO: 550079 - DNA, 19 bp, Mus musculus
  siRNA target sequence for Man1b (NM_010763.1,1680-1698).
ccgaggaggtctggttttt

SEQ ID NO: 550080 - DNA, 19 bp, Mus musculus
  siRNA target sequence for Man1b (NM_010763.1,1681-1699).
cgaggaggtctggttttta

SEQ ID NO: 550081 - DNA, 19 bp, Mus musculus
  siRNA target sequence for Man1b (NM_010763.1,1682-1700).
gaggaggtctggtttttat

SEQ ID NO: 550082 - DNA, 19 bp, Mus musculus
  siRNA target sequence for Man1b (NM_010763.1,1751-1769).
gctttgctgggggaatgtt

SEQ ID NO: 550083 - DNA, 19 bp, Mus musculus
  siRNA target sequence for Man1b (NM_010763.1,1752-1770).
ctttgctgggggaatgttt

SEQ ID NO: 550084 - DNA, 19 bp, Mus musculus
  siRNA target sequence for Man1b (NM_010763.1,1783-1801).
gatggttccagaaaggata

SEQ ID NO: 550085 - DNA, 19 bp, Mus musculus
  siRNA target sequence for Man1b (NM_010763.1,1805-1823).
ctggccactacttagaact

SEQ ID NO: 550086 - DNA, 19 bp, Mus musculus
  siRNA target sequence for Man1b (NM_010763.1,1841-1859).
gaacatgtcatgagtcata

SEQ ID NO: 550087 - DNA, 19 bp, Mus musculus
  siRNA target sequence for Man1b (NM_010763.1,1844-1862).
catgtcatgagtcatatga

SEQ ID NO: 550088 - DNA, 19 bp, Mus musculus
  siRNA target sequence for Man1b (NM_010763.1,1879-1897).
ctaggtccggagtcattca

SEQ ID NO: 550089 - DNA, 19 bp, Mus musculus
  siRNA target sequence for Man1b (NM_010763.1,1882-1900).
ggtccggagtcattcaagt

SEQ ID NO: 550090 - DNA, 19 bp, Mus musculus
  siRNA target sequence for Man1b (NM_010763.1,1883-1901).
gtccggagtcattcaagtt

SEQ ID NO: 550091 - DNA, 19 bp, Mus musculus
  siRNA target sequence for Man1b (NM_010763.1,1929-1947).
gcggcaggctgaaaagtat

SEQ ID NO: 550092 - DNA, 19 bp, Mus musculus
  siRNA target sequence for Man1b (NM_010763.1,1933-1951).
caggctgaaaagtattaca

SEQ ID NO: 550093 - DNA, 19 bp, Mus musculus
  siRNA target sequence for Man1b (NM_010763.1,1953-1971).
ccttcgtccagaagtaatt

SEQ ID NO: 550094 - DNA, 19 bp, Mus musculus
  siRNA target sequence for Man1b (NM_010763.1,1972-1990).
gaaacctattggtatctat

SEQ ID NO: 550095 - DNA, 19 bp, Mus musculus
  siRNA target sequence for Man1b (NM_010763.1,2036-2054).
cagcactggctattgagaa

SEQ ID NO: 550096 - DNA, 19 bp, Mus musculus
  siRNA target sequence for Man1b (NM_010763.1,2081-2099).
ctggtgtcaaggatgtata

SEQ ID NO: 550097 - DNA, 19 bp, Mus musculus
  siRNA target sequence for Man1b (NM_010763.1,2122-2140).
gacgtgcagcagagctttt

SEQ ID NO: 550098 - DNA, 19 bp, Mus musculus
  siRNA target sequence for Man1b (NM_010763.1,2127-2145).
gcagcagagcttttttctt

SEQ ID NO: 550099 - DNA, 19 bp, Mus musculus
  siRNA target sequence for Man1b (NM_010763.1,2143-2161).
cttgctgaaacattaaaat

SEQ ID NO: 550100 - DNA, 19 bp, Mus musculus
  siRNA target sequence for Man1b (NM_010763.1,2183-2201).
gcgatgaccttctaccttt

SEQ ID NO: 550101 - DNA, 19 bp, Mus musculus
  siRNA target sequence for Man1b (NM_010763.1,2184-2202).
cgatgaccttctaccttta

SEQ ID NO: 550102 - DNA, 19 bp, Mus musculus
  siRNA target sequence for Man1b (NM_010763.1,2205-2223).
ccactgggtgtttaacaca

SEQ ID NO: 550103 - DNA, 19 bp, Mus musculus
  siRNA target sequence for Masp1 (NM_008555.1,124-142).
cccataccgtggagctaaa

SEQ ID NO: 550104 - DNA, 19 bp, Mus musculus
  siRNA target sequence for Masp1 (NM_008555.1,132-150).
gtggagctaaacgaaatgt

SEQ ID NO: 550105 - DNA, 19 bp, Mus musculus
  siRNA target sequence for Masp1 (NM_008555.1,134-152).
ggagctaaacgaaatgttt

SEQ ID NO: 550106 - DNA, 19 bp, Mus musculus
  siRNA target sequence for Masp1 (NM_008555.1,169-187).
ctggctatccagattccta

SEQ ID NO: 550107 - DNA, 19 bp, Mus musculus
  siRNA target sequence for Masp1 (NM_008555.1,197-215).
ctctgaggtgacatggaat

SEQ ID NO: 550108 - DNA, 19 bp, Mus musculus
  siRNA target sequence for Masp1 (NM_008555.1,222-240).
gtcccggaggggtttcgaa

SEQ ID NO: 550109 - DNA, 19 bp, Mus musculus
  siRNA target sequence for Masp1 (NM_008555.1,226-244).
cggaggggtttcgaatcaa

SEQ ID NO: 550110 - DNA, 19 bp, Mus musculus
  siRNA target sequence for Masp1 (NM_008555.1,231-249).
gggtttcgaatcaagcttt

SEQ ID NO: 550111 - DNA, 19 bp, Mus musculus
  siRNA target sequence for Masp1 (NM_008555.1,237-255).
cgaatcaagctttacttca

SEQ ID NO: 550112 - DNA, 19 bp, Mus musculus
  siRNA target sequence for Masp1 (NM_008555.1,266-284).
cttggaatcctcctatctt

SEQ ID NO: 550113 - DNA, 19 bp, Mus musculus
  siRNA target sequence for Masp1 (NM_008555.1,277-295).
cctatctttgtgaatacga

SEQ ID NO: 550114 - DNA, 19 bp, Mus musculus
  siRNA target sequence for Masp1 (NM_008555.1,286-304).
gtgaatacgactatgtgaa

SEQ ID NO: 550115 - DNA, 19 bp, Mus musculus
  siRNA target sequence for Masp1 (NM_008555.1,296-314).
ctatgtgaaggtagaaaca

SEQ ID NO: 550116 - DNA, 19 bp, Mus musculus
  siRNA target sequence for Masp1 (NM_008555.1,346-364).
gggagaccaccgatactga

SEQ ID NO: 550117 - DNA, 19 bp, Mus musculus
  siRNA target sequence for Masp1 (NM_008555.1,467-485).
ccactacatggctgtagat

SEQ ID NO: 550118 - DNA, 19 bp, Mus musculus
  siRNA target sequence for Masp1 (NM_008555.1,618-636).
gaatgcagcggcaatctct

SEQ ID NO: 550119 - DNA, 19 bp, Mus musculus
  siRNA target sequence for Masp1 (NM_008555.1,692-710).
gagctcagaatgttcctat

SEQ ID NO: 550120 - DNA, 19 bp, Mus musculus
  siRNA target sequence for Masp1 (NM_008555.1,697-715).
cagaatgttcctataccat

SEQ ID NO: 550121 - DNA, 19 bp, Mus musculus
  siRNA target sequence for Masp1 (NM_008555.1,786-804).
gtgccctgtccctatgact

SEQ ID NO: 550122 - DNA, 19 bp, Mus musculus
  siRNA target sequence for Masp1 (NM_008555.1,790-808).
cctgtccctatgactacat

SEQ ID NO: 550123 - DNA, 19 bp, Mus musculus
  siRNA target sequence for Masp1 (NM_008555.1,793-811).
gtccctatgactacattaa

SEQ ID NO: 550124 - DNA, 19 bp, Mus musculus
  siRNA target sequence for Masp1 (NM_008555.1,812-830).
gattaaagctggttcaaaa

SEQ ID NO: 550125 - DNA, 19 bp, Mus musculus
  siRNA target sequence for Masp1 (NM_008555.1,947-965).
ctacagagcggcaggaaat

SEQ ID NO: 550126 - DNA, 19 bp, Mus musculus
  siRNA target sequence for Masp1 (NM_008555.1,985-1003).
ctcctgtgtacgggaaaat

SEQ ID NO: 550127 - DNA, 19 bp, Mus musculus
  siRNA target sequence for Masp1 (NM_008555.1,988-1006).
ctgtgtacgggaaaatcga

SEQ ID NO: 550128 - DNA, 19 bp, Mus musculus
  siRNA target sequence for Masp1 (NM_008555.1,1008-1026).
ccctcgcaggccgtgtatt

SEQ ID NO: 550129 - DNA, 19 bp, Mus musculus
  siRNA target sequence for Masp1 (NM_008555.1,1012-1030).
cgcaggccgtgtattcctt

SEQ ID NO: 550130 - DNA, 19 bp, Mus musculus
  siRNA target sequence for Masp1 (NM_008555.1,1060-1078).
caggctacaaagtgctaaa

SEQ ID NO: 550131 - DNA, 19 bp, Mus musculus
  siRNA target sequence for Masp1 (NM_008555.1,1063-1081).
gctacaaagtgctaaagga

SEQ ID NO: 550132 - DNA, 19 bp, Mus musculus
  siRNA target sequence for Masp1 (NM_008555.1,1064-1082).
ctacaaagtgctaaaggat

SEQ ID NO: 550133 - DNA, 19 bp, Mus musculus
  siRNA target sequence for Masp1 (NM_008555.1,1122-1140).
gacggtgcatggagtaaca

SEQ ID NO: 550134 - DNA, 19 bp, Mus musculus
  siRNA target sequence for Masp1 (NM_008555.1,1142-1160).
gatccccacctgtaaaatt

SEQ ID NO: 550135 - DNA, 19 bp, Mus musculus
  siRNA target sequence for Masp1 (NM_008555.1,1145-1163).
ccccacctgtaaaattgta

SEQ ID NO: 550136 - DNA, 19 bp, Mus musculus
  siRNA target sequence for Masp1 (NM_008555.1,1147-1165).
ccacctgtaaaattgtaga

SEQ ID NO: 550137 - DNA, 19 bp, Mus musculus
  siRNA target sequence for Masp1 (NM_008555.1,1223-1241).
cctcaccacatacaaatct

SEQ ID NO: 550138 - DNA, 19 bp, Mus musculus
  siRNA target sequence for Masp1 (NM_008555.1,1258-1276).
gccaacagccctattacaa

SEQ ID NO: 550139 - DNA, 19 bp, Mus musculus
  siRNA target sequence for Masp1 (NM_008555.1,1403-1421).
gatctccaggatcttcaat

SEQ ID NO: 550140 - DNA, 19 bp, Mus musculus
  siRNA target sequence for Masp1 (NM_008555.1,1439-1457).
gggtaccatgccatggatt

SEQ ID NO: 550141 - DNA, 19 bp, Mus musculus
  siRNA target sequence for Masp1 (NM_008555.1,1509-1527).
ggttccaactgggttttga

SEQ ID NO: 550142 - DNA, 19 bp, Mus musculus
  siRNA target sequence for Masp1 (NM_008555.1,1573-1591).
ccctacacagctcatactt

SEQ ID NO: 550143 - DNA, 19 bp, Mus musculus
  siRNA target sequence for Masp1 (NM_008555.1,1753-1771).
cgaggctgaacgactttgt

SEQ ID NO: 550144 - DNA, 19 bp, Mus musculus
  siRNA target sequence for Masp1 (NM_008555.1,1836-1854).
gggaagcagttcttacaga

SEQ ID NO: 550145 - DNA, 19 bp, Mus musculus
  siRNA target sequence for Masp1 (NM_008555.1,1917-1935).
gcctataccccattgaaga

SEQ ID NO: 550146 - DNA, 19 bp, Mus musculus
  siRNA target sequence for Masp1 (NM_008555.1,1918-1936).
cctataccccattgaagaa

SEQ ID NO: 550147 - DNA, 19 bp, Mus musculus
  siRNA target sequence for Masp1 (NM_008555.1,2094-2112).
gatcgctatggagtctatt

SEQ ID NO: 550148 - DNA, 19 bp, Mus musculus
  siRNA target sequence for Mcfd2 (NM_139295.1,204-222).
gcagcgtgggcctggataa

SEQ ID NO: 550149 - DNA, 19 bp, Mus musculus
  siRNA target sequence for Mcfd2 (NM_139295.1,305-323).
gaactgcagctccattact

SEQ ID NO: 550150 - DNA, 19 bp, Mus musculus
  siRNA target sequence for Mcfd2 (NM_139295.1,310-328).
gcagctccattacttcaaa

SEQ ID NO: 550151 - DNA, 19 bp, Mus musculus
  siRNA target sequence for Mcfd2 (NM_139295.1,335-353).
gattacgacggcaacagtt

SEQ ID NO: 550152 - DNA, 19 bp, Mus musculus
  siRNA target sequence for Mcfd2 (NM_139295.1,340-358).
cgacggcaacagtttgctt

SEQ ID NO: 550153 - DNA, 19 bp, Mus musculus
  siRNA target sequence for Mcfd2 (NM_139295.1,442-460).
gctcgtcagcatcatagat

SEQ ID NO: 550154 - DNA, 19 bp, Mus musculus
  siRNA target sequence for Mcfd2 (NM_139295.1,499-517).
catcgactacgctgagttt

SEQ ID NO: 550155 - DNA, 19 bp, Mus musculus
  siRNA target sequence for Mcfd2 (NM_139295.1,503-521).
gactacgctgagtttgcaa

SEQ ID NO: 550156 - DNA, 19 bp, Mus musculus
  siRNA target sequence for Mmp11 (NM_008606.1,176-194).
catgcagctctgcctaata

SEQ ID NO: 550157 - DNA, 19 bp, Mus musculus
  siRNA target sequence for Mmp11 (NM_008606.1,185-203).
ctgcctaataccttgacat

SEQ ID NO: 550158 - DNA, 19 bp, Mus musculus
  siRNA target sequence for Mmp11 (NM_008606.1,268-286).
gcccgacctgcctgatgta

SEQ ID NO: 550159 - DNA, 19 bp, Mus musculus
  siRNA target sequence for Mmp11 (NM_008606.1,345-363).
cagacctcacctataggat

SEQ ID NO: 550160 - DNA, 19 bp, Mus musculus
  siRNA target sequence for Mmp11 (NM_008606.1,474-492).
gacgcgctgacatcatgat

SEQ ID NO: 550161 - DNA, 19 bp, Mus musculus
  siRNA target sequence for Mmp11 (NM_008606.1,587-605).
ggggatgtccactttgact

SEQ ID NO: 550162 - DNA, 19 bp, Mus musculus
  siRNA target sequence for Mmp11 (NM_008606.1,588-606).
gggatgtccactttgacta

SEQ ID NO: 550163 - DNA, 19 bp, Mus musculus
  siRNA target sequence for Mmp11 (NM_008606.1,652-670).
gcaagtggcggctcatgaa

SEQ ID NO: 550164 - DNA, 19 bp, Mus musculus
  siRNA target sequence for Mmp11 (NM_008606.1,653-671).
caagtggcggctcatgaat

SEQ ID NO: 550165 - DNA, 19 bp, Mus musculus
  siRNA target sequence for Mmp11 (NM_008606.1,844-862).
ggctgggacagataccaat

SEQ ID NO: 550166 - DNA, 19 bp, Mus musculus
  siRNA target sequence for Mmp11 (NM_008606.1,848-866).
gggacagataccaatgaga

SEQ ID NO: 550167 - DNA, 19 bp, Mus musculus
  siRNA target sequence for Mmp11 (NM_008606.1,935-953).
cgaggagagctcttcttct

SEQ ID NO: 550168 - DNA, 19 bp, Mus musculus
  siRNA target sequence for Mmp11 (NM_008606.1,1071-1089).
cccagggccagatttggtt

SEQ ID NO: 550169 - DNA, 19 bp, Mus musculus
  siRNA target sequence for Mmp11 (NM_008606.1,1101-1119).
ctcagtactgggtatatga

SEQ ID NO: 550170 - DNA, 19 bp, Mus musculus
  siRNA target sequence for Mmp11 (NM_008606.1,1168-1186).
gcaagggtccccagttcat

SEQ ID NO: 550171 - DNA, 19 bp, Mus musculus
  siRNA target sequence for Mmp11 (NM_008606.1,1200-1218).
ggggtcctgagaagaacaa

SEQ ID NO: 550172 - DNA, 19 bp, Mus musculus
  siRNA target sequence for Mmp11 (NM_008606.1,1228-1246).
cttccgaggtggagactat

SEQ ID NO: 550173 - DNA, 19 bp, Mus musculus
  siRNA target sequence for Mmp11 (NM_008606.1,1314-1332).
gggtaccttctgagattga

SEQ ID NO: 550174 - DNA, 19 bp, Mus musculus
  siRNA target sequence for Mmp11 (NM_008606.1,1315-1333).
ggtaccttctgagattgat

SEQ ID NO: 550175 - DNA, 19 bp, Mus musculus
  siRNA target sequence for Mmp11 (NM_008606.1,1437-1455).
ccgtaggtcctgacttctt

SEQ ID NO: 550176 - DNA, 19 bp, Mus musculus
  siRNA target sequence for Mmp11 (NM_008606.1,1463-1481).
gctgagcctgccaatactt

SEQ ID NO: 550177 - DNA, 19 bp, Mus musculus
  siRNA target sequence for Mmp11 (NM_008606.1,1464-1482).
ctgagcctgccaatacttt

SEQ ID NO: 550178 - DNA, 19 bp, Mus musculus
  siRNA target sequence for Mmp12 (NM_008605.1,115-133).
gacagaattccaatgacaa

SEQ ID NO: 550179 - DNA, 19 bp, Mus musculus
  siRNA target sequence for Mmp12 (NM_008605.1,143-161).
ccaatagaaacttcctaaa

SEQ ID NO: 550180 - DNA, 19 bp, Mus musculus
  siRNA target sequence for Mmp12 (NM_008605.1,224-242).
caactctggcaataatgca

SEQ ID NO: 550181 - DNA, 19 bp, Mus musculus
  siRNA target sequence for Mmp12 (NM_008605.1,262-280).
cccgatgtacagcatctta

SEQ ID NO: 550182 - DNA, 19 bp, Mus musculus
  siRNA target sequence for Mmp12 (NM_008605.1,264-282).
cgatgtacagcatcttaga

SEQ ID NO: 550183 - DNA, 19 bp, Mus musculus
  siRNA target sequence for Mmp12 (NM_008605.1,286-304).
gtgccccagaggtcaagat

SEQ ID NO: 550184 - DNA, 19 bp, Mus musculus
  siRNA target sequence for Mmp12 (NM_008605.1,406-424).
gatgtgactcctctaagat

SEQ ID NO: 550185 - DNA, 19 bp, Mus musculus
  siRNA target sequence for Mmp12 (NM_008605.1,411-429).
gactcctctaagattcaga

SEQ ID NO: 550186 - DNA, 19 bp, Mus musculus
  siRNA target sequence for Mmp12 (NM_008605.1,422-440).
gattcagaaagcttcataa

SEQ ID NO: 550187 - DNA, 19 bp, Mus musculus
  siRNA target sequence for Mmp12 (NM_008605.1,447-465).
ggctgacattatgatactt

SEQ ID NO: 550188 - DNA, 19 bp, Mus musculus
  siRNA target sequence for Mmp12 (NM_008605.1,449-467).
ctgacattatgatactttt

SEQ ID NO: 550189 - DNA, 19 bp, Mus musculus
  siRNA target sequence for Mmp12 (NM_008605.1,453-471).
cattatgatactttttgca

SEQ ID NO: 550190 - DNA, 19 bp, Mus musculus
  siRNA target sequence for Mmp12 (NM_008605.1,481-499).
cacggagacttcaactatt

SEQ ID NO: 550191 - DNA, 19 bp, Mus musculus
  siRNA target sequence for Mmp12 (NM_008605.1,483-501).
cggagacttcaactatttt

SEQ ID NO: 550192 - DNA, 19 bp, Mus musculus
  siRNA target sequence for Mmp12 (NM_008605.1,576-594).
ggcagaaacgtggactaaa

SEQ ID NO: 550193 - DNA, 19 bp, Mus musculus
  siRNA target sequence for Mmp12 (NM_008605.1,577-595).
gcagaaacgtggactaaaa

SEQ ID NO: 550194 - DNA, 19 bp, Mus musculus
  siRNA target sequence for Mmp12 (NM_008605.1,580-598).
gaaacgtggactaaaagtt

SEQ ID NO: 550195 - DNA, 19 bp, Mus musculus
  siRNA target sequence for Mmp12 (NM_008605.1,584-602).
cgtggactaaaagttttca

SEQ ID NO: 550196 - DNA, 19 bp, Mus musculus
  siRNA target sequence for Mmp12 (NM_008605.1,585-603).
gtggactaaaagttttcaa

SEQ ID NO: 550197 - DNA, 19 bp, Mus musculus
  siRNA target sequence for Mmp12 (NM_008605.1,651-669).
ggggctgcagcattccaat

SEQ ID NO: 550198 - DNA, 19 bp, Mus musculus
  siRNA target sequence for Mmp12 (NM_008605.1,652-670).
gggctgcagcattccaata

SEQ ID NO: 550199 - DNA, 19 bp, Mus musculus
  siRNA target sequence for Mmp12 (NM_008605.1,653-671).
ggctgcagcattccaataa

SEQ ID NO: 550200 - DNA, 19 bp, Mus musculus
  siRNA target sequence for Mmp12 (NM_008605.1,657-675).
gcagcattccaataatcca

SEQ ID NO: 550201 - DNA, 19 bp, Mus musculus
  siRNA target sequence for Mmp12 (NM_008605.1,915-933).
gagtccagccaccaacatt

SEQ ID NO: 550202 - DNA, 19 bp, Mus musculus
  siRNA target sequence for Mmp12 (NM_008605.1,922-940).
gccaccaacattacttcta

SEQ ID NO: 550203 - DNA, 19 bp, Mus musculus
  siRNA target sequence for Mmp12 (NM_008605.1,923-941).
ccaccaacattacttctat

SEQ ID NO: 550204 - DNA, 19 bp, Mus musculus
  siRNA target sequence for Mmp12 (NM_008605.1,924-942).
caccaacattacttctatt

SEQ ID NO: 550205 - DNA, 19 bp, Mus musculus
  siRNA target sequence for Mmp12 (NM_008605.1,927-945).
caacattacttctatttct

SEQ ID NO: 550206 - DNA, 19 bp, Mus musculus
  siRNA target sequence for Mmp12 (NM_008605.1,1024-1042).
gatgagaagtactggttaa

SEQ ID NO: 550207 - DNA, 19 bp, Mus musculus
  siRNA target sequence for Mmp12 (NM_008605.1,1037-1055).
ggttaataaacaacttagt

SEQ ID NO: 550208 - DNA, 19 bp, Mus musculus
  siRNA target sequence for Mmp12 (NM_008605.1,1066-1084).
cactatcccaggagcatat

SEQ ID NO: 550209 - DNA, 19 bp, Mus musculus
  siRNA target sequence for Mmp12 (NM_008605.1,1137-1155).
cccacttcgccaaaaggtt

SEQ ID NO: 550210 - DNA, 19 bp, Mus musculus
  siRNA target sequence for Mmp12 (NM_008605.1,1138-1156).
ccacttcgccaaaaggttt

SEQ ID NO: 550211 - DNA, 19 bp, Mus musculus
  siRNA target sequence for Mmp12 (NM_008605.1,1139-1157).
cacttcgccaaaaggttta

SEQ ID NO: 550212 - DNA, 19 bp, Mus musculus
  siRNA target sequence for Mmp12 (NM_008605.1,1141-1159).
cttcgccaaaaggtttatt

SEQ ID NO: 550213 - DNA, 19 bp, Mus musculus
  siRNA target sequence for Mmp12 (NM_008605.1,1144-1162).
cgccaaaaggtttatttct

SEQ ID NO: 550214 - DNA, 19 bp, Mus musculus
  siRNA target sequence for Mmp12 (NM_008605.1,1216-1234).
gcttaccccaagctgattt

SEQ ID NO: 550215 - DNA, 19 bp, Mus musculus
  siRNA target sequence for Mmp12 (NM_008605.1,1238-1256).
cacacttcccaggaatcaa

SEQ ID NO: 550216 - DNA, 19 bp, Mus musculus
  siRNA target sequence for Mmp12 (NM_008605.1,1250-1268).
gaatcaagcctaaaattga

SEQ ID NO: 550217 - DNA, 19 bp, Mus musculus
  siRNA target sequence for Mmp12 (NM_008605.1,1309-1327).
ggagcctatcaattggaat

SEQ ID NO: 550218 - DNA, 19 bp, Mus musculus
  siRNA target sequence for Mmp12 (NM_008605.1,1341-1359).
ccgtcgtgtcaccaaaaca

SEQ ID NO: 550219 - DNA, 19 bp, Mus musculus
  siRNA target sequence for Mmp12 (NM_008605.1,1342-1360).
cgtcgtgtcaccaaaacat

SEQ ID NO: 550220 - DNA, 19 bp, Mus musculus
  siRNA target sequence for Mmp12 (NM_008605.1,1343-1361).
gtcgtgtcaccaaaacatt

SEQ ID NO: 550221 - DNA, 19 bp, Mus musculus
  siRNA target sequence for Mmp12 (NM_008605.1,1345-1363).
cgtgtcaccaaaacattga

SEQ ID NO: 550222 - DNA, 19 bp, Mus musculus
  siRNA target sequence for Mmp13 (NM_008607.1,131-149).
gagcactacttgaaatcat

SEQ ID NO: 550223 - DNA, 19 bp, Mus musculus
  siRNA target sequence for Mmp13 (NM_008607.1,134-152).
cactacttgaaatcatact

SEQ ID NO: 550224 - DNA, 19 bp, Mus musculus
  siRNA target sequence for Mmp13 (NM_008607.1,215-233).
ctccgagaaatgcaatctt

SEQ ID NO: 550225 - DNA, 19 bp, Mus musculus
  siRNA target sequence for Mmp13 (NM_008607.1,247-265).
ggtgactggcaaacttgat

SEQ ID NO: 550226 - DNA, 19 bp, Mus musculus
  siRNA target sequence for Mmp13 (NM_008607.1,250-268).
gactggcaaacttgatgat

SEQ ID NO: 550227 - DNA, 19 bp, Mus musculus
  siRNA target sequence for Mmp13 (NM_008607.1,335-353).
cctagaacactcaaatggt

SEQ ID NO: 550228 - DNA, 19 bp, Mus musculus
  siRNA target sequence for Mmp13 (NM_008607.1,352-370).
gtcccaaacgaacttaact

SEQ ID NO: 550229 - DNA, 19 bp, Mus musculus
  siRNA target sequence for Mmp13 (NM_008607.1,354-372).
cccaaacgaacttaactta

SEQ ID NO: 550230 - DNA, 19 bp, Mus musculus
  siRNA target sequence for Mmp13 (NM_008607.1,356-374).
caaacgaacttaacttaca

SEQ ID NO: 550231 - DNA, 19 bp, Mus musculus
  siRNA target sequence for Mmp13 (NM_008607.1,452-470).
gatgtgacaccactgaatt

SEQ ID NO: 550232 - DNA, 19 bp, Mus musculus
  siRNA target sequence for Mmp13 (NM_008607.1,464-482).
ctgaatttcaccagaatct

SEQ ID NO: 550233 - DNA, 19 bp, Mus musculus
  siRNA target sequence for Mmp13 (NM_008607.1,488-506).
ggcactgctgacatcatga

SEQ ID NO: 550234 - DNA, 19 bp, Mus musculus
  siRNA target sequence for Mmp13 (NM_008607.1,490-508).
cactgctgacatcatgata

SEQ ID NO: 550235 - DNA, 19 bp, Mus musculus
  siRNA target sequence for Mmp13 (NM_008607.1,510-528).
cttttgggactaaagaaca

SEQ ID NO: 550236 - DNA, 19 bp, Mus musculus
  siRNA target sequence for Mmp13 (NM_008607.1,753-771).
ctggcaaaagccatttcat

SEQ ID NO: 550237 - DNA, 19 bp, Mus musculus
  siRNA target sequence for Mmp13 (NM_008607.1,785-803).
gacgttcaaggaattcagt

SEQ ID NO: 550238 - DNA, 19 bp, Mus musculus
  siRNA target sequence for Mmp13 (NM_008607.1,787-805).
cgttcaaggaattcagttt

SEQ ID NO: 550239 - DNA, 19 bp, Mus musculus
  siRNA target sequence for Mmp13 (NM_008607.1,895-913).
cagtctccgaggagaaact

SEQ ID NO: 550240 - DNA, 19 bp, Mus musculus
  siRNA target sequence for Mmp13 (NM_008607.1,897-915).
gtctccgaggagaaactat

SEQ ID NO: 550241 - DNA, 19 bp, Mus musculus
  siRNA target sequence for Mmp13 (NM_008607.1,902-920).
cgaggagaaactatgatct

SEQ ID NO: 550242 - DNA, 19 bp, Mus musculus
  siRNA target sequence for Mmp13 (NM_008607.1,964-982).
ggctgagctctttttgaca

SEQ ID NO: 550243 - DNA, 19 bp, Mus musculus
  siRNA target sequence for Mmp13 (NM_008607.1,965-983).
gctgagctctttttgacaa

SEQ ID NO: 550244 - DNA, 19 bp, Mus musculus
  siRNA target sequence for Mmp13 (NM_008607.1,968-986).
gagctctttttgacaaagt

SEQ ID NO: 550245 - DNA, 19 bp, Mus musculus
  siRNA target sequence for Mmp13 (NM_008607.1,1015-1033).
ggatgctgcatatgaacat

SEQ ID NO: 550246 - DNA, 19 bp, Mus musculus
  siRNA target sequence for Mmp13 (NM_008607.1,1034-1052).
ccatcccgtgaccttatgt

SEQ ID NO: 550247 - DNA, 19 bp, Mus musculus
  siRNA target sequence for Mmp13 (NM_008607.1,1035-1053).
catcccgtgaccttatgtt

SEQ ID NO: 550248 - DNA, 19 bp, Mus musculus
  siRNA target sequence for Mmp13 (NM_008607.1,1077-1095).
gggctctgaatggttatga

SEQ ID NO: 550249 - DNA, 19 bp, Mus musculus
  siRNA target sequence for Mmp13 (NM_008607.1,1079-1097).
gctctgaatggttatgaca

SEQ ID NO: 550250 - DNA, 19 bp, Mus musculus
  siRNA target sequence for Mmp13 (NM_008607.1,1080-1098).
ctctgaatggttatgacat

SEQ ID NO: 550251 - DNA, 19 bp, Mus musculus
  siRNA target sequence for Mmp13 (NM_008607.1,1102-1120).
ggaaggttatcccagaaaa

SEQ ID NO: 550252 - DNA, 19 bp, Mus musculus
  siRNA target sequence for Mmp13 (NM_008607.1,1103-1121).
gaaggttatcccagaaaaa

SEQ ID NO: 550253 - DNA, 19 bp, Mus musculus
  siRNA target sequence for Mmp13 (NM_008607.1,1106-1124).
ggttatcccagaaaaatat

SEQ ID NO: 550254 - DNA, 19 bp, Mus musculus
  siRNA target sequence for Mmp13 (NM_008607.1,1159-1177).
gagcgctgcggttcacttt

SEQ ID NO: 550255 - DNA, 19 bp, Mus musculus
  siRNA target sequence for Mmp13 (NM_008607.1,1163-1181).
gctgcggttcactttgaga

SEQ ID NO: 550256 - DNA, 19 bp, Mus musculus
  siRNA target sequence for Mmp13 (NM_008607.1,1164-1182).
ctgcggttcactttgagaa

SEQ ID NO: 550257 - DNA, 19 bp, Mus musculus
  siRNA target sequence for Mmp13 (NM_008607.1,1185-1203).
cggggaagaccctcttctt

SEQ ID NO: 550258 - DNA, 19 bp, Mus musculus
  siRNA target sequence for Mmp13 (NM_008607.1,1210-1228).
gaaccacgtgtggagttat

SEQ ID NO: 550259 - DNA, 19 bp, Mus musculus
  siRNA target sequence for Mmp13 (NM_008607.1,1213-1231).
ccacgtgtggagttatgat

SEQ ID NO: 550260 - DNA, 19 bp, Mus musculus
  siRNA target sequence for Mmp13 (NM_008607.1,1216-1234).
cgtgtggagttatgatgat

SEQ ID NO: 550261 - DNA, 19 bp, Mus musculus
  siRNA target sequence for Mmp13 (NM_008607.1,1219-1237).
gtggagttatgatgatgtt

SEQ ID NO: 550262 - DNA, 19 bp, Mus musculus
  siRNA target sequence for Mmp13 (NM_008607.1,1221-1239).
ggagttatgatgatgttaa

SEQ ID NO: 550263 - DNA, 19 bp, Mus musculus
  siRNA target sequence for Mmp13 (NM_008607.1,1224-1242).
gttatgatgatgttaacca

SEQ ID NO: 550264 - DNA, 19 bp, Mus musculus
  siRNA target sequence for Mmp13 (NM_008607.1,1241-1259).
cagactatggacaaagatt

SEQ ID NO: 550265 - DNA, 19 bp, Mus musculus
  siRNA target sequence for Mmp13 (NM_008607.1,1345-1363).
caatgggcccatacagttt

SEQ ID NO: 550266 - DNA, 19 bp, Mus musculus
  siRNA target sequence for Mmp13 (NM_008607.1,1349-1367).
gggcccatacagtttgaat

SEQ ID NO: 550267 - DNA, 19 bp, Mus musculus
  siRNA target sequence for Mmp13 (NM_008607.1,1352-1370).
cccatacagtttgaataca

SEQ ID NO: 550268 - DNA, 19 bp, Mus musculus
  siRNA target sequence for Mmp13 (NM_008607.1,1393-1411).
gagagtcatgccaacaaat

SEQ ID NO: 550269 - DNA, 19 bp, Mus musculus
  siRNA target sequence for Mmp13 (NM_008607.1,1397-1415).
gtcatgccaacaaattcca

SEQ ID NO: 550270 - DNA, 19 bp, Mus musculus
  siRNA target sequence for Mmp13 (NM_008607.1,1399-1417).
catgccaacaaattccata

SEQ ID NO: 550271 - DNA, 19 bp, Mus musculus
  siRNA target sequence for Mmp2 (NM_008610.1,131-149).
gcaccatcgcccatcatca

SEQ ID NO: 550272 - DNA, 19 bp, Mus musculus
  siRNA target sequence for Mmp2 (NM_008610.1,132-150).
caccatcgcccatcatcaa

SEQ ID NO: 550273 - DNA, 19 bp, Mus musculus
  siRNA target sequence for Mmp2 (NM_008610.1,134-152).
ccatcgcccatcatcaagt

SEQ ID NO: 550274 - DNA, 19 bp, Mus musculus
  siRNA target sequence for Mmp2 (NM_008610.1,135-153).
catcgcccatcatcaagtt

SEQ ID NO: 550275 - DNA, 19 bp, Mus musculus
  siRNA target sequence for Mmp2 (NM_008610.1,158-176).
ggcgatgtcgcccctaaaa

SEQ ID NO: 550276 - DNA, 19 bp, Mus musculus
  siRNA target sequence for Mmp2 (NM_008610.1,160-178).
cgatgtcgcccctaaaaca

SEQ ID NO: 550277 - DNA, 19 bp, Mus musculus
  siRNA target sequence for Mmp2 (NM_008610.1,166-184).
cgcccctaaaacagacaaa

SEQ ID NO: 550278 - DNA, 19 bp, Mus musculus
  siRNA target sequence for Mmp2 (NM_008610.1,170-188).
cctaaaacagacaaagagt

SEQ ID NO: 550279 - DNA, 19 bp, Mus musculus
  siRNA target sequence for Mmp2 (NM_008610.1,171-189).
ctaaaacagacaaagagtt

SEQ ID NO: 550280 - DNA, 19 bp, Mus musculus
  siRNA target sequence for Mmp2 (NM_008610.1,362-380).
gtggccaactacaacttct

SEQ ID NO: 550281 - DNA, 19 bp, Mus musculus
  siRNA target sequence for Mmp2 (NM_008610.1,401-419).
gacaagaaccagatcacat

SEQ ID NO: 550282 - DNA, 19 bp, Mus musculus
  siRNA target sequence for Mmp2 (NM_008610.1,417-435).
catacaggatcattggtta

SEQ ID NO: 550283 - DNA, 19 bp, Mus musculus
  siRNA target sequence for Mmp2 (NM_008610.1,421-439).
caggatcattggttacaca

SEQ ID NO: 550284 - DNA, 19 bp, Mus musculus
  siRNA target sequence for Mmp2 (NM_008610.1,471-489).
cttttgctcgggccttaaa

SEQ ID NO: 550285 - DNA, 19 bp, Mus musculus
  siRNA target sequence for Mmp2 (NM_008610.1,476-494).
gctcgggccttaaaagtat

SEQ ID NO: 550286 - DNA, 19 bp, Mus musculus
  siRNA target sequence for Mmp2 (NM_008610.1,505-523).
cactccgctgcgcttttct

SEQ ID NO: 550287 - DNA, 19 bp, Mus musculus
  siRNA target sequence for Mmp2 (NM_008610.1,514-532).
gcgcttttctcgaatccat

SEQ ID NO: 550288 - DNA, 19 bp, Mus musculus
  siRNA target sequence for Mmp2 (NM_008610.1,570-588).
gggagcatggagatggata

SEQ ID NO: 550289 - DNA, 19 bp, Mus musculus
  siRNA target sequence for Mmp2 (NM_008610.1,649-667).
gggagattctcactttgat

SEQ ID NO: 550290 - DNA, 19 bp, Mus musculus
  siRNA target sequence for Mmp2 (NM_008610.1,698-716).
caagtggtccgcgtaaagt

SEQ ID NO: 550291 - DNA, 19 bp, Mus musculus
  siRNA target sequence for Mmp2 (NM_008610.1,1007-1025).
gactatgaccgggataaga

SEQ ID NO: 550292 - DNA, 19 bp, Mus musculus
  siRNA target sequence for Mmp2 (NM_008610.1,1059-1077).
ctgtgggtggaaattcaga

SEQ ID NO: 550293 - DNA, 19 bp, Mus musculus
  siRNA target sequence for Mmp2 (NM_008610.1,1338-1356).
gattatcccatgatgacat

SEQ ID NO: 550294 - DNA, 19 bp, Mus musculus
  siRNA target sequence for Mmp2 (NM_008610.1,1455-1473).
gcaaacaggacattgtctt

SEQ ID NO: 550295 - DNA, 19 bp, Mus musculus
  siRNA target sequence for Mmp2 (NM_008610.1,1456-1474).
caaacaggacattgtcttt

SEQ ID NO: 550296 - DNA, 19 bp, Mus musculus
  siRNA target sequence for Mmp2 (NM_008610.1,1493-1511).
cgtggtgagatcttcttct

SEQ ID NO: 550297 - DNA, 19 bp, Mus musculus
  siRNA target sequence for Mmp2 (NM_008610.1,1494-1512).
gtggtgagatcttcttctt

SEQ ID NO: 550298 - DNA, 19 bp, Mus musculus
  siRNA target sequence for Mmp2 (NM_008610.1,1510-1528).
cttcaaggaccggtttatt

SEQ ID NO: 550299 - DNA, 19 bp, Mus musculus
  siRNA target sequence for Mmp3 (NM_010809.1,127-145).
ctcatcctacccattgcat

SEQ ID NO: 550300 - DNA, 19 bp, Mus musculus
  siRNA target sequence for Mmp3 (NM_010809.1,205-223).
ctatggccttgcaaaagat

SEQ ID NO: 550301 - DNA, 19 bp, Mus musculus
  siRNA target sequence for Mmp3 (NM_010809.1,701-719).
gtcactggtaccaacctat

SEQ ID NO: 550302 - DNA, 19 bp, Mus musculus
  siRNA target sequence for Mmp3 (NM_010809.1,835-853).
ctctcaagatgatgtagat

SEQ ID NO: 550303 - DNA, 19 bp, Mus musculus
  siRNA target sequence for Mmp3 (NM_010809.1,845-863).
gatgtagatggtattcagt

SEQ ID NO: 550304 - DNA, 19 bp, Mus musculus
  siRNA target sequence for Mmp3 (NM_010809.1,902-920).
gtggtacccaccaagtcta

SEQ ID NO: 550305 - DNA, 19 bp, Mus musculus
  siRNA target sequence for Mmp3 (NM_010809.1,905-923).
gtacccaccaagtctaact

SEQ ID NO: 550306 - DNA, 19 bp, Mus musculus
  siRNA target sequence for Mmp3 (NM_010809.1,989-1007).
cggggagaagtcctgtttt

SEQ ID NO: 550307 - DNA, 19 bp, Mus musculus
  siRNA target sequence for Mmp3 (NM_010809.1,991-1009).
gggagaagtcctgtttttt

SEQ ID NO: 550308 - DNA, 19 bp, Mus musculus
  siRNA target sequence for Mmp3 (NM_010809.1,1018-1036).
gcacttttggcgcaaatct

SEQ ID NO: 550309 - DNA, 19 bp, Mus musculus
  siRNA target sequence for Mmp3 (NM_010809.1,1106-1124).
gctgcatatgaggttacta

SEQ ID NO: 550310 - DNA, 19 bp, Mus musculus
  siRNA target sequence for Mmp3 (NM_010809.1,1107-1125).
ctgcatatgaggttactaa

SEQ ID NO: 550311 - DNA, 19 bp, Mus musculus
  siRNA target sequence for Mmp3 (NM_010809.1,1109-1127).
gcatatgaggttactaaca

SEQ ID NO: 550312 - DNA, 19 bp, Mus musculus
  siRNA target sequence for Mmp3 (NM_010809.1,1186-1204).
gctagcaggttatcctaaa

SEQ ID NO: 550313 - DNA, 19 bp, Mus musculus
  siRNA target sequence for Mmp3 (NM_010809.1,1440-1458).
cttcgcagttggaatttga

SEQ ID NO: 550314 - DNA, 19 bp, Mus musculus
  siRNA target sequence for Mmp3 (NM_010809.1,1495-1513).
caatagctggtttaattgt

SEQ ID NO: 550315 - DNA, 19 bp, Mus musculus
  siRNA target sequence for Mmp7 (NM_010810.1,178-196).
ccctcatgactctaaaaca

SEQ ID NO: 550316 - DNA, 19 bp, Mus musculus
  siRNA target sequence for Mmp7 (NM_010810.1,179-197).
cctcatgactctaaaacaa

SEQ ID NO: 550317 - DNA, 19 bp, Mus musculus
  siRNA target sequence for Mmp7 (NM_010810.1,195-213).
caaagaaggtcaatagtct

SEQ ID NO: 550318 - DNA, 19 bp, Mus musculus
  siRNA target sequence for Mmp7 (NM_010810.1,250-268).
cctgcccatgactggaaaa

SEQ ID NO: 550319 - DNA, 19 bp, Mus musculus
  siRNA target sequence for Mmp7 (NM_010810.1,274-292).
cccctacatcatggaaata

SEQ ID NO: 550320 - DNA, 19 bp, Mus musculus
  siRNA target sequence for Mmp7 (NM_010810.1,275-293).
ccctacatcatggaaataa

SEQ ID NO: 550321 - DNA, 19 bp, Mus musculus
  siRNA target sequence for Mmp7 (NM_010810.1,276-294).
cctacatcatggaaataat

SEQ ID NO: 550322 - DNA, 19 bp, Mus musculus
  siRNA target sequence for Mmp7 (NM_010810.1,323-341).
gttgcagaatactcactaa

SEQ ID NO: 550323 - DNA, 19 bp, Mus musculus
  siRNA target sequence for Mmp7 (NM_010810.1,379-397).
ctacagaattgtatcctat

SEQ ID NO: 550324 - DNA, 19 bp, Mus musculus
  siRNA target sequence for Mmp7 (NM_010810.1,413-431).
cggatcgtagtggatcaaa

SEQ ID NO: 550325 - DNA, 19 bp, Mus musculus
  siRNA target sequence for Mmp7 (NM_010810.1,414-432).
ggatcgtagtggatcaaat

SEQ ID NO: 550326 - DNA, 19 bp, Mus musculus
  siRNA target sequence for Mmp7 (NM_010810.1,422-440).
gtggatcaaatcgtgaaaa

SEQ ID NO: 550327 - DNA, 19 bp, Mus musculus
  siRNA target sequence for Mmp7 (NM_010810.1,495-513).
gggggactgcggatatcat

SEQ ID NO: 550328 - DNA, 19 bp, Mus musculus
  siRNA target sequence for Mmp7 (NM_010810.1,498-516).
ggactgcggatatcataat

SEQ ID NO: 550329 - DNA, 19 bp, Mus musculus
  siRNA target sequence for Mmp7 (NM_010810.1,499-517).
gactgcggatatcataatt

SEQ ID NO: 550330 - DNA, 19 bp, Mus musculus
  siRNA target sequence for Mmp7 (NM_010810.1,520-538).
cttcgcaaggagagatcat

SEQ ID NO: 550331 - DNA, 19 bp, Mus musculus
  siRNA target sequence for Mmp7 (NM_010810.1,742-760).
gatgtaccctacctatcaa

SEQ ID NO: 550332 - DNA, 19 bp, Mus musculus
  siRNA target sequence for Mmp7 (NM_010810.1,745-763).
gtaccctacctatcaaaga

SEQ ID NO: 550333 - DNA, 19 bp, Mus musculus
  siRNA target sequence for Mmp7 (NM_010810.1,803-821).
gcaggcattcagaagttat

SEQ ID NO: 550334 - DNA, 19 bp, Mus musculus
  siRNA target sequence for Mmp8 (NM_008611.2,183-201).
ctgagaattacctacgaaa

SEQ ID NO: 550335 - DNA, 19 bp, Mus musculus
  siRNA target sequence for Mmp8 (NM_008611.2,185-203).
gagaattacctacgaaaat

SEQ ID NO: 550336 - DNA, 19 bp, Mus musculus
  siRNA target sequence for Mmp8 (NM_008611.2,205-223).
ctacaacttaccaagcaat

SEQ ID NO: 550337 - DNA, 19 bp, Mus musculus
  siRNA target sequence for Mmp8 (NM_008611.2,321-339).
ctacaatggggattatgga

SEQ ID NO: 550338 - DNA, 19 bp, Mus musculus
  siRNA target sequence for Mmp8 (NM_008611.2,324-342).
caatggggattatggaaat

SEQ ID NO: 550339 - DNA, 19 bp, Mus musculus
  siRNA target sequence for Mmp8 (NM_008611.2,415-433).
cctgacctacaggattata

SEQ ID NO: 550340 - DNA, 19 bp, Mus musculus
  siRNA target sequence for Mmp8 (NM_008611.2,421-439).
ctacaggattataaaccat

SEQ ID NO: 550341 - DNA, 19 bp, Mus musculus
  siRNA target sequence for Mmp8 (NM_008611.2,519-537).
ccttcaccgagatcttaca

SEQ ID NO: 550342 - DNA, 19 bp, Mus musculus
  siRNA target sequence for Mmp8 (NM_008611.2,677-695).
gaaacgtggactcaagatt

SEQ ID NO: 550343 - DNA, 19 bp, Mus musculus
  siRNA target sequence for Mmp8 (NM_008611.2,681-699).
cgtggactcaagattccaa

SEQ ID NO: 550344 - DNA, 19 bp, Mus musculus
  siRNA target sequence for Mmp8 (NM_008611.2,682-700).
gtggactcaagattccaaa

SEQ ID NO: 550345 - DNA, 19 bp, Mus musculus
  siRNA target sequence for Mmp8 (NM_008611.2,684-702).
ggactcaagattccaaaaa

SEQ ID NO: 550346 - DNA, 19 bp, Mus musculus
  siRNA target sequence for Mmp8 (NM_008611.2,696-714).
ccaaaaattacaacctatt

SEQ ID NO: 550347 - DNA, 19 bp, Mus musculus
  siRNA target sequence for Mmp8 (NM_008611.2,767-785).
gatcctggtgccttgatgt

SEQ ID NO: 550348 - DNA, 19 bp, Mus musculus
  siRNA target sequence for Mmp8 (NM_008611.2,822-840).
cactacctcaagatgatat

SEQ ID NO: 550349 - DNA, 19 bp, Mus musculus
  siRNA target sequence for Mmp8 (NM_008611.2,915-933).
gtgacccccacctgagatt

SEQ ID NO: 550350 - DNA, 19 bp, Mus musculus
  siRNA target sequence for Mmp8 (NM_008611.2,919-937).
cccccacctgagatttgat

SEQ ID NO: 550351 - DNA, 19 bp, Mus musculus
  siRNA target sequence for Mmp8 (NM_008611.2,948-966).
cactccgtggggagattta

SEQ ID NO: 550352 - DNA, 19 bp, Mus musculus
  siRNA target sequence for Mmp8 (NM_008611.2,957-975).
gggagatttacttctttaa

SEQ ID NO: 550353 - DNA, 19 bp, Mus musculus
  siRNA target sequence for Mmp8 (NM_008611.2,1014-1032).
cagttgacctcaatttcat

SEQ ID NO: 550354 - DNA, 19 bp, Mus musculus
  siRNA target sequence for Mmp8 (NM_008611.2,1016-1034).
gttgacctcaatttcatat

SEQ ID NO: 550355 - DNA, 19 bp, Mus musculus
  siRNA target sequence for Mmp8 (NM_008611.2,1092-1110).
gagacctagttttcctatt

SEQ ID NO: 550356 - DNA, 19 bp, Mus musculus
  siRNA target sequence for Mmp8 (NM_008611.2,1157-1175).
ggttaccccagagatatat

SEQ ID NO: 550357 - DNA, 19 bp, Mus musculus
  siRNA target sequence for Mmp8 (NM_008611.2,1165-1183).
cagagatatatccaactat

SEQ ID NO: 550358 - DNA, 19 bp, Mus musculus
  siRNA target sequence for Mmp8 (NM_008611.2,1169-1187).
gatatatccaactatggat

SEQ ID NO: 550359 - DNA, 19 bp, Mus musculus
  siRNA target sequence for Mmp8 (NM_008611.2,1195-1213).
gagtgtccaagccattgat

SEQ ID NO: 550360 - DNA, 19 bp, Mus musculus
  siRNA target sequence for Mmp8 (NM_008611.2,1224-1242).
cctataacgggaagacata

SEQ ID NO: 550361 - DNA, 19 bp, Mus musculus
  siRNA target sequence for Mmp8 (NM_008611.2,1267-1285).
gagatatgacaatcaaaga

SEQ ID NO: 550362 - DNA, 19 bp, Mus musculus
  siRNA target sequence for Mmp8 (NM_008611.2,1347-1365).
gagtcgatgcagttttcct

SEQ ID NO: 550363 - DNA, 19 bp, Mus musculus
  siRNA target sequence for Mmp8 (NM_008611.2,1390-1408).
cagtggaccacaatatttt

SEQ ID NO: 550364 - DNA, 19 bp, Mus musculus
  siRNA target sequence for Mmp8 (NM_008611.2,1394-1412).
ggaccacaatattttgcat

SEQ ID NO: 550365 - DNA, 19 bp, Mus musculus
  siRNA target sequence for Mmp8 (NM_008611.2,1395-1413).
gaccacaatattttgcatt

SEQ ID NO: 550366 - DNA, 19 bp, Mus musculus
  siRNA target sequence for Mmp8 (NM_008611.2,1397-1415).
ccacaatattttgcattta

SEQ ID NO: 550367 - DNA, 19 bp, Mus musculus
  siRNA target sequence for Mmp8 (NM_008611.2,1440-1458).
gagttgcaagaagcaattt

SEQ ID NO: 550368 - DNA, 19 bp, Mus musculus
  siRNA target sequence for Mpo (NM_010824.1,833-851).
ggcctttcaatgttacaga

SEQ ID NO: 550369 - DNA, 19 bp, Mus musculus
  siRNA target sequence for Mpo (NM_010824.1,834-852).
gcctttcaatgttacagat

SEQ ID NO: 550370 - DNA, 19 bp, Mus musculus
  siRNA target sequence for Mpo (NM_010824.1,926-944).
gcccaccgaatgacaagta

SEQ ID NO: 550371 - DNA, 19 bp, Mus musculus
  siRNA target sequence for Mpo (NM_010824.1,927-945).
cccaccgaatgacaagtat

SEQ ID NO: 550372 - DNA, 19 bp, Mus musculus
  siRNA target sequence for Mpo (NM_010824.1,1319-1337).
ccaatgaccctcgaatcaa

SEQ ID NO: 550373 - DNA, 19 bp, Mus musculus
  siRNA target sequence for Mpo (NM_010824.1,1331-1349).
gaatcaagaaccaaaagga

SEQ ID NO: 550374 - DNA, 19 bp, Mus musculus
  siRNA target sequence for Mpo (NM_010824.1,1400-1418).
ccattcgcaaccagatcaa

SEQ ID NO: 550375 - DNA, 19 bp, Mus musculus
  siRNA target sequence for Mpo (NM_010824.1,1888-1906).
cctcgaatcgccaatgtct

SEQ ID NO: 550376 - DNA, 19 bp, Mus musculus
  siRNA target sequence for Mpo (NM_010824.1,1889-1907).
ctcgaatcgccaatgtctt

SEQ ID NO: 550377 - DNA, 19 bp, Mus musculus
  siRNA target sequence for Mpo (NM_010824.1,1936-1954).
ctcatccaacccttcatgt

SEQ ID NO: 550378 - DNA, 19 bp, Mus musculus
  siRNA target sequence for Mpo (NM_010824.1,2003-2021).
cactcagcaaggtcttttt

SEQ ID NO: 550379 - DNA, 19 bp, Mus musculus
  siRNA target sequence for Mpo (NM_010824.1,2170-2188).
gatttgcctgctcttaaca

SEQ ID NO: 550380 - DNA, 19 bp, Mus musculus
  siRNA target sequence for Mpo (NM_010824.1,2309-2327).
ggaagctgatggcacaata

SEQ ID NO: 550381 - DNA, 19 bp, Mus musculus
  siRNA target sequence for Mpo (NM_010824.1,2330-2348).
gcacgcccaacaacattga

SEQ ID NO: 550382 - DNA, 19 bp, Mus musculus
  siRNA target sequence for Mpo (NM_010824.1,2472-2490).
cccaggcgtgttcagtaaa

SEQ ID NO: 550383 - DNA, 19 bp, Mus musculus
  siRNA target sequence for Mpo (NM_010824.1,2474-2492).
caggcgtgttcagtaaaca

SEQ ID NO: 550384 - DNA, 19 bp, Mus musculus
  siRNA target sequence for Mpo (NM_010824.1,2555-2573).
ccaccgtgtcgaagaacaa

SEQ ID NO: 550385 - DNA, 19 bp, Mus musculus
  siRNA target sequence for Mpo (NM_010824.1,2558-2576).
ccgtgtcgaagaacaacat

SEQ ID NO: 550386 - DNA, 19 bp, Mus musculus
  siRNA target sequence for Mpo (NM_010824.1,2564-2582).
cgaagaacaacatcttcat

SEQ ID NO: 550387 - DNA, 19 bp, Mus musculus
  siRNA target sequence for Mpo (NM_010824.1,2589-2607).
cacatacccccgagacttt

SEQ ID NO: 550388 - DNA, 19 bp, Mus musculus
  siRNA target sequence for Mpo (NM_010824.1,2602-2620).
gactttgtcagctgtaaca

SEQ ID NO: 550389 - DNA, 19 bp, Mus musculus
  siRNA target sequence for Mpo (NM_010824.1,2613-2631).
ctgtaacacccttcctaaa

SEQ ID NO: 550390 - DNA, 19 bp, Mus musculus
  siRNA target sequence for Mpo (NM_010824.1,2615-2633).
gtaacacccttcctaaact

SEQ ID NO: 550391 - DNA, 19 bp, Mus musculus
  siRNA target sequence for Mst1 (NM_008243.2,82-100).
gcagcgctcaccactgaat

SEQ ID NO: 550392 - DNA, 19 bp, Mus musculus
  siRNA target sequence for Mst1 (NM_008243.2,288-306).
cgctgcacacacagctata

SEQ ID NO: 550393 - DNA, 19 bp, Mus musculus
  siRNA target sequence for Mst1 (NM_008243.2,312-330).
cgagtctgtgccatctctt

SEQ ID NO: 550394 - DNA, 19 bp, Mus musculus
  siRNA target sequence for Mst1 (NM_008243.2,328-346).
cttccagaagaaagattat

SEQ ID NO: 550395 - DNA, 19 bp, Mus musculus
  siRNA target sequence for Mst1 (NM_008243.2,443-461).
cccaatgaccacaagtata

SEQ ID NO: 550396 - DNA, 19 bp, Mus musculus
  siRNA target sequence for Mst1 (NM_008243.2,630-648).
gcgaggtagacgttacaga

SEQ ID NO: 550397 - DNA, 19 bp, Mus musculus
  siRNA target sequence for Mst1 (NM_008243.2,728-746).
gatctgaaagacaactatt

SEQ ID NO: 550398 - DNA, 19 bp, Mus musculus
  siRNA target sequence for Mst1 (NM_008243.2,786-804).
ccacagacccgaatgttga

SEQ ID NO: 550399 - DNA, 19 bp, Mus musculus
  siRNA target sequence for Mst1 (NM_008243.2,795-813).
cgaatgttgagcgagaatt

SEQ ID NO: 550400 - DNA, 19 bp, Mus musculus
  siRNA target sequence for Mst1 (NM_008243.2,845-863).
cctccgaccgtcaaaggat

SEQ ID NO: 550401 - DNA, 19 bp, Mus musculus
  siRNA target sequence for Mst1 (NM_008243.2,901-919).
ctgcttccgcggaaaaggt

SEQ ID NO: 550402 - DNA, 19 bp, Mus musculus
  siRNA target sequence for Mst1 (NM_008243.2,925-943).
ctatcgaggcacaaccaat

SEQ ID NO: 550403 - DNA, 19 bp, Mus musculus
  siRNA target sequence for Mst1 (NM_008243.2,1001-1019).
cgctttgtgccagagaaat

SEQ ID NO: 550404 - DNA, 19 bp, Mus musculus
  siRNA target sequence for Mst1 (NM_008243.2,1003-1021).
ctttgtgccagagaaatat

SEQ ID NO: 550405 - DNA, 19 bp, Mus musculus
  siRNA target sequence for Mst1 (NM_008243.2,1027-1045).
caaggaccttcgtgagaat

SEQ ID NO: 550406 - DNA, 19 bp, Mus musculus
  siRNA target sequence for Mst1 (NM_008243.2,1031-1049).
gaccttcgtgagaatttct

SEQ ID NO: 550407 - DNA, 19 bp, Mus musculus
  siRNA target sequence for Mst1 (NM_008243.2,1073-1091).
gcgccttggtgcttcacat

SEQ ID NO: 550408 - DNA, 19 bp, Mus musculus
  siRNA target sequence for Mst1 (NM_008243.2,1171-1189).
cggctcaggtgaacagtat

SEQ ID NO: 550409 - DNA, 19 bp, Mus musculus
  siRNA target sequence for Mst1 (NM_008243.2,1248-1266).
caccgcacaagccacaatt

SEQ ID NO: 550410 - DNA, 19 bp, Mus musculus
  siRNA target sequence for Mst1 (NM_008243.2,1250-1268).
ccgcacaagccacaattta

SEQ ID NO: 550411 - DNA, 19 bp, Mus musculus
  siRNA target sequence for Mst1 (NM_008243.2,1252-1270).
gcacaagccacaatttaca

SEQ ID NO: 550412 - DNA, 19 bp, Mus musculus
  siRNA target sequence for Mst1 (NM_008243.2,1334-1352).
catgggccctggtgctata

SEQ ID NO: 550413 - DNA, 19 bp, Mus musculus
  siRNA target sequence for Mst1 (NM_008243.2,1361-1379).
ccggatatcctgtttgact

SEQ ID NO: 550414 - DNA, 19 bp, Mus musculus
  siRNA target sequence for Mst1 (NM_008243.2,1362-1380).
cggatatcctgtttgacta

SEQ ID NO: 550415 - DNA, 19 bp, Mus musculus
  siRNA target sequence for Mst1 (NM_008243.2,1439-1457).
caggtggtgtttgaaaagt

SEQ ID NO: 550416 - DNA, 19 bp, Mus musculus
  siRNA target sequence for Mst1 (NM_008243.2,1465-1483).
gagagttgacaagagtaat

SEQ ID NO: 550417 - DNA, 19 bp, Mus musculus
  siRNA target sequence for Mst1 (NM_008243.2,1544-1562).
cgacagggccagcatttct

SEQ ID NO: 550418 - DNA, 19 bp, Mus musculus
  siRNA target sequence for Mst1 (NM_008243.2,1638-1656).
caggatacgaggtatggtt

SEQ ID NO: 550419 - DNA, 19 bp, Mus musculus
  siRNA target sequence for Mst1 (NM_008243.2,1648-1666).
ggtatggttgggtacaatt

SEQ ID NO: 550420 - DNA, 19 bp, Mus musculus
  siRNA target sequence for Mst1 (NM_008243.2,1649-1667).
gtatggttgggtacaatta

SEQ ID NO: 550421 - DNA, 19 bp, Mus musculus
  siRNA target sequence for Mst1 (NM_008243.2,1787-1805).
catcacgtggccctgattt

SEQ ID NO: 550422 - DNA, 19 bp, Mus musculus
  siRNA target sequence for Mst1 (NM_008243.2,1806-1824).
gcctgcctcctgaacagta

SEQ ID NO: 550423 - DNA, 19 bp, Mus musculus
  siRNA target sequence for Mst1 (NM_008243.2,1872-1890).
ccatcggtacaagcaataa

SEQ ID NO: 550424 - DNA, 19 bp, Mus musculus
  siRNA target sequence for Mst1 (NM_008243.2,1876-1894).
cggtacaagcaataacaca

SEQ ID NO: 550425 - DNA, 19 bp, Mus musculus
  siRNA target sequence for Mst1 (NM_008243.2,1945-1963).
gaagtaccgaggacacata

SEQ ID NO: 550426 - DNA, 19 bp, Mus musculus
  siRNA target sequence for Mst1 (NM_008243.2,2063-2081).
gtcctacagggacttatca

SEQ ID NO: 550427 - DNA, 19 bp, Mus musculus
  siRNA target sequence for Mvp (NM_080638.1,157-175).
gctggaccagaacagtaat

SEQ ID NO: 550428 - DNA, 19 bp, Mus musculus
  siRNA target sequence for Mvp (NM_080638.1,220-238).
caatgagagggtactgttt

SEQ ID NO: 550429 - DNA, 19 bp, Mus musculus
  siRNA target sequence for Mvp (NM_080638.1,697-715).
ccgatccgtcggtgcttat

SEQ ID NO: 550430 - DNA, 19 bp, Mus musculus
  siRNA target sequence for Mvp (NM_080638.1,699-717).
gatccgtcggtgcttatct

SEQ ID NO: 550431 - DNA, 19 bp, Mus musculus
  siRNA target sequence for Mvp (NM_080638.1,749-767).
gtggacgctgtgatcctta

SEQ ID NO: 550432 - DNA, 19 bp, Mus musculus
  siRNA target sequence for Mvp (NM_080638.1,756-774).
ctgtgatccttacagaaaa

SEQ ID NO: 550433 - DNA, 19 bp, Mus musculus
  siRNA target sequence for Mvp (NM_080638.1,788-806).
ctccgggctcggcaaaact

SEQ ID NO: 550434 - DNA, 19 bp, Mus musculus
  siRNA target sequence for Mvp (NM_080638.1,791-809).
cgggctcggcaaaacttca

SEQ ID NO: 550435 - DNA, 19 bp, Mus musculus
  siRNA target sequence for Mvp (NM_080638.1,792-810).
gggctcggcaaaacttcaa

SEQ ID NO: 550436 - DNA, 19 bp, Mus musculus
  siRNA target sequence for Mvp (NM_080638.1,876-894).
cccatgtcccggatgtcta

SEQ ID NO: 550437 - DNA, 19 bp, Mus musculus
  siRNA target sequence for Mvp (NM_080638.1,877-895).
ccatgtcccggatgtctat

SEQ ID NO: 550438 - DNA, 19 bp, Mus musculus
  siRNA target sequence for Mvp (NM_080638.1,935-953).
cctcgacactactgtgtta

SEQ ID NO: 550439 - DNA, 19 bp, Mus musculus
  siRNA target sequence for Mvp (NM_080638.1,936-954).
ctcgacactactgtgttat

SEQ ID NO: 550440 - DNA, 19 bp, Mus musculus
  siRNA target sequence for Mvp (NM_080638.1,939-957).
gacactactgtgttatcct

SEQ ID NO: 550441 - DNA, 19 bp, Mus musculus
  siRNA target sequence for Mvp (NM_080638.1,993-1011).
gacaaaagcgtgttgtcaa

SEQ ID NO: 550442 - DNA, 19 bp, Mus musculus
  siRNA target sequence for Mvp (NM_080638.1,1014-1032).
gagagaagtcctttttcct

SEQ ID NO: 550443 - DNA, 19 bp, Mus musculus
  siRNA target sequence for Mvp (NM_080638.1,1239-1257).
ctatccctctggaccaaaa

SEQ ID NO: 550444 - DNA, 19 bp, Mus musculus
  siRNA target sequence for Mvp (NM_080638.1,1295-1313).
gtgcgggctgtgattggaa

SEQ ID NO: 550445 - DNA, 19 bp, Mus musculus
  siRNA target sequence for Mvp (NM_080638.1,1687-1705).
catcgaaactgcagatcat

SEQ ID NO: 550446 - DNA, 19 bp, Mus musculus
  siRNA target sequence for Mvp (NM_080638.1,1728-1746).
cttacaactggcactttga

SEQ ID NO: 550447 - DNA, 19 bp, Mus musculus
  siRNA target sequence for Mvp (NM_080638.1,1737-1755).
ggcactttgaactgaagaa

SEQ ID NO: 550448 - DNA, 19 bp, Mus musculus
  siRNA target sequence for Mvp (NM_080638.1,1772-1790).
gagacagccaagcttttct

SEQ ID NO: 550449 - DNA, 19 bp, Mus musculus
  siRNA target sequence for Mvp (NM_080638.1,1774-1792).
gacagccaagcttttctct

SEQ ID NO: 550450 - DNA, 19 bp, Mus musculus
  siRNA target sequence for Mvp (NM_080638.1,1848-1866).
ctgtagcctcggtcacatt

SEQ ID NO: 550451 - DNA, 19 bp, Mus musculus
  siRNA target sequence for Mvp (NM_080638.1,1857-1875).
cggtcacatttgatgactt

SEQ ID NO: 550452 - DNA, 19 bp, Mus musculus
  siRNA target sequence for Mvp (NM_080638.1,1863-1881).
catttgatgacttccataa

SEQ ID NO: 550453 - DNA, 19 bp, Mus musculus
  siRNA target sequence for Mvp (NM_080638.1,1882-1900).
gaactcagcacgtatcatt

SEQ ID NO: 550454 - DNA, 19 bp, Mus musculus
  siRNA target sequence for Mvp (NM_080638.1,2077-2095).
ccagctagccatcgaaatt

SEQ ID NO: 550455 - DNA, 19 bp, Mus musculus
  siRNA target sequence for Mvp (NM_080638.1,2078-2096).
cagctagccatcgaaatta

SEQ ID NO: 550456 - DNA, 19 bp, Mus musculus
  siRNA target sequence for Mvp (NM_080638.1,2080-2098).
gctagccatcgaaattaca

SEQ ID NO: 550457 - DNA, 19 bp, Mus musculus
  siRNA target sequence for Mvp (NM_080638.1,2081-2099).
ctagccatcgaaattacaa

SEQ ID NO: 550458 - DNA, 19 bp, Mus musculus
  siRNA target sequence for Mvp (NM_080638.1,2163-2181).
ggcttgagaggcagaagat

SEQ ID NO: 550459 - DNA, 19 bp, Mus musculus
  siRNA target sequence for Mvp (NM_080638.1,2208-2226).
cccgcaaggaacttttgga

SEQ ID NO: 550460 - DNA, 19 bp, Mus musculus
  siRNA target sequence for Mvp (NM_080638.1,2400-2418).
gagagatggagctgatcta

SEQ ID NO: 550461 - DNA, 19 bp, Mus musculus
  siRNA target sequence for Mvp (NM_080638.1,2551-2569).
gatgcaggtgaaacttctt

SEQ ID NO: 550462 - DNA, 19 bp, Mus musculus
  siRNA target sequence for Mvp (NM_080638.1,2570-2588).
cagtccctgggcctgaaat

SEQ ID NO: 550463 - DNA, 19 bp, Mus musculus
  siRNA target sequence for Mvp (NM_080638.1,2665-2683).
cggtcagccacctgtacaa

SEQ ID NO: 550464 - DNA, 19 bp, Mus musculus
  siRNA target sequence for Mvp (NM_080638.1,2669-2687).
cagccacctgtacaaaagt

SEQ ID NO: 550465 - DNA, 19 bp, Mus musculus
  siRNA target sequence for Myl1 (NM_021285.1,200-218).
gccaaacctaaggaagaaa

SEQ ID NO: 550466 - DNA, 19 bp, Mus musculus
  siRNA target sequence for Myl1 (NM_021285.1,224-242).
gatctgtctgctattaaga

SEQ ID NO: 550467 - DNA, 19 bp, Mus musculus
  siRNA target sequence for Myl2 (NM_010861.1,208-226).
ggacgagtgaacgtgaaaa

SEQ ID NO: 550468 - DNA, 19 bp, Mus musculus
  siRNA target sequence for Myl2 (NM_010861.1,209-227).
gacgagtgaacgtgaaaaa

SEQ ID NO: 550469 - DNA, 19 bp, Mus musculus
  siRNA target sequence for Myl2 (NM_010861.1,256-274).
gctccaggtccaattaact

SEQ ID NO: 550470 - DNA, 19 bp, Mus musculus
  siRNA target sequence for Myl2 (NM_010861.1,259-277).
ccaggtccaattaacttca

SEQ ID NO: 550471 - DNA, 19 bp, Mus musculus
  siRNA target sequence for Myl2 (NM_010861.1,342-360).
cgcattcaaggtgtttgat

SEQ ID NO: 550472 - DNA, 19 bp, Mus musculus
  siRNA target sequence for Myl2 (NM_010861.1,375-393).
gtcactgaaggctgactat

SEQ ID NO: 550473 - DNA, 19 bp, Mus musculus
  siRNA target sequence for Myl3 (NM_010859.1,201-219).
gtttgatgcctccaagatt

SEQ ID NO: 550474 - DNA, 19 bp, Mus musculus
  siRNA target sequence for Myl3 (NM_010859.1,205-223).
gatgcctccaagattaaga

SEQ ID NO: 550475 - DNA, 19 bp, Mus musculus
  siRNA target sequence for Myl3 (NM_010859.1,228-246).
gttcacacctgaacagatt

SEQ ID NO: 550476 - DNA, 19 bp, Mus musculus
  siRNA target sequence for Myl3 (NM_010859.1,286-304).
cccaagggcgagatgaaga

SEQ ID NO: 550477 - DNA, 19 bp, Mus musculus
  siRNA target sequence for Myl3 (NM_010859.1,287-305).
ccaagggcgagatgaagat

SEQ ID NO: 550478 - DNA, 19 bp, Mus musculus
  siRNA target sequence for Myl3 (NM_010859.1,652-670).
gcgtttgtgaagcatatca

SEQ ID NO: 550479 - DNA, 19 bp, Mus musculus
  siRNA target sequence for Myl3 (NM_010859.1,653-671).
cgtttgtgaagcatatcat

SEQ ID NO: 550480 - DNA, 19 bp, Mus musculus
  siRNA target sequence for Myl4 (NM_010858.2,263-281).
ctccaacgggagagatgaa

SEQ ID NO: 550481 - DNA, 19 bp, Mus musculus
  siRNA target sequence for Myl4 (NM_010858.2,265-283).
ccaacgggagagatgaaga

SEQ ID NO: 550482 - DNA, 19 bp, Mus musculus
  siRNA target sequence for Myl7 (NM_022879.1,67-85).
gcacaacgtggctcttcta

SEQ ID NO: 550483 - DNA, 19 bp, Mus musculus
  siRNA target sequence for Myl7 (NM_022879.1,68-86).
cacaacgtggctcttctaa

SEQ ID NO: 550484 - DNA, 19 bp, Mus musculus
  siRNA target sequence for Myl7 (NM_022879.1,73-91).
cgtggctcttctaatgtct

SEQ ID NO: 550485 - DNA, 19 bp, Mus musculus
  siRNA target sequence for Myl7 (NM_022879.1,160-178).
gatgggatcatctgcaaat

SEQ ID NO: 550486 - DNA, 19 bp, Mus musculus
  siRNA target sequence for Myl7 (NM_022879.1,204-222).
gctcgggagggtaagtgtt

SEQ ID NO: 550487 - DNA, 19 bp, Mus musculus
  siRNA target sequence for Myl7 (NM_022879.1,256-274).
gggaagggtcccatcaact

SEQ ID NO: 550488 - DNA, 19 bp, Mus musculus
  siRNA target sequence for Mylc2pl (NM_021611.1,147-165).
gctacaggttttatctctt

SEQ ID NO: 550489 - DNA, 19 bp, Mus musculus
  siRNA target sequence for Mylc2pl (NM_021611.1,214-232).
gctccaatgtcttttcgat

SEQ ID NO: 550490 - DNA, 19 bp, Mus musculus
  siRNA target sequence for Mylc2pl (NM_021611.1,337-355).
cactgggtcgcataaatgt

SEQ ID NO: 550491 - DNA, 19 bp, Mus musculus
  siRNA target sequence for Mylc2pl (NM_021611.1,343-361).
gtcgcataaatgtcaagaa

SEQ ID NO: 550492 - DNA, 19 bp, Mus musculus
  siRNA target sequence for Mylc2pl (NM_021611.1,356-374).
caagaacgaggaattggaa

SEQ ID NO: 550493 - DNA, 19 bp, Mus musculus
  siRNA target sequence for Mylc2pl (NM_021611.1,471-489).
ctgcacgccttcaaagtgt

SEQ ID NO: 550494 - DNA, 19 bp, Mus musculus
  siRNA target sequence for Mylc2pl (NM_021611.1,473-491).
gcacgccttcaaagtgttt

SEQ ID NO: 550495 - DNA, 19 bp, Mus musculus
  siRNA target sequence for Mylpf (NM_016754.3,247-265).
ggaggcgttcactgtaatt

SEQ ID NO: 550496 - DNA, 19 bp, Mus musculus
  siRNA target sequence for Mylpf (NM_016754.3,250-268).
ggcgttcactgtaattgat

SEQ ID NO: 550497 - DNA, 19 bp, Mus musculus
  siRNA target sequence for Mylpf (NM_016754.3,252-270).
cgttcactgtaattgatca

SEQ ID NO: 550498 - DNA, 19 bp, Mus musculus
  siRNA target sequence for Mylpf (NM_016754.3,350-368).
gaactcgacgctatgatga

SEQ ID NO: 550499 - DNA, 19 bp, Mus musculus
  siRNA target sequence for Mylpf (NM_016754.3,375-393).
ccagtgggcccatcaactt

SEQ ID NO: 550500 - DNA, 19 bp, Mus musculus
  siRNA target sequence for Nell2 (NM_016743.1,58-76).
gaatcccgggtgttactga

SEQ ID NO: 550501 - DNA, 19 bp, Mus musculus
  siRNA target sequence for Nell2 (NM_016743.1,126-144).
ggacccctccctacagatt

SEQ ID NO: 550502 - DNA, 19 bp, Mus musculus
  siRNA target sequence for Nell2 (NM_016743.1,136-154).
ctacagattgacgtcttaa

SEQ ID NO: 550503 - DNA, 19 bp, Mus musculus
  siRNA target sequence for Nell2 (NM_016743.1,147-165).
cgtcttaacagagttagaa

SEQ ID NO: 550504 - DNA, 19 bp, Mus musculus
  siRNA target sequence for Nell2 (NM_016743.1,522-540).
cttcagtgcctctcactta

SEQ ID NO: 550505 - DNA, 19 bp, Mus musculus
  siRNA target sequence for Nell2 (NM_016743.1,530-548).
cctctcacttaattttaca

SEQ ID NO: 550506 - DNA, 19 bp, Mus musculus
  siRNA target sequence for Nell2 (NM_016743.1,604-622).
gctctgggcacaacatttt

SEQ ID NO: 550507 - DNA, 19 bp, Mus musculus
  siRNA target sequence for Nell2 (NM_016743.1,710-728).
ctcagtgcccggaccttaa

SEQ ID NO: 550508 - DNA, 19 bp, Mus musculus
  siRNA target sequence for Nell2 (NM_016743.1,714-732).
gtgcccggaccttaatcga

SEQ ID NO: 550509 - DNA, 19 bp, Mus musculus
  siRNA target sequence for Nell2 (NM_016743.1,757-775).
catgggcttgtgcagaaaa

SEQ ID NO: 550510 - DNA, 19 bp, Mus musculus
  siRNA target sequence for Nell2 (NM_016743.1,760-778).
gggcttgtgcagaaaatca

SEQ ID NO: 550511 - DNA, 19 bp, Mus musculus
  siRNA target sequence for Nell2 (NM_016743.1,761-779).
ggcttgtgcagaaaatcat

SEQ ID NO: 550512 - DNA, 19 bp, Mus musculus
  siRNA target sequence for Nell2 (NM_016743.1,816-834).
gctgtcccgagctgaacaa

SEQ ID NO: 550513 - DNA, 19 bp, Mus musculus
  siRNA target sequence for Nell2 (NM_016743.1,1032-1050).
ctgtaaggagtgcaaatca

SEQ ID NO: 550514 - DNA, 19 bp, Mus musculus
  siRNA target sequence for Nell2 (NM_016743.1,1062-1080).
ccagggacggagctacttt

SEQ ID NO: 550515 - DNA, 19 bp, Mus musculus
  siRNA target sequence for Nell2 (NM_016743.1,1171-1189).
ggctgcccacccttagatt

SEQ ID NO: 550516 - DNA, 19 bp, Mus musculus
  siRNA target sequence for Nell2 (NM_016743.1,1229-1247).
gcaaggtttgtaaaggtta

SEQ ID NO: 550517 - DNA, 19 bp, Mus musculus
  siRNA target sequence for Nell2 (NM_016743.1,1230-1248).
caaggtttgtaaaggttat

SEQ ID NO: 550518 - DNA, 19 bp, Mus musculus
  siRNA target sequence for Nell2 (NM_016743.1,1319-1337).
gcagctgcagggatggttt

SEQ ID NO: 550519 - DNA, 19 bp, Mus musculus
  siRNA target sequence for Nell2 (NM_016743.1,1359-1377).
cgcctactgtgaagacatt

SEQ ID NO: 550520 - DNA, 19 bp, Mus musculus
  siRNA target sequence for Nell2 (NM_016743.1,1473-1491).
caggatcgacgattactca

SEQ ID NO: 550521 - DNA, 19 bp, Mus musculus
  siRNA target sequence for Nell2 (NM_016743.1,1479-1497).
cgacgattactcatgtaca

SEQ ID NO: 550522 - DNA, 19 bp, Mus musculus
  siRNA target sequence for Nell2 (NM_016743.1,1482-1500).
cgattactcatgtacagaa

SEQ ID NO: 550523 - DNA, 19 bp, Mus musculus
  siRNA target sequence for Nell2 (NM_016743.1,1515-1533).
cacaacccagcacaattgt

SEQ ID NO: 550524 - DNA, 19 bp, Mus musculus
  siRNA target sequence for Nell2 (NM_016743.1,1517-1535).
caacccagcacaattgtga

SEQ ID NO: 550525 - DNA, 19 bp, Mus musculus
  siRNA target sequence for Nell2 (NM_016743.1,1542-1560).
cgctttgtgctttaacact

SEQ ID NO: 550526 - DNA, 19 bp, Mus musculus
  siRNA target sequence for Nell2 (NM_016743.1,1606-1624).
ggaaccacgtgcaaagctt

SEQ ID NO: 550527 - DNA, 19 bp, Mus musculus
  siRNA target sequence for Nell2 (NM_016743.1,1607-1625).
gaaccacgtgcaaagcttt

SEQ ID NO: 550528 - DNA, 19 bp, Mus musculus
  siRNA target sequence for Nell2 (NM_016743.1,1815-1833).
ccatgacaatgggatgttt

SEQ ID NO: 550529 - DNA, 19 bp, Mus musculus
  siRNA target sequence for Nell2 (NM_016743.1,1900-1918).
gacaccatttgcttcaact

SEQ ID NO: 550530 - DNA, 19 bp, Mus musculus
  siRNA target sequence for Nell2 (NM_016743.1,1917-1935).
cttggacgggggatacgat

SEQ ID NO: 550531 - DNA, 19 bp, Mus musculus
  siRNA target sequence for Nell2 (NM_016743.1,2167-2185).
ggggaaaccgtgtacaaca

SEQ ID NO: 550532 - DNA, 19 bp, Mus musculus
  siRNA target sequence for Nell2 (NM_016743.1,2350-2368).
cgcaatgacatcaccaaaa

SEQ ID NO: 550533 - DNA, 19 bp, Mus musculus
  siRNA target sequence for Nin (NM_008697.1,338-356).
ctcttgggcagggtacatt

SEQ ID NO: 550534 - DNA, 19 bp, Mus musculus
  siRNA target sequence for Nin (NM_008697.1,340-358).
cttgggcagggtacatttt

SEQ ID NO: 550535 - DNA, 19 bp, Mus musculus
  siRNA target sequence for Nin (NM_008697.1,361-379).
ccaatttaaagaagcatta

SEQ ID NO: 550536 - DNA, 19 bp, Mus musculus
  siRNA target sequence for Nin (NM_008697.1,362-380).
caatttaaagaagcattaa

SEQ ID NO: 550537 - DNA, 19 bp, Mus musculus
  siRNA target sequence for Nin (NM_008697.1,371-389).
gaagcattaatacttatct

SEQ ID NO: 550538 - DNA, 19 bp, Mus musculus
  siRNA target sequence for Nin (NM_008697.1,446-464).
gctcagcccaaatatgtta

SEQ ID NO: 550539 - DNA, 19 bp, Mus musculus
  siRNA target sequence for Nin (NM_008697.1,475-493).
gcgttatggacgaagatca

SEQ ID NO: 550540 - DNA, 19 bp, Mus musculus
  siRNA target sequence for Nin (NM_008697.1,796-814).
ctgcgaacagtatggatta

SEQ ID NO: 550541 - DNA, 19 bp, Mus musculus
  siRNA target sequence for Nin (NM_008697.1,798-816).
gcgaacagtatggattaca

SEQ ID NO: 550542 - DNA, 19 bp, Mus musculus
  siRNA target sequence for Nin (NM_008697.1,873-891).
caatgagtgtggaagactt

SEQ ID NO: 550543 - DNA, 19 bp, Mus musculus
  siRNA target sequence for Nin (NM_008697.1,895-913).
ctatggtctgtttaagact

SEQ ID NO: 550544 - DNA, 19 bp, Mus musculus
  siRNA target sequence for Nin (NM_008697.1,942-960).
ctccctatagacaactgaa

SEQ ID NO: 550545 - DNA, 19 bp, Mus musculus
  siRNA target sequence for Nin (NM_008697.1,1266-1284).
ccgagatccggcacttgtt

SEQ ID NO: 550546 - DNA, 19 bp, Mus musculus
  siRNA target sequence for Nin (NM_008697.1,1267-1285).
cgagatccggcacttgtta

SEQ ID NO: 550547 - DNA, 19 bp, Mus musculus
  siRNA target sequence for Nin (NM_008697.1,1270-1288).
gatccggcacttgttagaa

SEQ ID NO: 550548 - DNA, 19 bp, Mus musculus
  siRNA target sequence for Nin (NM_008697.1,1448-1466).
cgcatagcagccttaaaga

SEQ ID NO: 550549 - DNA, 19 bp, Mus musculus
  siRNA target sequence for Nin (NM_008697.1,1449-1467).
gcatagcagccttaaagaa

SEQ ID NO: 550550 - DNA, 19 bp, Mus musculus
  siRNA target sequence for Nin (NM_008697.1,1548-1566).
ccaagacggaagagaatta

SEQ ID NO: 550551 - DNA, 19 bp, Mus musculus
  siRNA target sequence for Nin (NM_008697.1,1762-1780).
ggcgcagatgagaaatgaa

SEQ ID NO: 550552 - DNA, 19 bp, Mus musculus
  siRNA target sequence for Nin (NM_008697.1,1763-1781).
gcgcagatgagaaatgaat

SEQ ID NO: 550553 - DNA, 19 bp, Mus musculus
  siRNA target sequence for Nin (NM_008697.1,1764-1782).
cgcagatgagaaatgaata

SEQ ID NO: 550554 - DNA, 19 bp, Mus musculus
  siRNA target sequence for Nin (NM_008697.1,1826-1844).
cagtctgaactagaagaat

SEQ ID NO: 550555 - DNA, 19 bp, Mus musculus
  siRNA target sequence for Nin (NM_008697.1,1882-1900).
gaactcgctgtcagaagaa

SEQ ID NO: 550556 - DNA, 19 bp, Mus musculus
  siRNA target sequence for Nin (NM_008697.1,1952-1970).
gagtgcaaccccctgaata

SEQ ID NO: 550557 - DNA, 19 bp, Mus musculus
  siRNA target sequence for Nin (NM_008697.1,2056-2074).
caaagtgcgccactatgaa

SEQ ID NO: 550558 - DNA, 19 bp, Mus musculus
  siRNA target sequence for Nin (NM_008697.1,2173-2191).
cgagcttcggagtgagatt

SEQ ID NO: 550559 - DNA, 19 bp, Mus musculus
  siRNA target sequence for Nin (NM_008697.1,2430-2448).
gaggcttggagcaatctta

SEQ ID NO: 550560 - DNA, 19 bp, Mus musculus
  siRNA target sequence for Nin (NM_008697.1,2947-2965).
cctgtctggccagatactt

SEQ ID NO: 550561 - DNA, 19 bp, Mus musculus
  siRNA target sequence for Nin (NM_008697.1,3083-3101).
caagagaggcgagaaatga

SEQ ID NO: 550562 - DNA, 19 bp, Mus musculus
  siRNA target sequence for Nin (NM_008697.1,3168-3186).
cggagatgagcacagaaat

SEQ ID NO: 550563 - DNA, 19 bp, Mus musculus
  siRNA target sequence for Nin (NM_008697.1,3373-3391).
gcatgcagtgaaggaaaat

SEQ ID NO: 550564 - DNA, 19 bp, Mus musculus
  siRNA target sequence for Nin (NM_008697.1,3453-3471).
cggtgatctcgtcttgttt

SEQ ID NO: 550565 - DNA, 19 bp, Mus musculus
  siRNA target sequence for Nin (NM_008697.1,3788-3806).
caggacctgcttttcgata

SEQ ID NO: 550566 - DNA, 19 bp, Mus musculus
  siRNA target sequence for Nin (NM_008697.1,3855-3873).
catcttccaggtataaggt

SEQ ID NO: 550567 - DNA, 19 bp, Mus musculus
  siRNA target sequence for Nin (NM_008697.1,3858-3876).
cttccaggtataaggtatt

SEQ ID NO: 550568 - DNA, 19 bp, Mus musculus
  siRNA target sequence for Nin (NM_008697.1,3864-3882).
ggtataaggtattatacga

SEQ ID NO: 550569 - DNA, 19 bp, Mus musculus
  siRNA target sequence for Nin (NM_008697.1,4053-4071).
gttacgatgaggtcaaagt

SEQ ID NO: 550570 - DNA, 19 bp, Mus musculus
  siRNA target sequence for Nin (NM_008697.1,4193-4211).
gaggtcgcctcggatgaaa

SEQ ID NO: 550571 - DNA, 19 bp, Mus musculus
  siRNA target sequence for Nin (NM_008697.1,4261-4279).
gagcatgcaccacatcata

SEQ ID NO: 550572 - DNA, 19 bp, Mus musculus
  siRNA target sequence for Nin (NM_008697.1,4263-4281).
gcatgcaccacatcataga

SEQ ID NO: 550573 - DNA, 19 bp, Mus musculus
  siRNA target sequence for Nin (NM_008697.1,4323-4341).
cgaagctcctagctagaat

SEQ ID NO: 550574 - DNA, 19 bp, Mus musculus
  siRNA target sequence for Nin (NM_008697.1,4324-4342).
gaagctcctagctagaata

SEQ ID NO: 550575 - DNA, 19 bp, Mus musculus
  siRNA target sequence for Nin (NM_008697.1,4327-4345).
gctcctagctagaataaaa

SEQ ID NO: 550576 - DNA, 19 bp, Mus musculus
  siRNA target sequence for Nin (NM_008697.1,4330-4348).
cctagctagaataaaagca

SEQ ID NO: 550577 - DNA, 19 bp, Mus musculus
  siRNA target sequence for Nin (NM_008697.1,4338-4356).
gaataaaagcacacgaaat

SEQ ID NO: 550578 - DNA, 19 bp, Mus musculus
  siRNA target sequence for Nin (NM_008697.1,4474-4492).
ggccaccatcgcagagtta

SEQ ID NO: 550579 - DNA, 19 bp, Mus musculus
  siRNA target sequence for Nin (NM_008697.1,4476-4494).
ccaccatcgcagagttaga

SEQ ID NO: 550580 - DNA, 19 bp, Mus musculus
  siRNA target sequence for Nin (NM_008697.1,4477-4495).
caccatcgcagagttagaa

SEQ ID NO: 550581 - DNA, 19 bp, Mus musculus
  siRNA target sequence for Nin (NM_008697.1,4479-4497).
ccatcgcagagttagaact

SEQ ID NO: 550582 - DNA, 19 bp, Mus musculus
  siRNA target sequence for Nin (NM_008697.1,4511-4529).
ctacaggagctgactagaa

SEQ ID NO: 550583 - DNA, 19 bp, Mus musculus
  siRNA target sequence for Nin (NM_008697.1,4541-4559).
cgagtcactgcactagtta

SEQ ID NO: 550584 - DNA, 19 bp, Mus musculus
  siRNA target sequence for Nin (NM_008697.1,4740-4758).
gcatctctaacctgaaatt

SEQ ID NO: 550585 - DNA, 19 bp, Mus musculus
  siRNA target sequence for Nin (NM_008697.1,4750-4768).
cctgaaattggaggaatta

SEQ ID NO: 550586 - DNA, 19 bp, Mus musculus
  siRNA target sequence for Nin (NM_008697.1,4832-4850).
cagacaatggttgaaaaat

SEQ ID NO: 550587 - DNA, 19 bp, Mus musculus
  siRNA target sequence for Nin (NM_008697.1,4891-4909).
gttggattcagaaaatata

SEQ ID NO: 550588 - DNA, 19 bp, Mus musculus
  siRNA target sequence for Nin (NM_008697.1,5316-5334).
cagagtcaagcctcttaga

SEQ ID NO: 550589 - DNA, 19 bp, Mus musculus
  siRNA target sequence for Nin (NM_008697.1,5325-5343).
gcctcttagagcacagaat

SEQ ID NO: 550590 - DNA, 19 bp, Mus musculus
  siRNA target sequence for Nin (NM_008697.1,5326-5344).
cctcttagagcacagaatt

SEQ ID NO: 550591 - DNA, 19 bp, Mus musculus
  siRNA target sequence for Nin (NM_008697.1,5467-5485).
gatggctgagattgaatca

SEQ ID NO: 550592 - DNA, 19 bp, Mus musculus
  siRNA target sequence for Nin (NM_008697.1,5470-5488).
ggctgagattgaatcagat

SEQ ID NO: 550593 - DNA, 19 bp, Mus musculus
  siRNA target sequence for Nin (NM_008697.1,5528-5546).
gaagtgatgtcattacaca

SEQ ID NO: 550594 - DNA, 19 bp, Mus musculus
  siRNA target sequence for Nin (NM_008697.1,5701-5719).
ccagactgtggtacagaat

SEQ ID NO: 550595 - DNA, 19 bp, Mus musculus
  siRNA target sequence for Nin (NM_008697.1,5702-5720).
cagactgtggtacagaata

SEQ ID NO: 550596 - DNA, 19 bp, Mus musculus
  siRNA target sequence for Nin (NM_008697.1,5826-5844).
ccacagaacaagaaaaact

SEQ ID NO: 550597 - DNA, 19 bp, Mus musculus
  siRNA target sequence for Nin (NM_008697.1,5860-5878).
gtgtgaacagtctcagaaa

SEQ ID NO: 550598 - DNA, 19 bp, Mus musculus
  siRNA target sequence for Nin (NM_008697.1,5869-5887).
gtctcagaaagaacaatct

SEQ ID NO: 550599 - DNA, 19 bp, Mus musculus
  siRNA target sequence for Nin (NM_008697.1,5919-5937).
cccttgagcgaggattaga

SEQ ID NO: 550600 - DNA, 19 bp, Mus musculus
  siRNA target sequence for Nin (NM_008697.1,5920-5938).
ccttgagcgaggattagaa

SEQ ID NO: 550601 - DNA, 19 bp, Mus musculus
  siRNA target sequence for Nin (NM_008697.1,5924-5942).
gagcgaggattagaaacaa

SEQ ID NO: 550602 - DNA, 19 bp, Mus musculus
  siRNA target sequence for Nin (NM_008697.1,6133-6151).
ggaggagctcgaaaacaga

SEQ ID NO: 550603 - DNA, 19 bp, Mus musculus
  siRNA target sequence for Nin (NM_008697.1,6222-6240).
gattgggcacctctgaaaa

SEQ ID NO: 550604 - DNA, 19 bp, Mus musculus
  siRNA target sequence for Nin (NM_008697.1,6249-6267).
ctgttgatggcatttgtta

SEQ ID NO: 550605 - DNA, 19 bp, Mus musculus
  siRNA target sequence for Nin (NM_008697.1,6268-6286).
ccacgacagagtcttaaat

SEQ ID NO: 550606 - DNA, 19 bp, Mus musculus
  siRNA target sequence for Nin (NM_008697.1,6334-6352).
ggacatgttggaatcaagt

SEQ ID NO: 550607 - DNA, 19 bp, Mus musculus
  siRNA target sequence for Nin (NM_008697.1,6343-6361).
ggaatcaagtgctctttta

SEQ ID NO: 550608 - DNA, 19 bp, Mus musculus
  siRNA target sequence for Nin (NM_008697.1,6386-6404).
gttaaagccttcacagtat

SEQ ID NO: 550609 - DNA, 19 bp, Mus musculus
  siRNA target sequence for Nin (NM_008697.1,6437-6455).
gtgattcagtcacaaactt

SEQ ID NO: 550610 - DNA, 19 bp, Mus musculus
  siRNA target sequence for Nin (NM_008697.1,6462-6480).
gctacaaatcagcttattt

SEQ ID NO: 550611 - DNA, 19 bp, Mus musculus
  siRNA target sequence for Nin (NM_008697.1,6463-6481).
ctacaaatcagcttattta

SEQ ID NO: 550612 - DNA, 19 bp, Mus musculus
  siRNA target sequence for Nin (NM_008697.1,6497-6515).
ggatttaagagtcttgaaa

SEQ ID NO: 550613 - DNA, 19 bp, Mus musculus
  siRNA target sequence for Nin (NM_008697.1,6505-6523).
gagtcttgaaaggatatat

SEQ ID NO: 550614 - DNA, 19 bp, Mus musculus
  siRNA target sequence for Nin (NM_008697.1,6536-6554).
ctaattccatatgttgtta

SEQ ID NO: 550615 - DNA, 19 bp, Mus musculus
  siRNA target sequence for Nkd1 (NM_027280.2,215-233).
cgctgcttgggcaaggaaa

SEQ ID NO: 550616 - DNA, 19 bp, Mus musculus
  siRNA target sequence for Nkd1 (NM_027280.2,400-418).
ccctgccgcctgagaagat

SEQ ID NO: 550617 - DNA, 19 bp, Mus musculus
  siRNA target sequence for Nkd1 (NM_027280.2,546-564).
gagtggactttcactctat

SEQ ID NO: 550618 - DNA, 19 bp, Mus musculus
  siRNA target sequence for Nkd1 (NM_027280.2,550-568).
ggactttcactctatatga

SEQ ID NO: 550619 - DNA, 19 bp, Mus musculus
  siRNA target sequence for Nkd1 (NM_027280.2,573-591).
gacaacaatggcaaagtga

SEQ ID NO: 550620 - DNA, 19 bp, Mus musculus
  siRNA target sequence for Nkd1 (NM_027280.2,718-736).
gtaagaggagcgtcctttt

SEQ ID NO: 550621 - DNA, 19 bp, Mus musculus
  siRNA target sequence for Nkd1 (NM_027280.2,1158-1176).
gggagcaagcactttgtga

SEQ ID NO: 550622 - DNA, 19 bp, Mus musculus
  siRNA target sequence for Nkd1 (NM_027280.2,1321-1339).
cacccctggggcacaagaa

SEQ ID NO: 550623 - DNA, 19 bp, Mus musculus
  siRNA target sequence for Nkd2 (NM_028186.2,396-414).
caagggttccctagaagtt

SEQ ID NO: 550624 - DNA, 19 bp, Mus musculus
  siRNA target sequence for Nkd2 (NM_028186.2,459-477).
gctcttcagcacagatgat

SEQ ID NO: 550625 - DNA, 19 bp, Mus musculus
  siRNA target sequence for Nkd2 (NM_028186.2,499-517).
gagggtccactgagactta

SEQ ID NO: 550626 - DNA, 19 bp, Mus musculus
  siRNA target sequence for Nkd2 (NM_028186.2,580-598).
caagaatggacattcacat

SEQ ID NO: 550627 - DNA, 19 bp, Mus musculus
  siRNA target sequence for Nkd2 (NM_028186.2,583-601).
gaatggacattcacattgt

SEQ ID NO: 550628 - DNA, 19 bp, Mus musculus
  siRNA target sequence for Nkd2 (NM_028186.2,587-605).
ggacattcacattgtatga

SEQ ID NO: 550629 - DNA, 19 bp, Mus musculus
  siRNA target sequence for Nkd2 (NM_028186.2,590-608).
cattcacattgtatgactt

SEQ ID NO: 550630 - DNA, 19 bp, Mus musculus
  siRNA target sequence for Nkd2 (NM_028186.2,908-926).
cctactgtgtggatgagaa

SEQ ID NO: 550631 - DNA, 19 bp, Mus musculus
  siRNA target sequence for Nkd2 (NM_028186.2,961-979).
ggcatcgagaactacacat

SEQ ID NO: 550632 - DNA, 19 bp, Mus musculus
  siRNA target sequence for Nkd2 (NM_028186.2,1073-1091).
cggatgcccacgctataca

SEQ ID NO: 550633 - DNA, 19 bp, Mus musculus
  siRNA target sequence for Nkd2 (NM_028186.2,1428-1446).
catggtggagcatgaagta

SEQ ID NO: 550634 - DNA, 19 bp, Mus musculus
  siRNA target sequence for Notch4 (NM_010929.1,494-512).
cgggggtcactgctatgtt

SEQ ID NO: 550635 - DNA, 19 bp, Mus musculus
  siRNA target sequence for Notch4 (NM_010929.1,676-694).
cctgtgaacgcgacatcaa

SEQ ID NO: 550636 - DNA, 19 bp, Mus musculus
  siRNA target sequence for Notch4 (NM_010929.1,729-747).
ggcacctcctgccataaca

SEQ ID NO: 550637 - DNA, 19 bp, Mus musculus
  siRNA target sequence for Notch4 (NM_010929.1,1034-1052).
ggactgctctgaagatata

SEQ ID NO: 550638 - DNA, 19 bp, Mus musculus
  siRNA target sequence for Notch4 (NM_010929.1,1387-1405).
ccacctgtcaccaagatct

SEQ ID NO: 550639 - DNA, 19 bp, Mus musculus
  siRNA target sequence for Notch4 (NM_010929.1,1744-1762).
cccgatgtgagaaagacat

SEQ ID NO: 550640 - DNA, 19 bp, Mus musculus
  siRNA target sequence for Notch4 (NM_010929.1,2346-2364).
cgtcctgagggctattcct

SEQ ID NO: 550641 - DNA, 19 bp, Mus musculus
  siRNA target sequence for Notch4 (NM_010929.1,2829-2847).
gacacgggctcctcctatt

SEQ ID NO: 550642 - DNA, 19 bp, Mus musculus
  siRNA target sequence for Notch4 (NM_010929.1,2865-2883).
ggattccaaggcaagttat

SEQ ID NO: 550643 - DNA, 19 bp, Mus musculus
  siRNA target sequence for Notch4 (NM_010929.1,2875-2893).
gcaagttatgccaggataa

SEQ ID NO: 550644 - DNA, 19 bp, Mus musculus
  siRNA target sequence for Notch4 (NM_010929.1,2876-2894).
caagttatgccaggataat

SEQ ID NO: 550645 - DNA, 19 bp, Mus musculus
  siRNA target sequence for Notch4 (NM_010929.1,2993-3011).
gaactgctcaaaagtactt

SEQ ID NO: 550646 - DNA, 19 bp, Mus musculus
  siRNA target sequence for Notch4 (NM_010929.1,3326-3344).
ctgccccaagggttttgaa

SEQ ID NO: 550647 - DNA, 19 bp, Mus musculus
  siRNA target sequence for Notch4 (NM_010929.1,3806-3824).
ctctgaggagtgtctcttt

SEQ ID NO: 550648 - DNA, 19 bp, Mus musculus
  siRNA target sequence for Notch4 (NM_010929.1,3825-3843).
gatggctacgactgtgaaa

SEQ ID NO: 550649 - DNA, 19 bp, Mus musculus
  siRNA target sequence for Notch4 (NM_010929.1,3896-3914).
caacgggcactgtgagaaa

SEQ ID NO: 550650 - DNA, 19 bp, Mus musculus
  siRNA target sequence for Notch4 (NM_010929.1,3917-3935).
ctgcaataacgctgaatgt

SEQ ID NO: 550651 - DNA, 19 bp, Mus musculus
  siRNA target sequence for Notch4 (NM_010929.1,4164-4182).
gctagggattcctcttcat

SEQ ID NO: 550652 - DNA, 19 bp, Mus musculus
  siRNA target sequence for Notch4 (NM_010929.1,4554-4572).
ccccctggtttcattcgaa

SEQ ID NO: 550653 - DNA, 19 bp, Mus musculus
  siRNA target sequence for Notch4 (NM_010929.1,4612-4630).
cactgggcgaggacaacat

SEQ ID NO: 550654 - DNA, 19 bp, Mus musculus
  siRNA target sequence for Notch4 (NM_010929.1,5016-5034).
cacctagctgccagattct

SEQ ID NO: 550655 - DNA, 19 bp, Mus musculus
  siRNA target sequence for Notch4 (NM_010929.1,5244-5262).
gacctggttgaagaattga

SEQ ID NO: 550656 - DNA, 19 bp, Mus musculus
  siRNA target sequence for Notch4 (NM_010929.1,5264-5282).
cgcagcccgagcagatgta

SEQ ID NO: 550657 - DNA, 19 bp, Mus musculus
  siRNA target sequence for Notch4 (NM_010929.1,5280-5298).
gtaggagccagggataaaa

SEQ ID NO: 550658 - DNA, 19 bp, Mus musculus
  siRNA target sequence for Notch4 (NM_010929.1,5363-5381).
ccaggctggagcggataaa

SEQ ID NO: 550659 - DNA, 19 bp, Mus musculus
  siRNA target sequence for Notch4 (NM_010929.1,5366-5384).
ggctggagcggataaagat

SEQ ID NO: 550660 - DNA, 19 bp, Mus musculus
  siRNA target sequence for Notch4 (NM_010929.1,5979-5997).
cccttaaactcggttgtaa

SEQ ID NO: 550661 - DNA, 19 bp, Mus musculus
  siRNA target sequence for Notch4 (NM_010929.1,5981-5999).
cttaaactcggttgtaaga

SEQ ID NO: 550662 - DNA, 19 bp, Mus musculus
  siRNA target sequence for Notch4 (NM_010929.1,5989-6007).
cggttgtaagaaatctgaa

SEQ ID NO: 550663 - DNA, 19 bp, Mus musculus
  siRNA target sequence for Npnt (NM_033525.1,71-89).
ggtggcccaggcaaatagt

SEQ ID NO: 550664 - DNA, 19 bp, Mus musculus
  siRNA target sequence for Npnt (NM_033525.1,72-90).
gtggcccaggcaaatagtt

SEQ ID NO: 550665 - DNA, 19 bp, Mus musculus
  siRNA target sequence for Npnt (NM_033525.1,169-187).
caacctttctacgtcttaa

SEQ ID NO: 550666 - DNA, 19 bp, Mus musculus
  siRNA target sequence for Npnt (NM_033525.1,189-207).
gcagagactagcaaggata

SEQ ID NO: 550667 - DNA, 19 bp, Mus musculus
  siRNA target sequence for Npnt (NM_033525.1,262-280).
gggccaaacaagtgcaaat

SEQ ID NO: 550668 - DNA, 19 bp, Mus musculus
  siRNA target sequence for Npnt (NM_033525.1,264-282).
gccaaacaagtgcaaatgt

SEQ ID NO: 550669 - DNA, 19 bp, Mus musculus
  siRNA target sequence for Npnt (NM_033525.1,266-284).
caaacaagtgcaaatgtca

SEQ ID NO: 550670 - DNA, 19 bp, Mus musculus
  siRNA target sequence for Npnt (NM_033525.1,350-368).
gcagtgaacagcctctttt

SEQ ID NO: 550671 - DNA, 19 bp, Mus musculus
  siRNA target sequence for Npnt (NM_033525.1,378-396).
ggatcatcaagccacaaat

SEQ ID NO: 550672 - DNA, 19 bp, Mus musculus
  siRNA target sequence for Npnt (NM_033525.1,397-415).
gtaccttcaagggatttaa

SEQ ID NO: 550673 - DNA, 19 bp, Mus musculus
  siRNA target sequence for Npnt (NM_033525.1,401-419).
cttcaagggatttaaacga

SEQ ID NO: 550674 - DNA, 19 bp, Mus musculus
  siRNA target sequence for Npnt (NM_033525.1,676-694).
gtctcctgccctcgattta

SEQ ID NO: 550675 - DNA, 19 bp, Mus musculus
  siRNA target sequence for Npnt (NM_033525.1,740-758).
ctggtttcgacctcatgta

SEQ ID NO: 550676 - DNA, 19 bp, Mus musculus
  siRNA target sequence for Npnt (NM_033525.1,742-760).
ggtttcgacctcatgtaca

SEQ ID NO: 550677 - DNA, 19 bp, Mus musculus
  siRNA target sequence for Npnt (NM_033525.1,743-761).
gtttcgacctcatgtacat

SEQ ID NO: 550678 - DNA, 19 bp, Mus musculus
  siRNA target sequence for Npnt (NM_033525.1,824-842).
gctatgcccggtgttacaa

SEQ ID NO: 550679 - DNA, 19 bp, Mus musculus
  siRNA target sequence for Npnt (NM_033525.1,830-848).
cccggtgttacaacataca

SEQ ID NO: 550680 - DNA, 19 bp, Mus musculus
  siRNA target sequence for Npnt (NM_033525.1,831-849).
ccggtgttacaacatacat

SEQ ID NO: 550681 - DNA, 19 bp, Mus musculus
  siRNA target sequence for Npnt (NM_033525.1,863-881).
gccaatgtagagatggata

SEQ ID NO: 550682 - DNA, 19 bp, Mus musculus
  siRNA target sequence for Npnt (NM_033525.1,892-910).
ggactgaactgtgtgtata

SEQ ID NO: 550683 - DNA, 19 bp, Mus musculus
  siRNA target sequence for Npnt (NM_033525.1,904-922).
gtgtatatccccaaagtca

SEQ ID NO: 550684 - DNA, 19 bp, Mus musculus
  siRNA target sequence for Npnt (NM_033525.1,931-949).
ccttcaggtccaatccata

SEQ ID NO: 550685 - DNA, 19 bp, Mus musculus
  siRNA target sequence for Npnt (NM_033525.1,932-950).
cttcaggtccaatccatat

SEQ ID NO: 550686 - DNA, 19 bp, Mus musculus
  siRNA target sequence for Npnt (NM_033525.1,959-977).
gaaatggtacaatctcaaa

SEQ ID NO: 550687 - DNA, 19 bp, Mus musculus
  siRNA target sequence for Npnt (NM_033525.1,985-1003).
ggaggacatgcgaatagga

SEQ ID NO: 550688 - DNA, 19 bp, Mus musculus
  siRNA target sequence for Npnt (NM_033525.1,986-1004).
gaggacatgcgaataggat

SEQ ID NO: 550689 - DNA, 19 bp, Mus musculus
  siRNA target sequence for Npnt (NM_033525.1,1032-1050).
cctgaagacaccatatatt

SEQ ID NO: 550690 - DNA, 19 bp, Mus musculus
  siRNA target sequence for Npnt (NM_033525.1,1147-1165).
ccgacagagcccagaacaa

SEQ ID NO: 550691 - DNA, 19 bp, Mus musculus
  siRNA target sequence for Npnt (NM_033525.1,1229-1247).
gtaccactacacgagtaat

SEQ ID NO: 550692 - DNA, 19 bp, Mus musculus
  siRNA target sequence for Npnt (NM_033525.1,1241-1259).
gagtaattacggttgacaa

SEQ ID NO: 550693 - DNA, 19 bp, Mus musculus
  siRNA target sequence for Npnt (NM_033525.1,1316-1334).
cgacaaatgacctgtttga

SEQ ID NO: 550694 - DNA, 19 bp, Mus musculus
  siRNA target sequence for Npnt (NM_033525.1,1381-1399).
gacgacccaggtattctca

SEQ ID NO: 550695 - DNA, 19 bp, Mus musculus
  siRNA target sequence for Npnt (NM_033525.1,1387-1405).
ccaggtattctcatacaca

SEQ ID NO: 550696 - DNA, 19 bp, Mus musculus
  siRNA target sequence for Npnt (NM_033525.1,1398-1416).
catacacagctgcaatttt

SEQ ID NO: 550697 - DNA, 19 bp, Mus musculus
  siRNA target sequence for Npnt (NM_033525.1,1558-1576).
ctcggccacctcatgcatt

SEQ ID NO: 550698 - DNA, 19 bp, Mus musculus
  siRNA target sequence for Npnt (NM_033525.1,1726-1744).
cgaggggctgacgtcaaaa

SEQ ID NO: 550699 - DNA, 19 bp, Mus musculus
  siRNA target sequence for Npnt (NM_033525.1,1738-1756).
gtcaaaagcgtcatcttca

SEQ ID NO: 550700 - DNA, 19 bp, Mus musculus
  siRNA target sequence for Npnt (NM_033525.1,1797-1815).
ggatgatgtgagcttgaaa

SEQ ID NO: 550701 - DNA, 19 bp, Mus musculus
  siRNA target sequence for Npnt (NM_033525.1,1798-1816).
gatgatgtgagcttgaaaa

SEQ ID NO: 550702 - DNA, 19 bp, Mus musculus
  siRNA target sequence for Odz3 (NM_011857.2,190-208).
gaaagctttcgatcatgat

SEQ ID NO: 550703 - DNA, 19 bp, Mus musculus
  siRNA target sequence for Odz3 (NM_011857.2,257-275).
gaagccgacgagtatacta

SEQ ID NO: 550704 - DNA, 19 bp, Mus musculus
  siRNA target sequence for Odz3 (NM_011857.2,262-280).
cgacgagtatactagacaa

SEQ ID NO: 550705 - DNA, 19 bp, Mus musculus
  siRNA target sequence for Odz3 (NM_011857.2,558-576).
gcgagcaaccttcaaacaa

SEQ ID NO: 550706 - DNA, 19 bp, Mus musculus
  siRNA target sequence for Odz3 (NM_011857.2,869-887).
gcatctggctctgtttatt

SEQ ID NO: 550707 - DNA, 19 bp, Mus musculus
  siRNA target sequence for Odz3 (NM_011857.2,1013-1031).
gccattctcctctcctatt

SEQ ID NO: 550708 - DNA, 19 bp, Mus musculus
  siRNA target sequence for Odz3 (NM_011857.2,1021-1039).
cctctcctattttatagca

SEQ ID NO: 550709 - DNA, 19 bp, Mus musculus
  siRNA target sequence for Odz3 (NM_011857.2,1053-1071).
gcctcaactggcacttaca

SEQ ID NO: 550710 - DNA, 19 bp, Mus musculus
  siRNA target sequence for Odz3 (NM_011857.2,1085-1103).
gacacattcgagaatggaa

SEQ ID NO: 550711 - DNA, 19 bp, Mus musculus
  siRNA target sequence for Odz3 (NM_011857.2,1113-1131).
ctgacaccgtgccaacaaa

SEQ ID NO: 550712 - DNA, 19 bp, Mus musculus
  siRNA target sequence for Odz3 (NM_011857.2,1117-1135).
caccgtgccaacaaacact

SEQ ID NO: 550713 - DNA, 19 bp, Mus musculus
  siRNA target sequence for Odz3 (NM_011857.2,1145-1163).
ccttctggcgacaatggaa

SEQ ID NO: 550714 - DNA, 19 bp, Mus musculus
  siRNA target sequence for Odz3 (NM_011857.2,1146-1164).
cttctggcgacaatggaaa

SEQ ID NO: 550715 - DNA, 19 bp, Mus musculus
  siRNA target sequence for Odz3 (NM_011857.2,1153-1171).
cgacaatggaaaattaggt

SEQ ID NO: 550716 - DNA, 19 bp, Mus musculus
  siRNA target sequence for Odz3 (NM_011857.2,1169-1187).
ggtggatttacacatgaaa

SEQ ID NO: 550717 - DNA, 19 bp, Mus musculus
  siRNA target sequence for Odz3 (NM_011857.2,1221-1239).
gccggagagcaattcaaga

SEQ ID NO: 550718 - DNA, 19 bp, Mus musculus
  siRNA target sequence for Odz3 (NM_011857.2,1266-1284).
cgcagctctttattgatca

SEQ ID NO: 550719 - DNA, 19 bp, Mus musculus
  siRNA target sequence for Odz3 (NM_011857.2,1286-1304).
ccacagtttcttaagttca

SEQ ID NO: 550720 - DNA, 19 bp, Mus musculus
  siRNA target sequence for Odz3 (NM_011857.2,1287-1305).
cacagtttcttaagttcaa

SEQ ID NO: 550721 - DNA, 19 bp, Mus musculus
  siRNA target sequence for Odz3 (NM_011857.2,1556-1574).
gagcaggtctcctttaaca

SEQ ID NO: 550722 - DNA, 19 bp, Mus musculus
  siRNA target sequence for Odz3 (NM_011857.2,1567-1585).
ctttaacacgatcgttata

SEQ ID NO: 550723 - DNA, 19 bp, Mus musculus
  siRNA target sequence for Odz3 (NM_011857.2,1605-1623).
cccgaaattgccatggaaa

SEQ ID NO: 550724 - DNA, 19 bp, Mus musculus
  siRNA target sequence for Odz3 (NM_011857.2,1667-1685).
ctaggtccggattgttcaa

SEQ ID NO: 550725 - DNA, 19 bp, Mus musculus
  siRNA target sequence for Odz3 (NM_011857.2,1812-1830).
ggggtcgtgggatttgcat

SEQ ID NO: 550726 - DNA, 19 bp, Mus musculus
  siRNA target sequence for Odz3 (NM_011857.2,1835-1853).
ggctcttgcgcttgtaact

SEQ ID NO: 550727 - DNA, 19 bp, Mus musculus
  siRNA target sequence for Odz3 (NM_011857.2,1845-1863).
cttgtaactcgggatacaa

SEQ ID NO: 550728 - DNA, 19 bp, Mus musculus
  siRNA target sequence for Odz3 (NM_011857.2,1908-1926).
ctaatcacggggtgtgtat

SEQ ID NO: 550729 - DNA, 19 bp, Mus musculus
  siRNA target sequence for Odz3 (NM_011857.2,1971-1989).
gtgaaatactgaagactat

SEQ ID NO: 550730 - DNA, 19 bp, Mus musculus
  siRNA target sequence for Odz3 (NM_011857.2,2014-2032).
cgggacttaccttcaagaa

SEQ ID NO: 550731 - DNA, 19 bp, Mus musculus
  siRNA target sequence for Odz3 (NM_011857.2,2069-2087).
cccgactgctcaaatgaaa

SEQ ID NO: 550732 - DNA, 19 bp, Mus musculus
  siRNA target sequence for Odz3 (NM_011857.2,2437-2455).
cgaaggagacggactcatt

SEQ ID NO: 550733 - DNA, 19 bp, Mus musculus
  siRNA target sequence for Odz3 (NM_011857.2,2522-2540).
cctgatcctcaggatatca

SEQ ID NO: 550734 - DNA, 19 bp, Mus musculus
  siRNA target sequence for Odz3 (NM_011857.2,2584-2602).
cttctatgaccgaatcagt

SEQ ID NO: 550735 - DNA, 19 bp, Mus musculus
  siRNA target sequence for Odz3 (NM_011857.2,2639-2657).
ggagaaagtccgttcaata

SEQ ID NO: 550736 - DNA, 19 bp, Mus musculus
  siRNA target sequence for Odz3 (NM_011857.2,2642-2660).
gaaagtccgttcaataaga

SEQ ID NO: 550737 - DNA, 19 bp, Mus musculus
  siRNA target sequence for Odz3 (NM_011857.2,2677-2695).
cagaggccaagtactaaca

SEQ ID NO: 550738 - DNA, 19 bp, Mus musculus
  siRNA target sequence for Odz3 (NM_011857.2,2717-2735).
ggcgtcaacgtgtcgtttt

SEQ ID NO: 550739 - DNA, 19 bp, Mus musculus
  siRNA target sequence for Odz3 (NM_011857.2,2718-2736).
gcgtcaacgtgtcgttttt

SEQ ID NO: 550740 - DNA, 19 bp, Mus musculus
  siRNA target sequence for Odz3 (NM_011857.2,2719-2737).
cgtcaacgtgtcgttttta

SEQ ID NO: 550741 - DNA, 19 bp, Mus musculus
  siRNA target sequence for Odz3 (NM_011857.2,2738-2756).
cactactcggaatatggat

SEQ ID NO: 550742 - DNA, 19 bp, Mus musculus
  siRNA target sequence for Odz3 (NM_011857.2,2745-2763).
cggaatatggatataccat

SEQ ID NO: 550743 - DNA, 19 bp, Mus musculus
  siRNA target sequence for Odz3 (NM_011857.2,2746-2764).
ggaatatggatataccatt

SEQ ID NO: 550744 - DNA, 19 bp, Mus musculus
  siRNA target sequence for Odz3 (NM_011857.2,2747-2765).
gaatatggatataccatta

SEQ ID NO: 550745 - DNA, 19 bp, Mus musculus
  siRNA target sequence for Odz3 (NM_011857.2,2866-2884).
gattccctggaatgtcttt

SEQ ID NO: 550746 - DNA, 19 bp, Mus musculus
  siRNA target sequence for Odz3 (NM_011857.2,2894-2912).
gatacccttgtcatgaaga

SEQ ID NO: 550747 - DNA, 19 bp, Mus musculus
  siRNA target sequence for Odz3 (NM_011857.2,2958-2976).
ggccaagtcccatcattgt

SEQ ID NO: 550748 - DNA, 19 bp, Mus musculus
  siRNA target sequence for Odz3 (NM_011857.2,2960-2978).
ccaagtcccatcattgtgt

SEQ ID NO: 550749 - DNA, 19 bp, Mus musculus
  siRNA target sequence for Odz3 (NM_011857.2,2975-2993).
gtgtcttcaccgttatcca

SEQ ID NO: 550750 - DNA, 19 bp, Mus musculus
  siRNA target sequence for Odz3 (NM_011857.2,2984-3002).
ccgttatccaccttcttca

SEQ ID NO: 550751 - DNA, 19 bp, Mus musculus
  siRNA target sequence for Odz3 (NM_011857.2,3061-3079).
cacaattccaggaacagat

SEQ ID NO: 550752 - DNA, 19 bp, Mus musculus
  siRNA target sequence for Odz3 (NM_011857.2,3063-3081).
caattccaggaacagattt

SEQ ID NO: 550753 - DNA, 19 bp, Mus musculus
  siRNA target sequence for Odz3 (NM_011857.2,3150-3168).
ccgtcataccgtttaacct

SEQ ID NO: 550754 - DNA, 19 bp, Mus musculus
  siRNA target sequence for Odz3 (NM_011857.2,3267-3285).
cggacgcatataatcagaa

SEQ ID NO: 550755 - DNA, 19 bp, Mus musculus
  siRNA target sequence for Odz3 (NM_011857.2,3268-3286).
ggacgcatataatcagaaa

SEQ ID NO: 550756 - DNA, 19 bp, Mus musculus
  siRNA target sequence for Odz3 (NM_011857.2,3272-3290).
gcatataatcagaaagtct

SEQ ID NO: 550757 - DNA, 19 bp, Mus musculus
  siRNA target sequence for Odz3 (NM_011857.2,3273-3291).
catataatcagaaagtcta

SEQ ID NO: 550758 - DNA, 19 bp, Mus musculus
  siRNA target sequence for Odz3 (NM_011857.2,3364-3382).
gaggactgccgttttgcaa

SEQ ID NO: 550759 - DNA, 19 bp, Mus musculus
  siRNA target sequence for Odz3 (NM_011857.2,3445-3463).
cgttcagaacggtatacta

SEQ ID NO: 550760 - DNA, 19 bp, Mus musculus
  siRNA target sequence for Odz3 (NM_011857.2,3446-3464).
gttcagaacggtatactat

SEQ ID NO: 550761 - DNA, 19 bp, Mus musculus
  siRNA target sequence for Odz3 (NM_011857.2,3449-3467).
cagaacggtatactataca

SEQ ID NO: 550762 - DNA, 19 bp, Mus musculus
  siRNA target sequence for Odz3 (NM_011857.2,3451-3469).
gaacggtatactatacaaa

SEQ ID NO: 550763 - DNA, 19 bp, Mus musculus
  siRNA target sequence for Odz3 (NM_011857.2,3456-3474).
gtatactatacaaaggaaa

SEQ ID NO: 550764 - DNA, 19 bp, Mus musculus
  siRNA target sequence for Odz3 (NM_011857.2,3536-3554).
cggaggcgtagcatctcat

SEQ ID NO: 550765 - DNA, 19 bp, Mus musculus
  siRNA target sequence for Odz3 (NM_011857.2,3550-3568).
ctcatgcccaagttgcaat

SEQ ID NO: 550766 - DNA, 19 bp, Mus musculus
  siRNA target sequence for Odz3 (NM_011857.2,3617-3635).
gggatcgacggcagtctat

SEQ ID NO: 550767 - DNA, 19 bp, Mus musculus
  siRNA target sequence for Odz3 (NM_011857.2,3618-3636).
ggatcgacggcagtctata

SEQ ID NO: 550768 - DNA, 19 bp, Mus musculus
  siRNA target sequence for Odz3 (NM_011857.2,3622-3640).
cgacggcagtctatacgta

SEQ ID NO: 550769 - DNA, 19 bp, Mus musculus
  siRNA target sequence for Odz3 (NM_011857.2,3632-3650).
ctatacgtaggggatttca

SEQ ID NO: 550770 - DNA, 19 bp, Mus musculus
  siRNA target sequence for Odz3 (NM_011857.2,3692-3710).
gttttagaactaagaaata

SEQ ID NO: 550771 - DNA, 19 bp, Mus musculus
  siRNA target sequence for Odz3 (NM_011857.2,3765-3783).
cagtcaccggagatttgta

SEQ ID NO: 550772 - DNA, 19 bp, Mus musculus
  siRNA target sequence for Odz3 (NM_011857.2,3834-3852).
gagccaaagacctgactaa

SEQ ID NO: 550773 - DNA, 19 bp, Mus musculus
  siRNA target sequence for Odz3 (NM_011857.2,3955-3973).
caaaggaatggcaatcgat

SEQ ID NO: 550774 - DNA, 19 bp, Mus musculus
  siRNA target sequence for Odz3 (NM_011857.2,3976-3994).
gaacggactgatctacttt

SEQ ID NO: 550775 - DNA, 19 bp, Mus musculus
  siRNA target sequence for Odz3 (NM_011857.2,3979-3997).
cggactgatctactttgtt

SEQ ID NO: 550776 - DNA, 19 bp, Mus musculus
  siRNA target sequence for Odz3 (NM_011857.2,4066-4084).
cacgtcagctcgaccttta

SEQ ID NO: 550777 - DNA, 19 bp, Mus musculus
  siRNA target sequence for Odz3 (NM_011857.2,4089-4107).
gtgatactagcatgcatat

SEQ ID NO: 550778 - DNA, 19 bp, Mus musculus
  siRNA target sequence for Odz3 (NM_011857.2,4091-4109).
gatactagcatgcatatca

SEQ ID NO: 550779 - DNA, 19 bp, Mus musculus
  siRNA target sequence for Odz3 (NM_011857.2,4171-4189).
cgtcctggataataacgta

SEQ ID NO: 550780 - DNA, 19 bp, Mus musculus
  siRNA target sequence for Odz3 (NM_011857.2,4175-4193).
ctggataataacgtagttt

SEQ ID NO: 550781 - DNA, 19 bp, Mus musculus
  siRNA target sequence for Odz3 (NM_011857.2,4177-4195).
ggataataacgtagtttta

SEQ ID NO: 550782 - DNA, 19 bp, Mus musculus
  siRNA target sequence for Odz3 (NM_011857.2,4329-4347).
cctacagcggggtccttta

SEQ ID NO: 550783 - DNA, 19 bp, Mus musculus
  siRNA target sequence for Odz3 (NM_011857.2,4425-4443).
ggataccttcggaatgtga

SEQ ID NO: 550784 - DNA, 19 bp, Mus musculus
  siRNA target sequence for Odz3 (NM_011857.2,4593-4611).
cgaagaataaacctttact

SEQ ID NO: 550785 - DNA, 19 bp, Mus musculus
  siRNA target sequence for Odz3 (NM_011857.2,4615-4633).
ctcaatgaacttttacgaa

SEQ ID NO: 550786 - DNA, 19 bp, Mus musculus
  siRNA target sequence for Odz3 (NM_011857.2,4638-4656).
cctctccaactgatcaaga

SEQ ID NO: 550787 - DNA, 19 bp, Mus musculus
  siRNA target sequence for Odz3 (NM_011857.2,4710-4728).
cgggtgactacctatataa

SEQ ID NO: 550788 - DNA, 19 bp, Mus musculus
  siRNA target sequence for Odz3 (NM_011857.2,4711-4729).
gggtgactacctatataat

SEQ ID NO: 550789 - DNA, 19 bp, Mus musculus
  siRNA target sequence for Odz3 (NM_011857.2,4713-4731).
gtgactacctatataattt

SEQ ID NO: 550790 - DNA, 19 bp, Mus musculus
  siRNA target sequence for Odz3 (NM_011857.2,4715-4733).
gactacctatataatttta

SEQ ID NO: 550791 - DNA, 19 bp, Mus musculus
  siRNA target sequence for Odz3 (NM_011857.2,4721-4739).
ctatataattttagttaca

SEQ ID NO: 550792 - DNA, 19 bp, Mus musculus
  siRNA target sequence for Odz3 (NM_011857.2,4824-4842).
gggtggtgtctcctgataa

SEQ ID NO: 550793 - DNA, 19 bp, Mus musculus
  siRNA target sequence for Odz3 (NM_011857.2,4835-4853).
cctgataaccaggtgatat

SEQ ID NO: 550794 - DNA, 19 bp, Mus musculus
  siRNA target sequence for Odz3 (NM_011857.2,4838-4856).
gataaccaggtgatatggt

SEQ ID NO: 550795 - DNA, 19 bp, Mus musculus
  siRNA target sequence for Odz3 (NM_011857.2,4867-4885).
caccaacgggtgtctgaaa

SEQ ID NO: 550796 - DNA, 19 bp, Mus musculus
  siRNA target sequence for Odz3 (NM_011857.2,4942-4960).
gcttttagccaccaaaagt

SEQ ID NO: 550797 - DNA, 19 bp, Mus musculus
  siRNA target sequence for Odz3 (NM_011857.2,5003-5021).
ggtcgcctgacgaatgtta

SEQ ID NO: 550798 - DNA, 19 bp, Mus musculus
  siRNA target sequence for Odz3 (NM_011857.2,5007-5025).
gcctgacgaatgttacctt

SEQ ID NO: 550799 - DNA, 19 bp, Mus musculus
  siRNA target sequence for Odz3 (NM_011857.2,5198-5216).
gatggctcccttagaatct

SEQ ID NO: 550800 - DNA, 19 bp, Mus musculus
  siRNA target sequence for Odz3 (NM_011857.2,5201-5219).
ggctcccttagaatcttct

SEQ ID NO: 550801 - DNA, 19 bp, Mus musculus
  siRNA target sequence for Odz3 (NM_011857.2,5202-5220).
gctcccttagaatcttcta

SEQ ID NO: 550802 - DNA, 19 bp, Mus musculus
  siRNA target sequence for Odz3 (NM_011857.2,5288-5306).
gtagccaaaagaaacatga

SEQ ID NO: 550803 - DNA, 19 bp, Mus musculus
  siRNA target sequence for Odz3 (NM_011857.2,5316-5334).
gtgagaacgggcagaatct

SEQ ID NO: 550804 - DNA, 19 bp, Mus musculus
  siRNA target sequence for Odz3 (NM_011857.2,5445-5463).
ccaagacggaaaagatcta

SEQ ID NO: 550805 - DNA, 19 bp, Mus musculus
  siRNA target sequence for Odz3 (NM_011857.2,5446-5464).
caagacggaaaagatctat

SEQ ID NO: 550806 - DNA, 19 bp, Mus musculus
  siRNA target sequence for Odz3 (NM_011857.2,5449-5467).
gacggaaaagatctatgat

SEQ ID NO: 550807 - DNA, 19 bp, Mus musculus
  siRNA target sequence for Odz3 (NM_011857.2,5528-5546).
ctgccgagtagcaagctaa

SEQ ID NO: 550808 - DNA, 19 bp, Mus musculus
  siRNA target sequence for Odz3 (NM_011857.2,5552-5570).
gtgaacgtcacctactcat

SEQ ID NO: 550809 - DNA, 19 bp, Mus musculus
  siRNA target sequence for Odz3 (NM_011857.2,5612-5630).
gaaaaggtggactatgaca

SEQ ID NO: 550810 - DNA, 19 bp, Mus musculus
  siRNA target sequence for Odz3 (NM_011857.2,5679-5697).
gttacacgtacttggaaaa

SEQ ID NO: 550811 - DNA, 19 bp, Mus musculus
  siRNA target sequence for Odz3 (NM_011857.2,5922-5940).
cgagtcggagggtcttatt

SEQ ID NO: 550812 - DNA, 19 bp, Mus musculus
  siRNA target sequence for Odz3 (NM_011857.2,5925-5943).
gtcggagggtcttattcaa

SEQ ID NO: 550813 - DNA, 19 bp, Mus musculus
  siRNA target sequence for Odz3 (NM_011857.2,5927-5945).
cggagggtcttattcaagt

SEQ ID NO: 550814 - DNA, 19 bp, Mus musculus
  siRNA target sequence for Odz3 (NM_011857.2,5932-5950).
ggtcttattcaagtataga

SEQ ID NO: 550815 - DNA, 19 bp, Mus musculus
  siRNA target sequence for Odz3 (NM_011857.2,5933-5951).
gtcttattcaagtatagaa

SEQ ID NO: 550816 - DNA, 19 bp, Mus musculus
  siRNA target sequence for Odz3 (NM_011857.2,5961-5979).
ggctatcagaaattttata

SEQ ID NO: 550817 - DNA, 19 bp, Mus musculus
  siRNA target sequence for Odz3 (NM_011857.2,6018-6036).
cgggagtcctgaaaacagt

SEQ ID NO: 550818 - DNA, 19 bp, Mus musculus
  siRNA target sequence for Odz3 (NM_011857.2,6021-6039).
gagtcctgaaaacagtaaa

SEQ ID NO: 550819 - DNA, 19 bp, Mus musculus
  siRNA target sequence for Odz3 (NM_011857.2,6067-6085).
cattagatacaggcaaatt

SEQ ID NO: 550820 - DNA, 19 bp, Mus musculus
  siRNA target sequence for Odz3 (NM_011857.2,6114-6132).
gcttcagcgaggatggaat

SEQ ID NO: 550821 - DNA, 19 bp, Mus musculus
  siRNA target sequence for Odz3 (NM_011857.2,6118-6136).
cagcgaggatggaatggta

SEQ ID NO: 550822 - DNA, 19 bp, Mus musculus
  siRNA target sequence for Odz3 (NM_011857.2,6121-6139).
cgaggatggaatggtaaat

SEQ ID NO: 550823 - DNA, 19 bp, Mus musculus
  siRNA target sequence for Odz3 (NM_011857.2,6134-6152).
gtaaatgcgagatttgact

SEQ ID NO: 550824 - DNA, 19 bp, Mus musculus
  siRNA target sequence for Odz3 (NM_011857.2,6140-6158).
gcgagatttgactatagct

SEQ ID NO: 550825 - DNA, 19 bp, Mus musculus
  siRNA target sequence for Odz3 (NM_011857.2,6141-6159).
cgagatttgactatagcta

SEQ ID NO: 550826 - DNA, 19 bp, Mus musculus
  siRNA target sequence for Odz3 (NM_011857.2,6187-6205).
gcagggtgtcatcaatgaa

SEQ ID NO: 550827 - DNA, 19 bp, Mus musculus
  siRNA target sequence for Odz3 (NM_011857.2,6254-6272).
gtcgagcagtttggaaaat

SEQ ID NO: 550828 - DNA, 19 bp, Mus musculus
  siRNA target sequence for Odz3 (NM_011857.2,6266-6284).
ggaaaattcggagtgatat

SEQ ID NO: 550829 - DNA, 19 bp, Mus musculus
  siRNA target sequence for Odz3 (NM_011857.2,6267-6285).
gaaaattcggagtgatata

SEQ ID NO: 550830 - DNA, 19 bp, Mus musculus
  siRNA target sequence for Odz3 (NM_011857.2,6309-6327).
ccacggccgtgatgactta

SEQ ID NO: 550831 - DNA, 19 bp, Mus musculus
  siRNA target sequence for Odz3 (NM_011857.2,6310-6328).
cacggccgtgatgacttat

SEQ ID NO: 550832 - DNA, 19 bp, Mus musculus
  siRNA target sequence for Odz3 (NM_011857.2,6313-6331).
ggccgtgatgacttataca

SEQ ID NO: 550833 - DNA, 19 bp, Mus musculus
  siRNA target sequence for Odz3 (NM_011857.2,6354-6372).
gcatcaaggagatccaata

SEQ ID NO: 550834 - DNA, 19 bp, Mus musculus
  siRNA target sequence for Odz3 (NM_011857.2,6361-6379).
ggagatccaatatgagata

SEQ ID NO: 550835 - DNA, 19 bp, Mus musculus
  siRNA target sequence for Odz3 (NM_011857.2,6389-6407).
ctcatgtactggattacaa

SEQ ID NO: 550836 - DNA, 19 bp, Mus musculus
  siRNA target sequence for Odz3 (NM_011857.2,6455-6473).
gggccttttgccaacacta

SEQ ID NO: 550837 - DNA, 19 bp, Mus musculus
  siRNA target sequence for Odz3 (NM_011857.2,6524-6542).
ctaaacgaaaagatcatgt

SEQ ID NO: 550838 - DNA, 19 bp, Mus musculus
  siRNA target sequence for Odz3 (NM_011857.2,6546-6564).
ggtacaactacgacctaaa

SEQ ID NO: 550839 - DNA, 19 bp, Mus musculus
  siRNA target sequence for Odz3 (NM_011857.2,6547-6565).
gtacaactacgacctaaat

SEQ ID NO: 550840 - DNA, 19 bp, Mus musculus
  siRNA target sequence for Odz3 (NM_011857.2,6550-6568).
caactacgacctaaatgga

SEQ ID NO: 550841 - DNA, 19 bp, Mus musculus
  siRNA target sequence for Odz3 (NM_011857.2,6642-6660).
cccgcctgggcgatgttca

SEQ ID NO: 550842 - DNA, 19 bp, Mus musculus
  siRNA target sequence for Odz3 (NM_011857.2,6661-6679).
gtaccggctggatgaagat

SEQ ID NO: 550843 - DNA, 19 bp, Mus musculus
  siRNA target sequence for Odz3 (NM_011857.2,6690-6708).
gtcagaggggcactgaaat

SEQ ID NO: 550844 - DNA, 19 bp, Mus musculus
  siRNA target sequence for Odz3 (NM_011857.2,6692-6710).
cagaggggcactgaaattt

SEQ ID NO: 550845 - DNA, 19 bp, Mus musculus
  siRNA target sequence for Odz3 (NM_011857.2,6694-6712).
gaggggcactgaaattttt

SEQ ID NO: 550846 - DNA, 19 bp, Mus musculus
  siRNA target sequence for Odz3 (NM_011857.2,6696-6714).
ggggcactgaaatttttga

SEQ ID NO: 550847 - DNA, 19 bp, Mus musculus
  siRNA target sequence for Odz3 (NM_011857.2,6734-6752).
ctgactcgagtctacagta

SEQ ID NO: 550848 - DNA, 19 bp, Mus musculus
  siRNA target sequence for Odz3 (NM_011857.2,6736-6754).
gactcgagtctacagtaaa

SEQ ID NO: 550849 - DNA, 19 bp, Mus musculus
  siRNA target sequence for Odz3 (NM_011857.2,6791-6809).
ctgggaagacgtgtttcta

SEQ ID NO: 550850 - DNA, 19 bp, Mus musculus
  siRNA target sequence for Odz3 (NM_011857.2,6824-6842).
ggacagcaccttcagtttt

SEQ ID NO: 550851 - DNA, 19 bp, Mus musculus
  siRNA target sequence for Odz3 (NM_011857.2,6870-6888).
gaattactcacgtctacaa

SEQ ID NO: 550852 - DNA, 19 bp, Mus musculus
  siRNA target sequence for Odz3 (NM_011857.2,6996-7014).
ggacaccgctggctgtttt

SEQ ID NO: 550853 - DNA, 19 bp, Mus musculus
  siRNA target sequence for Odz3 (NM_011857.2,7025-7043).
gggctcatgctgaaacaga

SEQ ID NO: 550854 - DNA, 19 bp, Mus musculus
  siRNA target sequence for Odz3 (NM_011857.2,7087-7105).
cgactttcagctggtaatt

SEQ ID NO: 550855 - DNA, 19 bp, Mus musculus
  siRNA target sequence for Odz3 (NM_011857.2,7127-7145).
gacccgctcaccaaactaa

SEQ ID NO: 550856 - DNA, 19 bp, Mus musculus
  siRNA target sequence for Odz3 (NM_011857.2,7131-7149).
cgctcaccaaactaatcca

SEQ ID NO: 550857 - DNA, 19 bp, Mus musculus
  siRNA target sequence for Odz3 (NM_011857.2,7188-7206).
ggaccacaccggacattga

SEQ ID NO: 550858 - DNA, 19 bp, Mus musculus
  siRNA target sequence for Odz3 (NM_011857.2,7189-7207).
gaccacaccggacattgaa

SEQ ID NO: 550859 - DNA, 19 bp, Mus musculus
  siRNA target sequence for Odz3 (NM_011857.2,7371-7389).
ctgttcccaaatttgattt

SEQ ID NO: 550860 - DNA, 19 bp, Mus musculus
  siRNA target sequence for Odz3 (NM_011857.2,7373-7391).
gttcccaaatttgatttaa

SEQ ID NO: 550861 - DNA, 19 bp, Mus musculus
  siRNA target sequence for Odz3 (NM_011857.2,8044-8062).
ctggacggagggtgagaaa

SEQ ID NO: 550862 - DNA, 19 bp, Mus musculus
  siRNA target sequence for Odz3 (NM_011857.2,8161-8179).
ccagttcttgcgacaaagt

SEQ ID NO: 550863 - DNA, 19 bp, Mus musculus
  siRNA target sequence for Oit3 (NM_010959.1,242-260).
cctctttgcgacaaccata

SEQ ID NO: 550864 - DNA, 19 bp, Mus musculus
  siRNA target sequence for Oit3 (NM_010959.1,245-263).
ctttgcgacaaccatatga

SEQ ID NO: 550865 - DNA, 19 bp, Mus musculus
  siRNA target sequence for Oit3 (NM_010959.1,313-331).
cttctgcataccggaaaat

SEQ ID NO: 550866 - DNA, 19 bp, Mus musculus
  siRNA target sequence for Oit3 (NM_010959.1,366-384).
gcagccaccccctagaaga

SEQ ID NO: 550867 - DNA, 19 bp, Mus musculus
  siRNA target sequence for Oit3 (NM_010959.1,528-546).
gtggccatttctatgacat

SEQ ID NO: 550868 - DNA, 19 bp, Mus musculus
  siRNA target sequence for Oit3 (NM_010959.1,631-649).
gacttgctttgacgaaaat

SEQ ID NO: 550869 - DNA, 19 bp, Mus musculus
  siRNA target sequence for Oit3 (NM_010959.1,856-874).
ggtgctgtctgaagataat

SEQ ID NO: 550870 - DNA, 19 bp, Mus musculus
  siRNA target sequence for Oit3 (NM_010959.1,860-878).
ctgtctgaagataatcaca

SEQ ID NO: 550871 - DNA, 19 bp, Mus musculus
  siRNA target sequence for Oit3 (NM_010959.1,1046-1064).
gacgtggtgaatgacaaaa

SEQ ID NO: 550872 - DNA, 19 bp, Mus musculus
  siRNA target sequence for Oit3 (NM_010959.1,1240-1258).
ccgaaaccacggcatcttt

SEQ ID NO: 550873 - DNA, 19 bp, Mus musculus
  siRNA target sequence for Oit3 (NM_010959.1,1469-1487).
gtttccgatgactcagtaa

SEQ ID NO: 550874 - DNA, 19 bp, Mus musculus
  siRNA target sequence for Oit3 (NM_010959.1,1473-1491).
ccgatgactcagtaaagca

SEQ ID NO: 550875 - DNA, 19 bp, Mus musculus
  siRNA target sequence for Oit3 (NM_010959.1,1577-1595).
cactgccgcgtccttgtat

SEQ ID NO: 550876 - DNA, 19 bp, Mus musculus
  siRNA target sequence for Oit3 (NM_010959.1,1579-1597).
ctgccgcgtccttgtatgt

SEQ ID NO: 550877 - DNA, 19 bp, Mus musculus
  siRNA target sequence for Padi1 (NM_011059.1,205-223).
ggtgaacgtctatagtgat

SEQ ID NO: 550878 - DNA, 19 bp, Mus musculus
  siRNA target sequence for Padi1 (NM_011059.1,261-279).
gctctgaggtgaagatcta

SEQ ID NO: 550879 - DNA, 19 bp, Mus musculus
  siRNA target sequence for Padi1 (NM_011059.1,446-464).
cacagtgtgctctacctaa

SEQ ID NO: 550880 - DNA, 19 bp, Mus musculus
  siRNA target sequence for Padi1 (NM_011059.1,457-475).
ctacctaactgctgttgat

SEQ ID NO: 550881 - DNA, 19 bp, Mus musculus
  siRNA target sequence for Padi1 (NM_011059.1,581-599).
gtaaactgtgacagagata

SEQ ID NO: 550882 - DNA, 19 bp, Mus musculus
  siRNA target sequence for Padi1 (NM_011059.1,620-638).
ctgcatgctaaccatttga

SEQ ID NO: 550883 - DNA, 19 bp, Mus musculus
  siRNA target sequence for Padi1 (NM_011059.1,690-708).
gccctgatgagctttttga

SEQ ID NO: 550884 - DNA, 19 bp, Mus musculus
  siRNA target sequence for Padi1 (NM_011059.1,1285-1303).
gggtcctgactttggatat

SEQ ID NO: 550885 - DNA, 19 bp, Mus musculus
  siRNA target sequence for Padi1 (NM_011059.1,1855-1873).
ctacgctgaagccttcttt

SEQ ID NO: 550886 - DNA, 19 bp, Mus musculus
  siRNA target sequence for Padi1 (NM_011059.1,1995-2013).
gtctgcgctgcgtctttat

SEQ ID NO: 550887 - DNA, 19 bp, Mus musculus
  siRNA target sequence for Padi1 (NM_011059.1,2068-2086).
cgtgcggaggaaacctttt

SEQ ID NO: 550888 - DNA, 19 bp, Mus musculus
  siRNA target sequence for Padi1 (NM_011059.1,2069-2087).
gtgcggaggaaacctttta

SEQ ID NO: 550889 - DNA, 19 bp, Mus musculus
  siRNA target sequence for Padi2 (NM_008812.1,13-31).
gccgcctatacgggaaaat

SEQ ID NO: 550890 - DNA, 19 bp, Mus musculus
  siRNA target sequence for Padi2 (NM_008812.1,14-32).
ccgcctatacgggaaaata

SEQ ID NO: 550891 - DNA, 19 bp, Mus musculus
  siRNA target sequence for Padi2 (NM_008812.1,15-33).
cgcctatacgggaaaatat

SEQ ID NO: 550892 - DNA, 19 bp, Mus musculus
  siRNA target sequence for Padi2 (NM_008812.1,18-36).
ctatacgggaaaatatgct

SEQ ID NO: 550893 - DNA, 19 bp, Mus musculus
  siRNA target sequence for Padi2 (NM_008812.1,307-325).
ggtcactgtcaactactat

SEQ ID NO: 550894 - DNA, 19 bp, Mus musculus
  siRNA target sequence for Padi2 (NM_008812.1,312-330).
ctgtcaactactatgaaga

SEQ ID NO: 550895 - DNA, 19 bp, Mus musculus
  siRNA target sequence for Padi2 (NM_008812.1,679-697).
cgtggagaacccgttcttt

SEQ ID NO: 550896 - DNA, 19 bp, Mus musculus
  siRNA target sequence for Padi2 (NM_008812.1,765-783).
ctgcggagttgctgttctt

SEQ ID NO: 550897 - DNA, 19 bp, Mus musculus
  siRNA target sequence for Padi2 (NM_008812.1,839-857).
gtcagtctgctggagtata

SEQ ID NO: 550898 - DNA, 19 bp, Mus musculus
  siRNA target sequence for Padi2 (NM_008812.1,908-926).
cggattgcaccctggatta

SEQ ID NO: 550899 - DNA, 19 bp, Mus musculus
  siRNA target sequence for Padi2 (NM_008812.1,909-927).
ggattgcaccctggattat

SEQ ID NO: 550900 - DNA, 19 bp, Mus musculus
  siRNA target sequence for Padi2 (NM_008812.1,1023-1041).
ccaactgcgaactgaaagt

SEQ ID NO: 550901 - DNA, 19 bp, Mus musculus
  siRNA target sequence for Padi2 (NM_008812.1,1024-1042).
caactgcgaactgaaagtt

SEQ ID NO: 550902 - DNA, 19 bp, Mus musculus
  siRNA target sequence for Padi2 (NM_008812.1,1027-1045).
ctgcgaactgaaagtttgt

SEQ ID NO: 550903 - DNA, 19 bp, Mus musculus
  siRNA target sequence for Padi2 (NM_008812.1,1029-1047).
gcgaactgaaagtttgttt

SEQ ID NO: 550904 - DNA, 19 bp, Mus musculus
  siRNA target sequence for Padi2 (NM_008812.1,1444-1462).
cgtcgatgagtttatgact

SEQ ID NO: 550905 - DNA, 19 bp, Mus musculus
  siRNA target sequence for Padi2 (NM_008812.1,1445-1463).
gtcgatgagtttatgactt

SEQ ID NO: 550906 - DNA, 19 bp, Mus musculus
  siRNA target sequence for Padi2 (NM_008812.1,1448-1466).
gatgagtttatgactttca

SEQ ID NO: 550907 - DNA, 19 bp, Mus musculus
  siRNA target sequence for Padi2 (NM_008812.1,1474-1492).
cccaggcaaaaaggaattt

SEQ ID NO: 550908 - DNA, 19 bp, Mus musculus
  siRNA target sequence for Padi2 (NM_008812.1,1556-1574).
cacggggaggccgttatgt

SEQ ID NO: 550909 - DNA, 19 bp, Mus musculus
  siRNA target sequence for Padi2 (NM_008812.1,1559-1577).
ggggaggccgttatgttca

SEQ ID NO: 550910 - DNA, 19 bp, Mus musculus
  siRNA target sequence for Padi2 (NM_008812.1,1560-1578).
gggaggccgttatgttcaa

SEQ ID NO: 550911 - DNA, 19 bp, Mus musculus
  siRNA target sequence for Padi2 (NM_008812.1,1680-1698).
ggaaccgcgacatccttaa

SEQ ID NO: 550912 - DNA, 19 bp, Mus musculus
  siRNA target sequence for Padi3 (NM_011060.1,114-132).
gaccatcgtggacatttat

SEQ ID NO: 550913 - DNA, 19 bp, Mus musculus
  siRNA target sequence for Padi3 (NM_011060.1,176-194).
caccgggagtggacatcta

SEQ ID NO: 550914 - DNA, 19 bp, Mus musculus
  siRNA target sequence for Padi3 (NM_011060.1,239-257).
ggcggtggtgcttcaacaa

SEQ ID NO: 550915 - DNA, 19 bp, Mus musculus
  siRNA target sequence for Padi3 (NM_011060.1,510-528).
ggacaatgtcgactctaat

SEQ ID NO: 550916 - DNA, 19 bp, Mus musculus
  siRNA target sequence for Padi3 (NM_011060.1,970-988).
gtgtgccgggtgaggaata

SEQ ID NO: 550917 - DNA, 19 bp, Mus musculus
  siRNA target sequence for Padi3 (NM_011060.1,1170-1188).
gcagggcttcccttacaaa

SEQ ID NO: 550918 - DNA, 19 bp, Mus musculus
  siRNA target sequence for Padi3 (NM_011060.1,1174-1192).
ggcttcccttacaaaagga

SEQ ID NO: 550919 - DNA, 19 bp, Mus musculus
  siRNA target sequence for Padi3 (NM_011060.1,1578-1596).
gcttttcgagggtgtcatt

SEQ ID NO: 550920 - DNA, 19 bp, Mus musculus
  siRNA target sequence for Padi3 (NM_011060.1,1617-1635).
cgtctccatcaatcagatt

SEQ ID NO: 550921 - DNA, 19 bp, Mus musculus
  siRNA target sequence for Padi3 (NM_011060.1,1622-1640).
ccatcaatcagattcttaa

SEQ ID NO: 550922 - DNA, 19 bp, Mus musculus
  siRNA target sequence for Padi3 (NM_011060.1,1644-1662).
ccagagccttatcaacttt

SEQ ID NO: 550923 - DNA, 19 bp, Mus musculus
  siRNA target sequence for Padi3 (NM_011060.1,1649-1667).
gccttatcaactttaataa

SEQ ID NO: 550924 - DNA, 19 bp, Mus musculus
  siRNA target sequence for Padi4 (NM_011061.1,153-171).
caggagtcatcgtagatgt

SEQ ID NO: 550925 - DNA, 19 bp, Mus musculus
  siRNA target sequence for Padi4 (NM_011061.1,179-197).
ggtcctccagtcaagaaga

SEQ ID NO: 550926 - DNA, 19 bp, Mus musculus
  siRNA target sequence for Padi4 (NM_011061.1,289-307).
ggttcgagtttcatactat

SEQ ID NO: 550927 - DNA, 19 bp, Mus musculus
  siRNA target sequence for Padi4 (NM_011061.1,324-342).
cagtccaagccctgatcta

SEQ ID NO: 550928 - DNA, 19 bp, Mus musculus
  siRNA target sequence for Padi4 (NM_011061.1,329-347).
caagccctgatctacatca

SEQ ID NO: 550929 - DNA, 19 bp, Mus musculus
  siRNA target sequence for Padi4 (NM_011061.1,707-725).
ccacaacagttctcgtatt

SEQ ID NO: 550930 - DNA, 19 bp, Mus musculus
  siRNA target sequence for Padi4 (NM_011061.1,748-766).
gcacagcacagacttctat

SEQ ID NO: 550931 - DNA, 19 bp, Mus musculus
  siRNA target sequence for Padi4 (NM_011061.1,946-964).
gtgcagggtttctgacaat

SEQ ID NO: 550932 - DNA, 19 bp, Mus musculus
  siRNA target sequence for Padi4 (NM_011061.1,1027-1045).
ccccgaggaggagaatata

SEQ ID NO: 550933 - DNA, 19 bp, Mus musculus
  siRNA target sequence for Padi4 (NM_011061.1,1030-1048).
cgaggaggagaatatagat

SEQ ID NO: 550934 - DNA, 19 bp, Mus musculus
  siRNA target sequence for Padi4 (NM_011061.1,1162-1180).
gcgagttatgggtccaaat

SEQ ID NO: 550935 - DNA, 19 bp, Mus musculus
  siRNA target sequence for Padi4 (NM_011061.1,1190-1208).
gtgacccgaaagctctata

SEQ ID NO: 550936 - DNA, 19 bp, Mus musculus
  siRNA target sequence for Padi4 (NM_011061.1,1195-1213).
ccgaaagctctatatgtca

SEQ ID NO: 550937 - DNA, 19 bp, Mus musculus
  siRNA target sequence for Padi4 (NM_011061.1,1908-1926).
ccttcatcaacgacttcta

SEQ ID NO: 550938 - DNA, 19 bp, Mus musculus
  siRNA target sequence for Padi5 (NM_153106.1,139-157).
gacaagtgcaagtctttca

SEQ ID NO: 550939 - DNA, 19 bp, Mus musculus
  siRNA target sequence for Padi5 (NM_153106.1,387-405).
cctggaggcagacatctat

SEQ ID NO: 550940 - DNA, 19 bp, Mus musculus
  siRNA target sequence for Padi5 (NM_153106.1,439-457).
caagctaagaaaaaatgga

SEQ ID NO: 550941 - DNA, 19 bp, Mus musculus
  siRNA target sequence for Padi5 (NM_153106.1,495-513).
gaattgtagccctaatgct

SEQ ID NO: 550942 - DNA, 19 bp, Mus musculus
  siRNA target sequence for Padi5 (NM_153106.1,571-589).
ctgtctcagatgaatgtaa

SEQ ID NO: 550943 - DNA, 19 bp, Mus musculus
  siRNA target sequence for Padi5 (NM_153106.1,573-591).
gtctcagatgaatgtaact

SEQ ID NO: 550944 - DNA, 19 bp, Mus musculus
  siRNA target sequence for Padi5 (NM_153106.1,575-593).
ctcagatgaatgtaactgt

SEQ ID NO: 550945 - DNA, 19 bp, Mus musculus
  siRNA target sequence for Padi5 (NM_153106.1,689-707).
gctcctctgcgtatgaact

SEQ ID NO: 550946 - DNA, 19 bp, Mus musculus
  siRNA target sequence for Padi5 (NM_153106.1,828-846).
gtcactctccctagtagaa

SEQ ID NO: 550947 - DNA, 19 bp, Mus musculus
  siRNA target sequence for Padi5 (NM_153106.1,858-876).
cgagtgcatcccagagatt

SEQ ID NO: 550948 - DNA, 19 bp, Mus musculus
  siRNA target sequence for Padi5 (NM_153106.1,868-886).
ccagagattccgctctata

SEQ ID NO: 550949 - DNA, 19 bp, Mus musculus
  siRNA target sequence for Padi5 (NM_153106.1,869-887).
cagagattccgctctataa

SEQ ID NO: 550950 - DNA, 19 bp, Mus musculus
  siRNA target sequence for Padi5 (NM_153106.1,873-891).
gattccgctctataaggat

SEQ ID NO: 550951 - DNA, 19 bp, Mus musculus
  siRNA target sequence for Padi5 (NM_153106.1,878-896).
cgctctataaggatacagt

SEQ ID NO: 550952 - DNA, 19 bp, Mus musculus
  siRNA target sequence for Padi5 (NM_153106.1,900-918).
gttccgggtggcaccttat

SEQ ID NO: 550953 - DNA, 19 bp, Mus musculus
  siRNA target sequence for Padi5 (NM_153106.1,904-922).
cgggtggcaccttatatct

SEQ ID NO: 550954 - DNA, 19 bp, Mus musculus
  siRNA target sequence for Padi5 (NM_153106.1,1109-1127).
ctcacaagacggtgtcatt

SEQ ID NO: 550955 - DNA, 19 bp, Mus musculus
  siRNA target sequence for Padi5 (NM_153106.1,1111-1129).
cacaagacggtgtcattga

SEQ ID NO: 550956 - DNA, 19 bp, Mus musculus
  siRNA target sequence for Padi5 (NM_153106.1,1159-1177).
gaagacttccccatgaaat

SEQ ID NO: 550957 - DNA, 19 bp, Mus musculus
  siRNA target sequence for Padi5 (NM_153106.1,1162-1180).
gacttccccatgaaataca

SEQ ID NO: 550958 - DNA, 19 bp, Mus musculus
  siRNA target sequence for Padi5 (NM_153106.1,1436-1454).
ccggtcacatggatcaatt

SEQ ID NO: 550959 - DNA, 19 bp, Mus musculus
  siRNA target sequence for Padi5 (NM_153106.1,1438-1456).
ggtcacatggatcaattca

SEQ ID NO: 550960 - DNA, 19 bp, Mus musculus
  siRNA target sequence for Padi5 (NM_153106.1,1439-1457).
gtcacatggatcaattcat

SEQ ID NO: 550961 - DNA, 19 bp, Mus musculus
  siRNA target sequence for Padi5 (NM_153106.1,1441-1459).
cacatggatcaattcatgt

SEQ ID NO: 550962 - DNA, 19 bp, Mus musculus
  siRNA target sequence for Padi5 (NM_153106.1,1458-1476).
gtgctttgtccctaccaat

SEQ ID NO: 550963 - DNA, 19 bp, Mus musculus
  siRNA target sequence for Padi5 (NM_153106.1,1572-1590).
gaacgtgaccctgtttgaa

SEQ ID NO: 550964 - DNA, 19 bp, Mus musculus
  siRNA target sequence for Padi5 (NM_153106.1,1578-1596).
gaccctgtttgaagacatt

SEQ ID NO: 550965 - DNA, 19 bp, Mus musculus
  siRNA target sequence for Padi5 (NM_153106.1,1623-1641).
gagggagagcaaaactatt

SEQ ID NO: 550966 - DNA, 19 bp, Mus musculus
  siRNA target sequence for Padi5 (NM_153106.1,1653-1671).
ggctgacaagagttttcga

SEQ ID NO: 550967 - DNA, 19 bp, Mus musculus
  siRNA target sequence for Padi5 (NM_153106.1,1682-1700).
cctatgttgagaagtgtat

SEQ ID NO: 550968 - DNA, 19 bp, Mus musculus
  siRNA target sequence for Padi5 (NM_153106.1,1846-1864).
cccgacatgctgcagataa

SEQ ID NO: 550969 - DNA, 19 bp, Mus musculus
  siRNA target sequence for Padi5 (NM_153106.1,1974-1992).
gtgcaccttcattgatgat

SEQ ID NO: 550970 - DNA, 19 bp, Mus musculus
  siRNA target sequence for Padi5 (NM_153106.1,1998-2016).
ctgctacctggccaacata

SEQ ID NO: 550971 - DNA, 19 bp, Mus musculus
  siRNA target sequence for Padi5 (NM_153106.1,2029-2047).
gccagtgccatcataaaca

SEQ ID NO: 550972 - DNA, 19 bp, Mus musculus
  siRNA target sequence for Pcdh10 (NM_011043.1,125-143).
gatggtggacggagtcttt

SEQ ID NO: 550973 - DNA, 19 bp, Mus musculus
  siRNA target sequence for Pcdh10 (NM_011043.1,212-230).
cctgggcttggacattaca

SEQ ID NO: 550974 - DNA, 19 bp, Mus musculus
  siRNA target sequence for Pcdh10 (NM_011043.1,215-233).
gggcttggacattacaaaa

SEQ ID NO: 550975 - DNA, 19 bp, Mus musculus
  siRNA target sequence for Pcdh10 (NM_011043.1,221-239).
ggacattacaaaactttca

SEQ ID NO: 550976 - DNA, 19 bp, Mus musculus
  siRNA target sequence for Pcdh10 (NM_011043.1,301-319).
ccggggttctgtacgtaaa

SEQ ID NO: 550977 - DNA, 19 bp, Mus musculus
  siRNA target sequence for Pcdh10 (NM_011043.1,304-322).
gggttctgtacgtaaacga

SEQ ID NO: 550978 - DNA, 19 bp, Mus musculus
  siRNA target sequence for Pcdh10 (NM_011043.1,314-332).
cgtaaacgagaagatagat

SEQ ID NO: 550979 - DNA, 19 bp, Mus musculus
  siRNA target sequence for Pcdh10 (NM_011043.1,570-588).
gagataaccccaaatagct

SEQ ID NO: 550980 - DNA, 19 bp, Mus musculus
  siRNA target sequence for Pcdh10 (NM_011043.1,846-864).
caacccgtctacacagttt

SEQ ID NO: 550981 - DNA, 19 bp, Mus musculus
  siRNA target sequence for Pcdh10 (NM_011043.1,883-901).
cccctggcacgctagtgat

SEQ ID NO: 550982 - DNA, 19 bp, Mus musculus
  siRNA target sequence for Pcdh10 (NM_011043.1,892-910).
cgctagtgatccagcttaa

SEQ ID NO: 550983 - DNA, 19 bp, Mus musculus
  siRNA target sequence for Pcdh10 (NM_011043.1,893-911).
gctagtgatccagcttaat

SEQ ID NO: 550984 - DNA, 19 bp, Mus musculus
  siRNA target sequence for Pcdh10 (NM_011043.1,945-963).
gtcgtgtactcgttcagta

SEQ ID NO: 550985 - DNA, 19 bp, Mus musculus
  siRNA target sequence for Pcdh10 (NM_011043.1,953-971).
ctcgttcagtagtcacatt

SEQ ID NO: 550986 - DNA, 19 bp, Mus musculus
  siRNA target sequence for Pcdh10 (NM_011043.1,1030-1048).
gcggcgagctggactatga

SEQ ID NO: 550987 - DNA, 19 bp, Mus musculus
  siRNA target sequence for Pcdh10 (NM_011043.1,1031-1049).
cggcgagctggactatgaa

SEQ ID NO: 550988 - DNA, 19 bp, Mus musculus
  siRNA target sequence for Pcdh10 (NM_011043.1,1416-1434).
gcactctccaccagtaagt

SEQ ID NO: 550989 - DNA, 19 bp, Mus musculus
  siRNA target sequence for Pcdh10 (NM_011043.1,1489-1507).
cggtctacgacgtgtatgt

SEQ ID NO: 550990 - DNA, 19 bp, Mus musculus
  siRNA target sequence for Pcdh10 (NM_011043.1,1491-1509).
gtctacgacgtgtatgtga

SEQ ID NO: 550991 - DNA, 19 bp, Mus musculus
  siRNA target sequence for Pcdh10 (NM_011043.1,1502-1520).
gtatgtgacagaaaacaat

SEQ ID NO: 550992 - DNA, 19 bp, Mus musculus
  siRNA target sequence for Pcdh10 (NM_011043.1,1563-1581).
gacgaaggggccaatgcaa

SEQ ID NO: 550993 - DNA, 19 bp, Mus musculus
  siRNA target sequence for Pcdh10 (NM_011043.1,1565-1583).
cgaaggggccaatgcaaaa

SEQ ID NO: 550994 - DNA, 19 bp, Mus musculus
  siRNA target sequence for Pcdh10 (NM_011043.1,1566-1584).
gaaggggccaatgcaaaat

SEQ ID NO: 550995 - DNA, 19 bp, Mus musculus
  siRNA target sequence for Pcdh10 (NM_011043.1,1569-1587).
ggggccaatgcaaaattaa

SEQ ID NO: 550996 - DNA, 19 bp, Mus musculus
  siRNA target sequence for Pcdh10 (NM_011043.1,1572-1590).
gccaatgcaaaattaacct

SEQ ID NO: 550997 - DNA, 19 bp, Mus musculus
  siRNA target sequence for Pcdh10 (NM_011043.1,1578-1596).
gcaaaattaacctactcta

SEQ ID NO: 550998 - DNA, 19 bp, Mus musculus
  siRNA target sequence for Pcdh10 (NM_011043.1,1766-1784).
cacggtcaacatcttgata

SEQ ID NO: 550999 - DNA, 19 bp, Mus musculus
  siRNA target sequence for Pcdh10 (NM_011043.1,1768-1786).
cggtcaacatcttgatagt

SEQ ID NO: 551000 - DNA, 19 bp, Mus musculus
  siRNA target sequence for Pcdh10 (NM_011043.1,2228-2246).
ggacctcacacttatcctt

SEQ ID NO: 551001 - DNA, 19 bp, Mus musculus
  siRNA target sequence for Pcdh10 (NM_011043.1,2229-2247).
gacctcacacttatcctta

SEQ ID NO: 551002 - DNA, 19 bp, Mus musculus
  siRNA target sequence for Pcdh10 (NM_011043.1,2260-2278).
gctcggtgtccttcatctt

SEQ ID NO: 551003 - DNA, 19 bp, Mus musculus
  siRNA target sequence for Pcdh10 (NM_011043.1,2300-2318).
ggccgtgcgctgtcagaaa

SEQ ID NO: 551004 - DNA, 19 bp, Mus musculus
  siRNA target sequence for Pcdh10 (NM_011043.1,2302-2320).
ccgtgcgctgtcagaaaga

SEQ ID NO: 551005 - DNA, 19 bp, Mus musculus
  siRNA target sequence for Pcdh10 (NM_011043.1,2304-2322).
gtgcgctgtcagaaagaga

SEQ ID NO: 551006 - DNA, 19 bp, Mus musculus
  siRNA target sequence for Pcdh10 (NM_011043.1,2440-2458).
gcaagtcagatatcatgtt

SEQ ID NO: 551007 - DNA, 19 bp, Mus musculus
  siRNA target sequence for Pcdh10 (NM_011043.1,2581-2599).
ccaagaccgacctgatgtt

SEQ ID NO: 551008 - DNA, 19 bp, Mus musculus
  siRNA target sequence for Pcdh12 (NM_017378.1,333-351).
gggccaggaagctacttgt

SEQ ID NO: 551009 - DNA, 19 bp, Mus musculus
  siRNA target sequence for Pcdh12 (NM_017378.1,336-354).
ccaggaagctacttgttca

SEQ ID NO: 551010 - DNA, 19 bp, Mus musculus
  siRNA target sequence for Pcdh12 (NM_017378.1,339-357).
ggaagctacttgttcattt

SEQ ID NO: 551011 - DNA, 19 bp, Mus musculus
  siRNA target sequence for Pcdh12 (NM_017378.1,378-396).
gccactgtcatggtgaaat

SEQ ID NO: 551012 - DNA, 19 bp, Mus musculus
  siRNA target sequence for Pcdh12 (NM_017378.1,517-535).
cactgccggttcagatgaa

SEQ ID NO: 551013 - DNA, 19 bp, Mus musculus
  siRNA target sequence for Pcdh12 (NM_017378.1,604-622).
cctgtctggtgtcatttga

SEQ ID NO: 551014 - DNA, 19 bp, Mus musculus
  siRNA target sequence for Pcdh12 (NM_017378.1,634-652).
caggggcgtctgctctaat

SEQ ID NO: 551015 - DNA, 19 bp, Mus musculus
  siRNA target sequence for Pcdh12 (NM_017378.1,638-656).
ggcgtctgctctaattcat

SEQ ID NO: 551016 - DNA, 19 bp, Mus musculus
  siRNA target sequence for Pcdh12 (NM_017378.1,640-658).
cgtctgctctaattcatgt

SEQ ID NO: 551017 - DNA, 19 bp, Mus musculus
  siRNA target sequence for Pcdh12 (NM_017378.1,787-805).
cgggtcctaacagcttata

SEQ ID NO: 551018 - DNA, 19 bp, Mus musculus
  siRNA target sequence for Pcdh12 (NM_017378.1,788-806).
gggtcctaacagcttatat

SEQ ID NO: 551019 - DNA, 19 bp, Mus musculus
  siRNA target sequence for Pcdh12 (NM_017378.1,792-810).
cctaacagcttatattcct

SEQ ID NO: 551020 - DNA, 19 bp, Mus musculus
  siRNA target sequence for Pcdh12 (NM_017378.1,793-811).
ctaacagcttatattccta

SEQ ID NO: 551021 - DNA, 19 bp, Mus musculus
  siRNA target sequence for Pcdh12 (NM_017378.1,857-875).
ccctgatgagaccaaacat

SEQ ID NO: 551022 - DNA, 19 bp, Mus musculus
  siRNA target sequence for Pcdh12 (NM_017378.1,907-925).
gggaactccactcatattt

SEQ ID NO: 551023 - DNA, 19 bp, Mus musculus
  siRNA target sequence for Pcdh12 (NM_017378.1,933-951).
gtgctgaccgcctatgaca

SEQ ID NO: 551024 - DNA, 19 bp, Mus musculus
  siRNA target sequence for Pcdh12 (NM_017378.1,935-953).
gctgaccgcctatgacaat

SEQ ID NO: 551025 - DNA, 19 bp, Mus musculus
  siRNA target sequence for Pcdh12 (NM_017378.1,979-997).
gcgtggtcaaggtcaatgt

SEQ ID NO: 551026 - DNA, 19 bp, Mus musculus
  siRNA target sequence for Pcdh12 (NM_017378.1,1001-1019).
ggactccaatgacaatagt

SEQ ID NO: 551027 - DNA, 19 bp, Mus musculus
  siRNA target sequence for Pcdh12 (NM_017378.1,1071-1089).
cctggtactcttctcataa

SEQ ID NO: 551028 - DNA, 19 bp, Mus musculus
  siRNA target sequence for Pcdh12 (NM_017378.1,1075-1093).
gtactcttctcataaacct

SEQ ID NO: 551029 - DNA, 19 bp, Mus musculus
  siRNA target sequence for Pcdh12 (NM_017378.1,1172-1190).
gaacacctttggcatagat

SEQ ID NO: 551030 - DNA, 19 bp, Mus musculus
  siRNA target sequence for Pcdh12 (NM_017378.1,1216-1234).
gccaagccctagattacga

SEQ ID NO: 551031 - DNA, 19 bp, Mus musculus
  siRNA target sequence for Pcdh12 (NM_017378.1,1288-1306).
ccatcccaggccattgcaa

SEQ ID NO: 551032 - DNA, 19 bp, Mus musculus
  siRNA target sequence for Pcdh12 (NM_017378.1,1289-1307).
catcccaggccattgcaaa

SEQ ID NO: 551033 - DNA, 19 bp, Mus musculus
  siRNA target sequence for Pcdh12 (NM_017378.1,1296-1314).
ggccattgcaaagttctta

SEQ ID NO: 551034 - DNA, 19 bp, Mus musculus
  siRNA target sequence for Pcdh12 (NM_017378.1,1297-1315).
gccattgcaaagttcttat

SEQ ID NO: 551035 - DNA, 19 bp, Mus musculus
  siRNA target sequence for Pcdh12 (NM_017378.1,1303-1321).
gcaaagttcttatcaaagt

SEQ ID NO: 551036 - DNA, 19 bp, Mus musculus
  siRNA target sequence for Pcdh12 (NM_017378.1,1304-1322).
caaagttcttatcaaagtt

SEQ ID NO: 551037 - DNA, 19 bp, Mus musculus
  siRNA target sequence for Pcdh12 (NM_017378.1,1376-1394).
gtcgctggtgtcagaagat

SEQ ID NO: 551038 - DNA, 19 bp, Mus musculus
  siRNA target sequence for Pcdh12 (NM_017378.1,1378-1396).
cgctggtgtcagaagatct

SEQ ID NO: 551039 - DNA, 19 bp, Mus musculus
  siRNA target sequence for Pcdh12 (NM_017378.1,1419-1437).
cttgtcagtgcgaatgact

SEQ ID NO: 551040 - DNA, 19 bp, Mus musculus
  siRNA target sequence for Pcdh12 (NM_017378.1,1463-1481).
ccactgttggctgaatcaa

SEQ ID NO: 551041 - DNA, 19 bp, Mus musculus
  siRNA target sequence for Pcdh12 (NM_017378.1,1621-1639).
ctgagaaggagctccaaat

SEQ ID NO: 551042 - DNA, 19 bp, Mus musculus
  siRNA target sequence for Pcdh12 (NM_017378.1,1758-1776).
gacttgggcagtaatggaa

SEQ ID NO: 551043 - DNA, 19 bp, Mus musculus
  siRNA target sequence for Pcdh12 (NM_017378.1,1768-1786).
gtaatggaaaagtgtcata

SEQ ID NO: 551044 - DNA, 19 bp, Mus musculus
  siRNA target sequence for Pcdh12 (NM_017378.1,1799-1817).
ctcccccgtttctcactta

SEQ ID NO: 551045 - DNA, 19 bp, Mus musculus
  siRNA target sequence for Pcdh12 (NM_017378.1,1801-1819).
cccccgtttctcacttagt

SEQ ID NO: 551046 - DNA, 19 bp, Mus musculus
  siRNA target sequence for Pcdh12 (NM_017378.1,1803-1821).
cccgtttctcacttagtca

SEQ ID NO: 551047 - DNA, 19 bp, Mus musculus
  siRNA target sequence for Pcdh12 (NM_017378.1,1810-1828).
ctcacttagtcattattga

SEQ ID NO: 551048 - DNA, 19 bp, Mus musculus
  siRNA target sequence for Pcdh12 (NM_017378.1,1812-1830).
cacttagtcattattgact

SEQ ID NO: 551049 - DNA, 19 bp, Mus musculus
  siRNA target sequence for Pcdh12 (NM_017378.1,2023-2041).
ccctttcggtgcttgtaaa

SEQ ID NO: 551050 - DNA, 19 bp, Mus musculus
  siRNA target sequence for Pcdh12 (NM_017378.1,2024-2042).
cctttcggtgcttgtaaat

SEQ ID NO: 551051 - DNA, 19 bp, Mus musculus
  siRNA target sequence for Pcdh12 (NM_017378.1,2058-2076).
cttctgttgcccattgaga

SEQ ID NO: 551052 - DNA, 19 bp, Mus musculus
  siRNA target sequence for Pcdh12 (NM_017378.1,2248-2266).
cttccttggggcagctatt

SEQ ID NO: 551053 - DNA, 19 bp, Mus musculus
  siRNA target sequence for Pcdh12 (NM_017378.1,2252-2270).
cttggggcagctattcatt

SEQ ID NO: 551054 - DNA, 19 bp, Mus musculus
  siRNA target sequence for Pcdh12 (NM_017378.1,2255-2273).
ggggcagctattcattaat

SEQ ID NO: 551055 - DNA, 19 bp, Mus musculus
  siRNA target sequence for Pcdh12 (NM_017378.1,2257-2275).
ggcagctattcattaatgt

SEQ ID NO: 551056 - DNA, 19 bp, Mus musculus
  siRNA target sequence for Pcdh12 (NM_017378.1,2259-2277).
cagctattcattaatgtca

SEQ ID NO: 551057 - DNA, 19 bp, Mus musculus
  siRNA target sequence for Pcdh12 (NM_017378.1,2352-2370).
cagacccaagtttcattga

SEQ ID NO: 551058 - DNA, 19 bp, Mus musculus
  siRNA target sequence for Pcdh12 (NM_017378.1,2532-2550).
gataatagggcctacaact

SEQ ID NO: 551059 - DNA, 19 bp, Mus musculus
  siRNA target sequence for Pcdh12 (NM_017378.1,2765-2783).
caggaccctgcgtaaccaa

SEQ ID NO: 551060 - DNA, 19 bp, Mus musculus
  siRNA target sequence for Pcdh12 (NM_017378.1,2869-2887).
cctcccgggagaacctaaa

SEQ ID NO: 551061 - DNA, 19 bp, Mus musculus
  siRNA target sequence for Pcdh12 (NM_017378.1,2873-2891).
ccgggagaacctaaacctt

SEQ ID NO: 551062 - DNA, 19 bp, Mus musculus
  siRNA target sequence for Pcdh12 (NM_017378.1,2910-2928).
gtacgccaaccactcttaa

SEQ ID NO: 551063 - DNA, 19 bp, Mus musculus
  siRNA target sequence for Pcdh12 (NM_017378.1,3028-3046).
gacgacagcggaatttcaa

SEQ ID NO: 551064 - DNA, 19 bp, Mus musculus
  siRNA target sequence for Pcdh12 (NM_017378.1,3073-3091).
ccggtcctcatcagattct

SEQ ID NO: 551065 - DNA, 19 bp, Mus musculus
  siRNA target sequence for Pcdh12 (NM_017378.1,3075-3093).
ggtcctcatcagattctga

SEQ ID NO: 551066 - DNA, 19 bp, Mus musculus
  siRNA target sequence for Pcdh12 (NM_017378.1,3228-3246).
ccaaaccaccgaggaaata

SEQ ID NO: 551067 - DNA, 19 bp, Mus musculus
  siRNA target sequence for Pcdh12 (NM_017378.1,3229-3247).
caaaccaccgaggaaataa

SEQ ID NO: 551068 - DNA, 19 bp, Mus musculus
  siRNA target sequence for Pcdh12 (NM_017378.1,3234-3252).
caccgaggaaataaatact

SEQ ID NO: 551069 - DNA, 19 bp, Mus musculus
  siRNA target sequence for Pcdh12 (NM_017378.1,3364-3382).
cggaggaggacctttctgt

SEQ ID NO: 551070 - DNA, 19 bp, Mus musculus
  siRNA target sequence for Pcdh12 (NM_017378.1,3365-3383).
ggaggaggacctttctgta

SEQ ID NO: 551071 - DNA, 19 bp, Mus musculus
  siRNA target sequence for Pcdh12 (NM_017378.1,3379-3397).
ctgtaaagcgacttctaga

SEQ ID NO: 551072 - DNA, 19 bp, Mus musculus
  siRNA target sequence for Pcdh12 (NM_017378.1,3472-3490).
ggatggcgagattgtcatt

SEQ ID NO: 551073 - DNA, 19 bp, Mus musculus
  siRNA target sequence for Pcdh15 (NM_023115.1,500-518).
ggcaatacgaggattgcaa

SEQ ID NO: 551074 - DNA, 19 bp, Mus musculus
  siRNA target sequence for Pcdh15 (NM_023115.1,501-519).
gcaatacgaggattgcaaa

SEQ ID NO: 551075 - DNA, 19 bp, Mus musculus
  siRNA target sequence for Pcdh15 (NM_023115.1,567-585).
gagtcgaaacggtacaatt

SEQ ID NO: 551076 - DNA, 19 bp, Mus musculus
  siRNA target sequence for Pcdh15 (NM_023115.1,569-587).
gtcgaaacggtacaattct

SEQ ID NO: 551077 - DNA, 19 bp, Mus musculus
  siRNA target sequence for Pcdh15 (NM_023115.1,578-596).
gtacaattctggtggataa

SEQ ID NO: 551078 - DNA, 19 bp, Mus musculus
  siRNA target sequence for Pcdh15 (NM_023115.1,586-604).
ctggtggataacatgttga

SEQ ID NO: 551079 - DNA, 19 bp, Mus musculus
  siRNA target sequence for Pcdh15 (NM_023115.1,588-606).
ggtggataacatgttgatt

SEQ ID NO: 551080 - DNA, 19 bp, Mus musculus
  siRNA target sequence for Pcdh15 (NM_023115.1,633-651).
caccatagagctctcttta

SEQ ID NO: 551081 - DNA, 19 bp, Mus musculus
  siRNA target sequence for Pcdh15 (NM_023115.1,679-697).
ctggaccccgttaaacaga

SEQ ID NO: 551082 - DNA, 19 bp, Mus musculus
  siRNA target sequence for Pcdh15 (NM_023115.1,734-752).
gagacccaccaatgaacat

SEQ ID NO: 551083 - DNA, 19 bp, Mus musculus
  siRNA target sequence for Pcdh15 (NM_023115.1,739-757).
ccaccaatgaacatacact

SEQ ID NO: 551084 - DNA, 19 bp, Mus musculus
  siRNA target sequence for Pcdh15 (NM_023115.1,797-815).
gcacagttatctatcatga

SEQ ID NO: 551085 - DNA, 19 bp, Mus musculus
  siRNA target sequence for Pcdh15 (NM_023115.1,829-847).
gtgcgagatcggaatgaca

SEQ ID NO: 551086 - DNA, 19 bp, Mus musculus
  siRNA target sequence for Pcdh15 (NM_023115.1,901-919).
ccagttggcaccacgatat

SEQ ID NO: 551087 - DNA, 19 bp, Mus musculus
  siRNA target sequence for Pcdh15 (NM_023115.1,902-920).
cagttggcaccacgatatt

SEQ ID NO: 551088 - DNA, 19 bp, Mus musculus
  siRNA target sequence for Pcdh15 (NM_023115.1,904-922).
gttggcaccacgatattca

SEQ ID NO: 551089 - DNA, 19 bp, Mus musculus
  siRNA target sequence for Pcdh15 (NM_023115.1,924-942).
ggggttctcgggagacaat

SEQ ID NO: 551090 - DNA, 19 bp, Mus musculus
  siRNA target sequence for Pcdh15 (NM_023115.1,939-957).
caatggagctacagacata

SEQ ID NO: 551091 - DNA, 19 bp, Mus musculus
  siRNA target sequence for Pcdh15 (NM_023115.1,1076-1094).
gactcaactatgaggataa

SEQ ID NO: 551092 - DNA, 19 bp, Mus musculus
  siRNA target sequence for Pcdh15 (NM_023115.1,1080-1098).
caactatgaggataagact

SEQ ID NO: 551093 - DNA, 19 bp, Mus musculus
  siRNA target sequence for Pcdh15 (NM_023115.1,1089-1107).
ggataagactcgctactat

SEQ ID NO: 551094 - DNA, 19 bp, Mus musculus
  siRNA target sequence for Pcdh15 (NM_023115.1,1097-1115).
ctcgctactatgtcatcat

SEQ ID NO: 551095 - DNA, 19 bp, Mus musculus
  siRNA target sequence for Pcdh15 (NM_023115.1,1121-1139).
caaatgaccgtgcacaaaa

SEQ ID NO: 551096 - DNA, 19 bp, Mus musculus
  siRNA target sequence for Pcdh15 (NM_023115.1,1126-1144).
gaccgtgcacaaaatctga

SEQ ID NO: 551097 - DNA, 19 bp, Mus musculus
  siRNA target sequence for Pcdh15 (NM_023115.1,1128-1146).
ccgtgcacaaaatctgaat

SEQ ID NO: 551098 - DNA, 19 bp, Mus musculus
  siRNA target sequence for Pcdh15 (NM_023115.1,1130-1148).
gtgcacaaaatctgaatga

SEQ ID NO: 551099 - DNA, 19 bp, Mus musculus
  siRNA target sequence for Pcdh15 (NM_023115.1,1169-1187).
ccctcacagtagatgttct

SEQ ID NO: 551100 - DNA, 19 bp, Mus musculus
  siRNA target sequence for Pcdh15 (NM_023115.1,1289-1307).
ggactccggaagaactgaa

SEQ ID NO: 551101 - DNA, 19 bp, Mus musculus
  siRNA target sequence for Pcdh15 (NM_023115.1,1297-1315).
gaagaactgaaccctattt

SEQ ID NO: 551102 - DNA, 19 bp, Mus musculus
  siRNA target sequence for Pcdh15 (NM_023115.1,1317-1335).
ggtgacaccacctatccaa

SEQ ID NO: 551103 - DNA, 19 bp, Mus musculus
  siRNA target sequence for Pcdh15 (NM_023115.1,1484-1502).
gagacttccatcaaaaatt

SEQ ID NO: 551104 - DNA, 19 bp, Mus musculus
  siRNA target sequence for Pcdh15 (NM_023115.1,1555-1573).
gctagtctgcacatcgaaa

SEQ ID NO: 551105 - DNA, 19 bp, Mus musculus
  siRNA target sequence for Pcdh15 (NM_023115.1,1556-1574).
ctagtctgcacatcgaaat

SEQ ID NO: 551106 - DNA, 19 bp, Mus musculus
  siRNA target sequence for Pcdh15 (NM_023115.1,1570-1588).
gaaatactagacgaaaaca

SEQ ID NO: 551107 - DNA, 19 bp, Mus musculus
  siRNA target sequence for Pcdh15 (NM_023115.1,1576-1594).
ctagacgaaaacaatcaga

SEQ ID NO: 551108 - DNA, 19 bp, Mus musculus
  siRNA target sequence for Pcdh15 (NM_023115.1,1832-1850).
gggaggaacagcaaaccta

SEQ ID NO: 551109 - DNA, 19 bp, Mus musculus
  siRNA target sequence for Pcdh15 (NM_023115.1,1843-1861).
caaacctacacctttctga

SEQ ID NO: 551110 - DNA, 19 bp, Mus musculus
  siRNA target sequence for Pcdh15 (NM_023115.1,1891-1909).
gagccagtcgtggtcaata

SEQ ID NO: 551111 - DNA, 19 bp, Mus musculus
  siRNA target sequence for Pcdh15 (NM_023115.1,1911-1929).
ccgagtgatggatgcaaat

SEQ ID NO: 551112 - DNA, 19 bp, Mus musculus
  siRNA target sequence for Pcdh15 (NM_023115.1,1947-1965).
ccctgaaatctcctatgat

SEQ ID NO: 551113 - DNA, 19 bp, Mus musculus
  siRNA target sequence for Pcdh15 (NM_023115.1,1956-1974).
ctcctatgatgtctatgtt

SEQ ID NO: 551114 - DNA, 19 bp, Mus musculus
  siRNA target sequence for Pcdh15 (NM_023115.1,1958-1976).
cctatgatgtctatgttta

SEQ ID NO: 551115 - DNA, 19 bp, Mus musculus
  siRNA target sequence for Pcdh15 (NM_023115.1,1991-2009).
ctggggacagcgtcattca

SEQ ID NO: 551116 - DNA, 19 bp, Mus musculus
  siRNA target sequence for Pcdh15 (NM_023115.1,2044-2062).
ggggagatctcctatgaaa

SEQ ID NO: 551117 - DNA, 19 bp, Mus musculus
  siRNA target sequence for Pcdh15 (NM_023115.1,2045-2063).
gggagatctcctatgaaat

SEQ ID NO: 551118 - DNA, 19 bp, Mus musculus
  siRNA target sequence for Pcdh15 (NM_023115.1,2081-2099).
gagacttcgtgatcaacaa

SEQ ID NO: 551119 - DNA, 19 bp, Mus musculus
  siRNA target sequence for Pcdh15 (NM_023115.1,2083-2101).
gacttcgtgatcaacaaga

SEQ ID NO: 551120 - DNA, 19 bp, Mus musculus
  siRNA target sequence for Pcdh15 (NM_023115.1,2264-2282).
gcttcccgcagctgatgta

SEQ ID NO: 551121 - DNA, 19 bp, Mus musculus
  siRNA target sequence for Pcdh15 (NM_023115.1,2307-2325).
gaggatcggtgctatttta

SEQ ID NO: 551122 - DNA, 19 bp, Mus musculus
  siRNA target sequence for Pcdh15 (NM_023115.1,2352-2370).
gggagatccaatcacatat

SEQ ID NO: 551123 - DNA, 19 bp, Mus musculus
  siRNA target sequence for Pcdh15 (NM_023115.1,2388-2406).
ccctcagagagtttttaat

SEQ ID NO: 551124 - DNA, 19 bp, Mus musculus
  siRNA target sequence for Pcdh15 (NM_023115.1,2660-2678).
ggataaacggccaagttca

SEQ ID NO: 551125 - DNA, 19 bp, Mus musculus
  siRNA target sequence for Pcdh15 (NM_023115.1,2684-2702).
gcctggggaacttcaacaa

SEQ ID NO: 551126 - DNA, 19 bp, Mus musculus
  siRNA target sequence for Pcdh15 (NM_023115.1,2717-2735).
catccaacgggagcattta

SEQ ID NO: 551127 - DNA, 19 bp, Mus musculus
  siRNA target sequence for Pcdh15 (NM_023115.1,2845-2863).
gtgttggacattgatgata

SEQ ID NO: 551128 - DNA, 19 bp, Mus musculus
  siRNA target sequence for Pcdh15 (NM_023115.1,2869-2887).
cctgtttttaccaattcaa

SEQ ID NO: 551129 - DNA, 19 bp, Mus musculus
  siRNA target sequence for Pcdh15 (NM_023115.1,2894-2912).
cagttgtcgttgaagagaa

SEQ ID NO: 551130 - DNA, 19 bp, Mus musculus
  siRNA target sequence for Pcdh15 (NM_023115.1,2921-2939).
ccgggacctcctttcttca

SEQ ID NO: 551131 - DNA, 19 bp, Mus musculus
  siRNA target sequence for Pcdh15 (NM_023115.1,2974-2992).
gtgtcatatcggatcagaa

SEQ ID NO: 551132 - DNA, 19 bp, Mus musculus
  siRNA target sequence for Pcdh15 (NM_023115.1,3129-3147).
gactatgccacctggtata

SEQ ID NO: 551133 - DNA, 19 bp, Mus musculus
  siRNA target sequence for Pcdh15 (NM_023115.1,3149-3167).
caacagtcacggtaattgt

SEQ ID NO: 551134 - DNA, 19 bp, Mus musculus
  siRNA target sequence for Pcdh15 (NM_023115.1,3152-3170).
cagtcacggtaattgtgaa

SEQ ID NO: 551135 - DNA, 19 bp, Mus musculus
  siRNA target sequence for Pcdh15 (NM_023115.1,3258-3276).
caccgtttatgctgaagat

SEQ ID NO: 551136 - DNA, 19 bp, Mus musculus
  siRNA target sequence for Pcdh15 (NM_023115.1,3322-3340).
gacgacgtgcagtttccat

SEQ ID NO: 551137 - DNA, 19 bp, Mus musculus
  siRNA target sequence for Pcdh15 (NM_023115.1,3385-3403).
gtaacccgcgtcaatctta

SEQ ID NO: 551138 - DNA, 19 bp, Mus musculus
  siRNA target sequence for Pcdh15 (NM_023115.1,3389-3407).
cccgcgtcaatcttaatga

SEQ ID NO: 551139 - DNA, 19 bp, Mus musculus
  siRNA target sequence for Pcdh15 (NM_023115.1,3390-3408).
ccgcgtcaatcttaatgaa

SEQ ID NO: 551140 - DNA, 19 bp, Mus musculus
  siRNA target sequence for Pcdh15 (NM_023115.1,3392-3410).
gcgtcaatcttaatgaaga

SEQ ID NO: 551141 - DNA, 19 bp, Mus musculus
  siRNA target sequence for Pcdh15 (NM_023115.1,3406-3424).
gaagagcctactacgattt

SEQ ID NO: 551142 - DNA, 19 bp, Mus musculus
  siRNA target sequence for Pcdh15 (NM_023115.1,3473-3491).
gcagtgccacggtgagaat

SEQ ID NO: 551143 - DNA, 19 bp, Mus musculus
  siRNA target sequence for Pcdh15 (NM_023115.1,3474-3492).
cagtgccacggtgagaatt

SEQ ID NO: 551144 - DNA, 19 bp, Mus musculus
  siRNA target sequence for Pcdh15 (NM_023115.1,3479-3497).
ccacggtgagaattcttgt

SEQ ID NO: 551145 - DNA, 19 bp, Mus musculus
  siRNA target sequence for Pcdh15 (NM_023115.1,3482-3500).
cggtgagaattcttgtctt

SEQ ID NO: 551146 - DNA, 19 bp, Mus musculus
  siRNA target sequence for Pcdh15 (NM_023115.1,3525-3543).
cacccaagaggaatacaga

SEQ ID NO: 551147 - DNA, 19 bp, Mus musculus
  siRNA target sequence for Pcdh15 (NM_023115.1,3567-3585).
ggccagagggactgtagtt

SEQ ID NO: 551148 - DNA, 19 bp, Mus musculus
  siRNA target sequence for Pcdh15 (NM_023115.1,3598-3616).
gctgctgccattaatcaga

SEQ ID NO: 551149 - DNA, 19 bp, Mus musculus
  siRNA target sequence for Pcdh15 (NM_023115.1,3681-3699).
ggtcatctatgtgaattca

SEQ ID NO: 551150 - DNA, 19 bp, Mus musculus
  siRNA target sequence for Pcdh15 (NM_023115.1,3691-3709).
gtgaattcaccattggatt

SEQ ID NO: 551151 - DNA, 19 bp, Mus musculus
  siRNA target sequence for Pcdh15 (NM_023115.1,3735-3753).
ccgggtacaagcagattct

SEQ ID NO: 551152 - DNA, 19 bp, Mus musculus
  siRNA target sequence for Pcdh15 (NM_023115.1,3800-3818).
cagctaaggtgtacattga

SEQ ID NO: 551153 - DNA, 19 bp, Mus musculus
  siRNA target sequence for Pcdh15 (NM_023115.1,3819-3837).
gattcaggatgaaaacgat

SEQ ID NO: 551154 - DNA, 19 bp, Mus musculus
  siRNA target sequence for Pcdh15 (NM_023115.1,3844-3862).
ccagtgttccagaagaaat

SEQ ID NO: 551155 - DNA, 19 bp, Mus musculus
  siRNA target sequence for Pcdh15 (NM_023115.1,3928-3946).
gacagggacacgggtaatt

SEQ ID NO: 551156 - DNA, 19 bp, Mus musculus
  siRNA target sequence for Pcdh15 (NM_023115.1,3933-3951).
ggacacgggtaattacagt

SEQ ID NO: 551157 - DNA, 19 bp, Mus musculus
  siRNA target sequence for Pcdh15 (NM_023115.1,3957-3975).
ggcctaccggctcatcata

SEQ ID NO: 551158 - DNA, 19 bp, Mus musculus
  siRNA target sequence for Pcdh15 (NM_023115.1,3969-3987).
catcataccgccgattaaa

SEQ ID NO: 551159 - DNA, 19 bp, Mus musculus
  siRNA target sequence for Pcdh15 (NM_023115.1,4039-4057).
gccatgctcttccacaata

SEQ ID NO: 551160 - DNA, 19 bp, Mus musculus
  siRNA target sequence for Pcdh15 (NM_023115.1,4040-4058).
ccatgctcttccacaatat

SEQ ID NO: 551161 - DNA, 19 bp, Mus musculus
  siRNA target sequence for Pcdh15 (NM_023115.1,4044-4062).
gctcttccacaatatgaga

SEQ ID NO: 551162 - DNA, 19 bp, Mus musculus
  siRNA target sequence for Pcdh15 (NM_023115.1,4061-4079).
gaagatcctacttcaagtt

SEQ ID NO: 551163 - DNA, 19 bp, Mus musculus
  siRNA target sequence for Pcdh15 (NM_023115.1,4064-4082).
gatcctacttcaagtttca

SEQ ID NO: 551164 - DNA, 19 bp, Mus musculus
  siRNA target sequence for Pcdh15 (NM_023115.1,4137-4155).
ggtctccgtggtcaatcaa

SEQ ID NO: 551165 - DNA, 19 bp, Mus musculus
  siRNA target sequence for Pcdh15 (NM_023115.1,4335-4353).
gtgcgacctgactgtctat

SEQ ID NO: 551166 - DNA, 19 bp, Mus musculus
  siRNA target sequence for Pcdh15 (NM_023115.1,4376-4394).
gagccatcgacagaaatga

SEQ ID NO: 551167 - DNA, 19 bp, Mus musculus
  siRNA target sequence for Pcdh15 (NM_023115.1,4383-4401).
cgacagaaatgagcttttt

SEQ ID NO: 551168 - DNA, 19 bp, Mus musculus
  siRNA target sequence for Pcdh15 (NM_023115.1,4414-4432).
ggcaaactgctcgatatca

SEQ ID NO: 551169 - DNA, 19 bp, Mus musculus
  siRNA target sequence for Pcdh15 (NM_023115.1,4415-4433).
gcaaactgctcgatatcaa

SEQ ID NO: 551170 - DNA, 19 bp, Mus musculus
  siRNA target sequence for Pcdh15 (NM_023115.1,4416-4434).
caaactgctcgatatcaat

SEQ ID NO: 551171 - DNA, 19 bp, Mus musculus
  siRNA target sequence for Pcdh15 (NM_023115.1,4423-4441).
ctcgatatcaataaagact

SEQ ID NO: 551172 - DNA, 19 bp, Mus musculus
  siRNA target sequence for Pcdh15 (NM_023115.1,4495-4513).
gcagtgacgagcatcaaga

SEQ ID NO: 551173 - DNA, 19 bp, Mus musculus
  siRNA target sequence for Pcdh15 (NM_023115.1,4593-4611).
catcttggtcgtcttagta

SEQ ID NO: 551174 - DNA, 19 bp, Mus musculus
  siRNA target sequence for Pcdh15 (NM_023115.1,4647-4665).
cacgaagaccgcaagaatt

SEQ ID NO: 551175 - DNA, 19 bp, Mus musculus
  siRNA target sequence for Pcdh15 (NM_023115.1,4649-4667).
cgaagaccgcaagaattca

SEQ ID NO: 551176 - DNA, 19 bp, Mus musculus
  siRNA target sequence for Pcdh15 (NM_023115.1,4816-4834).
gaacaaagcaggggaaata

SEQ ID NO: 551177 - DNA, 19 bp, Mus musculus
  siRNA target sequence for Pcdh15 (NM_023115.1,4819-4837).
caaagcaggggaaataact

SEQ ID NO: 551178 - DNA, 19 bp, Mus musculus
  siRNA target sequence for Pcdh15 (NM_023115.1,4952-4970).
cagcaaggacgttctcatt

SEQ ID NO: 551179 - DNA, 19 bp, Mus musculus
  siRNA target sequence for Pcdh15 (NM_023115.1,5005-5023).
cccctttacatggaaagta

SEQ ID NO: 551180 - DNA, 19 bp, Mus musculus
  siRNA target sequence for Pcdh15 (NM_023115.1,5006-5024).
ccctttacatggaaagtat

SEQ ID NO: 551181 - DNA, 19 bp, Mus musculus
  siRNA target sequence for Pcdh15 (NM_023115.1,5026-5044).
ggtcaaaggtcaacaaact

SEQ ID NO: 551182 - DNA, 19 bp, Mus musculus
  siRNA target sequence for Pcdh15 (NM_023115.1,5049-5067).
ccttcagccacgaacagat

SEQ ID NO: 551183 - DNA, 19 bp, Mus musculus
  siRNA target sequence for Pcdh15 (NM_023115.1,5050-5068).
cttcagccacgaacagatt

SEQ ID NO: 551184 - DNA, 19 bp, Mus musculus
  siRNA target sequence for Pcdh15 (NM_023115.1,5057-5075).
cacgaacagattttgaaga

SEQ ID NO: 551185 - DNA, 19 bp, Mus musculus
  siRNA target sequence for Pcdh15 (NM_023115.1,5082-5100).
ggcacccagaacacaagtt

SEQ ID NO: 551186 - DNA, 19 bp, Mus musculus
  siRNA target sequence for Pcdh15 (NM_023115.1,5084-5102).
cacccagaacacaagttaa

SEQ ID NO: 551187 - DNA, 19 bp, Mus musculus
  siRNA target sequence for Pcdh15 (NM_023115.1,5295-5313).
cgttctgctggcaactgaa

SEQ ID NO: 551188 - DNA, 19 bp, Mus musculus
  siRNA target sequence for Pcdh15 (NM_023115.1,5368-5386).
caaacagagcagctgaaat

SEQ ID NO: 551189 - DNA, 19 bp, Mus musculus
  siRNA target sequence for Pcdh15 (NM_023115.1,5436-5454).
ctcaactctgccaacgatt

SEQ ID NO: 551190 - DNA, 19 bp, Mus musculus
  siRNA target sequence for Pcdh15 (NM_023115.1,5530-5548).
cctctgagaccccgtattt

SEQ ID NO: 551191 - DNA, 19 bp, Mus musculus
  siRNA target sequence for Pcdh15 (NM_023115.1,5531-5549).
ctctgagaccccgtatttt

SEQ ID NO: 551192 - DNA, 19 bp, Mus musculus
  siRNA target sequence for Pcdh15 (NM_023115.1,5542-5560).
cgtattttaaactccttaa

SEQ ID NO: 551193 - DNA, 19 bp, Mus musculus
  siRNA target sequence for Pcdh15 (NM_023115.1,5588-5606).
catcagatacagaaccaaa

SEQ ID NO: 551194 - DNA, 19 bp, Mus musculus
  siRNA target sequence for Pcdh15 (NM_023115.1,5599-5617).
gaaccaaaaaggaactctt

SEQ ID NO: 551195 - DNA, 19 bp, Mus musculus
  siRNA target sequence for Pcdh15 (NM_023115.1,5603-5621).
caaaaaggaactcttttga

SEQ ID NO: 551196 - DNA, 19 bp, Mus musculus
  siRNA target sequence for Pcdh15 (NM_023115.1,5680-5698).
cctcccattgcctttacca

SEQ ID NO: 551197 - DNA, 19 bp, Mus musculus
  siRNA target sequence for Pcdh15 (NM_023115.1,5685-5703).
cattgcctttaccactttt

SEQ ID NO: 551198 - DNA, 19 bp, Mus musculus
  siRNA target sequence for Pcdh15 (NM_023115.1,5731-5749).
cctcccccacaacttgtta

SEQ ID NO: 551199 - DNA, 19 bp, Mus musculus
  siRNA target sequence for Pcdh15 (NM_023115.1,5734-5752).
cccccacaacttgttacat

SEQ ID NO: 551200 - DNA, 19 bp, Mus musculus
  siRNA target sequence for Pcdh15 (NM_023115.1,5735-5753).
ccccacaacttgttacatt

SEQ ID NO: 551201 - DNA, 19 bp, Mus musculus
  siRNA target sequence for Pcdh15 (NM_023115.1,5736-5754).
cccacaacttgttacattt

SEQ ID NO: 551202 - DNA, 19 bp, Mus musculus
  siRNA target sequence for Pcdh15 (NM_023115.1,5896-5914).
gcaccagctgctaaatgca

SEQ ID NO: 551203 - DNA, 19 bp, Mus musculus
  siRNA target sequence for Pcdh15 (NM_023115.1,6036-6054).
ggcagagctcgagaaatca

SEQ ID NO: 551204 - DNA, 19 bp, Mus musculus
  siRNA target sequence for Pcdh15 (NM_023115.1,6095-6113).
ctgcagatccctcaaaact

SEQ ID NO: 551205 - DNA, 19 bp, Mus musculus
  siRNA target sequence for Pcdh15 (NM_023115.1,6171-6189).
ggaaacgttggttagagtt

SEQ ID NO: 551206 - DNA, 19 bp, Mus musculus
  siRNA target sequence for Pcdh15 (NM_023115.1,6176-6194).
cgttggttagagttgttga

SEQ ID NO: 551207 - DNA, 19 bp, Mus musculus
  siRNA target sequence for Pcdh15 (NM_023115.1,6214-6232).
cacagtcaatcaacatctt

SEQ ID NO: 551208 - DNA, 19 bp, Mus musculus
  siRNA target sequence for Pcdh18 (NM_130448.2,433-451).
ctaaaatgcactttagatt

SEQ ID NO: 551209 - DNA, 19 bp, Mus musculus
  siRNA target sequence for Pcdh18 (NM_130448.2,533-551).
ggtcggatcggtaattgct

SEQ ID NO: 551210 - DNA, 19 bp, Mus musculus
  siRNA target sequence for Pcdh18 (NM_130448.2,534-552).
gtcggatcggtaattgcta

SEQ ID NO: 551211 - DNA, 19 bp, Mus musculus
  siRNA target sequence for Pcdh18 (NM_130448.2,564-582).
gatgtggctgatgttttat

SEQ ID NO: 551212 - DNA, 19 bp, Mus musculus
  siRNA target sequence for Pcdh18 (NM_130448.2,642-660).
ctcctggtcgtaaatgaga

SEQ ID NO: 551213 - DNA, 19 bp, Mus musculus
  siRNA target sequence for Pcdh18 (NM_130448.2,645-663).
ctggtcgtaaatgagaata

SEQ ID NO: 551214 - DNA, 19 bp, Mus musculus
  siRNA target sequence for Pcdh18 (NM_130448.2,657-675).
gagaataccggagaaatca

SEQ ID NO: 551215 - DNA, 19 bp, Mus musculus
  siRNA target sequence for Pcdh18 (NM_130448.2,674-692).
cagcataggggctaaaatt

SEQ ID NO: 551216 - DNA, 19 bp, Mus musculus
  siRNA target sequence for Pcdh18 (NM_130448.2,698-716).
cgagcaactatgccaaaaa

SEQ ID NO: 551217 - DNA, 19 bp, Mus musculus
  siRNA target sequence for Pcdh18 (NM_130448.2,699-717).
gagcaactatgccaaaaaa

SEQ ID NO: 551218 - DNA, 19 bp, Mus musculus
  siRNA target sequence for Pcdh18 (NM_130448.2,722-740).
gaactgttcgatagagttt

SEQ ID NO: 551219 - DNA, 19 bp, Mus musculus
  siRNA target sequence for Pcdh18 (NM_130448.2,725-743).
ctgttcgatagagtttgat

SEQ ID NO: 551220 - DNA, 19 bp, Mus musculus
  siRNA target sequence for Pcdh18 (NM_130448.2,727-745).
gttcgatagagtttgatgt

SEQ ID NO: 551221 - DNA, 19 bp, Mus musculus
  siRNA target sequence for Pcdh18 (NM_130448.2,810-828).
gacaattccccccaattct

SEQ ID NO: 551222 - DNA, 19 bp, Mus musculus
  siRNA target sequence for Pcdh18 (NM_130448.2,835-853).
ccgtcattcccattgagat

SEQ ID NO: 551223 - DNA, 19 bp, Mus musculus
  siRNA target sequence for Pcdh18 (NM_130448.2,836-854).
cgtcattcccattgagata

SEQ ID NO: 551224 - DNA, 19 bp, Mus musculus
  siRNA target sequence for Pcdh18 (NM_130448.2,837-855).
gtcattcccattgagatat

SEQ ID NO: 551225 - DNA, 19 bp, Mus musculus
  siRNA target sequence for Pcdh18 (NM_130448.2,935-953).
ctactcgctctctgctaat

SEQ ID NO: 551226 - DNA, 19 bp, Mus musculus
  siRNA target sequence for Pcdh18 (NM_130448.2,938-956).
ctcgctctctgctaatgat

SEQ ID NO: 551227 - DNA, 19 bp, Mus musculus
  siRNA target sequence for Pcdh18 (NM_130448.2,940-958).
cgctctctgctaatgatta

SEQ ID NO: 551228 - DNA, 19 bp, Mus musculus
  siRNA target sequence for Pcdh18 (NM_130448.2,941-959).
gctctctgctaatgattat

SEQ ID NO: 551229 - DNA, 19 bp, Mus musculus
  siRNA target sequence for Pcdh18 (NM_130448.2,942-960).
ctctctgctaatgattatt

SEQ ID NO: 551230 - DNA, 19 bp, Mus musculus
  siRNA target sequence for Pcdh18 (NM_130448.2,994-1012).
ccaagtacgctgaactcat

SEQ ID NO: 551231 - DNA, 19 bp, Mus musculus
  siRNA target sequence for Pcdh18 (NM_130448.2,995-1013).
caagtacgctgaactcata

SEQ ID NO: 551232 - DNA, 19 bp, Mus musculus
  siRNA target sequence for Pcdh18 (NM_130448.2,1150-1168).
cctttgagcagccttctta

SEQ ID NO: 551233 - DNA, 19 bp, Mus musculus
  siRNA target sequence for Pcdh18 (NM_130448.2,1155-1173).
gagcagccttcttacacaa

SEQ ID NO: 551234 - DNA, 19 bp, Mus musculus
  siRNA target sequence for Pcdh18 (NM_130448.2,1162-1180).
cttcttacacaatacaact

SEQ ID NO: 551235 - DNA, 19 bp, Mus musculus
  siRNA target sequence for Pcdh18 (NM_130448.2,1165-1183).
cttacacaatacaactctt

SEQ ID NO: 551236 - DNA, 19 bp, Mus musculus
  siRNA target sequence for Pcdh18 (NM_130448.2,1169-1187).
cacaatacaactcttagaa

SEQ ID NO: 551237 - DNA, 19 bp, Mus musculus
  siRNA target sequence for Pcdh18 (NM_130448.2,1205-1223).
cttgctccttgatctaaat

SEQ ID NO: 551238 - DNA, 19 bp, Mus musculus
  siRNA target sequence for Pcdh18 (NM_130448.2,1241-1259).
gggcgctaatgggagaatt

SEQ ID NO: 551239 - DNA, 19 bp, Mus musculus
  siRNA target sequence for Pcdh18 (NM_130448.2,1243-1261).
gcgctaatgggagaattgt

SEQ ID NO: 551240 - DNA, 19 bp, Mus musculus
  siRNA target sequence for Pcdh18 (NM_130448.2,1245-1263).
gctaatgggagaattgtgt

SEQ ID NO: 551241 - DNA, 19 bp, Mus musculus
  siRNA target sequence for Pcdh18 (NM_130448.2,1429-1447).
gcaaaattataattaaggt

SEQ ID NO: 551242 - DNA, 19 bp, Mus musculus
  siRNA target sequence for Pcdh18 (NM_130448.2,1471-1489).
ctgaaattagcataaatct

SEQ ID NO: 551243 - DNA, 19 bp, Mus musculus
  siRNA target sequence for Pcdh18 (NM_130448.2,1506-1524).
gaagaagtatcttatgtct

SEQ ID NO: 551244 - DNA, 19 bp, Mus musculus
  siRNA target sequence for Pcdh18 (NM_130448.2,1527-1545).
gaaggggatcccattgata

SEQ ID NO: 551245 - DNA, 19 bp, Mus musculus
  siRNA target sequence for Pcdh18 (NM_130448.2,1531-1549).
gggatcccattgatacatt

SEQ ID NO: 551246 - DNA, 19 bp, Mus musculus
  siRNA target sequence for Pcdh18 (NM_130448.2,1584-1602).
gggctgaatggggaaataa

SEQ ID NO: 551247 - DNA, 19 bp, Mus musculus
  siRNA target sequence for Pcdh18 (NM_130448.2,1585-1603).
ggctgaatggggaaataat

SEQ ID NO: 551248 - DNA, 19 bp, Mus musculus
  siRNA target sequence for Pcdh18 (NM_130448.2,1595-1613).
ggaaataatctgtaagctt

SEQ ID NO: 551249 - DNA, 19 bp, Mus musculus
  siRNA target sequence for Pcdh18 (NM_130448.2,1692-1710).
gaaaagagatctgagtata

SEQ ID NO: 551250 - DNA, 19 bp, Mus musculus
  siRNA target sequence for Pcdh18 (NM_130448.2,1706-1724).
gtatagtttgactgtgatt

SEQ ID NO: 551251 - DNA, 19 bp, Mus musculus
  siRNA target sequence for Pcdh18 (NM_130448.2,1771-1789).
ctgttcaaatcaatgacat

SEQ ID NO: 551252 - DNA, 19 bp, Mus musculus
  siRNA target sequence for Pcdh18 (NM_130448.2,1811-1829).
ccagaggagccgatatgaa

SEQ ID NO: 551253 - DNA, 19 bp, Mus musculus
  siRNA target sequence for Pcdh18 (NM_130448.2,1812-1830).
cagaggagccgatatgaat

SEQ ID NO: 551254 - DNA, 19 bp, Mus musculus
  siRNA target sequence for Pcdh18 (NM_130448.2,1814-1832).
gaggagccgatatgaattt

SEQ ID NO: 551255 - DNA, 19 bp, Mus musculus
  siRNA target sequence for Pcdh18 (NM_130448.2,1862-1880).
gtatatcaccacagttaca

SEQ ID NO: 551256 - DNA, 19 bp, Mus musculus
  siRNA target sequence for Pcdh18 (NM_130448.2,1958-1976).
caccacgtatgtaaccatt

SEQ ID NO: 551257 - DNA, 19 bp, Mus musculus
  siRNA target sequence for Pcdh18 (NM_130448.2,2002-2020).
ccctcaggatctttgatca

SEQ ID NO: 551258 - DNA, 19 bp, Mus musculus
  siRNA target sequence for Pcdh18 (NM_130448.2,2003-2021).
cctcaggatctttgatcat

SEQ ID NO: 551259 - DNA, 19 bp, Mus musculus
  siRNA target sequence for Pcdh18 (NM_130448.2,2006-2024).
caggatctttgatcatgaa

SEQ ID NO: 551260 - DNA, 19 bp, Mus musculus
  siRNA target sequence for Pcdh18 (NM_130448.2,2025-2043).
gaagtgagtcagatcactt

SEQ ID NO: 551261 - DNA, 19 bp, Mus musculus
  siRNA target sequence for Pcdh18 (NM_130448.2,2099-2117).
cgttgtgctgaccatcatt

SEQ ID NO: 551262 - DNA, 19 bp, Mus musculus
  siRNA target sequence for Pcdh18 (NM_130448.2,2150-2168).
gcctgcaatgcacaataat

SEQ ID NO: 551263 - DNA, 19 bp, Mus musculus
  siRNA target sequence for Pcdh18 (NM_130448.2,2151-2169).
cctgcaatgcacaataata

SEQ ID NO: 551264 - DNA, 19 bp, Mus musculus
  siRNA target sequence for Pcdh18 (NM_130448.2,2194-2212).
gagctgaaagtggttttca

SEQ ID NO: 551265 - DNA, 19 bp, Mus musculus
  siRNA target sequence for Pcdh18 (NM_130448.2,2205-2223).
ggttttcatgtcacaagaa

SEQ ID NO: 551266 - DNA, 19 bp, Mus musculus
  siRNA target sequence for Pcdh18 (NM_130448.2,2264-2282).
cagctgctccatagtatct

SEQ ID NO: 551267 - DNA, 19 bp, Mus musculus
  siRNA target sequence for Pcdh18 (NM_130448.2,2270-2288).
ctccatagtatctggtaat

SEQ ID NO: 551268 - DNA, 19 bp, Mus musculus
  siRNA target sequence for Pcdh18 (NM_130448.2,2314-2332).
ctaggtcatgtgacattca

SEQ ID NO: 551269 - DNA, 19 bp, Mus musculus
  siRNA target sequence for Pcdh18 (NM_130448.2,2320-2338).
catgtgacattcataccaa

SEQ ID NO: 551270 - DNA, 19 bp, Mus musculus
  siRNA target sequence for Pcdh18 (NM_130448.2,2339-2357).
cgtcagcatggaatccatt

SEQ ID NO: 551271 - DNA, 19 bp, Mus musculus
  siRNA target sequence for Pcdh18 (NM_130448.2,2367-2385).
gaatgggcactctcagtta

SEQ ID NO: 551272 - DNA, 19 bp, Mus musculus
  siRNA target sequence for Pcdh18 (NM_130448.2,2371-2389).
gggcactctcagttatcat

SEQ ID NO: 551273 - DNA, 19 bp, Mus musculus
  siRNA target sequence for Pcdh18 (NM_130448.2,2434-2452).
ggtgcatggtctttgacta

SEQ ID NO: 551274 - DNA, 19 bp, Mus musculus
  siRNA target sequence for Pcdh18 (NM_130448.2,2435-2453).
gtgcatggtctttgactat

SEQ ID NO: 551275 - DNA, 19 bp, Mus musculus
  siRNA target sequence for Pcdh18 (NM_130448.2,2504-2522).
ggatgtgtccatgatcata

SEQ ID NO: 551276 - DNA, 19 bp, Mus musculus
  siRNA target sequence for Pcdh18 (NM_130448.2,2505-2523).
gatgtgtccatgatcataa

SEQ ID NO: 551277 - DNA, 19 bp, Mus musculus
  siRNA target sequence for Pcdh18 (NM_130448.2,2641-2659).
cgtaccagcatcatcctaa

SEQ ID NO: 551278 - DNA, 19 bp, Mus musculus
  siRNA target sequence for Pcdh18 (NM_130448.2,2642-2660).
gtaccagcatcatcctaaa

SEQ ID NO: 551279 - DNA, 19 bp, Mus musculus
  siRNA target sequence for Pcdh18 (NM_130448.2,2664-2682).
ccatccaggcagattcaca

SEQ ID NO: 551280 - DNA, 19 bp, Mus musculus
  siRNA target sequence for Pcdh18 (NM_130448.2,2857-2875).
cagagaatttttcattaga

SEQ ID NO: 551281 - DNA, 19 bp, Mus musculus
  siRNA target sequence for Pcdh18 (NM_130448.2,2924-2942).
gcttcaccaggggcaatat

SEQ ID NO: 551282 - DNA, 19 bp, Mus musculus
  siRNA target sequence for Pcdh18 (NM_130448.2,2953-2971).
caagttttcgaggaaacaa

SEQ ID NO: 551283 - DNA, 19 bp, Mus musculus
  siRNA target sequence for Pcdh18 (NM_130448.2,2961-2979).
cgaggaaacaaatattcca

SEQ ID NO: 551284 - DNA, 19 bp, Mus musculus
  siRNA target sequence for Pcdh18 (NM_130448.2,2989-3007).
gatatgcccttcaagacat

SEQ ID NO: 551285 - DNA, 19 bp, Mus musculus
  siRNA target sequence for Pcdh18 (NM_130448.2,3078-3096).
cgcgattctccgatagaca

SEQ ID NO: 551286 - DNA, 19 bp, Mus musculus
  siRNA target sequence for Pcdh18 (NM_130448.2,3128-3146).
cctcacggacgggagaatt

SEQ ID NO: 551287 - DNA, 19 bp, Mus musculus
  siRNA target sequence for Pcdh18 (NM_130448.2,3131-3149).
cacggacgggagaattcca

SEQ ID NO: 551288 - DNA, 19 bp, Mus musculus
  siRNA target sequence for Pcdh18 (NM_130448.2,3150-3168).
gcagcaatgaggctatgta

SEQ ID NO: 551289 - DNA, 19 bp, Mus musculus
  siRNA target sequence for Pcdh18 (NM_130448.2,3402-3420).
ggagactctagcacatcat

SEQ ID NO: 551290 - DNA, 19 bp, Mus musculus
  siRNA target sequence for Pcdh18 (NM_130448.2,3459-3477).
ctccccgcatccctagata

SEQ ID NO: 551291 - DNA, 19 bp, Mus musculus
  siRNA target sequence for Pcdh18 (NM_130448.2,3463-3481).
ccgcatccctagatacctt

SEQ ID NO: 551292 - DNA, 19 bp, Mus musculus
  siRNA target sequence for Pcdh18 (NM_130448.2,3464-3482).
cgcatccctagataccttt

SEQ ID NO: 551293 - DNA, 19 bp, Mus musculus
  siRNA target sequence for Pcdh18 (NM_130448.2,3465-3483).
gcatccctagatacctttt

SEQ ID NO: 551294 - DNA, 19 bp, Mus musculus
  siRNA target sequence for Pcdh18 (NM_130448.2,3469-3487).
ccctagataccttttctga

SEQ ID NO: 551295 - DNA, 19 bp, Mus musculus
  siRNA target sequence for Pcdh18 (NM_130448.2,3581-3599).
ggcagccagcacacatttt

SEQ ID NO: 551296 - DNA, 19 bp, Mus musculus
  siRNA target sequence for Pcdh21 (NM_130878.1,90-108).
ggctgctgcgcatttacct

SEQ ID NO: 551297 - DNA, 19 bp, Mus musculus
  siRNA target sequence for Pcdh21 (NM_130878.1,91-109).
gctgctgcgcatttaccta

SEQ ID NO: 551298 - DNA, 19 bp, Mus musculus
  siRNA target sequence for Pcdh21 (NM_130878.1,125-143).
gcccctcacttctttgaca

SEQ ID NO: 551299 - DNA, 19 bp, Mus musculus
  siRNA target sequence for Pcdh21 (NM_130878.1,126-144).
cccctcacttctttgacaa

SEQ ID NO: 551300 - DNA, 19 bp, Mus musculus
  siRNA target sequence for Pcdh21 (NM_130878.1,127-145).
ccctcacttctttgacaat

SEQ ID NO: 551301 - DNA, 19 bp, Mus musculus
  siRNA target sequence for Pcdh21 (NM_130878.1,196-214).
cactcctgtaggttctcat

SEQ ID NO: 551302 - DNA, 19 bp, Mus musculus
  siRNA target sequence for Pcdh21 (NM_130878.1,481-499).
ccgggttccagagaacata

SEQ ID NO: 551303 - DNA, 19 bp, Mus musculus
  siRNA target sequence for Pcdh21 (NM_130878.1,504-522).
ctgggagcagcatctttaa

SEQ ID NO: 551304 - DNA, 19 bp, Mus musculus
  siRNA target sequence for Pcdh21 (NM_130878.1,796-814).
cgtgggtacaccctactat

SEQ ID NO: 551305 - DNA, 19 bp, Mus musculus
  siRNA target sequence for Pcdh21 (NM_130878.1,800-818).
ggtacaccctactatggtt

SEQ ID NO: 551306 - DNA, 19 bp, Mus musculus
  siRNA target sequence for Pcdh21 (NM_130878.1,801-819).
gtacaccctactatggtta

SEQ ID NO: 551307 - DNA, 19 bp, Mus musculus
  siRNA target sequence for Pcdh21 (NM_130878.1,856-874).
gacggtggttgccatagat

SEQ ID NO: 551308 - DNA, 19 bp, Mus musculus
  siRNA target sequence for Pcdh21 (NM_130878.1,901-919).
cctctacaggctcttgaat

SEQ ID NO: 551309 - DNA, 19 bp, Mus musculus
  siRNA target sequence for Pcdh21 (NM_130878.1,922-940).
gagtgacggaatctttgaa

SEQ ID NO: 551310 - DNA, 19 bp, Mus musculus
  siRNA target sequence for Pcdh21 (NM_130878.1,924-942).
gtgacggaatctttgaaat

SEQ ID NO: 551311 - DNA, 19 bp, Mus musculus
  siRNA target sequence for Pcdh21 (NM_130878.1,926-944).
gacggaatctttgaaatta

SEQ ID NO: 551312 - DNA, 19 bp, Mus musculus
  siRNA target sequence for Pcdh21 (NM_130878.1,991-1009).
ccgaagagaggtgtatgaa

SEQ ID NO: 551313 - DNA, 19 bp, Mus musculus
  siRNA target sequence for Pcdh21 (NM_130878.1,1083-1101).
ggatcgtggacctcaacaa

SEQ ID NO: 551314 - DNA, 19 bp, Mus musculus
  siRNA target sequence for Pcdh21 (NM_130878.1,1144-1162).
gtttgagctctctatgttt

SEQ ID NO: 551315 - DNA, 19 bp, Mus musculus
  siRNA target sequence for Pcdh21 (NM_130878.1,1227-1245).
gagccaatgccaaattcaa

SEQ ID NO: 551316 - DNA, 19 bp, Mus musculus
  siRNA target sequence for Pcdh21 (NM_130878.1,1308-1326).
cccaagtgaccatcatagt

SEQ ID NO: 551317 - DNA, 19 bp, Mus musculus
  siRNA target sequence for Pcdh21 (NM_130878.1,1474-1492).
cacctcgcactactacatt

SEQ ID NO: 551318 - DNA, 19 bp, Mus musculus
  siRNA target sequence for Pcdh21 (NM_130878.1,1571-1589).
ggcaaagtccactattcca

SEQ ID NO: 551319 - DNA, 19 bp, Mus musculus
  siRNA target sequence for Pcdh21 (NM_130878.1,1572-1590).
gcaaagtccactattccat

SEQ ID NO: 551320 - DNA, 19 bp, Mus musculus
  siRNA target sequence for Pcdh21 (NM_130878.1,1599-1617).
ccgggtcagacctgttctt

SEQ ID NO: 551321 - DNA, 19 bp, Mus musculus
  siRNA target sequence for Pcdh21 (NM_130878.1,1600-1618).
cgggtcagacctgttctta

SEQ ID NO: 551322 - DNA, 19 bp, Mus musculus
  siRNA target sequence for Pcdh21 (NM_130878.1,1601-1619).
gggtcagacctgttcttaa

SEQ ID NO: 551323 - DNA, 19 bp, Mus musculus
  siRNA target sequence for Pcdh21 (NM_130878.1,1602-1620).
ggtcagacctgttcttaat

SEQ ID NO: 551324 - DNA, 19 bp, Mus musculus
  siRNA target sequence for Pcdh21 (NM_130878.1,1626-1644).
catccactgggcttatcta

SEQ ID NO: 551325 - DNA, 19 bp, Mus musculus
  siRNA target sequence for Pcdh21 (NM_130878.1,1676-1694).
ggtacttcgaggtacaact

SEQ ID NO: 551326 - DNA, 19 bp, Mus musculus
  siRNA target sequence for Pcdh21 (NM_130878.1,1677-1695).
gtacttcgaggtacaactt

SEQ ID NO: 551327 - DNA, 19 bp, Mus musculus
  siRNA target sequence for Pcdh21 (NM_130878.1,1680-1698).
cttcgaggtacaactttta

SEQ ID NO: 551328 - DNA, 19 bp, Mus musculus
  siRNA target sequence for Pcdh21 (NM_130878.1,1821-1839).
ggaccccactgaaaattga

SEQ ID NO: 551329 - DNA, 19 bp, Mus musculus
  siRNA target sequence for Pcdh21 (NM_130878.1,1857-1875).
cagaggagcctaacaactt

SEQ ID NO: 551330 - DNA, 19 bp, Mus musculus
  siRNA target sequence for Pcdh21 (NM_130878.1,1866-1884).
ctaacaacttggtagacta

SEQ ID NO: 551331 - DNA, 19 bp, Mus musculus
  siRNA target sequence for Pcdh21 (NM_130878.1,1904-1922).
ccagtcaacgtgtttgaca

SEQ ID NO: 551332 - DNA, 19 bp, Mus musculus
  siRNA target sequence for Pcdh21 (NM_130878.1,1905-1923).
cagtcaacgtgtttgacat

SEQ ID NO: 551333 - DNA, 19 bp, Mus musculus
  siRNA target sequence for Pcdh21 (NM_130878.1,1928-1946).
gcacacacaggggaaatta

SEQ ID NO: 551334 - DNA, 19 bp, Mus musculus
  siRNA target sequence for Pcdh21 (NM_130878.1,1938-1956).
gggaaattaggctcaagaa

SEQ ID NO: 551335 - DNA, 19 bp, Mus musculus
  siRNA target sequence for Pcdh21 (NM_130878.1,1939-1957).
ggaaattaggctcaagaat

SEQ ID NO: 551336 - DNA, 19 bp, Mus musculus
  siRNA target sequence for Pcdh21 (NM_130878.1,1940-1958).
gaaattaggctcaagaatt

SEQ ID NO: 551337 - DNA, 19 bp, Mus musculus
  siRNA target sequence for Pcdh21 (NM_130878.1,1968-1986).
ccttggaggccctacacaa

SEQ ID NO: 551338 - DNA, 19 bp, Mus musculus
  siRNA target sequence for Pcdh21 (NM_130878.1,2039-2057).
cgaggctccccatctttca

SEQ ID NO: 551339 - DNA, 19 bp, Mus musculus
  siRNA target sequence for Pcdh21 (NM_130878.1,2061-2079).
caacagccttactcaagat

SEQ ID NO: 551340 - DNA, 19 bp, Mus musculus
  siRNA target sequence for Pcdh21 (NM_130878.1,2178-2196).
gtgtcatggcaattgttgt

SEQ ID NO: 551341 - DNA, 19 bp, Mus musculus
  siRNA target sequence for Pcdh21 (NM_130878.1,2226-2244).
ccttctggcgtaacaagaa

SEQ ID NO: 551342 - DNA, 19 bp, Mus musculus
  siRNA target sequence for Pcdh21 (NM_130878.1,2232-2250).
ggcgtaacaagaagtctaa

SEQ ID NO: 551343 - DNA, 19 bp, Mus musculus
  siRNA target sequence for Pcdh21 (NM_130878.1,2234-2252).
cgtaacaagaagtctaaca

SEQ ID NO: 551344 - DNA, 19 bp, Mus musculus
  siRNA target sequence for Pcdh21 (NM_130878.1,2298-2316).
ctccccacacagttcgaat

SEQ ID NO: 551345 - DNA, 19 bp, Mus musculus
  siRNA target sequence for Pcdh21 (NM_130878.1,2301-2319).
cccacacagttcgaataga

SEQ ID NO: 551346 - DNA, 19 bp, Mus musculus
  siRNA target sequence for Pcdh21 (NM_130878.1,2303-2321).
cacacagttcgaatagagt

SEQ ID NO: 551347 - DNA, 19 bp, Mus musculus
  siRNA target sequence for Pcdh21 (NM_130878.1,2312-2330).
cgaatagagtggctcaaat

SEQ ID NO: 551348 - DNA, 19 bp, Mus musculus
  siRNA target sequence for Pcdh21 (NM_130878.1,2313-2331).
gaatagagtggctcaaatt

SEQ ID NO: 551349 - DNA, 19 bp, Mus musculus
  siRNA target sequence for Pcdh21 (NM_130878.1,2341-2359).
caaggctgctaccaagttt

SEQ ID NO: 551350 - DNA, 19 bp, Mus musculus
  siRNA target sequence for Pcdh21 (NM_130878.1,2344-2362).
ggctgctaccaagtttata

SEQ ID NO: 551351 - DNA, 19 bp, Mus musculus
  siRNA target sequence for Pcdh21 (NM_130878.1,2352-2370).
ccaagtttatactcaaaga

SEQ ID NO: 551352 - DNA, 19 bp, Mus musculus
  siRNA target sequence for Pcdh21 (NM_130878.1,2615-2633).
gacaacaaggcctatatct

SEQ ID NO: 551353 - DNA, 19 bp, Mus musculus
  siRNA target sequence for Pcdh7 (NM_018764.1,1221-1239).
gagtatctgaagattgaca

SEQ ID NO: 551354 - DNA, 19 bp, Mus musculus
  siRNA target sequence for Pcdh7 (NM_018764.1,1293-1311).
ccccaatgtcagatgatct

SEQ ID NO: 551355 - DNA, 19 bp, Mus musculus
  siRNA target sequence for Pcdh7 (NM_018764.1,1502-1520).
ggccaccgatcgtgacttt

SEQ ID NO: 551356 - DNA, 19 bp, Mus musculus
  siRNA target sequence for Pcdh7 (NM_018764.1,1756-1774).
ctccagacggcgagaaaca

SEQ ID NO: 551357 - DNA, 19 bp, Mus musculus
  siRNA target sequence for Pcdh7 (NM_018764.1,1975-1993).
gcacccccatcctacagtt

SEQ ID NO: 551358 - DNA, 19 bp, Mus musculus
  siRNA target sequence for Pcdh7 (NM_018764.1,2026-2044).
gacagatcgagtatgtatt

SEQ ID NO: 551359 - DNA, 19 bp, Mus musculus
  siRNA target sequence for Pcdh7 (NM_018764.1,2142-2160).
cagttgagattcacagtaa

SEQ ID NO: 551360 - DNA, 19 bp, Mus musculus
  siRNA target sequence for Pcdh7 (NM_018764.1,2237-2255).
cgttccctccatcgaaatt

SEQ ID NO: 551361 - DNA, 19 bp, Mus musculus
  siRNA target sequence for Pcdh7 (NM_018764.1,2246-2264).
catcgaaattcgcaagata

SEQ ID NO: 551362 - DNA, 19 bp, Mus musculus
  siRNA target sequence for Pcdh7 (NM_018764.1,2266-2284).
ggcgcatcccacttaagga

SEQ ID NO: 551363 - DNA, 19 bp, Mus musculus
  siRNA target sequence for Pcdh7 (NM_018764.1,2293-2311).
ccaacgtagccgaagatgt

SEQ ID NO: 551364 - DNA, 19 bp, Mus musculus
  siRNA target sequence for Pcdh7 (NM_018764.1,2433-2451).
gaaggcgatcaaaacaaga

SEQ ID NO: 551365 - DNA, 19 bp, Mus musculus
  siRNA target sequence for Pcdh7 (NM_018764.1,2473-2491).
cagccccactagactatga

SEQ ID NO: 551366 - DNA, 19 bp, Mus musculus
  siRNA target sequence for Pcdh7 (NM_018764.1,2504-2522).
gttcaacgtggtcatagta

SEQ ID NO: 551367 - DNA, 19 bp, Mus musculus
  siRNA target sequence for Pcdh7 (NM_018764.1,2573-2591).
caaggtgggagacactaat

SEQ ID NO: 551368 - DNA, 19 bp, Mus musculus
  siRNA target sequence for Pcdh7 (NM_018764.1,2707-2725).
cagagatcgcctattcact

SEQ ID NO: 551369 - DNA, 19 bp, Mus musculus
  siRNA target sequence for Pcdh7 (NM_018764.1,2769-2787).
ggagacatcctggtcaata

SEQ ID NO: 551370 - DNA, 19 bp, Mus musculus
  siRNA target sequence for Pcdh7 (NM_018764.1,2809-2827).
ctgacaggtatgagtttaa

SEQ ID NO: 551371 - DNA, 19 bp, Mus musculus
  siRNA target sequence for Pcdh7 (NM_018764.1,2866-2884).
gcagcaccacggtgattgt

SEQ ID NO: 551372 - DNA, 19 bp, Mus musculus
  siRNA target sequence for Pcdh7 (NM_018764.1,2867-2885).
cagcaccacggtgattgta

SEQ ID NO: 551373 - DNA, 19 bp, Mus musculus
  siRNA target sequence for Pcdh7 (NM_018764.1,2869-2887).
gcaccacggtgattgtaca

SEQ ID NO: 551374 - DNA, 19 bp, Mus musculus
  siRNA target sequence for Pcdh7 (NM_018764.1,2883-2901).
gtacaggtggctgataaaa

SEQ ID NO: 551375 - DNA, 19 bp, Mus musculus
  siRNA target sequence for Pcdh7 (NM_018764.1,2904-2922).
gacaacgaccctaagttta

SEQ ID NO: 551376 - DNA, 19 bp, Mus musculus
  siRNA target sequence for Pcdh7 (NM_018764.1,2909-2927).
cgaccctaagtttatgcaa

SEQ ID NO: 551377 - DNA, 19 bp, Mus musculus
  siRNA target sequence for Pcdh7 (NM_018764.1,3044-3062).
gaacagtaacattttttct

SEQ ID NO: 551378 - DNA, 19 bp, Mus musculus
  siRNA target sequence for Pcdh7 (NM_018764.1,3049-3067).
gtaacattttttctattga

SEQ ID NO: 551379 - DNA, 19 bp, Mus musculus
  siRNA target sequence for Pcdh7 (NM_018764.1,3072-3090).
gacacagggaccatttact

SEQ ID NO: 551380 - DNA, 19 bp, Mus musculus
  siRNA target sequence for Pcdh7 (NM_018764.1,3100-3118).
cttttgacagggaacatca

SEQ ID NO: 551381 - DNA, 19 bp, Mus musculus
  siRNA target sequence for Pcdh7 (NM_018764.1,3114-3132).
catcagactacgtacactt

SEQ ID NO: 551382 - DNA, 19 bp, Mus musculus
  siRNA target sequence for Pcdh7 (NM_018764.1,3117-3135).
cagactacgtacactttca

SEQ ID NO: 551383 - DNA, 19 bp, Mus musculus
  siRNA target sequence for Pcdh7 (NM_018764.1,3119-3137).
gactacgtacactttcaga

SEQ ID NO: 551384 - DNA, 19 bp, Mus musculus
  siRNA target sequence for Pcdh7 (NM_018764.1,3213-3231).
gacaacgctcccacagtta

SEQ ID NO: 551385 - DNA, 19 bp, Mus musculus
  siRNA target sequence for Pcdh7 (NM_018764.1,3451-3469).
ggctggttgtgcaagtgaa

SEQ ID NO: 551386 - DNA, 19 bp, Mus musculus
  siRNA target sequence for Pcdh7 (NM_018764.1,3499-3517).
cgactttggtgcatgtatt

SEQ ID NO: 551387 - DNA, 19 bp, Mus musculus
  siRNA target sequence for Pcdh7 (NM_018764.1,3525-3543).
gaaagtgtttccaatgcaa

SEQ ID NO: 551388 - DNA, 19 bp, Mus musculus
  siRNA target sequence for Pcdh7 (NM_018764.1,3531-3549).
gtttccaatgcaactgtaa

SEQ ID NO: 551389 - DNA, 19 bp, Mus musculus
  siRNA target sequence for Pcdh7 (NM_018764.1,3535-3553).
ccaatgcaactgtaattga

SEQ ID NO: 551390 - DNA, 19 bp, Mus musculus
  siRNA target sequence for Pcdh7 (NM_018764.1,3556-3574).
ctcagatagtccgaagttt

SEQ ID NO: 551391 - DNA, 19 bp, Mus musculus
  siRNA target sequence for Pcdh7 (NM_018764.1,3560-3578).
gatagtccgaagtttgcat

SEQ ID NO: 551392 - DNA, 19 bp, Mus musculus
  siRNA target sequence for Pcdh7 (NM_018764.1,3630-3648).
cagagacttagtattgtca

SEQ ID NO: 551393 - DNA, 19 bp, Mus musculus
  siRNA target sequence for Pcdh7 (NM_018764.1,3632-3650).
gagacttagtattgtcatt

SEQ ID NO: 551394 - DNA, 19 bp, Mus musculus
  siRNA target sequence for Pcdh7 (NM_018764.1,3652-3670).
gggtggttgctggcattat

SEQ ID NO: 551395 - DNA, 19 bp, Mus musculus
  siRNA target sequence for Pcdh7 (NM_018764.1,3696-3714).
gtcatgatggcaagatact

SEQ ID NO: 551396 - DNA, 19 bp, Mus musculus
  siRNA target sequence for Pcdh7 (NM_018764.1,3737-3755).
ctacgaagctggcaaaaaa

SEQ ID NO: 551397 - DNA, 19 bp, Mus musculus
  siRNA target sequence for Pcdh7 (NM_018764.1,3860-3878).
cactgtcgaagcttctaaa

SEQ ID NO: 551398 - DNA, 19 bp, Mus musculus
  siRNA target sequence for Pcdh7 (NM_018764.1,3886-3904).
gacagaggtatgatagtgt

SEQ ID NO: 551399 - DNA, 19 bp, Mus musculus
  siRNA target sequence for Pcdh7 (NM_018764.1,3890-3908).
gaggtatgatagtgtcaat

SEQ ID NO: 551400 - DNA, 19 bp, Mus musculus
  siRNA target sequence for Pcdh7 (NM_018764.1,3892-3910).
ggtatgatagtgtcaatga

SEQ ID NO: 551401 - DNA, 19 bp, Mus musculus
  siRNA target sequence for Pcdh7 (NM_018764.1,3935-3953).
gggccgataccgatctgtt

SEQ ID NO: 551402 - DNA, 19 bp, Mus musculus
  siRNA target sequence for Pcdh7 (NM_018764.1,3936-3954).
ggccgataccgatctgtta

SEQ ID NO: 551403 - DNA, 19 bp, Mus musculus
  siRNA target sequence for Pcdh7 (NM_018764.1,3937-3955).
gccgataccgatctgttaa

SEQ ID NO: 551404 - DNA, 19 bp, Mus musculus
  siRNA target sequence for Pcdh7 (NM_018764.1,3938-3956).
ccgataccgatctgttaat

SEQ ID NO: 551405 - DNA, 19 bp, Mus musculus
  siRNA target sequence for Pcdh7 (NM_018764.1,4036-4054).
caccaactgcagggaaaaa

SEQ ID NO: 551406 - DNA, 19 bp, Mus musculus
  siRNA target sequence for Pcdh7 (NM_018764.1,4042-4060).
ctgcagggaaaaaacatca

SEQ ID NO: 551407 - DNA, 19 bp, Mus musculus
  siRNA target sequence for Pcdh7 (NM_018764.1,4147-4165).
gctgtcaaacaagtaacaa

SEQ ID NO: 551408 - DNA, 19 bp, Mus musculus
  siRNA target sequence for Pcdh7 (NM_018764.1,4150-4168).
gtcaaacaagtaacaagta

SEQ ID NO: 551409 - DNA, 19 bp, Mus musculus
  siRNA target sequence for Pcdh7 (NM_018764.1,4152-4170).
caaacaagtaacaagtaca

SEQ ID NO: 551410 - DNA, 19 bp, Mus musculus
  siRNA target sequence for Pcdh7 (NM_018764.1,4181-4199).
gcgtgtacatccatacatt

SEQ ID NO: 551411 - DNA, 19 bp, Mus musculus
  siRNA target sequence for Pcdh8 (NM_021543.1,151-169).
ccccttgcagctatttagt

SEQ ID NO: 551412 - DNA, 19 bp, Mus musculus
  siRNA target sequence for Pcdh8 (NM_021543.1,153-171).
ccttgcagctatttagtct

SEQ ID NO: 551413 - DNA, 19 bp, Mus musculus
  siRNA target sequence for Pcdh8 (NM_021543.1,266-284).
gacctgcacatgaaagtgt

SEQ ID NO: 551414 - DNA, 19 bp, Mus musculus
  siRNA target sequence for Pcdh8 (NM_021543.1,302-320).
cgcctgatgaagcaattca

SEQ ID NO: 551415 - DNA, 19 bp, Mus musculus
  siRNA target sequence for Pcdh8 (NM_021543.1,945-963).
ccaacggcgacgttgtgtt

SEQ ID NO: 551416 - DNA, 19 bp, Mus musculus
  siRNA target sequence for Pcdh8 (NM_021543.1,1122-1140).
ccacctgcaaggttatcgt

SEQ ID NO: 551417 - DNA, 19 bp, Mus musculus
  siRNA target sequence for Pcdh8 (NM_021543.1,1162-1180).
caacgctcctgaaatttct

SEQ ID NO: 551418 - DNA, 19 bp, Mus musculus
  siRNA target sequence for Pcdh8 (NM_021543.1,1166-1184).
gctcctgaaatttctatca

SEQ ID NO: 551419 - DNA, 19 bp, Mus musculus
  siRNA target sequence for Pcdh8 (NM_021543.1,1625-1643).
gtgtcggtccgcgaaaaca

SEQ ID NO: 551420 - DNA, 19 bp, Mus musculus
  siRNA target sequence for Pcdh8 (NM_021543.1,1798-1816).
ctacgctctccgtagtttt

SEQ ID NO: 551421 - DNA, 19 bp, Mus musculus
  siRNA target sequence for Pcdh8 (NM_021543.1,1913-1931).
ctggaccagaatgatcatt

SEQ ID NO: 551422 - DNA, 19 bp, Mus musculus
  siRNA target sequence for Pcdh8 (NM_021543.1,1959-1977).
ctaatggctccctagaagt

SEQ ID NO: 551423 - DNA, 19 bp, Mus musculus
  siRNA target sequence for Pcdh8 (NM_021543.1,2112-2130).
gccacacgggggagatcat

SEQ ID NO: 551424 - DNA, 19 bp, Mus musculus
  siRNA target sequence for Pcdh8 (NM_021543.1,2352-2370).
cgccgctgatcgtcatcat

SEQ ID NO: 551425 - DNA, 19 bp, Mus musculus
  siRNA target sequence for Pcdh8 (NM_021543.1,2795-2813).
gtctggaagggtcattcat

SEQ ID NO: 551426 - DNA, 19 bp, Mus musculus
  siRNA target sequence for Pcdh8 (NM_021543.1,2829-2847).
gccgagaagctgagaagtt

SEQ ID NO: 551427 - DNA, 19 bp, Mus musculus
  siRNA target sequence for Pcdh8 (NM_021543.1,2871-2889).
gagacagtgatttcaatga

SEQ ID NO: 551428 - DNA, 19 bp, Mus musculus
  siRNA target sequence for Pcdh8 (NM_021543.1,2905-2923).
cagcggggacgctttgaaa

SEQ ID NO: 551429 - DNA, 19 bp, Mus musculus
  siRNA target sequence for Pcdh8 (NM_021543.1,2908-2926).
cggggacgctttgaaaaaa

SEQ ID NO: 551430 - DNA, 19 bp, Mus musculus
  siRNA target sequence for Pcdh8 (NM_021543.1,2910-2928).
gggacgctttgaaaaaaga

SEQ ID NO: 551431 - DNA, 19 bp, Mus musculus
  siRNA target sequence for Pcdh8 (NM_021543.1,2980-2998).
gatcctaggtcattctgat

SEQ ID NO: 551432 - DNA, 19 bp, Mus musculus
  siRNA target sequence for Pcdh8 (NM_021543.1,3102-3120).
ctctgcgcagggacaatta

SEQ ID NO: 551433 - DNA, 19 bp, Mus musculus
  siRNA target sequence for Pcdh8 (NM_021543.1,3104-3122).
ctgcgcagggacaattact

SEQ ID NO: 551434 - DNA, 19 bp, Mus musculus
  siRNA target sequence for Pcdh8 (NM_021543.1,3106-3124).
gcgcagggacaattactat

SEQ ID NO: 551435 - DNA, 19 bp, Mus musculus
  siRNA target sequence for Pcdh8 (NM_021543.1,3108-3126).
gcagggacaattactatca

SEQ ID NO: 551436 - DNA, 19 bp, Mus musculus
  siRNA target sequence for Pcdh8 (NM_021543.1,3150-3168).
ggttgcagagcgtctatga

SEQ ID NO: 551437 - DNA, 19 bp, Mus musculus
  siRNA target sequence for Pcdh8 (NM_021543.1,3154-3172).
gcagagcgtctatgagaaa

SEQ ID NO: 551438 - DNA, 19 bp, Mus musculus
  siRNA target sequence for Pcdh8 (NM_021543.1,3159-3177).
gcgtctatgagaaagtact

SEQ ID NO: 551439 - DNA, 19 bp, Mus musculus
  siRNA target sequence for Pcdh8 (NM_021543.1,3176-3194).
ctgcatagagactatgaca

SEQ ID NO: 551440 - DNA, 19 bp, Mus musculus
  siRNA target sequence for Pcdh8 (NM_021543.1,3254-3272).
ggagtacccctctatgaat

SEQ ID NO: 551441 - DNA, 19 bp, Mus musculus
  siRNA target sequence for Pcdh8 (NM_021543.1,3297-3315).
ccccgaagaagggaatcaa

SEQ ID NO: 551442 - DNA, 19 bp, Mus musculus
  siRNA target sequence for Pcdh8 (NM_021543.1,3298-3316).
cccgaagaagggaatcaat

SEQ ID NO: 551443 - DNA, 19 bp, Mus musculus
  siRNA target sequence for Pcdh8 (NM_021543.1,3300-3318).
cgaagaagggaatcaatga

SEQ ID NO: 551444 - DNA, 19 bp, Mus musculus
  siRNA target sequence for Pcdh8 (NM_021543.1,3304-3322).
gaagggaatcaatgaaaat

SEQ ID NO: 551445 - DNA, 19 bp, Mus musculus
  siRNA target sequence for Pcdha6 (NM_007767.1,535-553).
gagcaaagaatgttaattt

SEQ ID NO: 551446 - DNA, 19 bp, Mus musculus
  siRNA target sequence for Pcdha6 (NM_007767.1,594-612).
cgcatcagatgctgatgtt

SEQ ID NO: 551447 - DNA, 19 bp, Mus musculus
  siRNA target sequence for Pcdha6 (NM_007767.1,604-622).
gctgatgttggattaaatt

SEQ ID NO: 551448 - DNA, 19 bp, Mus musculus
  siRNA target sequence for Pcdha6 (NM_007767.1,607-625).
gatgttggattaaattcta

SEQ ID NO: 551449 - DNA, 19 bp, Mus musculus
  siRNA target sequence for Pcdha6 (NM_007767.1,610-628).
gttggattaaattctatgt

SEQ ID NO: 551450 - DNA, 19 bp, Mus musculus
  siRNA target sequence for Pcdha6 (NM_007767.1,640-658).
ctcagtcccagcgaatact

SEQ ID NO: 551451 - DNA, 19 bp, Mus musculus
  siRNA target sequence for Pcdha6 (NM_007767.1,642-660).
cagtcccagcgaatacttt

SEQ ID NO: 551452 - DNA, 19 bp, Mus musculus
  siRNA target sequence for Pcdha6 (NM_007767.1,661-679).
gggctagatgtgaaatcaa

SEQ ID NO: 551453 - DNA, 19 bp, Mus musculus
  siRNA target sequence for Pcdha6 (NM_007767.1,683-701).
gcgatggcaacaaacaaat

SEQ ID NO: 551454 - DNA, 19 bp, Mus musculus
  siRNA target sequence for Pcdha6 (NM_007767.1,684-702).
cgatggcaacaaacaaatt

SEQ ID NO: 551455 - DNA, 19 bp, Mus musculus
  siRNA target sequence for Pcdha6 (NM_007767.1,860-878).
ctgagtatgaagtgagaat

SEQ ID NO: 551456 - DNA, 19 bp, Mus musculus
  siRNA target sequence for Pcdha6 (NM_007767.1,862-880).
gagtatgaagtgagaatct

SEQ ID NO: 551457 - DNA, 19 bp, Mus musculus
  siRNA target sequence for Pcdha6 (NM_007767.1,871-889).
gtgagaatcttggaaaact

SEQ ID NO: 551458 - DNA, 19 bp, Mus musculus
  siRNA target sequence for Pcdha6 (NM_007767.1,892-910).
gacaacggaacgacagtta

SEQ ID NO: 551459 - DNA, 19 bp, Mus musculus
  siRNA target sequence for Pcdha6 (NM_007767.1,894-912).
caacggaacgacagttatt

SEQ ID NO: 551460 - DNA, 19 bp, Mus musculus
  siRNA target sequence for Pcdha6 (NM_007767.1,897-915).
cggaacgacagttattaga

SEQ ID NO: 551461 - DNA, 19 bp, Mus musculus
  siRNA target sequence for Pcdha6 (NM_007767.1,899-917).
gaacgacagttattagact

SEQ ID NO: 551462 - DNA, 19 bp, Mus musculus
  siRNA target sequence for Pcdha6 (NM_007767.1,903-921).
gacagttattagactgaat

SEQ ID NO: 551463 - DNA, 19 bp, Mus musculus
  siRNA target sequence for Pcdha6 (NM_007767.1,907-925).
gttattagactgaatgctt

SEQ ID NO: 551464 - DNA, 19 bp, Mus musculus
  siRNA target sequence for Pcdha6 (NM_007767.1,933-951).
ggatgaagggacgaattca

SEQ ID NO: 551465 - DNA, 19 bp, Mus musculus
  siRNA target sequence for Pcdha6 (NM_007767.1,940-958).
gggacgaattcagcaattt

SEQ ID NO: 551466 - DNA, 19 bp, Mus musculus
  siRNA target sequence for Pcdha6 (NM_007767.1,944-962).
cgaattcagcaatttcgta

SEQ ID NO: 551467 - DNA, 19 bp, Mus musculus
  siRNA target sequence for Pcdha6 (NM_007767.1,950-968).
cagcaatttcgtactcttt

SEQ ID NO: 551468 - DNA, 19 bp, Mus musculus
  siRNA target sequence for Pcdha6 (NM_007767.1,952-970).
gcaatttcgtactctttta

SEQ ID NO: 551469 - DNA, 19 bp, Mus musculus
  siRNA target sequence for Pcdha6 (NM_007767.1,953-971).
caatttcgtactcttttaa

SEQ ID NO: 551470 - DNA, 19 bp, Mus musculus
  siRNA target sequence for Pcdha6 (NM_007767.1,959-977).
cgtactcttttaatagact

SEQ ID NO: 551471 - DNA, 19 bp, Mus musculus
  siRNA target sequence for Pcdha6 (NM_007767.1,992-1010).
ctcttgagcagtttagcat

SEQ ID NO: 551472 - DNA, 19 bp, Mus musculus
  siRNA target sequence for Pcdha6 (NM_007767.1,1018-1036).
gatacaggagaaatcataa

SEQ ID NO: 551473 - DNA, 19 bp, Mus musculus
  siRNA target sequence for Pcdha6 (NM_007767.1,1119-1137).
gggccattgcactgtttta

SEQ ID NO: 551474 - DNA, 19 bp, Mus musculus
  siRNA target sequence for Pcdha6 (NM_007767.1,1121-1139).
gccattgcactgttttagt

SEQ ID NO: 551475 - DNA, 19 bp, Mus musculus
  siRNA target sequence for Pcdha6 (NM_007767.1,1130-1148).
ctgttttagtgaaggtatt

SEQ ID NO: 551476 - DNA, 19 bp, Mus musculus
  siRNA target sequence for Pcdha6 (NM_007767.1,1165-1183).
gtgcctcagatcactttga

SEQ ID NO: 551477 - DNA, 19 bp, Mus musculus
  siRNA target sequence for Pcdha6 (NM_007767.1,1167-1185).
gcctcagatcactttgact

SEQ ID NO: 551478 - DNA, 19 bp, Mus musculus
  siRNA target sequence for Pcdha6 (NM_007767.1,1473-1491).
cgacaatgcgccttcattt

SEQ ID NO: 551479 - DNA, 19 bp, Mus musculus
  siRNA target sequence for Pcdha6 (NM_007767.1,1850-1868).
gtgtagtgagcgaacttgt

SEQ ID NO: 551480 - DNA, 19 bp, Mus musculus
  siRNA target sequence for Pcdha6 (NM_007767.1,1886-1904).
ctggccaggtggtcacaaa

SEQ ID NO: 551481 - DNA, 19 bp, Mus musculus
  siRNA target sequence for Pcdha6 (NM_007767.1,1975-1993).
ggaacgcggagtctgttta

SEQ ID NO: 551482 - DNA, 19 bp, Mus musculus
  siRNA target sequence for Pcdha6 (NM_007767.1,2054-2072).
cacgccatcgcctattagt

SEQ ID NO: 551483 - DNA, 19 bp, Mus musculus
  siRNA target sequence for Pcdha6 (NM_007767.1,2188-2206).
caggaagtttcgttagtga

SEQ ID NO: 551484 - DNA, 19 bp, Mus musculus
  siRNA target sequence for Pcdha6 (NM_007767.1,2190-2208).
ggaagtttcgttagtgaat

SEQ ID NO: 551485 - DNA, 19 bp, Mus musculus
  siRNA target sequence for Pcdha6 (NM_007767.1,2194-2212).
gtttcgttagtgaatgtca

SEQ ID NO: 551486 - DNA, 19 bp, Mus musculus
  siRNA target sequence for Pcdha6 (NM_007767.1,2257-2275).
gttctaaccctcatggtat

SEQ ID NO: 551487 - DNA, 19 bp, Mus musculus
  siRNA target sequence for Pcdha6 (NM_007767.1,2482-2500).
gatttgaacgacgatcatt

SEQ ID NO: 551488 - DNA, 19 bp, Mus musculus
  siRNA target sequence for Pcdhb1 (NM_053126.1,125-143).
gttcgtttgtggctaatgt

SEQ ID NO: 551489 - DNA, 19 bp, Mus musculus
  siRNA target sequence for Pcdhb1 (NM_053126.1,252-270).
gttcgtcaaagagaaacta

SEQ ID NO: 551490 - DNA, 19 bp, Mus musculus
  siRNA target sequence for Pcdhb1 (NM_053126.1,279-297).
ggcactttgtggcaaatct

SEQ ID NO: 551491 - DNA, 19 bp, Mus musculus
  siRNA target sequence for Pcdhb1 (NM_053126.1,300-318).
cccgtgtgtgctgcatttt

SEQ ID NO: 551492 - DNA, 19 bp, Mus musculus
  siRNA target sequence for Pcdhb1 (NM_053126.1,352-370).
cgggtggaagtcagagtat

SEQ ID NO: 551493 - DNA, 19 bp, Mus musculus
  siRNA target sequence for Pcdhb1 (NM_053126.1,388-406).
gcaccagtttttctaaaca

SEQ ID NO: 551494 - DNA, 19 bp, Mus musculus
  siRNA target sequence for Pcdhb1 (NM_053126.1,490-508).
ctcaacggtctccaaaact

SEQ ID NO: 551495 - DNA, 19 bp, Mus musculus
  siRNA target sequence for Pcdhb1 (NM_053126.1,514-532).
ctgagtgcaaacacctatt

SEQ ID NO: 551496 - DNA, 19 bp, Mus musculus
  siRNA target sequence for Pcdhb1 (NM_053126.1,554-572).
gaagccacggtcctaaata

SEQ ID NO: 551497 - DNA, 19 bp, Mus musculus
  siRNA target sequence for Pcdhb1 (NM_053126.1,558-576).
ccacggtcctaaatatgca

SEQ ID NO: 551498 - DNA, 19 bp, Mus musculus
  siRNA target sequence for Pcdhb1 (NM_053126.1,566-584).
ctaaatatgcagaacttgt

SEQ ID NO: 551499 - DNA, 19 bp, Mus musculus
  siRNA target sequence for Pcdhb1 (NM_053126.1,611-629).
cgcagcctgaagtcaactt

SEQ ID NO: 551500 - DNA, 19 bp, Mus musculus
  siRNA target sequence for Pcdhb1 (NM_053126.1,666-684).
gtctggcaccgccaacatt

SEQ ID NO: 551501 - DNA, 19 bp, Mus musculus
  siRNA target sequence for Pcdhb1 (NM_053126.1,825-843).
gcagataacttattcttta

SEQ ID NO: 551502 - DNA, 19 bp, Mus musculus
  siRNA target sequence for Pcdhb1 (NM_053126.1,860-878).
cagttctacggacatttct

SEQ ID NO: 551503 - DNA, 19 bp, Mus musculus
  siRNA target sequence for Pcdhb1 (NM_053126.1,916-934).
cccctagattttgaaatga

SEQ ID NO: 551504 - DNA, 19 bp, Mus musculus
  siRNA target sequence for Pcdhb1 (NM_053126.1,1129-1147).
cgagttggaggaaaaatca

SEQ ID NO: 551505 - DNA, 19 bp, Mus musculus
  siRNA target sequence for Pcdhb1 (NM_053126.1,1151-1169).
gtttcctcaaagaagattt

SEQ ID NO: 551506 - DNA, 19 bp, Mus musculus
  siRNA target sequence for Pcdhb1 (NM_053126.1,1171-1189).
ccttttgtagtcaaacata

SEQ ID NO: 551507 - DNA, 19 bp, Mus musculus
  siRNA target sequence for Pcdhb1 (NM_053126.1,1237-1255).
gaggatgtctccagctata

SEQ ID NO: 551508 - DNA, 19 bp, Mus musculus
  siRNA target sequence for Pcdhb1 (NM_053126.1,1239-1257).
ggatgtctccagctataat

SEQ ID NO: 551509 - DNA, 19 bp, Mus musculus
  siRNA target sequence for Pcdhb1 (NM_053126.1,1240-1258).
gatgtctccagctataata

SEQ ID NO: 551510 - DNA, 19 bp, Mus musculus
  siRNA target sequence for Pcdhb1 (NM_053126.1,1243-1261).
gtctccagctataatatca

SEQ ID NO: 551511 - DNA, 19 bp, Mus musculus
  siRNA target sequence for Pcdhb1 (NM_053126.1,1311-1329).
gattgaagtggtaatagct

SEQ ID NO: 551512 - DNA, 19 bp, Mus musculus
  siRNA target sequence for Pcdhb1 (NM_053126.1,1318-1336).
gtggtaatagctgatgtaa

SEQ ID NO: 551513 - DNA, 19 bp, Mus musculus
  siRNA target sequence for Pcdhb1 (NM_053126.1,1422-1440).
ccacgccgaggatctagat

SEQ ID NO: 551514 - DNA, 19 bp, Mus musculus
  siRNA target sequence for Pcdhb1 (NM_053126.1,1423-1441).
cacgccgaggatctagatt

SEQ ID NO: 551515 - DNA, 19 bp, Mus musculus
  siRNA target sequence for Pcdhb1 (NM_053126.1,1518-1536).
cataaactcagataatgga

SEQ ID NO: 551516 - DNA, 19 bp, Mus musculus
  siRNA target sequence for Pcdhb1 (NM_053126.1,1547-1565).
cactaagaaccatggatta

SEQ ID NO: 551517 - DNA, 19 bp, Mus musculus
  siRNA target sequence for Pcdhb1 (NM_053126.1,1560-1578).
ggattatgaggccattcaa

SEQ ID NO: 551518 - DNA, 19 bp, Mus musculus
  siRNA target sequence for Pcdhb1 (NM_053126.1,1570-1588).
gccattcaagactttcagt

SEQ ID NO: 551519 - DNA, 19 bp, Mus musculus
  siRNA target sequence for Pcdhb1 (NM_053126.1,1571-1589).
ccattcaagactttcagtt

SEQ ID NO: 551520 - DNA, 19 bp, Mus musculus
  siRNA target sequence for Pcdhb1 (NM_053126.1,1572-1590).
cattcaagactttcagttt

SEQ ID NO: 551521 - DNA, 19 bp, Mus musculus
  siRNA target sequence for Pcdhb1 (NM_053126.1,1623-1641).
gttgagtagcgaagttact

SEQ ID NO: 551522 - DNA, 19 bp, Mus musculus
  siRNA target sequence for Pcdhb1 (NM_053126.1,1807-1825).
ctttcataccatcttctta

SEQ ID NO: 551523 - DNA, 19 bp, Mus musculus
  siRNA target sequence for Pcdhb1 (NM_053126.1,1861-1879).
caaaatggggaaatacgta

SEQ ID NO: 551524 - DNA, 19 bp, Mus musculus
  siRNA target sequence for Pcdhb1 (NM_053126.1,1876-1894).
cgtacactgaggcagatat

SEQ ID NO: 551525 - DNA, 19 bp, Mus musculus
  siRNA target sequence for Pcdhb1 (NM_053126.1,1961-1979).
ccactacggcctcacttaa

SEQ ID NO: 551526 - DNA, 19 bp, Mus musculus
  siRNA target sequence for Pcdhb1 (NM_053126.1,2023-2041).
caggatccatccaagcatt

SEQ ID NO: 551527 - DNA, 19 bp, Mus musculus
  siRNA target sequence for Pcdhb1 (NM_053126.1,2026-2044).
gatccatccaagcattcta

SEQ ID NO: 551528 - DNA, 19 bp, Mus musculus
  siRNA target sequence for Pcdhb1 (NM_053126.1,2029-2047).
ccatccaagcattctagaa

SEQ ID NO: 551529 - DNA, 19 bp, Mus musculus
  siRNA target sequence for Pcdhb1 (NM_053126.1,2034-2052).
caagcattctagaaaggta

SEQ ID NO: 551530 - DNA, 19 bp, Mus musculus
  siRNA target sequence for Pcdhb1 (NM_053126.1,2254-2272).
ccttgtccatatgatatgt

SEQ ID NO: 551531 - DNA, 19 bp, Mus musculus
  siRNA target sequence for Pcdhb1 (NM_053126.1,2280-2298).
cacgggaactgggaatagt

SEQ ID NO: 551532 - DNA, 19 bp, Mus musculus
  siRNA target sequence for Pcdhb1 (NM_053126.1,2282-2300).
cgggaactgggaatagtga

SEQ ID NO: 551533 - DNA, 19 bp, Mus musculus
  siRNA target sequence for Pcdhb1 (NM_053126.1,2381-2399).
gtttgcctccaggttctaa

SEQ ID NO: 551534 - DNA, 19 bp, Mus musculus
  siRNA target sequence for Pcdhb1 (NM_053126.1,2385-2403).
gcctccaggttctaataaa

SEQ ID NO: 551535 - DNA, 19 bp, Mus musculus
  siRNA target sequence for Pcdhb1 (NM_053126.1,2435-2453).
ggataggagatgagtatat

SEQ ID NO: 551536 - DNA, 19 bp, Mus musculus
  siRNA target sequence for Pcdhb10 (NM_053135.1,30-48).
gaacaggcaagtccttttt

SEQ ID NO: 551537 - DNA, 19 bp, Mus musculus
  siRNA target sequence for Pcdhb10 (NM_053135.1,75-93).
gtcttgtgccgatgcaatt

SEQ ID NO: 551538 - DNA, 19 bp, Mus musculus
  siRNA target sequence for Pcdhb10 (NM_053135.1,80-98).
gtgccgatgcaattatata

SEQ ID NO: 551539 - DNA, 19 bp, Mus musculus
  siRNA target sequence for Pcdhb10 (NM_053135.1,82-100).
gccgatgcaattatatatt

SEQ ID NO: 551540 - DNA, 19 bp, Mus musculus
  siRNA target sequence for Pcdhb10 (NM_053135.1,84-102).
cgatgcaattatatattct

SEQ ID NO: 551541 - DNA, 19 bp, Mus musculus
  siRNA target sequence for Pcdhb10 (NM_053135.1,166-184).
gttggagagctggctatta

SEQ ID NO: 551542 - DNA, 19 bp, Mus musculus
  siRNA target sequence for Pcdhb10 (NM_053135.1,399-417).
ccctgaccggaaaatgcta

SEQ ID NO: 551543 - DNA, 19 bp, Mus musculus
  siRNA target sequence for Pcdhb10 (NM_053135.1,925-943).
gaggcaactccgtattata

SEQ ID NO: 551544 - DNA, 19 bp, Mus musculus
  siRNA target sequence for Pcdhb10 (NM_053135.1,928-946).
gcaactccgtattataaca

SEQ ID NO: 551545 - DNA, 19 bp, Mus musculus
  siRNA target sequence for Pcdhb10 (NM_053135.1,929-947).
caactccgtattataacat

SEQ ID NO: 551546 - DNA, 19 bp, Mus musculus
  siRNA target sequence for Pcdhb10 (NM_053135.1,935-953).
cgtattataacatggaaat

SEQ ID NO: 551547 - DNA, 19 bp, Mus musculus
  siRNA target sequence for Pcdhb10 (NM_053135.1,936-954).
gtattataacatggaaatt

SEQ ID NO: 551548 - DNA, 19 bp, Mus musculus
  siRNA target sequence for Pcdhb10 (NM_053135.1,1733-1751).
ctgcggaggcaggttactt

SEQ ID NO: 551549 - DNA, 19 bp, Mus musculus
  siRNA target sequence for Pcdhb11 (NM_053136.2,867-885).
ggtcaggaaccactatagt

SEQ ID NO: 551550 - DNA, 19 bp, Mus musculus
  siRNA target sequence for Pcdhb11 (NM_053136.2,868-886).
gtcaggaaccactatagtt

SEQ ID NO: 551551 - DNA, 19 bp, Mus musculus
  siRNA target sequence for Pcdhb11 (NM_053136.2,870-888).
caggaaccactatagttca

SEQ ID NO: 551552 - DNA, 19 bp, Mus musculus
  siRNA target sequence for Pcdhb11 (NM_053136.2,873-891).
gaaccactatagttcacat

SEQ ID NO: 551553 - DNA, 19 bp, Mus musculus
  siRNA target sequence for Pcdhb11 (NM_053136.2,969-987).
ccattgataccttagttgt

SEQ ID NO: 551554 - DNA, 19 bp, Mus musculus
  siRNA target sequence for Pcdhb11 (NM_053136.2,1130-1148).
ggaattagccattataaca

SEQ ID NO: 551555 - DNA, 19 bp, Mus musculus
  siRNA target sequence for Pcdhb11 (NM_053136.2,1131-1149).
gaattagccattataacat

SEQ ID NO: 551556 - DNA, 19 bp, Mus musculus
  siRNA target sequence for Pcdhb11 (NM_053136.2,2179-2197).
gctactggtgaatagtttt

SEQ ID NO: 551557 - DNA, 19 bp, Mus musculus
  siRNA target sequence for Pcdhb12 (NM_053137.1,903-921).
cgaggtaagtcaccattat

SEQ ID NO: 551558 - DNA, 19 bp, Mus musculus
  siRNA target sequence for Pcdhb12 (NM_053137.1,904-922).
gaggtaagtcaccattata

SEQ ID NO: 551559 - DNA, 19 bp, Mus musculus
  siRNA target sequence for Pcdhb12 (NM_053137.1,907-925).
gtaagtcaccattatacca

SEQ ID NO: 551560 - DNA, 19 bp, Mus musculus
  siRNA target sequence for Pcdhb12 (NM_053137.1,913-931).
caccattataccatagaaa

SEQ ID NO: 551561 - DNA, 19 bp, Mus musculus
  siRNA target sequence for Pcdhb12 (NM_053137.1,1685-1703).
caccctgtacggagctatt

SEQ ID NO: 551562 - DNA, 19 bp, Mus musculus
  siRNA target sequence for Pcdhb12 (NM_053137.1,2015-2033).
ccacgcaggacgattatga

SEQ ID NO: 551563 - DNA, 19 bp, Mus musculus
  siRNA target sequence for Pcdhb12 (NM_053137.1,2260-2278).
ggaacaaacgagttcaatt

SEQ ID NO: 551564 - DNA, 19 bp, Mus musculus
  siRNA target sequence for Pcdhb12 (NM_053137.1,2344-2362).
gtgcgcaatagcgttgaat

SEQ ID NO: 551565 - DNA, 19 bp, Mus musculus
  siRNA target sequence for Pcdhb12 (NM_053137.1,2347-2365).
cgcaatagcgttgaattct

SEQ ID NO: 551566 - DNA, 19 bp, Mus musculus
  siRNA target sequence for Pcdhb12 (NM_053137.1,2348-2366).
gcaatagcgttgaattcta

SEQ ID NO: 551567 - DNA, 19 bp, Mus musculus
  siRNA target sequence for Pcdhb12 (NM_053137.1,2349-2367).
caatagcgttgaattctat

SEQ ID NO: 551568 - DNA, 19 bp, Mus musculus
  siRNA target sequence for Pcdhb13 (NM_053138.1,23-41).
gcaagacaaggcaagtgat

SEQ ID NO: 551569 - DNA, 19 bp, Mus musculus
  siRNA target sequence for Pcdhb13 (NM_053138.1,72-90).
ggtgggttcaggatcaatt

SEQ ID NO: 551570 - DNA, 19 bp, Mus musculus
  siRNA target sequence for Pcdhb13 (NM_053138.1,76-94).
ggttcaggatcaattcagt

SEQ ID NO: 551571 - DNA, 19 bp, Mus musculus
  siRNA target sequence for Pcdhb13 (NM_053138.1,77-95).
gttcaggatcaattcagta

SEQ ID NO: 551572 - DNA, 19 bp, Mus musculus
  siRNA target sequence for Pcdhb13 (NM_053138.1,309-327).
gtctttccgggtgttacta

SEQ ID NO: 551573 - DNA, 19 bp, Mus musculus
  siRNA target sequence for Pcdhb13 (NM_053138.1,349-367).
caagctgaactgagagtta

SEQ ID NO: 551574 - DNA, 19 bp, Mus musculus
  siRNA target sequence for Pcdhb13 (NM_053138.1,433-451).
gctccacctggaaagatat

SEQ ID NO: 551575 - DNA, 19 bp, Mus musculus
  siRNA target sequence for Pcdhb13 (NM_053138.1,434-452).
ctccacctggaaagatatt

SEQ ID NO: 551576 - DNA, 19 bp, Mus musculus
  siRNA target sequence for Pcdhb13 (NM_053138.1,551-569).
gcagcgatggcaagaagtt

SEQ ID NO: 551577 - DNA, 19 bp, Mus musculus
  siRNA target sequence for Pcdhb13 (NM_053138.1,662-680).
ggtcagggaccacagaaat

SEQ ID NO: 551578 - DNA, 19 bp, Mus musculus
  siRNA target sequence for Pcdhb13 (NM_053138.1,708-726).
caacacgccggaatttgct

SEQ ID NO: 551579 - DNA, 19 bp, Mus musculus
  siRNA target sequence for Pcdhb13 (NM_053138.1,842-860).
ctcaagatgatgatgttaa

SEQ ID NO: 551580 - DNA, 19 bp, Mus musculus
  siRNA target sequence for Pcdhb13 (NM_053138.1,892-910).
gaaattcgactgaaaagca

SEQ ID NO: 551581 - DNA, 19 bp, Mus musculus
  siRNA target sequence for Pcdhb13 (NM_053138.1,903-921).
gaaaagcacgttggatttt

SEQ ID NO: 551582 - DNA, 19 bp, Mus musculus
  siRNA target sequence for Pcdhb13 (NM_053138.1,989-1007).
ccttagtcgtccaagtatt

SEQ ID NO: 551583 - DNA, 19 bp, Mus musculus
  siRNA target sequence for Pcdhb13 (NM_053138.1,1079-1097).
gtatcatagtggcagtatt

SEQ ID NO: 551584 - DNA, 19 bp, Mus musculus
  siRNA target sequence for Pcdhb13 (NM_053138.1,1112-1130).
cggactctggaaataacca

SEQ ID NO: 551585 - DNA, 19 bp, Mus musculus
  siRNA target sequence for Pcdhb13 (NM_053138.1,1121-1139).
gaaataaccagcaggttat

SEQ ID NO: 551586 - DNA, 19 bp, Mus musculus
  siRNA target sequence for Pcdhb13 (NM_053138.1,2047-2065).
gaagatgcgctcacgttat

SEQ ID NO: 551587 - DNA, 19 bp, Mus musculus
  siRNA target sequence for Pcdhb13 (NM_053138.1,2058-2076).
cacgttatacctggttatt

SEQ ID NO: 551588 - DNA, 19 bp, Mus musculus
  siRNA target sequence for Pcdhb13 (NM_053138.1,2359-2377).
cctactcttcggaatagct

SEQ ID NO: 551589 - DNA, 19 bp, Mus musculus
  siRNA target sequence for Pcdhb13 (NM_053138.1,2360-2378).
ctactcttcggaatagctt

SEQ ID NO: 551590 - DNA, 19 bp, Mus musculus
  siRNA target sequence for Pcdhb14 (NM_053139.2,224-242).
ggcaagtgaccgccattat

SEQ ID NO: 551591 - DNA, 19 bp, Mus musculus
  siRNA target sequence for Pcdhb14 (NM_053139.2,226-244).
caagtgaccgccattatct

SEQ ID NO: 551592 - DNA, 19 bp, Mus musculus
  siRNA target sequence for Pcdhb14 (NM_053139.2,233-251).
ccgccattatctttctgtt

SEQ ID NO: 551593 - DNA, 19 bp, Mus musculus
  siRNA target sequence for Pcdhb14 (NM_053139.2,234-252).
cgccattatctttctgtta

SEQ ID NO: 551594 - DNA, 19 bp, Mus musculus
  siRNA target sequence for Pcdhb14 (NM_053139.2,325-343).
gggaacctagcaaaagatt

SEQ ID NO: 551595 - DNA, 19 bp, Mus musculus
  siRNA target sequence for Pcdhb14 (NM_053139.2,483-501).
caccaatccgtgtatccta

SEQ ID NO: 551596 - DNA, 19 bp, Mus musculus
  siRNA target sequence for Pcdhb14 (NM_053139.2,524-542).
gtccagtgcaatttattca

SEQ ID NO: 551597 - DNA, 19 bp, Mus musculus
  siRNA target sequence for Pcdhb14 (NM_053139.2,635-653).
gtgccgtgtttccattgaa

SEQ ID NO: 551598 - DNA, 19 bp, Mus musculus
  siRNA target sequence for Pcdhb14 (NM_053139.2,638-656).
ccgtgtttccattgaaaat

SEQ ID NO: 551599 - DNA, 19 bp, Mus musculus
  siRNA target sequence for Pcdhb14 (NM_053139.2,676-694).
gggagcaacacggttcaaa

SEQ ID NO: 551600 - DNA, 19 bp, Mus musculus
  siRNA target sequence for Pcdhb14 (NM_053139.2,677-695).
ggagcaacacggttcaaaa

SEQ ID NO: 551601 - DNA, 19 bp, Mus musculus
  siRNA target sequence for Pcdhb14 (NM_053139.2,680-698).
gcaacacggttcaaaacta

SEQ ID NO: 551602 - DNA, 19 bp, Mus musculus
  siRNA target sequence for Pcdhb14 (NM_053139.2,681-699).
caacacggttcaaaactat

SEQ ID NO: 551603 - DNA, 19 bp, Mus musculus
  siRNA target sequence for Pcdhb14 (NM_053139.2,684-702).
cacggttcaaaactataca

SEQ ID NO: 551604 - DNA, 19 bp, Mus musculus
  siRNA target sequence for Pcdhb14 (NM_053139.2,686-704).
cggttcaaaactatacaat

SEQ ID NO: 551605 - DNA, 19 bp, Mus musculus
  siRNA target sequence for Pcdhb14 (NM_053139.2,707-725).
gcaccaacgcccatttcca

SEQ ID NO: 551606 - DNA, 19 bp, Mus musculus
  siRNA target sequence for Pcdhb14 (NM_053139.2,727-745).
cttctcacccgcaatcaca

SEQ ID NO: 551607 - DNA, 19 bp, Mus musculus
  siRNA target sequence for Pcdhb14 (NM_053139.2,744-762).
cagcgacggcaggaaatat

SEQ ID NO: 551608 - DNA, 19 bp, Mus musculus
  siRNA target sequence for Pcdhb14 (NM_053139.2,802-820).
caggcacagattagattaa

SEQ ID NO: 551609 - DNA, 19 bp, Mus musculus
  siRNA target sequence for Pcdhb14 (NM_053139.2,806-824).
cacagattagattaacact

SEQ ID NO: 551610 - DNA, 19 bp, Mus musculus
  siRNA target sequence for Pcdhb14 (NM_053139.2,860-878).
ggactacccaggttgtcat

SEQ ID NO: 551611 - DNA, 19 bp, Mus musculus
  siRNA target sequence for Pcdhb14 (NM_053139.2,975-993).
cactgtatccgcaagagat

SEQ ID NO: 551612 - DNA, 19 bp, Mus musculus
  siRNA target sequence for Pcdhb14 (NM_053139.2,977-995).
ctgtatccgcaagagattt

SEQ ID NO: 551613 - DNA, 19 bp, Mus musculus
  siRNA target sequence for Pcdhb14 (NM_053139.2,1028-1046).
cgctttttcaatcatcaaa

SEQ ID NO: 551614 - DNA, 19 bp, Mus musculus
  siRNA target sequence for Pcdhb14 (NM_053139.2,1029-1047).
gctttttcaatcatcaaat

SEQ ID NO: 551615 - DNA, 19 bp, Mus musculus
  siRNA target sequence for Pcdhb14 (NM_053139.2,1126-1144).
cagtcttaccgcatggaaa

SEQ ID NO: 551616 - DNA, 19 bp, Mus musculus
  siRNA target sequence for Pcdhb14 (NM_053139.2,1130-1148).
cttaccgcatggaaatcga

SEQ ID NO: 551617 - DNA, 19 bp, Mus musculus
  siRNA target sequence for Pcdhb14 (NM_053139.2,1175-1193).
gaaaatgcacagtagtaat

SEQ ID NO: 551618 - DNA, 19 bp, Mus musculus
  siRNA target sequence for Pcdhb14 (NM_053139.2,1228-1246).
ctcaccatgtcagtactta

SEQ ID NO: 551619 - DNA, 19 bp, Mus musculus
  siRNA target sequence for Pcdhb14 (NM_053139.2,1261-1279).
gaaaactcccctgaaacta

SEQ ID NO: 551620 - DNA, 19 bp, Mus musculus
  siRNA target sequence for Pcdhb14 (NM_053139.2,1284-1302).
cgcgatttttggaatttca

SEQ ID NO: 551621 - DNA, 19 bp, Mus musculus
  siRNA target sequence for Pcdhb14 (NM_053139.2,1365-1383).
cttgaaacctaatgaagaa

SEQ ID NO: 551622 - DNA, 19 bp, Mus musculus
  siRNA target sequence for Pcdhb14 (NM_053139.2,1373-1391).
ctaatgaagaaaacttcta

SEQ ID NO: 551623 - DNA, 19 bp, Mus musculus
  siRNA target sequence for Pcdhb14 (NM_053139.2,1392-1410).
cacgttggtaactgaaaga

SEQ ID NO: 551624 - DNA, 19 bp, Mus musculus
  siRNA target sequence for Pcdhb14 (NM_053139.2,2228-2246).
ctgcacaagaagatgtact

SEQ ID NO: 551625 - DNA, 19 bp, Mus musculus
  siRNA target sequence for Pcdhb14 (NM_053139.2,2514-2532).
gaatgaaggaggttacaga

SEQ ID NO: 551626 - DNA, 19 bp, Mus musculus
  siRNA target sequence for Pcdhb14 (NM_053139.2,2535-2553).
cacggaggagaattccaat

SEQ ID NO: 551627 - DNA, 19 bp, Mus musculus
  siRNA target sequence for Pcdhb14 (NM_053139.2,2537-2555).
cggaggagaattccaattt

SEQ ID NO: 551628 - DNA, 19 bp, Mus musculus
  siRNA target sequence for Pcdhb15 (NM_053140.2,208-226).
ggcaagtactgtttcttta

SEQ ID NO: 551629 - DNA, 19 bp, Mus musculus
  siRNA target sequence for Pcdhb15 (NM_053140.2,253-271).
gcgccgaacagcttcagta

SEQ ID NO: 551630 - DNA, 19 bp, Mus musculus
  siRNA target sequence for Pcdhb15 (NM_053140.2,254-272).
cgccgaacagcttcagtat

SEQ ID NO: 551631 - DNA, 19 bp, Mus musculus
  siRNA target sequence for Pcdhb15 (NM_053140.2,255-273).
gccgaacagcttcagtatt

SEQ ID NO: 551632 - DNA, 19 bp, Mus musculus
  siRNA target sequence for Pcdhb15 (NM_053140.2,257-275).
cgaacagcttcagtattct

SEQ ID NO: 551633 - DNA, 19 bp, Mus musculus
  siRNA target sequence for Pcdhb15 (NM_053140.2,299-317).
gactttcctagccaatcta

SEQ ID NO: 551634 - DNA, 19 bp, Mus musculus
  siRNA target sequence for Pcdhb15 (NM_053140.2,359-377).
ggaagctagaattgtttca

SEQ ID NO: 551635 - DNA, 19 bp, Mus musculus
  siRNA target sequence for Pcdhb15 (NM_053140.2,378-396).
gaccagaacacacgatttt

SEQ ID NO: 551636 - DNA, 19 bp, Mus musculus
  siRNA target sequence for Pcdhb15 (NM_053140.2,406-424).
gtccgcttactggagaatt

SEQ ID NO: 551637 - DNA, 19 bp, Mus musculus
  siRNA target sequence for Pcdhb15 (NM_053140.2,408-426).
ccgcttactggagaattaa

SEQ ID NO: 551638 - DNA, 19 bp, Mus musculus
  siRNA target sequence for Pcdhb15 (NM_053140.2,525-543).
cgcgctgcactacatatca

SEQ ID NO: 551639 - DNA, 19 bp, Mus musculus
  siRNA target sequence for Pcdhb15 (NM_053140.2,526-544).
gcgctgcactacatatcaa

SEQ ID NO: 551640 - DNA, 19 bp, Mus musculus
  siRNA target sequence for Pcdhb15 (NM_053140.2,527-545).
cgctgcactacatatcaaa

SEQ ID NO: 551641 - DNA, 19 bp, Mus musculus
  siRNA target sequence for Pcdhb15 (NM_053140.2,532-550).
cactacatatcaaagatat

SEQ ID NO: 551642 - DNA, 19 bp, Mus musculus
  siRNA target sequence for Pcdhb15 (NM_053140.2,534-552).
ctacatatcaaagatataa

SEQ ID NO: 551643 - DNA, 19 bp, Mus musculus
  siRNA target sequence for Pcdhb15 (NM_053140.2,616-634).
caggggcgacgcttctctt

SEQ ID NO: 551644 - DNA, 19 bp, Mus musculus
  siRNA target sequence for Pcdhb15 (NM_053140.2,621-639).
gcgacgcttctcttggaaa

SEQ ID NO: 551645 - DNA, 19 bp, Mus musculus
  siRNA target sequence for Pcdhb15 (NM_053140.2,661-679).
gaacgaacagcctgagtaa

SEQ ID NO: 551646 - DNA, 19 bp, Mus musculus
  siRNA target sequence for Pcdhb15 (NM_053140.2,664-682).
cgaacagcctgagtaacta

SEQ ID NO: 551647 - DNA, 19 bp, Mus musculus
  siRNA target sequence for Pcdhb15 (NM_053140.2,685-703).
ccatcagccccaatgatta

SEQ ID NO: 551648 - DNA, 19 bp, Mus musculus
  siRNA target sequence for Pcdhb15 (NM_053140.2,686-704).
catcagccccaatgattat

SEQ ID NO: 551649 - DNA, 19 bp, Mus musculus
  siRNA target sequence for Pcdhb15 (NM_053140.2,691-709).
gccccaatgattatttcca

SEQ ID NO: 551650 - DNA, 19 bp, Mus musculus
  siRNA target sequence for Pcdhb15 (NM_053140.2,692-710).
ccccaatgattatttccat

SEQ ID NO: 551651 - DNA, 19 bp, Mus musculus
  siRNA target sequence for Pcdhb15 (NM_053140.2,727-745).
gaggggaggggcctatcat

SEQ ID NO: 551652 - DNA, 19 bp, Mus musculus
  siRNA target sequence for Pcdhb15 (NM_053140.2,748-766).
ctgaactggtactggataa

SEQ ID NO: 551653 - DNA, 19 bp, Mus musculus
  siRNA target sequence for Pcdhb15 (NM_053140.2,750-768).
gaactggtactggataaaa

SEQ ID NO: 551654 - DNA, 19 bp, Mus musculus
  siRNA target sequence for Pcdhb15 (NM_053140.2,783-801).
gaaataccagaattcactt

SEQ ID NO: 551655 - DNA, 19 bp, Mus musculus
  siRNA target sequence for Pcdhb15 (NM_053140.2,844-862).
ggacagccttggtgcaaat

SEQ ID NO: 551656 - DNA, 19 bp, Mus musculus
  siRNA target sequence for Pcdhb15 (NM_053140.2,863-881).
cttggtgttggacataaat

SEQ ID NO: 551657 - DNA, 19 bp, Mus musculus
  siRNA target sequence for Pcdhb15 (NM_053140.2,894-912).
caattcgtgcagtcacttt

SEQ ID NO: 551658 - DNA, 19 bp, Mus musculus
  siRNA target sequence for Pcdhb15 (NM_053140.2,899-917).
cgtgcagtcactttacaaa

SEQ ID NO: 551659 - DNA, 19 bp, Mus musculus
  siRNA target sequence for Pcdhb15 (NM_053140.2,902-920).
gcagtcactttacaaagtt

SEQ ID NO: 551660 - DNA, 19 bp, Mus musculus
  siRNA target sequence for Pcdhb15 (NM_053140.2,985-1003).
caggaagttacggacaaat

SEQ ID NO: 551661 - DNA, 19 bp, Mus musculus
  siRNA target sequence for Pcdhb15 (NM_053140.2,988-1006).
gaagttacggacaaataga

SEQ ID NO: 551662 - DNA, 19 bp, Mus musculus
  siRNA target sequence for Pcdhb15 (NM_053140.2,991-1009).
gttacggacaaatagacta

SEQ ID NO: 551663 - DNA, 19 bp, Mus musculus
  siRNA target sequence for Pcdhb15 (NM_053140.2,996-1014).
ggacaaatagactacacat

SEQ ID NO: 551664 - DNA, 19 bp, Mus musculus
  siRNA target sequence for Pcdhb15 (NM_053140.2,997-1015).
gacaaatagactacacatt

SEQ ID NO: 551665 - DNA, 19 bp, Mus musculus
  siRNA target sequence for Pcdhb15 (NM_053140.2,1040-1058).
ccaaacgtttcaaatcaat

SEQ ID NO: 551666 - DNA, 19 bp, Mus musculus
  siRNA target sequence for Pcdhb15 (NM_053140.2,1060-1078).
ctacatctggcgaacttta

SEQ ID NO: 551667 - DNA, 19 bp, Mus musculus
  siRNA target sequence for Pcdhb15 (NM_053140.2,1063-1081).
catctggcgaactttatct

SEQ ID NO: 551668 - DNA, 19 bp, Mus musculus
  siRNA target sequence for Pcdhb15 (NM_053140.2,1066-1084).
ctggcgaactttatcttaa

SEQ ID NO: 551669 - DNA, 19 bp, Mus musculus
  siRNA target sequence for Pcdhb15 (NM_053140.2,1094-1112).
caactatgaagcgattcaa

SEQ ID NO: 551670 - DNA, 19 bp, Mus musculus
  siRNA target sequence for Pcdhb15 (NM_053140.2,1097-1115).
ctatgaagcgattcaaact

SEQ ID NO: 551671 - DNA, 19 bp, Mus musculus
  siRNA target sequence for Pcdhb15 (NM_053140.2,1104-1122).
gcgattcaaacttattcga

SEQ ID NO: 551672 - DNA, 19 bp, Mus musculus
  siRNA target sequence for Pcdhb15 (NM_053140.2,1105-1123).
cgattcaaacttattcgat

SEQ ID NO: 551673 - DNA, 19 bp, Mus musculus
  siRNA target sequence for Pcdhb15 (NM_053140.2,1106-1124).
gattcaaacttattcgata

SEQ ID NO: 551674 - DNA, 19 bp, Mus musculus
  siRNA target sequence for Pcdhb15 (NM_053140.2,1110-1128).
caaacttattcgataacta

SEQ ID NO: 551675 - DNA, 19 bp, Mus musculus
  siRNA target sequence for Pcdhb15 (NM_053140.2,1215-1233).
ctcttgtcgtcacttaata

SEQ ID NO: 551676 - DNA, 19 bp, Mus musculus
  siRNA target sequence for Pcdhb15 (NM_053140.2,1261-1279).
cagttgttgctgtatttaa

SEQ ID NO: 551677 - DNA, 19 bp, Mus musculus
  siRNA target sequence for Pcdhb15 (NM_053140.2,1319-1337).
gtgctccattgcgaatgat

SEQ ID NO: 551678 - DNA, 19 bp, Mus musculus
  siRNA target sequence for Pcdhb15 (NM_053140.2,1395-1413).
cctttagatagagaatcaa

SEQ ID NO: 551679 - DNA, 19 bp, Mus musculus
  siRNA target sequence for Pcdhb15 (NM_053140.2,1405-1423).
gagaatcaaacactgaata

SEQ ID NO: 551680 - DNA, 19 bp, Mus musculus
  siRNA target sequence for Pcdhb15 (NM_053140.2,1407-1425).
gaatcaaacactgaataca

SEQ ID NO: 551681 - DNA, 19 bp, Mus musculus
  siRNA target sequence for Pcdhb15 (NM_053140.2,2071-2089).
gagatgtgcccaagcataa

SEQ ID NO: 551682 - DNA, 19 bp, Mus musculus
  siRNA target sequence for Pcdhb15 (NM_053140.2,2445-2463).
ggaggatcagggataacca

SEQ ID NO: 551683 - DNA, 19 bp, Mus musculus
  siRNA target sequence for Pcdhb15 (NM_053140.2,2454-2472).
gggataaccagtgaattta

SEQ ID NO: 551684 - DNA, 19 bp, Mus musculus
  siRNA target sequence for Pcdhb17 (NM_053142.2,332-350).
cgcagggctcggatcattt

SEQ ID NO: 551685 - DNA, 19 bp, Mus musculus
  siRNA target sequence for Pcdhb17 (NM_053142.2,341-359).
cggatcatttcccaagaaa

SEQ ID NO: 551686 - DNA, 19 bp, Mus musculus
  siRNA target sequence for Pcdhb17 (NM_053142.2,442-460).
cattgagccgtgtgttcta

SEQ ID NO: 551687 - DNA, 19 bp, Mus musculus
  siRNA target sequence for Pcdhb17 (NM_053142.2,517-535).
gatggacataaatgactat

SEQ ID NO: 551688 - DNA, 19 bp, Mus musculus
  siRNA target sequence for Pcdhb17 (NM_053142.2,562-580).
gatactgagaatactagaa

SEQ ID NO: 551689 - DNA, 19 bp, Mus musculus
  siRNA target sequence for Pcdhb17 (NM_053142.2,585-603).
gtgctctgggagatacatt

SEQ ID NO: 551690 - DNA, 19 bp, Mus musculus
  siRNA target sequence for Pcdhb17 (NM_053142.2,590-608).
ctgggagatacatttcctt

SEQ ID NO: 551691 - DNA, 19 bp, Mus musculus
  siRNA target sequence for Pcdhb17 (NM_053142.2,592-610).
gggagatacatttccttta

SEQ ID NO: 551692 - DNA, 19 bp, Mus musculus
  siRNA target sequence for Pcdhb17 (NM_053142.2,627-645).
cagacgtagcaatcaacaa

SEQ ID NO: 551693 - DNA, 19 bp, Mus musculus
  siRNA target sequence for Pcdhb17 (NM_053142.2,629-647).
gacgtagcaatcaacaata

SEQ ID NO: 551694 - DNA, 19 bp, Mus musculus
  siRNA target sequence for Pcdhb17 (NM_053142.2,819-837).
ggacggcacaggttctcat

SEQ ID NO: 551695 - DNA, 19 bp, Mus musculus
  siRNA target sequence for Pcdhb17 (NM_053142.2,820-838).
gacggcacaggttctcatt

SEQ ID NO: 551696 - DNA, 19 bp, Mus musculus
  siRNA target sequence for Pcdhb17 (NM_053142.2,856-874).
cgataatgcacccaagttt

SEQ ID NO: 551697 - DNA, 19 bp, Mus musculus
  siRNA target sequence for Pcdhb17 (NM_053142.2,882-900).
caacataccgagtgcaaat

SEQ ID NO: 551698 - DNA, 19 bp, Mus musculus
  siRNA target sequence for Pcdhb17 (NM_053142.2,1044-1062).
gggagattcggctacgaaa

SEQ ID NO: 551699 - DNA, 19 bp, Mus musculus
  siRNA target sequence for Pcdhb17 (NM_053142.2,1045-1063).
ggagattcggctacgaaaa

SEQ ID NO: 551700 - DNA, 19 bp, Mus musculus
  siRNA target sequence for Pcdhb17 (NM_053142.2,1274-1292).
gcgaacaatggaaaaatga

SEQ ID NO: 551701 - DNA, 19 bp, Mus musculus
  siRNA target sequence for Pcdhb17 (NM_053142.2,1275-1293).
cgaacaatggaaaaatgat

SEQ ID NO: 551702 - DNA, 19 bp, Mus musculus
  siRNA target sequence for Pcdhb17 (NM_053142.2,1332-1350).
cttcagggaagaactttta

SEQ ID NO: 551703 - DNA, 19 bp, Mus musculus
  siRNA target sequence for Pcdhb17 (NM_053142.2,1370-1388).
gcacttgacagggaagaaa

SEQ ID NO: 551704 - DNA, 19 bp, Mus musculus
  siRNA target sequence for Pcdhb17 (NM_053142.2,2200-2218).
ggacgctctaacactgtat

SEQ ID NO: 551705 - DNA, 19 bp, Mus musculus
  siRNA target sequence for Pcdhb17 (NM_053142.2,2514-2532).
cctcactccacaatagttt

SEQ ID NO: 551706 - DNA, 19 bp, Mus musculus
  siRNA target sequence for Pcdhb17 (NM_053142.2,2515-2533).
ctcactccacaatagtttt

SEQ ID NO: 551707 - DNA, 19 bp, Mus musculus
  siRNA target sequence for Pcdhb18 (NM_053143.1,188-206).
gaactagggtggtttgtga

SEQ ID NO: 551708 - DNA, 19 bp, Mus musculus
  siRNA target sequence for Pcdhb18 (NM_053143.1,296-314).
cagagccctgcatgcttta

SEQ ID NO: 551709 - DNA, 19 bp, Mus musculus
  siRNA target sequence for Pcdhb18 (NM_053143.1,302-320).
cctgcatgctttatttcca

SEQ ID NO: 551710 - DNA, 19 bp, Mus musculus
  siRNA target sequence for Pcdhb18 (NM_053143.1,330-348).
ggataacccctttcagatt

SEQ ID NO: 551711 - DNA, 19 bp, Mus musculus
  siRNA target sequence for Pcdhb18 (NM_053143.1,331-349).
gataacccctttcagattt

SEQ ID NO: 551712 - DNA, 19 bp, Mus musculus
  siRNA target sequence for Pcdhb18 (NM_053143.1,351-369).
ccgggctgagctgagaatt

SEQ ID NO: 551713 - DNA, 19 bp, Mus musculus
  siRNA target sequence for Pcdhb18 (NM_053143.1,400-418).
caggacaaaaagatgattt

SEQ ID NO: 551714 - DNA, 19 bp, Mus musculus
  siRNA target sequence for Pcdhb18 (NM_053143.1,402-420).
ggacaaaaagatgatttta

SEQ ID NO: 551715 - DNA, 19 bp, Mus musculus
  siRNA target sequence for Pcdhb18 (NM_053143.1,403-421).
gacaaaaagatgattttaa

SEQ ID NO: 551716 - DNA, 19 bp, Mus musculus
  siRNA target sequence for Pcdhb18 (NM_053143.1,444-462).
gggaacaacatttcgatta

SEQ ID NO: 551717 - DNA, 19 bp, Mus musculus
  siRNA target sequence for Pcdhb18 (NM_053143.1,446-464).
gaacaacatttcgattaga

SEQ ID NO: 551718 - DNA, 19 bp, Mus musculus
  siRNA target sequence for Pcdhb18 (NM_053143.1,487-505).
ggacggaatggcatccaaa

SEQ ID NO: 551719 - DNA, 19 bp, Mus musculus
  siRNA target sequence for Pcdhb18 (NM_053143.1,488-506).
gacggaatggcatccaaaa

SEQ ID NO: 551720 - DNA, 19 bp, Mus musculus
  siRNA target sequence for Pcdhb18 (NM_053143.1,490-508).
cggaatggcatccaaaact

SEQ ID NO: 551721 - DNA, 19 bp, Mus musculus
  siRNA target sequence for Pcdhb18 (NM_053143.1,513-531).
catcagccccaacactttt

SEQ ID NO: 551722 - DNA, 19 bp, Mus musculus
  siRNA target sequence for Pcdhb18 (NM_053143.1,552-570).
cagcgatgaaggaatgata

SEQ ID NO: 551723 - DNA, 19 bp, Mus musculus
  siRNA target sequence for Pcdhb18 (NM_053143.1,554-572).
gcgatgaaggaatgatata

SEQ ID NO: 551724 - DNA, 19 bp, Mus musculus
  siRNA target sequence for Pcdhb18 (NM_053143.1,672-690).
gacagccactatacatatt

SEQ ID NO: 551725 - DNA, 19 bp, Mus musculus
  siRNA target sequence for Pcdhb18 (NM_053143.1,719-737).
cacagtttccccaagaact

SEQ ID NO: 551726 - DNA, 19 bp, Mus musculus
  siRNA target sequence for Pcdhb18 (NM_053143.1,865-883).
cgagcaacctttcaaatca

SEQ ID NO: 551727 - DNA, 19 bp, Mus musculus
  siRNA target sequence for Pcdhb18 (NM_053143.1,886-904).
cctttctctggggaaatca

SEQ ID NO: 551728 - DNA, 19 bp, Mus musculus
  siRNA target sequence for Pcdhb18 (NM_053143.1,913-931).
gccttgcttgactatgagt

SEQ ID NO: 551729 - DNA, 19 bp, Mus musculus
  siRNA target sequence for Pcdhb18 (NM_053143.1,914-932).
ccttgcttgactatgagtt

SEQ ID NO: 551730 - DNA, 19 bp, Mus musculus
  siRNA target sequence for Pcdhb18 (NM_053143.1,918-936).
gcttgactatgagttcata

SEQ ID NO: 551731 - DNA, 19 bp, Mus musculus
  siRNA target sequence for Pcdhb18 (NM_053143.1,922-940).
gactatgagttcataaagt

SEQ ID NO: 551732 - DNA, 19 bp, Mus musculus
  siRNA target sequence for Pcdhb18 (NM_053143.1,933-951).
cataaagtcctataagtta

SEQ ID NO: 551733 - DNA, 19 bp, Mus musculus
  siRNA target sequence for Pcdhb18 (NM_053143.1,976-994).
ggcctttcggcgagatgta

SEQ ID NO: 551734 - DNA, 19 bp, Mus musculus
  siRNA target sequence for Pcdhb18 (NM_053143.1,986-1004).
cgagatgtacggttctagt

SEQ ID NO: 551735 - DNA, 19 bp, Mus musculus
  siRNA target sequence for Pcdhb18 (NM_053143.1,996-1014).
ggttctagtgcgggtttta

SEQ ID NO: 551736 - DNA, 19 bp, Mus musculus
  siRNA target sequence for Pcdhb18 (NM_053143.1,1005-1023).
gcgggttttagacgttaat

SEQ ID NO: 551737 - DNA, 19 bp, Mus musculus
  siRNA target sequence for Pcdhb18 (NM_053143.1,1007-1025).
gggttttagacgttaatga

SEQ ID NO: 551738 - DNA, 19 bp, Mus musculus
  siRNA target sequence for Pcdhb18 (NM_053143.1,1033-1051).
cctgaactgatcatgtcat

SEQ ID NO: 551739 - DNA, 19 bp, Mus musculus
  siRNA target sequence for Pcdhb18 (NM_053143.1,1183-1201).
ccttccgtggacaattttt

SEQ ID NO: 551740 - DNA, 19 bp, Mus musculus
  siRNA target sequence for Pcdhb18 (NM_053143.1,1475-1493).
caacccaagacctacagat

SEQ ID NO: 551741 - DNA, 19 bp, Mus musculus
  siRNA target sequence for Pcdhb18 (NM_053143.1,1532-1550).
ggcaactgtttgcaatcaa

SEQ ID NO: 551742 - DNA, 19 bp, Mus musculus
  siRNA target sequence for Pcdhb18 (NM_053143.1,2287-2305).
ggtaccagtgatttcaagt

SEQ ID NO: 551743 - DNA, 19 bp, Mus musculus
  siRNA target sequence for Pcdhb18 (NM_053143.1,2288-2306).
gtaccagtgatttcaagtt

SEQ ID NO: 551744 - DNA, 19 bp, Mus musculus
  siRNA target sequence for Pcdhb18 (NM_053143.1,2301-2319).
caagttcttgaaatcgatt

SEQ ID NO: 551745 - DNA, 19 bp, Mus musculus
  siRNA target sequence for Pcdhb18 (NM_053143.1,2316-2334).
gatttaccctgaagttcat

SEQ ID NO: 551746 - DNA, 19 bp, Mus musculus
  siRNA target sequence for Pcdhb18 (NM_053143.1,2359-2377).
gatgggaatcccacatttt

SEQ ID NO: 551747 - DNA, 19 bp, Mus musculus
  siRNA target sequence for Pcdhb19 (NM_053144.1,6-24).
gaatcaagagggactctat

SEQ ID NO: 551748 - DNA, 19 bp, Mus musculus
  siRNA target sequence for Pcdhb19 (NM_053144.1,193-211).
caagtggcctctagtgata

SEQ ID NO: 551749 - DNA, 19 bp, Mus musculus
  siRNA target sequence for Pcdhb19 (NM_053144.1,200-218).
cctctagtgataataaact

SEQ ID NO: 551750 - DNA, 19 bp, Mus musculus
  siRNA target sequence for Pcdhb19 (NM_053144.1,219-237).
gcctttgcaattgaacata

SEQ ID NO: 551751 - DNA, 19 bp, Mus musculus
  siRNA target sequence for Pcdhb19 (NM_053144.1,361-379).
cttcaggtcacggatgtaa

SEQ ID NO: 551752 - DNA, 19 bp, Mus musculus
  siRNA target sequence for Pcdhb19 (NM_053144.1,389-407).
cccccgtattcttggaaaa

SEQ ID NO: 551753 - DNA, 19 bp, Mus musculus
  siRNA target sequence for Pcdhb19 (NM_053144.1,467-485).
gtgcgatcgatttagatgt

SEQ ID NO: 551754 - DNA, 19 bp, Mus musculus
  siRNA target sequence for Pcdhb19 (NM_053144.1,499-517).
gttaaaagctacgagataa

SEQ ID NO: 551755 - DNA, 19 bp, Mus musculus
  siRNA target sequence for Pcdhb19 (NM_053144.1,535-553).
cacgttaccatgagagtta

SEQ ID NO: 551756 - DNA, 19 bp, Mus musculus
  siRNA target sequence for Pcdhb19 (NM_053144.1,686-704).
gagtggaggtcatagatat

SEQ ID NO: 551757 - DNA, 19 bp, Mus musculus
  siRNA target sequence for Pcdhb19 (NM_053144.1,688-706).
gtggaggtcatagatatta

SEQ ID NO: 551758 - DNA, 19 bp, Mus musculus
  siRNA target sequence for Pcdhb19 (NM_053144.1,719-737).
ccgagtttgaccacatgtt

SEQ ID NO: 551759 - DNA, 19 bp, Mus musculus
  siRNA target sequence for Pcdhb19 (NM_053144.1,745-763).
gtgacggttccagagaata

SEQ ID NO: 551760 - DNA, 19 bp, Mus musculus
  siRNA target sequence for Pcdhb19 (NM_053144.1,749-767).
cggttccagagaatagcat

SEQ ID NO: 551761 - DNA, 19 bp, Mus musculus
  siRNA target sequence for Pcdhb19 (NM_053144.1,791-809).
cctcggcttgggatttaga

SEQ ID NO: 551762 - DNA, 19 bp, Mus musculus
  siRNA target sequence for Pcdhb19 (NM_053144.1,801-819).
ggatttagactcaggaatt

SEQ ID NO: 551763 - DNA, 19 bp, Mus musculus
  siRNA target sequence for Pcdhb19 (NM_053144.1,802-820).
gatttagactcaggaatta

SEQ ID NO: 551764 - DNA, 19 bp, Mus musculus
  siRNA target sequence for Pcdhb19 (NM_053144.1,814-832).
ggaattaatggtgaagtat

SEQ ID NO: 551765 - DNA, 19 bp, Mus musculus
  siRNA target sequence for Pcdhb19 (NM_053144.1,856-874).
gaggatattcgaaaaacat

SEQ ID NO: 551766 - DNA, 19 bp, Mus musculus
  siRNA target sequence for Pcdhb19 (NM_053144.1,865-883).
cgaaaaacatttgcaatta

SEQ ID NO: 551767 - DNA, 19 bp, Mus musculus
  siRNA target sequence for Pcdhb19 (NM_053144.1,872-890).
catttgcaattaatgaaca

SEQ ID NO: 551768 - DNA, 19 bp, Mus musculus
  siRNA target sequence for Pcdhb19 (NM_053144.1,915-933).
ctatttggactttgaaaca

SEQ ID NO: 551769 - DNA, 19 bp, Mus musculus
  siRNA target sequence for Pcdhb19 (NM_053144.1,935-953).
ctgaatcctactcgataat

SEQ ID NO: 551770 - DNA, 19 bp, Mus musculus
  siRNA target sequence for Pcdhb19 (NM_053144.1,941-959).
cctactcgataatcattaa

SEQ ID NO: 551771 - DNA, 19 bp, Mus musculus
  siRNA target sequence for Pcdhb19 (NM_053144.1,942-960).
ctactcgataatcattaaa

SEQ ID NO: 551772 - DNA, 19 bp, Mus musculus
  siRNA target sequence for Pcdhb19 (NM_053144.1,945-963).
ctcgataatcattaaagct

SEQ ID NO: 551773 - DNA, 19 bp, Mus musculus
  siRNA target sequence for Pcdhb19 (NM_053144.1,965-983).
ctgatcggggaggactttt

SEQ ID NO: 551774 - DNA, 19 bp, Mus musculus
  siRNA target sequence for Pcdhb19 (NM_053144.1,976-994).
ggactttttgggaaatcta

SEQ ID NO: 551775 - DNA, 19 bp, Mus musculus
  siRNA target sequence for Pcdhb19 (NM_053144.1,1079-1097).
ccgcagagactttagttat

SEQ ID NO: 551776 - DNA, 19 bp, Mus musculus
  siRNA target sequence for Pcdhb19 (NM_053144.1,1086-1104).
gactttagttatgattttt

SEQ ID NO: 551777 - DNA, 19 bp, Mus musculus
  siRNA target sequence for Pcdhb19 (NM_053144.1,1135-1153).
ggcaagatggtgtgtacta

SEQ ID NO: 551778 - DNA, 19 bp, Mus musculus
  siRNA target sequence for Pcdhb19 (NM_053144.1,1136-1154).
gcaagatggtgtgtactat

SEQ ID NO: 551779 - DNA, 19 bp, Mus musculus
  siRNA target sequence for Pcdhb19 (NM_053144.1,1167-1185).
cccgtttgtgctaaaatct

SEQ ID NO: 551780 - DNA, 19 bp, Mus musculus
  siRNA target sequence for Pcdhb19 (NM_053144.1,1176-1194).
gctaaaatcttctattgaa

SEQ ID NO: 551781 - DNA, 19 bp, Mus musculus
  siRNA target sequence for Pcdhb19 (NM_053144.1,1184-1202).
cttctattgaaaattacta

SEQ ID NO: 551782 - DNA, 19 bp, Mus musculus
  siRNA target sequence for Pcdhb19 (NM_053144.1,1475-1493).
ctgctcaggaccttcaaat

SEQ ID NO: 551783 - DNA, 19 bp, Mus musculus
  siRNA target sequence for Pcdhb19 (NM_053144.1,2307-2325).
gccagtttcccccaattta

SEQ ID NO: 551784 - DNA, 19 bp, Mus musculus
  siRNA target sequence for Pcdhb19 (NM_053144.1,2309-2327).
cagtttcccccaatttaca

SEQ ID NO: 551785 - DNA, 19 bp, Mus musculus
  siRNA target sequence for Pcdhb19 (NM_053144.1,2334-2352).
gttccctgggaaagaaata

SEQ ID NO: 551786 - DNA, 19 bp, Mus musculus
  siRNA target sequence for Pcdhb19 (NM_053144.1,2361-2379).
ctctactttgcgcaatagt

SEQ ID NO: 551787 - DNA, 19 bp, Mus musculus
  siRNA target sequence for Pcdhb19 (NM_053144.1,2363-2381).
ctactttgcgcaatagttt

SEQ ID NO: 551788 - DNA, 19 bp, Mus musculus
  siRNA target sequence for Pcdhb19 (NM_053144.1,2384-2402).
ggttatttagggactgtaa

SEQ ID NO: 551789 - DNA, 19 bp, Mus musculus
  siRNA target sequence for Pcdhb19 (NM_053144.1,2385-2403).
gttatttagggactgtaat

SEQ ID NO: 551790 - DNA, 19 bp, Mus musculus
  siRNA target sequence for Pcdhb2 (NM_053127.1,79-97).
caggctgggtccacaatta

SEQ ID NO: 551791 - DNA, 19 bp, Mus musculus
  siRNA target sequence for Pcdhb2 (NM_053127.1,130-148).
ggtgtttttgtggcaaatt

SEQ ID NO: 551792 - DNA, 19 bp, Mus musculus
  siRNA target sequence for Pcdhb2 (NM_053127.1,190-208).
cggggaccgcgagtcattt

SEQ ID NO: 551793 - DNA, 19 bp, Mus musculus
  siRNA target sequence for Pcdhb2 (NM_053127.1,216-234).
gaaaaaattgaacttagaa

SEQ ID NO: 551794 - DNA, 19 bp, Mus musculus
  siRNA target sequence for Pcdhb2 (NM_053127.1,327-345).
ggtgttactgggaaatcct

SEQ ID NO: 551795 - DNA, 19 bp, Mus musculus
  siRNA target sequence for Pcdhb2 (NM_053127.1,372-390).
gattagggacataaatgat

SEQ ID NO: 551796 - DNA, 19 bp, Mus musculus
  siRNA target sequence for Pcdhb2 (NM_053127.1,473-491).
gtgctcaagacttagatgt

SEQ ID NO: 551797 - DNA, 19 bp, Mus musculus
  siRNA target sequence for Pcdhb2 (NM_053127.1,497-515).
gcaacggtctccaaactta

SEQ ID NO: 551798 - DNA, 19 bp, Mus musculus
  siRNA target sequence for Pcdhb2 (NM_053127.1,501-519).
cggtctccaaacttacaca

SEQ ID NO: 551799 - DNA, 19 bp, Mus musculus
  siRNA target sequence for Pcdhb2 (NM_053127.1,611-629).
gggaggagcgatcagaaat

SEQ ID NO: 551800 - DNA, 19 bp, Mus musculus
  siRNA target sequence for Pcdhb2 (NM_053127.1,616-634).
gagcgatcagaaatcagat

SEQ ID NO: 551801 - DNA, 19 bp, Mus musculus
  siRNA target sequence for Pcdhb2 (NM_053127.1,618-636).
gcgatcagaaatcagatta

SEQ ID NO: 551802 - DNA, 19 bp, Mus musculus
  siRNA target sequence for Pcdhb2 (NM_053127.1,623-641).
cagaaatcagattaatact

SEQ ID NO: 551803 - DNA, 19 bp, Mus musculus
  siRNA target sequence for Pcdhb2 (NM_053127.1,671-689).
ggtctggcaccgtccaaat

SEQ ID NO: 551804 - DNA, 19 bp, Mus musculus
  siRNA target sequence for Pcdhb2 (NM_053127.1,674-692).
ctggcaccgtccaaatcct

SEQ ID NO: 551805 - DNA, 19 bp, Mus musculus
  siRNA target sequence for Pcdhb2 (NM_053127.1,680-698).
ccgtccaaatccttattga

SEQ ID NO: 551806 - DNA, 19 bp, Mus musculus
  siRNA target sequence for Pcdhb2 (NM_053127.1,681-699).
cgtccaaatccttattgaa

SEQ ID NO: 551807 - DNA, 19 bp, Mus musculus
  siRNA target sequence for Pcdhb2 (NM_053127.1,823-841).
gaccatggaaatatagctt

SEQ ID NO: 551808 - DNA, 19 bp, Mus musculus
  siRNA target sequence for Pcdhb2 (NM_053127.1,852-870).
ccaagcctctgaagacatt

SEQ ID NO: 551809 - DNA, 19 bp, Mus musculus
  siRNA target sequence for Pcdhb2 (NM_053127.1,862-880).
gaagacattcggaaaacgt

SEQ ID NO: 551810 - DNA, 19 bp, Mus musculus
  siRNA target sequence for Pcdhb2 (NM_053127.1,893-911).
caacatccggagaaatcct

SEQ ID NO: 551811 - DNA, 19 bp, Mus musculus
  siRNA target sequence for Pcdhb2 (NM_053127.1,899-917).
ccggagaaatccttttagt

SEQ ID NO: 551812 - DNA, 19 bp, Mus musculus
  siRNA target sequence for Pcdhb2 (NM_053127.1,900-918).
cggagaaatccttttagta

SEQ ID NO: 551813 - DNA, 19 bp, Mus musculus
  siRNA target sequence for Pcdhb2 (NM_053127.1,938-956).
ccatccaggcatatacaat

SEQ ID NO: 551814 - DNA, 19 bp, Mus musculus
  siRNA target sequence for Pcdhb2 (NM_053127.1,939-957).
catccaggcatatacaata

SEQ ID NO: 551815 - DNA, 19 bp, Mus musculus
  siRNA target sequence for Pcdhb2 (NM_053127.1,945-963).
ggcatatacaatatgtgtt

SEQ ID NO: 551816 - DNA, 19 bp, Mus musculus
  siRNA target sequence for Pcdhb2 (NM_053127.1,995-1013).
gcagtgtggtgattgttca

SEQ ID NO: 551817 - DNA, 19 bp, Mus musculus
  siRNA target sequence for Pcdhb2 (NM_053127.1,996-1014).
cagtgtggtgattgttcaa

SEQ ID NO: 551818 - DNA, 19 bp, Mus musculus
  siRNA target sequence for Pcdhb2 (NM_053127.1,1009-1027).
gttcaagtaatggatttga

SEQ ID NO: 551819 - DNA, 19 bp, Mus musculus
  siRNA target sequence for Pcdhb2 (NM_053127.1,1036-1054).
cctccagaactgactatgt

SEQ ID NO: 551820 - DNA, 19 bp, Mus musculus
  siRNA target sequence for Pcdhb2 (NM_053127.1,1055-1073).
ccacatttaccaatcacat

SEQ ID NO: 551821 - DNA, 19 bp, Mus musculus
  siRNA target sequence for Pcdhb2 (NM_053127.1,1095-1113).
cgtaattgctgtgtttagt

SEQ ID NO: 551822 - DNA, 19 bp, Mus musculus
  siRNA target sequence for Pcdhb2 (NM_053127.1,1107-1125).
gtttagtgttgcagattct

SEQ ID NO: 551823 - DNA, 19 bp, Mus musculus
  siRNA target sequence for Pcdhb2 (NM_053127.1,1209-1227).
cactcttatgacaaacaca

SEQ ID NO: 551824 - DNA, 19 bp, Mus musculus
  siRNA target sequence for Pcdhb2 (NM_053127.1,2049-2067).
ccaagatgaggacatacta

SEQ ID NO: 551825 - DNA, 19 bp, Mus musculus
  siRNA target sequence for Pcdhb2 (NM_053127.1,2207-2225).
cagcccacctggtagatgt

SEQ ID NO: 551826 - DNA, 19 bp, Mus musculus
  siRNA target sequence for Pcdhb2 (NM_053127.1,2315-2333).
caatcatccccaatttcct

SEQ ID NO: 551827 - DNA, 19 bp, Mus musculus
  siRNA target sequence for Pcdhb2 (NM_053127.1,2359-2377).
gatacaaaccctagttaca

SEQ ID NO: 551828 - DNA, 19 bp, Mus musculus
  siRNA target sequence for Pcdhb2 (NM_053127.1,2367-2385).
ccctagttacaggaatagt

SEQ ID NO: 551829 - DNA, 19 bp, Mus musculus
  siRNA target sequence for Pcdhb2 (NM_053127.1,2368-2386).
cctagttacaggaatagtt

SEQ ID NO: 551830 - DNA, 19 bp, Mus musculus
  siRNA target sequence for Pcdhb2 (NM_053127.1,2379-2397).
gaatagttttgaattcagt

SEQ ID NO: 551831 - DNA, 19 bp, Mus musculus
  siRNA target sequence for Pcdhb20 (NM_053145.1,39-57).
ctgccaagggactttcaat

SEQ ID NO: 551832 - DNA, 19 bp, Mus musculus
  siRNA target sequence for Pcdhb20 (NM_053145.1,47-65).
ggactttcaatagaaatat

SEQ ID NO: 551833 - DNA, 19 bp, Mus musculus
  siRNA target sequence for Pcdhb20 (NM_053145.1,66-84).
cggacctttacctgtaaaa

SEQ ID NO: 551834 - DNA, 19 bp, Mus musculus
  siRNA target sequence for Pcdhb20 (NM_053145.1,208-226).
caggcgagtgctgaatctt

SEQ ID NO: 551835 - DNA, 19 bp, Mus musculus
  siRNA target sequence for Pcdhb20 (NM_053145.1,329-347).
gggtagtgtcagatgataa

SEQ ID NO: 551836 - DNA, 19 bp, Mus musculus
  siRNA target sequence for Pcdhb20 (NM_053145.1,330-348).
ggtagtgtcagatgataat

SEQ ID NO: 551837 - DNA, 19 bp, Mus musculus
  siRNA target sequence for Pcdhb20 (NM_053145.1,331-349).
gtagtgtcagatgataata

SEQ ID NO: 551838 - DNA, 19 bp, Mus musculus
  siRNA target sequence for Pcdhb20 (NM_053145.1,493-511).
gagctgcacgtcagagata

SEQ ID NO: 551839 - DNA, 19 bp, Mus musculus
  siRNA target sequence for Pcdhb20 (NM_053145.1,495-513).
gctgcacgtcagagatata

SEQ ID NO: 551840 - DNA, 19 bp, Mus musculus
  siRNA target sequence for Pcdhb20 (NM_053145.1,496-514).
ctgcacgtcagagatataa

SEQ ID NO: 551841 - DNA, 19 bp, Mus musculus
  siRNA target sequence for Pcdhb20 (NM_053145.1,498-516).
gcacgtcagagatataaat

SEQ ID NO: 551842 - DNA, 19 bp, Mus musculus
  siRNA target sequence for Pcdhb20 (NM_053145.1,501-519).
cgtcagagatataaatgat

SEQ ID NO: 551843 - DNA, 19 bp, Mus musculus
  siRNA target sequence for Pcdhb20 (NM_053145.1,524-542).
cccctacattcctagacaa

SEQ ID NO: 551844 - DNA, 19 bp, Mus musculus
  siRNA target sequence for Pcdhb20 (NM_053145.1,575-593).
ctatcggagccacattctt

SEQ ID NO: 551845 - DNA, 19 bp, Mus musculus
  siRNA target sequence for Pcdhb20 (NM_053145.1,634-652).
cttcaggactacagcatta

SEQ ID NO: 551846 - DNA, 19 bp, Mus musculus
  siRNA target sequence for Pcdhb20 (NM_053145.1,647-665).
gcattagccccagttctta

SEQ ID NO: 551847 - DNA, 19 bp, Mus musculus
  siRNA target sequence for Pcdhb20 (NM_053145.1,653-671).
gccccagttcttatttcta

SEQ ID NO: 551848 - DNA, 19 bp, Mus musculus
  siRNA target sequence for Pcdhb20 (NM_053145.1,654-672).
ccccagttcttatttctat

SEQ ID NO: 551849 - DNA, 19 bp, Mus musculus
  siRNA target sequence for Pcdhb20 (NM_053145.1,656-674).
ccagttcttatttctatgt

SEQ ID NO: 551850 - DNA, 19 bp, Mus musculus
  siRNA target sequence for Pcdhb20 (NM_053145.1,687-705).
cagtggcgatggaaagata

SEQ ID NO: 551851 - DNA, 19 bp, Mus musculus
  siRNA target sequence for Pcdhb20 (NM_053145.1,689-707).
gtggcgatggaaagatata

SEQ ID NO: 551852 - DNA, 19 bp, Mus musculus
  siRNA target sequence for Pcdhb20 (NM_053145.1,748-766).
gaatctgagcttagattga

SEQ ID NO: 551853 - DNA, 19 bp, Mus musculus
  siRNA target sequence for Pcdhb20 (NM_053145.1,801-819).
gtctgggacaacactgatt

SEQ ID NO: 551854 - DNA, 19 bp, Mus musculus
  siRNA target sequence for Pcdhb20 (NM_053145.1,812-830).
cactgattgtcataaaagt

SEQ ID NO: 551855 - DNA, 19 bp, Mus musculus
  siRNA target sequence for Pcdhb20 (NM_053145.1,814-832).
ctgattgtcataaaagtct

SEQ ID NO: 551856 - DNA, 19 bp, Mus musculus
  siRNA target sequence for Pcdhb20 (NM_053145.1,854-872).
cagagttcgctcagagttt

SEQ ID NO: 551857 - DNA, 19 bp, Mus musculus
  siRNA target sequence for Pcdhb20 (NM_053145.1,858-876).
gttcgctcagagtttctat

SEQ ID NO: 551858 - DNA, 19 bp, Mus musculus
  siRNA target sequence for Pcdhb20 (NM_053145.1,900-918).
gcctattggctccagtatt

SEQ ID NO: 551859 - DNA, 19 bp, Mus musculus
  siRNA target sequence for Pcdhb20 (NM_053145.1,924-942).
catctctgctaaagattta

SEQ ID NO: 551860 - DNA, 19 bp, Mus musculus
  siRNA target sequence for Pcdhb20 (NM_053145.1,937-955).
gatttagatatgggaattt

SEQ ID NO: 551861 - DNA, 19 bp, Mus musculus
  siRNA target sequence for Pcdhb20 (NM_053145.1,1030-1048).
ggggaagtcaatttgagat

SEQ ID NO: 551862 - DNA, 19 bp, Mus musculus
  siRNA target sequence for Pcdhb20 (NM_053145.1,1046-1064).
gatcactaatggattttga

SEQ ID NO: 551863 - DNA, 19 bp, Mus musculus
  siRNA target sequence for Pcdhb20 (NM_053145.1,1063-1081).
gaagtaatacagtcctatt

SEQ ID NO: 551864 - DNA, 19 bp, Mus musculus
  siRNA target sequence for Pcdhb20 (NM_053145.1,1077-1095).
ctattctgtaaatatccaa

SEQ ID NO: 551865 - DNA, 19 bp, Mus musculus
  siRNA target sequence for Pcdhb20 (NM_053145.1,1127-1145).
gcactctttcggttaaagt

SEQ ID NO: 551866 - DNA, 19 bp, Mus musculus
  siRNA target sequence for Pcdhb20 (NM_053145.1,1128-1146).
cactctttcggttaaagta

SEQ ID NO: 551867 - DNA, 19 bp, Mus musculus
  siRNA target sequence for Pcdhb20 (NM_053145.1,1136-1154).
cggttaaagtattagatat

SEQ ID NO: 551868 - DNA, 19 bp, Mus musculus
  siRNA target sequence for Pcdhb20 (NM_053145.1,1137-1155).
ggttaaagtattagatata

SEQ ID NO: 551869 - DNA, 19 bp, Mus musculus
  siRNA target sequence for Pcdhb20 (NM_053145.1,1138-1156).
gttaaagtattagatataa

SEQ ID NO: 551870 - DNA, 19 bp, Mus musculus
  siRNA target sequence for Pcdhb20 (NM_053145.1,1165-1183).
gcaccagaagtgatcatgt

SEQ ID NO: 551871 - DNA, 19 bp, Mus musculus
  siRNA target sequence for Pcdhb20 (NM_053145.1,1274-1292).
ggatcctttgctctattca

SEQ ID NO: 551872 - DNA, 19 bp, Mus musculus
  siRNA target sequence for Pcdhb20 (NM_053145.1,2420-2438).
cgaatgagttcaaattcct

SEQ ID NO: 551873 - DNA, 19 bp, Mus musculus
  siRNA target sequence for Pcdhb20 (NM_053145.1,2464-2482).
ctccatgaccctgattcta

SEQ ID NO: 551874 - DNA, 19 bp, Mus musculus
  siRNA target sequence for Pcdhb20 (NM_053145.1,2466-2484).
ccatgaccctgattctaat

SEQ ID NO: 551875 - DNA, 19 bp, Mus musculus
  siRNA target sequence for Pcdhb20 (NM_053145.1,2467-2485).
catgaccctgattctaata

SEQ ID NO: 551876 - DNA, 19 bp, Mus musculus
  siRNA target sequence for Pcdhb20 (NM_053145.1,2506-2524).
cgcaatagccttggtttta

SEQ ID NO: 551877 - DNA, 19 bp, Mus musculus
  siRNA target sequence for Pcdhb20 (NM_053145.1,2507-2525).
gcaatagccttggttttaa

SEQ ID NO: 551878 - DNA, 19 bp, Mus musculus
  siRNA target sequence for Pcdhb20 (NM_053145.1,2513-2531).
gccttggttttaatattca

SEQ ID NO: 551879 - DNA, 19 bp, Mus musculus
  siRNA target sequence for Pcdhb20 (NM_053145.1,2515-2533).
cttggttttaatattcaat

SEQ ID NO: 551880 - DNA, 19 bp, Mus musculus
  siRNA target sequence for Pcdhb21 (NM_053146.1,82-100).
gccacgacctggagatatt

SEQ ID NO: 551881 - DNA, 19 bp, Mus musculus
  siRNA target sequence for Pcdhb21 (NM_053146.1,84-102).
cacgacctggagatattct

SEQ ID NO: 551882 - DNA, 19 bp, Mus musculus
  siRNA target sequence for Pcdhb21 (NM_053146.1,86-104).
cgacctggagatattctgt

SEQ ID NO: 551883 - DNA, 19 bp, Mus musculus
  siRNA target sequence for Pcdhb21 (NM_053146.1,125-143).
gctcctctatagccaatat

SEQ ID NO: 551884 - DNA, 19 bp, Mus musculus
  siRNA target sequence for Pcdhb21 (NM_053146.1,126-144).
ctcctctatagccaatata

SEQ ID NO: 551885 - DNA, 19 bp, Mus musculus
  siRNA target sequence for Pcdhb21 (NM_053146.1,128-146).
cctctatagccaatataat

SEQ ID NO: 551886 - DNA, 19 bp, Mus musculus
  siRNA target sequence for Pcdhb21 (NM_053146.1,129-147).
ctctatagccaatataatt

SEQ ID NO: 551887 - DNA, 19 bp, Mus musculus
  siRNA target sequence for Pcdhb21 (NM_053146.1,131-149).
ctatagccaatataattaa

SEQ ID NO: 551888 - DNA, 19 bp, Mus musculus
  siRNA target sequence for Pcdhb21 (NM_053146.1,185-203).
ccagagttatatttgatga

SEQ ID NO: 551889 - DNA, 19 bp, Mus musculus
  siRNA target sequence for Pcdhb21 (NM_053146.1,199-217).
gatgactaccagccttatt

SEQ ID NO: 551890 - DNA, 19 bp, Mus musculus
  siRNA target sequence for Pcdhb21 (NM_053146.1,210-228).
gccttatttgcggttagaa

SEQ ID NO: 551891 - DNA, 19 bp, Mus musculus
  siRNA target sequence for Pcdhb21 (NM_053146.1,232-250).
gagactggcaacttgcttt

SEQ ID NO: 551892 - DNA, 19 bp, Mus musculus
  siRNA target sequence for Pcdhb21 (NM_053146.1,236-254).
ctggcaacttgcttttgaa

SEQ ID NO: 551893 - DNA, 19 bp, Mus musculus
  siRNA target sequence for Pcdhb21 (NM_053146.1,287-305).
gcagcgaaccctgtatatt

SEQ ID NO: 551894 - DNA, 19 bp, Mus musculus
  siRNA target sequence for Pcdhb21 (NM_053146.1,315-333).
ggtgctattggaaaatcct

SEQ ID NO: 551895 - DNA, 19 bp, Mus musculus
  siRNA target sequence for Pcdhb21 (NM_053146.1,383-401).
cccccacgttcctagaaaa

SEQ ID NO: 551896 - DNA, 19 bp, Mus musculus
  siRNA target sequence for Pcdhb21 (NM_053146.1,389-407).
cgttcctagaaaaactcat

SEQ ID NO: 551897 - DNA, 19 bp, Mus musculus
  siRNA target sequence for Pcdhb21 (NM_053146.1,437-455).
caggaacctcattccaaat

SEQ ID NO: 551898 - DNA, 19 bp, Mus musculus
  siRNA target sequence for Pcdhb21 (NM_053146.1,481-499).
gggatgaatggtatccaaa

SEQ ID NO: 551899 - DNA, 19 bp, Mus musculus
  siRNA target sequence for Pcdhb21 (NM_053146.1,482-500).
ggatgaatggtatccaaaa

SEQ ID NO: 551900 - DNA, 19 bp, Mus musculus
  siRNA target sequence for Pcdhb21 (NM_053146.1,491-509).
gtatccaaaactattcaat

SEQ ID NO: 551901 - DNA, 19 bp, Mus musculus
  siRNA target sequence for Pcdhb21 (NM_053146.1,512-530).
gccccaacccctatttcta

SEQ ID NO: 551902 - DNA, 19 bp, Mus musculus
  siRNA target sequence for Pcdhb21 (NM_053146.1,521-539).
cctatttctaccttaagtt

SEQ ID NO: 551903 - DNA, 19 bp, Mus musculus
  siRNA target sequence for Pcdhb21 (NM_053146.1,522-540).
ctatttctaccttaagtta

SEQ ID NO: 551904 - DNA, 19 bp, Mus musculus
  siRNA target sequence for Pcdhb21 (NM_053146.1,537-555).
gttaaaagacagtggtaaa

SEQ ID NO: 551905 - DNA, 19 bp, Mus musculus
  siRNA target sequence for Pcdhb21 (NM_053146.1,571-589).
gagctggtactggttagat

SEQ ID NO: 551906 - DNA, 19 bp, Mus musculus
  siRNA target sequence for Pcdhb21 (NM_053146.1,573-591).
gctggtactggttagatct

SEQ ID NO: 551907 - DNA, 19 bp, Mus musculus
  siRNA target sequence for Pcdhb21 (NM_053146.1,611-629).
cttcaattagcttgatact

SEQ ID NO: 551908 - DNA, 19 bp, Mus musculus
  siRNA target sequence for Pcdhb21 (NM_053146.1,624-642).
gatactaacagctatggat

SEQ ID NO: 551909 - DNA, 19 bp, Mus musculus
  siRNA target sequence for Pcdhb21 (NM_053146.1,660-678).
gtcagggactgtattggtt

SEQ ID NO: 551910 - DNA, 19 bp, Mus musculus
  siRNA target sequence for Pcdhb21 (NM_053146.1,665-683).
ggactgtattggttcaagt

SEQ ID NO: 551911 - DNA, 19 bp, Mus musculus
  siRNA target sequence for Pcdhb21 (NM_053146.1,666-684).
gactgtattggttcaagtt

SEQ ID NO: 551912 - DNA, 19 bp, Mus musculus
  siRNA target sequence for Pcdhb21 (NM_053146.1,763-781).
gtggactcactggtaatca

SEQ ID NO: 551913 - DNA, 19 bp, Mus musculus
  siRNA target sequence for Pcdhb21 (NM_053146.1,786-804).
gtctgcgacagatttggat

SEQ ID NO: 551914 - DNA, 19 bp, Mus musculus
  siRNA target sequence for Pcdhb21 (NM_053146.1,806-824).
cgggaataaatggagaaat

SEQ ID NO: 551915 - DNA, 19 bp, Mus musculus
  siRNA target sequence for Pcdhb21 (NM_053146.1,827-845).
cttattcgttttctcatat

SEQ ID NO: 551916 - DNA, 19 bp, Mus musculus
  siRNA target sequence for Pcdhb21 (NM_053146.1,846-864).
ctctagagatgtacaaaaa

SEQ ID NO: 551917 - DNA, 19 bp, Mus musculus
  siRNA target sequence for Pcdhb21 (NM_053146.1,887-905).
ctggtgaagtccgtttgaa

SEQ ID NO: 551918 - DNA, 19 bp, Mus musculus
  siRNA target sequence for Pcdhb21 (NM_053146.1,912-930).
cctagattttgaggtaatt

SEQ ID NO: 551919 - DNA, 19 bp, Mus musculus
  siRNA target sequence for Pcdhb21 (NM_053146.1,922-940).
gaggtaattcagtcttata

SEQ ID NO: 551920 - DNA, 19 bp, Mus musculus
  siRNA target sequence for Pcdhb21 (NM_053146.1,924-942).
ggtaattcagtcttataca

SEQ ID NO: 551921 - DNA, 19 bp, Mus musculus
  siRNA target sequence for Pcdhb21 (NM_053146.1,931-949).
cagtcttatacaataaata

SEQ ID NO: 551922 - DNA, 19 bp, Mus musculus
  siRNA target sequence for Pcdhb21 (NM_053146.1,977-995).
ctggaaaatcagccattat

SEQ ID NO: 551923 - DNA, 19 bp, Mus musculus
  siRNA target sequence for Pcdhb21 (NM_053146.1,1023-1041).
cccaccagaaatagtcatt

SEQ ID NO: 551924 - DNA, 19 bp, Mus musculus
  siRNA target sequence for Pcdhb21 (NM_053146.1,1024-1042).
ccaccagaaatagtcatta

SEQ ID NO: 551925 - DNA, 19 bp, Mus musculus
  siRNA target sequence for Pcdhb21 (NM_053146.1,1089-1107).
ggtcgctgttttcagttta

SEQ ID NO: 551926 - DNA, 19 bp, Mus musculus
  siRNA target sequence for Pcdhb21 (NM_053146.1,1092-1110).
cgctgttttcagtttacga

SEQ ID NO: 551927 - DNA, 19 bp, Mus musculus
  siRNA target sequence for Pcdhb21 (NM_053146.1,1134-1152).
gagaatgatgtgttcaatt

SEQ ID NO: 551928 - DNA, 19 bp, Mus musculus
  siRNA target sequence for Pcdhb21 (NM_053146.1,1171-1189).
ctcttgaaacctactttca

SEQ ID NO: 551929 - DNA, 19 bp, Mus musculus
  siRNA target sequence for Pcdhb21 (NM_053146.1,2052-2070).
ggaagcgctcacactctat

SEQ ID NO: 551930 - DNA, 19 bp, Mus musculus
  siRNA target sequence for Pcdhb21 (NM_053146.1,2053-2071).
gaagcgctcacactctatt

SEQ ID NO: 551931 - DNA, 19 bp, Mus musculus
  siRNA target sequence for Pcdhb21 (NM_053146.1,2057-2075).
cgctcacactctatttggt

SEQ ID NO: 551932 - DNA, 19 bp, Mus musculus
  siRNA target sequence for Pcdhb21 (NM_053146.1,2270-2288).
caggaatgtcagattccaa

SEQ ID NO: 551933 - DNA, 19 bp, Mus musculus
  siRNA target sequence for Pcdhb22 (NM_053147.2,361-379).
cagactgggaagctaatct

SEQ ID NO: 551934 - DNA, 19 bp, Mus musculus
  siRNA target sequence for Pcdhb22 (NM_053147.2,363-381).
gactgggaagctaatctta

SEQ ID NO: 551935 - DNA, 19 bp, Mus musculus
  siRNA target sequence for Pcdhb22 (NM_053147.2,369-387).
gaagctaatcttaaatgaa

SEQ ID NO: 551936 - DNA, 19 bp, Mus musculus
  siRNA target sequence for Pcdhb22 (NM_053147.2,432-450).
cactcatttccaagtgtta

SEQ ID NO: 551937 - DNA, 19 bp, Mus musculus
  siRNA target sequence for Pcdhb22 (NM_053147.2,483-501).
gctacgagtaggagacatt

SEQ ID NO: 551938 - DNA, 19 bp, Mus musculus
  siRNA target sequence for Pcdhb22 (NM_053147.2,484-502).
ctacgagtaggagacatta

SEQ ID NO: 551939 - DNA, 19 bp, Mus musculus
  siRNA target sequence for Pcdhb22 (NM_053147.2,538-556).
gccgtgaaaatcatagaga

SEQ ID NO: 551940 - DNA, 19 bp, Mus musculus
  siRNA target sequence for Pcdhb22 (NM_053147.2,569-587).
gcactgcgtttctactcaa

SEQ ID NO: 551941 - DNA, 19 bp, Mus musculus
  siRNA target sequence for Pcdhb22 (NM_053147.2,570-588).
cactgcgtttctactcaaa

SEQ ID NO: 551942 - DNA, 19 bp, Mus musculus
  siRNA target sequence for Pcdhb22 (NM_053147.2,620-638).
gcgttcagaactataagat

SEQ ID NO: 551943 - DNA, 19 bp, Mus musculus
  siRNA target sequence for Pcdhb22 (NM_053147.2,625-643).
cagaactataagattggta

SEQ ID NO: 551944 - DNA, 19 bp, Mus musculus
  siRNA target sequence for Pcdhb22 (NM_053147.2,630-648).
ctataagattggtaccaat

SEQ ID NO: 551945 - DNA, 19 bp, Mus musculus
  siRNA target sequence for Pcdhb22 (NM_053147.2,636-654).
gattggtaccaattctcat

SEQ ID NO: 551946 - DNA, 19 bp, Mus musculus
  siRNA target sequence for Pcdhb22 (NM_053147.2,735-753).
gcaggcagcgttcagatta

SEQ ID NO: 551947 - DNA, 19 bp, Mus musculus
  siRNA target sequence for Pcdhb22 (NM_053147.2,736-754).
caggcagcgttcagattaa

SEQ ID NO: 551948 - DNA, 19 bp, Mus musculus
  siRNA target sequence for Pcdhb22 (NM_053147.2,738-756).
ggcagcgttcagattaact

SEQ ID NO: 551949 - DNA, 19 bp, Mus musculus
  siRNA target sequence for Pcdhb22 (NM_053147.2,798-816).
ctcgcaaatccgcattgtt

SEQ ID NO: 551950 - DNA, 19 bp, Mus musculus
  siRNA target sequence for Pcdhb22 (NM_053147.2,800-818).
cgcaaatccgcattgttgt

SEQ ID NO: 551951 - DNA, 19 bp, Mus musculus
  siRNA target sequence for Pcdhb22 (NM_053147.2,857-875).
ctttctaccgggtgcaaat

SEQ ID NO: 551952 - DNA, 19 bp, Mus musculus
  siRNA target sequence for Pcdhb22 (NM_053147.2,861-879).
ctaccgggtgcaaattcca

SEQ ID NO: 551953 - DNA, 19 bp, Mus musculus
  siRNA target sequence for Pcdhb22 (NM_053147.2,893-911).
cgggttccatggttgctaa

SEQ ID NO: 551954 - DNA, 19 bp, Mus musculus
  siRNA target sequence for Pcdhb22 (NM_053147.2,989-1007).
gcaaaacttttgagctaaa

SEQ ID NO: 551955 - DNA, 19 bp, Mus musculus
  siRNA target sequence for Pcdhb22 (NM_053147.2,1018-1036).
ggagaagttcgactaatca

SEQ ID NO: 551956 - DNA, 19 bp, Mus musculus
  siRNA target sequence for Pcdhb22 (NM_053147.2,1019-1037).
gagaagttcgactaatcaa

SEQ ID NO: 551957 - DNA, 19 bp, Mus musculus
  siRNA target sequence for Pcdhb22 (NM_053147.2,1021-1039).
gaagttcgactaatcaaaa

SEQ ID NO: 551958 - DNA, 19 bp, Mus musculus
  siRNA target sequence for Pcdhb22 (NM_053147.2,1053-1071).
gacaacaccttcatatgaa

SEQ ID NO: 551959 - DNA, 19 bp, Mus musculus
  siRNA target sequence for Pcdhb22 (NM_053147.2,1055-1073).
caacaccttcatatgaact

SEQ ID NO: 551960 - DNA, 19 bp, Mus musculus
  siRNA target sequence for Pcdhb22 (NM_053147.2,1058-1076).
caccttcatatgaactaga

SEQ ID NO: 551961 - DNA, 19 bp, Mus musculus
  siRNA target sequence for Pcdhb22 (NM_053147.2,1061-1079).
cttcatatgaactagacat

SEQ ID NO: 551962 - DNA, 19 bp, Mus musculus
  siRNA target sequence for Pcdhb22 (NM_053147.2,1064-1082).
catatgaactagacataga

SEQ ID NO: 551963 - DNA, 19 bp, Mus musculus
  siRNA target sequence for Pcdhb22 (NM_053147.2,1146-1164).
cgataattacccagaacta

SEQ ID NO: 551964 - DNA, 19 bp, Mus musculus
  siRNA target sequence for Pcdhb22 (NM_053147.2,1147-1165).
gataattacccagaactaa

SEQ ID NO: 551965 - DNA, 19 bp, Mus musculus
  siRNA target sequence for Pcdhb22 (NM_053147.2,1155-1173).
cccagaactaattatatca

SEQ ID NO: 551966 - DNA, 19 bp, Mus musculus
  siRNA target sequence for Pcdhb22 (NM_053147.2,1156-1174).
ccagaactaattatatcat

SEQ ID NO: 551967 - DNA, 19 bp, Mus musculus
  siRNA target sequence for Pcdhb22 (NM_053147.2,1172-1190).
catcgctcaccaatccaat

SEQ ID NO: 551968 - DNA, 19 bp, Mus musculus
  siRNA target sequence for Pcdhb22 (NM_053147.2,1281-1299).
ggatggtgttccctttaca

SEQ ID NO: 551969 - DNA, 19 bp, Mus musculus
  siRNA target sequence for Pcdhb22 (NM_053147.2,1311-1329).
cgttgagaacttctataga

SEQ ID NO: 551970 - DNA, 19 bp, Mus musculus
  siRNA target sequence for Pcdhb22 (NM_053147.2,2407-2425).
cagagtaatgagttcaaat

SEQ ID NO: 551971 - DNA, 19 bp, Mus musculus
  siRNA target sequence for Pcdhb22 (NM_053147.2,2446-2464).
ggtattgtagaccaaaact

SEQ ID NO: 551972 - DNA, 19 bp, Mus musculus
  siRNA target sequence for Pcdhb22 (NM_053147.2,2447-2465).
gtattgtagaccaaaacta

SEQ ID NO: 551973 - DNA, 19 bp, Mus musculus
  siRNA target sequence for Pcdhb22 (NM_053147.2,2452-2470).
gtagaccaaaactatggta

SEQ ID NO: 551974 - DNA, 19 bp, Mus musculus
  siRNA target sequence for Pcdhb22 (NM_053147.2,2479-2497).
gatgatcagtccttctcaa

SEQ ID NO: 551975 - DNA, 19 bp, Mus musculus
  siRNA target sequence for Pcdhb22 (NM_053147.2,2485-2503).
cagtccttctcaagtgttt

SEQ ID NO: 551976 - DNA, 19 bp, Mus musculus
  siRNA target sequence for Pcdhb3 (NM_053128.1,84-102).
catgtctaggcgctattct

SEQ ID NO: 551977 - DNA, 19 bp, Mus musculus
  siRNA target sequence for Pcdhb3 (NM_053128.1,125-143).
gcttcgtaatagccaattt

SEQ ID NO: 551978 - DNA, 19 bp, Mus musculus
  siRNA target sequence for Pcdhb3 (NM_053128.1,126-144).
cttcgtaatagccaattta

SEQ ID NO: 551979 - DNA, 19 bp, Mus musculus
  siRNA target sequence for Pcdhb3 (NM_053128.1,149-167).
cggatctggggcttagtat

SEQ ID NO: 551980 - DNA, 19 bp, Mus musculus
  siRNA target sequence for Pcdhb3 (NM_053128.1,150-168).
ggatctggggcttagtata

SEQ ID NO: 551981 - DNA, 19 bp, Mus musculus
  siRNA target sequence for Pcdhb3 (NM_053128.1,156-174).
ggggcttagtatagaagaa

SEQ ID NO: 551982 - DNA, 19 bp, Mus musculus
  siRNA target sequence for Pcdhb3 (NM_053128.1,158-176).
ggcttagtatagaagaact

SEQ ID NO: 551983 - DNA, 19 bp, Mus musculus
  siRNA target sequence for Pcdhb3 (NM_053128.1,242-260).
ccggagatttgctcttagt

SEQ ID NO: 551984 - DNA, 19 bp, Mus musculus
  siRNA target sequence for Pcdhb3 (NM_053128.1,243-261).
cggagatttgctcttagtt

SEQ ID NO: 551985 - DNA, 19 bp, Mus musculus
  siRNA target sequence for Pcdhb3 (NM_053128.1,438-456).
cgtgcctgggacagtaatt

SEQ ID NO: 551986 - DNA, 19 bp, Mus musculus
  siRNA target sequence for Pcdhb3 (NM_053128.1,514-532).
gtctctcccacgtctcatt

SEQ ID NO: 551987 - DNA, 19 bp, Mus musculus
  siRNA target sequence for Pcdhb3 (NM_053128.1,518-536).
ctcccacgtctcattttca

SEQ ID NO: 551988 - DNA, 19 bp, Mus musculus
  siRNA target sequence for Pcdhb3 (NM_053128.1,693-711).
ggtcttagacacaaatgat

SEQ ID NO: 551989 - DNA, 19 bp, Mus musculus
  siRNA target sequence for Pcdhb3 (NM_053128.1,694-712).
gtcttagacacaaatgata

SEQ ID NO: 551990 - DNA, 19 bp, Mus musculus
  siRNA target sequence for Pcdhb3 (NM_053128.1,742-760).
gaggttcaaattttagaga

SEQ ID NO: 551991 - DNA, 19 bp, Mus musculus
  siRNA target sequence for Pcdhb3 (NM_053128.1,765-783).
ccctattggctctgtcatt

SEQ ID NO: 551992 - DNA, 19 bp, Mus musculus
  siRNA target sequence for Pcdhb3 (NM_053128.1,766-784).
cctattggctctgtcatta

SEQ ID NO: 551993 - DNA, 19 bp, Mus musculus
  siRNA target sequence for Pcdhb3 (NM_053128.1,802-820).
gacttggatacgggaaatt

SEQ ID NO: 551994 - DNA, 19 bp, Mus musculus
  siRNA target sequence for Pcdhb3 (NM_053128.1,804-822).
cttggatacgggaaatttt

SEQ ID NO: 551995 - DNA, 19 bp, Mus musculus
  siRNA target sequence for Pcdhb3 (NM_053128.1,823-841).
ggtgcaatatcatatgtct

SEQ ID NO: 551996 - DNA, 19 bp, Mus musculus
  siRNA target sequence for Pcdhb3 (NM_053128.1,824-842).
gtgcaatatcatatgtctt

SEQ ID NO: 551997 - DNA, 19 bp, Mus musculus
  siRNA target sequence for Pcdhb3 (NM_053128.1,856-874).
gaagaaattctcgaaactt

SEQ ID NO: 551998 - DNA, 19 bp, Mus musculus
  siRNA target sequence for Pcdhb3 (NM_053128.1,882-900).
gaactccagtactggtaat

SEQ ID NO: 551999 - DNA, 19 bp, Mus musculus
  siRNA target sequence for Pcdhb3 (NM_053128.1,895-913).
ggtaatatacagctactta

SEQ ID NO: 552000 - DNA, 19 bp, Mus musculus
  siRNA target sequence for Pcdhb3 (NM_053128.1,896-914).
gtaatatacagctacttaa

SEQ ID NO: 552001 - DNA, 19 bp, Mus musculus
  siRNA target sequence for Pcdhb3 (NM_053128.1,917-935).
gtttggattatgaagcaat

SEQ ID NO: 552002 - DNA, 19 bp, Mus musculus
  siRNA target sequence for Pcdhb3 (NM_053128.1,995-1013).
cagtcatagttcagatact

SEQ ID NO: 552003 - DNA, 19 bp, Mus musculus
  siRNA target sequence for Pcdhb3 (NM_053128.1,1039-1057).
ctgaccctgtcatcagtta

SEQ ID NO: 552004 - DNA, 19 bp, Mus musculus
  siRNA target sequence for Pcdhb3 (NM_053128.1,1044-1062).
cctgtcatcagttaacagt

SEQ ID NO: 552005 - DNA, 19 bp, Mus musculus
  siRNA target sequence for Pcdhb3 (NM_053128.1,1049-1067).
catcagttaacagtcttat

SEQ ID NO: 552006 - DNA, 19 bp, Mus musculus
  siRNA target sequence for Pcdhb3 (NM_053128.1,1071-1089).
cgagaattcagcagaaact

SEQ ID NO: 552007 - DNA, 19 bp, Mus musculus
  siRNA target sequence for Pcdhb3 (NM_053128.1,1183-1201).
ccatctgtagagaacttct

SEQ ID NO: 552008 - DNA, 19 bp, Mus musculus
  siRNA target sequence for Pcdhb3 (NM_053128.1,1184-1202).
catctgtagagaacttcta

SEQ ID NO: 552009 - DNA, 19 bp, Mus musculus
  siRNA target sequence for Pcdhb3 (NM_053128.1,1189-1207).
gtagagaacttctatacta

SEQ ID NO: 552010 - DNA, 19 bp, Mus musculus
  siRNA target sequence for Pcdhb3 (NM_053128.1,1897-1915).
cgcgatatgctcaagcaaa

SEQ ID NO: 552011 - DNA, 19 bp, Mus musculus
  siRNA target sequence for Pcdhb3 (NM_053128.1,1961-1979).
caagtgtcaccctgaatgt

SEQ ID NO: 552012 - DNA, 19 bp, Mus musculus
  siRNA target sequence for Pcdhb3 (NM_053128.1,2030-2048).
cacgcgactccgtccaaaa

SEQ ID NO: 552013 - DNA, 19 bp, Mus musculus
  siRNA target sequence for Pcdhb3 (NM_053128.1,2033-2051).
gcgactccgtccaaaacga

SEQ ID NO: 552014 - DNA, 19 bp, Mus musculus
  siRNA target sequence for Pcdhb3 (NM_053128.1,2058-2076).
cttgctcacgttgtactta

SEQ ID NO: 552015 - DNA, 19 bp, Mus musculus
  siRNA target sequence for Pcdhb4 (NM_053129.2,851-869).
gaccacagttcatattgaa

SEQ ID NO: 552016 - DNA, 19 bp, Mus musculus
  siRNA target sequence for Pcdhb4 (NM_053129.2,891-909).
gctccccagtttgtacaat

SEQ ID NO: 552017 - DNA, 19 bp, Mus musculus
  siRNA target sequence for Pcdhb4 (NM_053129.2,921-939).
gtgcaggttcccgagaatt

SEQ ID NO: 552018 - DNA, 19 bp, Mus musculus
  siRNA target sequence for Pcdhb4 (NM_053129.2,1716-1734).
gcgctcagggcattggatt

SEQ ID NO: 552019 - DNA, 19 bp, Mus musculus
  siRNA target sequence for Pcdhb4 (NM_053129.2,2211-2229).
cctacacgggaagaagata

SEQ ID NO: 552020 - DNA, 19 bp, Mus musculus
  siRNA target sequence for Pcdhb4 (NM_053129.2,2212-2230).
ctacacgggaagaagataa

SEQ ID NO: 552021 - DNA, 19 bp, Mus musculus
  siRNA target sequence for Pcdhb4 (NM_053129.2,2217-2235).
cgggaagaagataatctca

SEQ ID NO: 552022 - DNA, 19 bp, Mus musculus
  siRNA target sequence for Pcdhb4 (NM_053129.2,2480-2498).
gcccagcaatcccaatagt

SEQ ID NO: 552023 - DNA, 19 bp, Mus musculus
  siRNA target sequence for Pcdhb4 (NM_053129.2,2482-2500).
ccagcaatcccaatagtct

SEQ ID NO: 552024 - DNA, 19 bp, Mus musculus
  siRNA target sequence for Pcdhb4 (NM_053129.2,2486-2504).
caatcccaatagtctgatt

SEQ ID NO: 552025 - DNA, 19 bp, Mus musculus
  siRNA target sequence for Pcdhb4 (NM_053129.2,2499-2517).
ctgattccagacaattaca

SEQ ID NO: 552026 - DNA, 19 bp, Mus musculus
  siRNA target sequence for Pcdhb4 (NM_053129.2,2505-2523).
ccagacaattacatgttga

SEQ ID NO: 552027 - DNA, 19 bp, Mus musculus
  siRNA target sequence for Pcdhb4 (NM_053129.2,2508-2526).
gacaattacatgttgaata

SEQ ID NO: 552028 - DNA, 19 bp, Mus musculus
  siRNA target sequence for Pcdhb4 (NM_053129.2,2510-2528).
caattacatgttgaatagt

SEQ ID NO: 552029 - DNA, 19 bp, Mus musculus
  siRNA target sequence for Pcdhb5 (NM_053130.2,616-634).
gccaggcacacggttttca

SEQ ID NO: 552030 - DNA, 19 bp, Mus musculus
  siRNA target sequence for Pcdhb5 (NM_053130.2,617-635).
ccaggcacacggttttcat

SEQ ID NO: 552031 - DNA, 19 bp, Mus musculus
  siRNA target sequence for Pcdhb5 (NM_053130.2,620-638).
ggcacacggttttcattaa

SEQ ID NO: 552032 - DNA, 19 bp, Mus musculus
  siRNA target sequence for Pcdhb5 (NM_053130.2,621-639).
gcacacggttttcattaaa

SEQ ID NO: 552033 - DNA, 19 bp, Mus musculus
  siRNA target sequence for Pcdhb5 (NM_053130.2,624-642).
cacggttttcattaaaatt

SEQ ID NO: 552034 - DNA, 19 bp, Mus musculus
  siRNA target sequence for Pcdhb5 (NM_053130.2,1051-1069).
ctcaataaacgaattcact

SEQ ID NO: 552035 - DNA, 19 bp, Mus musculus
  siRNA target sequence for Pcdhb5 (NM_053130.2,1073-1091).
gaaatacgactgaaaacga

SEQ ID NO: 552036 - DNA, 19 bp, Mus musculus
  siRNA target sequence for Pcdhb5 (NM_053130.2,1279-1297).
ccgaatacgggatagagat

SEQ ID NO: 552037 - DNA, 19 bp, Mus musculus
  siRNA target sequence for Pcdhb5 (NM_053130.2,1280-1298).
cgaatacgggatagagatt

SEQ ID NO: 552038 - DNA, 19 bp, Mus musculus
  siRNA target sequence for Pcdhb5 (NM_053130.2,1310-1328).
gggaagatgatttgttcaa

SEQ ID NO: 552039 - DNA, 19 bp, Mus musculus
  siRNA target sequence for Pcdhb5 (NM_053130.2,1311-1329).
ggaagatgatttgttcaat

SEQ ID NO: 552040 - DNA, 19 bp, Mus musculus
  siRNA target sequence for Pcdhb5 (NM_053130.2,1312-1330).
gaagatgatttgttcaatt

SEQ ID NO: 552041 - DNA, 19 bp, Mus musculus
  siRNA target sequence for Pcdhb5 (NM_053130.2,1323-1341).
gttcaatttcagatcatgt

SEQ ID NO: 552042 - DNA, 19 bp, Mus musculus
  siRNA target sequence for Pcdhb5 (NM_053130.2,1745-1763).
ctgcagggcttcgaattct

SEQ ID NO: 552043 - DNA, 19 bp, Mus musculus
  siRNA target sequence for Pcdhb5 (NM_053130.2,2429-2447).
cagtatgacatgtgtctaa

SEQ ID NO: 552044 - DNA, 19 bp, Mus musculus
  siRNA target sequence for Pcdhb5 (NM_053130.2,2487-2505).
ccatagtccccaacctaat

SEQ ID NO: 552045 - DNA, 19 bp, Mus musculus
  siRNA target sequence for Pcdhb6 (NM_053131.1,2278-2296).
gggacaacagatttcaaat

SEQ ID NO: 552046 - DNA, 19 bp, Mus musculus
  siRNA target sequence for Pcdhb6 (NM_053131.1,2279-2297).
ggacaacagatttcaaatt

SEQ ID NO: 552047 - DNA, 19 bp, Mus musculus
  siRNA target sequence for Pcdhb6 (NM_053131.1,2282-2300).
caacagatttcaaattcct

SEQ ID NO: 552048 - DNA, 19 bp, Mus musculus
  siRNA target sequence for Pcdhb6 (NM_053131.1,2292-2310).
caaattcctgaaccattat

SEQ ID NO: 552049 - DNA, 19 bp, Mus musculus
  siRNA target sequence for Pcdhb6 (NM_053131.1,2298-2316).
cctgaaccattattcacaa

SEQ ID NO: 552050 - DNA, 19 bp, Mus musculus
  siRNA target sequence for Pcdhb6 (NM_053131.1,2299-2317).
ctgaaccattattcacaat

SEQ ID NO: 552051 - DNA, 19 bp, Mus musculus
  siRNA target sequence for Pcdhb7 (NM_053132.2,219-237).
gagaaagctcacccaaaaa

SEQ ID NO: 552052 - DNA, 19 bp, Mus musculus
  siRNA target sequence for Pcdhb7 (NM_053132.2,613-631).
gggaaatgctattgaatat

SEQ ID NO: 552053 - DNA, 19 bp, Mus musculus
  siRNA target sequence for Pcdhb7 (NM_053132.2,614-632).
ggaaatgctattgaatata

SEQ ID NO: 552054 - DNA, 19 bp, Mus musculus
  siRNA target sequence for Pcdhb7 (NM_053132.2,653-671).
cactctgttaccactgaat

SEQ ID NO: 552055 - DNA, 19 bp, Mus musculus
  siRNA target sequence for Pcdhb7 (NM_053132.2,655-673).
ctctgttaccactgaattt

SEQ ID NO: 552056 - DNA, 19 bp, Mus musculus
  siRNA target sequence for Pcdhb7 (NM_053132.2,1193-1211).
gaaaggcttggtaatagta

SEQ ID NO: 552057 - DNA, 19 bp, Mus musculus
  siRNA target sequence for Pcdhb7 (NM_053132.2,1698-1716).
ctgccactctcctcgttaa

SEQ ID NO: 552058 - DNA, 19 bp, Mus musculus
  siRNA target sequence for Pcdhb7 (NM_053132.2,2331-2349).
cttttcgtggggataaagt

SEQ ID NO: 552059 - DNA, 19 bp, Mus musculus
  siRNA target sequence for Pcdhb7 (NM_053132.2,2544-2562).
gacgctgggagagaactta

SEQ ID NO: 552060 - DNA, 19 bp, Mus musculus
  siRNA target sequence for Pcdhb7 (NM_053132.2,2551-2569).
ggagagaacttaatgaaaa

SEQ ID NO: 552061 - DNA, 19 bp, Mus musculus
  siRNA target sequence for Pcdhb8 (NM_053133.1,40-58).
gtcattttccttgctatat

SEQ ID NO: 552062 - DNA, 19 bp, Mus musculus
  siRNA target sequence for Pcdhb8 (NM_053133.1,193-211).
cgaatccatcacaatggta

SEQ ID NO: 552063 - DNA, 19 bp, Mus musculus
  siRNA target sequence for Pcdhb8 (NM_053133.1,360-378).
cttgcagttcacagatata

SEQ ID NO: 552064 - DNA, 19 bp, Mus musculus
  siRNA target sequence for Pcdhb8 (NM_053133.1,1439-1457).
gctccaatggccttattat

SEQ ID NO: 552065 - DNA, 19 bp, Mus musculus
  siRNA target sequence for Pcdhb8 (NM_053133.1,1442-1460).
ccaatggccttattatcta

SEQ ID NO: 552066 - DNA, 19 bp, Mus musculus
  siRNA target sequence for Pcdhb8 (NM_053133.1,2058-2076).
cactctctatctggttatt

SEQ ID NO: 552067 - DNA, 19 bp, Mus musculus
  siRNA target sequence for Pcdhb8 (NM_053133.1,2232-2250).
cttatcccagagttaccat

SEQ ID NO: 552068 - DNA, 19 bp, Mus musculus
  siRNA target sequence for Pcdhb8 (NM_053133.1,2295-2313).
gttcatgaaccccattatt

SEQ ID NO: 552069 - DNA, 19 bp, Mus musculus
  siRNA target sequence for Pcdhb8 (NM_053133.1,2298-2316).
catgaaccccattattcct

SEQ ID NO: 552070 - DNA, 19 bp, Mus musculus
  siRNA target sequence for Pcdhb8 (NM_053133.1,2304-2322).
ccccattattcctagtagt

SEQ ID NO: 552071 - DNA, 19 bp, Mus musculus
  siRNA target sequence for Pcdhb9 (NM_053134.2,219-237).
gggagaattcacctaaaca

SEQ ID NO: 552072 - DNA, 19 bp, Mus musculus
  siRNA target sequence for Pcdhb9 (NM_053134.2,643-661).
gccagcaaggcacacaatt

SEQ ID NO: 552073 - DNA, 19 bp, Mus musculus
  siRNA target sequence for Pcdhb9 (NM_053134.2,647-665).
gcaaggcacacaattttca

SEQ ID NO: 552074 - DNA, 19 bp, Mus musculus
  siRNA target sequence for Pcdhb9 (NM_053134.2,1065-1083).
gaaatccaacaaacattct

SEQ ID NO: 552075 - DNA, 19 bp, Mus musculus
  siRNA target sequence for Pcdhb9 (NM_053134.2,1070-1088).
ccaacaaacattctcaata

SEQ ID NO: 552076 - DNA, 19 bp, Mus musculus
  siRNA target sequence for Pcdhb9 (NM_053134.2,1071-1089).
caacaaacattctcaataa

SEQ ID NO: 552077 - DNA, 19 bp, Mus musculus
  siRNA target sequence for Pcdhb9 (NM_053134.2,1099-1117).
gtggagacatgcgattgaa

SEQ ID NO: 552078 - DNA, 19 bp, Mus musculus
  siRNA target sequence for Pcdhb9 (NM_053134.2,1101-1119).
ggagacatgcgattgaaaa

SEQ ID NO: 552079 - DNA, 19 bp, Mus musculus
  siRNA target sequence for Pcdhb9 (NM_053134.2,1102-1120).
gagacatgcgattgaaaaa

SEQ ID NO: 552080 - DNA, 19 bp, Mus musculus
  siRNA target sequence for Pcdhb9 (NM_053134.2,1104-1122).
gacatgcgattgaaaaaga

SEQ ID NO: 552081 - DNA, 19 bp, Mus musculus
  siRNA target sequence for Pcdhb9 (NM_053134.2,1106-1124).
catgcgattgaaaaagaaa

SEQ ID NO: 552082 - DNA, 19 bp, Mus musculus
  siRNA target sequence for Pcdhb9 (NM_053134.2,1192-1210).
ggaaaggctctgtaacgat

SEQ ID NO: 552083 - DNA, 19 bp, Mus musculus
  siRNA target sequence for Pcdhb9 (NM_053134.2,1193-1211).
gaaaggctctgtaacgata

SEQ ID NO: 552084 - DNA, 19 bp, Mus musculus
  siRNA target sequence for Pcdhb9 (NM_053134.2,1698-1716).
ctggccctctcttcgttaa

SEQ ID NO: 552085 - DNA, 19 bp, Mus musculus
  siRNA target sequence for Pcdhb9 (NM_053134.2,2200-2218).
gcttctcacaatcttactt

SEQ ID NO: 552086 - DNA, 19 bp, Mus musculus
  siRNA target sequence for Pcdhb9 (NM_053134.2,2256-2274).
gatgaggacgtgcttacat

SEQ ID NO: 552087 - DNA, 19 bp, Mus musculus
  siRNA target sequence for Pcdhb9 (NM_053134.2,2259-2277).
gaggacgtgcttacattgt

SEQ ID NO: 552088 - DNA, 19 bp, Mus musculus
  siRNA target sequence for Pcdhb9 (NM_053134.2,2535-2553).
gggatagaaattatggaaa

SEQ ID NO: 552089 - DNA, 19 bp, Mus musculus
  siRNA target sequence for Pcdhga12 (NM_033595.3,831-849).
gtccatcaagtgtcagtta

SEQ ID NO: 552090 - DNA, 19 bp, Mus musculus
  siRNA target sequence for Pcdhga12 (NM_033595.3,930-948).
ctacttccgtgaaagtgaa

SEQ ID NO: 552091 - DNA, 19 bp, Mus musculus
  siRNA target sequence for Pcdhga12 (NM_033595.3,937-955).
cgtgaaagtgaattagaaa

SEQ ID NO: 552092 - DNA, 19 bp, Mus musculus
  siRNA target sequence for Pcdhga12 (NM_033595.3,1015-1033).
ccagatatcgggaagaact

SEQ ID NO: 552093 - DNA, 19 bp, Mus musculus
  siRNA target sequence for Pcdhga12 (NM_033595.3,1100-1118).
gtaacaagtacccagaatt

SEQ ID NO: 552094 - DNA, 19 bp, Mus musculus
  siRNA target sequence for Pcdhga12 (NM_033595.3,1352-1370).
gcgccaatgcggaagtgat

SEQ ID NO: 552095 - DNA, 19 bp, Mus musculus
  siRNA target sequence for Pcdhga12 (NM_033595.3,1355-1373).
ccaatgcggaagtgatcta

SEQ ID NO: 552096 - DNA, 19 bp, Mus musculus
  siRNA target sequence for Pcdhga12 (NM_033595.3,1356-1374).
caatgcggaagtgatctat

SEQ ID NO: 552097 - DNA, 19 bp, Mus musculus
  siRNA target sequence for Pcdhga12 (NM_033595.3,1360-1378).
gcggaagtgatctattcct

SEQ ID NO: 552098 - DNA, 19 bp, Mus musculus
  siRNA target sequence for Pcdhga12 (NM_033595.3,1361-1379).
cggaagtgatctattcctt

SEQ ID NO: 552099 - DNA, 19 bp, Mus musculus
  siRNA target sequence for Pcdhga12 (NM_033595.3,1392-1410).
cgacaaggcagcgaaagtt

SEQ ID NO: 552100 - DNA, 19 bp, Mus musculus
  siRNA target sequence for Pcdhga12 (NM_033595.3,1393-1411).
gacaaggcagcgaaagttt

SEQ ID NO: 552101 - DNA, 19 bp, Mus musculus
  siRNA target sequence for Pcdhga12 (NM_033595.3,1431-1449).
ggggacaatatcaacaata

SEQ ID NO: 552102 - DNA, 19 bp, Mus musculus
  siRNA target sequence for Pcdhga12 (NM_033595.3,1488-1506).
ggaggtgcaagctacagat

SEQ ID NO: 552103 - DNA, 19 bp, Mus musculus
  siRNA target sequence for Pcdhga12 (NM_033595.3,1489-1507).
gaggtgcaagctacagata

SEQ ID NO: 552104 - DNA, 19 bp, Mus musculus
  siRNA target sequence for Pcdhga12 (NM_033595.3,1614-1632).
ctctccccaagggacatta

SEQ ID NO: 552105 - DNA, 19 bp, Mus musculus
  siRNA target sequence for Pcdhga12 (NM_033595.3,1620-1638).
ccaagggacattaatagca

SEQ ID NO: 552106 - DNA, 19 bp, Mus musculus
  siRNA target sequence for Pcdhga12 (NM_033595.3,1647-1665).
cgtaaatgatcaagattct

SEQ ID NO: 552107 - DNA, 19 bp, Mus musculus
  siRNA target sequence for Pcdhga12 (NM_033595.3,1725-1743).
gtcttacggaaactattat

SEQ ID NO: 552108 - DNA, 19 bp, Mus musculus
  siRNA target sequence for Pcdhga12 (NM_033595.3,1731-1749).
cggaaactattatagatta

SEQ ID NO: 552109 - DNA, 19 bp, Mus musculus
  siRNA target sequence for Pcdhga12 (NM_033595.3,1733-1751).
gaaactattatagattagt

SEQ ID NO: 552110 - DNA, 19 bp, Mus musculus
  siRNA target sequence for Pcdhga12 (NM_033595.3,1774-1792).
gaagaggttcctagttaca

SEQ ID NO: 552111 - DNA, 19 bp, Mus musculus
  siRNA target sequence for Pcdhga12 (NM_033595.3,1780-1798).
gttcctagttacaacatca

SEQ ID NO: 552112 - DNA, 19 bp, Mus musculus
  siRNA target sequence for Pcdhga12 (NM_033595.3,1783-1801).
cctagttacaacatcacaa

SEQ ID NO: 552113 - DNA, 19 bp, Mus musculus
  siRNA target sequence for Pcdhga12 (NM_033595.3,1864-1882).
gcagacacgaacgataact

SEQ ID NO: 552114 - DNA, 19 bp, Mus musculus
  siRNA target sequence for Pcdhga12 (NM_033595.3,2118-2136).
cctacaactgcaagtgata

SEQ ID NO: 552115 - DNA, 19 bp, Mus musculus
  siRNA target sequence for Pcdhga12 (NM_033595.3,2206-2224).
gacaacgtccccgaaatct

SEQ ID NO: 552116 - DNA, 19 bp, Mus musculus
  siRNA target sequence for Pcdhga12 (NM_033595.3,2544-2562).
cgacgtcctggcagatcta

SEQ ID NO: 552117 - DNA, 19 bp, Mus musculus
  siRNA target sequence for Pcdhga12 (NM_033595.3,2553-2571).
ggcagatctagacaatcta

SEQ ID NO: 552118 - DNA, 19 bp, Mus musculus
  siRNA target sequence for Pcdhga12 (NM_033595.3,2557-2575).
gatctagacaatctagaat

SEQ ID NO: 552119 - DNA, 19 bp, Mus musculus
  siRNA target sequence for Pcdhga12 (NM_033595.3,2739-2757).
cgttgcagcctctcacttt

SEQ ID NO: 552120 - DNA, 19 bp, Mus musculus
  siRNA target sequence for Pcdhga12 (NM_033595.3,2826-2844).
ccgaaagagtcacttgatt

SEQ ID NO: 552121 - DNA, 19 bp, Mus musculus
  siRNA target sequence for Pcdhga12 (NM_033595.3,2919-2937).
gggtgattcggttttttct

SEQ ID NO: 552122 - DNA, 19 bp, Mus musculus
  siRNA target sequence for Pcdhga12 (NM_033595.3,2920-2938).
ggtgattcggttttttcta

SEQ ID NO: 552123 - DNA, 19 bp, Mus musculus
  siRNA target sequence for Pcdhga12 (NM_033595.3,2921-2939).
gtgattcggttttttctaa

SEQ ID NO: 552124 - DNA, 19 bp, Mus musculus
  siRNA target sequence for Pcdhga12 (NM_033595.3,2936-2954).
ctaaagacaatcatgcatt

SEQ ID NO: 552125 - DNA, 19 bp, Mus musculus
  siRNA target sequence for Pcp4 (NM_008791.1,38-56).
gagcgaccaacggaaaaga

SEQ ID NO: 552126 - DNA, 19 bp, Mus musculus
  siRNA target sequence for Pcp4 (NM_008791.1,41-59).
cgaccaacggaaaagacaa

SEQ ID NO: 552127 - DNA, 19 bp, Mus musculus
  siRNA target sequence for Pcp4 (NM_008791.1,57-75).
caagacgtcaggagataat

SEQ ID NO: 552128 - DNA, 19 bp, Mus musculus
  siRNA target sequence for Pdcd6 (NM_011051.2,134-152).
gtcttccagcgggttgata

SEQ ID NO: 552129 - DNA, 19 bp, Mus musculus
  siRNA target sequence for Pdcd6 (NM_011051.2,136-154).
cttccagcgggttgataaa

SEQ ID NO: 552130 - DNA, 19 bp, Mus musculus
  siRNA target sequence for Pdcd6 (NM_011051.2,140-158).
cagcgggttgataaagaca

SEQ ID NO: 552131 - DNA, 19 bp, Mus musculus
  siRNA target sequence for Pdcd6 (NM_011051.2,155-173).
gacaggagtggagtgattt

SEQ ID NO: 552132 - DNA, 19 bp, Mus musculus
  siRNA target sequence for Pdcd6 (NM_011051.2,159-177).
ggagtggagtgatttcaga

SEQ ID NO: 552133 - DNA, 19 bp, Mus musculus
  siRNA target sequence for Pdcd6 (NM_011051.2,165-183).
gagtgatttcagacaatga

SEQ ID NO: 552134 - DNA, 19 bp, Mus musculus
  siRNA target sequence for Pdcd6 (NM_011051.2,191-209).
caagcattatccaatggta

SEQ ID NO: 552135 - DNA, 19 bp, Mus musculus
  siRNA target sequence for Pdcd6 (NM_011051.2,230-248).
gtgactgtgaggtcaatca

SEQ ID NO: 552136 - DNA, 19 bp, Mus musculus
  siRNA target sequence for Pdcd6 (NM_011051.2,236-254).
gtgaggtcaatcatttcta

SEQ ID NO: 552137 - DNA, 19 bp, Mus musculus
  siRNA target sequence for Pdcd6 (NM_011051.2,278-296).
ggtgtgaacttcagtgaat

SEQ ID NO: 552138 - DNA, 19 bp, Mus musculus
  siRNA target sequence for Pdcd6 (NM_011051.2,298-316).
cacgggtgtgtggaagtat

SEQ ID NO: 552139 - DNA, 19 bp, Mus musculus
  siRNA target sequence for Pdcd6 (NM_011051.2,300-318).
cgggtgtgtggaagtatat

SEQ ID NO: 552140 - DNA, 19 bp, Mus musculus
  siRNA target sequence for Pdcd6 (NM_011051.2,302-320).
ggtgtgtggaagtatatca

SEQ ID NO: 552141 - DNA, 19 bp, Mus musculus
  siRNA target sequence for Pdcd6 (NM_011051.2,321-339).
cagactggcagaatgtctt

SEQ ID NO: 552142 - DNA, 19 bp, Mus musculus
  siRNA target sequence for Pdcd6 (NM_011051.2,355-373).
ggacaactctgggatgatt

SEQ ID NO: 552143 - DNA, 19 bp, Mus musculus
  siRNA target sequence for Pdcd6 (NM_011051.2,363-381).
ctgggatgattgacaagaa

SEQ ID NO: 552144 - DNA, 19 bp, Mus musculus
  siRNA target sequence for Pdcd6 (NM_011051.2,437-455).
gacatcctcatccgaaaat

SEQ ID NO: 552145 - DNA, 19 bp, Mus musculus
  siRNA target sequence for Pdcd6 (NM_011051.2,439-457).
catcctcatccgaaaattt

SEQ ID NO: 552146 - DNA, 19 bp, Mus musculus
  siRNA target sequence for Pdcd6 (NM_011051.2,517-535).
gcagaggttgacagacata

SEQ ID NO: 552147 - DNA, 19 bp, Mus musculus
  siRNA target sequence for Pdcd6 (NM_011051.2,523-541).
gttgacagacatattcaga

SEQ ID NO: 552148 - DNA, 19 bp, Mus musculus
  siRNA target sequence for Pkd2l2 (NM_016927.1,68-86).
ccgaggagggacttcaaaa

SEQ ID NO: 552149 - DNA, 19 bp, Mus musculus
  siRNA target sequence for Pkd2l2 (NM_016927.1,82-100).
caaaacatgacctgcatta

SEQ ID NO: 552150 - DNA, 19 bp, Mus musculus
  siRNA target sequence for Pkd2l2 (NM_016927.1,124-142).
ccacactcgaggagttgtt

SEQ ID NO: 552151 - DNA, 19 bp, Mus musculus
  siRNA target sequence for Pkd2l2 (NM_016927.1,125-143).
cacactcgaggagttgtta

SEQ ID NO: 552152 - DNA, 19 bp, Mus musculus
  siRNA target sequence for Pkd2l2 (NM_016927.1,127-145).
cactcgaggagttgttact

SEQ ID NO: 552153 - DNA, 19 bp, Mus musculus
  siRNA target sequence for Pkd2l2 (NM_016927.1,129-147).
ctcgaggagttgttactct

SEQ ID NO: 552154 - DNA, 19 bp, Mus musculus
  siRNA target sequence for Pkd2l2 (NM_016927.1,131-149).
cgaggagttgttactctat

SEQ ID NO: 552155 - DNA, 19 bp, Mus musculus
  siRNA target sequence for Pkd2l2 (NM_016927.1,206-224).
gtactatttaaacaaagtt

SEQ ID NO: 552156 - DNA, 19 bp, Mus musculus
  siRNA target sequence for Pkd2l2 (NM_016927.1,327-345).
ctcatcgacggcttgtact

SEQ ID NO: 552157 - DNA, 19 bp, Mus musculus
  siRNA target sequence for Pkd2l2 (NM_016927.1,444-462).
ctgcgagtccgaaacaaca

SEQ ID NO: 552158 - DNA, 19 bp, Mus musculus
  siRNA target sequence for Pkd2l2 (NM_016927.1,447-465).
cgagtccgaaacaacactt

SEQ ID NO: 552159 - DNA, 19 bp, Mus musculus
  siRNA target sequence for Pkd2l2 (NM_016927.1,629-647).
ccgagatggaggatatata

SEQ ID NO: 552160 - DNA, 19 bp, Mus musculus
  siRNA target sequence for Pkd2l2 (NM_016927.1,633-651).
gatggaggatatatagtca

SEQ ID NO: 552161 - DNA, 19 bp, Mus musculus
  siRNA target sequence for Pkd2l2 (NM_016927.1,639-657).
ggatatatagtcacgttat

SEQ ID NO: 552162 - DNA, 19 bp, Mus musculus
  siRNA target sequence for Pkd2l2 (NM_016927.1,702-720).
ctgaacaactggattagca

SEQ ID NO: 552163 - DNA, 19 bp, Mus musculus
  siRNA target sequence for Pkd2l2 (NM_016927.1,725-743).
caccagggctgtttttatt

SEQ ID NO: 552164 - DNA, 19 bp, Mus musculus
  siRNA target sequence for Pkd2l2 (NM_016927.1,751-769).
ccctgtacaatgctaatgt

SEQ ID NO: 552165 - DNA, 19 bp, Mus musculus
  siRNA target sequence for Pkd2l2 (NM_016927.1,753-771).
ctgtacaatgctaatgtca

SEQ ID NO: 552166 - DNA, 19 bp, Mus musculus
  siRNA target sequence for Pkd2l2 (NM_016927.1,872-890).
ctactacgactacttcatt

SEQ ID NO: 552167 - DNA, 19 bp, Mus musculus
  siRNA target sequence for Pkd2l2 (NM_016927.1,891-909).
gcctcctgtgaagtcatat

SEQ ID NO: 552168 - DNA, 19 bp, Mus musculus
  siRNA target sequence for Pkd2l2 (NM_016927.1,923-941).
ctttgtcttcataatacaa

SEQ ID NO: 552169 - DNA, 19 bp, Mus musculus
  siRNA target sequence for Pkd2l2 (NM_016927.1,1024-1042).
gttttctcgccgtgtcttt

SEQ ID NO: 552170 - DNA, 19 bp, Mus musculus
  siRNA target sequence for Pkd2l2 (NM_016927.1,1032-1050).
gccgtgtctttctatgcat

SEQ ID NO: 552171 - DNA, 19 bp, Mus musculus
  siRNA target sequence for Pkd2l2 (NM_016927.1,1037-1055).
gtctttctatgcatactgt

SEQ ID NO: 552172 - DNA, 19 bp, Mus musculus
  siRNA target sequence for Pkd2l2 (NM_016927.1,1105-1123).
gctatcccgacttttactt

SEQ ID NO: 552173 - DNA, 19 bp, Mus musculus
  siRNA target sequence for Pkd2l2 (NM_016927.1,1125-1143).
cttgcatactggcacattt

SEQ ID NO: 552174 - DNA, 19 bp, Mus musculus
  siRNA target sequence for Pkd2l2 (NM_016927.1,1145-1163).
ctataacaacgtaattgct

SEQ ID NO: 552175 - DNA, 19 bp, Mus musculus
  siRNA target sequence for Pkd2l2 (NM_016927.1,1151-1169).
caacgtaattgctatcact

SEQ ID NO: 552176 - DNA, 19 bp, Mus musculus
  siRNA target sequence for Pkd2l2 (NM_016927.1,1266-1284).
gtggggttcgccatcatgt

SEQ ID NO: 552177 - DNA, 19 bp, Mus musculus
  siRNA target sequence for Pkd2l2 (NM_016927.1,1518-1536).
gacacctattctgaagtta

SEQ ID NO: 552178 - DNA, 19 bp, Mus musculus
  siRNA target sequence for Pkd2l2 (NM_016927.1,1530-1548).
gaagttaaggctgattatt

SEQ ID NO: 552179 - DNA, 19 bp, Mus musculus
  siRNA target sequence for Pkd2l2 (NM_016927.1,1533-1551).
gttaaggctgattattcaa

SEQ ID NO: 552180 - DNA, 19 bp, Mus musculus
  siRNA target sequence for Pkdrej (NM_011105.1,232-250).
cgcgtcctcctgaaagtca

SEQ ID NO: 552181 - DNA, 19 bp, Mus musculus
  siRNA target sequence for Pkdrej (NM_011105.1,428-446).
gcaagagctgggtgtactt

SEQ ID NO: 552182 - DNA, 19 bp, Mus musculus
  siRNA target sequence for Pkdrej (NM_011105.1,429-447).
caagagctgggtgtacttt

SEQ ID NO: 552183 - DNA, 19 bp, Mus musculus
  siRNA target sequence for Pkdrej (NM_011105.1,527-545).
ccctccacatccccaaata

SEQ ID NO: 552184 - DNA, 19 bp, Mus musculus
  siRNA target sequence for Pkdrej (NM_011105.1,528-546).
cctccacatccccaaatat

SEQ ID NO: 552185 - DNA, 19 bp, Mus musculus
  siRNA target sequence for Pkdrej (NM_011105.1,623-641).
caggctcggatatcatcta

SEQ ID NO: 552186 - DNA, 19 bp, Mus musculus
  siRNA target sequence for Pkdrej (NM_011105.1,625-643).
ggctcggatatcatctaca

SEQ ID NO: 552187 - DNA, 19 bp, Mus musculus
  siRNA target sequence for Pkdrej (NM_011105.1,626-644).
gctcggatatcatctacat

SEQ ID NO: 552188 - DNA, 19 bp, Mus musculus
  siRNA target sequence for Pkdrej (NM_011105.1,627-645).
ctcggatatcatctacatt

SEQ ID NO: 552189 - DNA, 19 bp, Mus musculus
  siRNA target sequence for Pkdrej (NM_011105.1,689-707).
ccagagtaaccgtgaagtt

SEQ ID NO: 552190 - DNA, 19 bp, Mus musculus
  siRNA target sequence for Pkdrej (NM_011105.1,797-815).
ccacaaatccaagatacta

SEQ ID NO: 552191 - DNA, 19 bp, Mus musculus
  siRNA target sequence for Pkdrej (NM_011105.1,813-831).
ctatagtggcaactatgta

SEQ ID NO: 552192 - DNA, 19 bp, Mus musculus
  siRNA target sequence for Pkdrej (NM_011105.1,888-906).
ggcagtgggctctgtacta

SEQ ID NO: 552193 - DNA, 19 bp, Mus musculus
  siRNA target sequence for Pkdrej (NM_011105.1,889-907).
gcagtgggctctgtactaa

SEQ ID NO: 552194 - DNA, 19 bp, Mus musculus
  siRNA target sequence for Pkdrej (NM_011105.1,894-912).
gggctctgtactaaccatt

SEQ ID NO: 552195 - DNA, 19 bp, Mus musculus
  siRNA target sequence for Pkdrej (NM_011105.1,904-922).
ctaaccattccaccaaaaa

SEQ ID NO: 552196 - DNA, 19 bp, Mus musculus
  siRNA target sequence for Pkdrej (NM_011105.1,929-947).
ggggcaatggtgtgtatta

SEQ ID NO: 552197 - DNA, 19 bp, Mus musculus
  siRNA target sequence for Pkdrej (NM_011105.1,931-949).
ggcaatggtgtgtattact

SEQ ID NO: 552198 - DNA, 19 bp, Mus musculus
  siRNA target sequence for Pkdrej (NM_011105.1,937-955).
ggtgtgtattacttcagaa

SEQ ID NO: 552199 - DNA, 19 bp, Mus musculus
  siRNA target sequence for Pkdrej (NM_011105.1,1065-1083).
gttaggtgtgtcagataga

SEQ ID NO: 552200 - DNA, 19 bp, Mus musculus
  siRNA target sequence for Pkdrej (NM_011105.1,1117-1135).
cgccaggatttgtatagct

SEQ ID NO: 552201 - DNA, 19 bp, Mus musculus
  siRNA target sequence for Pkdrej (NM_011105.1,1148-1166).
ctctaacgggccatgaagt

SEQ ID NO: 552202 - DNA, 19 bp, Mus musculus
  siRNA target sequence for Pkdrej (NM_011105.1,1154-1172).
cgggccatgaagtgatgtt

SEQ ID NO: 552203 - DNA, 19 bp, Mus musculus
  siRNA target sequence for Pkdrej (NM_011105.1,1159-1177).
catgaagtgatgtttgact

SEQ ID NO: 552204 - DNA, 19 bp, Mus musculus
  siRNA target sequence for Pkdrej (NM_011105.1,1207-1225).
ggaccttatttgtccataa

SEQ ID NO: 552205 - DNA, 19 bp, Mus musculus
  siRNA target sequence for Pkdrej (NM_011105.1,1208-1226).
gaccttatttgtccataaa

SEQ ID NO: 552206 - DNA, 19 bp, Mus musculus
  siRNA target sequence for Pkdrej (NM_011105.1,1228-1246).
gcttttgcctttaggaatt

SEQ ID NO: 552207 - DNA, 19 bp, Mus musculus
  siRNA target sequence for Pkdrej (NM_011105.1,1313-1331).
gacatcccgttgtcattaa

SEQ ID NO: 552208 - DNA, 19 bp, Mus musculus
  siRNA target sequence for Pkdrej (NM_011105.1,1340-1358).
ctcgagttggcaaatgcaa

SEQ ID NO: 552209 - DNA, 19 bp, Mus musculus
  siRNA target sequence for Pkdrej (NM_011105.1,1350-1368).
caaatgcaagataaatcca

SEQ ID NO: 552210 - DNA, 19 bp, Mus musculus
  siRNA target sequence for Pkdrej (NM_011105.1,1366-1384).
ccagctagtgggatttcca

SEQ ID NO: 552211 - DNA, 19 bp, Mus musculus
  siRNA target sequence for Pkdrej (NM_011105.1,1367-1385).
cagctagtgggatttccat

SEQ ID NO: 552212 - DNA, 19 bp, Mus musculus
  siRNA target sequence for Pkdrej (NM_011105.1,1375-1393).
gggatttccatggttacta

SEQ ID NO: 552213 - DNA, 19 bp, Mus musculus
  siRNA target sequence for Pkdrej (NM_011105.1,1376-1394).
ggatttccatggttactaa

SEQ ID NO: 552214 - DNA, 19 bp, Mus musculus
  siRNA target sequence for Pkdrej (NM_011105.1,1383-1401).
catggttactaaatttgct

SEQ ID NO: 552215 - DNA, 19 bp, Mus musculus
  siRNA target sequence for Pkdrej (NM_011105.1,1426-1444).
gagaaccttccccttaagt

SEQ ID NO: 552216 - DNA, 19 bp, Mus musculus
  siRNA target sequence for Pkdrej (NM_011105.1,1431-1449).
ccttccccttaagtataaa

SEQ ID NO: 552217 - DNA, 19 bp, Mus musculus
  siRNA target sequence for Pkdrej (NM_011105.1,1481-1499).
cgatcagttccgtagaaga

SEQ ID NO: 552218 - DNA, 19 bp, Mus musculus
  siRNA target sequence for Pkdrej (NM_011105.1,1485-1503).
cagttccgtagaagagaat

SEQ ID NO: 552219 - DNA, 19 bp, Mus musculus
  siRNA target sequence for Pkdrej (NM_011105.1,1490-1508).
ccgtagaagagaatacact

SEQ ID NO: 552220 - DNA, 19 bp, Mus musculus
  siRNA target sequence for Pkdrej (NM_011105.1,1507-1525).
ctgggttccgtggtgtatt

SEQ ID NO: 552221 - DNA, 19 bp, Mus musculus
  siRNA target sequence for Pkdrej (NM_011105.1,1509-1527).
gggttccgtggtgtattca

SEQ ID NO: 552222 - DNA, 19 bp, Mus musculus
  siRNA target sequence for Pkdrej (NM_011105.1,1568-1586).
gtacggtgacagatgagta

SEQ ID NO: 552223 - DNA, 19 bp, Mus musculus
  siRNA target sequence for Pkdrej (NM_011105.1,1584-1602).
gtacaatgtgaggctttat

SEQ ID NO: 552224 - DNA, 19 bp, Mus musculus
  siRNA target sequence for Pkdrej (NM_011105.1,1587-1605).
caatgtgaggctttatgtt

SEQ ID NO: 552225 - DNA, 19 bp, Mus musculus
  siRNA target sequence for Pkdrej (NM_011105.1,1685-1703).
caaaggatgttttacaaca

SEQ ID NO: 552226 - DNA, 19 bp, Mus musculus
  siRNA target sequence for Pkdrej (NM_011105.1,1707-1725).
gctcaacgtcaccatgaaa

SEQ ID NO: 552227 - DNA, 19 bp, Mus musculus
  siRNA target sequence for Pkdrej (NM_011105.1,1742-1760).
ctaccttgcttcaaaagca

SEQ ID NO: 552228 - DNA, 19 bp, Mus musculus
  siRNA target sequence for Pkdrej (NM_011105.1,1861-1879).
gagcacctcgtcaaacagt

SEQ ID NO: 552229 - DNA, 19 bp, Mus musculus
  siRNA target sequence for Pkdrej (NM_011105.1,1876-1894).
cagtctctcacgtttgcta

SEQ ID NO: 552230 - DNA, 19 bp, Mus musculus
  siRNA target sequence for Pkdrej (NM_011105.1,1880-1898).
ctctcacgtttgctatgaa

SEQ ID NO: 552231 - DNA, 19 bp, Mus musculus
  siRNA target sequence for Pkdrej (NM_011105.1,1882-1900).
ctcacgtttgctatgaaca

SEQ ID NO: 552232 - DNA, 19 bp, Mus musculus
  siRNA target sequence for Pkdrej (NM_011105.1,1918-1936).
cagtcggtgatggtgatta

SEQ ID NO: 552233 - DNA, 19 bp, Mus musculus
  siRNA target sequence for Pkdrej (NM_011105.1,1924-1942).
gtgatggtgattaccaaat

SEQ ID NO: 552234 - DNA, 19 bp, Mus musculus
  siRNA target sequence for Pkdrej (NM_011105.1,1926-1944).
gatggtgattaccaaatta

SEQ ID NO: 552235 - DNA, 19 bp, Mus musculus
  siRNA target sequence for Pkdrej (NM_011105.1,1962-1980).
cttgagtcaagcggattta

SEQ ID NO: 552236 - DNA, 19 bp, Mus musculus
  siRNA target sequence for Pkdrej (NM_011105.1,2009-2027).
caagccaagacctacaaga

SEQ ID NO: 552237 - DNA, 19 bp, Mus musculus
  siRNA target sequence for Pkdrej (NM_011105.1,2100-2118).
ccttcttaagctgattaat

SEQ ID NO: 552238 - DNA, 19 bp, Mus musculus
  siRNA target sequence for Pkdrej (NM_011105.1,2109-2127).
gctgattaatccctactat

SEQ ID NO: 552239 - DNA, 19 bp, Mus musculus
  siRNA target sequence for Pkdrej (NM_011105.1,2110-2128).
ctgattaatccctactata

SEQ ID NO: 552240 - DNA, 19 bp, Mus musculus
  siRNA target sequence for Pkdrej (NM_011105.1,2120-2138).
cctactatacgttacaaga

SEQ ID NO: 552241 - DNA, 19 bp, Mus musculus
  siRNA target sequence for Pkdrej (NM_011105.1,2145-2163).
gtttgtagtcgaatcacta

SEQ ID NO: 552242 - DNA, 19 bp, Mus musculus
  siRNA target sequence for Pkdrej (NM_011105.1,2159-2177).
cactatcagacacaatact

SEQ ID NO: 552243 - DNA, 19 bp, Mus musculus
  siRNA target sequence for Pkdrej (NM_011105.1,2232-2250).
catgtatgtggagaaagtt

SEQ ID NO: 552244 - DNA, 19 bp, Mus musculus
  siRNA target sequence for Pkdrej (NM_011105.1,2346-2364).
cgcaaaggctccgatttct

SEQ ID NO: 552245 - DNA, 19 bp, Mus musculus
  siRNA target sequence for Pkdrej (NM_011105.1,2348-2366).
caaaggctccgatttctat

SEQ ID NO: 552246 - DNA, 19 bp, Mus musculus
  siRNA target sequence for Pkdrej (NM_011105.1,2353-2371).
gctccgatttctatgatgt

SEQ ID NO: 552247 - DNA, 19 bp, Mus musculus
  siRNA target sequence for Pkdrej (NM_011105.1,2406-2424).
gacttacccggaaaacatt

SEQ ID NO: 552248 - DNA, 19 bp, Mus musculus
  siRNA target sequence for Pkdrej (NM_011105.1,2412-2430).
cccggaaaacatttctgta

SEQ ID NO: 552249 - DNA, 19 bp, Mus musculus
  siRNA target sequence for Pkdrej (NM_011105.1,2453-2471).
ctggagtcgcagataacaa

SEQ ID NO: 552250 - DNA, 19 bp, Mus musculus
  siRNA target sequence for Pkdrej (NM_011105.1,2455-2473).
ggagtcgcagataacaata

SEQ ID NO: 552251 - DNA, 19 bp, Mus musculus
  siRNA target sequence for Pkdrej (NM_011105.1,2508-2526).
gtacctggtcagaaaagat

SEQ ID NO: 552252 - DNA, 19 bp, Mus musculus
  siRNA target sequence for Pkdrej (NM_011105.1,2527-2545).
ctgaccccttcgagtttta

SEQ ID NO: 552253 - DNA, 19 bp, Mus musculus
  siRNA target sequence for Pkdrej (NM_011105.1,2589-2607).
ggtgacaacgggtggaatt

SEQ ID NO: 552254 - DNA, 19 bp, Mus musculus
  siRNA target sequence for Pkdrej (NM_011105.1,2635-2653).
ggggagctactcattcaca

SEQ ID NO: 552255 - DNA, 19 bp, Mus musculus
  siRNA target sequence for Pkdrej (NM_011105.1,2636-2654).
gggagctactcattcacat

SEQ ID NO: 552256 - DNA, 19 bp, Mus musculus
  siRNA target sequence for Pkdrej (NM_011105.1,2641-2659).
ctactcattcacattgtca

SEQ ID NO: 552257 - DNA, 19 bp, Mus musculus
  siRNA target sequence for Pkdrej (NM_011105.1,2676-2694).
gtttgaggccttggtatat

SEQ ID NO: 552258 - DNA, 19 bp, Mus musculus
  siRNA target sequence for Pkdrej (NM_011105.1,2707-2725).
ctcacgcccaccaatctga

SEQ ID NO: 552259 - DNA, 19 bp, Mus musculus
  siRNA target sequence for Pkdrej (NM_011105.1,2730-2748).
cactttccttgttcctaat

SEQ ID NO: 552260 - DNA, 19 bp, Mus musculus
  siRNA target sequence for Pkdrej (NM_011105.1,2815-2833).
gtggtttgtctgtcatcat

SEQ ID NO: 552261 - DNA, 19 bp, Mus musculus
  siRNA target sequence for Pkdrej (NM_011105.1,2847-2865).
catagctcagcgcagattt

SEQ ID NO: 552262 - DNA, 19 bp, Mus musculus
  siRNA target sequence for Pkdrej (NM_011105.1,2852-2870).
ctcagcgcagattttcatt

SEQ ID NO: 552263 - DNA, 19 bp, Mus musculus
  siRNA target sequence for Pkdrej (NM_011105.1,2857-2875).
cgcagattttcattcaagt

SEQ ID NO: 552264 - DNA, 19 bp, Mus musculus
  siRNA target sequence for Pkdrej (NM_011105.1,2911-2929).
gtcctgaagcccactaaca

SEQ ID NO: 552265 - DNA, 19 bp, Mus musculus
  siRNA target sequence for Pkdrej (NM_011105.1,2924-2942).
ctaacaagctagtgagaat

SEQ ID NO: 552266 - DNA, 19 bp, Mus musculus
  siRNA target sequence for Pkdrej (NM_011105.1,2928-2946).
caagctagtgagaattgct

SEQ ID NO: 552267 - DNA, 19 bp, Mus musculus
  siRNA target sequence for Pkdrej (NM_011105.1,2935-2953).
gtgagaattgctctcttta

SEQ ID NO: 552268 - DNA, 19 bp, Mus musculus
  siRNA target sequence for Pkdrej (NM_011105.1,2939-2957).
gaattgctctctttatggt

SEQ ID NO: 552269 - DNA, 19 bp, Mus musculus
  siRNA target sequence for Pkdrej (NM_011105.1,3123-3141).
ctttgtgactgctaaggta

SEQ ID NO: 552270 - DNA, 19 bp, Mus musculus
  siRNA target sequence for Pkdrej (NM_011105.1,3166-3184).
ctgaggctagcgatcatta

SEQ ID NO: 552271 - DNA, 19 bp, Mus musculus
  siRNA target sequence for Pkdrej (NM_011105.1,3168-3186).
gaggctagcgatcattagt

SEQ ID NO: 552272 - DNA, 19 bp, Mus musculus
  siRNA target sequence for Pkdrej (NM_011105.1,3170-3188).
ggctagcgatcattagtaa

SEQ ID NO: 552273 - DNA, 19 bp, Mus musculus
  siRNA target sequence for Pkdrej (NM_011105.1,3175-3193).
gcgatcattagtaacctta

SEQ ID NO: 552274 - DNA, 19 bp, Mus musculus
  siRNA target sequence for Pkdrej (NM_011105.1,3209-3227).
ctttcctggccgtgctttt

SEQ ID NO: 552275 - DNA, 19 bp, Mus musculus
  siRNA target sequence for Pkdrej (NM_011105.1,3217-3235).
gccgtgcttttcattatga

SEQ ID NO: 552276 - DNA, 19 bp, Mus musculus
  siRNA target sequence for Pkdrej (NM_011105.1,3267-3285).
gcacagggatgtgatagat

SEQ ID NO: 552277 - DNA, 19 bp, Mus musculus
  siRNA target sequence for Pkdrej (NM_011105.1,3274-3292).
gatgtgatagatctgtatt

SEQ ID NO: 552278 - DNA, 19 bp, Mus musculus
  siRNA target sequence for Pkdrej (NM_011105.1,3315-3333).
gactgataatgatcctttt

SEQ ID NO: 552279 - DNA, 19 bp, Mus musculus
  siRNA target sequence for Pkdrej (NM_011105.1,3317-3335).
ctgataatgatccttttga

SEQ ID NO: 552280 - DNA, 19 bp, Mus musculus
  siRNA target sequence for Pkdrej (NM_011105.1,3329-3347).
cttttgataccctatgcta

SEQ ID NO: 552281 - DNA, 19 bp, Mus musculus
  siRNA target sequence for Pkdrej (NM_011105.1,3345-3363).
ctatctagtaaccatcttt

SEQ ID NO: 552282 - DNA, 19 bp, Mus musculus
  siRNA target sequence for Pkdrej (NM_011105.1,3470-3488).
ccctataccgaggaagtat

SEQ ID NO: 552283 - DNA, 19 bp, Mus musculus
  siRNA target sequence for Pkdrej (NM_011105.1,3472-3490).
ctataccgaggaagtatca

SEQ ID NO: 552284 - DNA, 19 bp, Mus musculus
  siRNA target sequence for Pkdrej (NM_011105.1,3477-3495).
ccgaggaagtatcaatact

SEQ ID NO: 552285 - DNA, 19 bp, Mus musculus
  siRNA target sequence for Pkdrej (NM_011105.1,3478-3496).
cgaggaagtatcaatactt

SEQ ID NO: 552286 - DNA, 19 bp, Mus musculus
  siRNA target sequence for Pkdrej (NM_011105.1,3479-3497).
gaggaagtatcaatacttt

SEQ ID NO: 552287 - DNA, 19 bp, Mus musculus
  siRNA target sequence for Pkdrej (NM_011105.1,3498-3516).
cctcctgacaacaaaaaat

SEQ ID NO: 552288 - DNA, 19 bp, Mus musculus
  siRNA target sequence for Pkdrej (NM_011105.1,3578-3596).
ggtacctaagtcgaatcaa

SEQ ID NO: 552289 - DNA, 19 bp, Mus musculus
  siRNA target sequence for Pkdrej (NM_011105.1,3579-3597).
gtacctaagtcgaatcaaa

SEQ ID NO: 552290 - DNA, 19 bp, Mus musculus
  siRNA target sequence for Pkdrej (NM_011105.1,3582-3600).
cctaagtcgaatcaaagta

SEQ ID NO: 552291 - DNA, 19 bp, Mus musculus
  siRNA target sequence for Pkdrej (NM_011105.1,3587-3605).
gtcgaatcaaagtagaaaa

SEQ ID NO: 552292 - DNA, 19 bp, Mus musculus
  siRNA target sequence for Pkdrej (NM_011105.1,3598-3616).
gtagaaaatctcttcaaca

SEQ ID NO: 552293 - DNA, 19 bp, Mus musculus
  siRNA target sequence for Pkdrej (NM_011105.1,3615-3633).
caagcgcatttggcttttt

SEQ ID NO: 552294 - DNA, 19 bp, Mus musculus
  siRNA target sequence for Pkdrej (NM_011105.1,3619-3637).
cgcatttggctttttgtgt

SEQ ID NO: 552295 - DNA, 19 bp, Mus musculus
  siRNA target sequence for Pkdrej (NM_011105.1,3663-3681).
cactttggatgcaacgttt

SEQ ID NO: 552296 - DNA, 19 bp, Mus musculus
  siRNA target sequence for Pkdrej (NM_011105.1,3784-3802).
gaaattgtccccaaaccat

SEQ ID NO: 552297 - DNA, 19 bp, Mus musculus
  siRNA target sequence for Pkdrej (NM_011105.1,3790-3808).
gtccccaaaccattcaaca

SEQ ID NO: 552298 - DNA, 19 bp, Mus musculus
  siRNA target sequence for Pkdrej (NM_011105.1,3840-3858).
gctgctaagctctcttgtt

SEQ ID NO: 552299 - DNA, 19 bp, Mus musculus
  siRNA target sequence for Pkdrej (NM_011105.1,3848-3866).
gctctcttgtttgcaatat

SEQ ID NO: 552300 - DNA, 19 bp, Mus musculus
  siRNA target sequence for Pkdrej (NM_011105.1,3860-3878).
gcaatatcatgttttttaa

SEQ ID NO: 552301 - DNA, 19 bp, Mus musculus
  siRNA target sequence for Pkdrej (NM_011105.1,3941-3959).
gcatcgagagcgtcgtaat

SEQ ID NO: 552302 - DNA, 19 bp, Mus musculus
  siRNA target sequence for Pkdrej (NM_011105.1,3945-3963).
cgagagcgtcgtaatcaca

SEQ ID NO: 552303 - DNA, 19 bp, Mus musculus
  siRNA target sequence for Pkdrej (NM_011105.1,3946-3964).
gagagcgtcgtaatcacaa

SEQ ID NO: 552304 - DNA, 19 bp, Mus musculus
  siRNA target sequence for Pkdrej (NM_011105.1,3960-3978).
cacaatccccgtgcaatta

SEQ ID NO: 552305 - DNA, 19 bp, Mus musculus
  siRNA target sequence for Pkdrej (NM_011105.1,3962-3980).
caatccccgtgcaattact

SEQ ID NO: 552306 - DNA, 19 bp, Mus musculus
  siRNA target sequence for Pkdrej (NM_011105.1,3966-3984).
ccccgtgcaattactgata

SEQ ID NO: 552307 - DNA, 19 bp, Mus musculus
  siRNA target sequence for Pkdrej (NM_011105.1,3967-3985).
cccgtgcaattactgataa

SEQ ID NO: 552308 - DNA, 19 bp, Mus musculus
  siRNA target sequence for Pkdrej (NM_011105.1,3969-3987).
cgtgcaattactgataact

SEQ ID NO: 552309 - DNA, 19 bp, Mus musculus
  siRNA target sequence for Pkdrej (NM_011105.1,3970-3988).
gtgcaattactgataactt

SEQ ID NO: 552310 - DNA, 19 bp, Mus musculus
  siRNA target sequence for Pkdrej (NM_011105.1,3972-3990).
gcaattactgataactttt

SEQ ID NO: 552311 - DNA, 19 bp, Mus musculus
  siRNA target sequence for Pkdrej (NM_011105.1,4004-4022).
cccagaagaatcttaaaat

SEQ ID NO: 552312 - DNA, 19 bp, Mus musculus
  siRNA target sequence for Pkdrej (NM_011105.1,4008-4026).
gaagaatcttaaaatgaat

SEQ ID NO: 552313 - DNA, 19 bp, Mus musculus
  siRNA target sequence for Pkdrej (NM_011105.1,4095-4113).
gcacaaatggcatgaatat

SEQ ID NO: 552314 - DNA, 19 bp, Mus musculus
  siRNA target sequence for Pkdrej (NM_011105.1,4261-4279).
ggtgtccctccgaaagctt

SEQ ID NO: 552315 - DNA, 19 bp, Mus musculus
  siRNA target sequence for Pkdrej (NM_011105.1,4262-4280).
gtgtccctccgaaagcttt

SEQ ID NO: 552316 - DNA, 19 bp, Mus musculus
  siRNA target sequence for Pkdrej (NM_011105.1,4266-4284).
ccctccgaaagctttctct

SEQ ID NO: 552317 - DNA, 19 bp, Mus musculus
  siRNA target sequence for Pkdrej (NM_011105.1,4336-4354).
cccaggtggtgtgtttaca

SEQ ID NO: 552318 - DNA, 19 bp, Mus musculus
  siRNA target sequence for Pkdrej (NM_011105.1,4337-4355).
ccaggtggtgtgtttacat

SEQ ID NO: 552319 - DNA, 19 bp, Mus musculus
  siRNA target sequence for Pkdrej (NM_011105.1,4375-4393).
gccacttccggtatatcgt

SEQ ID NO: 552320 - DNA, 19 bp, Mus musculus
  siRNA target sequence for Pkdrej (NM_011105.1,4382-4400).
ccggtatatcgtcattctt

SEQ ID NO: 552321 - DNA, 19 bp, Mus musculus
  siRNA target sequence for Pkdrej (NM_011105.1,4384-4402).
ggtatatcgtcattcttta

SEQ ID NO: 552322 - DNA, 19 bp, Mus musculus
  siRNA target sequence for Pkdrej (NM_011105.1,4385-4403).
gtatatcgtcattctttat

SEQ ID NO: 552323 - DNA, 19 bp, Mus musculus
  siRNA target sequence for Pkdrej (NM_011105.1,4425-4443).
cggctatgccaagtcaata

SEQ ID NO: 552324 - DNA, 19 bp, Mus musculus
  siRNA target sequence for Pkdrej (NM_011105.1,4450-4468).
ctctttgcgtcgttctgtt

SEQ ID NO: 552325 - DNA, 19 bp, Mus musculus
  siRNA target sequence for Pkdrej (NM_011105.1,4488-4506).
cctcgtacaaccatgcaat

SEQ ID NO: 552326 - DNA, 19 bp, Mus musculus
  siRNA target sequence for Pkdrej (NM_011105.1,4489-4507).
ctcgtacaaccatgcaata

SEQ ID NO: 552327 - DNA, 19 bp, Mus musculus
  siRNA target sequence for Pkdrej (NM_011105.1,4565-4583).
ggtccagcaagtaccatta

SEQ ID NO: 552328 - DNA, 19 bp, Mus musculus
  siRNA target sequence for Pkdrej (NM_011105.1,4729-4747).
cggaggaggtccttcttgt

SEQ ID NO: 552329 - DNA, 19 bp, Mus musculus
  siRNA target sequence for Pkdrej (NM_011105.1,4730-4748).
ggaggaggtccttcttgtt

SEQ ID NO: 552330 - DNA, 19 bp, Mus musculus
  siRNA target sequence for Pkdrej (NM_011105.1,4758-4776).
cctcgtgactcacttcata

SEQ ID NO: 552331 - DNA, 19 bp, Mus musculus
  siRNA target sequence for Pkdrej (NM_011105.1,4759-4777).
ctcgtgactcacttcatat

SEQ ID NO: 552332 - DNA, 19 bp, Mus musculus
  siRNA target sequence for Pkdrej (NM_011105.1,4830-4848).
ctactataaccagtttatt

SEQ ID NO: 552333 - DNA, 19 bp, Mus musculus
  siRNA target sequence for Pkdrej (NM_011105.1,4916-4934).
gcgtgttcctccctttgtt

SEQ ID NO: 552334 - DNA, 19 bp, Mus musculus
  siRNA target sequence for Pkdrej (NM_011105.1,4917-4935).
cgtgttcctccctttgtta

SEQ ID NO: 552335 - DNA, 19 bp, Mus musculus
  siRNA target sequence for Pkdrej (NM_011105.1,4963-4981).
ccggacagctcttctaaaa

SEQ ID NO: 552336 - DNA, 19 bp, Mus musculus
  siRNA target sequence for Pkdrej (NM_011105.1,5014-5032).
gccagacctagcaacaaga

SEQ ID NO: 552337 - DNA, 19 bp, Mus musculus
  siRNA target sequence for Pkdrej (NM_011105.1,5066-5084).
gcgttgcaggggaaatcca

SEQ ID NO: 552338 - DNA, 19 bp, Mus musculus
  siRNA target sequence for Pkdrej (NM_011105.1,5067-5085).
cgttgcaggggaaatccat

SEQ ID NO: 552339 - DNA, 19 bp, Mus musculus
  siRNA target sequence for Pkdrej (NM_011105.1,5068-5086).
gttgcaggggaaatccatt

SEQ ID NO: 552340 - DNA, 19 bp, Mus musculus
  siRNA target sequence for Pkdrej (NM_011105.1,5174-5192).
ctagccatgggtttactta

SEQ ID NO: 552341 - DNA, 19 bp, Mus musculus
  siRNA target sequence for Pkdrej (NM_011105.1,5205-5223).
gaaaagatgggtgtatcat

SEQ ID NO: 552342 - DNA, 19 bp, Mus musculus
  siRNA target sequence for Pkdrej (NM_011105.1,5210-5228).
gatgggtgtatcattccta

SEQ ID NO: 552343 - DNA, 19 bp, Mus musculus
  siRNA target sequence for Pkdrej (NM_011105.1,5221-5239).
cattcctatggagtactaa

SEQ ID NO: 552344 - DNA, 19 bp, Mus musculus
  siRNA target sequence for Pkdrej (NM_011105.1,5233-5251).
gtactaaacacctatggat

SEQ ID NO: 552345 - DNA, 19 bp, Mus musculus
  siRNA target sequence for Pkdrej (NM_011105.1,5249-5267).
gatctggagggtatgtgtt

SEQ ID NO: 552346 - DNA, 19 bp, Mus musculus
  siRNA target sequence for Pkdrej (NM_011105.1,5254-5272).
ggagggtatgtgttctact

SEQ ID NO: 552347 - DNA, 19 bp, Mus musculus
  siRNA target sequence for Pkdrej (NM_011105.1,5255-5273).
gagggtatgtgttctactt

SEQ ID NO: 552348 - DNA, 19 bp, Mus musculus
  siRNA target sequence for Pkdrej (NM_011105.1,5281-5299).
ggacagcagatgtttaatt

SEQ ID NO: 552349 - DNA, 19 bp, Mus musculus
  siRNA target sequence for Pkdrej (NM_011105.1,5408-5426).
gcatttcggttgtattcga

SEQ ID NO: 552350 - DNA, 19 bp, Mus musculus
  siRNA target sequence for Pkdrej (NM_011105.1,5409-5427).
catttcggttgtattcgaa

SEQ ID NO: 552351 - DNA, 19 bp, Mus musculus
  siRNA target sequence for Pkdrej (NM_011105.1,5432-5450).
ctcccttaggggttgtcaa

SEQ ID NO: 552352 - DNA, 19 bp, Mus musculus
  siRNA target sequence for Pkdrej (NM_011105.1,5482-5500).
gctgacttcaacagaaaaa

SEQ ID NO: 552353 - DNA, 19 bp, Mus musculus
  siRNA target sequence for Pkdrej (NM_011105.1,5495-5513).
gaaaaacctcgtcagaaat

SEQ ID NO: 552354 - DNA, 19 bp, Mus musculus
  siRNA target sequence for Pkdrej (NM_011105.1,5650-5668).
ctcctgatagtgcttttct

SEQ ID NO: 552355 - DNA, 19 bp, Mus musculus
  siRNA target sequence for Pkdrej (NM_011105.1,5755-5773).
gttgaccacttcatgagaa

SEQ ID NO: 552356 - DNA, 19 bp, Mus musculus
  siRNA target sequence for Pkdrej (NM_011105.1,5758-5776).
gaccacttcatgagaatca

SEQ ID NO: 552357 - DNA, 19 bp, Mus musculus
  siRNA target sequence for Pkdrej (NM_011105.1,5819-5837).
gatattccaggttcttcta

SEQ ID NO: 552358 - DNA, 19 bp, Mus musculus
  siRNA target sequence for Pkdrej (NM_011105.1,5896-5914).
gctttggtggtgtctatat

SEQ ID NO: 552359 - DNA, 19 bp, Mus musculus
  siRNA target sequence for Pkdrej (NM_011105.1,5897-5915).
ctttggtggtgtctatata

SEQ ID NO: 552360 - DNA, 19 bp, Mus musculus
  siRNA target sequence for Pkdrej (NM_011105.1,5918-5936).
ccttcatgtacgtagcttt

SEQ ID NO: 552361 - DNA, 19 bp, Mus musculus
  siRNA target sequence for Pkdrej (NM_011105.1,5947-5965).
gtgttcggtcagcatgaat

SEQ ID NO: 552362 - DNA, 19 bp, Mus musculus
  siRNA target sequence for Pkdrej (NM_011105.1,5962-5980).
gaatggaattacagcaata

SEQ ID NO: 552363 - DNA, 19 bp, Mus musculus
  siRNA target sequence for Pkdrej (NM_011105.1,6186-6204).
ggccgaggctgtaacctat

SEQ ID NO: 552364 - DNA, 19 bp, Mus musculus
  siRNA target sequence for Pkdrej (NM_011105.1,6190-6208).
gaggctgtaacctatctgt

SEQ ID NO: 552365 - DNA, 19 bp, Mus musculus
  siRNA target sequence for Pkdrej (NM_011105.1,6217-6235).
ctaaaatctgggtttgact

SEQ ID NO: 552366 - DNA, 19 bp, Mus musculus
  siRNA target sequence for Pkdrej (NM_011105.1,6243-6261).
cacccgatctagagacaaa

SEQ ID NO: 552367 - DNA, 19 bp, Mus musculus
  siRNA target sequence for Pkdrej (NM_011105.1,6295-6313).
gggcagccggagaagaata

SEQ ID NO: 552368 - DNA, 19 bp, Mus musculus
  siRNA target sequence for Pkdrej (NM_011105.1,6297-6315).
gcagccggagaagaatact

SEQ ID NO: 552369 - DNA, 19 bp, Mus musculus
  siRNA target sequence for Pkdrej (NM_011105.1,6348-6366).
caacgggaagaaaatgatt

SEQ ID NO: 552370 - DNA, 19 bp, Mus musculus
  siRNA target sequence for Pla2g10 (NM_011987.1,233-251).
ccaggaggtcacatgtata

SEQ ID NO: 552371 - DNA, 19 bp, Mus musculus
  siRNA target sequence for Pla2g10 (NM_011987.1,302-320).
gatctccgatggcttacat

SEQ ID NO: 552372 - DNA, 19 bp, Mus musculus
  siRNA target sequence for Pla2g10 (NM_011987.1,305-323).
ctccgatggcttacatgaa

SEQ ID NO: 552373 - DNA, 19 bp, Mus musculus
  siRNA target sequence for Pla2g10 (NM_011987.1,307-325).
ccgatggcttacatgaact

SEQ ID NO: 552374 - DNA, 19 bp, Mus musculus
  siRNA target sequence for Pla2g10 (NM_011987.1,308-326).
cgatggcttacatgaacta

SEQ ID NO: 552375 - DNA, 19 bp, Mus musculus
  siRNA target sequence for Pla2g10 (NM_011987.1,309-327).
gatggcttacatgaactat

SEQ ID NO: 552376 - DNA, 19 bp, Mus musculus
  siRNA target sequence for Pla2g10 (NM_011987.1,318-336).
catgaactatggctgttat

SEQ ID NO: 552377 - DNA, 19 bp, Mus musculus
  siRNA target sequence for Pla2g10 (NM_011987.1,321-339).
gaactatggctgttattgt

SEQ ID NO: 552378 - DNA, 19 bp, Mus musculus
  siRNA target sequence for Pla2g10 (NM_011987.1,428-446).
gctgcagccctaagttaga

SEQ ID NO: 552379 - DNA, 19 bp, Mus musculus
  siRNA target sequence for Pla2g10 (NM_011987.1,498-516).
gaacaaatgccaagaactt

SEQ ID NO: 552380 - DNA, 19 bp, Mus musculus
  siRNA target sequence for Pla2g10 (NM_011987.1,610-628).
gactctcccaagtgcaatt

SEQ ID NO: 552381 - DNA, 19 bp, Mus musculus
  siRNA target sequence for Pla2g1b (NM_011107.1,134-152).
gtgatcccctgaaggatta

SEQ ID NO: 552382 - DNA, 19 bp, Mus musculus
  siRNA target sequence for Pla2g1b (NM_011107.1,142-160).
ctgaaggattacaacaact

SEQ ID NO: 552383 - DNA, 19 bp, Mus musculus
  siRNA target sequence for Pla2g1b (NM_011107.1,196-214).
ccagtggacgacttagaca

SEQ ID NO: 552384 - DNA, 19 bp, Mus musculus
  siRNA target sequence for Pla2g1b (NM_011107.1,407-425).
ccaaggtcccgtacaacaa

SEQ ID NO: 552385 - DNA, 19 bp, Mus musculus
  siRNA target sequence for Pla2g1b (NM_011107.1,412-430).
gtcccgtacaacaaggaat

SEQ ID NO: 552386 - DNA, 19 bp, Mus musculus
  siRNA target sequence for Pla2g1b (NM_011107.1,415-433).
ccgtacaacaaggaataca

SEQ ID NO: 552387 - DNA, 19 bp, Mus musculus
  siRNA target sequence for Pla2g1b (NM_011107.1,416-434).
cgtacaacaaggaatacaa

SEQ ID NO: 552388 - DNA, 19 bp, Mus musculus
  siRNA target sequence for Pla2g1b (NM_011107.1,442-460).
gacaccgggaaattctgtt

SEQ ID NO: 552389 - DNA, 19 bp, Mus musculus
  siRNA target sequence for Pla2g2a (NM_011108.1,43-61).
catggcctttggctcaata

SEQ ID NO: 552390 - DNA, 19 bp, Mus musculus
  siRNA target sequence for Pla2g2a (NM_011108.1,92-110).
gaaatgatttggcttaaga

SEQ ID NO: 552391 - DNA, 19 bp, Mus musculus
  siRNA target sequence for Pla2g2a (NM_011108.1,118-136).
gagagctgagcttagctat

SEQ ID NO: 552392 - DNA, 19 bp, Mus musculus
  siRNA target sequence for Pla2g2a (NM_011108.1,127-145).
gcttagctatgccttctat

SEQ ID NO: 552393 - DNA, 19 bp, Mus musculus
  siRNA target sequence for Pla2g2a (NM_011108.1,158-176).
ggcctgggtggcaaaggat

SEQ ID NO: 552394 - DNA, 19 bp, Mus musculus
  siRNA target sequence for Pla2g2a (NM_011108.1,159-177).
gcctgggtggcaaaggatt

SEQ ID NO: 552395 - DNA, 19 bp, Mus musculus
  siRNA target sequence for Pla2g2a (NM_011108.1,197-215).
ccggtgctgtgttactcat

SEQ ID NO: 552396 - DNA, 19 bp, Mus musculus
  siRNA target sequence for Pla2g2c (NM_008868.1,285-303).
gcgccttcttctcctatta

SEQ ID NO: 552397 - DNA, 19 bp, Mus musculus
  siRNA target sequence for Pla2g2c (NM_008868.1,387-405).
gctaccacaagcttaagga

SEQ ID NO: 552398 - DNA, 19 bp, Mus musculus
  siRNA target sequence for Pla2g2c (NM_008868.1,411-429).
gctgccaacccatcttgaa

SEQ ID NO: 552399 - DNA, 19 bp, Mus musculus
  siRNA target sequence for Pla2g2c (NM_008868.1,412-430).
ctgccaacccatcttgaat

SEQ ID NO: 552400 - DNA, 19 bp, Mus musculus
  siRNA target sequence for Pla2g2d (NM_011109.1,265-283).
ctgtcagaagcatgattgt

SEQ ID NO: 552401 - DNA, 19 bp, Mus musculus
  siRNA target sequence for Pla2g2d (NM_011109.1,271-289).
gaagcatgattgttgctat

SEQ ID NO: 552402 - DNA, 19 bp, Mus musculus
  siRNA target sequence for Pla2g2d (NM_011109.1,422-440).
gccttgtgcttgaagcaaa

SEQ ID NO: 552403 - DNA, 19 bp, Mus musculus
  siRNA target sequence for Pla2g2e (NM_012044.1,267-285).
gcctgccctgcagtacaat

SEQ ID NO: 552404 - DNA, 19 bp, Mus musculus
  siRNA target sequence for Pla2g2e (NM_012044.1,271-289).
gccctgcagtacaatgact

SEQ ID NO: 552405 - DNA, 19 bp, Mus musculus
  siRNA target sequence for Pla2g2e (NM_012044.1,272-290).
ccctgcagtacaatgacta

SEQ ID NO: 552406 - DNA, 19 bp, Mus musculus
  siRNA target sequence for Pla2g2e (NM_012044.1,336-354).
gacggattggtgttgtcat

SEQ ID NO: 552407 - DNA, 19 bp, Mus musculus
  siRNA target sequence for Pla2g2e (NM_012044.1,414-432).
gtacctcttctctatcact

SEQ ID NO: 552408 - DNA, 19 bp, Mus musculus
  siRNA target sequence for Pla2g2e (NM_012044.1,514-532).
cgccacaacctgaacactt

SEQ ID NO: 552409 - DNA, 19 bp, Mus musculus
  siRNA target sequence for Pla2g2f (NM_012045.2,154-172).
gaagaaggcgctggttaaa

SEQ ID NO: 552410 - DNA, 19 bp, Mus musculus
  siRNA target sequence for Pla2g2f (NM_012045.2,238-256).
gggtatgaagaaattcttt

SEQ ID NO: 552411 - DNA, 19 bp, Mus musculus
  siRNA target sequence for Pla2g2f (NM_012045.2,483-501).
cctacgtggaccactatga

SEQ ID NO: 552412 - DNA, 19 bp, Mus musculus
  siRNA target sequence for Pla2g2f (NM_012045.2,511-529).
cgagaatggcaccatgatt

SEQ ID NO: 552413 - DNA, 19 bp, Mus musculus
  siRNA target sequence for Pla2g2f (NM_012045.2,611-629).
cacccatacaggaacaagt

SEQ ID NO: 552414 - DNA, 19 bp, Mus musculus
  siRNA target sequence for Pla2g5 (NM_011110.2,281-299).
ggggcttgctagaactcaa

SEQ ID NO: 552415 - DNA, 19 bp, Mus musculus
  siRNA target sequence for Pla2g5 (NM_011110.2,417-435).
gatgcacgaccgttgttat

SEQ ID NO: 552416 - DNA, 19 bp, Mus musculus
  siRNA target sequence for Pla2g5 (NM_011110.2,466-484).
cggacccagtcctatgact

SEQ ID NO: 552417 - DNA, 19 bp, Mus musculus
  siRNA target sequence for Pla2g5 (NM_011110.2,472-490).
cagtcctatgactacagat

SEQ ID NO: 552418 - DNA, 19 bp, Mus musculus
  siRNA target sequence for Plcd (NM_019676.1,204-222).
cagctcgtggcgtagagaa

SEQ ID NO: 552419 - DNA, 19 bp, Mus musculus
  siRNA target sequence for Plcd (NM_019676.1,214-232).
cgtagagaacgcttctaca

SEQ ID NO: 552420 - DNA, 19 bp, Mus musculus
  siRNA target sequence for Plcd (NM_019676.1,215-233).
gtagagaacgcttctacaa

SEQ ID NO: 552421 - DNA, 19 bp, Mus musculus
  siRNA target sequence for Plcd (NM_019676.1,548-566).
gcttgcgaaaggctgataa

SEQ ID NO: 552422 - DNA, 19 bp, Mus musculus
  siRNA target sequence for Plcd (NM_019676.1,553-571).
cgaaaggctgataaaaaca

SEQ ID NO: 552423 - DNA, 19 bp, Mus musculus
  siRNA target sequence for Plcd (NM_019676.1,1005-1023).
gccgctcagccactactta

SEQ ID NO: 552424 - DNA, 19 bp, Mus musculus
  siRNA target sequence for Plcd (NM_019676.1,1007-1025).
cgctcagccactacttagt

SEQ ID NO: 552425 - DNA, 19 bp, Mus musculus
  siRNA target sequence for Plcd (NM_019676.1,1009-1027).
ctcagccactacttagtgt

SEQ ID NO: 552426 - DNA, 19 bp, Mus musculus
  siRNA target sequence for Plcd (NM_019676.1,1244-1262).
catccccctacccagttat

SEQ ID NO: 552427 - DNA, 19 bp, Mus musculus
  siRNA target sequence for Plcd (NM_019676.1,1247-1265).
ccccctacccagttatcct

SEQ ID NO: 552428 - DNA, 19 bp, Mus musculus
  siRNA target sequence for Plcd (NM_019676.1,1382-1400).
cttcgcctgagcaactgaa

SEQ ID NO: 552429 - DNA, 19 bp, Mus musculus
  siRNA target sequence for Plcd (NM_019676.1,1579-1597).
ctctccgacatggtcattt

SEQ ID NO: 552430 - DNA, 19 bp, Mus musculus
  siRNA target sequence for Plcd (NM_019676.1,1646-1664).
ggcaggcattctatgagat

SEQ ID NO: 552431 - DNA, 19 bp, Mus musculus
  siRNA target sequence for Plcd (NM_019676.1,1718-1736).
gttttgtccgccataacgt

SEQ ID NO: 552432 - DNA, 19 bp, Mus musculus
  siRNA target sequence for Plcd (NM_019676.1,1853-1871).
ggccagaaatggatgttta

SEQ ID NO: 552433 - DNA, 19 bp, Mus musculus
  siRNA target sequence for Plcd (NM_019676.1,1996-2014).
ctccgagtctggatcatct

SEQ ID NO: 552434 - DNA, 19 bp, Mus musculus
  siRNA target sequence for Plcd (NM_019676.1,2023-2041).
cagctgccgaaggtcaata

SEQ ID NO: 552435 - DNA, 19 bp, Mus musculus
  siRNA target sequence for Plcd (NM_019676.1,2028-2046).
gccgaaggtcaataagaat

SEQ ID NO: 552436 - DNA, 19 bp, Mus musculus
  siRNA target sequence for Plcd (NM_019676.1,2029-2047).
ccgaaggtcaataagaata

SEQ ID NO: 552437 - DNA, 19 bp, Mus musculus
  siRNA target sequence for Plcd (NM_019676.1,2030-2048).
cgaaggtcaataagaataa

SEQ ID NO: 552438 - DNA, 19 bp, Mus musculus
  siRNA target sequence for Plcd (NM_019676.1,2035-2053).
gtcaataagaataagaatt

SEQ ID NO: 552439 - DNA, 19 bp, Mus musculus
  siRNA target sequence for Plcd (NM_019676.1,2037-2055).
caataagaataagaattct

SEQ ID NO: 552440 - DNA, 19 bp, Mus musculus
  siRNA target sequence for Plcd (NM_019676.1,2111-2129).
gccgtcagacagcagttat

SEQ ID NO: 552441 - DNA, 19 bp, Mus musculus
  siRNA target sequence for Plcd (NM_019676.1,2112-2130).
ccgtcagacagcagttatt

SEQ ID NO: 552442 - DNA, 19 bp, Mus musculus
  siRNA target sequence for Plcd (NM_019676.1,2113-2131).
cgtcagacagcagttatta

SEQ ID NO: 552443 - DNA, 19 bp, Mus musculus
  siRNA target sequence for Plcd (NM_019676.1,2125-2143).
gttattaccaataatggtt

SEQ ID NO: 552444 - DNA, 19 bp, Mus musculus
  siRNA target sequence for Plcd (NM_019676.1,2153-2171).
ggtgggacacggagtttga

SEQ ID NO: 552445 - DNA, 19 bp, Mus musculus
  siRNA target sequence for Plcd (NM_019676.1,2156-2174).
gggacacggagtttgagtt

SEQ ID NO: 552446 - DNA, 19 bp, Mus musculus
  siRNA target sequence for Plcd (NM_019676.1,2207-2225).
gtttcatggtagaggatta

SEQ ID NO: 552447 - DNA, 19 bp, Mus musculus
  siRNA target sequence for Plcd (NM_019676.1,2234-2252).
cctctaagaacgactttat

SEQ ID NO: 552448 - DNA, 19 bp, Mus musculus
  siRNA target sequence for Plcd (NM_019676.1,2299-2317).
catgtccacctcttgtcta

SEQ ID NO: 552449 - DNA, 19 bp, Mus musculus
  siRNA target sequence for Plcd (NM_019676.1,2302-2320).
gtccacctcttgtctaaga

SEQ ID NO: 552450 - DNA, 19 bp, Mus musculus
  siRNA target sequence for Plcz1 (NM_054066.2,226-244).
caagatggtttttgtcaaa

SEQ ID NO: 552451 - DNA, 19 bp, Mus musculus
  siRNA target sequence for Plcz1 (NM_054066.2,289-307).
ctcacaaactgcttgagaa

SEQ ID NO: 552452 - DNA, 19 bp, Mus musculus
  siRNA target sequence for Plcz1 (NM_054066.2,330-348).
gctcatgtgaaacatattt

SEQ ID NO: 552453 - DNA, 19 bp, Mus musculus
  siRNA target sequence for Plcz1 (NM_054066.2,403-421).
ccatttaccggtgtattgt

SEQ ID NO: 552454 - DNA, 19 bp, Mus musculus
  siRNA target sequence for Plcz1 (NM_054066.2,404-422).
catttaccggtgtattgta

SEQ ID NO: 552455 - DNA, 19 bp, Mus musculus
  siRNA target sequence for Plcz1 (NM_054066.2,441-459).
gagattttcaacacgtata

SEQ ID NO: 552456 - DNA, 19 bp, Mus musculus
  siRNA target sequence for Plcz1 (NM_054066.2,443-461).
gattttcaacacgtatact

SEQ ID NO: 552457 - DNA, 19 bp, Mus musculus
  siRNA target sequence for Plcz1 (NM_054066.2,481-499).
ctgagaacagtctgattga

SEQ ID NO: 552458 - DNA, 19 bp, Mus musculus
  siRNA target sequence for Plcz1 (NM_054066.2,528-546).
gagatcgatcactctgatt

SEQ ID NO: 552459 - DNA, 19 bp, Mus musculus
  siRNA target sequence for Plcz1 (NM_054066.2,530-548).
gatcgatcactctgattca

SEQ ID NO: 552460 - DNA, 19 bp, Mus musculus
  siRNA target sequence for Plcz1 (NM_054066.2,533-551).
cgatcactctgattcagta

SEQ ID NO: 552461 - DNA, 19 bp, Mus musculus
  siRNA target sequence for Plcz1 (NM_054066.2,591-609).
ggtgagcgacagatgtcaa

SEQ ID NO: 552462 - DNA, 19 bp, Mus musculus
  siRNA target sequence for Plcz1 (NM_054066.2,592-610).
gtgagcgacagatgtcaat

SEQ ID NO: 552463 - DNA, 19 bp, Mus musculus
  siRNA target sequence for Plcz1 (NM_054066.2,596-614).
gcgacagatgtcaattgaa

SEQ ID NO: 552464 - DNA, 19 bp, Mus musculus
  siRNA target sequence for Plcz1 (NM_054066.2,615-633).
ggtttcgcaagatacatgt

SEQ ID NO: 552465 - DNA, 19 bp, Mus musculus
  siRNA target sequence for Plcz1 (NM_054066.2,616-634).
gtttcgcaagatacatgtt

SEQ ID NO: 552466 - DNA, 19 bp, Mus musculus
  siRNA target sequence for Plcz1 (NM_054066.2,620-638).
cgcaagatacatgttttca

SEQ ID NO: 552467 - DNA, 19 bp, Mus musculus
  siRNA target sequence for Plcz1 (NM_054066.2,629-647).
catgttttcatcagaatgt

SEQ ID NO: 552468 - DNA, 19 bp, Mus musculus
  siRNA target sequence for Plcz1 (NM_054066.2,646-664).
gtctactgtttaaagagaa

SEQ ID NO: 552469 - DNA, 19 bp, Mus musculus
  siRNA target sequence for Plcz1 (NM_054066.2,673-691).
ccgtgtaccaagatatgaa

SEQ ID NO: 552470 - DNA, 19 bp, Mus musculus
  siRNA target sequence for Plcz1 (NM_054066.2,674-692).
cgtgtaccaagatatgaat

SEQ ID NO: 552471 - DNA, 19 bp, Mus musculus
  siRNA target sequence for Plcz1 (NM_054066.2,677-695).
gtaccaagatatgaatcat

SEQ ID NO: 552472 - DNA, 19 bp, Mus musculus
  siRNA target sequence for Plcz1 (NM_054066.2,689-707).
gaatcatccattaagtgat

SEQ ID NO: 552473 - DNA, 19 bp, Mus musculus
  siRNA target sequence for Plcz1 (NM_054066.2,768-786).
gacatttggggatatgtaa

SEQ ID NO: 552474 - DNA, 19 bp, Mus musculus
  siRNA target sequence for Plcz1 (NM_054066.2,770-788).
catttggggatatgtaagt

SEQ ID NO: 552475 - DNA, 19 bp, Mus musculus
  siRNA target sequence for Plcz1 (NM_054066.2,850-868).
ccattgtgtaccatggtta

SEQ ID NO: 552476 - DNA, 19 bp, Mus musculus
  siRNA target sequence for Plcz1 (NM_054066.2,855-873).
gtgtaccatggttacacat

SEQ ID NO: 552477 - DNA, 19 bp, Mus musculus
  siRNA target sequence for Plcz1 (NM_054066.2,1052-1070).
ggagtttccagatacacta

SEQ ID NO: 552478 - DNA, 19 bp, Mus musculus
  siRNA target sequence for Plcz1 (NM_054066.2,1072-1090).
cgtctccagaggcactaaa

SEQ ID NO: 552479 - DNA, 19 bp, Mus musculus
  siRNA target sequence for Plcz1 (NM_054066.2,1080-1098).
gaggcactaaaattcaaaa

SEQ ID NO: 552480 - DNA, 19 bp, Mus musculus
  siRNA target sequence for Plcz1 (NM_054066.2,1286-1304).
ctcgacattgagtggaata

SEQ ID NO: 552481 - DNA, 19 bp, Mus musculus
  siRNA target sequence for Plcz1 (NM_054066.2,1300-1318).
gaatagcaggcgtcaagaa

SEQ ID NO: 552482 - DNA, 19 bp, Mus musculus
  siRNA target sequence for Plcz1 (NM_054066.2,1305-1323).
gcaggcgtcaagaaaagga

SEQ ID NO: 552483 - DNA, 19 bp, Mus musculus
  siRNA target sequence for Plcz1 (NM_054066.2,1348-1366).
ccttatctgatcttgtcat

SEQ ID NO: 552484 - DNA, 19 bp, Mus musculus
  siRNA target sequence for Plcz1 (NM_054066.2,1349-1367).
cttatctgatcttgtcatt

SEQ ID NO: 552485 - DNA, 19 bp, Mus musculus
  siRNA target sequence for Plcz1 (NM_054066.2,1356-1374).
gatcttgtcatttatacta

SEQ ID NO: 552486 - DNA, 19 bp, Mus musculus
  siRNA target sequence for Plcz1 (NM_054066.2,1385-1403).
gttccgaaacttccaatat

SEQ ID NO: 552487 - DNA, 19 bp, Mus musculus
  siRNA target sequence for Plcz1 (NM_054066.2,1405-1423).
caagagtctatcagcaatt

SEQ ID NO: 552488 - DNA, 19 bp, Mus musculus
  siRNA target sequence for Plcz1 (NM_054066.2,1408-1426).
gagtctatcagcaatttaa

SEQ ID NO: 552489 - DNA, 19 bp, Mus musculus
  siRNA target sequence for Plcz1 (NM_054066.2,1419-1437).
caatttaatgagaccaatt

SEQ ID NO: 552490 - DNA, 19 bp, Mus musculus
  siRNA target sequence for Plcz1 (NM_054066.2,1448-1466).
gtctcgagctcgaaaactt

SEQ ID NO: 552491 - DNA, 19 bp, Mus musculus
  siRNA target sequence for Plcz1 (NM_054066.2,1453-1471).
gagctcgaaaactttccaa

SEQ ID NO: 552492 - DNA, 19 bp, Mus musculus
  siRNA target sequence for Plcz1 (NM_054066.2,1455-1473).
gctcgaaaactttccaaat

SEQ ID NO: 552493 - DNA, 19 bp, Mus musculus
  siRNA target sequence for Plcz1 (NM_054066.2,1456-1474).
ctcgaaaactttccaaatt

SEQ ID NO: 552494 - DNA, 19 bp, Mus musculus
  siRNA target sequence for Plcz1 (NM_054066.2,1477-1495).
gagtccatgagtttatttt

SEQ ID NO: 552495 - DNA, 19 bp, Mus musculus
  siRNA target sequence for Plcz1 (NM_054066.2,1506-1524).
gcattcatcaccagagtat

SEQ ID NO: 552496 - DNA, 19 bp, Mus musculus
  siRNA target sequence for Plcz1 (NM_054066.2,1507-1525).
cattcatcaccagagtata

SEQ ID NO: 552497 - DNA, 19 bp, Mus musculus
  siRNA target sequence for Plcz1 (NM_054066.2,1516-1534).
ccagagtataccccaaaat

SEQ ID NO: 552498 - DNA, 19 bp, Mus musculus
  siRNA target sequence for Plcz1 (NM_054066.2,1519-1537).
gagtataccccaaaatgat

SEQ ID NO: 552499 - DNA, 19 bp, Mus musculus
  siRNA target sequence for Plcz1 (NM_054066.2,1540-1558).
gagcagactcttctaactt

SEQ ID NO: 552500 - DNA, 19 bp, Mus musculus
  siRNA target sequence for Plcz1 (NM_054066.2,1616-1634).
ccctggactgcctatggat

SEQ ID NO: 552501 - DNA, 19 bp, Mus musculus
  siRNA target sequence for Plcz1 (NM_054066.2,1617-1635).
cctggactgcctatggatt

SEQ ID NO: 552502 - DNA, 19 bp, Mus musculus
  siRNA target sequence for Plcz1 (NM_054066.2,1618-1636).
ctggactgcctatggattt

SEQ ID NO: 552503 - DNA, 19 bp, Mus musculus
  siRNA target sequence for Plcz1 (NM_054066.2,1685-1703).
gccagacatccttagagat

SEQ ID NO: 552504 - DNA, 19 bp, Mus musculus
  siRNA target sequence for Plcz1 (NM_054066.2,1686-1704).
ccagacatccttagagata

SEQ ID NO: 552505 - DNA, 19 bp, Mus musculus
  siRNA target sequence for Plcz1 (NM_054066.2,1712-1730).
gggctttaacccaaatgaa

SEQ ID NO: 552506 - DNA, 19 bp, Mus musculus
  siRNA target sequence for Plcz1 (NM_054066.2,1756-1774).
ccctcacaatccgaatcat

SEQ ID NO: 552507 - DNA, 19 bp, Mus musculus
  siRNA target sequence for Plcz1 (NM_054066.2,1794-1812).
gttagctcatcctctaaca

SEQ ID NO: 552508 - DNA, 19 bp, Mus musculus
  siRNA target sequence for Plcz1 (NM_054066.2,1805-1823).
ctctaacacgcctgacata

SEQ ID NO: 552509 - DNA, 19 bp, Mus musculus
  siRNA target sequence for Plcz1 (NM_054066.2,1807-1825).
ctaacacgcctgacatagt

SEQ ID NO: 552510 - DNA, 19 bp, Mus musculus
  siRNA target sequence for Plcz1 (NM_054066.2,1813-1831).
cgcctgacatagtagtgat

SEQ ID NO: 552511 - DNA, 19 bp, Mus musculus
  siRNA target sequence for Plcz1 (NM_054066.2,1820-1838).
catagtagtgatcatagaa

SEQ ID NO: 552512 - DNA, 19 bp, Mus musculus
  siRNA target sequence for Plcz1 (NM_054066.2,1868-1886).
gcagcagactcgtgttgtt

SEQ ID NO: 552513 - DNA, 19 bp, Mus musculus
  siRNA target sequence for Plcz1 (NM_054066.2,1869-1887).
cagcagactcgtgttgtta

SEQ ID NO: 552514 - DNA, 19 bp, Mus musculus
  siRNA target sequence for Plcz1 (NM_054066.2,1872-1890).
cagactcgtgttgttaaga

SEQ ID NO: 552515 - DNA, 19 bp, Mus musculus
  siRNA target sequence for Plcz1 (NM_054066.2,1876-1894).
ctcgtgttgttaagaataa

SEQ ID NO: 552516 - DNA, 19 bp, Mus musculus
  siRNA target sequence for Plcz1 (NM_054066.2,1912-1930).
ggaatgaaacatttacatt

SEQ ID NO: 552517 - DNA, 19 bp, Mus musculus
  siRNA target sequence for Plcz1 (NM_054066.2,1943-1961).
gccagaactggcattgata

SEQ ID NO: 552518 - DNA, 19 bp, Mus musculus
  siRNA target sequence for Plcz1 (NM_054066.2,1952-1970).
ggcattgatacgttttgtt

SEQ ID NO: 552519 - DNA, 19 bp, Mus musculus
  siRNA target sequence for Plcz1 (NM_054066.2,2012-2030).
cgggcagtacactttacca

SEQ ID NO: 552520 - DNA, 19 bp, Mus musculus
  siRNA target sequence for Plcz1 (NM_054066.2,2018-2036).
gtacactttaccagttctt

SEQ ID NO: 552521 - DNA, 19 bp, Mus musculus
  siRNA target sequence for Plcz1 (NM_054066.2,2039-2057).
catgaacaaaggttatcgt

SEQ ID NO: 552522 - DNA, 19 bp, Mus musculus
  siRNA target sequence for Plcz1 (NM_054066.2,2094-2112).
gaaccttcctcactgttta

SEQ ID NO: 552523 - DNA, 19 bp, Mus musculus
  siRNA target sequence for Plcz1 (NM_054066.2,2102-2120).
ctcactgtttatttatgtt

SEQ ID NO: 552524 - DNA, 19 bp, Mus musculus
  siRNA target sequence for Plg (NM_008877.2,120-138).
ctcgctggatggctacata

SEQ ID NO: 552525 - DNA, 19 bp, Mus musculus
  siRNA target sequence for Plg (NM_008877.2,124-142).
ctggatggctacataagca

SEQ ID NO: 552526 - DNA, 19 bp, Mus musculus
  siRNA target sequence for Plg (NM_008877.2,289-307).
gcggagaacagcaagactt

SEQ ID NO: 552527 - DNA, 19 bp, Mus musculus
  siRNA target sequence for Plg (NM_008877.2,320-338).
ggatgagagacgtcatctt

SEQ ID NO: 552528 - DNA, 19 bp, Mus musculus
  siRNA target sequence for Plg (NM_008877.2,321-339).
gatgagagacgtcatctta

SEQ ID NO: 552529 - DNA, 19 bp, Mus musculus
  siRNA target sequence for Plg (NM_008877.2,326-344).
gagacgtcatcttattcga

SEQ ID NO: 552530 - DNA, 19 bp, Mus musculus
  siRNA target sequence for Plg (NM_008877.2,328-346).
gacgtcatcttattcgaaa

SEQ ID NO: 552531 - DNA, 19 bp, Mus musculus
  siRNA target sequence for Plg (NM_008877.2,331-349).
gtcatcttattcgaaaaga

SEQ ID NO: 552532 - DNA, 19 bp, Mus musculus
  siRNA target sequence for Plg (NM_008877.2,333-351).
catcttattcgaaaagaga

SEQ ID NO: 552533 - DNA, 19 bp, Mus musculus
  siRNA target sequence for Plg (NM_008877.2,343-361).
gaaaagagagtgtatctgt

SEQ ID NO: 552534 - DNA, 19 bp, Mus musculus
  siRNA target sequence for Plg (NM_008877.2,352-370).
gtgtatctgtcagaatgta

SEQ ID NO: 552535 - DNA, 19 bp, Mus musculus
  siRNA target sequence for Plg (NM_008877.2,421-439).
ggtgttgcctgtcaaaagt

SEQ ID NO: 552536 - DNA, 19 bp, Mus musculus
  siRNA target sequence for Plg (NM_008877.2,454-472).
ccccacgtacccaactact

SEQ ID NO: 552537 - DNA, 19 bp, Mus musculus
  siRNA target sequence for Plg (NM_008877.2,496-514).
ggactagaagagaactact

SEQ ID NO: 552538 - DNA, 19 bp, Mus musculus
  siRNA target sequence for Plg (NM_008877.2,565-583).
ccggacaagagatatgact

SEQ ID NO: 552539 - DNA, 19 bp, Mus musculus
  siRNA target sequence for Plg (NM_008877.2,566-584).
cggacaagagatatgacta

SEQ ID NO: 552540 - DNA, 19 bp, Mus musculus
  siRNA target sequence for Plg (NM_008877.2,585-603).
ctgcaacattcctgaatgt

SEQ ID NO: 552541 - DNA, 19 bp, Mus musculus
  siRNA target sequence for Plg (NM_008877.2,698-716).
gcccacatgctcatggata

SEQ ID NO: 552542 - DNA, 19 bp, Mus musculus
  siRNA target sequence for Plg (NM_008877.2,741-759).
gaacctgaagatgaattat

SEQ ID NO: 552543 - DNA, 19 bp, Mus musculus
  siRNA target sequence for Plg (NM_008877.2,813-831).
caaacgctgggaatactgt

SEQ ID NO: 552544 - DNA, 19 bp, Mus musculus
  siRNA target sequence for Plg (NM_008877.2,865-883).
cccagcccaacctaccaat

SEQ ID NO: 552545 - DNA, 19 bp, Mus musculus
  siRNA target sequence for Plg (NM_008877.2,1433-1451).
gagggagtgttgtggaatt

SEQ ID NO: 552546 - DNA, 19 bp, Mus musculus
  siRNA target sequence for Plg (NM_008877.2,1444-1462).
gtggaattgcccacagttt

SEQ ID NO: 552547 - DNA, 19 bp, Mus musculus
  siRNA target sequence for Plg (NM_008877.2,1627-1645).
cgggcaggtctggaaaaga

SEQ ID NO: 552548 - DNA, 19 bp, Mus musculus
  siRNA target sequence for Plg (NM_008877.2,1633-1651).
ggtctggaaaagaactact

SEQ ID NO: 552549 - DNA, 19 bp, Mus musculus
  siRNA target sequence for Plg (NM_008877.2,1774-1792).
caggtggaaccgaagaaat

SEQ ID NO: 552550 - DNA, 19 bp, Mus musculus
  siRNA target sequence for Plg (NM_008877.2,1845-1863).
gcaaatcagccttagaaca

SEQ ID NO: 552551 - DNA, 19 bp, Mus musculus
  siRNA target sequence for Plg (NM_008877.2,1846-1864).
caaatcagccttagaacaa

SEQ ID NO: 552552 - DNA, 19 bp, Mus musculus
  siRNA target sequence for Plg (NM_008877.2,1927-1945).
gcccactgtttggagaaat

SEQ ID NO: 552553 - DNA, 19 bp, Mus musculus
  siRNA target sequence for Plg (NM_008877.2,1929-1947).
ccactgtttggagaaatct

SEQ ID NO: 552554 - DNA, 19 bp, Mus musculus
  siRNA target sequence for Plg (NM_008877.2,1930-1948).
cactgtttggagaaatctt

SEQ ID NO: 552555 - DNA, 19 bp, Mus musculus
  siRNA target sequence for Plg (NM_008877.2,1946-1964).
cttcaagacctgaattcta

SEQ ID NO: 552556 - DNA, 19 bp, Mus musculus
  siRNA target sequence for Plg (NM_008877.2,1949-1967).
caagacctgaattctacaa

SEQ ID NO: 552557 - DNA, 19 bp, Mus musculus
  siRNA target sequence for Plg (NM_008877.2,1954-1972).
cctgaattctacaaggtta

SEQ ID NO: 552558 - DNA, 19 bp, Mus musculus
  siRNA target sequence for Plg (NM_008877.2,1955-1973).
ctgaattctacaaggttat

SEQ ID NO: 552559 - DNA, 19 bp, Mus musculus
  siRNA target sequence for Plg (NM_008877.2,1979-1997).
gtgcgcacgaagaatatat

SEQ ID NO: 552560 - DNA, 19 bp, Mus musculus
  siRNA target sequence for Plg (NM_008877.2,2046-2064).
gcccaacaaccgtgacatt

SEQ ID NO: 552561 - DNA, 19 bp, Mus musculus
  siRNA target sequence for Plg (NM_008877.2,2093-2111).
ccatcacggataaagtcat

SEQ ID NO: 552562 - DNA, 19 bp, Mus musculus
  siRNA target sequence for Plg (NM_008877.2,2094-2112).
catcacggataaagtcatt

SEQ ID NO: 552563 - DNA, 19 bp, Mus musculus
  siRNA target sequence for Plg (NM_008877.2,2122-2140).
ctgccatctccaaattaca

SEQ ID NO: 552564 - DNA, 19 bp, Mus musculus
  siRNA target sequence for Plg (NM_008877.2,2142-2160).
ggttgctgaccggacaata

SEQ ID NO: 552565 - DNA, 19 bp, Mus musculus
  siRNA target sequence for Plg (NM_008877.2,2143-2161).
gttgctgaccggacaatat

SEQ ID NO: 552566 - DNA, 19 bp, Mus musculus
  siRNA target sequence for Plg (NM_008877.2,2146-2164).
gctgaccggacaatatgtt

SEQ ID NO: 552567 - DNA, 19 bp, Mus musculus
  siRNA target sequence for Plg (NM_008877.2,2147-2165).
ctgaccggacaatatgtta

SEQ ID NO: 552568 - DNA, 19 bp, Mus musculus
  siRNA target sequence for Plg (NM_008877.2,2149-2167).
gaccggacaatatgttaca

SEQ ID NO: 552569 - DNA, 19 bp, Mus musculus
  siRNA target sequence for Plg (NM_008877.2,2152-2170).
cggacaatatgttacatca

SEQ ID NO: 552570 - DNA, 19 bp, Mus musculus
  siRNA target sequence for Plg (NM_008877.2,2252-2270).
gcaaccgcgtcgagtatct

SEQ ID NO: 552571 - DNA, 19 bp, Mus musculus
  siRNA target sequence for Plg (NM_008877.2,2258-2276).
gcgtcgagtatctgaacaa

SEQ ID NO: 552572 - DNA, 19 bp, Mus musculus
  siRNA target sequence for Plg (NM_008877.2,2260-2278).
gtcgagtatctgaacaaca

SEQ ID NO: 552573 - DNA, 19 bp, Mus musculus
  siRNA target sequence for Plg (NM_008877.2,2269-2287).
ctgaacaacagagtcaaat

SEQ ID NO: 552574 - DNA, 19 bp, Mus musculus
  siRNA target sequence for Plg (NM_008877.2,2367-2385).
cgagaaggacaagtacatt

SEQ ID NO: 552575 - DNA, 19 bp, Mus musculus
  siRNA target sequence for Plg (NM_008877.2,2373-2391).
ggacaagtacattttacaa

SEQ ID NO: 552576 - DNA, 19 bp, Mus musculus
  siRNA target sequence for Plg (NM_008877.2,2414-2432).
gctgtgctcgccccaataa

SEQ ID NO: 552577 - DNA, 19 bp, Mus musculus
  siRNA target sequence for Plg (NM_008877.2,2452-2470).
gtctcacggtttgttgatt

SEQ ID NO: 552578 - DNA, 19 bp, Mus musculus
  siRNA target sequence for Plg (NM_008877.2,2456-2474).
cacggtttgttgattggat

SEQ ID NO: 552579 - DNA, 19 bp, Mus musculus
  siRNA target sequence for Plscr2 (NM_008880.2,310-328).
ctcctcgctcaggaacata

SEQ ID NO: 552580 - DNA, 19 bp, Mus musculus
  siRNA target sequence for Plscr2 (NM_008880.2,312-330).
cctcgctcaggaacatact

SEQ ID NO: 552581 - DNA, 19 bp, Mus musculus
  siRNA target sequence for Plscr2 (NM_008880.2,313-331).
ctcgctcaggaacatactt

SEQ ID NO: 552582 - DNA, 19 bp, Mus musculus
  siRNA target sequence for Plscr2 (NM_008880.2,458-476).
ctacacagtctcaacatct

SEQ ID NO: 552583 - DNA, 19 bp, Mus musculus
  siRNA target sequence for Plscr2 (NM_008880.2,472-490).
catctggacatgaaggtta

SEQ ID NO: 552584 - DNA, 19 bp, Mus musculus
  siRNA target sequence for Plscr2 (NM_008880.2,493-511).
ctgctacacggcttcctat

SEQ ID NO: 552585 - DNA, 19 bp, Mus musculus
  siRNA target sequence for Plscr2 (NM_008880.2,496-514).
ctacacggcttcctattca

SEQ ID NO: 552586 - DNA, 19 bp, Mus musculus
  siRNA target sequence for Plscr2 (NM_008880.2,499-517).
cacggcttcctattcaaaa

SEQ ID NO: 552587 - DNA, 19 bp, Mus musculus
  siRNA target sequence for Plscr2 (NM_008880.2,501-519).
cggcttcctattcaaaata

SEQ ID NO: 552588 - DNA, 19 bp, Mus musculus
  siRNA target sequence for Plscr2 (NM_008880.2,558-576).
gcaccaccacctattctga

SEQ ID NO: 552589 - DNA, 19 bp, Mus musculus
  siRNA target sequence for Plscr2 (NM_008880.2,559-577).
caccaccacctattctgaa

SEQ ID NO: 552590 - DNA, 19 bp, Mus musculus
  siRNA target sequence for Plscr2 (NM_008880.2,585-603).
cctgggctagaatacttaa

SEQ ID NO: 552591 - DNA, 19 bp, Mus musculus
  siRNA target sequence for Plscr2 (NM_008880.2,586-604).
ctgggctagaatacttaaa

SEQ ID NO: 552592 - DNA, 19 bp, Mus musculus
  siRNA target sequence for Plscr2 (NM_008880.2,632-650).
gcaagttgaacttctagaa

SEQ ID NO: 552593 - DNA, 19 bp, Mus musculus
  siRNA target sequence for Plscr2 (NM_008880.2,698-716).
cctcgggcagatggtttat

SEQ ID NO: 552594 - DNA, 19 bp, Mus musculus
  siRNA target sequence for Plscr2 (NM_008880.2,769-787).
gacctttcactttaagaat

SEQ ID NO: 552595 - DNA, 19 bp, Mus musculus
  siRNA target sequence for Plscr2 (NM_008880.2,959-977).
cgacaagagggagaatgtt

SEQ ID NO: 552596 - DNA, 19 bp, Mus musculus
  siRNA target sequence for Plscr2 (NM_008880.2,1050-1068).
gaagtgactagaattggta

SEQ ID NO: 552597 - DNA, 19 bp, Mus musculus
  siRNA target sequence for Plscr2 (NM_008880.2,1109-1127).
cacggattcggataacttt

SEQ ID NO: 552598 - DNA, 19 bp, Mus musculus
  siRNA target sequence for Plscr2 (NM_008880.2,1119-1137).
gataactttgggatccaat

SEQ ID NO: 552599 - DNA, 19 bp, Mus musculus
  siRNA target sequence for Plscr3 (NM_023564.2,613-631).
ctcctggcctcgaattcct

SEQ ID NO: 552600 - DNA, 19 bp, Mus musculus
  siRNA target sequence for Plscr3 (NM_023564.2,629-647).
cctagtgcagattgatcaa

SEQ ID NO: 552601 - DNA, 19 bp, Mus musculus
  siRNA target sequence for Plscr3 (NM_023564.2,630-648).
ctagtgcagattgatcaaa

SEQ ID NO: 552602 - DNA, 19 bp, Mus musculus
  siRNA target sequence for Plscr3 (NM_023564.2,667-685).
ctgaacgagtggaaacgtt

SEQ ID NO: 552603 - DNA, 19 bp, Mus musculus
  siRNA target sequence for Plscr3 (NM_023564.2,690-708).
ggctgggagacctgtaata

SEQ ID NO: 552604 - DNA, 19 bp, Mus musculus
  siRNA target sequence for Plscr3 (NM_023564.2,694-712).
gggagacctgtaatatgta

SEQ ID NO: 552605 - DNA, 19 bp, Mus musculus
  siRNA target sequence for Plscr3 (NM_023564.2,695-713).
ggagacctgtaatatgtat

SEQ ID NO: 552606 - DNA, 19 bp, Mus musculus
  siRNA target sequence for Plscr3 (NM_023564.2,849-867).
ctcctccgcccacttcatt

SEQ ID NO: 552607 - DNA, 19 bp, Mus musculus
  siRNA target sequence for Plscr3 (NM_023564.2,1139-1157).
cacagatgccgatgacttt

SEQ ID NO: 552608 - DNA, 19 bp, Mus musculus
  siRNA target sequence for Plscr3 (NM_023564.2,1171-1189).
cagtcgatctagatgtgaa

SEQ ID NO: 552609 - DNA, 19 bp, Mus musculus
  siRNA target sequence for Plscr3 (NM_023564.2,1214-1232).
cacgttcctcatcgattat

SEQ ID NO: 552610 - DNA, 19 bp, Mus musculus
  siRNA target sequence for Plscr3 (NM_023564.2,1216-1234).
cgttcctcatcgattatat

SEQ ID NO: 552611 - DNA, 19 bp, Mus musculus
  siRNA target sequence for Plscr3 (NM_023564.2,1221-1239).
ctcatcgattatatgttct

SEQ ID NO: 552612 - DNA, 19 bp, Mus musculus
  siRNA target sequence for Ppef2 (NM_011148.2,441-459).
ggaacatcttccagtctat

SEQ ID NO: 552613 - DNA, 19 bp, Mus musculus
  siRNA target sequence for Ppef2 (NM_011148.2,482-500).
caggtcaagctccatgaat

SEQ ID NO: 552614 - DNA, 19 bp, Mus musculus
  siRNA target sequence for Ppef2 (NM_011148.2,485-503).
gtcaagctccatgaattct

SEQ ID NO: 552615 - DNA, 19 bp, Mus musculus
  siRNA target sequence for Ppef2 (NM_011148.2,537-555).
gccaccatgagagagattt

SEQ ID NO: 552616 - DNA, 19 bp, Mus musculus
  siRNA target sequence for Ppef2 (NM_011148.2,848-866).
catggccagttggatgatt

SEQ ID NO: 552617 - DNA, 19 bp, Mus musculus
  siRNA target sequence for Ppef2 (NM_011148.2,851-869).
ggccagttggatgatttaa

SEQ ID NO: 552618 - DNA, 19 bp, Mus musculus
  siRNA target sequence for Ppef2 (NM_011148.2,907-925).
gagagcatacgtgttcaat

SEQ ID NO: 552619 - DNA, 19 bp, Mus musculus
  siRNA target sequence for Ppef2 (NM_011148.2,1003-1021).
ggagttccatcttaacaga

SEQ ID NO: 552620 - DNA, 19 bp, Mus musculus
  siRNA target sequence for Ppef2 (NM_011148.2,1065-1083).
ccaaggaagtgatgcataa

SEQ ID NO: 552621 - DNA, 19 bp, Mus musculus
  siRNA target sequence for Ppef2 (NM_011148.2,1070-1088).
gaagtgatgcataaataca

SEQ ID NO: 552622 - DNA, 19 bp, Mus musculus
  siRNA target sequence for Ppef2 (NM_011148.2,1150-1168).
cactctggttgatgagaaa

SEQ ID NO: 552623 - DNA, 19 bp, Mus musculus
  siRNA target sequence for Ppef2 (NM_011148.2,1152-1170).
ctctggttgatgagaaagt

SEQ ID NO: 552624 - DNA, 19 bp, Mus musculus
  siRNA target sequence for Ppef2 (NM_011148.2,1210-1228).
ggaacttctggctaaacta

SEQ ID NO: 552625 - DNA, 19 bp, Mus musculus
  siRNA target sequence for Ppef2 (NM_011148.2,1630-1648).
gtggaagcaggttgtagat

SEQ ID NO: 552626 - DNA, 19 bp, Mus musculus
  siRNA target sequence for Ppef2 (NM_011148.2,1632-1650).
ggaagcaggttgtagatat

SEQ ID NO: 552627 - DNA, 19 bp, Mus musculus
  siRNA target sequence for Ppef2 (NM_011148.2,1637-1655).
caggttgtagatattctgt

SEQ ID NO: 552628 - DNA, 19 bp, Mus musculus
  siRNA target sequence for Ppef2 (NM_011148.2,1700-1718).
cgaggaggaggctgttact

SEQ ID NO: 552629 - DNA, 19 bp, Mus musculus
  siRNA target sequence for Ppef2 (NM_011148.2,1734-1752).
cagaacggttgatggaaaa

SEQ ID NO: 552630 - DNA, 19 bp, Mus musculus
  siRNA target sequence for Ppef2 (NM_011148.2,1739-1757).
cggttgatggaaaaataca

SEQ ID NO: 552631 - DNA, 19 bp, Mus musculus
  siRNA target sequence for Ppef2 (NM_011148.2,1740-1758).
ggttgatggaaaaatacaa

SEQ ID NO: 552632 - DNA, 19 bp, Mus musculus
  siRNA target sequence for Ppef2 (NM_011148.2,1814-1832).
cacaaccgcaaggtgttaa

SEQ ID NO: 552633 - DNA, 19 bp, Mus musculus
  siRNA target sequence for Ppef2 (NM_011148.2,1825-1843).
ggtgttaaccatcttttct

SEQ ID NO: 552634 - DNA, 19 bp, Mus musculus
  siRNA target sequence for Ppef2 (NM_011148.2,1845-1863).
cctccaactactatgaagt

SEQ ID NO: 552635 - DNA, 19 bp, Mus musculus
  siRNA target sequence for Ppef2 (NM_011148.2,1846-1864).
ctccaactactatgaagtt

SEQ ID NO: 552636 - DNA, 19 bp, Mus musculus
  siRNA target sequence for Ppef2 (NM_011148.2,1899-1917).
cagccctgactccacatat

SEQ ID NO: 552637 - DNA, 19 bp, Mus musculus
  siRNA target sequence for Ppef2 (NM_011148.2,1911-1929).
cacatatcgtgcagtatca

SEQ ID NO: 552638 - DNA, 19 bp, Mus musculus
  siRNA target sequence for Ppef2 (NM_011148.2,1941-1959).
cgacccacaggctaaccat

SEQ ID NO: 552639 - DNA, 19 bp, Mus musculus
  siRNA target sequence for Ppef2 (NM_011148.2,1996-2014).
cagagcccttcgacagaaa

SEQ ID NO: 552640 - DNA, 19 bp, Mus musculus
  siRNA target sequence for Ppef2 (NM_011148.2,1998-2016).
gagcccttcgacagaaatt

SEQ ID NO: 552641 - DNA, 19 bp, Mus musculus
  siRNA target sequence for Ppef2 (NM_011148.2,2000-2018).
gcccttcgacagaaattat

SEQ ID NO: 552642 - DNA, 19 bp, Mus musculus
  siRNA target sequence for Ppef2 (NM_011148.2,2001-2019).
cccttcgacagaaattatt

SEQ ID NO: 552643 - DNA, 19 bp, Mus musculus
  siRNA target sequence for Ppef2 (NM_011148.2,2002-2020).
ccttcgacagaaattattt

SEQ ID NO: 552644 - DNA, 19 bp, Mus musculus
  siRNA target sequence for Ppef2 (NM_011148.2,2031-2049).
cggacctgcttgttgagtt

SEQ ID NO: 552645 - DNA, 19 bp, Mus musculus
  siRNA target sequence for Ppef2 (NM_011148.2,2032-2050).
ggacctgcttgttgagttt

SEQ ID NO: 552646 - DNA, 19 bp, Mus musculus
  siRNA target sequence for Ppef2 (NM_011148.2,2033-2051).
gacctgcttgttgagttta

SEQ ID NO: 552647 - DNA, 19 bp, Mus musculus
  siRNA target sequence for Ppef2 (NM_011148.2,2078-2096).
gtcatcaccctgagtgatt

SEQ ID NO: 552648 - DNA, 19 bp, Mus musculus
  siRNA target sequence for Ppef2 (NM_011148.2,2150-2168).
cggccacaactggtgaata

SEQ ID NO: 552649 - DNA, 19 bp, Mus musculus
  siRNA target sequence for Ppef2 (NM_011148.2,2152-2170).
gccacaactggtgaatagt

SEQ ID NO: 552650 - DNA, 19 bp, Mus musculus
  siRNA target sequence for Ppef2 (NM_011148.2,2174-2192).
gcggataacgtgttggaat

SEQ ID NO: 552651 - DNA, 19 bp, Mus musculus
  siRNA target sequence for Ppef2 (NM_011148.2,2175-2193).
cggataacgtgttggaata

SEQ ID NO: 552652 - DNA, 19 bp, Mus musculus
  siRNA target sequence for Ppef2 (NM_011148.2,2196-2214).
ggtcctggttggacagttt

SEQ ID NO: 552653 - DNA, 19 bp, Mus musculus
  siRNA target sequence for Ppef2 (NM_011148.2,2227-2245).
gctgagccgagagaatatt

SEQ ID NO: 552654 - DNA, 19 bp, Mus musculus
  siRNA target sequence for Ppef2 (NM_011148.2,2250-2268).
cgagtttgctggaaaagct

SEQ ID NO: 552655 - DNA, 19 bp, Mus musculus
  siRNA target sequence for Ppef2 (NM_011148.2,2308-2326).
catagacagcgatcattca

SEQ ID NO: 552656 - DNA, 19 bp, Mus musculus
  siRNA target sequence for Ppef2 (NM_011148.2,2316-2334).
gcgatcattcaggattcat

SEQ ID NO: 552657 - DNA, 19 bp, Mus musculus
  siRNA target sequence for Ppef2 (NM_011148.2,2366-2384).
ctcttcagctcacatatga

SEQ ID NO: 552658 - DNA, 19 bp, Mus musculus
  siRNA target sequence for Ppef2 (NM_011148.2,2450-2468).
cacatcgacatcaatgagt

SEQ ID NO: 552659 - DNA, 19 bp, Mus musculus
  siRNA target sequence for Ppp3r1 (NM_024459.1,233-251).
gtacagcgggtaatagata

SEQ ID NO: 552660 - DNA, 19 bp, Mus musculus
  siRNA target sequence for Ppp3r1 (NM_024459.1,240-258).
gggtaatagatatattcga

SEQ ID NO: 552661 - DNA, 19 bp, Mus musculus
  siRNA target sequence for Ppp3r1 (NM_024459.1,318-336).
gtgtcaaaggcgataagga

SEQ ID NO: 552662 - DNA, 19 bp, Mus musculus
  siRNA target sequence for Ppp3r1 (NM_024459.1,327-345).
gcgataaggaacagaagtt

SEQ ID NO: 552663 - DNA, 19 bp, Mus musculus
  siRNA target sequence for Ppp3r1 (NM_024459.1,348-366).
ggtttgcttttcgtatcta

SEQ ID NO: 552664 - DNA, 19 bp, Mus musculus
  siRNA target sequence for Ppp3r1 (NM_024459.1,353-371).
gcttttcgtatctatgaca

SEQ ID NO: 552665 - DNA, 19 bp, Mus musculus
  siRNA target sequence for Ppp3r1 (NM_024459.1,359-377).
cgtatctatgacatggata

SEQ ID NO: 552666 - DNA, 19 bp, Mus musculus
  siRNA target sequence for Ppp3r1 (NM_024459.1,427-445).
ggtgggcaacaatctgaaa

SEQ ID NO: 552667 - DNA, 19 bp, Mus musculus
  siRNA target sequence for Ppp3r1 (NM_024459.1,467-485).
gtagacaaaaccataataa

SEQ ID NO: 552668 - DNA, 19 bp, Mus musculus
  siRNA target sequence for Ppp3r1 (NM_024459.1,523-541).
ggaattctgtgctgtaagt

SEQ ID NO: 552669 - DNA, 19 bp, Mus musculus
  siRNA target sequence for Prf1 (NM_011073.2,131-149).
ccactcggtcagaatgcaa

SEQ ID NO: 552670 - DNA, 19 bp, Mus musculus
  siRNA target sequence for Prf1 (NM_011073.2,266-284).
gcacctgcaccctctgtaa

SEQ ID NO: 552671 - DNA, 19 bp, Mus musculus
  siRNA target sequence for Prf1 (NM_011073.2,267-285).
cacctgcaccctctgtaaa

SEQ ID NO: 552672 - DNA, 19 bp, Mus musculus
  siRNA target sequence for Prf1 (NM_011073.2,419-437).
ctgctaatatcaataacga

SEQ ID NO: 552673 - DNA, 19 bp, Mus musculus
  siRNA target sequence for Prf1 (NM_011073.2,507-525).
ctccaaggtagccaatttt

SEQ ID NO: 552674 - DNA, 19 bp, Mus musculus
  siRNA target sequence for Prf1 (NM_011073.2,539-557).
cctatcaggaccagtacaa

SEQ ID NO: 552675 - DNA, 19 bp, Mus musculus
  siRNA target sequence for Prf1 (NM_011073.2,574-592).
gtagagtgtcgcatgtaca

SEQ ID NO: 552676 - DNA, 19 bp, Mus musculus
  siRNA target sequence for Prf1 (NM_011073.2,577-595).
gagtgtcgcatgtacagtt

SEQ ID NO: 552677 - DNA, 19 bp, Mus musculus
  siRNA target sequence for Prf1 (NM_011073.2,579-597).
gtgtcgcatgtacagtttt

SEQ ID NO: 552678 - DNA, 19 bp, Mus musculus
  siRNA target sequence for Prf1 (NM_011073.2,619-637).
ctccaccttgacttcaaaa

SEQ ID NO: 552679 - DNA, 19 bp, Mus musculus
  siRNA target sequence for Prf1 (NM_011073.2,707-725).
cctatggcacgcactttat

SEQ ID NO: 552680 - DNA, 19 bp, Mus musculus
  siRNA target sequence for Prf1 (NM_011073.2,866-884).
gcgtctccagtgaatacaa

SEQ ID NO: 552681 - DNA, 19 bp, Mus musculus
  siRNA target sequence for Prf1 (NM_011073.2,867-885).
cgtctccagtgaatacaaa

SEQ ID NO: 552682 - DNA, 19 bp, Mus musculus
  siRNA target sequence for Prf1 (NM_011073.2,948-966).
gcgtcacgtcgaagtactt

SEQ ID NO: 552683 - DNA, 19 bp, Mus musculus
  siRNA target sequence for Prf1 (NM_011073.2,1138-1156).
caggctatcagccattata

SEQ ID NO: 552684 - DNA, 19 bp, Mus musculus
  siRNA target sequence for Prf1 (NM_011073.2,1168-1186).
gcccggtggcagaactgta

SEQ ID NO: 552685 - DNA, 19 bp, Mus musculus
  siRNA target sequence for Prf1 (NM_011073.2,1196-1214).
gcaggtcaggccagcataa

SEQ ID NO: 552686 - DNA, 19 bp, Mus musculus
  siRNA target sequence for Prf1 (NM_011073.2,1200-1218).
gtcaggccagcataagagt

SEQ ID NO: 552687 - DNA, 19 bp, Mus musculus
  siRNA target sequence for Prf1 (NM_011073.2,1289-1307).
ggggcttggcccatttggt

SEQ ID NO: 552688 - DNA, 19 bp, Mus musculus
  siRNA target sequence for Prf1 (NM_011073.2,1358-1376).
ctgatgcctacctaaaggt

SEQ ID NO: 552689 - DNA, 19 bp, Mus musculus
  siRNA target sequence for Prf1 (NM_011073.2,1364-1382).
cctacctaaaggtcttctt

SEQ ID NO: 552690 - DNA, 19 bp, Mus musculus
  siRNA target sequence for Prf1 (NM_011073.2,1405-1423).
ggtgtcgtgtggaacaata

SEQ ID NO: 552691 - DNA, 19 bp, Mus musculus
  siRNA target sequence for Prf1 (NM_011073.2,1408-1426).
gtcgtgtggaacaataaca

SEQ ID NO: 552692 - DNA, 19 bp, Mus musculus
  siRNA target sequence for Prf1 (NM_011073.2,1410-1428).
cgtgtggaacaataacaat

SEQ ID NO: 552693 - DNA, 19 bp, Mus musculus
  siRNA target sequence for Prf1 (NM_011073.2,1430-1448).
cccggtggactgacaagat

SEQ ID NO: 552694 - DNA, 19 bp, Mus musculus
  siRNA target sequence for Prf1 (NM_011073.2,1594-1612).
cacggcagggtgaaattct

SEQ ID NO: 552695 - DNA, 19 bp, Mus musculus
  siRNA target sequence for Proc (NM_008934.1,43-61).
gtccacctggggaatatct

SEQ ID NO: 552696 - DNA, 19 bp, Mus musculus
  siRNA target sequence for Proc (NM_008934.1,49-67).
ctggggaatatctagcata

SEQ ID NO: 552697 - DNA, 19 bp, Mus musculus
  siRNA target sequence for Proc (NM_008934.1,211-229).
ggcccaggagattttccaa

SEQ ID NO: 552698 - DNA, 19 bp, Mus musculus
  siRNA target sequence for Proc (NM_008934.1,248-266).
gccttctggatcaagtact

SEQ ID NO: 552699 - DNA, 19 bp, Mus musculus
  siRNA target sequence for Proc (NM_008934.1,249-267).
ccttctggatcaagtactt

SEQ ID NO: 552700 - DNA, 19 bp, Mus musculus
  siRNA target sequence for Proc (NM_008934.1,421-439).
ggactgtcgggtgaacaat

SEQ ID NO: 552701 - DNA, 19 bp, Mus musculus
  siRNA target sequence for Proc (NM_008934.1,532-550).
caagtccactgtgaatttt

SEQ ID NO: 552702 - DNA, 19 bp, Mus musculus
  siRNA target sequence for Proc (NM_008934.1,598-616).
caaacgagacacagactta

SEQ ID NO: 552703 - DNA, 19 bp, Mus musculus
  siRNA target sequence for Proc (NM_008934.1,632-650).
ccagatccaaggatagtca

SEQ ID NO: 552704 - DNA, 19 bp, Mus musculus
  siRNA target sequence for Proc (NM_008934.1,796-814).
cgtgaggcttggtgagtat

SEQ ID NO: 552705 - DNA, 19 bp, Mus musculus
  siRNA target sequence for Proc (NM_008934.1,801-819).
ggcttggtgagtatgatct

SEQ ID NO: 552706 - DNA, 19 bp, Mus musculus
  siRNA target sequence for Proc (NM_008934.1,1027-1045).
gacaggctggggctatcaa

SEQ ID NO: 552707 - DNA, 19 bp, Mus musculus
  siRNA target sequence for Proc (NM_008934.1,1038-1056).
gctatcaaagcgacagaat

SEQ ID NO: 552708 - DNA, 19 bp, Mus musculus
  siRNA target sequence for Proc (NM_008934.1,1287-1305).
gtgggcacaccaacaacta

SEQ ID NO: 552709 - DNA, 19 bp, Mus musculus
  siRNA target sequence for Proc (NM_008934.1,1322-1340).
gtgggaagctacctcaaat

SEQ ID NO: 552710 - DNA, 19 bp, Mus musculus
  siRNA target sequence for Proc (NM_008934.1,1325-1343).
ggaagctacctcaaatgga

SEQ ID NO: 552711 - DNA, 19 bp, Mus musculus
  siRNA target sequence for Proc (NM_008934.1,1326-1344).
gaagctacctcaaatggat

SEQ ID NO: 552712 - DNA, 19 bp, Mus musculus
  siRNA target sequence for Proz (NM_025834.2,485-503).
cctgtgcaatggctaaaaa

SEQ ID NO: 552713 - DNA, 19 bp, Mus musculus
  siRNA target sequence for Proz (NM_025834.2,486-504).
ctgtgcaatggctaaaaat

SEQ ID NO: 552714 - DNA, 19 bp, Mus musculus
  siRNA target sequence for Proz (NM_025834.2,488-506).
gtgcaatggctaaaaatga

SEQ ID NO: 552715 - DNA, 19 bp, Mus musculus
  siRNA target sequence for Proz (NM_025834.2,490-508).
gcaatggctaaaaatgaat

SEQ ID NO: 552716 - DNA, 19 bp, Mus musculus
  siRNA target sequence for Proz (NM_025834.2,524-542).
cggatggatgccagcattt

SEQ ID NO: 552717 - DNA, 19 bp, Mus musculus
  siRNA target sequence for Proz (NM_025834.2,553-571).
gggcagtcatcttacatgt

SEQ ID NO: 552718 - DNA, 19 bp, Mus musculus
  siRNA target sequence for Proz (NM_025834.2,597-615).
gggcaaggaccagaaatca

SEQ ID NO: 552719 - DNA, 19 bp, Mus musculus
  siRNA target sequence for Proz (NM_025834.2,598-616).
ggcaaggaccagaaatcat

SEQ ID NO: 552720 - DNA, 19 bp, Mus musculus
  siRNA target sequence for Proz (NM_025834.2,653-671).
cttccgaacacatcagaat

SEQ ID NO: 552721 - DNA, 19 bp, Mus musculus
  siRNA target sequence for Proz (NM_025834.2,707-725).
ggcaggtcagattaacaaa

SEQ ID NO: 552722 - DNA, 19 bp, Mus musculus
  siRNA target sequence for Proz (NM_025834.2,708-726).
gcaggtcagattaacaaat

SEQ ID NO: 552723 - DNA, 19 bp, Mus musculus
  siRNA target sequence for Proz (NM_025834.2,785-803).
cagcaaagtgttcgttatt

SEQ ID NO: 552724 - DNA, 19 bp, Mus musculus
  siRNA target sequence for Proz (NM_025834.2,788-806).
caaagtgttcgttattgca

SEQ ID NO: 552725 - DNA, 19 bp, Mus musculus
  siRNA target sequence for Proz (NM_025834.2,816-834).
cagtgtaaaagcaaatgtt

SEQ ID NO: 552726 - DNA, 19 bp, Mus musculus
  siRNA target sequence for Proz (NM_025834.2,1101-1119).
cggacagaccctgaatgta

SEQ ID NO: 552727 - DNA, 19 bp, Mus musculus
  siRNA target sequence for Proz (NM_025834.2,1289-1307).
gatactccatgtggtttaa

SEQ ID NO: 552728 - DNA, 19 bp, Mus musculus
  siRNA target sequence for Proz (NM_025834.2,1295-1313).
ccatgtggtttaaacagat

SEQ ID NO: 552729 - DNA, 19 bp, Mus musculus
  siRNA target sequence for Proz (NM_025834.2,1301-1319).
ggtttaaacagatcatgaa

SEQ ID NO: 552730 - DNA, 19 bp, Mus musculus
  siRNA target sequence for Prss2 (NM_009430.1,299-317).
cggcaccccaattataatt

SEQ ID NO: 552731 - DNA, 19 bp, Mus musculus
  siRNA target sequence for Prss2 (NM_009430.1,301-319).
gcaccccaattataattca

SEQ ID NO: 552732 - DNA, 19 bp, Mus musculus
  siRNA target sequence for Prss2 (NM_009430.1,302-320).
caccccaattataattcat

SEQ ID NO: 552733 - DNA, 19 bp, Mus musculus
  siRNA target sequence for Prss2 (NM_009430.1,686-704).
gatgctcctggtgtataca

SEQ ID NO: 552734 - DNA, 19 bp, Mus musculus
  siRNA target sequence for Pva (NM_013645.2,89-107).
gactccttcgaccacaaaa

SEQ ID NO: 552735 - DNA, 19 bp, Mus musculus
  siRNA target sequence for Pva (NM_013645.2,93-111).
ccttcgaccacaaaaagtt

SEQ ID NO: 552736 - DNA, 19 bp, Mus musculus
  siRNA target sequence for Pva (NM_013645.2,152-170).
gtgaagaaggtgttccata

SEQ ID NO: 552737 - DNA, 19 bp, Mus musculus
  siRNA target sequence for Pva (NM_013645.2,209-227).
gagctggggtccattctga

SEQ ID NO: 552738 - DNA, 19 bp, Mus musculus
  siRNA target sequence for Rad21 (NM_009009.2,80-98).
gagggcctctggccaaaat

SEQ ID NO: 552739 - DNA, 19 bp, Mus musculus
  siRNA target sequence for Rad21 (NM_009009.2,82-100).
gggcctctggccaaaatct

SEQ ID NO: 552740 - DNA, 19 bp, Mus musculus
  siRNA target sequence for Rad21 (NM_009009.2,231-249).
gggagtagtccgcatctat

SEQ ID NO: 552741 - DNA, 19 bp, Mus musculus
  siRNA target sequence for Rad21 (NM_009009.2,233-251).
gagtagtccgcatctatca

SEQ ID NO: 552742 - DNA, 19 bp, Mus musculus
  siRNA target sequence for Rad21 (NM_009009.2,235-253).
gtagtccgcatctatcaca

SEQ ID NO: 552743 - DNA, 19 bp, Mus musculus
  siRNA target sequence for Rad21 (NM_009009.2,267-285).
cctcctcgcagactgtaat

SEQ ID NO: 552744 - DNA, 19 bp, Mus musculus
  siRNA target sequence for Rad21 (NM_009009.2,270-288).
cctcgcagactgtaatgaa

SEQ ID NO: 552745 - DNA, 19 bp, Mus musculus
  siRNA target sequence for Rad21 (NM_009009.2,275-293).
cagactgtaatgaagcatt

SEQ ID NO: 552746 - DNA, 19 bp, Mus musculus
  siRNA target sequence for Rad21 (NM_009009.2,279-297).
ctgtaatgaagcatttatt

SEQ ID NO: 552747 - DNA, 19 bp, Mus musculus
  siRNA target sequence for Rad21 (NM_009009.2,359-377).
cttataatgccattacttt

SEQ ID NO: 552748 - DNA, 19 bp, Mus musculus
  siRNA target sequence for Rad21 (NM_009009.2,384-402).
ggaattccacgattttgat

SEQ ID NO: 552749 - DNA, 19 bp, Mus musculus
  siRNA target sequence for Rad21 (NM_009009.2,407-425).
cactgccagatttagatga

SEQ ID NO: 552750 - DNA, 19 bp, Mus musculus
  siRNA target sequence for Rad21 (NM_009009.2,490-508).
gaagtcggaaacatcagta

SEQ ID NO: 552751 - DNA, 19 bp, Mus musculus
  siRNA target sequence for Rad21 (NM_009009.2,539-557).
gaatggatgaccgtgaaat

SEQ ID NO: 552752 - DNA, 19 bp, Mus musculus
  siRNA target sequence for Rad21 (NM_009009.2,544-562).
gatgaccgtgaaataatga

SEQ ID NO: 552753 - DNA, 19 bp, Mus musculus
  siRNA target sequence for Rad21 (NM_009009.2,579-597).
cgaggatgacgacatgtta

SEQ ID NO: 552754 - DNA, 19 bp, Mus musculus
  siRNA target sequence for Rad21 (NM_009009.2,642-660).
caccagcaacctgaatgaa

SEQ ID NO: 552755 - DNA, 19 bp, Mus musculus
  siRNA target sequence for Rad21 (NM_009009.2,678-696).
gtacgaagaccagtacaaa

SEQ ID NO: 552756 - DNA, 19 bp, Mus musculus
  siRNA target sequence for Rad21 (NM_009009.2,681-699).
cgaagaccagtacaaagat

SEQ ID NO: 552757 - DNA, 19 bp, Mus musculus
  siRNA target sequence for Rad21 (NM_009009.2,726-744).
cggtatattagatgacaaa

SEQ ID NO: 552758 - DNA, 19 bp, Mus musculus
  siRNA target sequence for Rad21 (NM_009009.2,901-919).
gaaccgatgccaactatga

SEQ ID NO: 552759 - DNA, 19 bp, Mus musculus
  siRNA target sequence for Rad21 (NM_009009.2,961-979).
gcgttggagcccattgata

SEQ ID NO: 552760 - DNA, 19 bp, Mus musculus
  siRNA target sequence for Rad21 (NM_009009.2,962-980).
cgttggagcccattgatat

SEQ ID NO: 552761 - DNA, 19 bp, Mus musculus
  siRNA target sequence for Rad21 (NM_009009.2,963-981).
gttggagcccattgatata

SEQ ID NO: 552762 - DNA, 19 bp, Mus musculus
  siRNA target sequence for Rad21 (NM_009009.2,1029-1047).
cagtgtcaaagaattggat

SEQ ID NO: 552763 - DNA, 19 bp, Mus musculus
  siRNA target sequence for Rad21 (NM_009009.2,1033-1051).
gtcaaagaattggatagta

SEQ ID NO: 552764 - DNA, 19 bp, Mus musculus
  siRNA target sequence for Rad21 (NM_009009.2,1044-1062).
ggatagtaagaccattaga

SEQ ID NO: 552765 - DNA, 19 bp, Mus musculus
  siRNA target sequence for Rad21 (NM_009009.2,1063-1081).
gcccagcttagcgattatt

SEQ ID NO: 552766 - DNA, 19 bp, Mus musculus
  siRNA target sequence for Rad21 (NM_009009.2,1065-1083).
ccagcttagcgattattct

SEQ ID NO: 552767 - DNA, 19 bp, Mus musculus
  siRNA target sequence for Rad21 (NM_009009.2,1068-1086).
gcttagcgattattctgat

SEQ ID NO: 552768 - DNA, 19 bp, Mus musculus
  siRNA target sequence for Rad21 (NM_009009.2,1069-1087).
cttagcgattattctgata

SEQ ID NO: 552769 - DNA, 19 bp, Mus musculus
  siRNA target sequence for Rad21 (NM_009009.2,1073-1091).
gcgattattctgatattgt

SEQ ID NO: 552770 - DNA, 19 bp, Mus musculus
  siRNA target sequence for Rad21 (NM_009009.2,1074-1092).
cgattattctgatattgtt

SEQ ID NO: 552771 - DNA, 19 bp, Mus musculus
  siRNA target sequence for Rad21 (NM_009009.2,1111-1129).
ccgccaaccaagaagctta

SEQ ID NO: 552772 - DNA, 19 bp, Mus musculus
  siRNA target sequence for Rad21 (NM_009009.2,1112-1130).
cgccaaccaagaagcttat

SEQ ID NO: 552773 - DNA, 19 bp, Mus musculus
  siRNA target sequence for Rad21 (NM_009009.2,1151-1169).
gagtggaaaagctcttctt

SEQ ID NO: 552774 - DNA, 19 bp, Mus musculus
  siRNA target sequence for Rad21 (NM_009009.2,1178-1196).
cacagcccctgtggaataa

SEQ ID NO: 552775 - DNA, 19 bp, Mus musculus
  siRNA target sequence for Rad21 (NM_009009.2,1190-1208).
ggaataaccggctactgaa

SEQ ID NO: 552776 - DNA, 19 bp, Mus musculus
  siRNA target sequence for Rad21 (NM_009009.2,1221-1239).
ctgccttaccccacttgta

SEQ ID NO: 552777 - DNA, 19 bp, Mus musculus
  siRNA target sequence for Rad21 (NM_009009.2,1377-1395).
catcgatgagcccattata

SEQ ID NO: 552778 - DNA, 19 bp, Mus musculus
  siRNA target sequence for Rad21 (NM_009009.2,1431-1449).
ggccagcagaacaaccata

SEQ ID NO: 552779 - DNA, 19 bp, Mus musculus
  siRNA target sequence for Rad21 (NM_009009.2,1436-1454).
gcagaacaaccatagaaga

SEQ ID NO: 552780 - DNA, 19 bp, Mus musculus
  siRNA target sequence for Rad21 (NM_009009.2,1551-1569).
ggaaataccaccagtagaa

SEQ ID NO: 552781 - DNA, 19 bp, Mus musculus
  siRNA target sequence for Rad21 (NM_009009.2,1577-1595).
cagaggagcctccaaatat

SEQ ID NO: 552782 - DNA, 19 bp, Mus musculus
  siRNA target sequence for Rad21 (NM_009009.2,1579-1597).
gaggagcctccaaatatct

SEQ ID NO: 552783 - DNA, 19 bp, Mus musculus
  siRNA target sequence for Rad21 (NM_009009.2,1581-1599).
ggagcctccaaatatctgt

SEQ ID NO: 552784 - DNA, 19 bp, Mus musculus
  siRNA target sequence for Rad21 (NM_009009.2,1783-1801).
ggagcagagtctatcagtt

SEQ ID NO: 552785 - DNA, 19 bp, Mus musculus
  siRNA target sequence for Rad21 (NM_009009.2,1807-1825).
gagctgtgtcgaaacacaa

SEQ ID NO: 552786 - DNA, 19 bp, Mus musculus
  siRNA target sequence for Rad21 (NM_009009.2,1834-1852).
caggcagcagcaaagttct

SEQ ID NO: 552787 - DNA, 19 bp, Mus musculus
  siRNA target sequence for Rad21 (NM_009009.2,1837-1855).
gcagcagcaaagttctaca

SEQ ID NO: 552788 - DNA, 19 bp, Mus musculus
  siRNA target sequence for Rasgrp1 (NM_011246.2,348-366).
cagcctggatgatcttatt

SEQ ID NO: 552789 - DNA, 19 bp, Mus musculus
  siRNA target sequence for Rasgrp1 (NM_011246.2,352-370).
ctggatgatcttattgaca

SEQ ID NO: 552790 - DNA, 19 bp, Mus musculus
  siRNA target sequence for Rasgrp1 (NM_011246.2,398-416).
gaaacctgtgtcggaataa

SEQ ID NO: 552791 - DNA, 19 bp, Mus musculus
  siRNA target sequence for Rasgrp1 (NM_011246.2,410-428).
ggaataaccaactgttaca

SEQ ID NO: 552792 - DNA, 19 bp, Mus musculus
  siRNA target sequence for Rasgrp1 (NM_011246.2,411-429).
gaataaccaactgttacaa

SEQ ID NO: 552793 - DNA, 19 bp, Mus musculus
  siRNA target sequence for Rasgrp1 (NM_011246.2,440-458).
ccatgcaccggatcatcat

SEQ ID NO: 552794 - DNA, 19 bp, Mus musculus
  siRNA target sequence for Rasgrp1 (NM_011246.2,524-542).
caggagtttgcctgaagat

SEQ ID NO: 552795 - DNA, 19 bp, Mus musculus
  siRNA target sequence for Rasgrp1 (NM_011246.2,557-575).
ggtattggataacagaatt

SEQ ID NO: 552796 - DNA, 19 bp, Mus musculus
  siRNA target sequence for Rasgrp1 (NM_011246.2,571-589).
gaattctggatcatgttca

SEQ ID NO: 552797 - DNA, 19 bp, Mus musculus
  siRNA target sequence for Rasgrp1 (NM_011246.2,608-626).
ccagcaccatggaagagtt

SEQ ID NO: 552798 - DNA, 19 bp, Mus musculus
  siRNA target sequence for Rasgrp1 (NM_011246.2,672-690).
catcgacacgacccaaatt

SEQ ID NO: 552799 - DNA, 19 bp, Mus musculus
  siRNA target sequence for Rasgrp1 (NM_011246.2,675-693).
cgacacgacccaaattaat

SEQ ID NO: 552800 - DNA, 19 bp, Mus musculus
  siRNA target sequence for Rasgrp1 (NM_011246.2,825-843).
gtccttccgacggatatct

SEQ ID NO: 552801 - DNA, 19 bp, Mus musculus
  siRNA target sequence for Rasgrp1 (NM_011246.2,827-845).
ccttccgacggatatcttt

SEQ ID NO: 552802 - DNA, 19 bp, Mus musculus
  siRNA target sequence for Rasgrp1 (NM_011246.2,831-849).
ccgacggatatctttctct

SEQ ID NO: 552803 - DNA, 19 bp, Mus musculus
  siRNA target sequence for Rasgrp1 (NM_011246.2,979-997).
cgggcagaggtcttcatca

SEQ ID NO: 552804 - DNA, 19 bp, Mus musculus
  siRNA target sequence for Rasgrp1 (NM_011246.2,1109-1127).
cacatgtcccacatgagat

SEQ ID NO: 552805 - DNA, 19 bp, Mus musculus
  siRNA target sequence for Rasgrp1 (NM_011246.2,1118-1136).
cacatgagatcaataaggt

SEQ ID NO: 552806 - DNA, 19 bp, Mus musculus
  siRNA target sequence for Rasgrp1 (NM_011246.2,1321-1339).
gccctttacaatcatatca

SEQ ID NO: 552807 - DNA, 19 bp, Mus musculus
  siRNA target sequence for Rasgrp1 (NM_011246.2,1322-1340).
ccctttacaatcatatcaa

SEQ ID NO: 552808 - DNA, 19 bp, Mus musculus
  siRNA target sequence for Rasgrp1 (NM_011246.2,1396-1414).
gtgcatctgctgacgttat

SEQ ID NO: 552809 - DNA, 19 bp, Mus musculus
  siRNA target sequence for Rasgrp1 (NM_011246.2,1409-1427).
cgttatccctggatctata

SEQ ID NO: 552810 - DNA, 19 bp, Mus musculus
  siRNA target sequence for Rasgrp1 (NM_011246.2,1419-1437).
ggatctatactatacagaa

SEQ ID NO: 552811 - DNA, 19 bp, Mus musculus
  siRNA target sequence for Rasgrp1 (NM_011246.2,1505-1523).
cgaagccaccagttgtagt

SEQ ID NO: 552812 - DNA, 19 bp, Mus musculus
  siRNA target sequence for Rasgrp1 (NM_011246.2,1506-1524).
gaagccaccagttgtagta

SEQ ID NO: 552813 - DNA, 19 bp, Mus musculus
  siRNA target sequence for Rasgrp1 (NM_011246.2,1571-1589).
gcaaacacgtccaaaggat

SEQ ID NO: 552814 - DNA, 19 bp, Mus musculus
  siRNA target sequence for Rasgrp1 (NM_011246.2,1598-1616).
ctgtctttaagaactatga

SEQ ID NO: 552815 - DNA, 19 bp, Mus musculus
  siRNA target sequence for Rasgrp1 (NM_011246.2,1621-1639).
gaccaggatggctatatct

SEQ ID NO: 552816 - DNA, 19 bp, Mus musculus
  siRNA target sequence for Rasgrp1 (NM_011246.2,1656-1674).
gaagatcgctgcaagcttt

SEQ ID NO: 552817 - DNA, 19 bp, Mus musculus
  siRNA target sequence for Rasgrp1 (NM_011246.2,1662-1680).
cgctgcaagctttccattt

SEQ ID NO: 552818 - DNA, 19 bp, Mus musculus
  siRNA target sequence for Rasgrp1 (NM_011246.2,1729-1747).
gagatcacggcctacttca

SEQ ID NO: 552819 - DNA, 19 bp, Mus musculus
  siRNA target sequence for Rasgrp1 (NM_011246.2,1784-1802).
gctttccacacaactttca

SEQ ID NO: 552820 - DNA, 19 bp, Mus musculus
  siRNA target sequence for Rasgrp1 (NM_011246.2,1869-1887).
gcaaggctatcgctgtaaa

SEQ ID NO: 552821 - DNA, 19 bp, Mus musculus
  siRNA target sequence for Rasgrp1 (NM_011246.2,1873-1891).
ggctatcgctgtaaagact

SEQ ID NO: 552822 - DNA, 19 bp, Mus musculus
  siRNA target sequence for Rasgrp1 (NM_011246.2,1964-1982).
caatatccacagagaacat

SEQ ID NO: 552823 - DNA, 19 bp, Mus musculus
  siRNA target sequence for Rasgrp1 (NM_011246.2,2042-2060).
cacccgaagaaggatcttt

SEQ ID NO: 552824 - DNA, 19 bp, Mus musculus
  siRNA target sequence for Rasgrp1 (NM_011246.2,2044-2062).
cccgaagaaggatctttca

SEQ ID NO: 552825 - DNA, 19 bp, Mus musculus
  siRNA target sequence for Rasgrp1 (NM_011246.2,2045-2063).
ccgaagaaggatctttcat

SEQ ID NO: 552826 - DNA, 19 bp, Mus musculus
  siRNA target sequence for Rasgrp1 (NM_011246.2,2133-2151).
gtcctcccagaaaatttca

SEQ ID NO: 552827 - DNA, 19 bp, Mus musculus
  siRNA target sequence for Rasgrp1 (NM_011246.2,2135-2153).
cctcccagaaaatttcagt

SEQ ID NO: 552828 - DNA, 19 bp, Mus musculus
  siRNA target sequence for Rasgrp1 (NM_011246.2,2136-2154).
ctcccagaaaatttcagtt

SEQ ID NO: 552829 - DNA, 19 bp, Mus musculus
  siRNA target sequence for Rasgrp1 (NM_011246.2,2178-2196).
caagagcacccaaacagaa

SEQ ID NO: 552830 - DNA, 19 bp, Mus musculus
  siRNA target sequence for Rasgrp1 (NM_011246.2,2222-2240).
cgacccctggtcactttgt

SEQ ID NO: 552831 - DNA, 19 bp, Mus musculus
  siRNA target sequence for Rasgrp1 (NM_011246.2,2261-2279).
cggcgcagggcgctcttta

SEQ ID NO: 552832 - DNA, 19 bp, Mus musculus
  siRNA target sequence for Rasgrp1 (NM_011246.2,2262-2280).
ggcgcagggcgctctttat

SEQ ID NO: 552833 - DNA, 19 bp, Mus musculus
  siRNA target sequence for Rasgrp1 (NM_011246.2,2264-2282).
cgcagggcgctctttatgt

SEQ ID NO: 552834 - DNA, 19 bp, Mus musculus
  siRNA target sequence for Rasgrp1 (NM_011246.2,2356-2374).
gagtcccttataaaaccaa

SEQ ID NO: 552835 - DNA, 19 bp, Mus musculus
  siRNA target sequence for Rasgrp1 (NM_011246.2,2432-2450).
ccctgaaagcagataacga

SEQ ID NO: 552836 - DNA, 19 bp, Mus musculus
  siRNA target sequence for Rasgrp1 (NM_011246.2,2433-2451).
cctgaaagcagataacgat

SEQ ID NO: 552837 - DNA, 19 bp, Mus musculus
  siRNA target sequence for Rasgrp1 (NM_011246.2,2469-2487).
gaagtacgcacagaagaaa

SEQ ID NO: 552838 - DNA, 19 bp, Mus musculus
  siRNA target sequence for Rasgrp1 (NM_011246.2,2472-2490).
gtacgcacagaagaaaata

SEQ ID NO: 552839 - DNA, 19 bp, Mus musculus
  siRNA target sequence for Rasgrp1 (NM_011246.2,2532-2550).
gatggaccacggtgatagt

SEQ ID NO: 552840 - DNA, 19 bp, Mus musculus
  siRNA target sequence for Rasgrp2 (NM_011242.1,222-240).
ctgtatcgaagcctttgat

SEQ ID NO: 552841 - DNA, 19 bp, Mus musculus
  siRNA target sequence for Rasgrp2 (NM_011242.1,224-242).
gtatcgaagcctttgatga

SEQ ID NO: 552842 - DNA, 19 bp, Mus musculus
  siRNA target sequence for Rasgrp2 (NM_011242.1,288-306).
gatgcacccctggtacata

SEQ ID NO: 552843 - DNA, 19 bp, Mus musculus
  siRNA target sequence for Rasgrp2 (NM_011242.1,312-330).
ctctcagctggcttcgaaa

SEQ ID NO: 552844 - DNA, 19 bp, Mus musculus
  siRNA target sequence for Rasgrp2 (NM_011242.1,326-344).
cgaaactgctccacttcta

SEQ ID NO: 552845 - DNA, 19 bp, Mus musculus
  siRNA target sequence for Rasgrp2 (NM_011242.1,355-373).
cggaaggacaactccaatt

SEQ ID NO: 552846 - DNA, 19 bp, Mus musculus
  siRNA target sequence for Rcn (NM_009037.1,180-198).
gcttccagtacgatcatga

SEQ ID NO: 552847 - DNA, 19 bp, Mus musculus
  siRNA target sequence for Rcn (NM_009037.1,336-354).
ggatcaaacgggtacagaa

SEQ ID NO: 552848 - DNA, 19 bp, Mus musculus
  siRNA target sequence for Rcn (NM_009037.1,357-375).
gatacatctatgataatgt

SEQ ID NO: 552849 - DNA, 19 bp, Mus musculus
  siRNA target sequence for Rcn (NM_009037.1,368-386).
gataatgtcgctaaagtct

SEQ ID NO: 552850 - DNA, 19 bp, Mus musculus
  siRNA target sequence for Rcn (NM_009037.1,470-488).
cccgctgaattccatgata

SEQ ID NO: 552851 - DNA, 19 bp, Mus musculus
  siRNA target sequence for Rcn (NM_009037.1,472-490).
cgctgaattccatgatagt

SEQ ID NO: 552852 - DNA, 19 bp, Mus musculus
  siRNA target sequence for Rcn (NM_009037.1,473-491).
gctgaattccatgatagtt

SEQ ID NO: 552853 - DNA, 19 bp, Mus musculus
  siRNA target sequence for Rcn (NM_009037.1,606-624).
cagaggagtttgaacatat

SEQ ID NO: 552854 - DNA, 19 bp, Mus musculus
  siRNA target sequence for Rcn (NM_009037.1,608-626).
gaggagtttgaacatatga

SEQ ID NO: 552855 - DNA, 19 bp, Mus musculus
  siRNA target sequence for Rcn (NM_009037.1,697-715).
gtacatcgcggacatgttt

SEQ ID NO: 552856 - DNA, 19 bp, Mus musculus
  siRNA target sequence for Rcn (NM_009037.1,880-898).
ggtgtacgagtcagacaaa

SEQ ID NO: 552857 - DNA, 19 bp, Mus musculus
  siRNA target sequence for Rcn (NM_009037.1,881-899).
gtgtacgagtcagacaaaa

SEQ ID NO: 552858 - DNA, 19 bp, Mus musculus
  siRNA target sequence for Rcn (NM_009037.1,977-995).
ggggaagacctgaccaaaa

SEQ ID NO: 552859 - DNA, 19 bp, Mus musculus
  siRNA target sequence for Rcn2 (NM_011992.1,346-364).
ggaagacgtcgatgagtat

SEQ ID NO: 552860 - DNA, 19 bp, Mus musculus
  siRNA target sequence for Rcn2 (NM_011992.1,350-368).
gacgtcgatgagtatgtta

SEQ ID NO: 552861 - DNA, 19 bp, Mus musculus
  siRNA target sequence for Rcn2 (NM_011992.1,355-373).
cgatgagtatgttaaactt

SEQ ID NO: 552862 - DNA, 19 bp, Mus musculus
  siRNA target sequence for Rcn2 (NM_011992.1,395-413).
cgattgcagtcgatcataa

SEQ ID NO: 552863 - DNA, 19 bp, Mus musculus
  siRNA target sequence for Rcn2 (NM_011992.1,396-414).
gattgcagtcgatcataaa

SEQ ID NO: 552864 - DNA, 19 bp, Mus musculus
  siRNA target sequence for Rcn2 (NM_011992.1,400-418).
gcagtcgatcataaagaaa

SEQ ID NO: 552865 - DNA, 19 bp, Mus musculus
  siRNA target sequence for Rcn2 (NM_011992.1,403-421).
gtcgatcataaagaaaatt

SEQ ID NO: 552866 - DNA, 19 bp, Mus musculus
  siRNA target sequence for Rcn2 (NM_011992.1,405-423).
cgatcataaagaaaattga

SEQ ID NO: 552867 - DNA, 19 bp, Mus musculus
  siRNA target sequence for Rcn2 (NM_011992.1,427-445).
ggactctgatggctttctt

SEQ ID NO: 552868 - DNA, 19 bp, Mus musculus
  siRNA target sequence for Rcn2 (NM_011992.1,428-446).
gactctgatggctttctta

SEQ ID NO: 552869 - DNA, 19 bp, Mus musculus
  siRNA target sequence for Rcn2 (NM_011992.1,432-450).
ctgatggctttcttactga

SEQ ID NO: 552870 - DNA, 19 bp, Mus musculus
  siRNA target sequence for Rcn2 (NM_011992.1,458-476).
ctcagtcagtggattcaga

SEQ ID NO: 552871 - DNA, 19 bp, Mus musculus
  siRNA target sequence for Rcn2 (NM_011992.1,521-539).
gtggagtatgataagaaca

SEQ ID NO: 552872 - DNA, 19 bp, Mus musculus
  siRNA target sequence for Rcn2 (NM_011992.1,558-576).
cgtgggatgagtacaacat

SEQ ID NO: 552873 - DNA, 19 bp, Mus musculus
  siRNA target sequence for Rcn2 (NM_011992.1,586-604).
cgaccgggtgattgacttt

SEQ ID NO: 552874 - DNA, 19 bp, Mus musculus
  siRNA target sequence for Rcn2 (NM_011992.1,642-660).
cgttcaggcagcttcatct

SEQ ID NO: 552875 - DNA, 19 bp, Mus musculus
  siRNA target sequence for Rcn2 (NM_011992.1,643-661).
gttcaggcagcttcatcta

SEQ ID NO: 552876 - DNA, 19 bp, Mus musculus
  siRNA target sequence for Rcn2 (NM_011992.1,648-666).
ggcagcttcatctaaagga

SEQ ID NO: 552877 - DNA, 19 bp, Mus musculus
  siRNA target sequence for Rcn2 (NM_011992.1,705-723).
ctggtctgagtcttgaaga

SEQ ID NO: 552878 - DNA, 19 bp, Mus musculus
  siRNA target sequence for Rcn2 (NM_011992.1,712-730).
gagtcttgaagagttcatt

SEQ ID NO: 552879 - DNA, 19 bp, Mus musculus
  siRNA target sequence for Rcn2 (NM_011992.1,733-751).
gtttgagcaccctgaagaa

SEQ ID NO: 552880 - DNA, 19 bp, Mus musculus
  siRNA target sequence for Rcn2 (NM_011992.1,809-827).
ggcgatgggtttgttagtt

SEQ ID NO: 552881 - DNA, 19 bp, Mus musculus
  siRNA target sequence for Rcn2 (NM_011992.1,810-828).
gcgatgggtttgttagttt

SEQ ID NO: 552882 - DNA, 19 bp, Mus musculus
  siRNA target sequence for Rcn2 (NM_011992.1,853-871).
gcgggatccaactgcaaat

SEQ ID NO: 552883 - DNA, 19 bp, Mus musculus
  siRNA target sequence for Rcn2 (NM_011992.1,855-873).
gggatccaactgcaaatga

SEQ ID NO: 552884 - DNA, 19 bp, Mus musculus
  siRNA target sequence for Rcn2 (NM_011992.1,877-895).
cccagaatggatacttgtt

SEQ ID NO: 552885 - DNA, 19 bp, Mus musculus
  siRNA target sequence for Rcn2 (NM_011992.1,896-914).
gaaaaggacagatttgtga

SEQ ID NO: 552886 - DNA, 19 bp, Mus musculus
  siRNA target sequence for Rcn2 (NM_011992.1,901-919).
ggacagatttgtgaatgat

SEQ ID NO: 552887 - DNA, 19 bp, Mus musculus
  siRNA target sequence for Rcn2 (NM_011992.1,904-922).
cagatttgtgaatgattat

SEQ ID NO: 552888 - DNA, 19 bp, Mus musculus
  siRNA target sequence for Rcn2 (NM_011992.1,1126-1144).
ccatgacgactacttctat

SEQ ID NO: 552889 - DNA, 19 bp, Mus musculus
  siRNA target sequence for Rcvrn (NM_009038.1,235-253).
cggcaggagttcgaaagta

SEQ ID NO: 552890 - DNA, 19 bp, Mus musculus
  siRNA target sequence for Rcvrn (NM_009038.1,236-254).
ggcaggagttcgaaagtat

SEQ ID NO: 552891 - DNA, 19 bp, Mus musculus
  siRNA target sequence for Rcvrn (NM_009038.1,238-256).
caggagttcgaaagtatct

SEQ ID NO: 552892 - DNA, 19 bp, Mus musculus
  siRNA target sequence for Rcvrn (NM_009038.1,240-258).
ggagttcgaaagtatctat

SEQ ID NO: 552893 - DNA, 19 bp, Mus musculus
  siRNA target sequence for Rcvrn (NM_009038.1,241-259).
gagttcgaaagtatctatt

SEQ ID NO: 552894 - DNA, 19 bp, Mus musculus
  siRNA target sequence for Rcvrn (NM_009038.1,251-269).
gtatctattccaagttttt

SEQ ID NO: 552895 - DNA, 19 bp, Mus musculus
  siRNA target sequence for Rcvrn (NM_009038.1,481-499).
gctatcttcaaaatgatca

SEQ ID NO: 552896 - DNA, 19 bp, Mus musculus
  siRNA target sequence for Reps1 (NM_009048.1,6-24).
gctttgtggtgcaacaaga

SEQ ID NO: 552897 - DNA, 19 bp, Mus musculus
  siRNA target sequence for Reps1 (NM_009048.1,14-32).
gtgcaacaagacttggtta

SEQ ID NO: 552898 - DNA, 19 bp, Mus musculus
  siRNA target sequence for Reps1 (NM_009048.1,80-98).
cccagtctggttttccatt

SEQ ID NO: 552899 - DNA, 19 bp, Mus musculus
  siRNA target sequence for Reps1 (NM_009048.1,132-150).
ccctctcccacgatttgtt

SEQ ID NO: 552900 - DNA, 19 bp, Mus musculus
  siRNA target sequence for Reps1 (NM_009048.1,140-158).
cacgatttgttgcttcaaa

SEQ ID NO: 552901 - DNA, 19 bp, Mus musculus
  siRNA target sequence for Reps1 (NM_009048.1,142-160).
cgatttgttgcttcaaaga

SEQ ID NO: 552902 - DNA, 19 bp, Mus musculus
  siRNA target sequence for Reps1 (NM_009048.1,175-193).
cgccttgcagcctcctatt

SEQ ID NO: 552903 - DNA, 19 bp, Mus musculus
  siRNA target sequence for Reps1 (NM_009048.1,188-206).
cctattcttcagattctga

SEQ ID NO: 552904 - DNA, 19 bp, Mus musculus
  siRNA target sequence for Reps1 (NM_009048.1,245-263).
ccggcagaggccaagtcaa

SEQ ID NO: 552905 - DNA, 19 bp, Mus musculus
  siRNA target sequence for Reps1 (NM_009048.1,528-546).
caactgggtcagttttgca

SEQ ID NO: 552906 - DNA, 19 bp, Mus musculus
  siRNA target sequence for Reps1 (NM_009048.1,534-552).
ggtcagttttgcagatact

SEQ ID NO: 552907 - DNA, 19 bp, Mus musculus
  siRNA target sequence for Reps1 (NM_009048.1,560-578).
ccagtgctcttttaaccat

SEQ ID NO: 552908 - DNA, 19 bp, Mus musculus
  siRNA target sequence for Reps1 (NM_009048.1,628-646).
gctgcaactgccaatgaga

SEQ ID NO: 552909 - DNA, 19 bp, Mus musculus
  siRNA target sequence for Reps1 (NM_009048.1,649-667).
cgtaggcaatccagtagtt

SEQ ID NO: 552910 - DNA, 19 bp, Mus musculus
  siRNA target sequence for Reps1 (NM_009048.1,650-668).
gtaggcaatccagtagtta

SEQ ID NO: 552911 - DNA, 19 bp, Mus musculus
  siRNA target sequence for Reps1 (NM_009048.1,653-671).
ggcaatccagtagttatga

SEQ ID NO: 552912 - DNA, 19 bp, Mus musculus
  siRNA target sequence for Reps1 (NM_009048.1,697-715).
cagagacagtattatgtaa

SEQ ID NO: 552913 - DNA, 19 bp, Mus musculus
  siRNA target sequence for Reps1 (NM_009048.1,736-754).
cctgacctaaacggattta

SEQ ID NO: 552914 - DNA, 19 bp, Mus musculus
  siRNA target sequence for Reps1 (NM_009048.1,737-755).
ctgacctaaacggatttat

SEQ ID NO: 552915 - DNA, 19 bp, Mus musculus
  siRNA target sequence for Reps1 (NM_009048.1,756-774).
cccaggatctgcagctaaa

SEQ ID NO: 552916 - DNA, 19 bp, Mus musculus
  siRNA target sequence for Reps1 (NM_009048.1,758-776).
caggatctgcagctaaaga

SEQ ID NO: 552917 - DNA, 19 bp, Mus musculus
  siRNA target sequence for Reps1 (NM_009048.1,791-809).
caaaacttcctattcttga

SEQ ID NO: 552918 - DNA, 19 bp, Mus musculus
  siRNA target sequence for Reps1 (NM_009048.1,796-814).
cttcctattcttgaacttt

SEQ ID NO: 552919 - DNA, 19 bp, Mus musculus
  siRNA target sequence for Reps1 (NM_009048.1,854-872).
cattgacactggatgagtt

SEQ ID NO: 552920 - DNA, 19 bp, Mus musculus
  siRNA target sequence for Reps1 (NM_009048.1,858-876).
gacactggatgagttttgt

SEQ ID NO: 552921 - DNA, 19 bp, Mus musculus
  siRNA target sequence for Reps1 (NM_009048.1,889-907).
ctggtagttgctagaaaaa

SEQ ID NO: 552922 - DNA, 19 bp, Mus musculus
  siRNA target sequence for Reps1 (NM_009048.1,955-973).
ctgatagacttggaagatt

SEQ ID NO: 552923 - DNA, 19 bp, Mus musculus
  siRNA target sequence for Reps1 (NM_009048.1,1104-1122).
gtgggagacatttagtgaa

SEQ ID NO: 552924 - DNA, 19 bp, Mus musculus
  siRNA target sequence for Reps1 (NM_009048.1,1148-1166).
cccaatttgattctaacat

SEQ ID NO: 552925 - DNA, 19 bp, Mus musculus
  siRNA target sequence for Reps1 (NM_009048.1,1212-1230).
ccgcatgactccaagcaaa

SEQ ID NO: 552926 - DNA, 19 bp, Mus musculus
  siRNA target sequence for Reps1 (NM_009048.1,1213-1231).
cgcatgactccaagcaaaa

SEQ ID NO: 552927 - DNA, 19 bp, Mus musculus
  siRNA target sequence for Reps1 (NM_009048.1,1262-1280).
caagcagcgatcacactaa

SEQ ID NO: 552928 - DNA, 19 bp, Mus musculus
  siRNA target sequence for Reps1 (NM_009048.1,1286-1304).
ccagcccgttgcttgtgaa

SEQ ID NO: 552929 - DNA, 19 bp, Mus musculus
  siRNA target sequence for Reps1 (NM_009048.1,1416-1434).
gattgggagcagtgtaact

SEQ ID NO: 552930 - DNA, 19 bp, Mus musculus
  siRNA target sequence for Reps1 (NM_009048.1,1451-1469).
caggaacgtcacctgataa

SEQ ID NO: 552931 - DNA, 19 bp, Mus musculus
  siRNA target sequence for Reps1 (NM_009048.1,1453-1471).
ggaacgtcacctgataaca

SEQ ID NO: 552932 - DNA, 19 bp, Mus musculus
  siRNA target sequence for Reps1 (NM_009048.1,1501-1519).
cagccttctcattctagat

SEQ ID NO: 552933 - DNA, 19 bp, Mus musculus
  siRNA target sequence for Reps1 (NM_009048.1,1503-1521).
gccttctcattctagatca

SEQ ID NO: 552934 - DNA, 19 bp, Mus musculus
  siRNA target sequence for Reps1 (NM_009048.1,1504-1522).
ccttctcattctagatcat

SEQ ID NO: 552935 - DNA, 19 bp, Mus musculus
  siRNA target sequence for Reps1 (NM_009048.1,1656-1674).
ggatgcagatggtctaata

SEQ ID NO: 552936 - DNA, 19 bp, Mus musculus
  siRNA target sequence for Reps1 (NM_009048.1,1657-1675).
gatgcagatggtctaataa

SEQ ID NO: 552937 - DNA, 19 bp, Mus musculus
  siRNA target sequence for Reps1 (NM_009048.1,1661-1679).
cagatggtctaataactca

SEQ ID NO: 552938 - DNA, 19 bp, Mus musculus
  siRNA target sequence for Reps1 (NM_009048.1,1936-1954).
ccaccaaaacctgttagaa

SEQ ID NO: 552939 - DNA, 19 bp, Mus musculus
  siRNA target sequence for Reps1 (NM_009048.1,1945-1963).
cctgttagaagaagattaa

SEQ ID NO: 552940 - DNA, 19 bp, Mus musculus
  siRNA target sequence for Reps1 (NM_009048.1,1958-1976).
gattaaagtcagaagatga

SEQ ID NO: 552941 - DNA, 19 bp, Mus musculus
  siRNA target sequence for Reps1 (NM_009048.1,2016-2034).
cgtcctagctgctgttcta

SEQ ID NO: 552942 - DNA, 19 bp, Mus musculus
  siRNA target sequence for Reps1 (NM_009048.1,2017-2035).
gtcctagctgctgttctaa

SEQ ID NO: 552943 - DNA, 19 bp, Mus musculus
  siRNA target sequence for Reps1 (NM_009048.1,2088-2106).
ggcatccattagacgaaat

SEQ ID NO: 552944 - DNA, 19 bp, Mus musculus
  siRNA target sequence for Reps1 (NM_009048.1,2089-2107).
gcatccattagacgaaata

SEQ ID NO: 552945 - DNA, 19 bp, Mus musculus
  siRNA target sequence for Reps1 (NM_009048.1,2099-2117).
gacgaaataaggaaaccaa

SEQ ID NO: 552946 - DNA, 19 bp, Mus musculus
  siRNA target sequence for Reps1 (NM_009048.1,2167-2185).
gttctggaggagagaatct

SEQ ID NO: 552947 - DNA, 19 bp, Mus musculus
  siRNA target sequence for Reps1 (NM_009048.1,2205-2223).
gcagctccgaccgttttct

SEQ ID NO: 552948 - DNA, 19 bp, Mus musculus
  siRNA target sequence for Reps2 (NM_178256.2,532-550).
ccgaaggttcagattccat

SEQ ID NO: 552949 - DNA, 19 bp, Mus musculus
  siRNA target sequence for Reps2 (NM_178256.2,533-551).
cgaaggttcagattccata

SEQ ID NO: 552950 - DNA, 19 bp, Mus musculus
  siRNA target sequence for Reps2 (NM_178256.2,537-555).
ggttcagattccatactta

SEQ ID NO: 552951 - DNA, 19 bp, Mus musculus
  siRNA target sequence for Reps2 (NM_178256.2,538-556).
gttcagattccatacttaa

SEQ ID NO: 552952 - DNA, 19 bp, Mus musculus
  siRNA target sequence for Reps2 (NM_178256.2,720-738).
gatgcatccagctccatat

SEQ ID NO: 552953 - DNA, 19 bp, Mus musculus
  siRNA target sequence for Reps2 (NM_178256.2,803-821).
gtcggcaggcatctcttat

SEQ ID NO: 552954 - DNA, 19 bp, Mus musculus
  siRNA target sequence for Reps2 (NM_178256.2,842-860).
gagaaccgcaggagaacaa

SEQ ID NO: 552955 - DNA, 19 bp, Mus musculus
  siRNA target sequence for Reps2 (NM_178256.2,844-862).
gaaccgcaggagaacaaca

SEQ ID NO: 552956 - DNA, 19 bp, Mus musculus
  siRNA target sequence for Reps2 (NM_178256.2,849-867).
gcaggagaacaacagtaat

SEQ ID NO: 552957 - DNA, 19 bp, Mus musculus
  siRNA target sequence for Reps2 (NM_178256.2,879-897).
gccctggaggataactgaa

SEQ ID NO: 552958 - DNA, 19 bp, Mus musculus
  siRNA target sequence for Reps2 (NM_178256.2,884-902).
ggaggataactgaagaaca

SEQ ID NO: 552959 - DNA, 19 bp, Mus musculus
  siRNA target sequence for Reps2 (NM_178256.2,907-925).
gagtactacgtcaatcagt

SEQ ID NO: 552960 - DNA, 19 bp, Mus musculus
  siRNA target sequence for Reps2 (NM_178256.2,909-927).
gtactacgtcaatcagttt

SEQ ID NO: 552961 - DNA, 19 bp, Mus musculus
  siRNA target sequence for Reps2 (NM_178256.2,978-996).
gaacttcttcaccaaatca

SEQ ID NO: 552962 - DNA, 19 bp, Mus musculus
  siRNA target sequence for Reps2 (NM_178256.2,1009-1027).
ccagaactctcttatatct

SEQ ID NO: 552963 - DNA, 19 bp, Mus musculus
  siRNA target sequence for Reps2 (NM_178256.2,1060-1078).
ctgaccttgtccgagtttt

SEQ ID NO: 552964 - DNA, 19 bp, Mus musculus
  siRNA target sequence for Reps2 (NM_178256.2,1062-1080).
gaccttgtccgagttttgt

SEQ ID NO: 552965 - DNA, 19 bp, Mus musculus
  siRNA target sequence for Reps2 (NM_178256.2,1079-1097).
gtgctgcattccatctcat

SEQ ID NO: 552966 - DNA, 19 bp, Mus musculus
  siRNA target sequence for Reps2 (NM_178256.2,1165-1183).
caagcagctttccctaaat

SEQ ID NO: 552967 - DNA, 19 bp, Mus musculus
  siRNA target sequence for Reps2 (NM_178256.2,1185-1203).
caagtgggagtgtgcaatt

SEQ ID NO: 552968 - DNA, 19 bp, Mus musculus
  siRNA target sequence for Reps2 (NM_178256.2,1190-1208).
gggagtgtgcaatttttga

SEQ ID NO: 552969 - DNA, 19 bp, Mus musculus
  siRNA target sequence for Reps2 (NM_178256.2,1191-1209).
ggagtgtgcaatttttgat

SEQ ID NO: 552970 - DNA, 19 bp, Mus musculus
  siRNA target sequence for Reps2 (NM_178256.2,1221-1239).
gtcaatgccagcaaaccaa

SEQ ID NO: 552971 - DNA, 19 bp, Mus musculus
  siRNA target sequence for Reps2 (NM_178256.2,1325-1343).
ctgatgacaaacaagcttt

SEQ ID NO: 552972 - DNA, 19 bp, Mus musculus
  siRNA target sequence for Reps2 (NM_178256.2,1344-1362).
gaaaagtactgttaacgaa

SEQ ID NO: 552973 - DNA, 19 bp, Mus musculus
  siRNA target sequence for Reps2 (NM_178256.2,1349-1367).
gtactgttaacgaatcctt

SEQ ID NO: 552974 - DNA, 19 bp, Mus musculus
  siRNA target sequence for Reps2 (NM_178256.2,1354-1372).
gttaacgaatccttaccaa

SEQ ID NO: 552975 - DNA, 19 bp, Mus musculus
  siRNA target sequence for Reps2 (NM_178256.2,1394-1412).
caacttctaaggactacaa

SEQ ID NO: 552976 - DNA, 19 bp, Mus musculus
  siRNA target sequence for Reps2 (NM_178256.2,1763-1781).
ggaaattccgacctgaaaa

SEQ ID NO: 552977 - DNA, 19 bp, Mus musculus
  siRNA target sequence for Reps2 (NM_178256.2,1770-1788).
ccgacctgaaaatcaaaca

SEQ ID NO: 552978 - DNA, 19 bp, Mus musculus
  siRNA target sequence for Reps2 (NM_178256.2,1771-1789).
cgacctgaaaatcaaacaa

SEQ ID NO: 552979 - DNA, 19 bp, Mus musculus
  siRNA target sequence for Reps2 (NM_178256.2,1848-1866).
gccccatccaacagtacaa

SEQ ID NO: 552980 - DNA, 19 bp, Mus musculus
  siRNA target sequence for Reps2 (NM_178256.2,1849-1867).
ccccatccaacagtacaaa

SEQ ID NO: 552981 - DNA, 19 bp, Mus musculus
  siRNA target sequence for Reps2 (NM_178256.2,1901-1919).
ctgccattcgcaaaaataa

SEQ ID NO: 552982 - DNA, 19 bp, Mus musculus
  siRNA target sequence for Reps2 (NM_178256.2,1904-1922).
ccattcgcaaaaataagga

SEQ ID NO: 552983 - DNA, 19 bp, Mus musculus
  siRNA target sequence for Reps2 (NM_178256.2,1931-1949).
cagtgctggcccgattgaa

SEQ ID NO: 552984 - DNA, 19 bp, Mus musculus
  siRNA target sequence for Reps2 (NM_178256.2,1933-1951).
gtgctggcccgattgaaca

SEQ ID NO: 552985 - DNA, 19 bp, Mus musculus
  siRNA target sequence for Reps2 (NM_178256.2,1991-2009).
ggatcgcattggaaaacca

SEQ ID NO: 552986 - DNA, 19 bp, Mus musculus
  siRNA target sequence for Reps2 (NM_178256.2,1992-2010).
gatcgcattggaaaaccaa

SEQ ID NO: 552987 - DNA, 19 bp, Mus musculus
  siRNA target sequence for Rgn (NM_009060.1,95-113).
gtgttttacgggagaacta

SEQ ID NO: 552988 - DNA, 19 bp, Mus musculus
  siRNA target sequence for Rgn (NM_009060.1,97-115).
gttttacgggagaactaca

SEQ ID NO: 552989 - DNA, 19 bp, Mus musculus
  siRNA target sequence for Rgn (NM_009060.1,146-164).
cgtcacagtcgctactgtt

SEQ ID NO: 552990 - DNA, 19 bp, Mus musculus
  siRNA target sequence for Rgn (NM_009060.1,153-171).
gtcgctactgtttgtagat

SEQ ID NO: 552991 - DNA, 19 bp, Mus musculus
  siRNA target sequence for Rgn (NM_009060.1,155-173).
cgctactgtttgtagatat

SEQ ID NO: 552992 - DNA, 19 bp, Mus musculus
  siRNA target sequence for Rgn (NM_009060.1,169-187).
gatatcccttcaaagatta

SEQ ID NO: 552993 - DNA, 19 bp, Mus musculus
  siRNA target sequence for Rgn (NM_009060.1,198-216).
ggatacggtcagcaatcaa

SEQ ID NO: 552994 - DNA, 19 bp, Mus musculus
  siRNA target sequence for Rgn (NM_009060.1,349-367).
gtggatgaagataagaaaa

SEQ ID NO: 552995 - DNA, 19 bp, Mus musculus
  siRNA target sequence for Rgn (NM_009060.1,358-376).
gataagaaaaataatcgat

SEQ ID NO: 552996 - DNA, 19 bp, Mus musculus
  siRNA target sequence for Rgn (NM_009060.1,363-381).
gaaaaataatcgattcaat

SEQ ID NO: 552997 - DNA, 19 bp, Mus musculus
  siRNA target sequence for Rgn (NM_009060.1,460-478).
caccaagggtccttgtact

SEQ ID NO: 552998 - DNA, 19 bp, Mus musculus
  siRNA target sequence for Rgn (NM_009060.1,550-568).
ctggaccataaaatcttct

SEQ ID NO: 552999 - DNA, 19 bp, Mus musculus
  siRNA target sequence for Rgn (NM_009060.1,630-648).
gatttccaaccgcagaatt

SEQ ID NO: 553000 - DNA, 19 bp, Mus musculus
  siRNA target sequence for Rgn (NM_009060.1,635-653).
ccaaccgcagaattgttta

SEQ ID NO: 553001 - DNA, 19 bp, Mus musculus
  siRNA target sequence for Rgn (NM_009060.1,640-658).
cgcagaattgtttacaaga

SEQ ID NO: 553002 - DNA, 19 bp, Mus musculus
  siRNA target sequence for Rgn (NM_009060.1,767-785).
ggaaaagactgcaaactgt

SEQ ID NO: 553003 - DNA, 19 bp, Mus musculus
  siRNA target sequence for Rgn (NM_009060.1,784-802).
gtgaagttgcctgttgata

SEQ ID NO: 553004 - DNA, 19 bp, Mus musculus
  siRNA target sequence for Rgn (NM_009060.1,786-804).
gaagttgcctgttgataaa

SEQ ID NO: 553005 - DNA, 19 bp, Mus musculus
  siRNA target sequence for Rgn (NM_009060.1,789-807).
gttgcctgttgataaaaca

SEQ ID NO: 553006 - DNA, 19 bp, Mus musculus
  siRNA target sequence for Rgn (NM_009060.1,792-810).
gcctgttgataaaacaact

SEQ ID NO: 553007 - DNA, 19 bp, Mus musculus
  siRNA target sequence for Rgn (NM_009060.1,793-811).
cctgttgataaaacaactt

SEQ ID NO: 553008 - DNA, 19 bp, Mus musculus
  siRNA target sequence for Rgn (NM_009060.1,826-844).
gggaaagattactctgaaa

SEQ ID NO: 553009 - DNA, 19 bp, Mus musculus
  siRNA target sequence for Rgn (NM_009060.1,827-845).
ggaaagattactctgaaat

SEQ ID NO: 553010 - DNA, 19 bp, Mus musculus
  siRNA target sequence for Rgn (NM_009060.1,904-922).
gctggtaacattttcaaga

SEQ ID NO: 553011 - DNA, 19 bp, Mus musculus
  siRNA target sequence for Rgn (NM_009060.1,929-947).
gtctcggagtcaaaggaat

SEQ ID NO: 553012 - DNA, 19 bp, Mus musculus
  siRNA target sequence for Rgn (NM_009060.1,944-962).
gaattgccccatattccta

SEQ ID NO: 553013 - DNA, 19 bp, Mus musculus
  siRNA target sequence for Rhbdl (NM_144816.1,367-385).
gagacggactgctagatga

SEQ ID NO: 553014 - DNA, 19 bp, Mus musculus
  siRNA target sequence for Rhbdl (NM_144816.1,487-505).
gcccaccccctgtgttcat

SEQ ID NO: 553015 - DNA, 19 bp, Mus musculus
  siRNA target sequence for Rhbdl (NM_144816.1,549-567).
ggggcacgtctcaacaagt

SEQ ID NO: 553016 - DNA, 19 bp, Mus musculus
  siRNA target sequence for Rhbdl (NM_144816.1,578-596).
gacctaccaccctgaatat

SEQ ID NO: 553017 - DNA, 19 bp, Mus musculus
  siRNA target sequence for Rhbdl (NM_144816.1,645-663).
cgcttcctcacctacatgt

SEQ ID NO: 553018 - DNA, 19 bp, Mus musculus
  siRNA target sequence for Rhbdl (NM_144816.1,646-664).
gcttcctcacctacatgtt

SEQ ID NO: 553019 - DNA, 19 bp, Mus musculus
  siRNA target sequence for Rhbdl (NM_144816.1,868-886).
cacacctggccaatgttgt

SEQ ID NO: 553020 - DNA, 19 bp, Mus musculus
  siRNA target sequence for Rhbdl (NM_144816.1,901-919).
ggatgcggtgtccatacaa

SEQ ID NO: 553021 - DNA, 19 bp, Mus musculus
  siRNA target sequence for Rhbdl4 (NM_139228.2,377-395).
ctgatgagcaacaaacgtt

SEQ ID NO: 553022 - DNA, 19 bp, Mus musculus
  siRNA target sequence for Rhbdl4 (NM_139228.2,533-551).
cgcaagtggtactatgaca

SEQ ID NO: 553023 - DNA, 19 bp, Mus musculus
  siRNA target sequence for Rhbdl4 (NM_139228.2,569-587).
ccgccctggttcatgatca

SEQ ID NO: 553024 - DNA, 19 bp, Mus musculus
  siRNA target sequence for Rhbdl4 (NM_139228.2,622-640).
caacggggtcctactagat

SEQ ID NO: 553025 - DNA, 19 bp, Mus musculus
  siRNA target sequence for Rhbdl4 (NM_139228.2,665-683).
cctcgatacctgaagaact

SEQ ID NO: 553026 - DNA, 19 bp, Mus musculus
  siRNA target sequence for Rhbdl4 (NM_139228.2,722-740).
cgctatgtgacgtacatct

SEQ ID NO: 553027 - DNA, 19 bp, Mus musculus
  siRNA target sequence for Rhbdl4 (NM_139228.2,945-963).
cccacctagccaacattgt

SEQ ID NO: 553028 - DNA, 19 bp, Mus musculus
  siRNA target sequence for Rhbdl4 (NM_139228.2,978-996).
gcatgaagtgccagttcaa

SEQ ID NO: 553029 - DNA, 19 bp, Mus musculus
  siRNA target sequence for Rhbdl4 (NM_139228.2,1011-1029).
ctgtggccttgatctgtat

SEQ ID NO: 553030 - DNA, 19 bp, Mus musculus
  siRNA target sequence for Rhbdl4 (NM_139228.2,1015-1033).
ggccttgatctgtatgagt

SEQ ID NO: 553031 - DNA, 19 bp, Mus musculus
  siRNA target sequence for Rhbdl4 (NM_139228.2,1016-1034).
gccttgatctgtatgagta

SEQ ID NO: 553032 - DNA, 19 bp, Mus musculus
  siRNA target sequence for Rhbdl4 (NM_139228.2,1147-1165).
cgtggtggttctcagaaat

SEQ ID NO: 553033 - DNA, 19 bp, Mus musculus
  siRNA target sequence for Rnf111 (NM_033604.1,350-368).
ctcaatggactcctgaatt

SEQ ID NO: 553034 - DNA, 19 bp, Mus musculus
  siRNA target sequence for Rnf111 (NM_033604.1,356-374).
ggactcctgaatttaacga

SEQ ID NO: 553035 - DNA, 19 bp, Mus musculus
  siRNA target sequence for Rnf111 (NM_033604.1,372-390).
cgagctctacaccctaaaa

SEQ ID NO: 553036 - DNA, 19 bp, Mus musculus
  siRNA target sequence for Rnf111 (NM_033604.1,385-403).
ctaaaagtggctatgaaga

SEQ ID NO: 553037 - DNA, 19 bp, Mus musculus
  siRNA target sequence for Rnf111 (NM_033604.1,501-519).
ggagatgattaatagcaaa

SEQ ID NO: 553038 - DNA, 19 bp, Mus musculus
  siRNA target sequence for Rnf111 (NM_033604.1,1211-1229).
ctccctcaggaagtattga

SEQ ID NO: 553039 - DNA, 19 bp, Mus musculus
  siRNA target sequence for Rnf111 (NM_033604.1,2360-2378).
ctccccctcaagtggatta

SEQ ID NO: 553040 - DNA, 19 bp, Mus musculus
  siRNA target sequence for Rnf111 (NM_033604.1,2813-2831).
ctcacctggcccattacca

SEQ ID NO: 553041 - DNA, 19 bp, Mus musculus
  siRNA target sequence for Rptn (NM_009100.1,69-87).
cctcaacttcttaatagca

SEQ ID NO: 553042 - DNA, 19 bp, Mus musculus
  siRNA target sequence for Rptn (NM_009100.1,85-103).
gcattctcaacgtaagcaa

SEQ ID NO: 553043 - DNA, 19 bp, Mus musculus
  siRNA target sequence for Rptn (NM_009100.1,90-108).
ctcaacgtaagcaaggttt

SEQ ID NO: 553044 - DNA, 19 bp, Mus musculus
  siRNA target sequence for Rptn (NM_009100.1,113-131).
ggactatgctgaatatcat

SEQ ID NO: 553045 - DNA, 19 bp, Mus musculus
  siRNA target sequence for Rptn (NM_009100.1,208-226).
caaatgatccagaaactgt

SEQ ID NO: 553046 - DNA, 19 bp, Mus musculus
  siRNA target sequence for Rptn (NM_009100.1,245-263).
cttggaccgagacagaaat

SEQ ID NO: 553047 - DNA, 19 bp, Mus musculus
  siRNA target sequence for Rptn (NM_009100.1,249-267).
gaccgagacagaaatggat

SEQ ID NO: 553048 - DNA, 19 bp, Mus musculus
  siRNA target sequence for Rptn (NM_009100.1,251-269).
ccgagacagaaatggatat

SEQ ID NO: 553049 - DNA, 19 bp, Mus musculus
  siRNA target sequence for Rptn (NM_009100.1,320-338).
ccatcataagctagatagt

SEQ ID NO: 553050 - DNA, 19 bp, Mus musculus
  siRNA target sequence for Rptn (NM_009100.1,324-342).
cataagctagatagtaagt

SEQ ID NO: 553051 - DNA, 19 bp, Mus musculus
  siRNA target sequence for Rptn (NM_009100.1,387-405).
ggaacacggagccataaat

SEQ ID NO: 553052 - DNA, 19 bp, Mus musculus
  siRNA target sequence for Rptn (NM_009100.1,388-406).
gaacacggagccataaatt

SEQ ID NO: 553053 - DNA, 19 bp, Mus musculus
  siRNA target sequence for Rptn (NM_009100.1,510-528).
cagtcccagagacaagata

SEQ ID NO: 553054 - DNA, 19 bp, Mus musculus
  siRNA target sequence for Rptn (NM_009100.1,533-551).
ctctgagagacatgataca

SEQ ID NO: 553055 - DNA, 19 bp, Mus musculus
  siRNA target sequence for Rptn (NM_009100.1,641-659).
gtctgagtcagacaatgaa

SEQ ID NO: 553056 - DNA, 19 bp, Mus musculus
  siRNA target sequence for Rptn (NM_009100.1,645-663).
gagtcagacaatgaatctt

SEQ ID NO: 553057 - DNA, 19 bp, Mus musculus
  siRNA target sequence for Rptn (NM_009100.1,651-669).
gacaatgaatcttctagtt

SEQ ID NO: 553058 - DNA, 19 bp, Mus musculus
  siRNA target sequence for Rptn (NM_009100.1,673-691).
gtcaaagactgggttataa

SEQ ID NO: 553059 - DNA, 19 bp, Mus musculus
  siRNA target sequence for Rptn (NM_009100.1,683-701).
gggttataaatctagtcat

SEQ ID NO: 553060 - DNA, 19 bp, Mus musculus
  siRNA target sequence for Rptn (NM_009100.1,827-845).
ccgaaaagattcttattct

SEQ ID NO: 553061 - DNA, 19 bp, Mus musculus
  siRNA target sequence for Rptn (NM_009100.1,828-846).
cgaaaagattcttattcta

SEQ ID NO: 553062 - DNA, 19 bp, Mus musculus
  siRNA target sequence for Rptn (NM_009100.1,849-867).
caaaccagtcaacaagaat

SEQ ID NO: 553063 - DNA, 19 bp, Mus musculus
  siRNA target sequence for Rptn (NM_009100.1,947-965).
gtatggccagacaaataaa

SEQ ID NO: 553064 - DNA, 19 bp, Mus musculus
  siRNA target sequence for Rptn (NM_009100.1,1987-2005).
ctcaacagggtcacaaaga

SEQ ID NO: 553065 - DNA, 19 bp, Mus musculus
  siRNA target sequence for Rptn (NM_009100.1,2021-2039).
cactcaccaaggtcagaaa

SEQ ID NO: 553066 - DNA, 19 bp, Mus musculus
  siRNA target sequence for Rptn (NM_009100.1,2643-2661).
ggtcagtcagagattggaa

SEQ ID NO: 553067 - DNA, 19 bp, Mus musculus
  siRNA target sequence for Rptn (NM_009100.1,2644-2662).
gtcagtcagagattggaaa

SEQ ID NO: 553068 - DNA, 19 bp, Mus musculus
  siRNA target sequence for Rptn (NM_009100.1,2646-2664).
cagtcagagattggaaaaa

SEQ ID NO: 553069 - DNA, 19 bp, Mus musculus
  siRNA target sequence for Rptn (NM_009100.1,2688-2706).
cactctctagggactgata

SEQ ID NO: 553070 - DNA, 19 bp, Mus musculus
  siRNA target sequence for Rptn (NM_009100.1,2690-2708).
ctctctagggactgataga

SEQ ID NO: 553071 - DNA, 19 bp, Mus musculus
  siRNA target sequence for Rptn (NM_009100.1,2694-2712).
ctagggactgatagaacaa

SEQ ID NO: 553072 - DNA, 19 bp, Mus musculus
  siRNA target sequence for Rptn (NM_009100.1,2710-2728).
caagaagagactcatatgt

SEQ ID NO: 553073 - DNA, 19 bp, Mus musculus
  siRNA target sequence for Rptn (NM_009100.1,2716-2734).
gagactcatatgttgaaca

SEQ ID NO: 553074 - DNA, 19 bp, Mus musculus
  siRNA target sequence for Rptn (NM_009100.1,2754-2772).
ctaagtcagcagaattcaa

SEQ ID NO: 553075 - DNA, 19 bp, Mus musculus
  siRNA target sequence for Rptn (NM_009100.1,2859-2877).
gacaaccaacacaaactct

SEQ ID NO: 553076 - DNA, 19 bp, Mus musculus
  siRNA target sequence for Rptn (NM_009100.1,2897-2915).
gccatactcctatgaagaa

SEQ ID NO: 553077 - DNA, 19 bp, Mus musculus
  siRNA target sequence for Rptn (NM_009100.1,2949-2967).
cactgcggggaggaagaat

SEQ ID NO: 553078 - DNA, 19 bp, Mus musculus
  siRNA target sequence for Rptn (NM_009100.1,2951-2969).
ctgcggggaggaagaatat

SEQ ID NO: 553079 - DNA, 19 bp, Mus musculus
  siRNA target sequence for Rptn (NM_009100.1,2954-2972).
cggggaggaagaatatcaa

SEQ ID NO: 553080 - DNA, 19 bp, Mus musculus
  siRNA target sequence for Rptn (NM_009100.1,2956-2974).
gggaggaagaatatcaaga

SEQ ID NO: 553081 - DNA, 19 bp, Mus musculus
  siRNA target sequence for Rptn (NM_009100.1,2996-3014).
ggatcaggaaaatctgtat

SEQ ID NO: 553082 - DNA, 19 bp, Mus musculus
  siRNA target sequence for Rptn (NM_009100.1,3020-3038).
gcagaactggcaaactcat

SEQ ID NO: 553083 - DNA, 19 bp, Mus musculus
  siRNA target sequence for Rptn (NM_009100.1,3023-3041).
gaactggcaaactcatgaa

SEQ ID NO: 553084 - DNA, 19 bp, Mus musculus
  siRNA target sequence for Rptn (NM_009100.1,3103-3121).
gacaacacaggcaaactca

SEQ ID NO: 553085 - DNA, 19 bp, Mus musculus
  siRNA target sequence for Rptn (NM_009100.1,3113-3131).
gcaaactcatgaagaaaat

SEQ ID NO: 553086 - DNA, 19 bp, Mus musculus
  siRNA target sequence for Rptn (NM_009100.1,3262-3280).
gcttccccaacagagaaaa

SEQ ID NO: 553087 - DNA, 19 bp, Mus musculus
  siRNA target sequence for Rptn (NM_009100.1,3412-3430).
gccctttgtacgactatgt

SEQ ID NO: 553088 - DNA, 19 bp, Mus musculus
  siRNA target sequence for Rptn (NM_009100.1,3435-3453).
gaacaggcagcctatcagt

SEQ ID NO: 553089 - DNA, 19 bp, Mus musculus
  siRNA target sequence for Ryr2 (NM_023868.1,74-92).
cggcgaccatccacaaaga

SEQ ID NO: 553090 - DNA, 19 bp, Mus musculus
  siRNA target sequence for Ryr2 (NM_023868.1,75-93).
ggcgaccatccacaaagaa

SEQ ID NO: 553091 - DNA, 19 bp, Mus musculus
  siRNA target sequence for Ryr2 (NM_023868.1,148-166).
gagtctacttccaattcca

SEQ ID NO: 553092 - DNA, 19 bp, Mus musculus
  siRNA target sequence for Ryr2 (NM_023868.1,408-426).
ccggtcttccactgacaaa

SEQ ID NO: 553093 - DNA, 19 bp, Mus musculus
  siRNA target sequence for Ryr2 (NM_023868.1,410-428).
ggtcttccactgacaaact

SEQ ID NO: 553094 - DNA, 19 bp, Mus musculus
  siRNA target sequence for Ryr2 (NM_023868.1,569-587).
ggtacttgcacttgtcata

SEQ ID NO: 553095 - DNA, 19 bp, Mus musculus
  siRNA target sequence for Ryr2 (NM_023868.1,570-588).
gtacttgcacttgtcatat

SEQ ID NO: 553096 - DNA, 19 bp, Mus musculus
  siRNA target sequence for Ryr2 (NM_023868.1,667-685).
gcagcccaaggctatctca

SEQ ID NO: 553097 - DNA, 19 bp, Mus musculus
  siRNA target sequence for Ryr2 (NM_023868.1,668-686).
cagcccaaggctatctcat

SEQ ID NO: 553098 - DNA, 19 bp, Mus musculus
  siRNA target sequence for Ryr2 (NM_023868.1,766-784).
cagcggagaacagttcatt

SEQ ID NO: 553099 - DNA, 19 bp, Mus musculus
  siRNA target sequence for Ryr2 (NM_023868.1,768-786).
gcggagaacagttcattat

SEQ ID NO: 553100 - DNA, 19 bp, Mus musculus
  siRNA target sequence for Ryr2 (NM_023868.1,770-788).
ggagaacagttcattatga

SEQ ID NO: 553101 - DNA, 19 bp, Mus musculus
  siRNA target sequence for Ryr2 (NM_023868.1,771-789).
gagaacagttcattatgaa

SEQ ID NO: 553102 - DNA, 19 bp, Mus musculus
  siRNA target sequence for Ryr2 (NM_023868.1,827-845).
gactagagaccctaagagt

SEQ ID NO: 553103 - DNA, 19 bp, Mus musculus
  siRNA target sequence for Ryr2 (NM_023868.1,852-870).
gagtggaagccacataaga

SEQ ID NO: 553104 - DNA, 19 bp, Mus musculus
  siRNA target sequence for Ryr2 (NM_023868.1,894-912).
gcatgtcacgacaggaaaa

SEQ ID NO: 553105 - DNA, 19 bp, Mus musculus
  siRNA target sequence for Ryr2 (NM_023868.1,895-913).
catgtcacgacaggaaaat

SEQ ID NO: 553106 - DNA, 19 bp, Mus musculus
  siRNA target sequence for Ryr2 (NM_023868.1,898-916).
gtcacgacaggaaaatact

SEQ ID NO: 553107 - DNA, 19 bp, Mus musculus
  siRNA target sequence for Ryr2 (NM_023868.1,993-1011).
ccggtcttccaaggaaaaa

SEQ ID NO: 553108 - DNA, 19 bp, Mus musculus
  siRNA target sequence for Ryr2 (NM_023868.1,994-1012).
cggtcttccaaggaaaaat

SEQ ID NO: 553109 - DNA, 19 bp, Mus musculus
  siRNA target sequence for Ryr2 (NM_023868.1,1017-1035).
cgtgggggtgaggaaagaa

SEQ ID NO: 553110 - DNA, 19 bp, Mus musculus
  siRNA target sequence for Ryr2 (NM_023868.1,1048-1066).
ggaacctcagaaatcaagt

SEQ ID NO: 553111 - DNA, 19 bp, Mus musculus
  siRNA target sequence for Ryr2 (NM_023868.1,1076-1094).
ccatttgctacatacaaca

SEQ ID NO: 553112 - DNA, 19 bp, Mus musculus
  siRNA target sequence for Ryr2 (NM_023868.1,1197-1215).
ggacgatggtttgaactta

SEQ ID NO: 553113 - DNA, 19 bp, Mus musculus
  siRNA target sequence for Ryr2 (NM_023868.1,1198-1216).
gacgatggtttgaacttat

SEQ ID NO: 553114 - DNA, 19 bp, Mus musculus
  siRNA target sequence for Ryr2 (NM_023868.1,1263-1281).
cacagtgttcctctttaat

SEQ ID NO: 553115 - DNA, 19 bp, Mus musculus
  siRNA target sequence for Ryr2 (NM_023868.1,1267-1285).
gtgttcctctttaataggt

SEQ ID NO: 553116 - DNA, 19 bp, Mus musculus
  siRNA target sequence for Ryr2 (NM_023868.1,1272-1290).
cctctttaataggttcata

SEQ ID NO: 553117 - DNA, 19 bp, Mus musculus
  siRNA target sequence for Ryr2 (NM_023868.1,1273-1291).
ctctttaataggttcataa

SEQ ID NO: 553118 - DNA, 19 bp, Mus musculus
  siRNA target sequence for Ryr2 (NM_023868.1,1304-1322).
ctctcagcaagaaagtaaa

SEQ ID NO: 553119 - DNA, 19 bp, Mus musculus
  siRNA target sequence for Ryr2 (NM_023868.1,1568-1586).
gagagtcttggaaatccat

SEQ ID NO: 553120 - DNA, 19 bp, Mus musculus
  siRNA target sequence for Ryr2 (NM_023868.1,1617-1635).
cctaattagaggaaatcgt

SEQ ID NO: 553121 - DNA, 19 bp, Mus musculus
  siRNA target sequence for Ryr2 (NM_023868.1,1618-1636).
ctaattagaggaaatcgta

SEQ ID NO: 553122 - DNA, 19 bp, Mus musculus
  siRNA target sequence for Ryr2 (NM_023868.1,1719-1737).
ggtcctccactgtgtgtta

SEQ ID NO: 553123 - DNA, 19 bp, Mus musculus
  siRNA target sequence for Ryr2 (NM_023868.1,1774-1792).
gggcatatcaagtccatta

SEQ ID NO: 553124 - DNA, 19 bp, Mus musculus
  siRNA target sequence for Ryr2 (NM_023868.1,1775-1793).
ggcatatcaagtccattat

SEQ ID NO: 553125 - DNA, 19 bp, Mus musculus
  siRNA target sequence for Ryr2 (NM_023868.1,1785-1803).
gtccattatctcgctttta

SEQ ID NO: 553126 - DNA, 19 bp, Mus musculus
  siRNA target sequence for Ryr2 (NM_023868.1,1787-1805).
ccattatctcgcttttaga

SEQ ID NO: 553127 - DNA, 19 bp, Mus musculus
  siRNA target sequence for Ryr2 (NM_023868.1,1887-1905).
gcacctcatctgtgataat

SEQ ID NO: 553128 - DNA, 19 bp, Mus musculus
  siRNA target sequence for Ryr2 (NM_023868.1,1911-1929).
gccaggacgagatctctta

SEQ ID NO: 553129 - DNA, 19 bp, Mus musculus
  siRNA target sequence for Ryr2 (NM_023868.1,1932-1950).
gcagacccgtcttgtgaat

SEQ ID NO: 553130 - DNA, 19 bp, Mus musculus
  siRNA target sequence for Ryr2 (NM_023868.1,1935-1953).
gacccgtcttgtgaatcat

SEQ ID NO: 553131 - DNA, 19 bp, Mus musculus
  siRNA target sequence for Ryr2 (NM_023868.1,1937-1955).
cccgtcttgtgaatcatgt

SEQ ID NO: 553132 - DNA, 19 bp, Mus musculus
  siRNA target sequence for Ryr2 (NM_023868.1,1958-1976).
gcagcatgaggcctaatat

SEQ ID NO: 553133 - DNA, 19 bp, Mus musculus
  siRNA target sequence for Ryr2 (NM_023868.1,1959-1977).
cagcatgaggcctaatatt

SEQ ID NO: 553134 - DNA, 19 bp, Mus musculus
  siRNA target sequence for Ryr2 (NM_023868.1,1961-1979).
gcatgaggcctaatatttt

SEQ ID NO: 553135 - DNA, 19 bp, Mus musculus
  siRNA target sequence for Ryr2 (NM_023868.1,2256-2274).
cgatgtcatcagttgttgt

SEQ ID NO: 553136 - DNA, 19 bp, Mus musculus
  siRNA target sequence for Ryr2 (NM_023868.1,2257-2275).
gatgtcatcagttgttgtt

SEQ ID NO: 553137 - DNA, 19 bp, Mus musculus
  siRNA target sequence for Ryr2 (NM_023868.1,2262-2280).
catcagttgttgtttagat

SEQ ID NO: 553138 - DNA, 19 bp, Mus musculus
  siRNA target sequence for Ryr2 (NM_023868.1,2294-2312).
gcatctcgtttcgcattaa

SEQ ID NO: 553139 - DNA, 19 bp, Mus musculus
  siRNA target sequence for Ryr2 (NM_023868.1,2295-2313).
catctcgtttcgcattaat

SEQ ID NO: 553140 - DNA, 19 bp, Mus musculus
  siRNA target sequence for Ryr2 (NM_023868.1,2298-2316).
ctcgtttcgcattaatgga

SEQ ID NO: 553141 - DNA, 19 bp, Mus musculus
  siRNA target sequence for Ryr2 (NM_023868.1,2709-2727).
gtatggtccggttagagat

SEQ ID NO: 553142 - DNA, 19 bp, Mus musculus
  siRNA target sequence for Ryr2 (NM_023868.1,2714-2732).
gtccggttagagatgacaa

SEQ ID NO: 553143 - DNA, 19 bp, Mus musculus
  siRNA target sequence for Ryr2 (NM_023868.1,2847-2865).
cgtgggtatagctgatgaa

SEQ ID NO: 553144 - DNA, 19 bp, Mus musculus
  siRNA target sequence for Ryr2 (NM_023868.1,2939-2957).
caatggatctgagctttat

SEQ ID NO: 553145 - DNA, 19 bp, Mus musculus
  siRNA target sequence for Ryr2 (NM_023868.1,2966-2984).
ccccgtctcaggaagcaat

SEQ ID NO: 553146 - DNA, 19 bp, Mus musculus
  siRNA target sequence for Ryr2 (NM_023868.1,2991-3009).
caagttggctgaaaatgct

SEQ ID NO: 553147 - DNA, 19 bp, Mus musculus
  siRNA target sequence for Ryr2 (NM_023868.1,3247-3265).
gagaggttccgcatcttca

SEQ ID NO: 553148 - DNA, 19 bp, Mus musculus
  siRNA target sequence for Ryr2 (NM_023868.1,3291-3309).
ggctgggcgctggtacttt

SEQ ID NO: 553149 - DNA, 19 bp, Mus musculus
  siRNA target sequence for Ryr2 (NM_023868.1,3293-3311).
ctgggcgctggtactttga

SEQ ID NO: 553150 - DNA, 19 bp, Mus musculus
  siRNA target sequence for Ryr2 (NM_023868.1,3297-3315).
gcgctggtactttgaattt

SEQ ID NO: 553151 - DNA, 19 bp, Mus musculus
  siRNA target sequence for Ryr2 (NM_023868.1,3362-3380).
gctgccaaccagatctaga

SEQ ID NO: 553152 - DNA, 19 bp, Mus musculus
  siRNA target sequence for Ryr2 (NM_023868.1,3363-3381).
ctgccaaccagatctagaa

SEQ ID NO: 553153 - DNA, 19 bp, Mus musculus
  siRNA target sequence for Ryr2 (NM_023868.1,3365-3383).
gccaaccagatctagaact

SEQ ID NO: 553154 - DNA, 19 bp, Mus musculus
  siRNA target sequence for Ryr2 (NM_023868.1,3396-3414).
ccgtgcctttgcttttgat

SEQ ID NO: 553155 - DNA, 19 bp, Mus musculus
  siRNA target sequence for Ryr2 (NM_023868.1,3434-3452).
ggcaccagggcaatgaaca

SEQ ID NO: 553156 - DNA, 19 bp, Mus musculus
  siRNA target sequence for Ryr2 (NM_023868.1,3484-3502).
gtgggctgcatggttgata

SEQ ID NO: 553157 - DNA, 19 bp, Mus musculus
  siRNA target sequence for Ryr2 (NM_023868.1,3488-3506).
gctgcatggttgatatgaa

SEQ ID NO: 553158 - DNA, 19 bp, Mus musculus
  siRNA target sequence for Ryr2 (NM_023868.1,3491-3509).
gcatggttgatatgaatga

SEQ ID NO: 553159 - DNA, 19 bp, Mus musculus
  siRNA target sequence for Ryr2 (NM_023868.1,3508-3526).
gaacacaccatgatgttca

SEQ ID NO: 553160 - DNA, 19 bp, Mus musculus
  siRNA target sequence for Ryr2 (NM_023868.1,3618-3636).
cctcggggtggcacaagta

SEQ ID NO: 553161 - DNA, 19 bp, Mus musculus
  siRNA target sequence for Ryr2 (NM_023868.1,3637-3655).
ggcaggatgaactttggaa

SEQ ID NO: 553162 - DNA, 19 bp, Mus musculus
  siRNA target sequence for Ryr2 (NM_023868.1,3668-3686).
ctttgaaatattttaccat

SEQ ID NO: 553163 - DNA, 19 bp, Mus musculus
  siRNA target sequence for Ryr2 (NM_023868.1,3909-3927).
cctgagtatgcccattgaa

SEQ ID NO: 553164 - DNA, 19 bp, Mus musculus
  siRNA target sequence for Ryr2 (NM_023868.1,3910-3928).
ctgagtatgcccattgaat

SEQ ID NO: 553165 - DNA, 19 bp, Mus musculus
  siRNA target sequence for Ryr2 (NM_023868.1,3929-3947).
gtgccgaggtcttctcaaa

SEQ ID NO: 553166 - DNA, 19 bp, Mus musculus
  siRNA target sequence for Ryr2 (NM_023868.1,4046-4064).
cagctcatggtcatcttgt

SEQ ID NO: 553167 - DNA, 19 bp, Mus musculus
  siRNA target sequence for Ryr2 (NM_023868.1,4073-4091).
gcatcgacaaggacaaaga

SEQ ID NO: 553168 - DNA, 19 bp, Mus musculus
  siRNA target sequence for Ryr2 (NM_023868.1,4140-4158).
gccctcacgactaaagcaa

SEQ ID NO: 553169 - DNA, 19 bp, Mus musculus
  siRNA target sequence for Ryr2 (NM_023868.1,4172-4190).
gaaggaccaagccagatta

SEQ ID NO: 553170 - DNA, 19 bp, Mus musculus
  siRNA target sequence for Ryr2 (NM_023868.1,4263-4281).
gcagacgtccacatactat

SEQ ID NO: 553171 - DNA, 19 bp, Mus musculus
  siRNA target sequence for Ryr2 (NM_023868.1,4264-4282).
cagacgtccacatactatt

SEQ ID NO: 553172 - DNA, 19 bp, Mus musculus
  siRNA target sequence for Ryr2 (NM_023868.1,4293-4311).
gatctttcctggacaagaa

SEQ ID NO: 553173 - DNA, 19 bp, Mus musculus
  siRNA target sequence for Ryr2 (NM_023868.1,4304-4322).
gacaagaaccagctaatgt

SEQ ID NO: 553174 - DNA, 19 bp, Mus musculus
  siRNA target sequence for Ryr2 (NM_023868.1,4306-4324).
caagaaccagctaatgtct

SEQ ID NO: 553175 - DNA, 19 bp, Mus musculus
  siRNA target sequence for Ryr2 (NM_023868.1,4321-4339).
gtctgggtgggctggatta

SEQ ID NO: 553176 - DNA, 19 bp, Mus musculus
  siRNA target sequence for Ryr2 (NM_023868.1,4323-4341).
ctgggtgggctggattaca

SEQ ID NO: 553177 - DNA, 19 bp, Mus musculus
  siRNA target sequence for Ryr2 (NM_023868.1,4547-4565).
gtgggctgctcacattcat

SEQ ID NO: 553178 - DNA, 19 bp, Mus musculus
  siRNA target sequence for Ryr2 (NM_023868.1,4642-4660).
gctacgagtcccaatgttt

SEQ ID NO: 553179 - DNA, 19 bp, Mus musculus
  siRNA target sequence for Ryr2 (NM_023868.1,4643-4661).
ctacgagtcccaatgtttt

SEQ ID NO: 553180 - DNA, 19 bp, Mus musculus
  siRNA target sequence for Ryr2 (NM_023868.1,4646-4664).
cgagtcccaatgttttcca

SEQ ID NO: 553181 - DNA, 19 bp, Mus musculus
  siRNA target sequence for Ryr2 (NM_023868.1,4854-4872).
gctggtgcagtgtctagat

SEQ ID NO: 553182 - DNA, 19 bp, Mus musculus
  siRNA target sequence for Ryr2 (NM_023868.1,4881-4899).
gttcatgtccctccatata

SEQ ID NO: 553183 - DNA, 19 bp, Mus musculus
  siRNA target sequence for Ryr2 (NM_023868.1,4884-4902).
catgtccctccatatacct

SEQ ID NO: 553184 - DNA, 19 bp, Mus musculus
  siRNA target sequence for Ryr2 (NM_023868.1,4911-4929).
cagatctgttgacatctta

SEQ ID NO: 553185 - DNA, 19 bp, Mus musculus
  siRNA target sequence for Ryr2 (NM_023868.1,4913-4931).
gatctgttgacatcttaga

SEQ ID NO: 553186 - DNA, 19 bp, Mus musculus
  siRNA target sequence for Ryr2 (NM_023868.1,5094-5112).
gctgcgagctggctactat

SEQ ID NO: 553187 - DNA, 19 bp, Mus musculus
  siRNA target sequence for Ryr2 (NM_023868.1,5150-5168).
ccgccaggctcatgatgaa

SEQ ID NO: 553188 - DNA, 19 bp, Mus musculus
  siRNA target sequence for Ryr2 (NM_023868.1,5299-5317).
ccgagtttcgtgagcatta

SEQ ID NO: 553189 - DNA, 19 bp, Mus musculus
  siRNA target sequence for Ryr2 (NM_023868.1,5312-5330).
gcattagcaacgactgtta

SEQ ID NO: 553190 - DNA, 19 bp, Mus musculus
  siRNA target sequence for Ryr2 (NM_023868.1,5313-5331).
cattagcaacgactgttat

SEQ ID NO: 553191 - DNA, 19 bp, Mus musculus
  siRNA target sequence for Ryr2 (NM_023868.1,5318-5336).
gcaacgactgttatcagta

SEQ ID NO: 553192 - DNA, 19 bp, Mus musculus
  siRNA target sequence for Ryr2 (NM_023868.1,5493-5511).
catgggcatctttcacaat

SEQ ID NO: 553193 - DNA, 19 bp, Mus musculus
  siRNA target sequence for Ryr2 (NM_023868.1,5544-5562).
gcccagtgtgtttaaggaa

SEQ ID NO: 553194 - DNA, 19 bp, Mus musculus
  siRNA target sequence for Ryr2 (NM_023868.1,5691-5709).
cccggagccagttaaacta

SEQ ID NO: 553195 - DNA, 19 bp, Mus musculus
  siRNA target sequence for Ryr2 (NM_023868.1,5757-5775).
ccggatcgaagccattgta

SEQ ID NO: 553196 - DNA, 19 bp, Mus musculus
  siRNA target sequence for Ryr2 (NM_023868.1,5814-5832).
ccaacggttcaggtataat

SEQ ID NO: 553197 - DNA, 19 bp, Mus musculus
  siRNA target sequence for Ryr2 (NM_023868.1,5819-5837).
ggttcaggtataatgaagt

SEQ ID NO: 553198 - DNA, 19 bp, Mus musculus
  siRNA target sequence for Ryr2 (NM_023868.1,5836-5854).
gtcatgcaagccttaaaca

SEQ ID NO: 553199 - DNA, 19 bp, Mus musculus
  siRNA target sequence for Ryr2 (NM_023868.1,5863-5881).
gcactcactgccaggaaaa

SEQ ID NO: 553200 - DNA, 19 bp, Mus musculus
  siRNA target sequence for Ryr2 (NM_023868.1,5974-5992).
cgagaccaactcctagatt

SEQ ID NO: 553201 - DNA, 19 bp, Mus musculus
  siRNA target sequence for Ryr2 (NM_023868.1,6049-6067).
gatggaagcaatgacttaa

SEQ ID NO: 553202 - DNA, 19 bp, Mus musculus
  siRNA target sequence for Ryr2 (NM_023868.1,6053-6071).
gaagcaatgacttaacaat

SEQ ID NO: 553203 - DNA, 19 bp, Mus musculus
  siRNA target sequence for Ryr2 (NM_023868.1,6057-6075).
caatgacttaacaatcaga

SEQ ID NO: 553204 - DNA, 19 bp, Mus musculus
  siRNA target sequence for Ryr2 (NM_023868.1,6142-6160).
gcaagtgactccagaaagt

SEQ ID NO: 553205 - DNA, 19 bp, Mus musculus
  siRNA target sequence for Ryr2 (NM_023868.1,6180-6198).
catttctgagactatggta

SEQ ID NO: 553206 - DNA, 19 bp, Mus musculus
  siRNA target sequence for Ryr2 (NM_023868.1,6204-6222).
ggctcaagagtctgtcatt

SEQ ID NO: 553207 - DNA, 19 bp, Mus musculus
  siRNA target sequence for Ryr2 (NM_023868.1,6206-6224).
ctcaagagtctgtcattga

SEQ ID NO: 553208 - DNA, 19 bp, Mus musculus
  siRNA target sequence for Ryr2 (NM_023868.1,6304-6322).
ccaaagacctacactatca

SEQ ID NO: 553209 - DNA, 19 bp, Mus musculus
  siRNA target sequence for Ryr2 (NM_023868.1,6305-6323).
caaagacctacactatcaa

SEQ ID NO: 553210 - DNA, 19 bp, Mus musculus
  siRNA target sequence for Ryr2 (NM_023868.1,6427-6445).
cgtggactaggggatatca

SEQ ID NO: 553211 - DNA, 19 bp, Mus musculus
  siRNA target sequence for Ryr2 (NM_023868.1,6430-6448).
ggactaggggatatcatga

SEQ ID NO: 553212 - DNA, 19 bp, Mus musculus
  siRNA target sequence for Ryr2 (NM_023868.1,6431-6449).
gactaggggatatcatgaa

SEQ ID NO: 553213 - DNA, 19 bp, Mus musculus
  siRNA target sequence for Ryr2 (NM_023868.1,6433-6451).
ctaggggatatcatgaata

SEQ ID NO: 553214 - DNA, 19 bp, Mus musculus
  siRNA target sequence for Ryr2 (NM_023868.1,6538-6556).
ggtggcgagtccaaggaaa

SEQ ID NO: 553215 - DNA, 19 bp, Mus musculus
  siRNA target sequence for Ryr2 (NM_023868.1,6539-6557).
gtggcgagtccaaggaaat

SEQ ID NO: 553216 - DNA, 19 bp, Mus musculus
  siRNA target sequence for Ryr2 (NM_023868.1,6541-6559).
ggcgagtccaaggaaatca

SEQ ID NO: 553217 - DNA, 19 bp, Mus musculus
  siRNA target sequence for Ryr2 (NM_023868.1,6587-6605).
gccgttttctctgttactt

SEQ ID NO: 553218 - DNA, 19 bp, Mus musculus
  siRNA target sequence for Ryr2 (NM_023868.1,6603-6621).
cttctgtcgtataagtaga

SEQ ID NO: 553219 - DNA, 19 bp, Mus musculus
  siRNA target sequence for Ryr2 (NM_023868.1,6728-6746).
cagcttcagtgatggataa

SEQ ID NO: 553220 - DNA, 19 bp, Mus musculus
  siRNA target sequence for Ryr2 (NM_023868.1,6884-6902).
gagagcgataccttgactt

SEQ ID NO: 553221 - DNA, 19 bp, Mus musculus
  siRNA target sequence for Ryr2 (NM_023868.1,6889-6907).
cgataccttgactttctca

SEQ ID NO: 553222 - DNA, 19 bp, Mus musculus
  siRNA target sequence for Ryr2 (NM_023868.1,6908-6926).
gatttgcagtcttctgtaa

SEQ ID NO: 553223 - DNA, 19 bp, Mus musculus
  siRNA target sequence for Ryr2 (NM_023868.1,7103-7121).
ccagcaaaacccttgatat

SEQ ID NO: 553224 - DNA, 19 bp, Mus musculus
  siRNA target sequence for Ryr2 (NM_023868.1,7106-7124).
gcaaaacccttgatataga

SEQ ID NO: 553225 - DNA, 19 bp, Mus musculus
  siRNA target sequence for Ryr2 (NM_023868.1,7170-7188).
cttctacgcagctttgatt

SEQ ID NO: 553226 - DNA, 19 bp, Mus musculus
  siRNA target sequence for Ryr2 (NM_023868.1,7240-7258).
ggagaagccatccgaatta

SEQ ID NO: 553227 - DNA, 19 bp, Mus musculus
  siRNA target sequence for Ryr2 (NM_023868.1,7243-7261).
gaagccatccgaattaggt

SEQ ID NO: 553228 - DNA, 19 bp, Mus musculus
  siRNA target sequence for Ryr2 (NM_023868.1,7430-7448).
gaattgaggtgcaagattt

SEQ ID NO: 553229 - DNA, 19 bp, Mus musculus
  siRNA target sequence for Ryr2 (NM_023868.1,7562-7580).
gcacagctgtcctaccttt

SEQ ID NO: 553230 - DNA, 19 bp, Mus musculus
  siRNA target sequence for Ryr2 (NM_023868.1,7570-7588).
gtcctacctttgttaacga

SEQ ID NO: 553231 - DNA, 19 bp, Mus musculus
  siRNA target sequence for Ryr2 (NM_023868.1,7642-7660).
ctgctacacactgtatata

SEQ ID NO: 553232 - DNA, 19 bp, Mus musculus
  siRNA target sequence for Ryr2 (NM_023868.1,7652-7670).
ctgtatatagactctctaa

SEQ ID NO: 553233 - DNA, 19 bp, Mus musculus
  siRNA target sequence for Ryr2 (NM_023868.1,7671-7689).
gggatgctcccttaccaaa

SEQ ID NO: 553234 - DNA, 19 bp, Mus musculus
  siRNA target sequence for Ryr2 (NM_023868.1,7711-7729).
gtgtgcctgctctctatat

SEQ ID NO: 553235 - DNA, 19 bp, Mus musculus
  siRNA target sequence for Ryr2 (NM_023868.1,7713-7731).
gtgcctgctctctatatgt

SEQ ID NO: 553236 - DNA, 19 bp, Mus musculus
  siRNA target sequence for Ryr2 (NM_023868.1,7733-7751).
gccaactgagaccatctat

SEQ ID NO: 553237 - DNA, 19 bp, Mus musculus
  siRNA target sequence for Ryr2 (NM_023868.1,7830-7848).
gaccaatcattatgaaaga

SEQ ID NO: 553238 - DNA, 19 bp, Mus musculus
  siRNA target sequence for Ryr2 (NM_023868.1,7898-7916).
cctcggaagaagaacttca

SEQ ID NO: 553239 - DNA, 19 bp, Mus musculus
  siRNA target sequence for Ryr2 (NM_023868.1,7899-7917).
ctcggaagaagaacttcat

SEQ ID NO: 553240 - DNA, 19 bp, Mus musculus
  siRNA target sequence for Ryr2 (NM_023868.1,7901-7919).
cggaagaagaacttcattt

SEQ ID NO: 553241 - DNA, 19 bp, Mus musculus
  siRNA target sequence for Ryr2 (NM_023868.1,7909-7927).
gaacttcatttatcaagaa

SEQ ID NO: 553242 - DNA, 19 bp, Mus musculus
  siRNA target sequence for Ryr2 (NM_023868.1,8035-8053).
gactacatggagtcaaact

SEQ ID NO: 553243 - DNA, 19 bp, Mus musculus
  siRNA target sequence for Ryr2 (NM_023868.1,8037-8055).
ctacatggagtcaaactat

SEQ ID NO: 553244 - DNA, 19 bp, Mus musculus
  siRNA target sequence for Ryr2 (NM_023868.1,8086-8104).
gattctgaagggaacttta

SEQ ID NO: 553245 - DNA, 19 bp, Mus musculus
  siRNA target sequence for Ryr2 (NM_023868.1,8116-8134).
gttgatacctcaaacatta

SEQ ID NO: 553246 - DNA, 19 bp, Mus musculus
  siRNA target sequence for Ryr2 (NM_023868.1,8143-8161).
gagaagttggaatacttca

SEQ ID NO: 553247 - DNA, 19 bp, Mus musculus
  siRNA target sequence for Ryr2 (NM_023868.1,8203-8221).
gacaagttggcgaatggat

SEQ ID NO: 553248 - DNA, 19 bp, Mus musculus
  siRNA target sequence for Ryr2 (NM_023868.1,8208-8226).
gttggcgaatggatggatt

SEQ ID NO: 553249 - DNA, 19 bp, Mus musculus
  siRNA target sequence for Ryr2 (NM_023868.1,8263-8281).
ccgctaatgaagccatata

SEQ ID NO: 553250 - DNA, 19 bp, Mus musculus
  siRNA target sequence for Ryr2 (NM_023868.1,8264-8282).
cgctaatgaagccatataa

SEQ ID NO: 553251 - DNA, 19 bp, Mus musculus
  siRNA target sequence for Ryr2 (NM_023868.1,8385-8403).
ggacagcatggccctttat

SEQ ID NO: 553252 - DNA, 19 bp, Mus musculus
  siRNA target sequence for Ryr2 (NM_023868.1,8386-8404).
gacagcatggccctttata

SEQ ID NO: 553253 - DNA, 19 bp, Mus musculus
  siRNA target sequence for Ryr2 (NM_023868.1,8406-8424).
ccggactcgacgaatttct

SEQ ID NO: 553254 - DNA, 19 bp, Mus musculus
  siRNA target sequence for Ryr2 (NM_023868.1,8408-8426).
ggactcgacgaatttctca

SEQ ID NO: 553255 - DNA, 19 bp, Mus musculus
  siRNA target sequence for Ryr2 (NM_023868.1,8470-8488).
cgtgctattgacatgagta

SEQ ID NO: 553256 - DNA, 19 bp, Mus musculus
  siRNA target sequence for Ryr2 (NM_023868.1,8501-8519).
ctcgagacctgcatgctat

SEQ ID NO: 553257 - DNA, 19 bp, Mus musculus
  siRNA target sequence for Ryr2 (NM_023868.1,8536-8554).
gaaaactaccacaacatat

SEQ ID NO: 553258 - DNA, 19 bp, Mus musculus
  siRNA target sequence for Ryr2 (NM_023868.1,8737-8755).
gatacaccttcgattgaga

SEQ ID NO: 553259 - DNA, 19 bp, Mus musculus
  siRNA target sequence for Ryr2 (NM_023868.1,8754-8772).
gaagcgatttgcctatagt

SEQ ID NO: 553260 - DNA, 19 bp, Mus musculus
  siRNA target sequence for Ryr2 (NM_023868.1,8863-8881).
ccgtacgagcaagaaatca

SEQ ID NO: 553261 - DNA, 19 bp, Mus musculus
  siRNA target sequence for Ryr2 (NM_023868.1,8864-8882).
cgtacgagcaagaaatcaa

SEQ ID NO: 553262 - DNA, 19 bp, Mus musculus
  siRNA target sequence for Ryr2 (NM_023868.1,9026-9044).
gcaaacttggagttcttgt

SEQ ID NO: 553263 - DNA, 19 bp, Mus musculus
  siRNA target sequence for Ryr2 (NM_023868.1,9048-9066).
gcataggatctcactgttt

SEQ ID NO: 553264 - DNA, 19 bp, Mus musculus
  siRNA target sequence for Ryr2 (NM_023868.1,9265-9283).
ggggtgactcagatcatca

SEQ ID NO: 553265 - DNA, 19 bp, Mus musculus
  siRNA target sequence for Ryr2 (NM_023868.1,9266-9284).
gggtgactcagatcatcaa

SEQ ID NO: 553266 - DNA, 19 bp, Mus musculus
  siRNA target sequence for Ryr2 (NM_023868.1,9376-9394).
gtacaggtgtcttgttata

SEQ ID NO: 553267 - DNA, 19 bp, Mus musculus
  siRNA target sequence for Ryr2 (NM_023868.1,9498-9516).
ccctatcgcctttttggaa

SEQ ID NO: 553268 - DNA, 19 bp, Mus musculus
  siRNA target sequence for Ryr2 (NM_023868.1,9499-9517).
cctatcgcctttttggaaa

SEQ ID NO: 553269 - DNA, 19 bp, Mus musculus
  siRNA target sequence for Ryr2 (NM_023868.1,9538-9556).
gtttactccatctacaaca

SEQ ID NO: 553270 - DNA, 19 bp, Mus musculus
  siRNA target sequence for Ryr2 (NM_023868.1,9604-9622).
gaggatgtctgcccaaata

SEQ ID NO: 553271 - DNA, 19 bp, Mus musculus
  siRNA target sequence for Ryr2 (NM_023868.1,9606-9624).
ggatgtctgcccaaatata

SEQ ID NO: 553272 - DNA, 19 bp, Mus musculus
  siRNA target sequence for Ryr2 (NM_023868.1,9708-9726).
ggttgtactgcccatgtta

SEQ ID NO: 553273 - DNA, 19 bp, Mus musculus
  siRNA target sequence for Ryr2 (NM_023868.1,9709-9727).
gttgtactgcccatgttat

SEQ ID NO: 553274 - DNA, 19 bp, Mus musculus
  siRNA target sequence for Ryr2 (NM_023868.1,9712-9730).
gtactgcccatgttatgca

SEQ ID NO: 553275 - DNA, 19 bp, Mus musculus
  siRNA target sequence for Ryr2 (NM_023868.1,9824-9842).
cgctgctgggcaacattct

SEQ ID NO: 553276 - DNA, 19 bp, Mus musculus
  siRNA target sequence for Ryr2 (NM_023868.1,9961-9979).
cccttgatggagaagctaa

SEQ ID NO: 553277 - DNA, 19 bp, Mus musculus
  siRNA target sequence for Ryr2 (NM_023868.1,10050-10068).
ggccgagctgctcattcta

SEQ ID NO: 553278 - DNA, 19 bp, Mus musculus
  siRNA target sequence for Ryr2 (NM_023868.1,10053-10071).
cgagctgctcattctagat

SEQ ID NO: 553279 - DNA, 19 bp, Mus musculus
  siRNA target sequence for Ryr2 (NM_023868.1,10082-10100).
cactggccagggatctcta

SEQ ID NO: 553280 - DNA, 19 bp, Mus musculus
  siRNA target sequence for Ryr2 (NM_023868.1,10112-10130).
cactcctgatccgatttgt

SEQ ID NO: 553281 - DNA, 19 bp, Mus musculus
  siRNA target sequence for Ryr2 (NM_023868.1,10123-10141).
cgatttgtggactataaca

SEQ ID NO: 553282 - DNA, 19 bp, Mus musculus
  siRNA target sequence for Ryr2 (NM_023868.1,10175-10193).
cagaggagctatttcgaat

SEQ ID NO: 553283 - DNA, 19 bp, Mus musculus
  siRNA target sequence for Ryr2 (NM_023868.1,10198-10216).
gctgaagtcttcatctact

SEQ ID NO: 553284 - DNA, 19 bp, Mus musculus
  siRNA target sequence for Ryr2 (NM_023868.1,10217-10235).
ggtccaaatcccataattt

SEQ ID NO: 553285 - DNA, 19 bp, Mus musculus
  siRNA target sequence for Ryr2 (NM_023868.1,10362-10380).
caaaggggaccggtattct

SEQ ID NO: 553286 - DNA, 19 bp, Mus musculus
  siRNA target sequence for Ryr2 (NM_023868.1,10379-10397).
ctatgcagacatctttgat

SEQ ID NO: 553287 - DNA, 19 bp, Mus musculus
  siRNA target sequence for Ryr2 (NM_023868.1,10469-10487).
ctttggccaaaaatagatt

SEQ ID NO: 553288 - DNA, 19 bp, Mus musculus
  siRNA target sequence for Ryr2 (NM_023868.1,10506-10524).
ggaggaagtacgtgatata

SEQ ID NO: 553289 - DNA, 19 bp, Mus musculus
  siRNA target sequence for Ryr2 (NM_023868.1,10507-10525).
gaggaagtacgtgatataa

SEQ ID NO: 553290 - DNA, 19 bp, Mus musculus
  siRNA target sequence for Ryr2 (NM_023868.1,10519-10537).
gatataatccgcagtaata

SEQ ID NO: 553291 - DNA, 19 bp, Mus musculus
  siRNA target sequence for Ryr2 (NM_023868.1,10527-10545).
ccgcagtaatatacactta

SEQ ID NO: 553292 - DNA, 19 bp, Mus musculus
  siRNA target sequence for Ryr2 (NM_023868.1,10529-10547).
gcagtaatatacacttaca

SEQ ID NO: 553293 - DNA, 19 bp, Mus musculus
  siRNA target sequence for Ryr2 (NM_023868.1,10647-10665).
gcgtgtcctgggtatagca

SEQ ID NO: 553294 - DNA, 19 bp, Mus musculus
  siRNA target sequence for Ryr2 (NM_023868.1,10648-10666).
cgtgtcctgggtatagcaa

SEQ ID NO: 553295 - DNA, 19 bp, Mus musculus
  siRNA target sequence for Ryr2 (NM_023868.1,10649-10667).
gtgtcctgggtatagcaaa

SEQ ID NO: 553296 - DNA, 19 bp, Mus musculus
  siRNA target sequence for Ryr2 (NM_023868.1,10678-10696).
caccttgagcagaaatcta

SEQ ID NO: 553297 - DNA, 19 bp, Mus musculus
  siRNA target sequence for Ryr2 (NM_023868.1,10686-10704).
gcagaaatctaagtatact

SEQ ID NO: 553298 - DNA, 19 bp, Mus musculus
  siRNA target sequence for Ryr2 (NM_023868.1,10728-10746).
ggaacatcctcaaagatca

SEQ ID NO: 553299 - DNA, 19 bp, Mus musculus
  siRNA target sequence for Ryr2 (NM_023868.1,10771-10789).
ctctctaagcagagaaaaa

SEQ ID NO: 553300 - DNA, 19 bp, Mus musculus
  siRNA target sequence for Ryr2 (NM_023868.1,10847-10865).
cggtcaatctttttcttca

SEQ ID NO: 553301 - DNA, 19 bp, Mus musculus
  siRNA target sequence for Ryr2 (NM_023868.1,10883-10901).
ggattgaaacagaagaaca

SEQ ID NO: 553302 - DNA, 19 bp, Mus musculus
  siRNA target sequence for Ryr2 (NM_023868.1,10900-10918).
cattactttgaggataaat

SEQ ID NO: 553303 - DNA, 19 bp, Mus musculus
  siRNA target sequence for Ryr2 (NM_023868.1,10911-10929).
ggataaattgattgaagat

SEQ ID NO: 553304 - DNA, 19 bp, Mus musculus
  siRNA target sequence for Ryr2 (NM_023868.1,10912-10930).
gataaattgattgaagatt

SEQ ID NO: 553305 - DNA, 19 bp, Mus musculus
  siRNA target sequence for Ryr2 (NM_023868.1,10984-11002).
gatcccctccatcaactta

SEQ ID NO: 553306 - DNA, 19 bp, Mus musculus
  siRNA target sequence for Ryr2 (NM_023868.1,10988-11006).
ccctccatcaacttattct

SEQ ID NO: 553307 - DNA, 19 bp, Mus musculus
  siRNA target sequence for Ryr2 (NM_023868.1,11023-11041).
gccctaacggagaaatgca

SEQ ID NO: 553308 - DNA, 19 bp, Mus musculus
  siRNA target sequence for Ryr2 (NM_023868.1,11024-11042).
ccctaacggagaaatgcaa

SEQ ID NO: 553309 - DNA, 19 bp, Mus musculus
  siRNA target sequence for Ryr2 (NM_023868.1,11047-11065).
gaggaagattttctataca

SEQ ID NO: 553310 - DNA, 19 bp, Mus musculus
  siRNA target sequence for Ryr2 (NM_023868.1,11064-11082).
catggcgtatgcagacatt

SEQ ID NO: 553311 - DNA, 19 bp, Mus musculus
  siRNA target sequence for Ryr2 (NM_023868.1,11258-11276).
caatggtggctgctacttt

SEQ ID NO: 553312 - DNA, 19 bp, Mus musculus
  siRNA target sequence for Ryr2 (NM_023868.1,11280-11298).
gctgggcattgcgatttta

SEQ ID NO: 553313 - DNA, 19 bp, Mus musculus
  siRNA target sequence for Ryr2 (NM_023868.1,11283-11301).
gggcattgcgattttaaat

SEQ ID NO: 553314 - DNA, 19 bp, Mus musculus
  siRNA target sequence for Ryr2 (NM_023868.1,11286-11304).
cattgcgattttaaatggt

SEQ ID NO: 553315 - DNA, 19 bp, Mus musculus
  siRNA target sequence for Ryr2 (NM_023868.1,11544-11562).
ggggcacaactcagacttt

SEQ ID NO: 553316 - DNA, 19 bp, Mus musculus
  siRNA target sequence for Ryr2 (NM_023868.1,11550-11568).
caactcagactttcagaat

SEQ ID NO: 553317 - DNA, 19 bp, Mus musculus
  siRNA target sequence for Ryr2 (NM_023868.1,11587-11605).
ggcaacaacaccacagtta

SEQ ID NO: 553318 - DNA, 19 bp, Mus musculus
  siRNA target sequence for Ryr2 (NM_023868.1,11643-11661).
gcaggagtccattagtgat

SEQ ID NO: 553319 - DNA, 19 bp, Mus musculus
  siRNA target sequence for Ryr2 (NM_023868.1,11644-11662).
caggagtccattagtgatt

SEQ ID NO: 553320 - DNA, 19 bp, Mus musculus
  siRNA target sequence for Ryr2 (NM_023868.1,11704-11722).
gggcagcgtaacttttcca

SEQ ID NO: 553321 - DNA, 19 bp, Mus musculus
  siRNA target sequence for Ryr2 (NM_023868.1,11705-11723).
ggcagcgtaacttttccaa

SEQ ID NO: 553322 - DNA, 19 bp, Mus musculus
  siRNA target sequence for Ryr2 (NM_023868.1,11769-11787).
catccagggcccttgtact

SEQ ID NO: 553323 - DNA, 19 bp, Mus musculus
  siRNA target sequence for Ryr2 (NM_023868.1,11775-11793).
gggcccttgtactggaaat

SEQ ID NO: 553324 - DNA, 19 bp, Mus musculus
  siRNA target sequence for Ryr2 (NM_023868.1,11777-11795).
gcccttgtactggaaatca

SEQ ID NO: 553325 - DNA, 19 bp, Mus musculus
  siRNA target sequence for Ryr2 (NM_023868.1,11838-11856).
cttccttcatgtatttgca

SEQ ID NO: 553326 - DNA, 19 bp, Mus musculus
  siRNA target sequence for Ryr2 (NM_023868.1,11888-11906).
gccagattgagctcttaaa

SEQ ID NO: 553327 - DNA, 19 bp, Mus musculus
  siRNA target sequence for Ryr2 (NM_023868.1,11889-11907).
ccagattgagctcttaaaa

SEQ ID NO: 553328 - DNA, 19 bp, Mus musculus
  siRNA target sequence for Ryr2 (NM_023868.1,11892-11910).
gattgagctcttaaaagaa

SEQ ID NO: 553329 - DNA, 19 bp, Mus musculus
  siRNA target sequence for Ryr2 (NM_023868.1,11901-11919).
cttaaaagaacttatggat

SEQ ID NO: 553330 - DNA, 19 bp, Mus musculus
  siRNA target sequence for Ryr2 (NM_023868.1,11951-11969).
ctatgctagaaggtaatgt

SEQ ID NO: 553331 - DNA, 19 bp, Mus musculus
  siRNA target sequence for Ryr2 (NM_023868.1,12080-12098).
catcctctgacacattcaa

SEQ ID NO: 553332 - DNA, 19 bp, Mus musculus
  siRNA target sequence for Ryr2 (NM_023868.1,12086-12104).
ctgacacattcaaagagta

SEQ ID NO: 553333 - DNA, 19 bp, Mus musculus
  siRNA target sequence for Ryr2 (NM_023868.1,12225-12243).
cgagacacttgactatgaa

SEQ ID NO: 553334 - DNA, 19 bp, Mus musculus
  siRNA target sequence for Ryr2 (NM_023868.1,12430-12448).
cgcatcgaaagggtctatt

SEQ ID NO: 553335 - DNA, 19 bp, Mus musculus
  siRNA target sequence for Ryr2 (NM_023868.1,12431-12449).
gcatcgaaagggtctattt

SEQ ID NO: 553336 - DNA, 19 bp, Mus musculus
  siRNA target sequence for Ryr2 (NM_023868.1,12432-12450).
catcgaaagggtctatttt

SEQ ID NO: 553337 - DNA, 19 bp, Mus musculus
  siRNA target sequence for Ryr2 (NM_023868.1,12507-12525).
gaggcagttcatattcgat

SEQ ID NO: 553338 - DNA, 19 bp, Mus musculus
  siRNA target sequence for Ryr2 (NM_023868.1,12691-12709).
ccacgaatgggcttcttct

SEQ ID NO: 553339 - DNA, 19 bp, Mus musculus
  siRNA target sequence for Ryr2 (NM_023868.1,12735-12753).
gtttgctctcaggtacaat

SEQ ID NO: 553340 - DNA, 19 bp, Mus musculus
  siRNA target sequence for Ryr2 (NM_023868.1,13120-13138).
gatcttctttctgacatat

SEQ ID NO: 553341 - DNA, 19 bp, Mus musculus
  siRNA target sequence for Ryr2 (NM_023868.1,13237-13255).
cctgaggtacaagaaaagt

SEQ ID NO: 553342 - DNA, 19 bp, Mus musculus
  siRNA target sequence for Ryr2 (NM_023868.1,13380-13398).
gttgaggcagcttcataca

SEQ ID NO: 553343 - DNA, 19 bp, Mus musculus
  siRNA target sequence for Ryr2 (NM_023868.1,13428-13446).
gtcagcattctggaagaaa

SEQ ID NO: 553344 - DNA, 19 bp, Mus musculus
  siRNA target sequence for Ryr2 (NM_023868.1,13571-13589).
cttctgtggttgaaggaaa

SEQ ID NO: 553345 - DNA, 19 bp, Mus musculus
  siRNA target sequence for Ryr2 (NM_023868.1,13608-13626).
ctccagcgatactgctaaa

SEQ ID NO: 553346 - DNA, 19 bp, Mus musculus
  siRNA target sequence for Ryr2 (NM_023868.1,13610-13628).
ccagcgatactgctaaagt

SEQ ID NO: 553347 - DNA, 19 bp, Mus musculus
  siRNA target sequence for Ryr2 (NM_023868.1,13658-13676).
ggatcattgcggttcacta

SEQ ID NO: 553348 - DNA, 19 bp, Mus musculus
  siRNA target sequence for Ryr2 (NM_023868.1,13764-13782).
cggatactactgcttgaaa

SEQ ID NO: 553349 - DNA, 19 bp, Mus musculus
  siRNA target sequence for Ryr2 (NM_023868.1,13766-13784).
gatactactgcttgaaagt

SEQ ID NO: 553350 - DNA, 19 bp, Mus musculus
  siRNA target sequence for Ryr2 (NM_023868.1,13830-13848).
ggagtttgacggactttat

SEQ ID NO: 553351 - DNA, 19 bp, Mus musculus
  siRNA target sequence for Ryr2 (NM_023868.1,13831-13849).
gagtttgacggactttata

SEQ ID NO: 553352 - DNA, 19 bp, Mus musculus
  siRNA target sequence for Ryr2 (NM_023868.1,13833-13851).
gtttgacggactttatata

SEQ ID NO: 553353 - DNA, 19 bp, Mus musculus
  siRNA target sequence for Ryr2 (NM_023868.1,13962-13980).
ggataaatatggagagttt

SEQ ID NO: 553354 - DNA, 19 bp, Mus musculus
  siRNA target sequence for Ryr2 (NM_023868.1,14016-14034).
ggataaggctgcactagat

SEQ ID NO: 553355 - DNA, 19 bp, Mus musculus
  siRNA target sequence for Ryr2 (NM_023868.1,14017-14035).
gataaggctgcactagatt

SEQ ID NO: 553356 - DNA, 19 bp, Mus musculus
  siRNA target sequence for Ryr2 (NM_023868.1,14078-14096).
ccttgtctgctgtattgaa

SEQ ID NO: 553357 - DNA, 19 bp, Mus musculus
  siRNA target sequence for Ryr2 (NM_023868.1,14087-14105).
ctgtattgaattctattga

SEQ ID NO: 553358 - DNA, 19 bp, Mus musculus
  siRNA target sequence for Ryr2 (NM_023868.1,14134-14152).
gtcgtgttcacagacaatt

SEQ ID NO: 553359 - DNA, 19 bp, Mus musculus
  siRNA target sequence for Ryr2 (NM_023868.1,14184-14202).
gtctgttcttggacattat

SEQ ID NO: 553360 - DNA, 19 bp, Mus musculus
  siRNA target sequence for Ryr2 (NM_023868.1,14186-14204).
ctgttcttggacattataa

SEQ ID NO: 553361 - DNA, 19 bp, Mus musculus
  siRNA target sequence for Ryr2 (NM_023868.1,14188-14206).
gttcttggacattataaca

SEQ ID NO: 553362 - DNA, 19 bp, Mus musculus
  siRNA target sequence for Ryr2 (NM_023868.1,14191-14209).
cttggacattataacaact

SEQ ID NO: 553363 - DNA, 19 bp, Mus musculus
  siRNA target sequence for Ryr2 (NM_023868.1,14290-14308).
ggcaaacagctcgtgttaa

SEQ ID NO: 553364 - DNA, 19 bp, Mus musculus
  siRNA target sequence for Ryr2 (NM_023868.1,14292-14310).
caaacagctcgtgttaact

SEQ ID NO: 553365 - DNA, 19 bp, Mus musculus
  siRNA target sequence for Ryr2 (NM_023868.1,14315-14333).
gcttattggctgttgttgt

SEQ ID NO: 553366 - DNA, 19 bp, Mus musculus
  siRNA target sequence for Ryr2 (NM_023868.1,14343-14361).
cactgtcgtggcgttcaat

SEQ ID NO: 553367 - DNA, 19 bp, Mus musculus
  siRNA target sequence for Ryr2 (NM_023868.1,14347-14365).
gtcgtggcgttcaatttct

SEQ ID NO: 553368 - DNA, 19 bp, Mus musculus
  siRNA target sequence for Ryr2 (NM_023868.1,14504-14522).
caggagacgagtatgagat

SEQ ID NO: 553369 - DNA, 19 bp, Mus musculus
  siRNA target sequence for Ryr2 (NM_023868.1,14518-14536).
gagatctaccgcatcatct

SEQ ID NO: 553370 - DNA, 19 bp, Mus musculus
  siRNA target sequence for Ryr2 (NM_023868.1,14520-14538).
gatctaccgcatcatcttt

SEQ ID NO: 553371 - DNA, 19 bp, Mus musculus
  siRNA target sequence for Ryr2 (NM_023868.1,14583-14601).
catacaaggtttgatcatt

SEQ ID NO: 553372 - DNA, 19 bp, Mus musculus
  siRNA target sequence for Ryr2 (NM_023868.1,14672-14690).
gtgggattggcaacgatta

SEQ ID NO: 553373 - DNA, 19 bp, Mus musculus
  siRNA target sequence for Ryr2 (NM_023868.1,14674-14692).
gggattggcaacgattatt

SEQ ID NO: 553374 - DNA, 19 bp, Mus musculus
  siRNA target sequence for Ryr2 (NM_023868.1,14675-14693).
ggattggcaacgattattt

SEQ ID NO: 553375 - DNA, 19 bp, Mus musculus
  siRNA target sequence for Ryr2 (NM_023868.1,14680-14698).
ggcaacgattattttgata

SEQ ID NO: 553376 - DNA, 19 bp, Mus musculus
  siRNA target sequence for Ryr2 (NM_023868.1,14682-14700).
caacgattattttgataca

SEQ ID NO: 553377 - DNA, 19 bp, Mus musculus
  siRNA target sequence for Ryr2 (NM_023868.1,14836-14854).
gagaggtgttgggaatttt

SEQ ID NO: 553378 - DNA, 19 bp, Mus musculus
  siRNA target sequence for S100a1 (NM_011309.2,276-294).
ggcaaggaaggggacaaat

SEQ ID NO: 553379 - DNA, 19 bp, Mus musculus
  siRNA target sequence for S100a1 (NM_011309.2,372-390).
gatgctgtggacaaggtaa

SEQ ID NO: 553380 - DNA, 19 bp, Mus musculus
  siRNA target sequence for S100a1 (NM_011309.2,463-481).
cagtggcttgtaacaactt

SEQ ID NO: 553381 - DNA, 19 bp, Mus musculus
  siRNA target sequence for S100a10 (NM_009112.1,121-139).
ggtttgcaggcgacaaaga

SEQ ID NO: 553382 - DNA, 19 bp, Mus musculus
  siRNA target sequence for S100a10 (NM_009112.1,302-320).
gctcaccattgcatgcaat

SEQ ID NO: 553383 - DNA, 19 bp, Mus musculus
  siRNA target sequence for S100a10 (NM_009112.1,307-325).
ccattgcatgcaatgacta

SEQ ID NO: 553384 - DNA, 19 bp, Mus musculus
  siRNA target sequence for S100a10 (NM_009112.1,308-326).
cattgcatgcaatgactat

SEQ ID NO: 553385 - DNA, 19 bp, Mus musculus
  siRNA target sequence for S100a10 (NM_009112.1,316-334).
gcaatgactattttgtagt

SEQ ID NO: 553386 - DNA, 19 bp, Mus musculus
  siRNA target sequence for S100a10 (NM_009112.1,321-339).
gactattttgtagtaaaca

SEQ ID NO: 553387 - DNA, 19 bp, Mus musculus
  siRNA target sequence for S100a13 (NM_009113.2,428-446).
gcctgaacatcaatgaatt

SEQ ID NO: 553388 - DNA, 19 bp, Mus musculus
  siRNA target sequence for S100a14 (NM_025393.1,190-208).
gagacactcatcaagaact

SEQ ID NO: 553389 - DNA, 19 bp, Mus musculus
  siRNA target sequence for S100a14 (NM_025393.1,196-214).
ctcatcaagaacttccata

SEQ ID NO: 553390 - DNA, 19 bp, Mus musculus
  siRNA target sequence for S100a14 (NM_025393.1,204-222).
gaacttccataaatactct

SEQ ID NO: 553391 - DNA, 19 bp, Mus musculus
  siRNA target sequence for S100a14 (NM_025393.1,221-239).
ctgtggcgggtaaaaagga

SEQ ID NO: 553392 - DNA, 19 bp, Mus musculus
  siRNA target sequence for S100a14 (NM_025393.1,223-241).
gtggcgggtaaaaaggaaa

SEQ ID NO: 553393 - DNA, 19 bp, Mus musculus
  siRNA target sequence for S100a14 (NM_025393.1,329-347).
ccaacctgggcaactgtaa

SEQ ID NO: 553394 - DNA, 19 bp, Mus musculus
  siRNA target sequence for S100a14 (NM_025393.1,334-352).
ctgggcaactgtaatgact

SEQ ID NO: 553395 - DNA, 19 bp, Mus musculus
  siRNA target sequence for S100a14 (NM_025393.1,368-386).
gaagcttctgggagttgat

SEQ ID NO: 553396 - DNA, 19 bp, Mus musculus
  siRNA target sequence for S100a3 (NM_011310.1,120-138).
gggcgctgtggggataaat

SEQ ID NO: 553397 - DNA, 19 bp, Mus musculus
  siRNA target sequence for S100a3 (NM_011310.1,127-145).
gtggggataaatacaagat

SEQ ID NO: 553398 - DNA, 19 bp, Mus musculus
  siRNA target sequence for S100a3 (NM_011310.1,154-172).
cggagctcaaggagttgtt

SEQ ID NO: 553399 - DNA, 19 bp, Mus musculus
  siRNA target sequence for S100a3 (NM_011310.1,210-228).
cgggagtgtgactacaata

SEQ ID NO: 553400 - DNA, 19 bp, Mus musculus
  siRNA target sequence for S100a3 (NM_011310.1,211-229).
gggagtgtgactacaataa

SEQ ID NO: 553401 - DNA, 19 bp, Mus musculus
  siRNA target sequence for S100a3 (NM_011310.1,212-230).
ggagtgtgactacaataaa

SEQ ID NO: 553402 - DNA, 19 bp, Mus musculus
  siRNA target sequence for S100a3 (NM_011310.1,213-231).
gagtgtgactacaataaat

SEQ ID NO: 553403 - DNA, 19 bp, Mus musculus
  siRNA target sequence for S100a3 (NM_011310.1,314-332).
ctgccacgagtacttcaaa

SEQ ID NO: 553404 - DNA, 19 bp, Mus musculus
  siRNA target sequence for S100a4 (NM_011311.1,89-107).
gtgtccaccttccacaaat

SEQ ID NO: 553405 - DNA, 19 bp, Mus musculus
  siRNA target sequence for S100a4 (NM_011311.1,94-112).
caccttccacaaatactca

SEQ ID NO: 553406 - DNA, 19 bp, Mus musculus
  siRNA target sequence for S100a4 (NM_011311.1,114-132).
gcaaagagggtgacaagtt

SEQ ID NO: 553407 - DNA, 19 bp, Mus musculus
  siRNA target sequence for S100a4 (NM_011311.1,241-259).
cagcaacagggacaatgaa

SEQ ID NO: 553408 - DNA, 19 bp, Mus musculus
  siRNA target sequence for S100a4 (NM_011311.1,243-261).
gcaacagggacaatgaagt

SEQ ID NO: 553409 - DNA, 19 bp, Mus musculus
  siRNA target sequence for S100a4 (NM_011311.1,300-318).
ccatgatgtgcaatgaatt

SEQ ID NO: 553410 - DNA, 19 bp, Mus musculus
  siRNA target sequence for S100a4 (NM_011311.1,304-322).
gatgtgcaatgaattcttt

SEQ ID NO: 553411 - DNA, 19 bp, Mus musculus
  siRNA target sequence for S100a5 (NM_011312.1,60-78).
ggtcaccactttccataaa

SEQ ID NO: 553412 - DNA, 19 bp, Mus musculus
  siRNA target sequence for S100a5 (NM_011312.1,61-79).
gtcaccactttccataaat

SEQ ID NO: 553413 - DNA, 19 bp, Mus musculus
  siRNA target sequence for S100a5 (NM_011312.1,63-81).
caccactttccataaatat

SEQ ID NO: 553414 - DNA, 19 bp, Mus musculus
  siRNA target sequence for S100a5 (NM_011312.1,102-120).
gctgaccctgagtaggaaa

SEQ ID NO: 553415 - DNA, 19 bp, Mus musculus
  siRNA target sequence for S100a5 (NM_011312.1,107-125).
ccctgagtaggaaagaact

SEQ ID NO: 553416 - DNA, 19 bp, Mus musculus
  siRNA target sequence for S100a5 (NM_011312.1,179-197).
gcattgataacttgatgaa

SEQ ID NO: 553417 - DNA, 19 bp, Mus musculus
  siRNA target sequence for S100a5 (NM_011312.1,261-279).
gctgtgcatggcctacaat

SEQ ID NO: 553418 - DNA, 19 bp, Mus musculus
  siRNA target sequence for S100a8 (NM_013650.1,66-84).
cttgagcaacctcattgat

SEQ ID NO: 553419 - DNA, 19 bp, Mus musculus
  siRNA target sequence for S100a8 (NM_013650.1,85-103).
gtctaccacaattattcca

SEQ ID NO: 553420 - DNA, 19 bp, Mus musculus
  siRNA target sequence for S100a8 (NM_013650.1,101-119).
ccaatatacaaggaaatca

SEQ ID NO: 553421 - DNA, 19 bp, Mus musculus
  siRNA target sequence for S100a8 (NM_013650.1,118-136).
caccatgccctctacaaga

SEQ ID NO: 553422 - DNA, 19 bp, Mus musculus
  siRNA target sequence for S100a8 (NM_013650.1,120-138).
ccatgccctctacaagaat

SEQ ID NO: 553423 - DNA, 19 bp, Mus musculus
  siRNA target sequence for S100a8 (NM_013650.1,207-225).
cagagaattggacatcaat

SEQ ID NO: 553424 - DNA, 19 bp, Mus musculus
  siRNA target sequence for S100a8 (NM_013650.1,227-245).
gtgacaatgcaattaactt

SEQ ID NO: 553425 - DNA, 19 bp, Mus musculus
  siRNA target sequence for S100a8 (NM_013650.1,276-294).
gggtgtggcatctcacaaa

SEQ ID NO: 553426 - DNA, 19 bp, Mus musculus
  siRNA target sequence for S100a9 (NM_009114.1,85-103).
gacaccttccatcaatact

SEQ ID NO: 553427 - DNA, 19 bp, Mus musculus
  siRNA target sequence for S100a9 (NM_009114.1,163-181).
gcacagttggcaaccttta

SEQ ID NO: 553428 - DNA, 19 bp, Mus musculus
  siRNA target sequence for S100a9 (NM_009114.1,166-184).
cagttggcaacctttatga

SEQ ID NO: 553429 - DNA, 19 bp, Mus musculus
  siRNA target sequence for S100a9 (NM_009114.1,197-215).
gaaatgaagccctcataaa

SEQ ID NO: 553430 - DNA, 19 bp, Mus musculus
  siRNA target sequence for S100a9 (NM_009114.1,206-224).
ccctcataaatgacatcat

SEQ ID NO: 553431 - DNA, 19 bp, Mus musculus
  siRNA target sequence for S100a9 (NM_009114.1,260-278).
gctttgaggagtgtatgat

SEQ ID NO: 553432 - DNA, 19 bp, Mus musculus
  siRNA target sequence for Sag (NM_009118.1,166-184).
gcctgcgggaagaccaata

SEQ ID NO: 553433 - DNA, 19 bp, Mus musculus
  siRNA target sequence for Sag (NM_009118.1,167-185).
cctgcgggaagaccaataa

SEQ ID NO: 553434 - DNA, 19 bp, Mus musculus
  siRNA target sequence for Sag (NM_009118.1,168-186).
ctgcgggaagaccaataaa

SEQ ID NO: 553435 - DNA, 19 bp, Mus musculus
  siRNA target sequence for Sag (NM_009118.1,399-417).
ccgcagggacctgtatttt

SEQ ID NO: 553436 - DNA, 19 bp, Mus musculus
  siRNA target sequence for Sag (NM_009118.1,400-418).
cgcagggacctgtattttt

SEQ ID NO: 553437 - DNA, 19 bp, Mus musculus
  siRNA target sequence for Sag (NM_009118.1,598-616).
gactttgaggttaaagcat

SEQ ID NO: 553438 - DNA, 19 bp, Mus musculus
  siRNA target sequence for Sag (NM_009118.1,907-925).
ctctactcaagtgactatt

SEQ ID NO: 553439 - DNA, 19 bp, Mus musculus
  siRNA target sequence for Sag (NM_009118.1,1006-1024).
cccctactggctaacaaca

SEQ ID NO: 553440 - DNA, 19 bp, Mus musculus
  siRNA target sequence for Sag (NM_009118.1,1132-1150).
ctggtgtcataccatatca

SEQ ID NO: 553441 - DNA, 19 bp, Mus musculus
  siRNA target sequence for Sag (NM_009118.1,1161-1179).
cacggtgtcgggctttcta

SEQ ID NO: 553442 - DNA, 19 bp, Mus musculus
  siRNA target sequence for Sag (NM_009118.1,1267-1285).
caggatgaaaatttggttt

SEQ ID NO: 553443 - DNA, 19 bp, Mus musculus
  siRNA target sequence for Samsn1 (NM_023380.1,118-136).
gaccgttttcggaataatt

SEQ ID NO: 553444 - DNA, 19 bp, Mus musculus
  siRNA target sequence for Samsn1 (NM_023380.1,127-145).
cggaataattccgtatcaa

SEQ ID NO: 553445 - DNA, 19 bp, Mus musculus
  siRNA target sequence for Samsn1 (NM_023380.1,128-146).
ggaataattccgtatcaaa

SEQ ID NO: 553446 - DNA, 19 bp, Mus musculus
  siRNA target sequence for Samsn1 (NM_023380.1,129-147).
gaataattccgtatcaaaa

SEQ ID NO: 553447 - DNA, 19 bp, Mus musculus
  siRNA target sequence for Samsn1 (NM_023380.1,143-161).
caaaatctgatgactcaat

SEQ ID NO: 553448 - DNA, 19 bp, Mus musculus
  siRNA target sequence for Samsn1 (NM_023380.1,250-268).
gctatttcatggacaatga

SEQ ID NO: 553449 - DNA, 19 bp, Mus musculus
  siRNA target sequence for Samsn1 (NM_023380.1,299-317).
ctctttctgaggaaaaaga

SEQ ID NO: 553450 - DNA, 19 bp, Mus musculus
  siRNA target sequence for Samsn1 (NM_023380.1,351-369).
gaacagtgatcccatgatt

SEQ ID NO: 553451 - DNA, 19 bp, Mus musculus
  siRNA target sequence for Samsn1 (NM_023380.1,361-379).
cccatgattggaacacata

SEQ ID NO: 553452 - DNA, 19 bp, Mus musculus
  siRNA target sequence for Samsn1 (NM_023380.1,363-381).
catgattggaacacataca

SEQ ID NO: 553453 - DNA, 19 bp, Mus musculus
  siRNA target sequence for Samsn1 (NM_023380.1,406-424).
gactctatggacagtcttt

SEQ ID NO: 553454 - DNA, 19 bp, Mus musculus
  siRNA target sequence for Samsn1 (NM_023380.1,459-477).
ctgttcagatggaacaagt

SEQ ID NO: 553455 - DNA, 19 bp, Mus musculus
  siRNA target sequence for Samsn1 (NM_023380.1,488-506).
gcttccgactggatgatga

SEQ ID NO: 553456 - DNA, 19 bp, Mus musculus
  siRNA target sequence for Samsn1 (NM_023380.1,574-592).
gacaccgactcccttaaaa

SEQ ID NO: 553457 - DNA, 19 bp, Mus musculus
  siRNA target sequence for Samsn1 (NM_023380.1,578-596).
ccgactcccttaaaatcaa

SEQ ID NO: 553458 - DNA, 19 bp, Mus musculus
  siRNA target sequence for Samsn1 (NM_023380.1,580-598).
gactcccttaaaatcaaga

SEQ ID NO: 553459 - DNA, 19 bp, Mus musculus
  siRNA target sequence for Samsn1 (NM_023380.1,601-619).
ggagacatcatagacatta

SEQ ID NO: 553460 - DNA, 19 bp, Mus musculus
  siRNA target sequence for Samsn1 (NM_023380.1,645-663).
gacagggatgctgaacaat

SEQ ID NO: 553461 - DNA, 19 bp, Mus musculus
  siRNA target sequence for Samsn1 (NM_023380.1,667-685).
gtgggaaacttcaaattta

SEQ ID NO: 553462 - DNA, 19 bp, Mus musculus
  siRNA target sequence for Samsn1 (NM_023380.1,799-817).
cttcaggaatacacttcaa

SEQ ID NO: 553463 - DNA, 19 bp, Mus musculus
  siRNA target sequence for Samsn1 (NM_023380.1,874-892).
catctcattgaattaaaca

SEQ ID NO: 553464 - DNA, 19 bp, Mus musculus
  siRNA target sequence for Samsn1 (NM_023380.1,1038-1056).
gagggactctggctgttat

SEQ ID NO: 553465 - DNA, 19 bp, Mus musculus
  siRNA target sequence for Samsn1 (NM_023380.1,1044-1062).
ctctggctgttatatctca

SEQ ID NO: 553466 - DNA, 19 bp, Mus musculus
  siRNA target sequence for Scg2 (NM_009129.1,28-46).
ggagcagttctgcttctta

SEQ ID NO: 553467 - DNA, 19 bp, Mus musculus
  siRNA target sequence for Scg2 (NM_009129.1,37-55).
ctgcttcttatccacttaa

SEQ ID NO: 553468 - DNA, 19 bp, Mus musculus
  siRNA target sequence for Scg2 (NM_009129.1,132-150).
ggagaatgtccaaaagttt

SEQ ID NO: 553469 - DNA, 19 bp, Mus musculus
  siRNA target sequence for Scg2 (NM_009129.1,151-169).
cctagtccagaaatgatca

SEQ ID NO: 553470 - DNA, 19 bp, Mus musculus
  siRNA target sequence for Scg2 (NM_009129.1,330-348).
cgagtggatgcggataata

SEQ ID NO: 553471 - DNA, 19 bp, Mus musculus
  siRNA target sequence for Scg2 (NM_009129.1,402-420).
caagccctatgccttgaat

SEQ ID NO: 553472 - DNA, 19 bp, Mus musculus
  siRNA target sequence for Scg2 (NM_009129.1,498-516).
gcggttccctctcatgtat

SEQ ID NO: 553473 - DNA, 19 bp, Mus musculus
  siRNA target sequence for Scg2 (NM_009129.1,543-561).
caaacgcacaaatgaaata

SEQ ID NO: 553474 - DNA, 19 bp, Mus musculus
  siRNA target sequence for Scg2 (NM_009129.1,556-574).
gaaatagtcgaggaacaat

SEQ ID NO: 553475 - DNA, 19 bp, Mus musculus
  siRNA target sequence for Scg2 (NM_009129.1,659-677).
gggttgacgaggaacaaaa

SEQ ID NO: 553476 - DNA, 19 bp, Mus musculus
  siRNA target sequence for Scg2 (NM_009129.1,694-712).
gaagacgacgtgtacaaga

SEQ ID NO: 553477 - DNA, 19 bp, Mus musculus
  siRNA target sequence for Scg2 (NM_009129.1,705-723).
gtacaagaccaacaacatt

SEQ ID NO: 553478 - DNA, 19 bp, Mus musculus
  siRNA target sequence for Scg2 (NM_009129.1,867-885).
gttggggctcccagatgaa

SEQ ID NO: 553479 - DNA, 19 bp, Mus musculus
  siRNA target sequence for Scg2 (NM_009129.1,870-888).
ggggctcccagatgaagaa

SEQ ID NO: 553480 - DNA, 19 bp, Mus musculus
  siRNA target sequence for Scg2 (NM_009129.1,922-940).
gatgcctccaaagttatca

SEQ ID NO: 553481 - DNA, 19 bp, Mus musculus
  siRNA target sequence for Scg2 (NM_009129.1,939-957).
cacctacctgagaaggtta

SEQ ID NO: 553482 - DNA, 19 bp, Mus musculus
  siRNA target sequence for Scg2 (NM_009129.1,945-963).
cctgagaaggttagtgaat

SEQ ID NO: 553483 - DNA, 19 bp, Mus musculus
  siRNA target sequence for Scg2 (NM_009129.1,1031-1049).
cccttgattctcagtctat

SEQ ID NO: 553484 - DNA, 19 bp, Mus musculus
  siRNA target sequence for Scg2 (NM_009129.1,1080-1098).
gcagataccccctgaagat

SEQ ID NO: 553485 - DNA, 19 bp, Mus musculus
  siRNA target sequence for Scg2 (NM_009129.1,1083-1101).
gataccccctgaagattta

SEQ ID NO: 553486 - DNA, 19 bp, Mus musculus
  siRNA target sequence for Scg2 (NM_009129.1,1088-1106).
cccctgaagatttaattga

SEQ ID NO: 553487 - DNA, 19 bp, Mus musculus
  siRNA target sequence for Scg2 (NM_009129.1,1206-1224).
ccgtccagacatgtttcaa

SEQ ID NO: 553488 - DNA, 19 bp, Mus musculus
  siRNA target sequence for Scg2 (NM_009129.1,1210-1228).
ccagacatgtttcaaagta

SEQ ID NO: 553489 - DNA, 19 bp, Mus musculus
  siRNA target sequence for Scg2 (NM_009129.1,1211-1229).
cagacatgtttcaaagtaa

SEQ ID NO: 553490 - DNA, 19 bp, Mus musculus
  siRNA target sequence for Scg2 (NM_009129.1,1213-1231).
gacatgtttcaaagtaaga

SEQ ID NO: 553491 - DNA, 19 bp, Mus musculus
  siRNA target sequence for Scg2 (NM_009129.1,1333-1351).
gagaatgtagtaaatcaga

SEQ ID NO: 553492 - DNA, 19 bp, Mus musculus
  siRNA target sequence for Scg2 (NM_009129.1,1395-1413).
gatgaggctcccttatggt

SEQ ID NO: 553493 - DNA, 19 bp, Mus musculus
  siRNA target sequence for Scg2 (NM_009129.1,1472-1490).
gcagacaagcaccttatga

SEQ ID NO: 553494 - DNA, 19 bp, Mus musculus
  siRNA target sequence for Scg2 (NM_009129.1,1484-1502).
cttatgaaaatctgaatga

SEQ ID NO: 553495 - DNA, 19 bp, Mus musculus
  siRNA target sequence for Scg2 (NM_009129.1,1525-1543).
gccaggatgctagttaagt

SEQ ID NO: 553496 - DNA, 19 bp, Mus musculus
  siRNA target sequence for Scg2 (NM_009129.1,1688-1706).
ccaaggtgagcaaaaggat

SEQ ID NO: 553497 - DNA, 19 bp, Mus musculus
  siRNA target sequence for Scg2 (NM_009129.1,1709-1727).
ccgtaggatccctgaagaa

SEQ ID NO: 553498 - DNA, 19 bp, Mus musculus
  siRNA target sequence for Scg2 (NM_009129.1,1710-1728).
cgtaggatccctgaagaat

SEQ ID NO: 553499 - DNA, 19 bp, Mus musculus
  siRNA target sequence for Scgn (NM_145399.1,185-203).
gacaacgcacgcagaaaaa

SEQ ID NO: 553500 - DNA, 19 bp, Mus musculus
  siRNA target sequence for Scgn (NM_145399.1,187-205).
caacgcacgcagaaaaact

SEQ ID NO: 553501 - DNA, 19 bp, Mus musculus
  siRNA target sequence for Scgn (NM_145399.1,248-266).
cgcttcgacaaggaagaaa

SEQ ID NO: 553502 - DNA, 19 bp, Mus musculus
  siRNA target sequence for Scgn (NM_145399.1,297-315).
ccttctttgatcatttgct

SEQ ID NO: 553503 - DNA, 19 bp, Mus musculus
  siRNA target sequence for Scgn (NM_145399.1,305-323).
gatcatttgctggcaaaat

SEQ ID NO: 553504 - DNA, 19 bp, Mus musculus
  siRNA target sequence for Scgn (NM_145399.1,388-406).
ccacaacgtctctaaggaa

SEQ ID NO: 553505 - DNA, 19 bp, Mus musculus
  siRNA target sequence for Scgn (NM_145399.1,408-426).
gccgcatactgatgaaaga

SEQ ID NO: 553506 - DNA, 19 bp, Mus musculus
  siRNA target sequence for Scgn (NM_145399.1,425-443).
gagcttgccagtatgttct

SEQ ID NO: 553507 - DNA, 19 bp, Mus musculus
  siRNA target sequence for Scgn (NM_145399.1,427-445).
gcttgccagtatgttctta

SEQ ID NO: 553508 - DNA, 19 bp, Mus musculus
  siRNA target sequence for Scgn (NM_145399.1,433-451).
cagtatgttcttatctgaa

SEQ ID NO: 553509 - DNA, 19 bp, Mus musculus
  siRNA target sequence for Scgn (NM_145399.1,482-500).
gaaactcccttggataaca

SEQ ID NO: 553510 - DNA, 19 bp, Mus musculus
  siRNA target sequence for Scgn (NM_145399.1,517-535).
gatttggcgcaaatacgat

SEQ ID NO: 553511 - DNA, 19 bp, Mus musculus
  siRNA target sequence for Scgn (NM_145399.1,541-559).
cagcagtggtttcatatca

SEQ ID NO: 553512 - DNA, 19 bp, Mus musculus
  siRNA target sequence for Scgn (NM_145399.1,561-579).
ctgctgagctttgtaactt

SEQ ID NO: 553513 - DNA, 19 bp, Mus musculus
  siRNA target sequence for Scgn (NM_145399.1,646-664).
caccatgatgaagatcttt

SEQ ID NO: 553514 - DNA, 19 bp, Mus musculus
  siRNA target sequence for Scgn (NM_145399.1,677-695).
gatggacgtttggatctta

SEQ ID NO: 553515 - DNA, 19 bp, Mus musculus
  siRNA target sequence for Scgn (NM_145399.1,681-699).
gacgtttggatcttaatga

SEQ ID NO: 553516 - DNA, 19 bp, Mus musculus
  siRNA target sequence for Scgn (NM_145399.1,751-769).
ggatgcttcttctactgaa

SEQ ID NO: 553517 - DNA, 19 bp, Mus musculus
  siRNA target sequence for Scgn (NM_145399.1,800-818).
gcccattacgatgttagta

SEQ ID NO: 553518 - DNA, 19 bp, Mus musculus
  siRNA target sequence for Scgn (NM_145399.1,801-819).
cccattacgatgttagtaa

SEQ ID NO: 553519 - DNA, 19 bp, Mus musculus
  siRNA target sequence for Scgn (NM_145399.1,802-820).
ccattacgatgttagtaaa

SEQ ID NO: 553520 - DNA, 19 bp, Mus musculus
  siRNA target sequence for Scgn (NM_145399.1,803-821).
cattacgatgttagtaaaa

SEQ ID NO: 553521 - DNA, 19 bp, Mus musculus
  siRNA target sequence for Scgn (NM_145399.1,840-858).
cagaagtggatggatttgt

SEQ ID NO: 553522 - DNA, 19 bp, Mus musculus
  siRNA target sequence for Scgn (NM_145399.1,842-860).
gaagtggatggatttgtca

SEQ ID NO: 553523 - DNA, 19 bp, Mus musculus
  siRNA target sequence for Scgn (NM_145399.1,847-865).
ggatggatttgtcaaagat

SEQ ID NO: 553524 - DNA, 19 bp, Mus musculus
  siRNA target sequence for Scgn (NM_145399.1,848-866).
gatggatttgtcaaagata

SEQ ID NO: 553525 - DNA, 19 bp, Mus musculus
  siRNA target sequence for Scgn (NM_145399.1,851-869).
ggatttgtcaaagatatga

SEQ ID NO: 553526 - DNA, 19 bp, Mus musculus
  siRNA target sequence for Scgn (NM_145399.1,852-870).
gatttgtcaaagatatgat

SEQ ID NO: 553527 - DNA, 19 bp, Mus musculus
  siRNA target sequence for Scgn (NM_145399.1,896-914).
ggtgtggatctggataagt

SEQ ID NO: 553528 - DNA, 19 bp, Mus musculus
  siRNA target sequence for Scgn (NM_145399.1,983-1001).
ctgtgtcttgggctaaaaa

SEQ ID NO: 553529 - DNA, 19 bp, Mus musculus
  siRNA target sequence for Scgn (NM_145399.1,985-1003).
gtgtcttgggctaaaaata

SEQ ID NO: 553530 - DNA, 19 bp, Mus musculus
  siRNA target sequence for Scn10a (NM_009134.1,378-396).
cccttcaacctgatcagaa

SEQ ID NO: 553531 - DNA, 19 bp, Mus musculus
  siRNA target sequence for Scn10a (NM_009134.1,383-401).
caacctgatcagaagaaca

SEQ ID NO: 553532 - DNA, 19 bp, Mus musculus
  siRNA target sequence for Scn10a (NM_009134.1,420-438).
cactcctggttctccatat

SEQ ID NO: 553533 - DNA, 19 bp, Mus musculus
  siRNA target sequence for Scn10a (NM_009134.1,428-446).
gttctccatatttatcact

SEQ ID NO: 553534 - DNA, 19 bp, Mus musculus
  siRNA target sequence for Scn10a (NM_009134.1,470-488).
gtgcatgacccgaactgat

SEQ ID NO: 553535 - DNA, 19 bp, Mus musculus
  siRNA target sequence for Scn10a (NM_009134.1,473-491).
catgacccgaactgatctt

SEQ ID NO: 553536 - DNA, 19 bp, Mus musculus
  siRNA target sequence for Scn10a (NM_009134.1,529-547).
ccttcgaggctctgataaa

SEQ ID NO: 553537 - DNA, 19 bp, Mus musculus
  siRNA target sequence for Scn10a (NM_009134.1,839-857).
caaggggaacctcaagaat

SEQ ID NO: 553538 - DNA, 19 bp, Mus musculus
  siRNA target sequence for Scn10a (NM_009134.1,883-901).
cgcacaaggctgacaatct

SEQ ID NO: 553539 - DNA, 19 bp, Mus musculus
  siRNA target sequence for Scn10a (NM_009134.1,1018-1036).
ctgacaacccggattttaa

SEQ ID NO: 553540 - DNA, 19 bp, Mus musculus
  siRNA target sequence for Scn10a (NM_009134.1,1020-1038).
gacaacccggattttaact

SEQ ID NO: 553541 - DNA, 19 bp, Mus musculus
  siRNA target sequence for Scn10a (NM_009134.1,1131-1149).
cgggcttccgggaaaatgt

SEQ ID NO: 553542 - DNA, 19 bp, Mus musculus
  siRNA target sequence for Scn10a (NM_009134.1,1132-1150).
gggcttccgggaaaatgta

SEQ ID NO: 553543 - DNA, 19 bp, Mus musculus
  siRNA target sequence for Scn10a (NM_009134.1,1134-1152).
gcttccgggaaaatgtaca

SEQ ID NO: 553544 - DNA, 19 bp, Mus musculus
  siRNA target sequence for Scn10a (NM_009134.1,1135-1153).
cttccgggaaaatgtacat

SEQ ID NO: 553545 - DNA, 19 bp, Mus musculus
  siRNA target sequence for Scn10a (NM_009134.1,1249-1267).
caacaattgcagaaatcga

SEQ ID NO: 553546 - DNA, 19 bp, Mus musculus
  siRNA target sequence for Scn10a (NM_009134.1,1562-1580).
cagccaagacgtctcattt

SEQ ID NO: 553547 - DNA, 19 bp, Mus musculus
  siRNA target sequence for Scn10a (NM_009134.1,1565-1583).
ccaagacgtctcatttcct

SEQ ID NO: 553548 - DNA, 19 bp, Mus musculus
  siRNA target sequence for Scn10a (NM_009134.1,1937-1955).
gatcagcttcgcccaaaaa

SEQ ID NO: 553549 - DNA, 19 bp, Mus musculus
  siRNA target sequence for Scn10a (NM_009134.1,1946-1964).
cgcccaaaaatatctgata

SEQ ID NO: 553550 - DNA, 19 bp, Mus musculus
  siRNA target sequence for Scn10a (NM_009134.1,1973-1991).
ctgccccaagtggagaaaa

SEQ ID NO: 553551 - DNA, 19 bp, Mus musculus
  siRNA target sequence for Scn10a (NM_009134.1,2026-2044).
ccttcgcagagcttaccat

SEQ ID NO: 553552 - DNA, 19 bp, Mus musculus
  siRNA target sequence for Scn10a (NM_009134.1,2096-2114).
catgactgatgctttcgat

SEQ ID NO: 553553 - DNA, 19 bp, Mus musculus
  siRNA target sequence for Scn10a (NM_009134.1,2120-2138).
gctccaagccggcaacatt

SEQ ID NO: 553554 - DNA, 19 bp, Mus musculus
  siRNA target sequence for Scn10a (NM_009134.1,2169-2187).
gccttcaagatcattgctt

SEQ ID NO: 553555 - DNA, 19 bp, Mus musculus
  siRNA target sequence for Scn10a (NM_009134.1,2184-2202).
gctttcgacccgtactact

SEQ ID NO: 553556 - DNA, 19 bp, Mus musculus
  siRNA target sequence for Scn10a (NM_009134.1,2185-2203).
ctttcgacccgtactacta

SEQ ID NO: 553557 - DNA, 19 bp, Mus musculus
  siRNA target sequence for Scn10a (NM_009134.1,2809-2827).
gggccattaccagttacat

SEQ ID NO: 553558 - DNA, 19 bp, Mus musculus
  siRNA target sequence for Scn10a (NM_009134.1,2811-2829).
gccattaccagttacatca

SEQ ID NO: 553559 - DNA, 19 bp, Mus musculus
  siRNA target sequence for Scn10a (NM_009134.1,2864-2882).
gacccagctggggatgaaa

SEQ ID NO: 553560 - DNA, 19 bp, Mus musculus
  siRNA target sequence for Scn10a (NM_009134.1,3741-3759).
gccaagatcctcgagtatt

SEQ ID NO: 553561 - DNA, 19 bp, Mus musculus
  siRNA target sequence for Scn10a (NM_009134.1,3815-3833).
ggctctgtctcgattcgaa

SEQ ID NO: 553562 - DNA, 19 bp, Mus musculus
  siRNA target sequence for Scn10a (NM_009134.1,3987-4005).
ccattttccgtcgtgaatt

SEQ ID NO: 553563 - DNA, 19 bp, Mus musculus
  siRNA target sequence for Scn10a (NM_009134.1,4066-4084).
gggttaacgtcaaagtcaa

SEQ ID NO: 553564 - DNA, 19 bp, Mus musculus
  siRNA target sequence for Scn10a (NM_009134.1,4165-4183).
ctgtcgattctcgagatat

SEQ ID NO: 553565 - DNA, 19 bp, Mus musculus
  siRNA target sequence for Scn10a (NM_009134.1,4167-4185).
gtcgattctcgagatatca

SEQ ID NO: 553566 - DNA, 19 bp, Mus musculus
  siRNA target sequence for Scn10a (NM_009134.1,4170-4188).
gattctcgagatatcaaca

SEQ ID NO: 553567 - DNA, 19 bp, Mus musculus
  siRNA target sequence for Scn10a (NM_009134.1,4210-4228).
gcctgtacatgtacctata

SEQ ID NO: 553568 - DNA, 19 bp, Mus musculus
  siRNA target sequence for Scn10a (NM_009134.1,4259-4277).
cttcacgctgaatctcttt

SEQ ID NO: 553569 - DNA, 19 bp, Mus musculus
  siRNA target sequence for Scn10a (NM_009134.1,4597-4615).
cgggcgagtgtgtgatgaa

SEQ ID NO: 553570 - DNA, 19 bp, Mus musculus
  siRNA target sequence for Scn10a (NM_009134.1,4655-4673).
gaatgtgttcgacttcatt

SEQ ID NO: 553571 - DNA, 19 bp, Mus musculus
  siRNA target sequence for Scn10a (NM_009134.1,4917-4935).
gccagcttcgctaatgtca

SEQ ID NO: 553572 - DNA, 19 bp, Mus musculus
  siRNA target sequence for Scn10a (NM_009134.1,4918-4936).
ccagcttcgctaatgtcat

SEQ ID NO: 553573 - DNA, 19 bp, Mus musculus
  siRNA target sequence for Scn10a (NM_009134.1,4919-4937).
cagcttcgctaatgtcata

SEQ ID NO: 553574 - DNA, 19 bp, Mus musculus
  siRNA target sequence for Scn10a (NM_009134.1,4921-4939).
gcttcgctaatgtcataga

SEQ ID NO: 553575 - DNA, 19 bp, Mus musculus
  siRNA target sequence for Scn10a (NM_009134.1,4922-4940).
cttcgctaatgtcatagat

SEQ ID NO: 553576 - DNA, 19 bp, Mus musculus
  siRNA target sequence for Scn10a (NM_009134.1,5306-5324).
ccagttcattgccttttct

SEQ ID NO: 553577 - DNA, 19 bp, Mus musculus
  siRNA target sequence for Scn10a (NM_009134.1,5369-5387).
cccaaaacctaatcagaat

SEQ ID NO: 553578 - DNA, 19 bp, Mus musculus
  siRNA target sequence for Scn10a (NM_009134.1,5410-5428).
cgttggtccccggagataa

SEQ ID NO: 553579 - DNA, 19 bp, Mus musculus
  siRNA target sequence for Scn10a (NM_009134.1,5492-5510).
ggattctctgaagactaat

SEQ ID NO: 553580 - DNA, 19 bp, Mus musculus
  siRNA target sequence for Scn10a (NM_009134.1,5493-5511).
gattctctgaagactaata

SEQ ID NO: 553581 - DNA, 19 bp, Mus musculus
  siRNA target sequence for Scn10a (NM_009134.1,5519-5537).
gaagtttatggcaactaat

SEQ ID NO: 553582 - DNA, 19 bp, Mus musculus
  siRNA target sequence for Scn10a (NM_009134.1,5522-5540).
gtttatggcaactaatctt

SEQ ID NO: 553583 - DNA, 19 bp, Mus musculus
  siRNA target sequence for Scn10a (NM_009134.1,5528-5546).
ggcaactaatctttccaaa

SEQ ID NO: 553584 - DNA, 19 bp, Mus musculus
  siRNA target sequence for Scn10a (NM_009134.1,5594-5612).
catctcagccaccattatt

SEQ ID NO: 553585 - DNA, 19 bp, Mus musculus
  siRNA target sequence for Scn10a (NM_009134.1,5619-5637).
gcctatcggaactacatgt

SEQ ID NO: 553586 - DNA, 19 bp, Mus musculus
  siRNA target sequence for Scn10a (NM_009134.1,5620-5638).
cctatcggaactacatgtt

SEQ ID NO: 553587 - DNA, 19 bp, Mus musculus
  siRNA target sequence for Scn10a (NM_009134.1,5744-5762).
cggtgggctcccagacaaa

SEQ ID NO: 553588 - DNA, 19 bp, Mus musculus
  siRNA target sequence for Scn10a (NM_009134.1,5745-5763).
ggtgggctcccagacaaat

SEQ ID NO: 553589 - DNA, 19 bp, Mus musculus
  siRNA target sequence for Scn10a (NM_009134.1,5845-5863).
catctagctcaatgcaaaa

SEQ ID NO: 553590 - DNA, 19 bp, Mus musculus
  siRNA target sequence for Scn10a (NM_009134.1,5854-5872).
caatgcaaaatgaagatga

SEQ ID NO: 553591 - DNA, 19 bp, Mus musculus
  siRNA target sequence for Scn11a (NM_011887.2,163-181).
ccttcactttcgactcttt

SEQ ID NO: 553592 - DNA, 19 bp, Mus musculus
  siRNA target sequence for Scn11a (NM_011887.2,173-191).
cgactctttggctgcaata

SEQ ID NO: 553593 - DNA, 19 bp, Mus musculus
  siRNA target sequence for Scn11a (NM_011887.2,314-332).
cgttccccctgaccttata

SEQ ID NO: 553594 - DNA, 19 bp, Mus musculus
  siRNA target sequence for Scn11a (NM_011887.2,334-352).
cgaagcccctggaagatct

SEQ ID NO: 553595 - DNA, 19 bp, Mus musculus
  siRNA target sequence for Scn11a (NM_011887.2,348-366).
gatctggacccattttaca

SEQ ID NO: 553596 - DNA, 19 bp, Mus musculus
  siRNA target sequence for Scn11a (NM_011887.2,379-397).
cattcatggtattgaacaa

SEQ ID NO: 553597 - DNA, 19 bp, Mus musculus
  siRNA target sequence for Scn11a (NM_011887.2,395-413).
caagaagagaacaatctat

SEQ ID NO: 553598 - DNA, 19 bp, Mus musculus
  siRNA target sequence for Scn11a (NM_011887.2,425-443).
caagagggccttgttcatt

SEQ ID NO: 553599 - DNA, 19 bp, Mus musculus
  siRNA target sequence for Scn11a (NM_011887.2,460-478).
ccatcagaagcttcatgat

SEQ ID NO: 553600 - DNA, 19 bp, Mus musculus
  siRNA target sequence for Scn11a (NM_011887.2,461-479).
catcagaagcttcatgatt

SEQ ID NO: 553601 - DNA, 19 bp, Mus musculus
  siRNA target sequence for Scn11a (NM_011887.2,523-541).
cagtgatcatcaactgtat

SEQ ID NO: 553602 - DNA, 19 bp, Mus musculus
  siRNA target sequence for Scn11a (NM_011887.2,525-543).
gtgatcatcaactgtatgt

SEQ ID NO: 553603 - DNA, 19 bp, Mus musculus
  siRNA target sequence for Scn11a (NM_011887.2,583-601).
gtaacattcccgaatacgt

SEQ ID NO: 553604 - DNA, 19 bp, Mus musculus
  siRNA target sequence for Scn11a (NM_011887.2,652-670).
gcttcattgtggatgagtt

SEQ ID NO: 553605 - DNA, 19 bp, Mus musculus
  siRNA target sequence for Scn11a (NM_011887.2,721-739).
cagcgatagcgccttgttt

SEQ ID NO: 553606 - DNA, 19 bp, Mus musculus
  siRNA target sequence for Scn11a (NM_011887.2,975-993).
ggccctaacgctttttcca

SEQ ID NO: 553607 - DNA, 19 bp, Mus musculus
  siRNA target sequence for Scn11a (NM_011887.2,976-994).
gccctaacgctttttccaa

SEQ ID NO: 553608 - DNA, 19 bp, Mus musculus
  siRNA target sequence for Scn11a (NM_011887.2,992-1010).
caacaaggattgctttgta

SEQ ID NO: 553609 - DNA, 19 bp, Mus musculus
  siRNA target sequence for Scn11a (NM_011887.2,1020-1038).
gatagcgaggacttcataa

SEQ ID NO: 553610 - DNA, 19 bp, Mus musculus
  siRNA target sequence for Scn11a (NM_011887.2,1074-1092).
gatggttccacgtgcaata

SEQ ID NO: 553611 - DNA, 19 bp, Mus musculus
  siRNA target sequence for Scn11a (NM_011887.2,1077-1095).
ggttccacgtgcaataaaa

SEQ ID NO: 553612 - DNA, 19 bp, Mus musculus
  siRNA target sequence for Scn11a (NM_011887.2,1085-1103).
gtgcaataaaaccacattt

SEQ ID NO: 553613 - DNA, 19 bp, Mus musculus
  siRNA target sequence for Scn11a (NM_011887.2,1096-1114).
ccacatttaacccagatta

SEQ ID NO: 553614 - DNA, 19 bp, Mus musculus
  siRNA target sequence for Scn11a (NM_011887.2,1097-1115).
cacatttaacccagattat

SEQ ID NO: 553615 - DNA, 19 bp, Mus musculus
  siRNA target sequence for Scn11a (NM_011887.2,1155-1173).
gccatgttccgggttatga

SEQ ID NO: 553616 - DNA, 19 bp, Mus musculus
  siRNA target sequence for Scn11a (NM_011887.2,1157-1175).
catgttccgggttatgact

SEQ ID NO: 553617 - DNA, 19 bp, Mus musculus
  siRNA target sequence for Scn11a (NM_011887.2,1212-1230).
cgcacctccgggatctact

SEQ ID NO: 553618 - DNA, 19 bp, Mus musculus
  siRNA target sequence for Scn11a (NM_011887.2,1214-1232).
cacctccgggatctacttt

SEQ ID NO: 553619 - DNA, 19 bp, Mus musculus
  siRNA target sequence for Scn11a (NM_011887.2,1216-1234).
cctccgggatctactttgt

SEQ ID NO: 553620 - DNA, 19 bp, Mus musculus
  siRNA target sequence for Scn11a (NM_011887.2,1219-1237).
ccgggatctactttgtctt

SEQ ID NO: 553621 - DNA, 19 bp, Mus musculus
  siRNA target sequence for Scn11a (NM_011887.2,1410-1428).
gttgccatgggaattgaca

SEQ ID NO: 553622 - DNA, 19 bp, Mus musculus
  siRNA target sequence for Scn11a (NM_011887.2,1446-1464).
ctccaagcttcgtcctttt

SEQ ID NO: 553623 - DNA, 19 bp, Mus musculus
  siRNA target sequence for Scn11a (NM_011887.2,1456-1474).
cgtccttttccccaaagaa

SEQ ID NO: 553624 - DNA, 19 bp, Mus musculus
  siRNA target sequence for Scn11a (NM_011887.2,1488-1506).
ggcagtaagacaagaaagt

SEQ ID NO: 553625 - DNA, 19 bp, Mus musculus
  siRNA target sequence for Scn11a (NM_011887.2,1498-1516).
caagaaagtccttctttat

SEQ ID NO: 553626 - DNA, 19 bp, Mus musculus
  siRNA target sequence for Scn11a (NM_011887.2,1540-1558).
cctcagcgtccgattcaga

SEQ ID NO: 553627 - DNA, 19 bp, Mus musculus
  siRNA target sequence for Scn11a (NM_011887.2,1557-1575).
gaggacgatgcctctaaaa

SEQ ID NO: 553628 - DNA, 19 bp, Mus musculus
  siRNA target sequence for Scn11a (NM_011887.2,1619-1637).
gcccgtagaactctttgat

SEQ ID NO: 553629 - DNA, 19 bp, Mus musculus
  siRNA target sequence for Scn11a (NM_011887.2,1669-1687).
cgctgagtgccgtcagtat

SEQ ID NO: 553630 - DNA, 19 bp, Mus musculus
  siRNA target sequence for Scn11a (NM_011887.2,1671-1689).
ctgagtgccgtcagtatct

SEQ ID NO: 553631 - DNA, 19 bp, Mus musculus
  siRNA target sequence for Scn11a (NM_011887.2,1678-1696).
ccgtcagtatcttaaccat

SEQ ID NO: 553632 - DNA, 19 bp, Mus musculus
  siRNA target sequence for Scn11a (NM_011887.2,1732-1750).
gtttcccgtgtgggaaaaa

SEQ ID NO: 553633 - DNA, 19 bp, Mus musculus
  siRNA target sequence for Scn11a (NM_011887.2,1786-1804).
ctccgtggctgtgcataaa

SEQ ID NO: 553634 - DNA, 19 bp, Mus musculus
  siRNA target sequence for Scn11a (NM_011887.2,1788-1806).
ccgtggctgtgcataaaga

SEQ ID NO: 553635 - DNA, 19 bp, Mus musculus
  siRNA target sequence for Scn11a (NM_011887.2,1789-1807).
cgtggctgtgcataaagaa

SEQ ID NO: 553636 - DNA, 19 bp, Mus musculus
  siRNA target sequence for Scn11a (NM_011887.2,1809-1827).
gtcctgcagactatcatga

SEQ ID NO: 553637 - DNA, 19 bp, Mus musculus
  siRNA target sequence for Scn11a (NM_011887.2,1859-1877).
ctgcatcatcgtcaatact

SEQ ID NO: 553638 - DNA, 19 bp, Mus musculus
  siRNA target sequence for Scn11a (NM_011887.2,1887-1905).
gccatggaacaccacaata

SEQ ID NO: 553639 - DNA, 19 bp, Mus musculus
  siRNA target sequence for Scn11a (NM_011887.2,1898-1916).
ccacaatatggataactct

SEQ ID NO: 553640 - DNA, 19 bp, Mus musculus
  siRNA target sequence for Scn11a (NM_011887.2,1899-1917).
cacaatatggataactctt

SEQ ID NO: 553641 - DNA, 19 bp, Mus musculus
  siRNA target sequence for Scn11a (NM_011887.2,1901-1919).
caatatggataactcttta

SEQ ID NO: 553642 - DNA, 19 bp, Mus musculus
  siRNA target sequence for Scn11a (NM_011887.2,1915-1933).
ctttaaaagacatactgaa

SEQ ID NO: 553643 - DNA, 19 bp, Mus musculus
  siRNA target sequence for Scn11a (NM_011887.2,2016-2034).
cggcacggctggaacatct

SEQ ID NO: 553644 - DNA, 19 bp, Mus musculus
  siRNA target sequence for Scn11a (NM_011887.2,2017-2035).
ggcacggctggaacatctt

SEQ ID NO: 553645 - DNA, 19 bp, Mus musculus
  siRNA target sequence for Scn11a (NM_011887.2,2018-2036).
gcacggctggaacatcttt

SEQ ID NO: 553646 - DNA, 19 bp, Mus musculus
  siRNA target sequence for Scn11a (NM_011887.2,2075-2093).
cttccacaaactgtctaaa

SEQ ID NO: 553647 - DNA, 19 bp, Mus musculus
  siRNA target sequence for Scn11a (NM_011887.2,2144-2162).
caaatcctggcccacatta

SEQ ID NO: 553648 - DNA, 19 bp, Mus musculus
  siRNA target sequence for Scn11a (NM_011887.2,2227-2245).
cgatcgtggtcttcatctt

SEQ ID NO: 553649 - DNA, 19 bp, Mus musculus
  siRNA target sequence for Scn11a (NM_011887.2,2265-2283).
ctctttggtgccaagttta

SEQ ID NO: 553650 - DNA, 19 bp, Mus musculus
  siRNA target sequence for Scn11a (NM_011887.2,2467-2485).
ggaagctcgtggtgcttaa

SEQ ID NO: 553651 - DNA, 19 bp, Mus musculus
  siRNA target sequence for Scn11a (NM_011887.2,2593-2611).
gccgagcgttctacttcat

SEQ ID NO: 553652 - DNA, 19 bp, Mus musculus
  siRNA target sequence for Scn11a (NM_011887.2,2735-2753).
ctggaaggagtatgattca

SEQ ID NO: 553653 - DNA, 19 bp, Mus musculus
  siRNA target sequence for Scn11a (NM_011887.2,2738-2756).
gaaggagtatgattcagaa

SEQ ID NO: 553654 - DNA, 19 bp, Mus musculus
  siRNA target sequence for Scn11a (NM_011887.2,2803-2821).
caaaagaagaggacgatat

SEQ ID NO: 553655 - DNA, 19 bp, Mus musculus
  siRNA target sequence for Scn11a (NM_011887.2,2811-2829).
gaggacgatatggaatgtt

SEQ ID NO: 553656 - DNA, 19 bp, Mus musculus
  siRNA target sequence for Scn11a (NM_011887.2,2813-2831).
ggacgatatggaatgttgt

SEQ ID NO: 553657 - DNA, 19 bp, Mus musculus
  siRNA target sequence for Scn11a (NM_011887.2,2922-2940).
gatgaccacggggttgaaa

SEQ ID NO: 553658 - DNA, 19 bp, Mus musculus
  siRNA target sequence for Scn11a (NM_011887.2,2932-2950).
gggttgaaatggaagtgtt

SEQ ID NO: 553659 - DNA, 19 bp, Mus musculus
  siRNA target sequence for Scn11a (NM_011887.2,2933-2951).
ggttgaaatggaagtgttt

SEQ ID NO: 553660 - DNA, 19 bp, Mus musculus
  siRNA target sequence for Scn11a (NM_011887.2,2953-2971).
ccgaagaagatccgaattt

SEQ ID NO: 553661 - DNA, 19 bp, Mus musculus
  siRNA target sequence for Scn11a (NM_011887.2,2954-2972).
cgaagaagatccgaattta

SEQ ID NO: 553662 - DNA, 19 bp, Mus musculus
  siRNA target sequence for Scn11a (NM_011887.2,2955-2973).
gaagaagatccgaatttaa

SEQ ID NO: 553663 - DNA, 19 bp, Mus musculus
  siRNA target sequence for Scn11a (NM_011887.2,2958-2976).
gaagatccgaatttaacca

SEQ ID NO: 553664 - DNA, 19 bp, Mus musculus
  siRNA target sequence for Scn11a (NM_011887.2,2964-2982).
ccgaatttaaccatacaga

SEQ ID NO: 553665 - DNA, 19 bp, Mus musculus
  siRNA target sequence for Scn11a (NM_011887.2,3006-3024).
gcaagcatgctctcagaat

SEQ ID NO: 553666 - DNA, 19 bp, Mus musculus
  siRNA target sequence for Scn11a (NM_011887.2,3019-3037).
cagaatgcagcacaataga

SEQ ID NO: 553667 - DNA, 19 bp, Mus musculus
  siRNA target sequence for Scn11a (NM_011887.2,3029-3047).
cacaatagacctgaatgat

SEQ ID NO: 553668 - DNA, 19 bp, Mus musculus
  siRNA target sequence for Scn11a (NM_011887.2,3038-3056).
cctgaatgatatctttaga

SEQ ID NO: 553669 - DNA, 19 bp, Mus musculus
  siRNA target sequence for Scn11a (NM_011887.2,3086-3104).
gcaaccagatcgatgcttt

SEQ ID NO: 553670 - DNA, 19 bp, Mus musculus
  siRNA target sequence for Scn11a (NM_011887.2,3112-3130).
gcctcagttgtatctttct

SEQ ID NO: 553671 - DNA, 19 bp, Mus musculus
  siRNA target sequence for Scn11a (NM_011887.2,3113-3131).
cctcagttgtatctttcta

SEQ ID NO: 553672 - DNA, 19 bp, Mus musculus
  siRNA target sequence for Scn11a (NM_011887.2,3129-3147).
ctatgttgcaaaacaatca

SEQ ID NO: 553673 - DNA, 19 bp, Mus musculus
  siRNA target sequence for Scn11a (NM_011887.2,3253-3271).
gcagcggagcactgatatt

SEQ ID NO: 553674 - DNA, 19 bp, Mus musculus
  siRNA target sequence for Scn11a (NM_011887.2,3298-3316).
cccaagttgaaaaattact

SEQ ID NO: 553675 - DNA, 19 bp, Mus musculus
  siRNA target sequence for Scn11a (NM_011887.2,3315-3333).
ctgaagtgtaccgataata

SEQ ID NO: 553676 - DNA, 19 bp, Mus musculus
  siRNA target sequence for Scn11a (NM_011887.2,3317-3335).
gaagtgtaccgataatatt

SEQ ID NO: 553677 - DNA, 19 bp, Mus musculus
  siRNA target sequence for Scn11a (NM_011887.2,3384-3402).
ggattccggaagtatttca

SEQ ID NO: 553678 - DNA, 19 bp, Mus musculus
  siRNA target sequence for Scn11a (NM_011887.2,3449-3467).
gctcagcctcacgaactta

SEQ ID NO: 553679 - DNA, 19 bp, Mus musculus
  siRNA target sequence for Scn11a (NM_011887.2,3454-3472).
gcctcacgaacttaccaaa

SEQ ID NO: 553680 - DNA, 19 bp, Mus musculus
  siRNA target sequence for Scn11a (NM_011887.2,3460-3478).
cgaacttaccaaacttgaa

SEQ ID NO: 553681 - DNA, 19 bp, Mus musculus
  siRNA target sequence for Scn11a (NM_011887.2,3724-3742).
gccaatgtttagttagtaa

SEQ ID NO: 553682 - DNA, 19 bp, Mus musculus
  siRNA target sequence for Scn11a (NM_011887.2,3725-3743).
ccaatgtttagttagtaat

SEQ ID NO: 553683 - DNA, 19 bp, Mus musculus
  siRNA target sequence for Scn11a (NM_011887.2,3804-3822).
ctgcaagtggcgacctata

SEQ ID NO: 553684 - DNA, 19 bp, Mus musculus
  siRNA target sequence for Scn11a (NM_011887.2,3881-3899).
ggcctttgaggcgaatcta

SEQ ID NO: 553685 - DNA, 19 bp, Mus musculus
  siRNA target sequence for Scn11a (NM_011887.2,3882-3900).
gcctttgaggcgaatctat

SEQ ID NO: 553686 - DNA, 19 bp, Mus musculus
  siRNA target sequence for Scn11a (NM_011887.2,3883-3901).
cctttgaggcgaatctata

SEQ ID NO: 553687 - DNA, 19 bp, Mus musculus
  siRNA target sequence for Scn11a (NM_011887.2,3893-3911).
gaatctatacgcatacctt

SEQ ID NO: 553688 - DNA, 19 bp, Mus musculus
  siRNA target sequence for Scn11a (NM_011887.2,3897-3915).
ctatacgcatacctttact

SEQ ID NO: 553689 - DNA, 19 bp, Mus musculus
  siRNA target sequence for Scn11a (NM_011887.2,3956-3974).
cctctttatcggtgttatt

SEQ ID NO: 553690 - DNA, 19 bp, Mus musculus
  siRNA target sequence for Scn11a (NM_011887.2,3959-3977).
ctttatcggtgttattatt

SEQ ID NO: 553691 - DNA, 19 bp, Mus musculus
  siRNA target sequence for Scn11a (NM_011887.2,3967-3985).
gtgttattattgacaactt

SEQ ID NO: 553692 - DNA, 19 bp, Mus musculus
  siRNA target sequence for Scn11a (NM_011887.2,4004-4022).
gttaggtggccaagacatt

SEQ ID NO: 553693 - DNA, 19 bp, Mus musculus
  siRNA target sequence for Scn11a (NM_011887.2,4097-4115).
cccaaggcccctgaacaaa

SEQ ID NO: 553694 - DNA, 19 bp, Mus musculus
  siRNA target sequence for Scn11a (NM_011887.2,4098-4116).
ccaaggcccctgaacaaat

SEQ ID NO: 553695 - DNA, 19 bp, Mus musculus
  siRNA target sequence for Scn11a (NM_011887.2,4119-4137).
caagccttcgtgttcgatt

SEQ ID NO: 553696 - DNA, 19 bp, Mus musculus
  siRNA target sequence for Scn11a (NM_011887.2,4151-4169).
ggtctttgacgtcatcatt

SEQ ID NO: 553697 - DNA, 19 bp, Mus musculus
  siRNA target sequence for Scn11a (NM_011887.2,4176-4194).
cttattgtcacaaacatga

SEQ ID NO: 553698 - DNA, 19 bp, Mus musculus
  siRNA target sequence for Scn11a (NM_011887.2,4282-4300).
ccgtagagtgtctcatcaa

SEQ ID NO: 553699 - DNA, 19 bp, Mus musculus
  siRNA target sequence for Scn11a (NM_011887.2,4283-4301).
cgtagagtgtctcatcaaa

SEQ ID NO: 553700 - DNA, 19 bp, Mus musculus
  siRNA target sequence for Scn11a (NM_011887.2,4309-4327).
ctttgaggcaacactactt

SEQ ID NO: 553701 - DNA, 19 bp, Mus musculus
  siRNA target sequence for Scn11a (NM_011887.2,4331-4349).
caatggctggaacttattt

SEQ ID NO: 553702 - DNA, 19 bp, Mus musculus
  siRNA target sequence for Scn11a (NM_011887.2,4335-4353).
ggctggaacttatttgatt

SEQ ID NO: 553703 - DNA, 19 bp, Mus musculus
  siRNA target sequence for Scn11a (NM_011887.2,4337-4355).
ctggaacttatttgattgt

SEQ ID NO: 553704 - DNA, 19 bp, Mus musculus
  siRNA target sequence for Scn11a (NM_011887.2,4365-4383).
gttctttccatcattagta

SEQ ID NO: 553705 - DNA, 19 bp, Mus musculus
  siRNA target sequence for Scn11a (NM_011887.2,4492-4510).
gaatcaggacactcctttt

SEQ ID NO: 553706 - DNA, 19 bp, Mus musculus
  siRNA target sequence for Scn11a (NM_011887.2,4503-4521).
ctccttttcgcgttgatga

SEQ ID NO: 553707 - DNA, 19 bp, Mus musculus
  siRNA target sequence for Scn11a (NM_011887.2,4506-4524).
cttttcgcgttgatgatgt

SEQ ID NO: 553708 - DNA, 19 bp, Mus musculus
  siRNA target sequence for Scn11a (NM_011887.2,4779-4797).
ccgcagatagccatagtct

SEQ ID NO: 553709 - DNA, 19 bp, Mus musculus
  siRNA target sequence for Scn11a (NM_011887.2,4780-4798).
cgcagatagccatagtcta

SEQ ID NO: 553710 - DNA, 19 bp, Mus musculus
  siRNA target sequence for Scn11a (NM_011887.2,5041-5059).
ggtttcagtttctcatgat

SEQ ID NO: 553711 - DNA, 19 bp, Mus musculus
  siRNA target sequence for Scn11a (NM_011887.2,5080-5098).
gtgatcgcctccattgcat

SEQ ID NO: 553712 - DNA, 19 bp, Mus musculus
  siRNA target sequence for Scn11a (NM_011887.2,5140-5158).
ccagcggcttggataccat

SEQ ID NO: 553713 - DNA, 19 bp, Mus musculus
  siRNA target sequence for Scn11a (NM_011887.2,5144-5162).
cggcttggataccatgaaa

SEQ ID NO: 553714 - DNA, 19 bp, Mus musculus
  siRNA target sequence for Scn11a (NM_011887.2,5382-5400).
cccaagatcaaggttcatt

SEQ ID NO: 553715 - DNA, 19 bp, Mus musculus
  siRNA target sequence for Scn4a (NM_133199.1,187-205).
gaacctcccactcatctat

SEQ ID NO: 553716 - DNA, 19 bp, Mus musculus
  siRNA target sequence for Scn4a (NM_133199.1,211-229).
ccccccacctgaagtcatt

SEQ ID NO: 553717 - DNA, 19 bp, Mus musculus
  siRNA target sequence for Scn4a (NM_133199.1,277-295).
cttcattgtgctcaacaaa

SEQ ID NO: 553718 - DNA, 19 bp, Mus musculus
  siRNA target sequence for Scn4a (NM_133199.1,392-410).
gcgctgttcagcatgttca

SEQ ID NO: 553719 - DNA, 19 bp, Mus musculus
  siRNA target sequence for Scn4a (NM_133199.1,537-555).
gaggcttttgcattgatga

SEQ ID NO: 553720 - DNA, 19 bp, Mus musculus
  siRNA target sequence for Scn4a (NM_133199.1,876-894).
ccacgtggtatggtaatga

SEQ ID NO: 553721 - DNA, 19 bp, Mus musculus
  siRNA target sequence for Scn4a (NM_133199.1,877-895).
cacgtggtatggtaatgat

SEQ ID NO: 553722 - DNA, 19 bp, Mus musculus
  siRNA target sequence for Scn4a (NM_133199.1,1013-1031).
gacgaagggaacttctatt

SEQ ID NO: 553723 - DNA, 19 bp, Mus musculus
  siRNA target sequence for Scn4a (NM_133199.1,1092-1110).
ctgagggctacgaatgcat

SEQ ID NO: 553724 - DNA, 19 bp, Mus musculus
  siRNA target sequence for Scn4a (NM_133199.1,1329-1347).
catatgctgagcagaatga

SEQ ID NO: 553725 - DNA, 19 bp, Mus musculus
  siRNA target sequence for Scn4a (NM_133199.1,1484-1502).
ccaacccacagcaaagact

SEQ ID NO: 553726 - DNA, 19 bp, Mus musculus
  siRNA target sequence for Scn4a (NM_133199.1,1674-1692).
gggtgaagttcaagcatat

SEQ ID NO: 553727 - DNA, 19 bp, Mus musculus
  siRNA target sequence for Scn4a (NM_133199.1,1675-1693).
ggtgaagttcaagcatatt

SEQ ID NO: 553728 - DNA, 19 bp, Mus musculus
  siRNA target sequence for Scn4a (NM_133199.1,1874-1892).
gctatggacccctacgaat

SEQ ID NO: 553729 - DNA, 19 bp, Mus musculus
  siRNA target sequence for Scn4a (NM_133199.1,1875-1893).
ctatggacccctacgaata

SEQ ID NO: 553730 - DNA, 19 bp, Mus musculus
  siRNA target sequence for Scn4a (NM_133199.1,1882-1900).
cccctacgaatatttccaa

SEQ ID NO: 553731 - DNA, 19 bp, Mus musculus
  siRNA target sequence for Scn4a (NM_133199.1,2028-2046).
catggccaacactcaacat

SEQ ID NO: 553732 - DNA, 19 bp, Mus musculus
  siRNA target sequence for Scn4a (NM_133199.1,2164-2182).
ggaatgcgtgtgcaagatt

SEQ ID NO: 553733 - DNA, 19 bp, Mus musculus
  siRNA target sequence for Scn4a (NM_133199.1,2456-2474).
gccatcgggcgtatcaagt

SEQ ID NO: 553734 - DNA, 19 bp, Mus musculus
  siRNA target sequence for Scn4a (NM_133199.1,2527-2545).
cctgagcctcaaagacata

SEQ ID NO: 553735 - DNA, 19 bp, Mus musculus
  siRNA target sequence for Scn4a (NM_133199.1,2528-2546).
ctgagcctcaaagacataa

SEQ ID NO: 553736 - DNA, 19 bp, Mus musculus
  siRNA target sequence for Scn4a (NM_133199.1,2592-2610).
gccctcccgaggatgagaa

SEQ ID NO: 553737 - DNA, 19 bp, Mus musculus
  siRNA target sequence for Scn4a (NM_133199.1,2768-2786).
gaggagtccgacttggaaa

SEQ ID NO: 553738 - DNA, 19 bp, Mus musculus
  siRNA target sequence for Scn4a (NM_133199.1,2877-2895).
gcagcacagctgactacaa

SEQ ID NO: 553739 - DNA, 19 bp, Mus musculus
  siRNA target sequence for Scn4a (NM_133199.1,3051-3069).
cctgcttcaagattgttga

SEQ ID NO: 553740 - DNA, 19 bp, Mus musculus
  siRNA target sequence for Scn4a (NM_133199.1,3558-3576).
caaccacctccgagagatt

SEQ ID NO: 553741 - DNA, 19 bp, Mus musculus
  siRNA target sequence for Scn4a (NM_133199.1,3646-3664).
gaacgtcaaggtcaactat

SEQ ID NO: 553742 - DNA, 19 bp, Mus musculus
  siRNA target sequence for Scn4a (NM_133199.1,3695-3713).
cttcaggtggccactttca

SEQ ID NO: 553743 - DNA, 19 bp, Mus musculus
  siRNA target sequence for Scn4a (NM_133199.1,3902-3920).
gggaaagacatcttcatga

SEQ ID NO: 553744 - DNA, 19 bp, Mus musculus
  siRNA target sequence for Scn4a (NM_133199.1,4127-4145).
gtggacatcctgtataaca

SEQ ID NO: 553745 - DNA, 19 bp, Mus musculus
  siRNA target sequence for Scn4a (NM_133199.1,4276-4294).
cgcactctctgacttgata

SEQ ID NO: 553746 - DNA, 19 bp, Mus musculus
  siRNA target sequence for Scn4a (NM_133199.1,4278-4296).
cactctctgacttgataca

SEQ ID NO: 553747 - DNA, 19 bp, Mus musculus
  siRNA target sequence for Scn4a (NM_133199.1,4284-4302).
ctgacttgatacagaaata

SEQ ID NO: 553748 - DNA, 19 bp, Mus musculus
  siRNA target sequence for Scn4a (NM_133199.1,4286-4304).
gacttgatacagaaatact

SEQ ID NO: 553749 - DNA, 19 bp, Mus musculus
  siRNA target sequence for Scn4a (NM_133199.1,4492-4510).
cttcgcctacgtcaagaaa

SEQ ID NO: 553750 - DNA, 19 bp, Mus musculus
  siRNA target sequence for Scn4a (NM_133199.1,4496-4514).
gcctacgtcaagaaagagt

SEQ ID NO: 553751 - DNA, 19 bp, Mus musculus
  siRNA target sequence for Scn4a (NM_133199.1,4694-4712).
ccatccatcggcatctgtt

SEQ ID NO: 553752 - DNA, 19 bp, Mus musculus
  siRNA target sequence for Scn4a (NM_133199.1,4695-4713).
catccatcggcatctgttt

SEQ ID NO: 553753 - DNA, 19 bp, Mus musculus
  siRNA target sequence for Scn4a (NM_133199.1,4896-4914).
gccgcctttctgactttgt

SEQ ID NO: 553754 - DNA, 19 bp, Mus musculus
  siRNA target sequence for Scn4a (NM_133199.1,4924-4942).
gcaggagcccttgaaaatt

SEQ ID NO: 553755 - DNA, 19 bp, Mus musculus
  siRNA target sequence for Scn4a (NM_133199.1,4957-4975).
gatcaagcttatcacatta

SEQ ID NO: 553756 - DNA, 19 bp, Mus musculus
  siRNA target sequence for Scn4a (NM_133199.1,5165-5183).
gaggtgtgtgctatcaaaa

SEQ ID NO: 553757 - DNA, 19 bp, Mus musculus
  siRNA target sequence for Scn4a (NM_133199.1,5305-5323).
caccatgaacaagatgtat

SEQ ID NO: 553758 - DNA, 19 bp, Mus musculus
  siRNA target sequence for Scn4a (NM_133199.1,5498-5516).
cgcccaggggtcaaagagt

SEQ ID NO: 553759 - DNA, 19 bp, Mus musculus
  siRNA target sequence for Scube1 (NM_022723.1,151-169).
cagaacacacccaagtctt

SEQ ID NO: 553760 - DNA, 19 bp, Mus musculus
  siRNA target sequence for Scube1 (NM_022723.1,222-240).
cattgacgagtgtgagaat

SEQ ID NO: 553761 - DNA, 19 bp, Mus musculus
  siRNA target sequence for Scube1 (NM_022723.1,233-251).
gtgagaatgactactacaa

SEQ ID NO: 553762 - DNA, 19 bp, Mus musculus
  siRNA target sequence for Scube1 (NM_022723.1,430-448).
cacagcggcttttttctca

SEQ ID NO: 553763 - DNA, 19 bp, Mus musculus
  siRNA target sequence for Scube1 (NM_022723.1,476-494).
gctccaatgagggtatgaa

SEQ ID NO: 553764 - DNA, 19 bp, Mus musculus
  siRNA target sequence for Scube1 (NM_022723.1,595-613).
cagaaggactgcacactaa

SEQ ID NO: 553765 - DNA, 19 bp, Mus musculus
  siRNA target sequence for Scube1 (NM_022723.1,605-623).
gcacactaacctgtaacta

SEQ ID NO: 553766 - DNA, 19 bp, Mus musculus
  siRNA target sequence for Scube1 (NM_022723.1,606-624).
cacactaacctgtaactat

SEQ ID NO: 553767 - DNA, 19 bp, Mus musculus
  siRNA target sequence for Scube1 (NM_022723.1,610-628).
ctaacctgtaactatggaa

SEQ ID NO: 553768 - DNA, 19 bp, Mus musculus
  siRNA target sequence for Scube1 (NM_022723.1,677-695).
gtggctgccaccagaagta

SEQ ID NO: 553769 - DNA, 19 bp, Mus musculus
  siRNA target sequence for Scube1 (NM_022723.1,954-972).
gcggacatgccaagacatt

SEQ ID NO: 553770 - DNA, 19 bp, Mus musculus
  siRNA target sequence for Scube1 (NM_022723.1,956-974).
ggacatgccaagacattga

SEQ ID NO: 553771 - DNA, 19 bp, Mus musculus
  siRNA target sequence for Scube1 (NM_022723.1,1090-1108).
gatgaatgtagcatgaaca

SEQ ID NO: 553772 - DNA, 19 bp, Mus musculus
  siRNA target sequence for Scube1 (NM_022723.1,1530-1548).
cctgaggcatcccctttta

SEQ ID NO: 553773 - DNA, 19 bp, Mus musculus
  siRNA target sequence for Scube1 (NM_022723.1,1551-1569).
caactgccacgtgactttt

SEQ ID NO: 553774 - DNA, 19 bp, Mus musculus
  siRNA target sequence for Scube1 (NM_022723.1,1734-1752).
gcaagccgccatcaagatt

SEQ ID NO: 553775 - DNA, 19 bp, Mus musculus
  siRNA target sequence for Scube1 (NM_022723.1,1856-1874).
gcggcataggccaaatact

SEQ ID NO: 553776 - DNA, 19 bp, Mus musculus
  siRNA target sequence for Scube1 (NM_022723.1,1857-1875).
cggcataggccaaatacta

SEQ ID NO: 553777 - DNA, 19 bp, Mus musculus
  siRNA target sequence for Scube1 (NM_022723.1,2022-2040).
ggctggtgcccgaaacgta

SEQ ID NO: 553778 - DNA, 19 bp, Mus musculus
  siRNA target sequence for Scube1 (NM_022723.1,2023-2041).
gctggtgcccgaaacgtat

SEQ ID NO: 553779 - DNA, 19 bp, Mus musculus
  siRNA target sequence for Scube1 (NM_022723.1,2299-2317).
gagtttggccagaaccatt

SEQ ID NO: 553780 - DNA, 19 bp, Mus musculus
  siRNA target sequence for Scube1 (NM_022723.1,2337-2355).
caccagcaccgattttgat

SEQ ID NO: 553781 - DNA, 19 bp, Mus musculus
  siRNA target sequence for Scube1 (NM_022723.1,2494-2512).
ccaaagcgcaggatcctaa

SEQ ID NO: 553782 - DNA, 19 bp, Mus musculus
  siRNA target sequence for Scube1 (NM_022723.1,2495-2513).
caaagcgcaggatcctaat

SEQ ID NO: 553783 - DNA, 19 bp, Mus musculus
  siRNA target sequence for Scube1 (NM_022723.1,2499-2517).
gcgcaggatcctaatcgta

SEQ ID NO: 553784 - DNA, 19 bp, Mus musculus
  siRNA target sequence for Scube1 (NM_022723.1,2694-2712).
cagtggcaaagggtttcaa

SEQ ID NO: 553785 - DNA, 19 bp, Mus musculus
  siRNA target sequence for Scube1 (NM_022723.1,2715-2733).
gccctatgtcacctatgat

SEQ ID NO: 553786 - DNA, 19 bp, Mus musculus
  siRNA target sequence for Scube1 (NM_022723.1,2724-2742).
cacctatgatggtaagtca

SEQ ID NO: 553787 - DNA, 19 bp, Mus musculus
  siRNA target sequence for Sdf4 (NM_011341.2,746-764).
ccgtcaaggaaaacaaact

SEQ ID NO: 553788 - DNA, 19 bp, Mus musculus
  siRNA target sequence for Sdf4 (NM_011341.2,985-1003).
gaggacgagttcctttcat

SEQ ID NO: 553789 - DNA, 19 bp, Mus musculus
  siRNA target sequence for Sdf4 (NM_011341.2,990-1008).
cgagttcctttcattcctt

SEQ ID NO: 553790 - DNA, 19 bp, Mus musculus
  siRNA target sequence for Sdf4 (NM_011341.2,1041-1059).
catggtcaaggagatcttt

SEQ ID NO: 553791 - DNA, 19 bp, Mus musculus
  siRNA target sequence for Sdf4 (NM_011341.2,1118-1136).
ctgtgggtactgttgagaa

SEQ ID NO: 553792 - DNA, 19 bp, Mus musculus
  siRNA target sequence for Sdf4 (NM_011341.2,1137-1155).
ccaacaaggccaagacatt

SEQ ID NO: 553793 - DNA, 19 bp, Mus musculus
  siRNA target sequence for Sdf4 (NM_011341.2,1145-1163).
gccaagacattgatgacaa

SEQ ID NO: 553794 - DNA, 19 bp, Mus musculus
  siRNA target sequence for Sdf4 (NM_011341.2,1284-1302).
cgaagccaaacagatgatt

SEQ ID NO: 553795 - DNA, 19 bp, Mus musculus
  siRNA target sequence for Sdf4 (NM_011341.2,1397-1415).
cccgcaacgtgcatgaaga

SEQ ID NO: 553796 - DNA, 19 bp, Mus musculus
  siRNA target sequence for Sdf4 (NM_011341.2,1400-1418).
gcaacgtgcatgaagagtt

SEQ ID NO: 553797 - DNA, 19 bp, Mus musculus
  siRNA target sequence for Sh3d1B (NM_011365.1,9-27).
gtttcccacagcgatgaat

SEQ ID NO: 553798 - DNA, 19 bp, Mus musculus
  siRNA target sequence for Sh3d1B (NM_011365.1,42-60).
gtgggctattacatctgaa

SEQ ID NO: 553799 - DNA, 19 bp, Mus musculus
  siRNA target sequence for Sh3d1B (NM_011365.1,45-63).
ggctattacatctgaagaa

SEQ ID NO: 553800 - DNA, 19 bp, Mus musculus
  siRNA target sequence for Sh3d1B (NM_011365.1,61-79).
gaacgtactaagcatgata

SEQ ID NO: 553801 - DNA, 19 bp, Mus musculus
  siRNA target sequence for Sh3d1B (NM_011365.1,65-83).
gtactaagcatgataaaca

SEQ ID NO: 553802 - DNA, 19 bp, Mus musculus
  siRNA target sequence for Sh3d1B (NM_011365.1,72-90).
gcatgataaacagtttgat

SEQ ID NO: 553803 - DNA, 19 bp, Mus musculus
  siRNA target sequence for Sh3d1B (NM_011365.1,122-140).
gtgatcaagcccgtacttt

SEQ ID NO: 553804 - DNA, 19 bp, Mus musculus
  siRNA target sequence for Sh3d1B (NM_011365.1,124-142).
gatcaagcccgtacttttt

SEQ ID NO: 553805 - DNA, 19 bp, Mus musculus
  siRNA target sequence for Sh3d1B (NM_011365.1,188-206).
ccttatcagatctgaacaa

SEQ ID NO: 553806 - DNA, 19 bp, Mus musculus
  siRNA target sequence for Sh3d1B (NM_011365.1,225-243).
gcaagagttctctatagct

SEQ ID NO: 553807 - DNA, 19 bp, Mus musculus
  siRNA target sequence for Sh3d1B (NM_011365.1,236-254).
ctatagctatgaaactcat

SEQ ID NO: 553808 - DNA, 19 bp, Mus musculus
  siRNA target sequence for Sh3d1B (NM_011365.1,241-259).
gctatgaaactcatcaagt

SEQ ID NO: 553809 - DNA, 19 bp, Mus musculus
  siRNA target sequence for Sh3d1B (NM_011365.1,321-339).
gttctctccactaatctct

SEQ ID NO: 553810 - DNA, 19 bp, Mus musculus
  siRNA target sequence for Sh3d1B (NM_011365.1,355-373).
ggaagcatgcccaatctgt

SEQ ID NO: 553811 - DNA, 19 bp, Mus musculus
  siRNA target sequence for Sh3d1B (NM_011365.1,363-381).
gcccaatctgtccattcat

SEQ ID NO: 553812 - DNA, 19 bp, Mus musculus
  siRNA target sequence for Sh3d1B (NM_011365.1,394-412).
ccagttgcacctatagcaa

SEQ ID NO: 553813 - DNA, 19 bp, Mus musculus
  siRNA target sequence for Sh3d1B (NM_011365.1,443-461).
gtattcctcccctaatgat

SEQ ID NO: 553814 - DNA, 19 bp, Mus musculus
  siRNA target sequence for Sh3d1B (NM_011365.1,488-506).
gtacatcctcattaccaaa

SEQ ID NO: 553815 - DNA, 19 bp, Mus musculus
  siRNA target sequence for Sh3d1B (NM_011365.1,509-527).
gaactgccagtctcattca

SEQ ID NO: 553816 - DNA, 19 bp, Mus musculus
  siRNA target sequence for Sh3d1B (NM_011365.1,520-538).
ctcattcagcctttatcca

SEQ ID NO: 553817 - DNA, 19 bp, Mus musculus
  siRNA target sequence for Sh3d1B (NM_011365.1,528-546).
gcctttatccattccttat

SEQ ID NO: 553818 - DNA, 19 bp, Mus musculus
  siRNA target sequence for Sh3d1B (NM_011365.1,562-580).
cctcatgcatcatcttaca

SEQ ID NO: 553819 - DNA, 19 bp, Mus musculus
  siRNA target sequence for Sh3d1B (NM_011365.1,572-590).
catcttacagcctgatgat

SEQ ID NO: 553820 - DNA, 19 bp, Mus musculus
  siRNA target sequence for Sh3d1B (NM_011365.1,585-603).
gatgatgggaggatttggt

SEQ ID NO: 553821 - DNA, 19 bp, Mus musculus
  siRNA target sequence for Sh3d1B (NM_011365.1,621-639).
ggcccagtctctgattgat

SEQ ID NO: 553822 - DNA, 19 bp, Mus musculus
  siRNA target sequence for Sh3d1B (NM_011365.1,627-645).
gtctctgattgatttagga

SEQ ID NO: 553823 - DNA, 19 bp, Mus musculus
  siRNA target sequence for Sh3d1B (NM_011365.1,633-651).
gattgatttaggatctagt

SEQ ID NO: 553824 - DNA, 19 bp, Mus musculus
  siRNA target sequence for Sh3d1B (NM_011365.1,643-661).
ggatctagtagctcaactt

SEQ ID NO: 553825 - DNA, 19 bp, Mus musculus
  siRNA target sequence for Sh3d1B (NM_011365.1,718-736).
gttcctcagccttcaagat

SEQ ID NO: 553826 - DNA, 19 bp, Mus musculus
  siRNA target sequence for Sh3d1B (NM_011365.1,746-764).
ggcaaaaatttaatagtct

SEQ ID NO: 553827 - DNA, 19 bp, Mus musculus
  siRNA target sequence for Sh3d1B (NM_011365.1,812-830).
cccttcttcagtcaaatct

SEQ ID NO: 553828 - DNA, 19 bp, Mus musculus
  siRNA target sequence for Sh3d1B (NM_011365.1,822-840).
gtcaaatctctctcaaact

SEQ ID NO: 553829 - DNA, 19 bp, Mus musculus
  siRNA target sequence for Sh3d1B (NM_011365.1,841-859).
cagctagctactatttgga

SEQ ID NO: 553830 - DNA, 19 bp, Mus musculus
  siRNA target sequence for Sh3d1B (NM_011365.1,997-1015).
gggggaaagcaagttgatt

SEQ ID NO: 553831 - DNA, 19 bp, Mus musculus
  siRNA target sequence for Sh3d1B (NM_011365.1,1028-1046).
ctctgccttcatatcagaa

SEQ ID NO: 553832 - DNA, 19 bp, Mus musculus
  siRNA target sequence for Sh3d1B (NM_011365.1,1030-1048).
ctgccttcatatcagaaaa

SEQ ID NO: 553833 - DNA, 19 bp, Mus musculus
  siRNA target sequence for Sh3d1B (NM_011365.1,1032-1050).
gccttcatatcagaaaaca

SEQ ID NO: 553834 - DNA, 19 bp, Mus musculus
  siRNA target sequence for Sh3d1B (NM_011365.1,1095-1113).
caaacggaaagccaactat

SEQ ID NO: 553835 - DNA, 19 bp, Mus musculus
  siRNA target sequence for Sh3d1B (NM_011365.1,1365-1383).
gagacaacgccgtttagaa

SEQ ID NO: 553836 - DNA, 19 bp, Mus musculus
  siRNA target sequence for Sh3d1B (NM_011365.1,1376-1394).
gtttagaatgggaaagact

SEQ ID NO: 553837 - DNA, 19 bp, Mus musculus
  siRNA target sequence for Sh3d1B (NM_011365.1,1427-1445).
gggaacaagaagacattgt

SEQ ID NO: 553838 - DNA, 19 bp, Mus musculus
  siRNA target sequence for Sh3d1B (NM_011365.1,1515-1533).
ctcaggcagactacaagat

SEQ ID NO: 553839 - DNA, 19 bp, Mus musculus
  siRNA target sequence for Sh3d1B (NM_011365.1,1564-1582).
gagctagaagttttggata

SEQ ID NO: 553840 - DNA, 19 bp, Mus musculus
  siRNA target sequence for Sh3d1B (NM_011365.1,1566-1584).
gctagaagttttggataaa

SEQ ID NO: 553841 - DNA, 19 bp, Mus musculus
  siRNA target sequence for Sh3d1B (NM_011365.1,1570-1588).
gaagttttggataaacagt

SEQ ID NO: 553842 - DNA, 19 bp, Mus musculus
  siRNA target sequence for Sh3d1B (NM_011365.1,1605-1623).
ggaaatcaaacaacttcaa

SEQ ID NO: 553843 - DNA, 19 bp, Mus musculus
  siRNA target sequence for Sh3d1B (NM_011365.1,1665-1683).
ccctgagaagcagctatta

SEQ ID NO: 553844 - DNA, 19 bp, Mus musculus
  siRNA target sequence for Sh3d1B (NM_011365.1,1667-1685).
ctgagaagcagctattaaa

SEQ ID NO: 553845 - DNA, 19 bp, Mus musculus
  siRNA target sequence for Sh3d1B (NM_011365.1,1710-1728).
cagtaacacacctgattca

SEQ ID NO: 553846 - DNA, 19 bp, Mus musculus
  siRNA target sequence for Sh3d1B (NM_011365.1,1720-1738).
cctgattcagggatcagtt

SEQ ID NO: 553847 - DNA, 19 bp, Mus musculus
  siRNA target sequence for Sh3d1B (NM_011365.1,1729-1747).
gggatcagtttacttcata

SEQ ID NO: 553848 - DNA, 19 bp, Mus musculus
  siRNA target sequence for Sh3d1B (NM_011365.1,1730-1748).
ggatcagtttacttcataa

SEQ ID NO: 553849 - DNA, 19 bp, Mus musculus
  siRNA target sequence for Sh3d1B (NM_011365.1,1731-1749).
gatcagtttacttcataaa

SEQ ID NO: 553850 - DNA, 19 bp, Mus musculus
  siRNA target sequence for Sh3d1B (NM_011365.1,1768-1786).
gaattatgccaaagactta

SEQ ID NO: 553851 - DNA, 19 bp, Mus musculus
  siRNA target sequence for Sh3d1B (NM_011365.1,1792-1810).
caattagatgctcttgaaa

SEQ ID NO: 553852 - DNA, 19 bp, Mus musculus
  siRNA target sequence for Sh3d1B (NM_011365.1,1890-1908).
gcagttagcccttgaacaa

SEQ ID NO: 553853 - DNA, 19 bp, Mus musculus
  siRNA target sequence for Sh3d1B (NM_011365.1,1893-1911).
gttagcccttgaacaactt

SEQ ID NO: 553854 - DNA, 19 bp, Mus musculus
  siRNA target sequence for Sh3d1B (NM_011365.1,1897-1915).
gcccttgaacaacttcata

SEQ ID NO: 553855 - DNA, 19 bp, Mus musculus
  siRNA target sequence for Sh3d1B (NM_011365.1,1900-1918).
cttgaacaacttcataaaa

SEQ ID NO: 553856 - DNA, 19 bp, Mus musculus
  siRNA target sequence for Sh3d1B (NM_011365.1,1924-1942).
cgtgacaaattgaaggaaa

SEQ ID NO: 553857 - DNA, 19 bp, Mus musculus
  siRNA target sequence for Sh3d1B (NM_011365.1,2025-2043).
cttgtggagagaaagtatt

SEQ ID NO: 553858 - DNA, 19 bp, Mus musculus
  siRNA target sequence for Sh3d1B (NM_011365.1,2189-2207).
caagaaaccatgatgagat

SEQ ID NO: 553859 - DNA, 19 bp, Mus musculus
  siRNA target sequence for Sh3d1B (NM_011365.1,2235-2253).
ggttgatgaaaaaactgta

SEQ ID NO: 553860 - DNA, 19 bp, Mus musculus
  siRNA target sequence for Sh3d1B (NM_011365.1,2264-2282).
gttggctttatggtagttt

SEQ ID NO: 553861 - DNA, 19 bp, Mus musculus
  siRNA target sequence for Sh3d1B (NM_011365.1,2309-2327).
gcaactatgtagaaaaagt

SEQ ID NO: 553862 - DNA, 19 bp, Mus musculus
  siRNA target sequence for Sh3d1B (NM_011365.1,2420-2438).
catcagtgactgattatca

SEQ ID NO: 553863 - DNA, 19 bp, Mus musculus
  siRNA target sequence for Sh3d1B (NM_011365.1,2443-2461).
gtatccttctcaaacctta

SEQ ID NO: 553864 - DNA, 19 bp, Mus musculus
  siRNA target sequence for Sh3d1B (NM_011365.1,2718-2736).
cattcctgggaatgaagta

SEQ ID NO: 553865 - DNA, 19 bp, Mus musculus
  siRNA target sequence for Sh3d1B (NM_011365.1,2833-2851).
gactacattgcactttatt

SEQ ID NO: 553866 - DNA, 19 bp, Mus musculus
  siRNA target sequence for Sh3d1B (NM_011365.1,2842-2860).
gcactttattcatactcaa

SEQ ID NO: 553867 - DNA, 19 bp, Mus musculus
  siRNA target sequence for Sh3d1B (NM_011365.1,3017-3035).
gcaaatctggagcatcaaa

SEQ ID NO: 553868 - DNA, 19 bp, Mus musculus
  siRNA target sequence for Sh3d1B (NM_011365.1,3043-3061).
cccgagatcgctcaagtaa

SEQ ID NO: 553869 - DNA, 19 bp, Mus musculus
  siRNA target sequence for Sh3d1B (NM_011365.1,3045-3063).
cgagatcgctcaagtaact

SEQ ID NO: 553870 - DNA, 19 bp, Mus musculus
  siRNA target sequence for Sh3d1B (NM_011365.1,3046-3064).
gagatcgctcaagtaactt

SEQ ID NO: 553871 - DNA, 19 bp, Mus musculus
  siRNA target sequence for Sh3d1B (NM_011365.1,3099-3117).
ccttgcgccaggacagtta

SEQ ID NO: 553872 - DNA, 19 bp, Mus musculus
  siRNA target sequence for Sh3d1B (NM_011365.1,3100-3118).
cttgcgccaggacagttaa

SEQ ID NO: 553873 - DNA, 19 bp, Mus musculus
  siRNA target sequence for Sh3d1B (NM_011365.1,3103-3121).
gcgccaggacagttaatat

SEQ ID NO: 553874 - DNA, 19 bp, Mus musculus
  siRNA target sequence for Sh3d1B (NM_011365.1,3104-3122).
cgccaggacagttaatatt

SEQ ID NO: 553875 - DNA, 19 bp, Mus musculus
  siRNA target sequence for Sh3d1B (NM_011365.1,3109-3127).
ggacagttaatattaatct

SEQ ID NO: 553876 - DNA, 19 bp, Mus musculus
  siRNA target sequence for Sh3d1B (NM_011365.1,3110-3128).
gacagttaatattaatctt

SEQ ID NO: 553877 - DNA, 19 bp, Mus musculus
  siRNA target sequence for Sh3d1B (NM_011365.1,3242-3260).
gaaccatgcctacttttca

SEQ ID NO: 553878 - DNA, 19 bp, Mus musculus
  siRNA target sequence for Sh3d1B (NM_011365.1,3261-3279).
cgctgtatgtcaagtgatt

SEQ ID NO: 553879 - DNA, 19 bp, Mus musculus
  siRNA target sequence for Sh3d1B (NM_011365.1,3265-3283).
gtatgtcaagtgattgcta

SEQ ID NO: 553880 - DNA, 19 bp, Mus musculus
  siRNA target sequence for Sh3d1B (NM_011365.1,3269-3287).
gtcaagtgattgctatgta

SEQ ID NO: 553881 - DNA, 19 bp, Mus musculus
  siRNA target sequence for Sh3d1B (NM_011365.1,3291-3309).
ctacatggcgaataacgaa

SEQ ID NO: 553882 - DNA, 19 bp, Mus musculus
  siRNA target sequence for Sh3d1B (NM_011365.1,3331-3349).
ggacagctgattaatgtta

SEQ ID NO: 553883 - DNA, 19 bp, Mus musculus
  siRNA target sequence for Sh3d1B (NM_011365.1,3332-3350).
gacagctgattaatgttat

SEQ ID NO: 553884 - DNA, 19 bp, Mus musculus
  siRNA target sequence for Sh3d1B (NM_011365.1,3337-3355).
ctgattaatgttatgaaca

SEQ ID NO: 553885 - DNA, 19 bp, Mus musculus
  siRNA target sequence for Slc25a12 (NM_172436.2,68-86).
cctcatgagctgagaaaca

SEQ ID NO: 553886 - DNA, 19 bp, Mus musculus
  siRNA target sequence for Slc25a12 (NM_172436.2,71-89).
catgagctgagaaacatat

SEQ ID NO: 553887 - DNA, 19 bp, Mus musculus
  siRNA target sequence for Slc25a12 (NM_172436.2,113-131).
gtggacggggagcattaca

SEQ ID NO: 553888 - DNA, 19 bp, Mus musculus
  siRNA target sequence for Slc25a12 (NM_172436.2,145-163).
cttcgttcaacgctatctt

SEQ ID NO: 553889 - DNA, 19 bp, Mus musculus
  siRNA target sequence for Slc25a12 (NM_172436.2,165-183).
gcctgtacaacgatccaaa

SEQ ID NO: 553890 - DNA, 19 bp, Mus musculus
  siRNA target sequence for Slc25a12 (NM_172436.2,211-229).
ggcaggagtagctgatcaa

SEQ ID NO: 553891 - DNA, 19 bp, Mus musculus
  siRNA target sequence for Slc25a12 (NM_172436.2,216-234).
gagtagctgatcaaaccaa

SEQ ID NO: 553892 - DNA, 19 bp, Mus musculus
  siRNA target sequence for Slc25a12 (NM_172436.2,291-309).
cagattccatgttcatagt

SEQ ID NO: 553893 - DNA, 19 bp, Mus musculus
  siRNA target sequence for Slc25a12 (NM_172436.2,301-319).
gttcatagtggctttccaa

SEQ ID NO: 553894 - DNA, 19 bp, Mus musculus
  siRNA target sequence for Slc25a12 (NM_172436.2,395-413).
caccacatcccttttaact

SEQ ID NO: 553895 - DNA, 19 bp, Mus musculus
  siRNA target sequence for Slc25a12 (NM_172436.2,466-484).
gaactatgtggaattcact

SEQ ID NO: 553896 - DNA, 19 bp, Mus musculus
  siRNA target sequence for Slc25a12 (NM_172436.2,487-505).
gttcctccaggaattgcaa

SEQ ID NO: 553897 - DNA, 19 bp, Mus musculus
  siRNA target sequence for Slc25a12 (NM_172436.2,520-538).
gcaagcctttgcactgaaa

SEQ ID NO: 553898 - DNA, 19 bp, Mus musculus
  siRNA target sequence for Slc25a12 (NM_172436.2,719-737).
gagcttgttcgaaagatct

SEQ ID NO: 553899 - DNA, 19 bp, Mus musculus
  siRNA target sequence for Slc25a12 (NM_172436.2,721-739).
gcttgttcgaaagatctat

SEQ ID NO: 553900 - DNA, 19 bp, Mus musculus
  siRNA target sequence for Slc25a12 (NM_172436.2,725-743).
gttcgaaagatctatagca

SEQ ID NO: 553901 - DNA, 19 bp, Mus musculus
  siRNA target sequence for Slc25a12 (NM_172436.2,733-751).
gatctatagcactttagca

SEQ ID NO: 553902 - DNA, 19 bp, Mus musculus
  siRNA target sequence for Slc25a12 (NM_172436.2,749-767).
gcaggcacgaggaaagata

SEQ ID NO: 553903 - DNA, 19 bp, Mus musculus
  siRNA target sequence for Slc25a12 (NM_172436.2,750-768).
caggcacgaggaaagatat

SEQ ID NO: 553904 - DNA, 19 bp, Mus musculus
  siRNA target sequence for Slc25a12 (NM_172436.2,754-772).
cacgaggaaagatattgaa

SEQ ID NO: 553905 - DNA, 19 bp, Mus musculus
  siRNA target sequence for Slc25a12 (NM_172436.2,815-833).
caggtcactccactagaaa

SEQ ID NO: 553906 - DNA, 19 bp, Mus musculus
  siRNA target sequence for Slc25a12 (NM_172436.2,817-835).
ggtcactccactagaaatt

SEQ ID NO: 553907 - DNA, 19 bp, Mus musculus
  siRNA target sequence for Slc25a12 (NM_172436.2,820-838).
cactccactagaaattgat

SEQ ID NO: 553908 - DNA, 19 bp, Mus musculus
  siRNA target sequence for Slc25a12 (NM_172436.2,822-840).
ctccactagaaattgatat

SEQ ID NO: 553909 - DNA, 19 bp, Mus musculus
  siRNA target sequence for Slc25a12 (NM_172436.2,824-842).
ccactagaaattgatatct

SEQ ID NO: 553910 - DNA, 19 bp, Mus musculus
  siRNA target sequence for Slc25a12 (NM_172436.2,825-843).
cactagaaattgatatctt

SEQ ID NO: 553911 - DNA, 19 bp, Mus musculus
  siRNA target sequence for Slc25a12 (NM_172436.2,827-845).
ctagaaattgatatcttgt

SEQ ID NO: 553912 - DNA, 19 bp, Mus musculus
  siRNA target sequence for Slc25a12 (NM_172436.2,889-907).
ggcagacatcgagagaata

SEQ ID NO: 553913 - DNA, 19 bp, Mus musculus
  siRNA target sequence for Slc25a12 (NM_172436.2,1120-1138).
ggtcggggagctgatgtat

SEQ ID NO: 553914 - DNA, 19 bp, Mus musculus
  siRNA target sequence for Slc25a12 (NM_172436.2,1123-1141).
cggggagctgatgtataaa

SEQ ID NO: 553915 - DNA, 19 bp, Mus musculus
  siRNA target sequence for Slc25a12 (NM_172436.2,1171-1189).
gcgctacgagggtttcttt

SEQ ID NO: 553916 - DNA, 19 bp, Mus musculus
  siRNA target sequence for Slc25a12 (NM_172436.2,1242-1260).
ccattaagctaacagttaa

SEQ ID NO: 553917 - DNA, 19 bp, Mus musculus
  siRNA target sequence for Slc25a12 (NM_172436.2,1243-1261).
cattaagctaacagttaat

SEQ ID NO: 553918 - DNA, 19 bp, Mus musculus
  siRNA target sequence for Slc25a12 (NM_172436.2,1249-1267).
gctaacagttaatgatttt

SEQ ID NO: 553919 - DNA, 19 bp, Mus musculus
  siRNA target sequence for Slc25a12 (NM_172436.2,1341-1359).
gaggctcgcaggtcatctt

SEQ ID NO: 553920 - DNA, 19 bp, Mus musculus
  siRNA target sequence for Slc25a12 (NM_172436.2,1343-1361).
ggctcgcaggtcatcttta

SEQ ID NO: 553921 - DNA, 19 bp, Mus musculus
  siRNA target sequence for Slc25a12 (NM_172436.2,1347-1365).
cgcaggtcatctttaccaa

SEQ ID NO: 553922 - DNA, 19 bp, Mus musculus
  siRNA target sequence for Slc25a12 (NM_172436.2,1362-1380).
ccaaccctctggagatagt

SEQ ID NO: 553923 - DNA, 19 bp, Mus musculus
  siRNA target sequence for Slc25a12 (NM_172436.2,1489-1507).
ctgtttcctccgagacatt

SEQ ID NO: 553924 - DNA, 19 bp, Mus musculus
  siRNA target sequence for Slc25a12 (NM_172436.2,1508-1526).
cccttctccgcaatctatt

SEQ ID NO: 553925 - DNA, 19 bp, Mus musculus
  siRNA target sequence for Slc25a12 (NM_172436.2,1509-1527).
ccttctccgcaatctattt

SEQ ID NO: 553926 - DNA, 19 bp, Mus musculus
  siRNA target sequence for Slc25a12 (NM_172436.2,1510-1528).
cttctccgcaatctatttt

SEQ ID NO: 553927 - DNA, 19 bp, Mus musculus
  siRNA target sequence for Slc25a12 (NM_172436.2,1575-1593).
gcgtgggaggcatcaatct

SEQ ID NO: 553928 - DNA, 19 bp, Mus musculus
  siRNA target sequence for Slc25a12 (NM_172436.2,1704-1722).
gcggggtcgtcgactgttt

SEQ ID NO: 553929 - DNA, 19 bp, Mus musculus
  siRNA target sequence for Slc25a12 (NM_172436.2,1714-1732).
cgactgtttccgaaagatt

SEQ ID NO: 553930 - DNA, 19 bp, Mus musculus
  siRNA target sequence for Slc25a12 (NM_172436.2,1742-1760).
gaagggccctcggcatttt

SEQ ID NO: 553931 - DNA, 19 bp, Mus musculus
  siRNA target sequence for Slc25a12 (NM_172436.2,1745-1763).
gggccctcggcattttgga

SEQ ID NO: 553932 - DNA, 19 bp, Mus musculus
  siRNA target sequence for Slc25a12 (NM_172436.2,1746-1764).
ggccctcggcattttggaa

SEQ ID NO: 553933 - DNA, 19 bp, Mus musculus
  siRNA target sequence for Slc25a12 (NM_172436.2,1772-1790).
gcagctcgggtgtttcgat

SEQ ID NO: 553934 - DNA, 19 bp, Mus musculus
  siRNA target sequence for Slc25a12 (NM_172436.2,1806-1824).
gtgtcactctggttaccta

SEQ ID NO: 553935 - DNA, 19 bp, Mus musculus
  siRNA target sequence for Slc25a12 (NM_172436.2,1834-1852).
gcagcggtggttttacata

SEQ ID NO: 553936 - DNA, 19 bp, Mus musculus
  siRNA target sequence for Slc25a12 (NM_172436.2,1839-1857).
ggtggttttacatagattt

SEQ ID NO: 553937 - DNA, 19 bp, Mus musculus
  siRNA target sequence for Slc25a12 (NM_172436.2,1840-1858).
gtggttttacatagatttt

SEQ ID NO: 553938 - DNA, 19 bp, Mus musculus
  siRNA target sequence for Slc25a12 (NM_172436.2,1920-1938).
ctgccaaccccgatcacat

SEQ ID NO: 553939 - DNA, 19 bp, Mus musculus
  siRNA target sequence for Slc25a12 (NM_172436.2,1963-1981).
cactttcgctggcattgaa

SEQ ID NO: 553940 - DNA, 19 bp, Mus musculus
  siRNA target sequence for Slc25a12 (NM_172436.2,1971-1989).
ctggcattgaaaacaagtt

SEQ ID NO: 553941 - DNA, 19 bp, Mus musculus
  siRNA target sequence for Slc25a12 (NM_172436.2,1999-2017).
cctccccaagtttaagtct

SEQ ID NO: 553942 - DNA, 19 bp, Mus musculus
  siRNA target sequence for Slc25a13 (NM_015829.1,143-161).
ccgatccagctgagcttaa

SEQ ID NO: 553943 - DNA, 19 bp, Mus musculus
  siRNA target sequence for Slc25a13 (NM_015829.1,144-162).
cgatccagctgagcttaaa

SEQ ID NO: 553944 - DNA, 19 bp, Mus musculus
  siRNA target sequence for Slc25a13 (NM_015829.1,151-169).
gctgagcttaaagcaatat

SEQ ID NO: 553945 - DNA, 19 bp, Mus musculus
  siRNA target sequence for Slc25a13 (NM_015829.1,152-170).
ctgagcttaaagcaatatt

SEQ ID NO: 553946 - DNA, 19 bp, Mus musculus
  siRNA target sequence for Slc25a13 (NM_015829.1,177-195).
gtatgcgagcattgaaaaa

SEQ ID NO: 553947 - DNA, 19 bp, Mus musculus
  siRNA target sequence for Slc25a13 (NM_015829.1,231-249).
cactcggtatttgaatatt

SEQ ID NO: 553948 - DNA, 19 bp, Mus musculus
  siRNA target sequence for Slc25a13 (NM_015829.1,272-290).
cgaaaactgtggaactttt

SEQ ID NO: 553949 - DNA, 19 bp, Mus musculus
  siRNA target sequence for Slc25a13 (NM_015829.1,309-327).
gaccaaagatgggttaata

SEQ ID NO: 553950 - DNA, 19 bp, Mus musculus
  siRNA target sequence for Slc25a13 (NM_015829.1,368-386).
ctccggatgccttgtttat

SEQ ID NO: 553951 - DNA, 19 bp, Mus musculus
  siRNA target sequence for Slc25a13 (NM_015829.1,436-454).
gaggatgtcaagcaaattt

SEQ ID NO: 553952 - DNA, 19 bp, Mus musculus
  siRNA target sequence for Slc25a13 (NM_015829.1,458-476).
gacagactacaattcatca

SEQ ID NO: 553953 - DNA, 19 bp, Mus musculus
  siRNA target sequence for Slc25a13 (NM_015829.1,485-503).
catttaactgggattcaga

SEQ ID NO: 553954 - DNA, 19 bp, Mus musculus
  siRNA target sequence for Slc25a13 (NM_015829.1,508-526).
gtgcagctacattttggaa

SEQ ID NO: 553955 - DNA, 19 bp, Mus musculus
  siRNA target sequence for Slc25a13 (NM_015829.1,553-571).
gcggagttcactcagtttt

SEQ ID NO: 553956 - DNA, 19 bp, Mus musculus
  siRNA target sequence for Slc25a13 (NM_015829.1,554-572).
cggagttcactcagttttt

SEQ ID NO: 553957 - DNA, 19 bp, Mus musculus
  siRNA target sequence for Slc25a13 (NM_015829.1,556-574).
gagttcactcagtttttgt

SEQ ID NO: 553958 - DNA, 19 bp, Mus musculus
  siRNA target sequence for Slc25a13 (NM_015829.1,734-752).
gcactaggtcccatcaagt

SEQ ID NO: 553959 - DNA, 19 bp, Mus musculus
  siRNA target sequence for Slc25a13 (NM_015829.1,740-758).
ggtcccatcaagttagctt

SEQ ID NO: 553960 - DNA, 19 bp, Mus musculus
  siRNA target sequence for Slc25a13 (NM_015829.1,799-817).
gaactcattaggaagatct

SEQ ID NO: 553961 - DNA, 19 bp, Mus musculus
  siRNA target sequence for Slc25a13 (NM_015829.1,802-820).
ctcattaggaagatctaca

SEQ ID NO: 553962 - DNA, 19 bp, Mus musculus
  siRNA target sequence for Slc25a13 (NM_015829.1,913-931).
gttgacatcttgtttcagt

SEQ ID NO: 553963 - DNA, 19 bp, Mus musculus
  siRNA target sequence for Slc25a13 (NM_015829.1,989-1007).
cccctctagaggaaggaat

SEQ ID NO: 553964 - DNA, 19 bp, Mus musculus
  siRNA target sequence for Slc25a13 (NM_015829.1,1003-1021).
ggaatgttacccttcaact

SEQ ID NO: 553965 - DNA, 19 bp, Mus musculus
  siRNA target sequence for Slc25a13 (NM_015829.1,1149-1167).
gtatcctatcgatcttgta

SEQ ID NO: 553966 - DNA, 19 bp, Mus musculus
  siRNA target sequence for Slc25a13 (NM_015829.1,1153-1171).
cctatcgatcttgtaaaga

SEQ ID NO: 553967 - DNA, 19 bp, Mus musculus
  siRNA target sequence for Slc25a13 (NM_015829.1,1190-1208).
gatcaaccggctcttttgt

SEQ ID NO: 553968 - DNA, 19 bp, Mus musculus
  siRNA target sequence for Slc25a13 (NM_015829.1,1207-1225).
gtgggcgagctcatgtata

SEQ ID NO: 553969 - DNA, 19 bp, Mus musculus
  siRNA target sequence for Slc25a13 (NM_015829.1,1209-1227).
gggcgagctcatgtataaa

SEQ ID NO: 553970 - DNA, 19 bp, Mus musculus
  siRNA target sequence for Slc25a13 (NM_015829.1,1257-1275).
ccgctacgaaggcttcttt

SEQ ID NO: 553971 - DNA, 19 bp, Mus musculus
  siRNA target sequence for Slc25a13 (NM_015829.1,1323-1341).
gaaggccataaaacttaca

SEQ ID NO: 553972 - DNA, 19 bp, Mus musculus
  siRNA target sequence for Slc25a13 (NM_015829.1,1347-1365).
cgattttgtgagagataaa

SEQ ID NO: 553973 - DNA, 19 bp, Mus musculus
  siRNA target sequence for Slc25a13 (NM_015829.1,1348-1366).
gattttgtgagagataaat

SEQ ID NO: 553974 - DNA, 19 bp, Mus musculus
  siRNA target sequence for Slc25a13 (NM_015829.1,1433-1451).
cccaagtgattttcacaaa

SEQ ID NO: 553975 - DNA, 19 bp, Mus musculus
  siRNA target sequence for Slc25a13 (NM_015829.1,1434-1452).
ccaagtgattttcacaaat

SEQ ID NO: 553976 - DNA, 19 bp, Mus musculus
  siRNA target sequence for Slc25a13 (NM_015829.1,1440-1458).
gattttcacaaatccttta

SEQ ID NO: 553977 - DNA, 19 bp, Mus musculus
  siRNA target sequence for Slc25a13 (NM_015829.1,1544-1562).
ggttctttggcatctacaa

SEQ ID NO: 553978 - DNA, 19 bp, Mus musculus
  siRNA target sequence for Slc25a13 (NM_015829.1,1626-1644).
ccacgtgaaggcttccttt

SEQ ID NO: 553979 - DNA, 19 bp, Mus musculus
  siRNA target sequence for Slc25a13 (NM_015829.1,1632-1650).
gaaggcttcctttgcaaat

SEQ ID NO: 553980 - DNA, 19 bp, Mus musculus
  siRNA target sequence for Slc25a13 (NM_015829.1,1683-1701).
cttagccggtgctattgct

SEQ ID NO: 553981 - DNA, 19 bp, Mus musculus
  siRNA target sequence for Slc25a13 (NM_015829.1,1708-1726).
cctgcggcatctttagtga

SEQ ID NO: 553982 - DNA, 19 bp, Mus musculus
  siRNA target sequence for Slc25a13 (NM_015829.1,1772-1790).
ctggccaaaccacttacaa

SEQ ID NO: 553983 - DNA, 19 bp, Mus musculus
  siRNA target sequence for Slc25a13 (NM_015829.1,1795-1813).
gtgaccgactgcttcagaa

SEQ ID NO: 553984 - DNA, 19 bp, Mus musculus
  siRNA target sequence for Slc25a13 (NM_015829.1,1803-1821).
ctgcttcagaaagatactt

SEQ ID NO: 553985 - DNA, 19 bp, Mus musculus
  siRNA target sequence for Slc25a13 (NM_015829.1,1896-1914).
caccttgcttacgtatgaa

SEQ ID NO: 553986 - DNA, 19 bp, Mus musculus
  siRNA target sequence for Slc25a13 (NM_015829.1,1898-1916).
ccttgcttacgtatgaatt

SEQ ID NO: 553987 - DNA, 19 bp, Mus musculus
  siRNA target sequence for Slc25a13 (NM_015829.1,1925-1943).
ggtggttctatgtcgattt

SEQ ID NO: 553988 - DNA, 19 bp, Mus musculus
  siRNA target sequence for Slc25a13 (NM_015829.1,1926-1944).
gtggttctatgtcgatttt

SEQ ID NO: 553989 - DNA, 19 bp, Mus musculus
  siRNA target sequence for Slc25a13 (NM_015829.1,1929-1947).
gttctatgtcgattttgga

SEQ ID NO: 553990 - DNA, 19 bp, Mus musculus
  siRNA target sequence for Slc25a13 (NM_015829.1,1964-1982).
gatctgagccggttcctaa

SEQ ID NO: 553991 - DNA, 19 bp, Mus musculus
  siRNA target sequence for Slc25a13 (NM_015829.1,1979-1997).
ctaaatcccggattactct

SEQ ID NO: 553992 - DNA, 19 bp, Mus musculus
  siRNA target sequence for Slc25a13 (NM_015829.1,2016-2034).
ccacgtagggggctacaaa

SEQ ID NO: 553993 - DNA, 19 bp, Mus musculus
  siRNA target sequence for Slc25a13 (NM_015829.1,2052-2070).
cgcagggattgagaacaaa

SEQ ID NO: 553994 - DNA, 19 bp, Mus musculus
  siRNA target sequence for Slc25a13 (NM_015829.1,2054-2072).
cagggattgagaacaaatt

SEQ ID NO: 553995 - DNA, 19 bp, Mus musculus
  siRNA target sequence for Slc25a13 (NM_015829.1,2058-2076).
gattgagaacaaatttgga

SEQ ID NO: 553996 - DNA, 19 bp, Mus musculus
  siRNA target sequence for Slc25a13 (NM_015829.1,2104-2122).
gcatctacctcaaaagtga

SEQ ID NO: 553997 - DNA, 19 bp, Mus musculus
  siRNA target sequence for Slit1 (NM_015748.1,669-687).
cactcggatccacaagaat

SEQ ID NO: 553998 - DNA, 19 bp, Mus musculus
  siRNA target sequence for Slit1 (NM_015748.1,673-691).
cggatccacaagaatgact

SEQ ID NO: 553999 - DNA, 19 bp, Mus musculus
  siRNA target sequence for Slit1 (NM_015748.1,674-692).
ggatccacaagaatgactt

SEQ ID NO: 554000 - DNA, 19 bp, Mus musculus
  siRNA target sequence for Slit1 (NM_015748.1,750-768).
ggaacgcggagcttttgat

SEQ ID NO: 554001 - DNA, 19 bp, Mus musculus
  siRNA target sequence for Slit1 (NM_015748.1,918-936).
cacagacctcaaaaatcta

SEQ ID NO: 554002 - DNA, 19 bp, Mus musculus
  siRNA target sequence for Slit1 (NM_015748.1,920-938).
cagacctcaaaaatctaca

SEQ ID NO: 554003 - DNA, 19 bp, Mus musculus
  siRNA target sequence for Slit1 (NM_015748.1,1398-1416).
ggagttgaacggtatcaaa

SEQ ID NO: 554004 - DNA, 19 bp, Mus musculus
  siRNA target sequence for Slit1 (NM_015748.1,1513-1531).
ggcctgcgctccttgaatt

SEQ ID NO: 554005 - DNA, 19 bp, Mus musculus
  siRNA target sequence for Slit1 (NM_015748.1,1563-1581).
cctgccccgaggtgtattt

SEQ ID NO: 554006 - DNA, 19 bp, Mus musculus
  siRNA target sequence for Slit1 (NM_015748.1,1566-1584).
gccccgaggtgtatttgga

SEQ ID NO: 554007 - DNA, 19 bp, Mus musculus
  siRNA target sequence for Slit1 (NM_015748.1,1875-1893).
gcgtattgggcagatcaaa

SEQ ID NO: 554008 - DNA, 19 bp, Mus musculus
  siRNA target sequence for Slit1 (NM_015748.1,1876-1894).
cgtattgggcagatcaaaa

SEQ ID NO: 554009 - DNA, 19 bp, Mus musculus
  siRNA target sequence for Slit1 (NM_015748.1,2030-2048).
ccagcctgaaactctctaa

SEQ ID NO: 554010 - DNA, 19 bp, Mus musculus
  siRNA target sequence for Slit1 (NM_015748.1,2033-2051).
gcctgaaactctctaagat

SEQ ID NO: 554011 - DNA, 19 bp, Mus musculus
  siRNA target sequence for Slit1 (NM_015748.1,2078-2096).
ctgagctacgactgaacaa

SEQ ID NO: 554012 - DNA, 19 bp, Mus musculus
  siRNA target sequence for Slit1 (NM_015748.1,2080-2098).
gagctacgactgaacaaca

SEQ ID NO: 554013 - DNA, 19 bp, Mus musculus
  siRNA target sequence for Slit1 (NM_015748.1,2082-2100).
gctacgactgaacaacaat

SEQ ID NO: 554014 - DNA, 19 bp, Mus musculus
  siRNA target sequence for Slit1 (NM_015748.1,2116-2134).
gaggccactgggttgttta

SEQ ID NO: 554015 - DNA, 19 bp, Mus musculus
  siRNA target sequence for Slit1 (NM_015748.1,2119-2137).
gccactgggttgtttaaga

SEQ ID NO: 554016 - DNA, 19 bp, Mus musculus
  siRNA target sequence for Slit1 (NM_015748.1,2120-2138).
ccactgggttgtttaagaa

SEQ ID NO: 554017 - DNA, 19 bp, Mus musculus
  siRNA target sequence for Slit1 (NM_015748.1,2250-2268).
gctggagtccattagaagt

SEQ ID NO: 554018 - DNA, 19 bp, Mus musculus
  siRNA target sequence for Slit1 (NM_015748.1,2271-2289).
catgttccggggtctagat

SEQ ID NO: 554019 - DNA, 19 bp, Mus musculus
  siRNA target sequence for Slit1 (NM_015748.1,2455-2473).
ctggccaacccgttcaact

SEQ ID NO: 554020 - DNA, 19 bp, Mus musculus
  siRNA target sequence for Slit1 (NM_015748.1,2838-2856).
cagttccttgagcaattct

SEQ ID NO: 554021 - DNA, 19 bp, Mus musculus
  siRNA target sequence for Slit1 (NM_015748.1,2948-2966).
cgctgcgcctgctgtcttt

SEQ ID NO: 554022 - DNA, 19 bp, Mus musculus
  siRNA target sequence for Slit1 (NM_015748.1,3148-3166).
gagggcaaactgttactca

SEQ ID NO: 554023 - DNA, 19 bp, Mus musculus
  siRNA target sequence for Slit1 (NM_015748.1,3170-3188).
cacctgccaagaagtttga

SEQ ID NO: 554024 - DNA, 19 bp, Mus musculus
  siRNA target sequence for Slit1 (NM_015748.1,3172-3190).
cctgccaagaagtttgaat

SEQ ID NO: 554025 - DNA, 19 bp, Mus musculus
  siRNA target sequence for Slit1 (NM_015748.1,3426-3444).
ctgtccctccggctttgaa

SEQ ID NO: 554026 - DNA, 19 bp, Mus musculus
  siRNA target sequence for Slit1 (NM_015748.1,3514-3532).
gatggcgtggggaattaca

SEQ ID NO: 554027 - DNA, 19 bp, Mus musculus
  siRNA target sequence for Slit1 (NM_015748.1,3517-3535).
ggcgtggggaattacacat

SEQ ID NO: 554028 - DNA, 19 bp, Mus musculus
  siRNA target sequence for Slit1 (NM_015748.1,3917-3935).
gccctgaatgtgagaaatt

SEQ ID NO: 554029 - DNA, 19 bp, Mus musculus
  siRNA target sequence for Slit1 (NM_015748.1,3920-3938).
ctgaatgtgagaaattgct

SEQ ID NO: 554030 - DNA, 19 bp, Mus musculus
  siRNA target sequence for Slit1 (NM_015748.1,4096-4114).
ggccatgtccgtgttagtt

SEQ ID NO: 554031 - DNA, 19 bp, Mus musculus
  siRNA target sequence for Slit1 (NM_015748.1,4097-4115).
gccatgtccgtgttagtta

SEQ ID NO: 554032 - DNA, 19 bp, Mus musculus
  siRNA target sequence for Slit1 (NM_015748.1,4098-4116).
ccatgtccgtgttagttat

SEQ ID NO: 554033 - DNA, 19 bp, Mus musculus
  siRNA target sequence for Slit1 (NM_015748.1,4459-4477).
gagccgtgccgcaaactct

SEQ ID NO: 554034 - DNA, 19 bp, Mus musculus
  siRNA target sequence for Slit1 (NM_015748.1,4977-4995).
cagcgatgggacttcgttt

SEQ ID NO: 554035 - DNA, 19 bp, Mus musculus
  siRNA target sequence for Slit2 (NM_178804.2,277-295).
ctatcgctggggttagtgt

SEQ ID NO: 554036 - DNA, 19 bp, Mus musculus
  siRNA target sequence for Slit2 (NM_178804.2,292-310).
gtgttgtcgatcttgaaca

SEQ ID NO: 554037 - DNA, 19 bp, Mus musculus
  siRNA target sequence for Slit2 (NM_178804.2,385-403).
cgcagtgtgcccaggaata

SEQ ID NO: 554038 - DNA, 19 bp, Mus musculus
  siRNA target sequence for Slit2 (NM_178804.2,386-404).
gcagtgtgcccaggaatat

SEQ ID NO: 554039 - DNA, 19 bp, Mus musculus
  siRNA target sequence for Slit2 (NM_178804.2,424-442).
ctggatttgaatggaaata

SEQ ID NO: 554040 - DNA, 19 bp, Mus musculus
  siRNA target sequence for Slit2 (NM_178804.2,456-474).
cacgaagacagattttgct

SEQ ID NO: 554041 - DNA, 19 bp, Mus musculus
  siRNA target sequence for Slit2 (NM_178804.2,480-498).
caggcacctcagagttctt

SEQ ID NO: 554042 - DNA, 19 bp, Mus musculus
  siRNA target sequence for Slit2 (NM_178804.2,536-554).
gagcattccaggatcttaa

SEQ ID NO: 554043 - DNA, 19 bp, Mus musculus
  siRNA target sequence for Slit2 (NM_178804.2,539-557).
cattccaggatcttaagga

SEQ ID NO: 554044 - DNA, 19 bp, Mus musculus
  siRNA target sequence for Slit2 (NM_178804.2,559-577).
ctggaaagactgcgtttaa

SEQ ID NO: 554045 - DNA, 19 bp, Mus musculus
  siRNA target sequence for Slit2 (NM_178804.2,562-580).
gaaagactgcgtttaaaca

SEQ ID NO: 554046 - DNA, 19 bp, Mus musculus
  siRNA target sequence for Slit2 (NM_178804.2,566-584).
gactgcgtttaaacagaaa

SEQ ID NO: 554047 - DNA, 19 bp, Mus musculus
  siRNA target sequence for Slit2 (NM_178804.2,688-706).
cgtggggcagttgacatta

SEQ ID NO: 554048 - DNA, 19 bp, Mus musculus
  siRNA target sequence for Slit2 (NM_178804.2,689-707).
gtggggcagttgacattaa

SEQ ID NO: 554049 - DNA, 19 bp, Mus musculus
  siRNA target sequence for Slit2 (NM_178804.2,691-709).
ggggcagttgacattaaaa

SEQ ID NO: 554050 - DNA, 19 bp, Mus musculus
  siRNA target sequence for Slit2 (NM_178804.2,788-806).
ctctgaacaataacaatat

SEQ ID NO: 554051 - DNA, 19 bp, Mus musculus
  siRNA target sequence for Slit2 (NM_178804.2,795-813).
caataacaatattactaga

SEQ ID NO: 554052 - DNA, 19 bp, Mus musculus
  siRNA target sequence for Slit2 (NM_178804.2,859-877).
cgactccactcgaacaact

SEQ ID NO: 554053 - DNA, 19 bp, Mus musculus
  siRNA target sequence for Slit2 (NM_178804.2,860-878).
gactccactcgaacaactt

SEQ ID NO: 554054 - DNA, 19 bp, Mus musculus
  siRNA target sequence for Slit2 (NM_178804.2,862-880).
ctccactcgaacaacttgt

SEQ ID NO: 554055 - DNA, 19 bp, Mus musculus
  siRNA target sequence for Slit2 (NM_178804.2,865-883).
cactcgaacaacttgtact

SEQ ID NO: 554056 - DNA, 19 bp, Mus musculus
  siRNA target sequence for Slit2 (NM_178804.2,928-946).
ccacgggtgggcttgtaca

SEQ ID NO: 554057 - DNA, 19 bp, Mus musculus
  siRNA target sequence for Slit2 (NM_178804.2,993-1011).
ggttcaaaaacgagagttt

SEQ ID NO: 554058 - DNA, 19 bp, Mus musculus
  siRNA target sequence for Slit2 (NM_178804.2,1146-1164).
gaccatcacagaaatacgt

SEQ ID NO: 554059 - DNA, 19 bp, Mus musculus
  siRNA target sequence for Slit2 (NM_178804.2,1201-1219).
gccttctcaccatacaaaa

SEQ ID NO: 554060 - DNA, 19 bp, Mus musculus
  siRNA target sequence for Slit2 (NM_178804.2,1282-1300).
ggactgcgctctctgaatt

SEQ ID NO: 554061 - DNA, 19 bp, Mus musculus
  siRNA target sequence for Slit2 (NM_178804.2,1335-1353).
cccaaaaagtttattcgaa

SEQ ID NO: 554062 - DNA, 19 bp, Mus musculus
  siRNA target sequence for Slit2 (NM_178804.2,1404-1422).
ccttcgggtagatgctttt

SEQ ID NO: 554063 - DNA, 19 bp, Mus musculus
  siRNA target sequence for Slit2 (NM_178804.2,1451-1469).
ccttatatgacaataagct

SEQ ID NO: 554064 - DNA, 19 bp, Mus musculus
  siRNA target sequence for Slit2 (NM_178804.2,1452-1470).
cttatatgacaataagctt

SEQ ID NO: 554065 - DNA, 19 bp, Mus musculus
  siRNA target sequence for Slit2 (NM_178804.2,1501-1519).
ctcagagccatccaaacta

SEQ ID NO: 554066 - DNA, 19 bp, Mus musculus
  siRNA target sequence for Slit2 (NM_178804.2,1507-1525).
gccatccaaactatgcatt

SEQ ID NO: 554067 - DNA, 19 bp, Mus musculus
  siRNA target sequence for Slit2 (NM_178804.2,1560-1578).
caagtggctagcggattat

SEQ ID NO: 554068 - DNA, 19 bp, Mus musculus
  siRNA target sequence for Slit2 (NM_178804.2,1631-1649).
gcctggcaaacaaaagaat

SEQ ID NO: 554069 - DNA, 19 bp, Mus musculus
  siRNA target sequence for Slit2 (NM_178804.2,1665-1683).
caagaaattccgttgttca

SEQ ID NO: 554070 - DNA, 19 bp, Mus musculus
  siRNA target sequence for Slit2 (NM_178804.2,1688-1706).
cagaagattatcgatcaaa

SEQ ID NO: 554071 - DNA, 19 bp, Mus musculus
  siRNA target sequence for Slit2 (NM_178804.2,1690-1708).
gaagattatcgatcaaaat

SEQ ID NO: 554072 - DNA, 19 bp, Mus musculus
  siRNA target sequence for Slit2 (NM_178804.2,1693-1711).
gattatcgatcaaaattaa

SEQ ID NO: 554073 - DNA, 19 bp, Mus musculus
  siRNA target sequence for Slit2 (NM_178804.2,1771-1789).
gtagactgctccaatcaaa

SEQ ID NO: 554074 - DNA, 19 bp, Mus musculus
  siRNA target sequence for Slit2 (NM_178804.2,1781-1799).
ccaatcaaagactcaacaa

SEQ ID NO: 554075 - DNA, 19 bp, Mus musculus
  siRNA target sequence for Slit2 (NM_178804.2,1797-1815).
caaaatccctgaccatatt

SEQ ID NO: 554076 - DNA, 19 bp, Mus musculus
  siRNA target sequence for Slit2 (NM_178804.2,1828-1846).
gcagagctgcgtctcaata

SEQ ID NO: 554077 - DNA, 19 bp, Mus musculus
  siRNA target sequence for Slit2 (NM_178804.2,1829-1847).
cagagctgcgtctcaataa

SEQ ID NO: 554078 - DNA, 19 bp, Mus musculus
  siRNA target sequence for Slit2 (NM_178804.2,1833-1851).
gctgcgtctcaataataat

SEQ ID NO: 554079 - DNA, 19 bp, Mus musculus
  siRNA target sequence for Slit2 (NM_178804.2,1836-1854).
gcgtctcaataataatgaa

SEQ ID NO: 554080 - DNA, 19 bp, Mus musculus
  siRNA target sequence for Slit2 (NM_178804.2,1870-1888).
gccacgggaatatttaaga

SEQ ID NO: 554081 - DNA, 19 bp, Mus musculus
  siRNA target sequence for Slit2 (NM_178804.2,1871-1889).
ccacgggaatatttaagaa

SEQ ID NO: 554082 - DNA, 19 bp, Mus musculus
  siRNA target sequence for Slit2 (NM_178804.2,1872-1890).
cacgggaatatttaagaaa

SEQ ID NO: 554083 - DNA, 19 bp, Mus musculus
  siRNA target sequence for Slit2 (NM_178804.2,1874-1892).
cgggaatatttaagaaact

SEQ ID NO: 554084 - DNA, 19 bp, Mus musculus
  siRNA target sequence for Slit2 (NM_178804.2,1875-1893).
gggaatatttaagaaactt

SEQ ID NO: 554085 - DNA, 19 bp, Mus musculus
  siRNA target sequence for Slit2 (NM_178804.2,1894-1912).
cctcagttacgtaaaatca

SEQ ID NO: 554086 - DNA, 19 bp, Mus musculus
  siRNA target sequence for Slit2 (NM_178804.2,1895-1913).
ctcagttacgtaaaatcaa

SEQ ID NO: 554087 - DNA, 19 bp, Mus musculus
  siRNA target sequence for Slit2 (NM_178804.2,1897-1915).
cagttacgtaaaatcaact

SEQ ID NO: 554088 - DNA, 19 bp, Mus musculus
  siRNA target sequence for Slit2 (NM_178804.2,1903-1921).
cgtaaaatcaactttagca

SEQ ID NO: 554089 - DNA, 19 bp, Mus musculus
  siRNA target sequence for Slit2 (NM_178804.2,1904-1922).
gtaaaatcaactttagcaa

SEQ ID NO: 554090 - DNA, 19 bp, Mus musculus
  siRNA target sequence for Slit2 (NM_178804.2,1961-1979).
gcgcgtctggtgtgaatga

SEQ ID NO: 554091 - DNA, 19 bp, Mus musculus
  siRNA target sequence for Slit2 (NM_178804.2,1963-1981).
gcgtctggtgtgaatgaaa

SEQ ID NO: 554092 - DNA, 19 bp, Mus musculus
  siRNA target sequence for Slit2 (NM_178804.2,1964-1982).
cgtctggtgtgaatgaaat

SEQ ID NO: 554093 - DNA, 19 bp, Mus musculus
  siRNA target sequence for Slit2 (NM_178804.2,1965-1983).
gtctggtgtgaatgaaatt

SEQ ID NO: 554094 - DNA, 19 bp, Mus musculus
  siRNA target sequence for Slit2 (NM_178804.2,1967-1985).
ctggtgtgaatgaaattct

SEQ ID NO: 554095 - DNA, 19 bp, Mus musculus
  siRNA target sequence for Slit2 (NM_178804.2,1989-2007).
caccagtaaccgtttggaa

SEQ ID NO: 554096 - DNA, 19 bp, Mus musculus
  siRNA target sequence for Slit2 (NM_178804.2,1991-2009).
ccagtaaccgtttggaaaa

SEQ ID NO: 554097 - DNA, 19 bp, Mus musculus
  siRNA target sequence for Slit2 (NM_178804.2,1992-2010).
cagtaaccgtttggaaaat

SEQ ID NO: 554098 - DNA, 19 bp, Mus musculus
  siRNA target sequence for Slit2 (NM_178804.2,2058-2076).
gctgagaagtaatcgaata

SEQ ID NO: 554099 - DNA, 19 bp, Mus musculus
  siRNA target sequence for Slit2 (NM_178804.2,2081-2099).
gtgttgggaacgacagttt

SEQ ID NO: 554100 - DNA, 19 bp, Mus musculus
  siRNA target sequence for Slit2 (NM_178804.2,2118-2136).
gcgtctgctctctttatat

SEQ ID NO: 554101 - DNA, 19 bp, Mus musculus
  siRNA target sequence for Slit2 (NM_178804.2,2303-2321).
cctacttcctgaaggaaat

SEQ ID NO: 554102 - DNA, 19 bp, Mus musculus
  siRNA target sequence for Slit2 (NM_178804.2,2365-2383).
ggaaatgatgacaatagtt

SEQ ID NO: 554103 - DNA, 19 bp, Mus musculus
  siRNA target sequence for Slit2 (NM_178804.2,2410-2428).
gaatgtacctgcttggata

SEQ ID NO: 554104 - DNA, 19 bp, Mus musculus
  siRNA target sequence for Slit2 (NM_178804.2,2414-2432).
gtacctgcttggatacagt

SEQ ID NO: 554105 - DNA, 19 bp, Mus musculus
  siRNA target sequence for Slit2 (NM_178804.2,2457-2475).
gaaggttttgcctaaaggt

SEQ ID NO: 554106 - DNA, 19 bp, Mus musculus
  siRNA target sequence for Slit2 (NM_178804.2,2460-2478).
ggttttgcctaaaggtatt

SEQ ID NO: 554107 - DNA, 19 bp, Mus musculus
  siRNA target sequence for Slit2 (NM_178804.2,2531-2549).
cgaaggaactctctaacta

SEQ ID NO: 554108 - DNA, 19 bp, Mus musculus
  siRNA target sequence for Slit2 (NM_178804.2,2585-2603).
gaataagcaccctttccaa

SEQ ID NO: 554109 - DNA, 19 bp, Mus musculus
  siRNA target sequence for Slit2 (NM_178804.2,2594-2612).
ccctttccaatcaaagctt

SEQ ID NO: 554110 - DNA, 19 bp, Mus musculus
  siRNA target sequence for Slit2 (NM_178804.2,2624-2642).
cccagcttctcaccttaat

SEQ ID NO: 554111 - DNA, 19 bp, Mus musculus
  siRNA target sequence for Slit2 (NM_178804.2,2670-2688).
ccctccacgaacctttgat

SEQ ID NO: 554112 - DNA, 19 bp, Mus musculus
  siRNA target sequence for Slit2 (NM_178804.2,2675-2693).
cacgaacctttgatggatt

SEQ ID NO: 554113 - DNA, 19 bp, Mus musculus
  siRNA target sequence for Slit2 (NM_178804.2,2746-2764).
gaaggtgccttcaatgact

SEQ ID NO: 554114 - DNA, 19 bp, Mus musculus
  siRNA target sequence for Slit2 (NM_178804.2,2838-2856).
ctgggtgaagtcggaatat

SEQ ID NO: 554115 - DNA, 19 bp, Mus musculus
  siRNA target sequence for Slit2 (NM_178804.2,2840-2858).
gggtgaagtcggaatataa

SEQ ID NO: 554116 - DNA, 19 bp, Mus musculus
  siRNA target sequence for Slit2 (NM_178804.2,2844-2862).
gaagtcggaatataaggaa

SEQ ID NO: 554117 - DNA, 19 bp, Mus musculus
  siRNA target sequence for Slit2 (NM_178804.2,2925-2943).
ctccaaaaaatttacatgt

SEQ ID NO: 554118 - DNA, 19 bp, Mus musculus
  siRNA target sequence for Slit2 (NM_178804.2,2942-2960).
gtcaaggtcccgtggatat

SEQ ID NO: 554119 - DNA, 19 bp, Mus musculus
  siRNA target sequence for Slit2 (NM_178804.2,2947-2965).
ggtcccgtggatatcacta

SEQ ID NO: 554120 - DNA, 19 bp, Mus musculus
  siRNA target sequence for Slit2 (NM_178804.2,2948-2966).
gtcccgtggatatcactat

SEQ ID NO: 554121 - DNA, 19 bp, Mus musculus
  siRNA target sequence for Slit2 (NM_178804.2,2951-2969).
ccgtggatatcactattca

SEQ ID NO: 554122 - DNA, 19 bp, Mus musculus
  siRNA target sequence for Slit2 (NM_178804.2,2952-2970).
cgtggatatcactattcaa

SEQ ID NO: 554123 - DNA, 19 bp, Mus musculus
  siRNA target sequence for Slit2 (NM_178804.2,2963-2981).
ctattcaagccaagtgtaa

SEQ ID NO: 554124 - DNA, 19 bp, Mus musculus
  siRNA target sequence for Slit2 (NM_178804.2,2976-2994).
gtgtaatccctgcttatca

SEQ ID NO: 554125 - DNA, 19 bp, Mus musculus
  siRNA target sequence for Slit2 (NM_178804.2,2983-3001).
ccctgcttatcaaatccat

SEQ ID NO: 554126 - DNA, 19 bp, Mus musculus
  siRNA target sequence for Slit2 (NM_178804.2,2987-3005).
gcttatcaaatccatgtaa

SEQ ID NO: 554127 - DNA, 19 bp, Mus musculus
  siRNA target sequence for Slit2 (NM_178804.2,2988-3006).
cttatcaaatccatgtaaa

SEQ ID NO: 554128 - DNA, 19 bp, Mus musculus
  siRNA target sequence for Slit2 (NM_178804.2,3030-3048).
ccccgttgatttttatcga

SEQ ID NO: 554129 - DNA, 19 bp, Mus musculus
  siRNA target sequence for Slit2 (NM_178804.2,3053-3071).
cctgcccatatggattcaa

SEQ ID NO: 554130 - DNA, 19 bp, Mus musculus
  siRNA target sequence for Slit2 (NM_178804.2,3081-3099).
ctgtgatgtccccattcat

SEQ ID NO: 554131 - DNA, 19 bp, Mus musculus
  siRNA target sequence for Slit2 (NM_178804.2,3093-3111).
cattcatgcttgtatcagt

SEQ ID NO: 554132 - DNA, 19 bp, Mus musculus
  siRNA target sequence for Slit2 (NM_178804.2,3104-3122).
gtatcagtaatccatgtaa

SEQ ID NO: 554133 - DNA, 19 bp, Mus musculus
  siRNA target sequence for Slit2 (NM_178804.2,3187-3205).
gggtttgaaggagaaaact

SEQ ID NO: 554134 - DNA, 19 bp, Mus musculus
  siRNA target sequence for Slit2 (NM_178804.2,3254-3272).
ctacatgcgttgatggaat

SEQ ID NO: 554135 - DNA, 19 bp, Mus musculus
  siRNA target sequence for Slit2 (NM_178804.2,3257-3275).
catgcgttgatggaattaa

SEQ ID NO: 554136 - DNA, 19 bp, Mus musculus
  siRNA target sequence for Slit2 (NM_178804.2,3260-3278).
gcgttgatggaattaacaa

SEQ ID NO: 554137 - DNA, 19 bp, Mus musculus
  siRNA target sequence for Slit2 (NM_178804.2,3262-3280).
gttgatggaattaacaact

SEQ ID NO: 554138 - DNA, 19 bp, Mus musculus
  siRNA target sequence for Slit2 (NM_178804.2,3268-3286).
ggaattaacaactacacat

SEQ ID NO: 554139 - DNA, 19 bp, Mus musculus
  siRNA target sequence for Slit2 (NM_178804.2,3289-3307).
ctttgcccaccggaataca

SEQ ID NO: 554140 - DNA, 19 bp, Mus musculus
  siRNA target sequence for Slit2 (NM_178804.2,3454-3472).
gatgactgccaagataaca

SEQ ID NO: 554141 - DNA, 19 bp, Mus musculus
  siRNA target sequence for Slit2 (NM_178804.2,3583-3601).
cgcaccagcccctgtgata

SEQ ID NO: 554142 - DNA, 19 bp, Mus musculus
  siRNA target sequence for Slit2 (NM_178804.2,3588-3606).
cagcccctgtgataatttt

SEQ ID NO: 554143 - DNA, 19 bp, Mus musculus
  siRNA target sequence for Slit2 (NM_178804.2,3591-3609).
cccctgtgataattttgat

SEQ ID NO: 554144 - DNA, 19 bp, Mus musculus
  siRNA target sequence for Slit2 (NM_178804.2,3592-3610).
ccctgtgataattttgatt

SEQ ID NO: 554145 - DNA, 19 bp, Mus musculus
  siRNA target sequence for Slit2 (NM_178804.2,3629-3647).
gtatcatcaggataaatga

SEQ ID NO: 554146 - DNA, 19 bp, Mus musculus
  siRNA target sequence for Slit2 (NM_178804.2,3636-3654).
caggataaatgaaccaata

SEQ ID NO: 554147 - DNA, 19 bp, Mus musculus
  siRNA target sequence for Slit2 (NM_178804.2,3754-3772).
gttcggcctcagacaaaca

SEQ ID NO: 554148 - DNA, 19 bp, Mus musculus
  siRNA target sequence for Slit2 (NM_178804.2,3801-3819).
cagcggcatcctcttgtat

SEQ ID NO: 554149 - DNA, 19 bp, Mus musculus
  siRNA target sequence for Slit2 (NM_178804.2,3837-3855).
cattgccgtggaactctat

SEQ ID NO: 554150 - DNA, 19 bp, Mus musculus
  siRNA target sequence for Slit2 (NM_178804.2,3895-3913).
ccggcttctgccatttaca

SEQ ID NO: 554151 - DNA, 19 bp, Mus musculus
  siRNA target sequence for Slit2 (NM_178804.2,3897-3915).
ggcttctgccatttacagt

SEQ ID NO: 554152 - DNA, 19 bp, Mus musculus
  siRNA target sequence for Slit2 (NM_178804.2,3994-4012).
ggaggaagccctaaagtca

SEQ ID NO: 554153 - DNA, 19 bp, Mus musculus
  siRNA target sequence for Slit2 (NM_178804.2,4003-4021).
cctaaagtcatcaccaatt

SEQ ID NO: 554154 - DNA, 19 bp, Mus musculus
  siRNA target sequence for Slit2 (NM_178804.2,4004-4022).
ctaaagtcatcaccaattt

SEQ ID NO: 554155 - DNA, 19 bp, Mus musculus
  siRNA target sequence for Slit2 (NM_178804.2,4009-4027).
gtcatcaccaatttgtcaa

SEQ ID NO: 554156 - DNA, 19 bp, Mus musculus
  siRNA target sequence for Slit2 (NM_178804.2,4014-4032).
caccaatttgtcaaaacaa

SEQ ID NO: 554157 - DNA, 19 bp, Mus musculus
  siRNA target sequence for Slit2 (NM_178804.2,4017-4035).
caatttgtcaaaacaatct

SEQ ID NO: 554158 - DNA, 19 bp, Mus musculus
  siRNA target sequence for Slit2 (NM_178804.2,4138-4156).
ggctgtatccggaaccttt

SEQ ID NO: 554159 - DNA, 19 bp, Mus musculus
  siRNA target sequence for Slit2 (NM_178804.2,4139-4157).
gctgtatccggaaccttta

SEQ ID NO: 554160 - DNA, 19 bp, Mus musculus
  siRNA target sequence for Slit2 (NM_178804.2,4149-4167).
gaacctttacattaacagt

SEQ ID NO: 554161 - DNA, 19 bp, Mus musculus
  siRNA target sequence for Slit2 (NM_178804.2,4182-4200).
ccggaaaatgcctatgcaa

SEQ ID NO: 554162 - DNA, 19 bp, Mus musculus
  siRNA target sequence for Slit2 (NM_178804.2,4183-4201).
cggaaaatgcctatgcaaa

SEQ ID NO: 554163 - DNA, 19 bp, Mus musculus
  siRNA target sequence for Slit2 (NM_178804.2,4346-4364).
gcctcggaaacaaatgtgt

SEQ ID NO: 554164 - DNA, 19 bp, Mus musculus
  siRNA target sequence for Slit2 (NM_178804.2,4386-4404).
caatgccttctcctatagt

SEQ ID NO: 554165 - DNA, 19 bp, Mus musculus
  siRNA target sequence for Slit2 (NM_178804.2,4588-4606).
gaacggataagggactatt

SEQ ID NO: 554166 - DNA, 19 bp, Mus musculus
  siRNA target sequence for Slit2 (NM_178804.2,4621-4639).
ggttacgctgcctgtcaaa

SEQ ID NO: 554167 - DNA, 19 bp, Mus musculus
  siRNA target sequence for Slit2 (NM_178804.2,4626-4644).
cgctgcctgtcaaacaact

SEQ ID NO: 554168 - DNA, 19 bp, Mus musculus
  siRNA target sequence for Slit2 (NM_178804.2,4627-4645).
gctgcctgtcaaacaacta

SEQ ID NO: 554169 - DNA, 19 bp, Mus musculus
  siRNA target sequence for Slit2 (NM_178804.2,4628-4646).
ctgcctgtcaaacaactaa

SEQ ID NO: 554170 - DNA, 19 bp, Mus musculus
  siRNA target sequence for Slit2 (NM_178804.2,4632-4650).
ctgtcaaacaactaagaaa

SEQ ID NO: 554171 - DNA, 19 bp, Mus musculus
  siRNA target sequence for Slit2 (NM_178804.2,4713-4731).
caagaggcggaaatactct

SEQ ID NO: 554172 - DNA, 19 bp, Mus musculus
  siRNA target sequence for Slit2 (NM_178804.2,4719-4737).
gcggaaatactctttcgaa

SEQ ID NO: 554173 - DNA, 19 bp, Mus musculus
  siRNA target sequence for Slit2 (NM_178804.2,4720-4738).
cggaaatactctttcgaat

SEQ ID NO: 554174 - DNA, 19 bp, Mus musculus
  siRNA target sequence for Smoc1 (NM_022316.1,474-492).
ccatcgaggtcgatgcaaa

SEQ ID NO: 554175 - DNA, 19 bp, Mus musculus
  siRNA target sequence for Smoc1 (NM_022316.1,670-688).
ggttcttccgtgcagaata

SEQ ID NO: 554176 - DNA, 19 bp, Mus musculus
  siRNA target sequence for Smoc1 (NM_022316.1,671-689).
gttcttccgtgcagaataa

SEQ ID NO: 554177 - DNA, 19 bp, Mus musculus
  siRNA target sequence for Smoc1 (NM_022316.1,684-702).
gaataaaactcctgtatgt

SEQ ID NO: 554178 - DNA, 19 bp, Mus musculus
  siRNA target sequence for Smoc1 (NM_022316.1,726-744).
cttgagccagggtaattca

SEQ ID NO: 554179 - DNA, 19 bp, Mus musculus
  siRNA target sequence for Smoc1 (NM_022316.1,796-814).
gtgttcgatggagatgaaa

SEQ ID NO: 554180 - DNA, 19 bp, Mus musculus
  siRNA target sequence for Smoc1 (NM_022316.1,820-838).
gcccccaccttatggatta

SEQ ID NO: 554181 - DNA, 19 bp, Mus musculus
  siRNA target sequence for Smoc1 (NM_022316.1,821-839).
cccccaccttatggattaa

SEQ ID NO: 554182 - DNA, 19 bp, Mus musculus
  siRNA target sequence for Smoc1 (NM_022316.1,824-842).
ccaccttatggattaagca

SEQ ID NO: 554183 - DNA, 19 bp, Mus musculus
  siRNA target sequence for Smoc1 (NM_022316.1,875-893).
ccaacgtaagaaattcaga

SEQ ID NO: 554184 - DNA, 19 bp, Mus musculus
  siRNA target sequence for Smoc1 (NM_022316.1,879-897).
cgtaagaaattcagagaaa

SEQ ID NO: 554185 - DNA, 19 bp, Mus musculus
  siRNA target sequence for Smoc1 (NM_022316.1,952-970).
ccccgagagggcattgtga

SEQ ID NO: 554186 - DNA, 19 bp, Mus musculus
  siRNA target sequence for Smoc1 (NM_022316.1,953-971).
cccgagagggcattgtgat

SEQ ID NO: 554187 - DNA, 19 bp, Mus musculus
  siRNA target sequence for Smoc1 (NM_022316.1,982-1000).
gctcctggtgggctctata

SEQ ID NO: 554188 - DNA, 19 bp, Mus musculus
  siRNA target sequence for Smoc1 (NM_022316.1,983-1001).
ctcctggtgggctctataa

SEQ ID NO: 554189 - DNA, 19 bp, Mus musculus
  siRNA target sequence for Smoc1 (NM_022316.1,1018-1036).
caatccacaggctactgtt

SEQ ID NO: 554190 - DNA, 19 bp, Mus musculus
  siRNA target sequence for Smoc1 (NM_022316.1,1034-1052).
gttggtgcgtcctagtaga

SEQ ID NO: 554191 - DNA, 19 bp, Mus musculus
  siRNA target sequence for Smoc1 (NM_022316.1,1180-1198).
gggaagaagatggaattta

SEQ ID NO: 554192 - DNA, 19 bp, Mus musculus
  siRNA target sequence for Smoc1 (NM_022316.1,1181-1199).
ggaagaagatggaatttat

SEQ ID NO: 554193 - DNA, 19 bp, Mus musculus
  siRNA target sequence for Smoc1 (NM_022316.1,1346-1364).
gcaacagcagcgatgacat

SEQ ID NO: 554194 - DNA, 19 bp, Mus musculus
  siRNA target sequence for Smoc1 (NM_022316.1,1497-1515).
ctgcctgggtgttagcaaa

SEQ ID NO: 554195 - DNA, 19 bp, Mus musculus
  siRNA target sequence for Smoc2 (NM_022315.1,271-289).
gagagtcgatcaagacaaa

SEQ ID NO: 554196 - DNA, 19 bp, Mus musculus
  siRNA target sequence for Smoc2 (NM_022315.1,273-291).
gagtcgatcaagacaaaga

SEQ ID NO: 554197 - DNA, 19 bp, Mus musculus
  siRNA target sequence for Smoc2 (NM_022315.1,275-293).
gtcgatcaagacaaagaca

SEQ ID NO: 554198 - DNA, 19 bp, Mus musculus
  siRNA target sequence for Smoc2 (NM_022315.1,416-434).
gctcaccgtgggaattgca

SEQ ID NO: 554199 - DNA, 19 bp, Mus musculus
  siRNA target sequence for Smoc2 (NM_022315.1,417-435).
ctcaccgtgggaattgcaa

SEQ ID NO: 554200 - DNA, 19 bp, Mus musculus
  siRNA target sequence for Smoc2 (NM_022315.1,421-439).
ccgtgggaattgcaaagat

SEQ ID NO: 554201 - DNA, 19 bp, Mus musculus
  siRNA target sequence for Smoc2 (NM_022315.1,493-511).
gttccagcaagtgttcatt

SEQ ID NO: 554202 - DNA, 19 bp, Mus musculus
  siRNA target sequence for Smoc2 (NM_022315.1,767-785).
ctctggaccgagcaagtta

SEQ ID NO: 554203 - DNA, 19 bp, Mus musculus
  siRNA target sequence for Smoc2 (NM_022315.1,772-790).
gaccgagcaagttaagagt

SEQ ID NO: 554204 - DNA, 19 bp, Mus musculus
  siRNA target sequence for Smoc2 (NM_022315.1,791-809).
cggcagaacaagaccaata

SEQ ID NO: 554205 - DNA, 19 bp, Mus musculus
  siRNA target sequence for Smoc2 (NM_022315.1,868-886).
gcccaagaatgacaatgta

SEQ ID NO: 554206 - DNA, 19 bp, Mus musculus
  siRNA target sequence for Smoc2 (NM_022315.1,903-921).
cacatggtggtctctacaa

SEQ ID NO: 554207 - DNA, 19 bp, Mus musculus
  siRNA target sequence for Smoc2 (NM_022315.1,1002-1020).
caaggtatgagcaacctaa

SEQ ID NO: 554208 - DNA, 19 bp, Mus musculus
  siRNA target sequence for Smoc2 (NM_022315.1,1006-1024).
gtatgagcaacctaagtgt

SEQ ID NO: 554209 - DNA, 19 bp, Mus musculus
  siRNA target sequence for Smoc2 (NM_022315.1,1101-1119).
ccaaaaagcacgagtttct

SEQ ID NO: 554210 - DNA, 19 bp, Mus musculus
  siRNA target sequence for Smoc2 (NM_022315.1,1232-1250).
gttgtacattggtacttca

SEQ ID NO: 554211 - DNA, 19 bp, Mus musculus
  siRNA target sequence for Smoc2 (NM_022315.1,1462-1480).
ccacacccccagaggaaat

SEQ ID NO: 554212 - DNA, 19 bp, Mus musculus
  siRNA target sequence for Sparc (NM_009242.1,301-319).
gccagaaccatcattgcaa

SEQ ID NO: 554213 - DNA, 19 bp, Mus musculus
  siRNA target sequence for Sparc (NM_009242.1,305-323).
gaaccatcattgcaaacat

SEQ ID NO: 554214 - DNA, 19 bp, Mus musculus
  siRNA target sequence for Sparc (NM_009242.1,394-412).
ctcccattggcgagtttga

SEQ ID NO: 554215 - DNA, 19 bp, Mus musculus
  siRNA target sequence for Sparc (NM_009242.1,396-414).
cccattggcgagtttgaga

SEQ ID NO: 554216 - DNA, 19 bp, Mus musculus
  siRNA target sequence for Sparc (NM_009242.1,397-415).
ccattggcgagtttgagaa

SEQ ID NO: 554217 - DNA, 19 bp, Mus musculus
  siRNA target sequence for Sparc (NM_009242.1,402-420).
ggcgagtttgagaaggtat

SEQ ID NO: 554218 - DNA, 19 bp, Mus musculus
  siRNA target sequence for Sparc (NM_009242.1,518-536).
ctacatcggaccatgcaaa

SEQ ID NO: 554219 - DNA, 19 bp, Mus musculus
  siRNA target sequence for Sparc (NM_009242.1,587-605).
gcgtgactggctcaaaaat

SEQ ID NO: 554220 - DNA, 19 bp, Mus musculus
  siRNA target sequence for Sparc (NM_009242.1,589-607).
gtgactggctcaaaaatgt

SEQ ID NO: 554221 - DNA, 19 bp, Mus musculus
  siRNA target sequence for Sparc (NM_009242.1,728-746).
gctgttggcccgagacttt

SEQ ID NO: 554222 - DNA, 19 bp, Mus musculus
  siRNA target sequence for Sparc (NM_009242.1,800-818).
ggatcagcaccctattgat

SEQ ID NO: 554223 - DNA, 19 bp, Mus musculus
  siRNA target sequence for Sparc (NM_009242.1,909-927).
ctagacaacgacaagtaca

SEQ ID NO: 554224 - DNA, 19 bp, Mus musculus
  siRNA target sequence for Sparcl1 (NM_010097.2,431-449).
gtggcaatcccgacaagta

SEQ ID NO: 554225 - DNA, 19 bp, Mus musculus
  siRNA target sequence for Sparcl1 (NM_010097.2,433-451).
ggcaatcccgacaagtaca

SEQ ID NO: 554226 - DNA, 19 bp, Mus musculus
  siRNA target sequence for Sparcl1 (NM_010097.2,434-452).
gcaatcccgacaagtacaa

SEQ ID NO: 554227 - DNA, 19 bp, Mus musculus
  siRNA target sequence for Sparcl1 (NM_010097.2,466-484).
ccactccaacccaactact

SEQ ID NO: 554228 - DNA, 19 bp, Mus musculus
  siRNA target sequence for Sparcl1 (NM_010097.2,674-692).
gatggagatggggatttaa

SEQ ID NO: 554229 - DNA, 19 bp, Mus musculus
  siRNA target sequence for Sparcl1 (NM_010097.2,678-696).
gagatggggatttaagtgt

SEQ ID NO: 554230 - DNA, 19 bp, Mus musculus
  siRNA target sequence for Sparcl1 (NM_010097.2,701-719).
ccaacggaaggaacactaa

SEQ ID NO: 554231 - DNA, 19 bp, Mus musculus
  siRNA target sequence for Sparcl1 (NM_010097.2,741-759).
caagtgagcctcaacagaa

SEQ ID NO: 554232 - DNA, 19 bp, Mus musculus
  siRNA target sequence for Sparcl1 (NM_010097.2,801-819).
cttcctatgtggatcctaa

SEQ ID NO: 554233 - DNA, 19 bp, Mus musculus
  siRNA target sequence for Sparcl1 (NM_010097.2,805-823).
ctatgtggatcctaaccaa

SEQ ID NO: 554234 - DNA, 19 bp, Mus musculus
  siRNA target sequence for Sparcl1 (NM_010097.2,816-834).
ctaaccaacgcgcaaacat

SEQ ID NO: 554235 - DNA, 19 bp, Mus musculus
  siRNA target sequence for Sparcl1 (NM_010097.2,821-839).
caacgcgcaaacatcacaa

SEQ ID NO: 554236 - DNA, 19 bp, Mus musculus
  siRNA target sequence for Sparcl1 (NM_010097.2,937-955).
gacacaagatccagacatt

SEQ ID NO: 554237 - DNA, 19 bp, Mus musculus
  siRNA target sequence for Sparcl1 (NM_010097.2,1023-1041).
gtgcccccagtgataacca

SEQ ID NO: 554238 - DNA, 19 bp, Mus musculus
  siRNA target sequence for Sparcl1 (NM_010097.2,1155-1173).
cagagaagcatcaatctga

SEQ ID NO: 554239 - DNA, 19 bp, Mus musculus
  siRNA target sequence for Sparcl1 (NM_010097.2,1421-1439).
gcaggcgatgactacttca

SEQ ID NO: 554240 - DNA, 19 bp, Mus musculus
  siRNA target sequence for Sparcl1 (NM_010097.2,1422-1440).
caggcgatgactacttcat

SEQ ID NO: 554241 - DNA, 19 bp, Mus musculus
  siRNA target sequence for Sparcl1 (NM_010097.2,1460-1478).
gaggccgaaaggatgcatt

SEQ ID NO: 554242 - DNA, 19 bp, Mus musculus
  siRNA target sequence for Sparcl1 (NM_010097.2,1644-1662).
gcacgaacttccaatgtaa

SEQ ID NO: 554243 - DNA, 19 bp, Mus musculus
  siRNA target sequence for Sparcl1 (NM_010097.2,1645-1663).
cacgaacttccaatgtaaa

SEQ ID NO: 554244 - DNA, 19 bp, Mus musculus
  siRNA target sequence for Sparcl1 (NM_010097.2,1728-1746).
cttgtccccctgcaaaaat

SEQ ID NO: 554245 - DNA, 19 bp, Mus musculus
  siRNA target sequence for Sparcl1 (NM_010097.2,1737-1755).
ctgcaaaaatcctagatca

SEQ ID NO: 554246 - DNA, 19 bp, Mus musculus
  siRNA target sequence for Sparcl1 (NM_010097.2,1844-1862).
caactgcagctggattact

SEQ ID NO: 554247 - DNA, 19 bp, Mus musculus
  siRNA target sequence for Sparcl1 (NM_010097.2,1861-1879).
cttcggagcttgcaaatct

SEQ ID NO: 554248 - DNA, 19 bp, Mus musculus
  siRNA target sequence for Sparcl1 (NM_010097.2,1864-1882).
cggagcttgcaaatctatt

SEQ ID NO: 554249 - DNA, 19 bp, Mus musculus
  siRNA target sequence for Sparcl1 (NM_010097.2,1945-1963).
catcctcatgcagctttat

SEQ ID NO: 554250 - DNA, 19 bp, Mus musculus
  siRNA target sequence for Sparcl1 (NM_010097.2,1982-2000).
ggcggctatctcaatgaaa

SEQ ID NO: 554251 - DNA, 19 bp, Mus musculus
  siRNA target sequence for Sparcl1 (NM_010097.2,1983-2001).
gcggctatctcaatgaaaa

SEQ ID NO: 554252 - DNA, 19 bp, Mus musculus
  siRNA target sequence for Sparcl1 (NM_010097.2,2055-2073).
gagaccatcccattgaact

SEQ ID NO: 554253 - DNA, 19 bp, Mus musculus
  siRNA target sequence for Sparcl1 (NM_010097.2,2118-2136).
ctgtgcactggcagtttaa

SEQ ID NO: 554254 - DNA, 19 bp, Mus musculus
  siRNA target sequence for Sparcl1 (NM_010097.2,2223-2241).
gcataactcgcttctttga

SEQ ID NO: 554255 - DNA, 19 bp, Mus musculus
  siRNA target sequence for Sparcl1 (NM_010097.2,2247-2265).
gtgaccccaacaaggataa

SEQ ID NO: 554256 - DNA, 19 bp, Mus musculus
  siRNA target sequence for Spock2 (NM_052994.2,614-632).
gtctgcaagccctgtcata

SEQ ID NO: 554257 - DNA, 19 bp, Mus musculus
  siRNA target sequence for Spock2 (NM_052994.2,657-675).
gctccgacggccataccta

SEQ ID NO: 554258 - DNA, 19 bp, Mus musculus
  siRNA target sequence for Spock2 (NM_052994.2,1072-1090).
ctgtgatacctacaaagat

SEQ ID NO: 554259 - DNA, 19 bp, Mus musculus
  siRNA target sequence for Spock2 (NM_052994.2,1106-1124).
gctgagtggtgcttctgtt

SEQ ID NO: 554260 - DNA, 19 bp, Mus musculus
  siRNA target sequence for Spock2 (NM_052994.2,1107-1125).
ctgagtggtgcttctgttt

SEQ ID NO: 554261 - DNA, 19 bp, Mus musculus
  siRNA target sequence for SST3 (NM_172463.3,351-369).
ccggactctacgtgaacaa

SEQ ID NO: 554262 - DNA, 19 bp, Mus musculus
  siRNA target sequence for SST3 (NM_172463.3,352-370).
cggactctacgtgaacaat

SEQ ID NO: 554263 - DNA, 19 bp, Mus musculus
  siRNA target sequence for SST3 (NM_172463.3,353-371).
ggactctacgtgaacaata

SEQ ID NO: 554264 - DNA, 19 bp, Mus musculus
  siRNA target sequence for SST3 (NM_172463.3,480-498).
ggcgtgcaggtgatgtcta

SEQ ID NO: 554265 - DNA, 19 bp, Mus musculus
  siRNA target sequence for SST3 (NM_172463.3,483-501).
gtgcaggtgatgtctacta

SEQ ID NO: 554266 - DNA, 19 bp, Mus musculus
  siRNA target sequence for SST3 (NM_172463.3,544-562).
ggacatcagacggtacttt

SEQ ID NO: 554267 - DNA, 19 bp, Mus musculus
  siRNA target sequence for SST3 (NM_172463.3,582-600).
ctgctacctgggtttttgt

SEQ ID NO: 554268 - DNA, 19 bp, Mus musculus
  siRNA target sequence for SST3 (NM_172463.3,640-658).
ctcttcccccgttaacaca

SEQ ID NO: 554269 - DNA, 19 bp, Mus musculus
  siRNA target sequence for SST3 (NM_172463.3,642-660).
cttcccccgttaacacatt

SEQ ID NO: 554270 - DNA, 19 bp, Mus musculus
  siRNA target sequence for SST3 (NM_172463.3,647-665).
cccgttaacacattccaaa

SEQ ID NO: 554271 - DNA, 19 bp, Mus musculus
  siRNA target sequence for SST3 (NM_172463.3,657-675).
cattccaaactgtactcat

SEQ ID NO: 554272 - DNA, 19 bp, Mus musculus
  siRNA target sequence for SST3 (NM_172463.3,812-830).
gggcaccgctacttcaaca

SEQ ID NO: 554273 - DNA, 19 bp, Mus musculus
  siRNA target sequence for SST3 (NM_172463.3,813-831).
ggcaccgctacttcaacat

SEQ ID NO: 554274 - DNA, 19 bp, Mus musculus
  siRNA target sequence for SST3 (NM_172463.3,898-916).
ctgggcgtttagaatcgat

SEQ ID NO: 554275 - DNA, 19 bp, Mus musculus
  siRNA target sequence for SST3 (NM_172463.3,1200-1218).
ctccgtgtgacaacaaagt

SEQ ID NO: 554276 - DNA, 19 bp, Mus musculus
  siRNA target sequence for SST3 (NM_172463.3,1202-1220).
ccgtgtgacaacaaagtat

SEQ ID NO: 554277 - DNA, 19 bp, Mus musculus
  siRNA target sequence for SST3 (NM_172463.3,1251-1269).
gcagctctgcagtatgtgt

SEQ ID NO: 554278 - DNA, 19 bp, Mus musculus
  siRNA target sequence for SST3 (NM_172463.3,1270-1288).
gtgtcaggctggatacact

SEQ ID NO: 554279 - DNA, 19 bp, Mus musculus
  siRNA target sequence for SST3 (NM_172463.3,1336-1354).
ccagaatgggggatcatgt

SEQ ID NO: 554280 - DNA, 19 bp, Mus musculus
  siRNA target sequence for SST3 (NM_172463.3,1339-1357).
gaatgggggatcatgtgtt

SEQ ID NO: 554281 - DNA, 19 bp, Mus musculus
  siRNA target sequence for SST3 (NM_172463.3,1353-1371).
gtgttgacctggttggaaa

SEQ ID NO: 554282 - DNA, 19 bp, Mus musculus
  siRNA target sequence for SST3 (NM_172463.3,1358-1376).
gacctggttggaaactaca

SEQ ID NO: 554283 - DNA, 19 bp, Mus musculus
  siRNA target sequence for SST3 (NM_172463.3,1493-1511).
gagggatacgtgtgtgaat

SEQ ID NO: 554284 - DNA, 19 bp, Mus musculus
  siRNA target sequence for SST3 (NM_172463.3,1615-1633).
gtgtcctccaggcttcttt

SEQ ID NO: 554285 - DNA, 19 bp, Mus musculus
  siRNA target sequence for SST3 (NM_172463.3,1661-1679).
gccacgccctgcaacatga

SEQ ID NO: 554286 - DNA, 19 bp, Mus musculus
  siRNA target sequence for SST3 (NM_172463.3,1662-1680).
ccacgccctgcaacatgaa

SEQ ID NO: 554287 - DNA, 19 bp, Mus musculus
  siRNA target sequence for SST3 (NM_172463.3,1719-1737).
gcggaagctacctatgtgt

SEQ ID NO: 554288 - DNA, 19 bp, Mus musculus
  siRNA target sequence for SST3 (NM_172463.3,1783-1801).
cgactcagacccttgcttt

SEQ ID NO: 554289 - DNA, 19 bp, Mus musculus
  siRNA target sequence for SST3 (NM_172463.3,1784-1802).
gactcagacccttgcttta

SEQ ID NO: 554290 - DNA, 19 bp, Mus musculus
  siRNA target sequence for SST3 (NM_172463.3,1957-1975).
ctgcacctgcccttataga

SEQ ID NO: 554291 - DNA, 19 bp, Mus musculus
  siRNA target sequence for SST3 (NM_172463.3,1959-1977).
gcacctgcccttatagatt

SEQ ID NO: 554292 - DNA, 19 bp, Mus musculus
  siRNA target sequence for SST3 (NM_172463.3,2020-2038).
ctctggcccctgtcataat

SEQ ID NO: 554293 - DNA, 19 bp, Mus musculus
  siRNA target sequence for SST3 (NM_172463.3,2033-2051).
cataatggtgggacttgtt

SEQ ID NO: 554294 - DNA, 19 bp, Mus musculus
  siRNA target sequence for SST3 (NM_172463.3,2043-2061).
ggacttgtttccactacat

SEQ ID NO: 554295 - DNA, 19 bp, Mus musculus
  siRNA target sequence for SST3 (NM_172463.3,2044-2062).
gacttgtttccactacatt

SEQ ID NO: 554296 - DNA, 19 bp, Mus musculus
  siRNA target sequence for SST3 (NM_172463.3,3076-3094).
caatatctccgttttctca

SEQ ID NO: 554297 - DNA, 19 bp, Mus musculus
  siRNA target sequence for SST3 (NM_172463.3,3165-3183).
gccctatagaagactttga

SEQ ID NO: 554298 - DNA, 19 bp, Mus musculus
  siRNA target sequence for SST3 (NM_172463.3,3321-3339).
gtgtggaccgcctcacatt

SEQ ID NO: 554299 - DNA, 19 bp, Mus musculus
  siRNA target sequence for SST3 (NM_172463.3,3350-3368).
ctgccagggagaagataca

SEQ ID NO: 554300 - DNA, 19 bp, Mus musculus
  siRNA target sequence for SST3 (NM_172463.3,3653-3671).
cggtaccagctctcagtta

SEQ ID NO: 554301 - DNA, 19 bp, Mus musculus
  siRNA target sequence for SST3 (NM_172463.3,3882-3900).
ggttctcagagcttgtaga

SEQ ID NO: 554302 - DNA, 19 bp, Mus musculus
  siRNA target sequence for SST3 (NM_172463.3,3975-3993).
ctccggtgccactcaagaa

SEQ ID NO: 554303 - DNA, 19 bp, Mus musculus
  siRNA target sequence for SST3 (NM_172463.3,3977-3995).
ccggtgccactcaagaaca

SEQ ID NO: 554304 - DNA, 19 bp, Mus musculus
  siRNA target sequence for SST3 (NM_172463.3,4257-4275).
gccaccatgtgtataagaa

SEQ ID NO: 554305 - DNA, 19 bp, Mus musculus
  siRNA target sequence for SST3 (NM_172463.3,4289-4307).
caccaggacgtgtgcttta

SEQ ID NO: 554306 - DNA, 19 bp, Mus musculus
  siRNA target sequence for Syp (NM_009305.1,91-109).
gccatcttcgcctttgcta

SEQ ID NO: 554307 - DNA, 19 bp, Mus musculus
  siRNA target sequence for Syp (NM_009305.1,164-182).
cggagagtgccctcaacat

SEQ ID NO: 554308 - DNA, 19 bp, Mus musculus
  siRNA target sequence for Syp (NM_009305.1,177-195).
caacatcgaagtcgaattt

SEQ ID NO: 554309 - DNA, 19 bp, Mus musculus
  siRNA target sequence for Syp (NM_009305.1,346-364).
gccctggccacctacatct

SEQ ID NO: 554310 - DNA, 19 bp, Mus musculus
  siRNA target sequence for Syp (NM_009305.1,424-442).
gcagtgttcgctttcatgt

SEQ ID NO: 554311 - DNA, 19 bp, Mus musculus
  siRNA target sequence for Syp (NM_009305.1,433-451).
gctttcatgtggctagtta

SEQ ID NO: 554312 - DNA, 19 bp, Mus musculus
  siRNA target sequence for Syp (NM_009305.1,495-513).
cactgacccagagaacatt

SEQ ID NO: 554313 - DNA, 19 bp, Mus musculus
  siRNA target sequence for Syp (NM_009305.1,625-643).
ctctgggttggcaacctat

SEQ ID NO: 554314 - DNA, 19 bp, Mus musculus
  siRNA target sequence for Syp (NM_009305.1,629-647).
gggttggcaacctatggtt

SEQ ID NO: 554315 - DNA, 19 bp, Mus musculus
  siRNA target sequence for Syp (NM_009305.1,789-807).
cgggcctcagggtggttat

SEQ ID NO: 554316 - DNA, 19 bp, Mus musculus
  siRNA target sequence for Syp (NM_009305.1,792-810).
gcctcagggtggttatcaa

SEQ ID NO: 554317 - DNA, 19 bp, Mus musculus
  siRNA target sequence for Syp (NM_009305.1,905-923).
cctccttctccaatcagat

SEQ ID NO: 554318 - DNA, 19 bp, Mus musculus
  siRNA target sequence for Tgm2 (NM_009373.2,118-136).
ggtgtgatttggagattca

SEQ ID NO: 554319 - DNA, 19 bp, Mus musculus
  siRNA target sequence for Tgm2 (NM_009373.2,163-181).
ccgacctatgccaagagaa

SEQ ID NO: 554320 - DNA, 19 bp, Mus musculus
  siRNA target sequence for Tgm2 (NM_009373.2,410-428).
cccagccaatgctcctatt

SEQ ID NO: 554321 - DNA, 19 bp, Mus musculus
  siRNA target sequence for Tgm2 (NM_009373.2,517-535).
ggtgcccagccgatgatgt

SEQ ID NO: 554322 - DNA, 19 bp, Mus musculus
  siRNA target sequence for Tgm2 (NM_009373.2,520-538).
gcccagccgatgatgtgta

SEQ ID NO: 554323 - DNA, 19 bp, Mus musculus
  siRNA target sequence for Tgm2 (NM_009373.2,577-595).
cgcaacagggcttcatcta

SEQ ID NO: 554324 - DNA, 19 bp, Mus musculus
  siRNA target sequence for Tgm2 (NM_009373.2,640-658).
ggcagttcgaggatggaat

SEQ ID NO: 554325 - DNA, 19 bp, Mus musculus
  siRNA target sequence for Tgm2 (NM_009373.2,670-688).
gcctgatgctcttggatat

SEQ ID NO: 554326 - DNA, 19 bp, Mus musculus
  siRNA target sequence for Tgm2 (NM_009373.2,809-827).
ccgctgggacaacaactat

SEQ ID NO: 554327 - DNA, 19 bp, Mus musculus
  siRNA target sequence for Tgm2 (NM_009373.2,824-842).
ctatggggatggtatcagt

SEQ ID NO: 554328 - DNA, 19 bp, Mus musculus
  siRNA target sequence for Tgm2 (NM_009373.2,1184-1202).
gagcgaagggacatactgt

SEQ ID NO: 554329 - DNA, 19 bp, Mus musculus
  siRNA target sequence for Tgm2 (NM_009373.2,1320-1338).
gggtctgtgctcaaatcca

SEQ ID NO: 554330 - DNA, 19 bp, Mus musculus
  siRNA target sequence for Tgm2 (NM_009373.2,1321-1339).
ggtctgtgctcaaatccat

SEQ ID NO: 554331 - DNA, 19 bp, Mus musculus
  siRNA target sequence for Tgm2 (NM_009373.2,1353-1371).
gtcgtggggcagaagatca

SEQ ID NO: 554332 - DNA, 19 bp, Mus musculus
  siRNA target sequence for Tgm2 (NM_009373.2,1723-1741).
gaatcctctacgagaagta

SEQ ID NO: 554333 - DNA, 19 bp, Mus musculus
  siRNA target sequence for Tgm2 (NM_009373.2,1839-1857).
ctggagaatcccgaaatca

SEQ ID NO: 554334 - DNA, 19 bp, Mus musculus
  siRNA target sequence for Tgm2 (NM_009373.2,1869-1887).
ctgggagaacccaagcaaa

SEQ ID NO: 554335 - DNA, 19 bp, Mus musculus
  siRNA target sequence for Tgm2 (NM_009373.2,1938-1956).
ctgtatgactgcatcttca

SEQ ID NO: 554336 - DNA, 19 bp, Mus musculus
  siRNA target sequence for Tgm2 (NM_009373.2,2046-2064).
gacctgttcccgactgata

SEQ ID NO: 554337 - DNA, 19 bp, Mus musculus
  siRNA target sequence for Tgm2 (NM_009373.2,2048-2066).
cctgttcccgactgatatt

SEQ ID NO: 554338 - DNA, 19 bp, Mus musculus
  siRNA target sequence for Tgm2 (NM_009373.2,2121-2139).
ggttaccggaatgttatca

SEQ ID NO: 554339 - DNA, 19 bp, Mus musculus
  siRNA target sequence for Tgm2 (NM_009373.2,2122-2140).
gttaccggaatgttatcat

SEQ ID NO: 554340 - DNA, 19 bp, Mus musculus
  siRNA target sequence for Tgm3 (NM_009374.1,59-77).
gtgctttacagatccaaaa

SEQ ID NO: 554341 - DNA, 19 bp, Mus musculus
  siRNA target sequence for Tgm3 (NM_009374.1,62-80).
ctttacagatccaaaacgt

SEQ ID NO: 554342 - DNA, 19 bp, Mus musculus
  siRNA target sequence for Tgm3 (NM_009374.1,84-102).
ctggcaggtgcctatgaat

SEQ ID NO: 554343 - DNA, 19 bp, Mus musculus
  siRNA target sequence for Tgm3 (NM_009374.1,88-106).
caggtgcctatgaatcgaa

SEQ ID NO: 554344 - DNA, 19 bp, Mus musculus
  siRNA target sequence for Tgm3 (NM_009374.1,110-128).
cgcatcacacagacaagtt

SEQ ID NO: 554345 - DNA, 19 bp, Mus musculus
  siRNA target sequence for Tgm3 (NM_009374.1,162-180).
gccctgggagataatatta

SEQ ID NO: 554346 - DNA, 19 bp, Mus musculus
  siRNA target sequence for Tgm3 (NM_009374.1,164-182).
cctgggagataatattagt

SEQ ID NO: 554347 - DNA, 19 bp, Mus musculus
  siRNA target sequence for Tgm3 (NM_009374.1,368-386).
gtgctcccatcggattgta

SEQ ID NO: 554348 - DNA, 19 bp, Mus musculus
  siRNA target sequence for Tgm3 (NM_009374.1,370-388).
gctcccatcggattgtaca

SEQ ID NO: 554349 - DNA, 19 bp, Mus musculus
  siRNA target sequence for Tgm3 (NM_009374.1,430-448).
ctgaaacttggcacgttta

SEQ ID NO: 554350 - DNA, 19 bp, Mus musculus
  siRNA target sequence for Tgm3 (NM_009374.1,432-450).
gaaacttggcacgtttata

SEQ ID NO: 554351 - DNA, 19 bp, Mus musculus
  siRNA target sequence for Tgm3 (NM_009374.1,467-485).
ggttgcaagcggatgatgt

SEQ ID NO: 554352 - DNA, 19 bp, Mus musculus
  siRNA target sequence for Tgm3 (NM_009374.1,471-489).
gcaagcggatgatgtcttt

SEQ ID NO: 554353 - DNA, 19 bp, Mus musculus
  siRNA target sequence for Tgm3 (NM_009374.1,494-512).
gtaaccacgccgaaagaca

SEQ ID NO: 554354 - DNA, 19 bp, Mus musculus
  siRNA target sequence for Tgm3 (NM_009374.1,501-519).
cgccgaaagacaagagtat

SEQ ID NO: 554355 - DNA, 19 bp, Mus musculus
  siRNA target sequence for Tgm3 (NM_009374.1,570-588).
catggttggctggaacttt

SEQ ID NO: 554356 - DNA, 19 bp, Mus musculus
  siRNA target sequence for Tgm3 (NM_009374.1,618-636).
cagcctctccattttggat

SEQ ID NO: 554357 - DNA, 19 bp, Mus musculus
  siRNA target sequence for Tgm3 (NM_009374.1,683-701).
gaaatgaccccaaatatgt

SEQ ID NO: 554358 - DNA, 19 bp, Mus musculus
  siRNA target sequence for Tgm3 (NM_009374.1,845-863).
gcttcaggccagtccaatt

SEQ ID NO: 554359 - DNA, 19 bp, Mus musculus
  siRNA target sequence for Tgm3 (NM_009374.1,953-971).
ctcacgacacagatcgaaa

SEQ ID NO: 554360 - DNA, 19 bp, Mus musculus
  siRNA target sequence for Tgm3 (NM_009374.1,1080-1098).
cctaggccccacatacaat

SEQ ID NO: 554361 - DNA, 19 bp, Mus musculus
  siRNA target sequence for Tgm3 (NM_009374.1,1155-1173).
cggtccagcttccgttaat

SEQ ID NO: 554362 - DNA, 19 bp, Mus musculus
  siRNA target sequence for Tgm3 (NM_009374.1,1159-1177).
ccagcttccgttaatgcaa

SEQ ID NO: 554363 - DNA, 19 bp, Mus musculus
  siRNA target sequence for Tgm3 (NM_009374.1,1187-1205).
gtgatgtggaccggaattt

SEQ ID NO: 554364 - DNA, 19 bp, Mus musculus
  siRNA target sequence for Tgm3 (NM_009374.1,1218-1236).
catcttcgcggaggttaat

SEQ ID NO: 554365 - DNA, 19 bp, Mus musculus
  siRNA target sequence for Tgm3 (NM_009374.1,1243-1261).
cgcatcacttggatctata

SEQ ID NO: 554366 - DNA, 19 bp, Mus musculus
  siRNA target sequence for Tgm3 (NM_009374.1,1253-1271).
ggatctataataatagaaa

SEQ ID NO: 554367 - DNA, 19 bp, Mus musculus
  siRNA target sequence for Tgm3 (NM_009374.1,1277-1295).
cccagaagcagaattctgt

SEQ ID NO: 554368 - DNA, 19 bp, Mus musculus
  siRNA target sequence for Tgm3 (NM_009374.1,1301-1319).
ctcactccattggcaaata

SEQ ID NO: 554369 - DNA, 19 bp, Mus musculus
  siRNA target sequence for Tgm3 (NM_009374.1,1561-1579).
ctgatgctcaaaaacatga

SEQ ID NO: 554370 - DNA, 19 bp, Mus musculus
  siRNA target sequence for Tgm3 (NM_009374.1,1617-1635).
ctggaccatcgtctacaat

SEQ ID NO: 554371 - DNA, 19 bp, Mus musculus
  siRNA target sequence for Tgm3 (NM_009374.1,1659-1677).
gaaggactcagccacaata

SEQ ID NO: 554372 - DNA, 19 bp, Mus musculus
  siRNA target sequence for Tgm3 (NM_009374.1,1663-1681).
gactcagccacaatatcct

SEQ ID NO: 554373 - DNA, 19 bp, Mus musculus
  siRNA target sequence for Tgm3 (NM_009374.1,1716-1734).
gatcgcatactctcagtat

SEQ ID NO: 554374 - DNA, 19 bp, Mus musculus
  siRNA target sequence for Tgm3 (NM_009374.1,1720-1738).
gcatactctcagtatgaga

SEQ ID NO: 554375 - DNA, 19 bp, Mus musculus
  siRNA target sequence for Tgm3 (NM_009374.1,1972-1990).
gcagcctcaagattgatgt

SEQ ID NO: 554376 - DNA, 19 bp, Mus musculus
  siRNA target sequence for Tgm3 (NM_009374.1,2018-2036).
cccgcatccgatttgagat

SEQ ID NO: 554377 - DNA, 19 bp, Mus musculus
  siRNA target sequence for Tgm3 (NM_009374.1,2019-2037).
ccgcatccgatttgagatt

SEQ ID NO: 554378 - DNA, 19 bp, Mus musculus
  siRNA target sequence for Tgm3 (NM_009374.1,2020-2038).
cgcatccgatttgagattt

SEQ ID NO: 554379 - DNA, 19 bp, Mus musculus
  siRNA target sequence for Tgm3 (NM_009374.1,2021-2039).
gcatccgatttgagatttt

SEQ ID NO: 554380 - DNA, 19 bp, Mus musculus
  siRNA target sequence for Tgm3 (NM_009374.1,2062-2080).
caactgctcgctgactttt

SEQ ID NO: 554381 - DNA, 19 bp, Mus musculus
  siRNA target sequence for Tgm3 (NM_009374.1,2071-2089).
gctgacttttcctgcaata

SEQ ID NO: 554382 - DNA, 19 bp, Mus musculus
  siRNA target sequence for Thbd (NM_009378.1,319-337).
gcctgcaaggacatttgat

SEQ ID NO: 554383 - DNA, 19 bp, Mus musculus
  siRNA target sequence for Thbd (NM_009378.1,321-339).
ctgcaaggacatttgatga

SEQ ID NO: 554384 - DNA, 19 bp, Mus musculus
  siRNA target sequence for Thbd (NM_009378.1,406-424).
ggccctggatcggtttaca

SEQ ID NO: 554385 - DNA, 19 bp, Mus musculus
  siRNA target sequence for Thbd (NM_009378.1,481-499).
gggttactggcgataacca

SEQ ID NO: 554386 - DNA, 19 bp, Mus musculus
  siRNA target sequence for Thbd (NM_009378.1,680-698).
gcctctgacggtgaatact

SEQ ID NO: 554387 - DNA, 19 bp, Mus musculus
  siRNA target sequence for Thbd (NM_009378.1,752-770).
cagtggtgcggactttcaa

SEQ ID NO: 554388 - DNA, 19 bp, Mus musculus
  siRNA target sequence for Thbd (NM_009378.1,912-930).
gagtacttgtgcaatagga

SEQ ID NO: 554389 - DNA, 19 bp, Mus musculus
  siRNA target sequence for Thbd (NM_009378.1,1022-1040).
cgaactctgcgagcatttt

SEQ ID NO: 554390 - DNA, 19 bp, Mus musculus
  siRNA target sequence for Thbd (NM_009378.1,1023-1041).
gaactctgcgagcattttt

SEQ ID NO: 554391 - DNA, 19 bp, Mus musculus
  siRNA target sequence for Thbd (NM_009378.1,1065-1083).
ggctcttactcctgtatgt

SEQ ID NO: 554392 - DNA, 19 bp, Mus musculus
  siRNA target sequence for Thbd (NM_009378.1,1257-1275).
ccgtgtttcggatctaact

SEQ ID NO: 554393 - DNA, 19 bp, Mus musculus
  siRNA target sequence for Thbd (NM_009378.1,1267-1285).
gatctaactgcgagtttca

SEQ ID NO: 554394 - DNA, 19 bp, Mus musculus
  siRNA target sequence for Thbd (NM_009378.1,1356-1374).
ccgcacaagtgcgaaatgt

SEQ ID NO: 554395 - DNA, 19 bp, Mus musculus
  siRNA target sequence for Thbd (NM_009378.1,1357-1375).
cgcacaagtgcgaaatgtt

SEQ ID NO: 554396 - DNA, 19 bp, Mus musculus
  siRNA target sequence for Thbd (NM_009378.1,1359-1377).
cacaagtgcgaaatgttct

SEQ ID NO: 554397 - DNA, 19 bp, Mus musculus
  siRNA target sequence for Thbd (NM_009378.1,1465-1483).
ccgtatgcacggacattga

SEQ ID NO: 554398 - DNA, 19 bp, Mus musculus
  siRNA target sequence for Thbd (NM_009378.1,1466-1484).
cgtatgcacggacattgat

SEQ ID NO: 554399 - DNA, 19 bp, Mus musculus
  siRNA target sequence for Thbd (NM_009378.1,1489-1507).
gcagtcaaggcgaatgctt

SEQ ID NO: 554400 - DNA, 19 bp, Mus musculus
  siRNA target sequence for Thbd (NM_009378.1,1500-1518).
gaatgcttcaccagtgaat

SEQ ID NO: 554401 - DNA, 19 bp, Mus musculus
  siRNA target sequence for Thbd (NM_009378.1,1872-1890).
cggacgctgcagaagttct

SEQ ID NO: 554402 - DNA, 19 bp, Mus musculus
  siRNA target sequence for Thbs1 (NM_011580.1,75-93).
gggagataacggtgtgttt

SEQ ID NO: 554403 - DNA, 19 bp, Mus musculus
  siRNA target sequence for Thbs1 (NM_011580.1,77-95).
gagataacggtgtgtttga

SEQ ID NO: 554404 - DNA, 19 bp, Mus musculus
  siRNA target sequence for Thbs1 (NM_011580.1,79-97).
gataacggtgtgtttgaca

SEQ ID NO: 554405 - DNA, 19 bp, Mus musculus
  siRNA target sequence for Thbs1 (NM_011580.1,144-162).
ggtgaagggccaagatcta

SEQ ID NO: 554406 - DNA, 19 bp, Mus musculus
  siRNA target sequence for Thbs1 (NM_011580.1,145-163).
gtgaagggccaagatctat

SEQ ID NO: 554407 - DNA, 19 bp, Mus musculus
  siRNA target sequence for Thbs1 (NM_011580.1,171-189).
cgccttccgcattgagaat

SEQ ID NO: 554408 - DNA, 19 bp, Mus musculus
  siRNA target sequence for Thbs1 (NM_011580.1,203-221).
ccgctgtgccggatgacaa

SEQ ID NO: 554409 - DNA, 19 bp, Mus musculus
  siRNA target sequence for Thbs1 (NM_011580.1,206-224).
ctgtgccggatgacaagtt

SEQ ID NO: 554410 - DNA, 19 bp, Mus musculus
  siRNA target sequence for Thbs1 (NM_011580.1,250-268).
gccgacaaaggcttcatct

SEQ ID NO: 554411 - DNA, 19 bp, Mus musculus
  siRNA target sequence for Thbs1 (NM_011580.1,251-269).
ccgacaaaggcttcatctt

SEQ ID NO: 554412 - DNA, 19 bp, Mus musculus
  siRNA target sequence for Thbs1 (NM_011580.1,462-480).
gagcatcacgctgtttgtt

SEQ ID NO: 554413 - DNA, 19 bp, Mus musculus
  siRNA target sequence for Thbs1 (NM_011580.1,464-482).
gcatcacgctgtttgttca

SEQ ID NO: 554414 - DNA, 19 bp, Mus musculus
  siRNA target sequence for Thbs1 (NM_011580.1,489-507).
ccgggctcaactctacata

SEQ ID NO: 554415 - DNA, 19 bp, Mus musculus
  siRNA target sequence for Thbs1 (NM_011580.1,491-509).
gggctcaactctacataga

SEQ ID NO: 554416 - DNA, 19 bp, Mus musculus
  siRNA target sequence for Thbs1 (NM_011580.1,493-511).
gctcaactctacatagact

SEQ ID NO: 554417 - DNA, 19 bp, Mus musculus
  siRNA target sequence for Thbs1 (NM_011580.1,584-602).
ccaggctccgagttgcaaa

SEQ ID NO: 554418 - DNA, 19 bp, Mus musculus
  siRNA target sequence for Thbs1 (NM_011580.1,788-806).
caaaggacctccaagctat

SEQ ID NO: 554419 - DNA, 19 bp, Mus musculus
  siRNA target sequence for Thbs1 (NM_011580.1,792-810).
ggacctccaagctatctgt

SEQ ID NO: 554420 - DNA, 19 bp, Mus musculus
  siRNA target sequence for Thbs1 (NM_011580.1,886-904).
gacagcatccgaaaagtga

SEQ ID NO: 554421 - DNA, 19 bp, Mus musculus
  siRNA target sequence for Thbs1 (NM_011580.1,1022-1040).
gccagaactcggttaccat

SEQ ID NO: 554422 - DNA, 19 bp, Mus musculus
  siRNA target sequence for Thbs1 (NM_011580.1,1219-1237).
gacagcctcaacaacagat

SEQ ID NO: 554423 - DNA, 19 bp, Mus musculus
  siRNA target sequence for Thbs1 (NM_011580.1,1272-1290).
cattcaggagtgtgacaaa

SEQ ID NO: 554424 - DNA, 19 bp, Mus musculus
  siRNA target sequence for Thbs1 (NM_011580.1,1276-1294).
caggagtgtgacaaaagat

SEQ ID NO: 554425 - DNA, 19 bp, Mus musculus
  siRNA target sequence for Thbs1 (NM_011580.1,1354-1372).
ggtgacggtgtgatcacaa

SEQ ID NO: 554426 - DNA, 19 bp, Mus musculus
  siRNA target sequence for Thbs1 (NM_011580.1,1461-1479).
cgcctgcccaattaatgga

SEQ ID NO: 554427 - DNA, 19 bp, Mus musculus
  siRNA target sequence for Thbs1 (NM_011580.1,1541-1559).
gacgcagccgactctgtaa

SEQ ID NO: 554428 - DNA, 19 bp, Mus musculus
  siRNA target sequence for Thbs1 (NM_011580.1,1594-1612).
gttggcgatgtgacagaaa

SEQ ID NO: 554429 - DNA, 19 bp, Mus musculus
  siRNA target sequence for Thbs1 (NM_011580.1,1599-1617).
cgatgtgacagaaaatcaa

SEQ ID NO: 554430 - DNA, 19 bp, Mus musculus
  siRNA target sequence for Thbs1 (NM_011580.1,1764-1782).
cgtcgatgagtgcaaagaa

SEQ ID NO: 554431 - DNA, 19 bp, Mus musculus
  siRNA target sequence for Thbs1 (NM_011580.1,1800-1818).
caatcacaacggagaacat

SEQ ID NO: 554432 - DNA, 19 bp, Mus musculus
  siRNA target sequence for Thbs1 (NM_011580.1,1961-1979).
cgcatgactgcaacaagaa

SEQ ID NO: 554433 - DNA, 19 bp, Mus musculus
  siRNA target sequence for Thbs1 (NM_011580.1,2085-2103).
ggacggctggcctaatgaa

SEQ ID NO: 554434 - DNA, 19 bp, Mus musculus
  siRNA target sequence for Thbs1 (NM_011580.1,2086-2104).
gacggctggcctaatgaaa

SEQ ID NO: 554435 - DNA, 19 bp, Mus musculus
  siRNA target sequence for Thbs1 (NM_011580.1,2125-2143).
gcaacctaccactgcaaaa

SEQ ID NO: 554436 - DNA, 19 bp, Mus musculus
  siRNA target sequence for Thbs1 (NM_011580.1,2126-2144).
caacctaccactgcaaaaa

SEQ ID NO: 554437 - DNA, 19 bp, Mus musculus
  siRNA target sequence for Thbs1 (NM_011580.1,2431-2449).
gacaactgccagtacgttt

SEQ ID NO: 554438 - DNA, 19 bp, Mus musculus
  siRNA target sequence for Thbs1 (NM_011580.1,2643-2661).
ccaggccgaccatgataaa

SEQ ID NO: 554439 - DNA, 19 bp, Mus musculus
  siRNA target sequence for Thbs1 (NM_011580.1,2646-2664).
ggccgaccatgataaagat

SEQ ID NO: 554440 - DNA, 19 bp, Mus musculus
  siRNA target sequence for Thbs1 (NM_011580.1,2880-2898).
ccagatgattcctctagat

SEQ ID NO: 554441 - DNA, 19 bp, Mus musculus
  siRNA target sequence for Thbs1 (NM_011580.1,2937-2955).
ccgccatcagggcaaagaa

SEQ ID NO: 554442 - DNA, 19 bp, Mus musculus
  siRNA target sequence for Thbs1 (NM_011580.1,2984-3002).
gacttgctgtaggttatga

SEQ ID NO: 554443 - DNA, 19 bp, Mus musculus
  siRNA target sequence for Thbs1 (NM_011580.1,2992-3010).
gtaggttatgatgagttta

SEQ ID NO: 554444 - DNA, 19 bp, Mus musculus
  siRNA target sequence for Thbs1 (NM_011580.1,3300-3318).
cggctggaaagatttcact

SEQ ID NO: 554445 - DNA, 19 bp, Mus musculus
  siRNA target sequence for Thbs1 (NM_011580.1,3346-3364).
ccaaagaccggttatatca

SEQ ID NO: 554446 - DNA, 19 bp, Mus musculus
  siRNA target sequence for Thbs1 (NM_011580.1,3404-3422).
cgggacccatctatgacaa

SEQ ID NO: 554447 - DNA, 19 bp, Mus musculus
  siRNA target sequence for Thbs2 (NM_011581.1,279-297).
cacgtcaaggacacttcat

SEQ ID NO: 554448 - DNA, 19 bp, Mus musculus
  siRNA target sequence for Thbs2 (NM_011581.1,281-299).
cgtcaaggacacttcattt

SEQ ID NO: 554449 - DNA, 19 bp, Mus musculus
  siRNA target sequence for Thbs2 (NM_011581.1,384-402).
cgttttgtacggtttgact

SEQ ID NO: 554450 - DNA, 19 bp, Mus musculus
  siRNA target sequence for Thbs2 (NM_011581.1,385-403).
gttttgtacggtttgacta

SEQ ID NO: 554451 - DNA, 19 bp, Mus musculus
  siRNA target sequence for Thbs2 (NM_011581.1,410-428).
cccagtgaacacagatgat

SEQ ID NO: 554452 - DNA, 19 bp, Mus musculus
  siRNA target sequence for Thbs2 (NM_011581.1,541-559).
cctcccagaggcagtttga

SEQ ID NO: 554453 - DNA, 19 bp, Mus musculus
  siRNA target sequence for Thbs2 (NM_011581.1,739-757).
ccctggaagaaccattcta

SEQ ID NO: 554454 - DNA, 19 bp, Mus musculus
  siRNA target sequence for Thbs2 (NM_011581.1,755-773).
ctatgagcagctagaagta

SEQ ID NO: 554455 - DNA, 19 bp, Mus musculus
  siRNA target sequence for Thbs2 (NM_011581.1,925-943).
ccatcagtgaacatacaga

SEQ ID NO: 554456 - DNA, 19 bp, Mus musculus
  siRNA target sequence for Thbs2 (NM_011581.1,1101-1119).
gagagagtgtctagtgata

SEQ ID NO: 554457 - DNA, 19 bp, Mus musculus
  siRNA target sequence for Thbs2 (NM_011581.1,1181-1199).
gcaggagggccgaatcttt

SEQ ID NO: 554458 - DNA, 19 bp, Mus musculus
  siRNA target sequence for Thbs2 (NM_011581.1,1189-1207).
gccgaatctttgcagaaaa

SEQ ID NO: 554459 - DNA, 19 bp, Mus musculus
  siRNA target sequence for Thbs2 (NM_011581.1,1190-1208).
ccgaatctttgcagaaaat

SEQ ID NO: 554460 - DNA, 19 bp, Mus musculus
  siRNA target sequence for Thbs2 (NM_011581.1,1214-1232).
ctgggttgtggatagttgt

SEQ ID NO: 554461 - DNA, 19 bp, Mus musculus
  siRNA target sequence for Thbs2 (NM_011581.1,1237-1255).
catgcacctgcaagaaatt

SEQ ID NO: 554462 - DNA, 19 bp, Mus musculus
  siRNA target sequence for Thbs2 (NM_011581.1,1240-1258).
gcacctgcaagaaatttaa

SEQ ID NO: 554463 - DNA, 19 bp, Mus musculus
  siRNA target sequence for Thbs2 (NM_011581.1,1427-1445).
gagaggccggtcttgtgat

SEQ ID NO: 554464 - DNA, 19 bp, Mus musculus
  siRNA target sequence for Thbs2 (NM_011581.1,1681-1699).
gtgatccgtgcccaattga

SEQ ID NO: 554465 - DNA, 19 bp, Mus musculus
  siRNA target sequence for Thbs2 (NM_011581.1,1836-1854).
caccaaatgtgcaacaaga

SEQ ID NO: 554466 - DNA, 19 bp, Mus musculus
  siRNA target sequence for Thbs2 (NM_011581.1,1839-1857).
caaatgtgcaacaagagaa

SEQ ID NO: 554467 - DNA, 19 bp, Mus musculus
  siRNA target sequence for Thbs2 (NM_011581.1,1863-1881).
cctattgatgggtgcttat

SEQ ID NO: 554468 - DNA, 19 bp, Mus musculus
  siRNA target sequence for Thbs2 (NM_011581.1,1877-1895).
cttatccaacccgtgtttt

SEQ ID NO: 554469 - DNA, 19 bp, Mus musculus
  siRNA target sequence for Thbs2 (NM_011581.1,2001-2019).
gctgtggtcacagatattt

SEQ ID NO: 554470 - DNA, 19 bp, Mus musculus
  siRNA target sequence for Thbs2 (NM_011581.1,2396-2414).
cgggcaggaggattttgat

SEQ ID NO: 554471 - DNA, 19 bp, Mus musculus
  siRNA target sequence for Thbs2 (NM_011581.1,2495-2513).
cttcaatccccgtcaatta

SEQ ID NO: 554472 - DNA, 19 bp, Mus musculus
  siRNA target sequence for Thbs2 (NM_011581.1,2503-2521).
cccgtcaattagactatga

SEQ ID NO: 554473 - DNA, 19 bp, Mus musculus
  siRNA target sequence for Thbs2 (NM_011581.1,2579-2597).
gatcgacacagacaacaat

SEQ ID NO: 554474 - DNA, 19 bp, Mus musculus
  siRNA target sequence for Thbs2 (NM_011581.1,2628-2646).
gacggagacgatgttttca

SEQ ID NO: 554475 - DNA, 19 bp, Mus musculus
  siRNA target sequence for Thbs2 (NM_011581.1,2645-2663).
caatgagcgagacaattgt

SEQ ID NO: 554476 - DNA, 19 bp, Mus musculus
  siRNA target sequence for Thbs2 (NM_011581.1,2651-2669).
gcgagacaattgtccatat

SEQ ID NO: 554477 - DNA, 19 bp, Mus musculus
  siRNA target sequence for Thbs2 (NM_011581.1,2655-2673).
gacaattgtccatatgtct

SEQ ID NO: 554478 - DNA, 19 bp, Mus musculus
  siRNA target sequence for Thbs2 (NM_011581.1,2756-2774).
gatcgatcaggacaatgat

SEQ ID NO: 554479 - DNA, 19 bp, Mus musculus
  siRNA target sequence for Thbs2 (NM_011581.1,2798-2816).
caatgaggacatagatgat

SEQ ID NO: 554480 - DNA, 19 bp, Mus musculus
  siRNA target sequence for Thbs2 (NM_011581.1,2994-3012).
gacggccgaggtgacattt

SEQ ID NO: 554481 - DNA, 19 bp, Mus musculus
  siRNA target sequence for Thbs2 (NM_011581.1,2996-3014).
cggccgaggtgacatttgt

SEQ ID NO: 554482 - DNA, 19 bp, Mus musculus
  siRNA target sequence for Thbs2 (NM_011581.1,2997-3015).
ggccgaggtgacatttgta

SEQ ID NO: 554483 - DNA, 19 bp, Mus musculus
  siRNA target sequence for Thbs2 (NM_011581.1,2998-3016).
gccgaggtgacatttgtaa

SEQ ID NO: 554484 - DNA, 19 bp, Mus musculus
  siRNA target sequence for Thbs2 (NM_011581.1,2999-3017).
ccgaggtgacatttgtaaa

SEQ ID NO: 554485 - DNA, 19 bp, Mus musculus
  siRNA target sequence for Thbs2 (NM_011581.1,3001-3019).
gaggtgacatttgtaaaga

SEQ ID NO: 554486 - DNA, 19 bp, Mus musculus
  siRNA target sequence for Thbs2 (NM_011581.1,3008-3026).
catttgtaaagatgacttt

SEQ ID NO: 554487 - DNA, 19 bp, Mus musculus
  siRNA target sequence for Thbs2 (NM_011581.1,3124-3142).
ccaaggggaccacacaaat

SEQ ID NO: 554488 - DNA, 19 bp, Mus musculus
  siRNA target sequence for Thbs2 (NM_011581.1,3128-3146).
ggggaccacacaaattgat

SEQ ID NO: 554489 - DNA, 19 bp, Mus musculus
  siRNA target sequence for Thbs2 (NM_011581.1,3398-3416).
ctctggtgtgtcactcaaa

SEQ ID NO: 554490 - DNA, 19 bp, Mus musculus
  siRNA target sequence for Thbs2 (NM_011581.1,3505-3523).
ggcatgaccccaaaaacat

SEQ ID NO: 554491 - DNA, 19 bp, Mus musculus
  siRNA target sequence for Thbs2 (NM_011581.1,3580-3598).
gctacatgagagtcttagt

SEQ ID NO: 554492 - DNA, 19 bp, Mus musculus
  siRNA target sequence for Thbs2 (NM_011581.1,3620-3638).
ggctgactcaggaccaatt

SEQ ID NO: 554493 - DNA, 19 bp, Mus musculus
  siRNA target sequence for Thbs2 (NM_011581.1,3621-3639).
gctgactcaggaccaattt

SEQ ID NO: 554494 - DNA, 19 bp, Mus musculus
  siRNA target sequence for Thbs2 (NM_011581.1,3622-3640).
ctgactcaggaccaattta

SEQ ID NO: 554495 - DNA, 19 bp, Mus musculus
  siRNA target sequence for Thbs2 (NM_011581.1,3634-3652).
caatttatgaccaaaccta

SEQ ID NO: 554496 - DNA, 19 bp, Mus musculus
  siRNA target sequence for Thbs2 (NM_011581.1,3661-3679).
gacggctgggcctgtttgt

SEQ ID NO: 554497 - DNA, 19 bp, Mus musculus
  siRNA target sequence for Thbs2 (NM_011581.1,3664-3682).
ggctgggcctgtttgtctt

SEQ ID NO: 554498 - DNA, 19 bp, Mus musculus
  siRNA target sequence for Thbs2 (NM_011581.1,3685-3703).
cccaagagatggtctattt

SEQ ID NO: 554499 - DNA, 19 bp, Mus musculus
  siRNA target sequence for Thbs3 (NM_013691.1,104-122).
gtcaggaccttcaggtaat

SEQ ID NO: 554500 - DNA, 19 bp, Mus musculus
  siRNA target sequence for Thbs3 (NM_013691.1,534-552).
cagtggactggagattaga

SEQ ID NO: 554501 - DNA, 19 bp, Mus musculus
  siRNA target sequence for Thbs3 (NM_013691.1,585-603).
ctttgtggaatcgatgaaa

SEQ ID NO: 554502 - DNA, 19 bp, Mus musculus
  siRNA target sequence for Thbs3 (NM_013691.1,589-607).
gtggaatcgatgaaaatta

SEQ ID NO: 554503 - DNA, 19 bp, Mus musculus
  siRNA target sequence for Thbs3 (NM_013691.1,631-649).
gtaggagccctgagtgaat

SEQ ID NO: 554504 - DNA, 19 bp, Mus musculus
  siRNA target sequence for Thbs3 (NM_013691.1,661-679).
ggagacgactccattcaca

SEQ ID NO: 554505 - DNA, 19 bp, Mus musculus
  siRNA target sequence for Thbs3 (NM_013691.1,689-707).
ccagcgcactgcaatccat

SEQ ID NO: 554506 - DNA, 19 bp, Mus musculus
  siRNA target sequence for Thbs3 (NM_013691.1,693-711).
cgcactgcaatccattcta

SEQ ID NO: 554507 - DNA, 19 bp, Mus musculus
  siRNA target sequence for Thbs3 (NM_013691.1,788-806).
gagaccaggtgaaggaaat

SEQ ID NO: 554508 - DNA, 19 bp, Mus musculus
  siRNA target sequence for Thbs3 (NM_013691.1,905-923).
gtatggaagtgtatgagta

SEQ ID NO: 554509 - DNA, 19 bp, Mus musculus
  siRNA target sequence for Thbs3 (NM_013691.1,1137-1155).
ggtctgcaatgacattgat

SEQ ID NO: 554510 - DNA, 19 bp, Mus musculus
  siRNA target sequence for Thbs3 (NM_013691.1,1149-1167).
cattgatgaatgtaatgat

SEQ ID NO: 554511 - DNA, 19 bp, Mus musculus
  siRNA target sequence for Thbs3 (NM_013691.1,1180-1198).
ggctgtgacccaaattcca

SEQ ID NO: 554512 - DNA, 19 bp, Mus musculus
  siRNA target sequence for Thbs3 (NM_013691.1,1181-1199).
gctgtgacccaaattccat

SEQ ID NO: 554513 - DNA, 19 bp, Mus musculus
  siRNA target sequence for Thbs3 (NM_013691.1,1209-1227).
cacggtggggtctttcaaa

SEQ ID NO: 554514 - DNA, 19 bp, Mus musculus
  siRNA target sequence for Thbs3 (NM_013691.1,1323-1341).
ccacgcccactgtctcttt

SEQ ID NO: 554515 - DNA, 19 bp, Mus musculus
  siRNA target sequence for Thbs3 (NM_013691.1,1326-1344).
cgcccactgtctctttgaa

SEQ ID NO: 554516 - DNA, 19 bp, Mus musculus
  siRNA target sequence for Thbs3 (NM_013691.1,1406-1424).
ggcctgacacagatataga

SEQ ID NO: 554517 - DNA, 19 bp, Mus musculus
  siRNA target sequence for Thbs3 (NM_013691.1,1442-1460).
ctcttccctgcatggataa

SEQ ID NO: 554518 - DNA, 19 bp, Mus musculus
  siRNA target sequence for Thbs3 (NM_013691.1,1444-1462).
cttccctgcatggataaca

SEQ ID NO: 554519 - DNA, 19 bp, Mus musculus
  siRNA target sequence for Thbs3 (NM_013691.1,1447-1465).
ccctgcatggataacaaca

SEQ ID NO: 554520 - DNA, 19 bp, Mus musculus
  siRNA target sequence for Thbs3 (NM_013691.1,1468-1486).
cactgcaagcaggacaatt

SEQ ID NO: 554521 - DNA, 19 bp, Mus musculus
  siRNA target sequence for Thbs3 (NM_013691.1,1559-1577).
ctgacggggatggtatcaa

SEQ ID NO: 554522 - DNA, 19 bp, Mus musculus
  siRNA target sequence for Thbs3 (NM_013691.1,1561-1579).
gacggggatggtatcaaga

SEQ ID NO: 554523 - DNA, 19 bp, Mus musculus
  siRNA target sequence for Thbs3 (NM_013691.1,1656-1674).
cgacaactgtcccaatgtt

SEQ ID NO: 554524 - DNA, 19 bp, Mus musculus
  siRNA target sequence for Thbs3 (NM_013691.1,1667-1685).
ccaatgttcccaacaatga

SEQ ID NO: 554525 - DNA, 19 bp, Mus musculus
  siRNA target sequence for Thbs3 (NM_013691.1,2035-2053).
gacggtgtcccagattaca

SEQ ID NO: 554526 - DNA, 19 bp, Mus musculus
  siRNA target sequence for Thbs3 (NM_013691.1,2077-2095).
cgcctggtacccaatccta

SEQ ID NO: 554527 - DNA, 19 bp, Mus musculus
  siRNA target sequence for Thbs3 (NM_013691.1,2078-2096).
gcctggtacccaatcctaa

SEQ ID NO: 554528 - DNA, 19 bp, Mus musculus
  siRNA target sequence for Thbs3 (NM_013691.1,2079-2097).
cctggtacccaatcctaat

SEQ ID NO: 554529 - DNA, 19 bp, Mus musculus
  siRNA target sequence for Thbs3 (NM_013691.1,2083-2101).
gtacccaatcctaatcaga

SEQ ID NO: 554530 - DNA, 19 bp, Mus musculus
  siRNA target sequence for Thbs3 (NM_013691.1,2413-2431).
gcgggcttcctcttcagtt

SEQ ID NO: 554531 - DNA, 19 bp, Mus musculus
  siRNA target sequence for Thbs3 (NM_013691.1,2414-2432).
cgggcttcctcttcagtta

SEQ ID NO: 554532 - DNA, 19 bp, Mus musculus
  siRNA target sequence for Thbs3 (NM_013691.1,2538-2556).
ggcagtgacatccatatct

SEQ ID NO: 554533 - DNA, 19 bp, Mus musculus
  siRNA target sequence for Thbs3 (NM_013691.1,2652-2670).
gcgagacaagacatcctat

SEQ ID NO: 554534 - DNA, 19 bp, Mus musculus
  siRNA target sequence for Thbs3 (NM_013691.1,2653-2671).
cgagacaagacatcctata

SEQ ID NO: 554535 - DNA, 19 bp, Mus musculus
  siRNA target sequence for Thbs3 (NM_013691.1,2656-2674).
gacaagacatcctatagat

SEQ ID NO: 554536 - DNA, 19 bp, Mus musculus
  siRNA target sequence for Thbs3 (NM_013691.1,2743-2761).
gcggattctggggtgatta

SEQ ID NO: 554537 - DNA, 19 bp, Mus musculus
  siRNA target sequence for Thbs3 (NM_013691.1,2744-2762).
cggattctggggtgattat

SEQ ID NO: 554538 - DNA, 19 bp, Mus musculus
  siRNA target sequence for Thbs3 (NM_013691.1,2745-2763).
ggattctggggtgattatt

SEQ ID NO: 554539 - DNA, 19 bp, Mus musculus
  siRNA target sequence for Thbs3 (NM_013691.1,2836-2854).
cagtaccgatgcaatgaca

SEQ ID NO: 554540 - DNA, 19 bp, Mus musculus
  siRNA target sequence for Thbs4 (NM_011582.1,169-187).
cacaccccaggtctttgat

SEQ ID NO: 554541 - DNA, 19 bp, Mus musculus
  siRNA target sequence for Thbs4 (NM_011582.1,174-192).
cccaggtctttgatcttct

SEQ ID NO: 554542 - DNA, 19 bp, Mus musculus
  siRNA target sequence for Thbs4 (NM_011582.1,175-193).
ccaggtctttgatcttcta

SEQ ID NO: 554543 - DNA, 19 bp, Mus musculus
  siRNA target sequence for Thbs4 (NM_011582.1,252-270).
ccctgcacgaagtctatct

SEQ ID NO: 554544 - DNA, 19 bp, Mus musculus
  siRNA target sequence for Thbs4 (NM_011582.1,254-272).
ctgcacgaagtctatctca

SEQ ID NO: 554545 - DNA, 19 bp, Mus musculus
  siRNA target sequence for Thbs4 (NM_011582.1,364-382).
gatgggacggctgaacaaa

SEQ ID NO: 554546 - DNA, 19 bp, Mus musculus
  siRNA target sequence for Thbs4 (NM_011582.1,391-409).
ccgctacctgaagaatgat

SEQ ID NO: 554547 - DNA, 19 bp, Mus musculus
  siRNA target sequence for Thbs4 (NM_011582.1,422-440).
ctggtggtgttcaacaact

SEQ ID NO: 554548 - DNA, 19 bp, Mus musculus
  siRNA target sequence for Thbs4 (NM_011582.1,765-783).
gtcaaatgacacaactgaa

SEQ ID NO: 554549 - DNA, 19 bp, Mus musculus
  siRNA target sequence for Thbs4 (NM_011582.1,823-841).
ggtcaaggaaacatcgttt

SEQ ID NO: 554550 - DNA, 19 bp, Mus musculus
  siRNA target sequence for Thbs4 (NM_011582.1,1023-1041).
gaccctgcccagatggtta

SEQ ID NO: 554551 - DNA, 19 bp, Mus musculus
  siRNA target sequence for Thbs4 (NM_011582.1,1104-1122).
gtgtgcgctgtgtgaattt

SEQ ID NO: 554552 - DNA, 19 bp, Mus musculus
  siRNA target sequence for Thbs4 (NM_011582.1,1180-1198).
gggtgtcgggatcaacttt

SEQ ID NO: 554553 - DNA, 19 bp, Mus musculus
  siRNA target sequence for Thbs4 (NM_011582.1,1184-1202).
gtcgggatcaactttgcta

SEQ ID NO: 554554 - DNA, 19 bp, Mus musculus
  siRNA target sequence for Thbs4 (NM_011582.1,1187-1205).
gggatcaactttgctaaaa

SEQ ID NO: 554555 - DNA, 19 bp, Mus musculus
  siRNA target sequence for Thbs4 (NM_011582.1,1216-1234).
ggtgtgcactgatgttgat

SEQ ID NO: 554556 - DNA, 19 bp, Mus musculus
  siRNA target sequence for Thbs4 (NM_011582.1,1454-1472).
gctggtgacggctatgtct

SEQ ID NO: 554557 - DNA, 19 bp, Mus musculus
  siRNA target sequence for Thbs4 (NM_011582.1,1497-1515).
gttaccctgatgaagaact

SEQ ID NO: 554558 - DNA, 19 bp, Mus musculus
  siRNA target sequence for Thbs4 (NM_011582.1,1731-1749).
ggatggtcctgaataatga

SEQ ID NO: 554559 - DNA, 19 bp, Mus musculus
  siRNA target sequence for Thbs4 (NM_011582.1,1864-1882).
ggatcgggatggtgatgat

SEQ ID NO: 554560 - DNA, 19 bp, Mus musculus
  siRNA target sequence for Thbs4 (NM_011582.1,1930-1948).
gtcggatgtggataacgat

SEQ ID NO: 554561 - DNA, 19 bp, Mus musculus
  siRNA target sequence for Thbs4 (NM_011582.1,2044-2062).
gctggacactgacaaagat

SEQ ID NO: 554562 - DNA, 19 bp, Mus musculus
  siRNA target sequence for Thbs4 (NM_011582.1,2060-2078).
gatgggatcggcgatgaat

SEQ ID NO: 554563 - DNA, 19 bp, Mus musculus
  siRNA target sequence for Thbs4 (NM_011582.1,2064-2082).
ggatcggcgatgaatgtga

SEQ ID NO: 554564 - DNA, 19 bp, Mus musculus
  siRNA target sequence for Thbs4 (NM_011582.1,2065-2083).
gatcggcgatgaatgtgat

SEQ ID NO: 554565 - DNA, 19 bp, Mus musculus
  siRNA target sequence for Thbs4 (NM_011582.1,2182-2200).
cggggtaggagatatctgt

SEQ ID NO: 554566 - DNA, 19 bp, Mus musculus
  siRNA target sequence for Thbs4 (NM_011582.1,2221-2239).
ccaggtcatcgatcacatt

SEQ ID NO: 554567 - DNA, 19 bp, Mus musculus
  siRNA target sequence for Thbs4 (NM_011582.1,2224-2242).
ggtcatcgatcacattgat

SEQ ID NO: 554568 - DNA, 19 bp, Mus musculus
  siRNA target sequence for Thbs4 (NM_011582.1,2415-2433).
catttaacggagttgactt

SEQ ID NO: 554569 - DNA, 19 bp, Mus musculus
  siRNA target sequence for Thbs4 (NM_011582.1,2458-2476).
ccagacagatgatgactat

SEQ ID NO: 554570 - DNA, 19 bp, Mus musculus
  siRNA target sequence for Thbs4 (NM_011582.1,2602-2620).
ggctgtgaagtctaaaact

SEQ ID NO: 554571 - DNA, 19 bp, Mus musculus
  siRNA target sequence for Thbs4 (NM_011582.1,2773-2791).
cagggtgcgcttttatgaa

SEQ ID NO: 554572 - DNA, 19 bp, Mus musculus
  siRNA target sequence for Tkt (NM_009388.2,251-269).
gcagcgctgccgagatcat

SEQ ID NO: 554573 - DNA, 19 bp, Mus musculus
  siRNA target sequence for Tkt (NM_009388.2,314-332).
cccgaaaccctcacaatga

SEQ ID NO: 554574 - DNA, 19 bp, Mus musculus
  siRNA target sequence for Tkt (NM_009388.2,321-339).
ccctcacaatgatcgattt

SEQ ID NO: 554575 - DNA, 19 bp, Mus musculus
  siRNA target sequence for Tkt (NM_009388.2,323-341).
ctcacaatgatcgatttgt

SEQ ID NO: 554576 - DNA, 19 bp, Mus musculus
  siRNA target sequence for Tkt (NM_009388.2,353-371).
gccatgcagctcccatttt

SEQ ID NO: 554577 - DNA, 19 bp, Mus musculus
  siRNA target sequence for Tkt (NM_009388.2,559-577).
gccagctaccgagtctatt

SEQ ID NO: 554578 - DNA, 19 bp, Mus musculus
  siRNA target sequence for Tkt (NM_009388.2,563-581).
gctaccgagtctattgcat

SEQ ID NO: 554579 - DNA, 19 bp, Mus musculus
  siRNA target sequence for Tkt (NM_009388.2,628-646).
gcctttgctggaatttaca

SEQ ID NO: 554580 - DNA, 19 bp, Mus musculus
  siRNA target sequence for Tkt (NM_009388.2,629-647).
cctttgctggaatttacaa

SEQ ID NO: 554581 - DNA, 19 bp, Mus musculus
  siRNA target sequence for Tkt (NM_009388.2,658-676).
ctcgttgccatttttgaca

SEQ ID NO: 554582 - DNA, 19 bp, Mus musculus
  siRNA target sequence for Tkt (NM_009388.2,1006-1024).
ccatccgtggacattgcta

SEQ ID NO: 554583 - DNA, 19 bp, Mus musculus
  siRNA target sequence for Tkt (NM_009388.2,1007-1025).
catccgtggacattgctaa

SEQ ID NO: 554584 - DNA, 19 bp, Mus musculus
  siRNA target sequence for Tkt (NM_009388.2,1116-1134).
cgccagtgaccgtatcatt

SEQ ID NO: 554585 - DNA, 19 bp, Mus musculus
  siRNA target sequence for Tkt (NM_009388.2,1169-1187).
cggagctcttcaaaaagga

SEQ ID NO: 554586 - DNA, 19 bp, Mus musculus
  siRNA target sequence for Tkt (NM_009388.2,1188-1206).
gcacccagaccggttcatt

SEQ ID NO: 554587 - DNA, 19 bp, Mus musculus
  siRNA target sequence for Tkt (NM_009388.2,1192-1210).
ccagaccggttcattgagt

SEQ ID NO: 554588 - DNA, 19 bp, Mus musculus
  siRNA target sequence for Tkt (NM_009388.2,1211-1229).
gctacattgccgagcaaaa

SEQ ID NO: 554589 - DNA, 19 bp, Mus musculus
  siRNA target sequence for Tkt (NM_009388.2,1501-1519).
gagttagcagccaacacaa

SEQ ID NO: 554590 - DNA, 19 bp, Mus musculus
  siRNA target sequence for Tkt (NM_009388.2,1641-1659).
gatcggggctggtgtaact

SEQ ID NO: 554591 - DNA, 19 bp, Mus musculus
  siRNA target sequence for Tkt (NM_009388.2,1767-1785).
ctctgcccgagcaaccaaa

SEQ ID NO: 554592 - DNA, 19 bp, Mus musculus
  siRNA target sequence for Tkt (NM_009388.2,1799-1817).
ccgtggaggaccactacta

SEQ ID NO: 554593 - DNA, 19 bp, Mus musculus
  siRNA target sequence for Tll (NM_009390.1,652-670).
ggtggtctcgggtattgtt

SEQ ID NO: 554594 - DNA, 19 bp, Mus musculus
  siRNA target sequence for Tll (NM_009390.1,653-671).
gtggtctcgggtattgttt

SEQ ID NO: 554595 - DNA, 19 bp, Mus musculus
  siRNA target sequence for Tll (NM_009390.1,693-711).
gcgctggcctcgattatga

SEQ ID NO: 554596 - DNA, 19 bp, Mus musculus
  siRNA target sequence for Tll (NM_009390.1,694-712).
cgctggcctcgattatgat

SEQ ID NO: 554597 - DNA, 19 bp, Mus musculus
  siRNA target sequence for Tll (NM_009390.1,696-714).
ctggcctcgattatgatta

SEQ ID NO: 554598 - DNA, 19 bp, Mus musculus
  siRNA target sequence for Tll (NM_009390.1,700-718).
cctcgattatgattacact

SEQ ID NO: 554599 - DNA, 19 bp, Mus musculus
  siRNA target sequence for Tll (NM_009390.1,701-719).
ctcgattatgattacactt

SEQ ID NO: 554600 - DNA, 19 bp, Mus musculus
  siRNA target sequence for Tll (NM_009390.1,703-721).
cgattatgattacactttt

SEQ ID NO: 554601 - DNA, 19 bp, Mus musculus
  siRNA target sequence for Tll (NM_009390.1,739-757).
caaaacggagcctatagat

SEQ ID NO: 554602 - DNA, 19 bp, Mus musculus
  siRNA target sequence for Tll (NM_009390.1,744-762).
cggagcctatagattacaa

SEQ ID NO: 554603 - DNA, 19 bp, Mus musculus
  siRNA target sequence for Tll (NM_009390.1,796-814).
catcgccttagatgatgaa

SEQ ID NO: 554604 - DNA, 19 bp, Mus musculus
  siRNA target sequence for Tll (NM_009390.1,801-819).
ccttagatgatgaagactt

SEQ ID NO: 554605 - DNA, 19 bp, Mus musculus
  siRNA target sequence for Tll (NM_009390.1,859-877).
gagcccctttggaaaactt

SEQ ID NO: 554606 - DNA, 19 bp, Mus musculus
  siRNA target sequence for Tll (NM_009390.1,926-944).
ggggcactctaccaactta

SEQ ID NO: 554607 - DNA, 19 bp, Mus musculus
  siRNA target sequence for Tll (NM_009390.1,927-945).
gggcactctaccaacttat

SEQ ID NO: 554608 - DNA, 19 bp, Mus musculus
  siRNA target sequence for Tll (NM_009390.1,941-959).
cttatagagaggatcagaa

SEQ ID NO: 554609 - DNA, 19 bp, Mus musculus
  siRNA target sequence for Tll (NM_009390.1,971-989).
ggcttggagcaaaataaca

SEQ ID NO: 554610 - DNA, 19 bp, Mus musculus
  siRNA target sequence for Tll (NM_009390.1,997-1015).
gggaaaagcacctccaaaa

SEQ ID NO: 554611 - DNA, 19 bp, Mus musculus
  siRNA target sequence for Tll (NM_009390.1,1189-1207).
cactgagagaagtgatgaa

SEQ ID NO: 554612 - DNA, 19 bp, Mus musculus
  siRNA target sequence for Tll (NM_009390.1,1384-1402).
caaccatgtcaccatcatt

SEQ ID NO: 554613 - DNA, 19 bp, Mus musculus
  siRNA target sequence for Tll (NM_009390.1,1467-1485).
ctcttggggaaagatatga

SEQ ID NO: 554614 - DNA, 19 bp, Mus musculus
  siRNA target sequence for Tll (NM_009390.1,1469-1487).
cttggggaaagatatgatt

SEQ ID NO: 554615 - DNA, 19 bp, Mus musculus
  siRNA target sequence for Tll (NM_009390.1,1524-1542).
caagagggatgtttttaga

SEQ ID NO: 554616 - DNA, 19 bp, Mus musculus
  siRNA target sequence for Tll (NM_009390.1,1550-1568).
ctcccctcccgtgatgata

SEQ ID NO: 554617 - DNA, 19 bp, Mus musculus
  siRNA target sequence for Tll (NM_009390.1,1552-1570).
cccctcccgtgatgataat

SEQ ID NO: 554618 - DNA, 19 bp, Mus musculus
  siRNA target sequence for Tll (NM_009390.1,1592-1610).
caacggacccggttaagca

SEQ ID NO: 554619 - DNA, 19 bp, Mus musculus
  siRNA target sequence for Tll (NM_009390.1,1628-1646).
gcaagaaagctgtatcgat

SEQ ID NO: 554620 - DNA, 19 bp, Mus musculus
  siRNA target sequence for Tll (NM_009390.1,1658-1676).
ggagaaaccctgcaagaat

SEQ ID NO: 554621 - DNA, 19 bp, Mus musculus
  siRNA target sequence for Tll (NM_009390.1,1758-1776).
cgggagaaaagattgtctt

SEQ ID NO: 554622 - DNA, 19 bp, Mus musculus
  siRNA target sequence for Tll (NM_009390.1,1813-1831).
gtgctggtatgattacatt

SEQ ID NO: 554623 - DNA, 19 bp, Mus musculus
  siRNA target sequence for Tll (NM_009390.1,1818-1836).
ggtatgattacattgaagt

SEQ ID NO: 554624 - DNA, 19 bp, Mus musculus
  siRNA target sequence for Tll (NM_009390.1,1819-1837).
gtatgattacattgaagta

SEQ ID NO: 554625 - DNA, 19 bp, Mus musculus
  siRNA target sequence for Tll (NM_009390.1,1888-1906).
caaagtggctggagttctt

SEQ ID NO: 554626 - DNA, 19 bp, Mus musculus
  siRNA target sequence for Tll (NM_009390.1,1894-1912).
ggctggagttcttacatct

SEQ ID NO: 554627 - DNA, 19 bp, Mus musculus
  siRNA target sequence for Tll (NM_009390.1,1920-1938).
gcagaatgtggattgagtt

SEQ ID NO: 554628 - DNA, 19 bp, Mus musculus
  siRNA target sequence for Tll (NM_009390.1,2001-2019).
gggagataaggaaaaacga

SEQ ID NO: 554629 - DNA, 19 bp, Mus musculus
  siRNA target sequence for Tll (NM_009390.1,2037-2055).
ccaattaccccgatgacta

SEQ ID NO: 554630 - DNA, 19 bp, Mus musculus
  siRNA target sequence for Tll (NM_009390.1,2158-2176).
ctatgaccacctagaagtt

SEQ ID NO: 554631 - DNA, 19 bp, Mus musculus
  siRNA target sequence for Tll (NM_009390.1,2211-2229).
gacggttctgtggttatga

SEQ ID NO: 554632 - DNA, 19 bp, Mus musculus
  siRNA target sequence for Tll (NM_009390.1,2283-2301).
ctgacgggactgtgaacaa

SEQ ID NO: 554633 - DNA, 19 bp, Mus musculus
  siRNA target sequence for Tll (NM_009390.1,2306-2324).
gggtttgctgcgaactttt

SEQ ID NO: 554634 - DNA, 19 bp, Mus musculus
  siRNA target sequence for Tll (NM_009390.1,2369-2387).
gaacagaggtgtcttaaca

SEQ ID NO: 554635 - DNA, 19 bp, Mus musculus
  siRNA target sequence for Tll (NM_009390.1,2558-2576).
gcgccaagccagtacagaa

SEQ ID NO: 554636 - DNA, 19 bp, Mus musculus
  siRNA target sequence for Tll (NM_009390.1,2559-2577).
cgccaagccagtacagaat

SEQ ID NO: 554637 - DNA, 19 bp, Mus musculus
  siRNA target sequence for Tll (NM_009390.1,2683-2701).
gttctgtggcgctgacata

SEQ ID NO: 554638 - DNA, 19 bp, Mus musculus
  siRNA target sequence for Tll (NM_009390.1,2804-2822).
gatgagtgttcaaaggata

SEQ ID NO: 554639 - DNA, 19 bp, Mus musculus
  siRNA target sequence for Tll (NM_009390.1,2886-2904).
gattcgtgttgcatgagaa

SEQ ID NO: 554640 - DNA, 19 bp, Mus musculus
  siRNA target sequence for Tll (NM_009390.1,2925-2943).
ccgagtgtgaacagaagat

SEQ ID NO: 554641 - DNA, 19 bp, Mus musculus
  siRNA target sequence for Tll (NM_009390.1,3032-3050).
cctggccaccgcatcacat

SEQ ID NO: 554642 - DNA, 19 bp, Mus musculus
  siRNA target sequence for Tll (NM_009390.1,3033-3051).
ctggccaccgcatcacatt

SEQ ID NO: 554643 - DNA, 19 bp, Mus musculus
  siRNA target sequence for Tll (NM_009390.1,3092-3110).
gcttatgatcacttggaaa

SEQ ID NO: 554644 - DNA, 19 bp, Mus musculus
  siRNA target sequence for Tll (NM_009390.1,3093-3111).
cttatgatcacttggaaat

SEQ ID NO: 554645 - DNA, 19 bp, Mus musculus
  siRNA target sequence for Tll (NM_009390.1,3126-3144).
cggagaagtcaccaatact

SEQ ID NO: 554646 - DNA, 19 bp, Mus musculus
  siRNA target sequence for Tll (NM_009390.1,3202-3220).
gtttattcggtttatttct

SEQ ID NO: 554647 - DNA, 19 bp, Mus musculus
  siRNA target sequence for Tll (NM_009390.1,3323-3341).
cagtttggtgataataact

SEQ ID NO: 554648 - DNA, 19 bp, Mus musculus
  siRNA target sequence for Tll (NM_009390.1,3383-3401).
cgaggatctcgacttgaat

SEQ ID NO: 554649 - DNA, 19 bp, Mus musculus
  siRNA target sequence for Tll (NM_009390.1,3384-3402).
gaggatctcgacttgaatt

SEQ ID NO: 554650 - DNA, 19 bp, Mus musculus
  siRNA target sequence for Tll (NM_009390.1,3386-3404).
ggatctcgacttgaattgt

SEQ ID NO: 554651 - DNA, 19 bp, Mus musculus
  siRNA target sequence for Tll (NM_009390.1,3403-3421).
gtccttccagacattcgaa

SEQ ID NO: 554652 - DNA, 19 bp, Mus musculus
  siRNA target sequence for Tll (NM_009390.1,3409-3427).
ccagacattcgaagtagaa

SEQ ID NO: 554653 - DNA, 19 bp, Mus musculus
  siRNA target sequence for Tll (NM_009390.1,3441-3459).
gtggctatgactatgttga

SEQ ID NO: 554654 - DNA, 19 bp, Mus musculus
  siRNA target sequence for Tll (NM_009390.1,3488-3506).
gtgggtcttggtagattct

SEQ ID NO: 554655 - DNA, 19 bp, Mus musculus
  siRNA target sequence for Tll (NM_009390.1,3490-3508).
gggtcttggtagattctgt

SEQ ID NO: 554656 - DNA, 19 bp, Mus musculus
  siRNA target sequence for Tll (NM_009390.1,3516-3534).
ggccaccagaagaaatcta

SEQ ID NO: 554657 - DNA, 19 bp, Mus musculus
  siRNA target sequence for Tll (NM_009390.1,3518-3536).
ccaccagaagaaatctatt

SEQ ID NO: 554658 - DNA, 19 bp, Mus musculus
  siRNA target sequence for Tll (NM_009390.1,3606-3624).
gatataaaagtataagata

SEQ ID NO: 554659 - DNA, 19 bp, Mus musculus
  siRNA target sequence for Tll2 (NM_011904.1,436-454).
caagccatccattgacaaa

SEQ ID NO: 554660 - DNA, 19 bp, Mus musculus
  siRNA target sequence for Tll2 (NM_011904.1,525-543).
gcatccaggcaccaagaaa

SEQ ID NO: 554661 - DNA, 19 bp, Mus musculus
  siRNA target sequence for Tll2 (NM_011904.1,550-568).
caaggatgccaccacattt

SEQ ID NO: 554662 - DNA, 19 bp, Mus musculus
  siRNA target sequence for Tll2 (NM_011904.1,702-720).
gtacccagagggccatttt

SEQ ID NO: 554663 - DNA, 19 bp, Mus musculus
  siRNA target sequence for Tll2 (NM_011904.1,808-826).
caggacctgtggttgttgt

SEQ ID NO: 554664 - DNA, 19 bp, Mus musculus
  siRNA target sequence for Tll2 (NM_011904.1,861-879).
ccatatccatcgggaaaaa

SEQ ID NO: 554665 - DNA, 19 bp, Mus musculus
  siRNA target sequence for Tll2 (NM_011904.1,1179-1197).
ggctcagtcagggagatat

SEQ ID NO: 554666 - DNA, 19 bp, Mus musculus
  siRNA target sequence for Tll2 (NM_011904.1,1250-1268).
gacacgacaggaaactttt

SEQ ID NO: 554667 - DNA, 19 bp, Mus musculus
  siRNA target sequence for Tll2 (NM_011904.1,1328-1346).
gtcaccccaggggaaaaga

SEQ ID NO: 554668 - DNA, 19 bp, Mus musculus
  siRNA target sequence for Tll2 (NM_011904.1,1340-1358).
gaaaagatcatcctaaatt

SEQ ID NO: 554669 - DNA, 19 bp, Mus musculus
  siRNA target sequence for Tll2 (NM_011904.1,1360-1378).
cacctccatggatttgttt

SEQ ID NO: 554670 - DNA, 19 bp, Mus musculus
  siRNA target sequence for Tll2 (NM_011904.1,1452-1470).
ggttctgtggcgataagat

SEQ ID NO: 554671 - DNA, 19 bp, Mus musculus
  siRNA target sequence for Tll2 (NM_011904.1,1453-1471).
gttctgtggcgataagata

SEQ ID NO: 554672 - DNA, 19 bp, Mus musculus
  siRNA target sequence for Tll2 (NM_011904.1,1572-1590).
gtgggggagacataaccaa

SEQ ID NO: 554673 - DNA, 19 bp, Mus musculus
  siRNA target sequence for Tll2 (NM_011904.1,1635-1653).
gaccttccaaggaatgtgt

SEQ ID NO: 554674 - DNA, 19 bp, Mus musculus
  siRNA target sequence for Tll2 (NM_011904.1,1837-1855).
ccgactgtgggtgaagttt

SEQ ID NO: 554675 - DNA, 19 bp, Mus musculus
  siRNA target sequence for Tll2 (NM_011904.1,1860-1878).
ccgacggctccatcaataa

SEQ ID NO: 554676 - DNA, 19 bp, Mus musculus
  siRNA target sequence for Tll2 (NM_011904.1,1861-1879).
cgacggctccatcaataaa

SEQ ID NO: 554677 - DNA, 19 bp, Mus musculus
  siRNA target sequence for Tll2 (NM_011904.1,1948-1966).
gcagcgctgtgtaaacaca

SEQ ID NO: 554678 - DNA, 19 bp, Mus musculus
  siRNA target sequence for Tll2 (NM_011904.1,2009-2027).
gctgccgacaagaagacat

SEQ ID NO: 554679 - DNA, 19 bp, Mus musculus
  siRNA target sequence for Tll2 (NM_011904.1,2045-2063).
ggcttcattaccaagctaa

SEQ ID NO: 554680 - DNA, 19 bp, Mus musculus
  siRNA target sequence for Tll2 (NM_011904.1,2046-2064).
gcttcattaccaagctaaa

SEQ ID NO: 554681 - DNA, 19 bp, Mus musculus
  siRNA target sequence for Tll2 (NM_011904.1,2186-2204).
ggcaatgacgtctgtaagt

SEQ ID NO: 554682 - DNA, 19 bp, Mus musculus
  siRNA target sequence for Tll2 (NM_011904.1,2187-2205).
gcaatgacgtctgtaagta

SEQ ID NO: 554683 - DNA, 19 bp, Mus musculus
  siRNA target sequence for Tll2 (NM_011904.1,2188-2206).
caatgacgtctgtaagtat

SEQ ID NO: 554684 - DNA, 19 bp, Mus musculus
  siRNA target sequence for Tll2 (NM_011904.1,2192-2210).
gacgtctgtaagtatgact

SEQ ID NO: 554685 - DNA, 19 bp, Mus musculus
  siRNA target sequence for Tll2 (NM_011904.1,2248-2266).
gcttcacggcaaattctgt

SEQ ID NO: 554686 - DNA, 19 bp, Mus musculus
  siRNA target sequence for Tll2 (NM_011904.1,2501-2519).
gctggctgcgcctacaaga

SEQ ID NO: 554687 - DNA, 19 bp, Mus musculus
  siRNA target sequence for Tll2 (NM_011904.1,2502-2520).
ctggctgcgcctacaagat

SEQ ID NO: 554688 - DNA, 19 bp, Mus musculus
  siRNA target sequence for Tll2 (NM_011904.1,2504-2522).
ggctgcgcctacaagatca

SEQ ID NO: 554689 - DNA, 19 bp, Mus musculus
  siRNA target sequence for Tll2 (NM_011904.1,2570-2588).
cccagccggaaggaatgta

SEQ ID NO: 554690 - DNA, 19 bp, Mus musculus
  siRNA target sequence for Tll2 (NM_011904.1,2620-2638).
ggtgaaaattacattcagt

SEQ ID NO: 554691 - DNA, 19 bp, Mus musculus
  siRNA target sequence for Tll2 (NM_011904.1,2934-2952).
gctgtgactgggtgatagt

SEQ ID NO: 554692 - DNA, 19 bp, Mus musculus
  siRNA target sequence for Tll2 (NM_011904.1,2980-2998).
gatattccggacctttgaa

SEQ ID NO: 554693 - DNA, 19 bp, Mus musculus
  siRNA target sequence for Tll2 (NM_011904.1,3084-3102).
gtggctcagggccattaga

SEQ ID NO: 554694 - DNA, 19 bp, Mus musculus
  siRNA target sequence for Tll2 (NM_011904.1,3092-3110).
gggccattagaggaaatct

SEQ ID NO: 554695 - DNA, 19 bp, Mus musculus
  siRNA target sequence for Tll2 (NM_011904.1,3095-3113).
ccattagaggaaatctact

SEQ ID NO: 554696 - DNA, 19 bp, Mus musculus
  siRNA target sequence for Tll2 (NM_011904.1,3117-3135).
ccggagactcgctaatgat

SEQ ID NO: 554697 - DNA, 19 bp, Mus musculus
  siRNA target sequence for Tncc (NM_009393.1,337-355).
ggatctcttccgcatgttt

SEQ ID NO: 554698 - DNA, 19 bp, Mus musculus
  siRNA target sequence for Tncc (NM_009393.1,343-361).
cttccgcatgtttgacaaa

SEQ ID NO: 554699 - DNA, 19 bp, Mus musculus
  siRNA target sequence for Tncc (NM_009393.1,410-428).
gccacaggtgagaccatta

SEQ ID NO: 554700 - DNA, 19 bp, Mus musculus
  siRNA target sequence for Tncc (NM_009393.1,423-441).
ccattacggaagatgacat

SEQ ID NO: 554701 - DNA, 19 bp, Mus musculus
  siRNA target sequence for Tncc (NM_009393.1,475-493).
cgatggccgaattgactat

SEQ ID NO: 554702 - DNA, 19 bp, Mus musculus
  siRNA target sequence for Tpo (NM_009417.2,83-101).
cttggagctatggcaataa

SEQ ID NO: 554703 - DNA, 19 bp, Mus musculus
  siRNA target sequence for Tpo (NM_009417.2,87-105).
gagctatggcaataatgct

SEQ ID NO: 554704 - DNA, 19 bp, Mus musculus
  siRNA target sequence for Tpo (NM_009417.2,96-114).
caataatgctggtggttat

SEQ ID NO: 554705 - DNA, 19 bp, Mus musculus
  siRNA target sequence for Tpo (NM_009417.2,109-127).
ggttatgggaactgtaatt

SEQ ID NO: 554706 - DNA, 19 bp, Mus musculus
  siRNA target sequence for Tpo (NM_009417.2,110-128).
gttatgggaactgtaattt

SEQ ID NO: 554707 - DNA, 19 bp, Mus musculus
  siRNA target sequence for Tpo (NM_009417.2,174-192).
ccatgaagtcccatgttat

SEQ ID NO: 554708 - DNA, 19 bp, Mus musculus
  siRNA target sequence for Tpo (NM_009417.2,360-378).
catcaatacaagtcatgaa

SEQ ID NO: 554709 - DNA, 19 bp, Mus musculus
  siRNA target sequence for Tpo (NM_009417.2,397-415).
ctccacggatgccttatca

SEQ ID NO: 554710 - DNA, 19 bp, Mus musculus
  siRNA target sequence for Tpo (NM_009417.2,489-507).
cctgcctggcaaataagta

SEQ ID NO: 554711 - DNA, 19 bp, Mus musculus
  siRNA target sequence for Tpo (NM_009417.2,517-535).
cacaggggcgtgcaacaat

SEQ ID NO: 554712 - DNA, 19 bp, Mus musculus
  siRNA target sequence for Tpo (NM_009417.2,522-540).
gggcgtgcaacaatagaga

SEQ ID NO: 554713 - DNA, 19 bp, Mus musculus
  siRNA target sequence for Tpo (NM_009417.2,523-541).
ggcgtgcaacaatagagat

SEQ ID NO: 554714 - DNA, 19 bp, Mus musculus
  siRNA target sequence for Tpo (NM_009417.2,583-601).
gctgcctcctgtctatgaa

SEQ ID NO: 554715 - DNA, 19 bp, Mus musculus
  siRNA target sequence for Tpo (NM_009417.2,623-641).
ggctggaaccctaatttct

SEQ ID NO: 554716 - DNA, 19 bp, Mus musculus
  siRNA target sequence for Tpo (NM_009417.2,624-642).
gctggaaccctaatttctt

SEQ ID NO: 554717 - DNA, 19 bp, Mus musculus
  siRNA target sequence for Tpo (NM_009417.2,688-706).
cctcattcaagtttccaat

SEQ ID NO: 554718 - DNA, 19 bp, Mus musculus
  siRNA target sequence for Tpo (NM_009417.2,722-740).
gatgaccagtactctgatt

SEQ ID NO: 554719 - DNA, 19 bp, Mus musculus
  siRNA target sequence for Tpo (NM_009417.2,756-774).
gacagtacatcgatcatga

SEQ ID NO: 554720 - DNA, 19 bp, Mus musculus
  siRNA target sequence for Tpo (NM_009417.2,760-778).
gtacatcgatcatgacatt

SEQ ID NO: 554721 - DNA, 19 bp, Mus musculus
  siRNA target sequence for Tpo (NM_009417.2,838-856).
gacctgtgagaaccaaaat

SEQ ID NO: 554722 - DNA, 19 bp, Mus musculus
  siRNA target sequence for Tpo (NM_009417.2,1044-1062).
gctcccctggcgttgagaa

SEQ ID NO: 554723 - DNA, 19 bp, Mus musculus
  siRNA target sequence for Tpo (NM_009417.2,1537-1555).
ggtgagacggctaaacact

SEQ ID NO: 554724 - DNA, 19 bp, Mus musculus
  siRNA target sequence for Tpo (NM_009417.2,1627-1645).
ccaggaaggtggtttggat

SEQ ID NO: 554725 - DNA, 19 bp, Mus musculus
  siRNA target sequence for Tpo (NM_009417.2,1725-1743).
ggctcttcgtgctgtctaa

SEQ ID NO: 554726 - DNA, 19 bp, Mus musculus
  siRNA target sequence for Tpo (NM_009417.2,1797-1815).
gcttaccagactacaatga

SEQ ID NO: 554727 - DNA, 19 bp, Mus musculus
  siRNA target sequence for Tpo (NM_009417.2,1978-1996).
ccgcactggtcctctgttt

SEQ ID NO: 554728 - DNA, 19 bp, Mus musculus
  siRNA target sequence for Tpo (NM_009417.2,2155-2173).
ggatgccttccgtattgga

SEQ ID NO: 554729 - DNA, 19 bp, Mus musculus
  siRNA target sequence for Tpo (NM_009417.2,2156-2174).
gatgccttccgtattggaa

SEQ ID NO: 554730 - DNA, 19 bp, Mus musculus
  siRNA target sequence for Tpo (NM_009417.2,2160-2178).
ccttccgtattggaaagtt

SEQ ID NO: 554731 - DNA, 19 bp, Mus musculus
  siRNA target sequence for Tpo (NM_009417.2,2172-2190).
gaaagttcccccaagactt

SEQ ID NO: 554732 - DNA, 19 bp, Mus musculus
  siRNA target sequence for Tpo (NM_009417.2,2241-2259).
ccttcccacaagatgacaa

SEQ ID NO: 554733 - DNA, 19 bp, Mus musculus
  siRNA target sequence for Tpo (NM_009417.2,2315-2333).
gggaagctggtgcttgtat

SEQ ID NO: 554734 - DNA, 19 bp, Mus musculus
  siRNA target sequence for Tpo (NM_009417.2,2316-2334).
ggaagctggtgcttgtata

SEQ ID NO: 554735 - DNA, 19 bp, Mus musculus
  siRNA target sequence for Tpo (NM_009417.2,2366-2384).
caggagcaggtcacatgta

SEQ ID NO: 554736 - DNA, 19 bp, Mus musculus
  siRNA target sequence for Tpo (NM_009417.2,2403-2421).
ccgaacctcctgtctgtaa

SEQ ID NO: 554737 - DNA, 19 bp, Mus musculus
  siRNA target sequence for Tpo (NM_009417.2,2411-2429).
cctgtctgtaaagatgtta

SEQ ID NO: 554738 - DNA, 19 bp, Mus musculus
  siRNA target sequence for Tpo (NM_009417.2,2412-2430).
ctgtctgtaaagatgttaa

SEQ ID NO: 554739 - DNA, 19 bp, Mus musculus
  siRNA target sequence for Tpo (NM_009417.2,2595-2613).
cactgggtgcacttctcat

SEQ ID NO: 554740 - DNA, 19 bp, Mus musculus
  siRNA target sequence for Tpo (NM_009417.2,2628-2646).
gtctcacctggatagtaat

SEQ ID NO: 554741 - DNA, 19 bp, Mus musculus
  siRNA target sequence for Tpo (NM_009417.2,2630-2648).
ctcacctggatagtaattt

SEQ ID NO: 554742 - DNA, 19 bp, Mus musculus
  siRNA target sequence for Tpo (NM_009417.2,2655-2673).
ggacacatgctgataagaa

SEQ ID NO: 554743 - DNA, 19 bp, Mus musculus
  siRNA target sequence for Tpo (NM_009417.2,2656-2674).
gacacatgctgataagaaa

SEQ ID NO: 554744 - DNA, 19 bp, Mus musculus
  siRNA target sequence for Umod (NM_009470.2,278-296).
gcgagacggtgttctgaat

SEQ ID NO: 554745 - DNA, 19 bp, Mus musculus
  siRNA target sequence for Umod (NM_009470.2,288-306).
gttctgaatgccacaacaa

SEQ ID NO: 554746 - DNA, 19 bp, Mus musculus
  siRNA target sequence for Umod (NM_009470.2,707-725).
caagacccctgcaatacat

SEQ ID NO: 554747 - DNA, 19 bp, Mus musculus
  siRNA target sequence for Umod (NM_009470.2,713-731).
ccctgcaatacatatgaga

SEQ ID NO: 554748 - DNA, 19 bp, Mus musculus
  siRNA target sequence for Umod (NM_009470.2,997-1015).
cccaggtggcttctatatt

SEQ ID NO: 554749 - DNA, 19 bp, Mus musculus
  siRNA target sequence for Umod (NM_009470.2,999-1017).
caggtggcttctatattta

SEQ ID NO: 554750 - DNA, 19 bp, Mus musculus
  siRNA target sequence for Umod (NM_009470.2,1076-1094).
gaggggacttgcgaagaat

SEQ ID NO: 554751 - DNA, 19 bp, Mus musculus
  siRNA target sequence for Umod (NM_009470.2,1098-1116).
gggtagatgaagattgcat

SEQ ID NO: 554752 - DNA, 19 bp, Mus musculus
  siRNA target sequence for Umod (NM_009470.2,1134-1152).
ggcgctgccagtgtaaaca

SEQ ID NO: 554753 - DNA, 19 bp, Mus musculus
  siRNA target sequence for Umod (NM_009470.2,1205-1223).
gccaatgacatcaagatgt

SEQ ID NO: 554754 - DNA, 19 bp, Mus musculus
  siRNA target sequence for Umod (NM_009470.2,1322-1340).
gactggatgtccatagtga

SEQ ID NO: 554755 - DNA, 19 bp, Mus musculus
  siRNA target sequence for Umod (NM_009470.2,1356-1374).
gtccctgtgggacagtatt

SEQ ID NO: 554756 - DNA, 19 bp, Mus musculus
  siRNA target sequence for Umod (NM_009470.2,1358-1376).
ccctgtgggacagtattga

SEQ ID NO: 554757 - DNA, 19 bp, Mus musculus
  siRNA target sequence for Umod (NM_009470.2,1370-1388).
gtattgaggagaaacgaaa

SEQ ID NO: 554758 - DNA, 19 bp, Mus musculus
  siRNA target sequence for Umod (NM_009470.2,1418-1436).
ctggcaaatgcgatcatca

SEQ ID NO: 554759 - DNA, 19 bp, Mus musculus
  siRNA target sequence for Umod (NM_009470.2,1439-1457).
cgggacatcatcataagaa

SEQ ID NO: 554760 - DNA, 19 bp, Mus musculus
  siRNA target sequence for Umod (NM_009470.2,1547-1565).
ggtgggacaggcaagttca

SEQ ID NO: 554761 - DNA, 19 bp, Mus musculus
  siRNA target sequence for Umod (NM_009470.2,1566-1584).
ccgtgcggatggcattgtt

SEQ ID NO: 554762 - DNA, 19 bp, Mus musculus
  siRNA target sequence for Umod (NM_009470.2,1686-1704).
cccggtttgtactgctaat

SEQ ID NO: 554763 - DNA, 19 bp, Mus musculus
  siRNA target sequence for Umod (NM_009470.2,1688-1706).
cggtttgtactgctaatga

SEQ ID NO: 554764 - DNA, 19 bp, Mus musculus
  siRNA target sequence for Umod (NM_009470.2,1740-1758).
cagaccctgtgaaatactt

SEQ ID NO: 554765 - DNA, 19 bp, Mus musculus
  siRNA target sequence for Umod (NM_009470.2,1771-1789).
cagttgtccacgtacagaa

SEQ ID NO: 554766 - DNA, 19 bp, Mus musculus
  siRNA target sequence for Umod (NM_009470.2,1827-1845).
ctcaggcccgattttctgt

SEQ ID NO: 554767 - DNA, 19 bp, Mus musculus
  siRNA target sequence for Umod (NM_009470.2,1833-1851).
cccgattttctgttcagat

SEQ ID NO: 554768 - DNA, 19 bp, Mus musculus
  siRNA target sequence for Umod (NM_009470.2,1866-1884).
gaaactacgaccttgtcta

SEQ ID NO: 554769 - DNA, 19 bp, Mus musculus
  siRNA target sequence for Umod (NM_009470.2,1889-1907).
cactgcgaggtgtacctat

SEQ ID NO: 554770 - DNA, 19 bp, Mus musculus
  siRNA target sequence for Umod (NM_009470.2,1893-1911).
gcgaggtgtacctatgtga

SEQ ID NO: 554771 - DNA, 19 bp, Mus musculus
  siRNA target sequence for Umod (NM_009470.2,1914-1932).
ctacgagtgaacagtgtaa

SEQ ID NO: 554772 - DNA, 19 bp, Mus musculus
  siRNA target sequence for Umod (NM_009470.2,1938-1956).
cctgctctggtactagatt

SEQ ID NO: 554773 - DNA, 19 bp, Mus musculus
  siRNA target sequence for Umod (NM_009470.2,1939-1957).
ctgctctggtactagattt

SEQ ID NO: 554774 - DNA, 19 bp, Mus musculus
  siRNA target sequence for Umod (NM_009470.2,1993-2011).
gaacttgggtcccataaca

SEQ ID NO: 554775 - DNA, 19 bp, Mus musculus
  siRNA target sequence for Vldlr (NM_013703.1,253-271).
cactgcaagcgggaagaaa

SEQ ID NO: 554776 - DNA, 19 bp, Mus musculus
  siRNA target sequence for Vldlr (NM_013703.1,279-297).
gtgatagctcccagtttca

SEQ ID NO: 554777 - DNA, 19 bp, Mus musculus
  siRNA target sequence for Vldlr (NM_013703.1,289-307).
ccagtttcagtgcacaaat

SEQ ID NO: 554778 - DNA, 19 bp, Mus musculus
  siRNA target sequence for Vldlr (NM_013703.1,368-386).
gacgagaagaactgtgtaa

SEQ ID NO: 554779 - DNA, 19 bp, Mus musculus
  siRNA target sequence for Vldlr (NM_013703.1,497-515).
gaacagtgccatatgagaa

SEQ ID NO: 554780 - DNA, 19 bp, Mus musculus
  siRNA target sequence for Vldlr (NM_013703.1,513-531).
gaacatgccgcataaatga

SEQ ID NO: 554781 - DNA, 19 bp, Mus musculus
  siRNA target sequence for Vldlr (NM_013703.1,516-534).
catgccgcataaatgaaat

SEQ ID NO: 554782 - DNA, 19 bp, Mus musculus
  siRNA target sequence for Vldlr (NM_013703.1,546-564).
cccgttctactcagtgtat

SEQ ID NO: 554783 - DNA, 19 bp, Mus musculus
  siRNA target sequence for Vldlr (NM_013703.1,576-594).
ggagatgcgatggtgaaaa

SEQ ID NO: 554784 - DNA, 19 bp, Mus musculus
  siRNA target sequence for Vldlr (NM_013703.1,674-692).
cgctgcgtctccagaaact

SEQ ID NO: 554785 - DNA, 19 bp, Mus musculus
  siRNA target sequence for Vldlr (NM_013703.1,675-693).
gctgcgtctccagaaactt

SEQ ID NO: 554786 - DNA, 19 bp, Mus musculus
  siRNA target sequence for Vldlr (NM_013703.1,676-694).
ctgcgtctccagaaacttt

SEQ ID NO: 554787 - DNA, 19 bp, Mus musculus
  siRNA target sequence for Vldlr (NM_013703.1,678-696).
gcgtctccagaaactttgt

SEQ ID NO: 554788 - DNA, 19 bp, Mus musculus
  siRNA target sequence for Vldlr (NM_013703.1,871-889).
ccgtcagcctgtgatacat

SEQ ID NO: 554789 - DNA, 19 bp, Mus musculus
  siRNA target sequence for Vldlr (NM_013703.1,878-896).
cctgtgatacataccaaat

SEQ ID NO: 554790 - DNA, 19 bp, Mus musculus
  siRNA target sequence for Vldlr (NM_013703.1,924-942).
ctggcgagtgcattcacaa

SEQ ID NO: 554791 - DNA, 19 bp, Mus musculus
  siRNA target sequence for Vldlr (NM_013703.1,1014-1032).
gccgacctgaccagtttga

SEQ ID NO: 554792 - DNA, 19 bp, Mus musculus
  siRNA target sequence for Vldlr (NM_013703.1,1016-1034).
cgacctgaccagtttgaat

SEQ ID NO: 554793 - DNA, 19 bp, Mus musculus
  siRNA target sequence for Vldlr (NM_013703.1,1078-1096).
catccgagactgtgttgat

SEQ ID NO: 554794 - DNA, 19 bp, Mus musculus
  siRNA target sequence for Vldlr (NM_013703.1,1174-1192).
catagacatgagcaaagta

SEQ ID NO: 554795 - DNA, 19 bp, Mus musculus
  siRNA target sequence for Vldlr (NM_013703.1,1255-1273).
cgaatgcctggtcaataat

SEQ ID NO: 554796 - DNA, 19 bp, Mus musculus
  siRNA target sequence for Vldlr (NM_013703.1,1291-1309).
ctgcaaagacctagttata

SEQ ID NO: 554797 - DNA, 19 bp, Mus musculus
  siRNA target sequence for Vldlr (NM_013703.1,1294-1312).
caaagacctagttataggt

SEQ ID NO: 554798 - DNA, 19 bp, Mus musculus
  siRNA target sequence for Vldlr (NM_013703.1,1301-1319).
ctagttataggttatgagt

SEQ ID NO: 554799 - DNA, 19 bp, Mus musculus
  siRNA target sequence for Vldlr (NM_013703.1,1343-1361).
ctgatagataggaaaacct

SEQ ID NO: 554800 - DNA, 19 bp, Mus musculus
  siRNA target sequence for Vldlr (NM_013703.1,1401-1419).
gtcaaatttgtatcaactt

SEQ ID NO: 554801 - DNA, 19 bp, Mus musculus
  siRNA target sequence for Vldlr (NM_013703.1,1424-1442).
ggcggttacaagtgtgaat

SEQ ID NO: 554802 - DNA, 19 bp, Mus musculus
  siRNA target sequence for Vldlr (NM_013703.1,1443-1461).
gtagtcgtggctatcaaat

SEQ ID NO: 554803 - DNA, 19 bp, Mus musculus
  siRNA target sequence for Vldlr (NM_013703.1,1446-1464).
gtcgtggctatcaaatgga

SEQ ID NO: 554804 - DNA, 19 bp, Mus musculus
  siRNA target sequence for Vldlr (NM_013703.1,1499-1517).
gagccgagtctgatcttca

SEQ ID NO: 554805 - DNA, 19 bp, Mus musculus
  siRNA target sequence for Vldlr (NM_013703.1,1503-1521).
cgagtctgatcttcactaa

SEQ ID NO: 554806 - DNA, 19 bp, Mus musculus
  siRNA target sequence for Vldlr (NM_013703.1,1504-1522).
gagtctgatcttcactaat

SEQ ID NO: 554807 - DNA, 19 bp, Mus musculus
  siRNA target sequence for Vldlr (NM_013703.1,1508-1526).
ctgatcttcactaatcgaa

SEQ ID NO: 554808 - DNA, 19 bp, Mus musculus
  siRNA target sequence for Vldlr (NM_013703.1,1660-1678).
cttcagtgcctcaattgat

SEQ ID NO: 554809 - DNA, 19 bp, Mus musculus
  siRNA target sequence for Vldlr (NM_013703.1,1665-1683).
gtgcctcaattgatgacaa

SEQ ID NO: 554810 - DNA, 19 bp, Mus musculus
  siRNA target sequence for Vldlr (NM_013703.1,1679-1697).
gacaaggttggtagacatt

SEQ ID NO: 554811 - DNA, 19 bp, Mus musculus
  siRNA target sequence for Vldlr (NM_013703.1,1681-1699).
caaggttggtagacatttt

SEQ ID NO: 554812 - DNA, 19 bp, Mus musculus
  siRNA target sequence for Vldlr (NM_013703.1,1705-1723).
gatcgacaatgtctataat

SEQ ID NO: 554813 - DNA, 19 bp, Mus musculus
  siRNA target sequence for Vldlr (NM_013703.1,1708-1726).
cgacaatgtctataatcct

SEQ ID NO: 554814 - DNA, 19 bp, Mus musculus
  siRNA target sequence for Vldlr (NM_013703.1,1737-1755).
ctgttgattgggtgtacaa

SEQ ID NO: 554815 - DNA, 19 bp, Mus musculus
  siRNA target sequence for Vldlr (NM_013703.1,1775-1793).
gcggcttctaagactattt

SEQ ID NO: 554816 - DNA, 19 bp, Mus musculus
  siRNA target sequence for Vldlr (NM_013703.1,1777-1795).
ggcttctaagactatttca

SEQ ID NO: 554817 - DNA, 19 bp, Mus musculus
  siRNA target sequence for Vldlr (NM_013703.1,1874-1892).
ccgttgtcgggctttgttt

SEQ ID NO: 554818 - DNA, 19 bp, Mus musculus
  siRNA target sequence for Vldlr (NM_013703.1,1903-1921).
ctggggcgagccagctaaa

SEQ ID NO: 554819 - DNA, 19 bp, Mus musculus
  siRNA target sequence for Vldlr (NM_013703.1,1975-1993).
catccaatggcctaatgga

SEQ ID NO: 554820 - DNA, 19 bp, Mus musculus
  siRNA target sequence for Vldlr (NM_013703.1,1983-2001).
ggcctaatggaattacact

SEQ ID NO: 554821 - DNA, 19 bp, Mus musculus
  siRNA target sequence for Vldlr (NM_013703.1,2120-2138).
cctcttgcactcaccatat

SEQ ID NO: 554822 - DNA, 19 bp, Mus musculus
  siRNA target sequence for Vldlr (NM_013703.1,2155-2173).
ctggatagatggagaaaat

SEQ ID NO: 554823 - DNA, 19 bp, Mus musculus
  siRNA target sequence for Vldlr (NM_013703.1,2178-2196).
cagtgtacggtgccaataa

SEQ ID NO: 554824 - DNA, 19 bp, Mus musculus
  siRNA target sequence for Vldlr (NM_013703.1,2180-2198).
gtgtacggtgccaataaat

SEQ ID NO: 554825 - DNA, 19 bp, Mus musculus
  siRNA target sequence for Vldlr (NM_013703.1,2185-2203).
cggtgccaataaattcact

SEQ ID NO: 554826 - DNA, 19 bp, Mus musculus
  siRNA target sequence for Vldlr (NM_013703.1,2213-2231).
ctggccactctagtgaata

SEQ ID NO: 554827 - DNA, 19 bp, Mus musculus
  siRNA target sequence for Vldlr (NM_013703.1,2217-2235).
ccactctagtgaataatct

SEQ ID NO: 554828 - DNA, 19 bp, Mus musculus
  siRNA target sequence for Vldlr (NM_013703.1,2220-2238).
ctctagtgaataatctcaa

SEQ ID NO: 554829 - DNA, 19 bp, Mus musculus
  siRNA target sequence for Vldlr (NM_013703.1,2272-2290).
cgtccagccgtcaggtaaa

SEQ ID NO: 554830 - DNA, 19 bp, Mus musculus
  siRNA target sequence for Vldlr (NM_013703.1,2273-2291).
gtccagccgtcaggtaaaa

SEQ ID NO: 554831 - DNA, 19 bp, Mus musculus
  siRNA target sequence for Vldlr (NM_013703.1,2276-2294).
cagccgtcaggtaaaaact

SEQ ID NO: 554832 - DNA, 19 bp, Mus musculus
  siRNA target sequence for Vldlr (NM_013703.1,2341-2359).
gccagcaccacagatcaat

SEQ ID NO: 554833 - DNA, 19 bp, Mus musculus
  siRNA target sequence for Vldlr (NM_013703.1,2343-2361).
cagcaccacagatcaatga

SEQ ID NO: 554834 - DNA, 19 bp, Mus musculus
  siRNA target sequence for Vldlr (NM_013703.1,2360-2378).
gaccactctccaaaatata

SEQ ID NO: 554835 - DNA, 19 bp, Mus musculus
  siRNA target sequence for Vldlr (NM_013703.1,2388-2406).
gtcccaatgggtacaatct

SEQ ID NO: 554836 - DNA, 19 bp, Mus musculus
  siRNA target sequence for Vldlr (NM_013703.1,2420-2438).
cgagagtgtcaaagtactt

SEQ ID NO: 554837 - DNA, 19 bp, Mus musculus
  siRNA target sequence for Vldlr (NM_013703.1,2425-2443).
gtgtcaaagtacttcaact

SEQ ID NO: 554838 - DNA, 19 bp, Mus musculus
  siRNA target sequence for Vldlr (NM_013703.1,2449-2467).
gacttacagtgagacaaaa

SEQ ID NO: 554839 - DNA, 19 bp, Mus musculus
  siRNA target sequence for Vldlr (NM_013703.1,2510-2528).
cctggagggatcaatgtga

SEQ ID NO: 554840 - DNA, 19 bp, Mus musculus
  siRNA target sequence for Vldlr (NM_013703.1,2615-2633).
gcagtaggtggctacttga

SEQ ID NO: 554841 - DNA, 19 bp, Mus musculus
  siRNA target sequence for Vldlr (NM_013703.1,2618-2636).
gtaggtggctacttgatgt

SEQ ID NO: 554842 - DNA, 19 bp, Mus musculus
  siRNA target sequence for Vldlr (NM_013703.1,2708-2726).
gaggacctgtcgatagaca

SEQ ID NO: 554843 - DNA, 19 bp, Mus musculus
  siRNA target sequence for Vldlr (NM_013703.1,2714-2732).
ctgtcgatagacattggta

SEQ ID NO: 554844 - DNA, 19 bp, Mus musculus
  siRNA target sequence for Vldlr (NM_013703.1,2757-2775).
catacccagcaatatcagt

SEQ ID NO: 554845 - DNA, 19 bp, Mus musculus
  siRNA target sequence for Vsnl1 (NM_012038.2,284-302).
gtagctttgagcagaaact

SEQ ID NO: 554846 - DNA, 19 bp, Mus musculus
  siRNA target sequence for Vsnl1 (NM_012038.2,399-417).
caccgtgatcatgatgaaa

SEQ ID NO: 554847 - DNA, 19 bp, Mus musculus
  siRNA target sequence for Vsnl1 (NM_012038.2,401-419).
ccgtgatcatgatgaaaat

SEQ ID NO: 554848 - DNA, 19 bp, Mus musculus
  siRNA target sequence for Vsnl1 (NM_012038.2,493-511).
cagattacactggatgaat

SEQ ID NO: 554849 - DNA, 19 bp, Mus musculus
  siRNA target sequence for Vsnl1 (NM_012038.2,530-548).
gcgacccttccattgtatt

SEQ ID NO: 554850 - DNA, 19 bp, Mus musculus
  siRNA target sequence for Vsnl1 (NM_012038.2,531-549).
cgacccttccattgtatta

SEQ ID NO: 554851 - DNA, 19 bp, Mus musculus
  siRNA target sequence for Vsnl1 (NM_012038.2,534-552).
cccttccattgtattactt

SEQ ID NO: 554852 - DNA, 19 bp, Mus musculus
  siRNA target sequence for 1110013H04Rik (NM_026752.2,310-328).
caccgagaggcggagtttt

SEQ ID NO: 554853 - DNA, 19 bp, Mus musculus
  siRNA target sequence for 1110013H04Rik (NM_026752.2,314-332).
gagaggcggagttttatga

SEQ ID NO: 554854 - DNA, 19 bp, Mus musculus
  siRNA target sequence for 1110013H04Rik (NM_026752.2,316-334).
gaggcggagttttatgaca

SEQ ID NO: 554855 - DNA, 19 bp, Mus musculus
  siRNA target sequence for 1110013H04Rik (NM_026752.2,358-376).
ggagctaccttccttgtta

SEQ ID NO: 554856 - DNA, 19 bp, Mus musculus
  siRNA target sequence for 1110013H04Rik (NM_026752.2,362-380).
ctaccttccttgttacttt

SEQ ID NO: 554857 - DNA, 19 bp, Mus musculus
  siRNA target sequence for 1110013H04Rik (NM_026752.2,452-470).
gggacagtcatcgtgaaat

SEQ ID NO: 554858 - DNA, 19 bp, Mus musculus
  siRNA target sequence for 1110013H04Rik (NM_026752.2,671-689).
ctaccaagctcctctatga

SEQ ID NO: 554859 - DNA, 19 bp, Mus musculus
  siRNA target sequence for 1110013H04Rik (NM_026752.2,675-693).
caagctcctctatgaatca

SEQ ID NO: 554860 - DNA, 19 bp, Mus musculus
  siRNA target sequence for 1110020C07Rik (NM_018884.1,652-670).
cgctaccagaagaagttca

SEQ ID NO: 554861 - DNA, 19 bp, Mus musculus
  siRNA target sequence for 1110020C07Rik (NM_018884.1,778-796).
ggctccctgggattcaata

SEQ ID NO: 554862 - DNA, 19 bp, Mus musculus
  siRNA target sequence for 1110020C07Rik (NM_018884.1,782-800).
ccctgggattcaatatcat

SEQ ID NO: 554863 - DNA, 19 bp, Mus musculus
  siRNA target sequence for 1110020C07Rik (NM_018884.1,783-801).
cctgggattcaatatcatt

SEQ ID NO: 554864 - DNA, 19 bp, Mus musculus
  siRNA target sequence for 1110020C07Rik (NM_018884.1,833-851).
gatcctccagtgaaggaat

SEQ ID NO: 554865 - DNA, 19 bp, Mus musculus
  siRNA target sequence for 1110020C07Rik (NM_018884.1,837-855).
ctccagtgaaggaatcttt

SEQ ID NO: 554866 - DNA, 19 bp, Mus musculus
  siRNA target sequence for 1110020C07Rik (NM_018884.1,839-857).
ccagtgaaggaatctttgt

SEQ ID NO: 554867 - DNA, 19 bp, Mus musculus
  siRNA target sequence for 1110020C07Rik (NM_018884.1,840-858).
cagtgaaggaatctttgta

SEQ ID NO: 554868 - DNA, 19 bp, Mus musculus
  siRNA target sequence for 1110020C07Rik (NM_018884.1,942-960).
cttatcccgagcaactcat

SEQ ID NO: 554869 - DNA, 19 bp, Mus musculus
  siRNA target sequence for 1110020C07Rik (NM_018884.1,1025-1043).
cacctcgaaccaagatgtt

SEQ ID NO: 554870 - DNA, 19 bp, Mus musculus
  siRNA target sequence for 1110020C07Rik (NM_018884.1,1027-1045).
cctcgaaccaagatgttca

SEQ ID NO: 554871 - DNA, 19 bp, Mus musculus
  siRNA target sequence for 1110020C07Rik (NM_018884.1,1181-1199).
ccgcatcccatgactacta

SEQ ID NO: 554872 - DNA, 19 bp, Mus musculus
  siRNA target sequence for 1110020C07Rik (NM_018884.1,1182-1200).
cgcatcccatgactactat

SEQ ID NO: 554873 - DNA, 19 bp, Mus musculus
  siRNA target sequence for 1110020C07Rik (NM_018884.1,1184-1202).
catcccatgactactatga

SEQ ID NO: 554874 - DNA, 19 bp, Mus musculus
  siRNA target sequence for 1110020C07Rik (NM_018884.1,1212-1230).
ctacatgggggatatccat

SEQ ID NO: 554875 - DNA, 19 bp, Mus musculus
  siRNA target sequence for 1110020C07Rik (NM_018884.1,1336-1354).
gatgacattgggatatata

SEQ ID NO: 554876 - DNA, 19 bp, Mus musculus
  siRNA target sequence for 1110020C07Rik (NM_018884.1,1341-1359).
cattgggatatatataagt

SEQ ID NO: 554877 - DNA, 19 bp, Mus musculus
  siRNA target sequence for 1110020C07Rik (NM_018884.1,1467-1485).
gcttctaaccagtgaagaa

SEQ ID NO: 554878 - DNA, 19 bp, Mus musculus
  siRNA target sequence for 1110020C07Rik (NM_018884.1,1471-1489).
ctaaccagtgaagaaaaca

SEQ ID NO: 554879 - DNA, 19 bp, Mus musculus
  siRNA target sequence for 1110020C07Rik (NM_018884.1,1560-1578).
cgacttcctggatgactta

SEQ ID NO: 554880 - DNA, 19 bp, Mus musculus
  siRNA target sequence for 1110020C07Rik (NM_018884.1,1757-1775).
gctcagaacaggagaataa

SEQ ID NO: 554881 - DNA, 19 bp, Mus musculus
  siRNA target sequence for 1110020C07Rik (NM_018884.1,1767-1785).
ggagaataacggtgaagat

SEQ ID NO: 554882 - DNA, 19 bp, Mus musculus
  siRNA target sequence for 1110020C07Rik (NM_018884.1,2384-2402).
cagctaacatcgaagctta

SEQ ID NO: 554883 - DNA, 19 bp, Mus musculus
  siRNA target sequence for 1110020C07Rik (NM_018884.1,2403-2421).
caggccatcccccaagaat

SEQ ID NO: 554884 - DNA, 19 bp, Mus musculus
  siRNA target sequence for 1110020C07Rik (NM_018884.1,2433-2451).
cactgaggaccctgaagta

SEQ ID NO: 554885 - DNA, 19 bp, Mus musculus
  siRNA target sequence for 1110020C07Rik (NM_018884.1,2621-2639).
cagctcacgcgcaacacta

SEQ ID NO: 554886 - DNA, 19 bp, Mus musculus
  siRNA target sequence for 1110020C07Rik (NM_018884.1,2722-2740).
gacttgaactcttctaact

SEQ ID NO: 554887 - DNA, 19 bp, Mus musculus
  siRNA target sequence for 1110020C07Rik (NM_018884.1,2782-2800).
gacgggacgcgctacatca

SEQ ID NO: 554888 - DNA, 19 bp, Mus musculus
  siRNA target sequence for 1110020C07Rik (NM_018884.1,2830-2848).
cgggagcgtgcgctgaaaa

SEQ ID NO: 554889 - DNA, 19 bp, Mus musculus
  siRNA target sequence for 1110020C07Rik (NM_018884.1,2831-2849).
gggagcgtgcgctgaaaat

SEQ ID NO: 554890 - DNA, 19 bp, Mus musculus
  siRNA target sequence for 1110020C07Rik (NM_018884.1,2867-2885).
gcctgaccacggatgatga

SEQ ID NO: 554891 - DNA, 19 bp, Mus musculus
  siRNA target sequence for 1110020C07Rik (NM_018884.1,2969-2987).
ggaggcgcgagtttatgat

SEQ ID NO: 554892 - DNA, 19 bp, Mus musculus
  siRNA target sequence for 1110020C07Rik (NM_018884.1,3114-3132).
gactatccaagaactctta

SEQ ID NO: 554893 - DNA, 19 bp, Mus musculus
  siRNA target sequence for 1110020C07Rik (NM_018884.1,3129-3147).
cttaacccacggcacaaaa

SEQ ID NO: 554894 - DNA, 19 bp, Mus musculus
  siRNA target sequence for 1110020C07Rik (NM_018884.1,3154-3172).
gacggcactagggtataca

SEQ ID NO: 554895 - DNA, 19 bp, Mus musculus
  siRNA target sequence for 1110020C07Rik (NM_018884.1,3156-3174).
cggcactagggtatacaat

SEQ ID NO: 554896 - DNA, 19 bp, Mus musculus
  siRNA target sequence for 1110020C07Rik (NM_018884.1,3157-3175).
ggcactagggtatacaatt

SEQ ID NO: 554897 - DNA, 19 bp, Mus musculus
  siRNA target sequence for 1110020C07Rik (NM_018884.1,3180-3198).
cctgtcggtgactactgta

SEQ ID NO: 554898 - DNA, 19 bp, Mus musculus
  siRNA target sequence for 1110064L07Rik (NM_175401.2,562-580).
gtggcgtgcatctggttat

SEQ ID NO: 554899 - DNA, 19 bp, Mus musculus
  siRNA target sequence for 1110064L07Rik (NM_175401.2,564-582).
ggcgtgcatctggttatca

SEQ ID NO: 554900 - DNA, 19 bp, Mus musculus
  siRNA target sequence for 1110064L07Rik (NM_175401.2,566-584).
cgtgcatctggttatcact

SEQ ID NO: 554901 - DNA, 19 bp, Mus musculus
  siRNA target sequence for 1110064L07Rik (NM_175401.2,567-585).
gtgcatctggttatcacta

SEQ ID NO: 554902 - DNA, 19 bp, Mus musculus
  siRNA target sequence for 1110064L07Rik (NM_175401.2,686-704).
gttcacggttcctctagaa

SEQ ID NO: 554903 - DNA, 19 bp, Mus musculus
  siRNA target sequence for 1110064L07Rik (NM_175401.2,767-785).
catgtaccgggtgatagaa

SEQ ID NO: 554904 - DNA, 19 bp, Mus musculus
  siRNA target sequence for 1110064L07Rik (NM_175401.2,813-831).
gtgctgggcttcagaagta

SEQ ID NO: 554905 - DNA, 19 bp, Mus musculus
  siRNA target sequence for 1110068E08Rik (NM_026858.2,237-255).
gaagacgctggataccaat

SEQ ID NO: 554906 - DNA, 19 bp, Mus musculus
  siRNA target sequence for 1110068E08Rik (NM_026858.2,243-261).
gctggataccaatccatat

SEQ ID NO: 554907 - DNA, 19 bp, Mus musculus
  siRNA target sequence for 1110068E08Rik (NM_026858.2,247-265).
gataccaatccatatgtca

SEQ ID NO: 554908 - DNA, 19 bp, Mus musculus
  siRNA target sequence for 1110068E08Rik (NM_026858.2,251-269).
ccaatccatatgtcaaact

SEQ ID NO: 554909 - DNA, 19 bp, Mus musculus
  siRNA target sequence for 1110068E08Rik (NM_026858.2,257-275).
catatgtcaaacttctact

SEQ ID NO: 554910 - DNA, 19 bp, Mus musculus
  siRNA target sequence for 1110068E08Rik (NM_026858.2,329-347).
gcgaagtctgcgatggaaa

SEQ ID NO: 554911 - DNA, 19 bp, Mus musculus
  siRNA target sequence for 1110068E08Rik (NM_026858.2,348-366).
cgtcagcggaggctttgat

SEQ ID NO: 554912 - DNA, 19 bp, Mus musculus
  siRNA target sequence for 1110068E08Rik (NM_026858.2,368-386).
cgtctacgtctcagattgt

SEQ ID NO: 554913 - DNA, 19 bp, Mus musculus
  siRNA target sequence for 1110068E08Rik (NM_026858.2,369-387).
gtctacgtctcagattgtt

SEQ ID NO: 554914 - DNA, 19 bp, Mus musculus
  siRNA target sequence for 1110068E08Rik (NM_026858.2,371-389).
ctacgtctcagattgtttt

SEQ ID NO: 554915 - DNA, 19 bp, Mus musculus
  siRNA target sequence for 1110068E08Rik (NM_026858.2,385-403).
gttttgtgcgagaataaca

SEQ ID NO: 554916 - DNA, 19 bp, Mus musculus
  siRNA target sequence for 1110068E08Rik (NM_026858.2,542-560).
gggactgctcccttgtgaa

SEQ ID NO: 554917 - DNA, 19 bp, Mus musculus
  siRNA target sequence for 1110068E08Rik (NM_026858.2,551-569).
cccttgtgaacgaactctt

SEQ ID NO: 554918 - DNA, 19 bp, Mus musculus
  siRNA target sequence for 1110068E08Rik (NM_026858.2,567-585).
cttcaggctgcgttttgga

SEQ ID NO: 554919 - DNA, 19 bp, Mus musculus
  siRNA target sequence for 1110068E08Rik (NM_026858.2,570-588).
caggctgcgttttggatta

SEQ ID NO: 554920 - DNA, 19 bp, Mus musculus
  siRNA target sequence for 1110068E08Rik (NM_026858.2,572-590).
ggctgcgttttggattaaa

SEQ ID NO: 554921 - DNA, 19 bp, Mus musculus
  siRNA target sequence for 1110068E08Rik (NM_026858.2,626-644).
gacctgctatgaattcaca

SEQ ID NO: 554922 - DNA, 19 bp, Mus musculus
  siRNA target sequence for 1110070J07Rik (NM_175175.3,203-221).
cagtgaggcgaatactaga

SEQ ID NO: 554923 - DNA, 19 bp, Mus musculus
  siRNA target sequence for 1110070J07Rik (NM_175175.3,212-230).
gaatactagacgcataagt

SEQ ID NO: 554924 - DNA, 19 bp, Mus musculus
  siRNA target sequence for 1110070J07Rik (NM_175175.3,217-235).
ctagacgcataagtattgt

SEQ ID NO: 554925 - DNA, 19 bp, Mus musculus
  siRNA target sequence for 1110070J07Rik (NM_175175.3,294-312).
ggagaaggagtgttgacta

SEQ ID NO: 554926 - DNA, 19 bp, Mus musculus
  siRNA target sequence for 1110070J07Rik (NM_175175.3,295-313).
gagaaggagtgttgactaa

SEQ ID NO: 554927 - DNA, 19 bp, Mus musculus
  siRNA target sequence for 1110070J07Rik (NM_175175.3,336-354).
gcaaggcagtttttcttat

SEQ ID NO: 554928 - DNA, 19 bp, Mus musculus
  siRNA target sequence for 1110070J07Rik (NM_175175.3,340-358).
ggcagtttttcttatttaa

SEQ ID NO: 554929 - DNA, 19 bp, Mus musculus
  siRNA target sequence for 1110070J07Rik (NM_175175.3,369-387).
gtatacggcaatattgtta

SEQ ID NO: 554930 - DNA, 19 bp, Mus musculus
  siRNA target sequence for 1110070J07Rik (NM_175175.3,462-480).
ggggaattacggaatggat

SEQ ID NO: 554931 - DNA, 19 bp, Mus musculus
  siRNA target sequence for 1110070J07Rik (NM_175175.3,499-517).
ctaagtcgtttgcagttta

SEQ ID NO: 554932 - DNA, 19 bp, Mus musculus
  siRNA target sequence for 1110070J07Rik (NM_175175.3,503-521).
gtcgtttgcagtttatgct

SEQ ID NO: 554933 - DNA, 19 bp, Mus musculus
  siRNA target sequence for 1110070J07Rik (NM_175175.3,541-559).
cagagtggatgaatcacat

SEQ ID NO: 554934 - DNA, 19 bp, Mus musculus
  siRNA target sequence for 1110070J07Rik (NM_175175.3,543-561).
gagtggatgaatcacataa

SEQ ID NO: 554935 - DNA, 19 bp, Mus musculus
  siRNA target sequence for 1110070J07Rik (NM_175175.3,545-563).
gtggatgaatcacataaat

SEQ ID NO: 554936 - DNA, 19 bp, Mus musculus
  siRNA target sequence for 1110070J07Rik (NM_175175.3,547-565).
ggatgaatcacataaataa

SEQ ID NO: 554937 - DNA, 19 bp, Mus musculus
  siRNA target sequence for 1110070J07Rik (NM_175175.3,551-569).
gaatcacataaataagtgt

SEQ ID NO: 554938 - DNA, 19 bp, Mus musculus
  siRNA target sequence for 1110070J07Rik (NM_175175.3,640-658).
ctgaggccaccgtgtgtat

SEQ ID NO: 554939 - DNA, 19 bp, Mus musculus
  siRNA target sequence for 1110070J07Rik (NM_175175.3,653-671).
gtgtatgcgctgtcagaaa

SEQ ID NO: 554940 - DNA, 19 bp, Mus musculus
  siRNA target sequence for 1110070J07Rik (NM_175175.3,661-679).
gctgtcagaaagcaaaatt

SEQ ID NO: 554941 - DNA, 19 bp, Mus musculus
  siRNA target sequence for 1110070J07Rik (NM_175175.3,698-716).
gcaccattgccgcaaatgt

SEQ ID NO: 554942 - DNA, 19 bp, Mus musculus
  siRNA target sequence for 1110070J07Rik (NM_175175.3,834-852).
gcgtgtcagccgactagat

SEQ ID NO: 554943 - DNA, 19 bp, Mus musculus
  siRNA target sequence for 1110070J07Rik (NM_175175.3,836-854).
gtgtcagccgactagatca

SEQ ID NO: 554944 - DNA, 19 bp, Mus musculus
  siRNA target sequence for 1110070J07Rik (NM_175175.3,844-862).
cgactagatcagactctta

SEQ ID NO: 554945 - DNA, 19 bp, Mus musculus
  siRNA target sequence for 1110070J07Rik (NM_175175.3,845-863).
gactagatcagactcttat

SEQ ID NO: 554946 - DNA, 19 bp, Mus musculus
  siRNA target sequence for 1110070J07Rik (NM_175175.3,869-887).
gtcgttgaagtctccttta

SEQ ID NO: 554947 - DNA, 19 bp, Mus musculus
  siRNA target sequence for 1110070J07Rik (NM_175175.3,872-890).
gttgaagtctcctttaaat

SEQ ID NO: 554948 - DNA, 19 bp, Mus musculus
  siRNA target sequence for 1500041L05Rik (NM_028054.1,260-278).
gtaacggctgtcttagctt

SEQ ID NO: 554949 - DNA, 19 bp, Mus musculus
  siRNA target sequence for 1500041L05Rik (NM_028054.1,323-341).
gcaagcagtgccacacaat

SEQ ID NO: 554950 - DNA, 19 bp, Mus musculus
  siRNA target sequence for 1500041L05Rik (NM_028054.1,352-370).
gggtcttctgacaatgctt

SEQ ID NO: 554951 - DNA, 19 bp, Mus musculus
  siRNA target sequence for 1500041L05Rik (NM_028054.1,377-395).
ggtcaccacctcagaacta

SEQ ID NO: 554952 - DNA, 19 bp, Mus musculus
  siRNA target sequence for 1500041L05Rik (NM_028054.1,380-398).
caccacctcagaactataa

SEQ ID NO: 554953 - DNA, 19 bp, Mus musculus
  siRNA target sequence for 1500041L05Rik (NM_028054.1,494-512).
cacggcttcgtcaggaaaa

SEQ ID NO: 554954 - DNA, 19 bp, Mus musculus
  siRNA target sequence for 1500041L05Rik (NM_028054.1,496-514).
cggcttcgtcaggaaaaca

SEQ ID NO: 554955 - DNA, 19 bp, Mus musculus
  siRNA target sequence for 1500041L05Rik (NM_028054.1,497-515).
ggcttcgtcaggaaaacaa

SEQ ID NO: 554956 - DNA, 19 bp, Mus musculus
  siRNA target sequence for 1500041L05Rik (NM_028054.1,930-948).
cctggctcttgccaaaaga

SEQ ID NO: 554957 - DNA, 19 bp, Mus musculus
  siRNA target sequence for 1500041L05Rik (NM_028054.1,1199-1217).
gcaatgaggatgctacttt

SEQ ID NO: 554958 - DNA, 19 bp, Mus musculus
  siRNA target sequence for 1500041L05Rik (NM_028054.1,1264-1282).
cgggagggccatgataact

SEQ ID NO: 554959 - DNA, 19 bp, Mus musculus
  siRNA target sequence for 1500041L05Rik (NM_028054.1,1265-1283).
gggagggccatgataactt

SEQ ID NO: 554960 - DNA, 19 bp, Mus musculus
  siRNA target sequence for 1500041L05Rik (NM_028054.1,1266-1284).
ggagggccatgataacttt

SEQ ID NO: 554961 - DNA, 19 bp, Mus musculus
  siRNA target sequence for 1500041L05Rik (NM_028054.1,1269-1287).
gggccatgataactttgat

SEQ ID NO: 554962 - DNA, 19 bp, Mus musculus
  siRNA target sequence for 1700010O16Rik (NM_026205.2,77-95).
gtggtgggtacgatctcaa

SEQ ID NO: 554963 - DNA, 19 bp, Mus musculus
  siRNA target sequence for 1700010O16Rik (NM_026205.2,209-227).
ggtggctagccagacaaaa

SEQ ID NO: 554964 - DNA, 19 bp, Mus musculus
  siRNA target sequence for 1700010O16Rik (NM_026205.2,263-281).
gaaagatggtcgaagtgaa

SEQ ID NO: 554965 - DNA, 19 bp, Mus musculus
  siRNA target sequence for 1700010O16Rik (NM_026205.2,267-285).
gatggtcgaagtgaataaa

SEQ ID NO: 554966 - DNA, 19 bp, Mus musculus
  siRNA target sequence for 1700010O16Rik (NM_026205.2,277-295).
gtgaataaactccgaaaaa

SEQ ID NO: 554967 - DNA, 19 bp, Mus musculus
  siRNA target sequence for 1700010O16Rik (NM_026205.2,443-461).
gaggggtcctggatgaaca

SEQ ID NO: 554968 - DNA, 19 bp, Mus musculus
  siRNA target sequence for 1700010O16Rik (NM_026205.2,767-785).
gtacgcagggccaaagtgt

SEQ ID NO: 554969 - DNA, 19 bp, Mus musculus
  siRNA target sequence for 1700010O16Rik (NM_026205.2,771-789).
gcagggccaaagtgtctta

SEQ ID NO: 554970 - DNA, 19 bp, Mus musculus
  siRNA target sequence for 1700010O16Rik (NM_026205.2,772-790).
cagggccaaagtgtcttat

SEQ ID NO: 554971 - DNA, 19 bp, Mus musculus
  siRNA target sequence for 1810013P09Rik (NM_024413.1,185-203).
caagccacgcatcttcttt

SEQ ID NO: 554972 - DNA, 19 bp, Mus musculus
  siRNA target sequence for 1810013P09Rik (NM_024413.1,257-275).
ccgcagccagcatattatt

SEQ ID NO: 554973 - DNA, 19 bp, Mus musculus
  siRNA target sequence for 1810013P09Rik (NM_024413.1,276-294).
cccctagaagaggtaacat

SEQ ID NO: 554974 - DNA, 19 bp, Mus musculus
  siRNA target sequence for 1810013P09Rik (NM_024413.1,385-403).
cggagcgccaggaatggat

SEQ ID NO: 554975 - DNA, 19 bp, Mus musculus
  siRNA target sequence for 1810013P09Rik (NM_024413.1,387-405).
gagcgccaggaatggataa

SEQ ID NO: 554976 - DNA, 19 bp, Mus musculus
  siRNA target sequence for 1810013P09Rik (NM_024413.1,489-507).
gacaaggccacggacattt

SEQ ID NO: 554977 - DNA, 19 bp, Mus musculus
  siRNA target sequence for 1810016I24Rik (NM_029880.1,131-149).
caaagagtggtattgaatt

SEQ ID NO: 554978 - DNA, 19 bp, Mus musculus
  siRNA target sequence for 1810016I24Rik (NM_029880.1,152-170).
cgacctgggaaaaatggaa

SEQ ID NO: 554979 - DNA, 19 bp, Mus musculus
  siRNA target sequence for 1810016I24Rik (NM_029880.1,236-254).
gttcaagtgaggactcttt

SEQ ID NO: 554980 - DNA, 19 bp, Mus musculus
  siRNA target sequence for 1810016I24Rik (NM_029880.1,242-260).
gtgaggactctttatctct

SEQ ID NO: 554981 - DNA, 19 bp, Mus musculus
  siRNA target sequence for 1810016I24Rik (NM_029880.1,269-287).
ccttacatgcgctgtaaga

SEQ ID NO: 554982 - DNA, 19 bp, Mus musculus
  siRNA target sequence for 1810016I24Rik (NM_029880.1,270-288).
cttacatgcgctgtaagat

SEQ ID NO: 554983 - DNA, 19 bp, Mus musculus
  siRNA target sequence for 1810016I24Rik (NM_029880.1,400-418).
cgattttgtgacttcgttt

SEQ ID NO: 554984 - DNA, 19 bp, Mus musculus
  siRNA target sequence for 1810016I24Rik (NM_029880.1,453-471).
ggaatggccttgaaaaggt

SEQ ID NO: 554985 - DNA, 19 bp, Mus musculus
  siRNA target sequence for 1810016I24Rik (NM_029880.1,454-472).
gaatggccttgaaaaggta

SEQ ID NO: 554986 - DNA, 19 bp, Mus musculus
  siRNA target sequence for 1810016I24Rik (NM_029880.1,485-503).
gtagatggacacctttcat

SEQ ID NO: 554987 - DNA, 19 bp, Mus musculus
  siRNA target sequence for 1810016I24Rik (NM_029880.1,521-539).
ggtatgcctggcttgactt

SEQ ID NO: 554988 - DNA, 19 bp, Mus musculus
  siRNA target sequence for 1810016I24Rik (NM_029880.1,576-594).
ctggatctaatcagacaat

SEQ ID NO: 554989 - DNA, 19 bp, Mus musculus
  siRNA target sequence for 1810016I24Rik (NM_029880.1,612-630).
caggcgcctgtggatcttt

SEQ ID NO: 554990 - DNA, 19 bp, Mus musculus
  siRNA target sequence for 1810016I24Rik (NM_029880.1,664-682).
cagagtggtgggaatttgt

SEQ ID NO: 554991 - DNA, 19 bp, Mus musculus
  siRNA target sequence for 1810016I24Rik (NM_029880.1,731-749).
gctgcagttaattacaaaa

SEQ ID NO: 554992 - DNA, 19 bp, Mus musculus
  siRNA target sequence for 1810016I24Rik (NM_029880.1,789-807).
gcggagtggatgtctactt

SEQ ID NO: 554993 - DNA, 19 bp, Mus musculus
  siRNA target sequence for 1810016I24Rik (NM_029880.1,829-847).
cagcaacgcggtgataagt

SEQ ID NO: 554994 - DNA, 19 bp, Mus musculus
  siRNA target sequence for 1810016I24Rik (NM_029880.1,831-849).
gcaacgcggtgataagtca

SEQ ID NO: 554995 - DNA, 19 bp, Mus musculus
  siRNA target sequence for 1810016I24Rik (NM_029880.1,974-992).
gagagatttacggtattaa

SEQ ID NO: 554996 - DNA, 19 bp, Mus musculus
  siRNA target sequence for 1810016I24Rik (NM_029880.1,1027-1045).
gctgagtcagtggtttaaa

SEQ ID NO: 554997 - DNA, 19 bp, Mus musculus
  siRNA target sequence for 1810016I24Rik (NM_029880.1,1128-1146).
gcaacgtagggaaacagat

SEQ ID NO: 554998 - DNA, 19 bp, Mus musculus
  siRNA target sequence for 1810016I24Rik (NM_029880.1,1144-1162).
gatcgtctgcatttcagaa

SEQ ID NO: 554999 - DNA, 19 bp, Mus musculus
  siRNA target sequence for 1810016I24Rik (NM_029880.1,1150-1168).
ctgcatttcagaagattct

SEQ ID NO: 555000 - DNA, 19 bp, Mus musculus
  siRNA target sequence for 2010001O09Rik (NM_025909.1,100-118).
gtttctctctggagtgaat

SEQ ID NO: 555001 - DNA, 19 bp, Mus musculus
  siRNA target sequence for 2010001O09Rik (NM_025909.1,176-194).
ctccgagcagtaaatgcat

SEQ ID NO: 555002 - DNA, 19 bp, Mus musculus
  siRNA target sequence for 2010001O09Rik (NM_025909.1,234-252).
ccttactgcctagaaactt

SEQ ID NO: 555003 - DNA, 19 bp, Mus musculus
  siRNA target sequence for 2010001O09Rik (NM_025909.1,235-253).
cttactgcctagaaacttt

SEQ ID NO: 555004 - DNA, 19 bp, Mus musculus
  siRNA target sequence for 2010001O09Rik (NM_025909.1,320-338).
ggggtgcttacctacagat

SEQ ID NO: 555005 - DNA, 19 bp, Mus musculus
  siRNA target sequence for 2010001O09Rik (NM_025909.1,323-341).
gtgcttacctacagatgta

SEQ ID NO: 555006 - DNA, 19 bp, Mus musculus
  siRNA target sequence for 2010001O09Rik (NM_025909.1,325-343).
gcttacctacagatgtact

SEQ ID NO: 555007 - DNA, 19 bp, Mus musculus
  siRNA target sequence for 2010001O09Rik (NM_025909.1,349-367).
gggtgattctgttctaaga

SEQ ID NO: 555008 - DNA, 19 bp, Mus musculus
  siRNA target sequence for 2010001O09Rik (NM_025909.1,445-463).
ccggagtttccgtacatct

SEQ ID NO: 555009 - DNA, 19 bp, Mus musculus
  siRNA target sequence for 2010001O09Rik (NM_025909.1,569-587).
gcacttccccctaacaaga

SEQ ID NO: 555010 - DNA, 19 bp, Mus musculus
  siRNA target sequence for 2010001O09Rik (NM_025909.1,579-597).
ctaacaagaaggagctatt

SEQ ID NO: 555011 - DNA, 19 bp, Mus musculus
  siRNA target sequence for 2010001O09Rik (NM_025909.1,654-672).
gactgctctttgtagtgtt

SEQ ID NO: 555012 - DNA, 19 bp, Mus musculus
  siRNA target sequence for 2010001O09Rik (NM_025909.1,703-721).
caccggaaggagtaaacta

SEQ ID NO: 555013 - DNA, 19 bp, Mus musculus
  siRNA target sequence for 2010001O09Rik (NM_025909.1,705-723).
ccggaaggagtaaactact

SEQ ID NO: 555014 - DNA, 19 bp, Mus musculus
  siRNA target sequence for 2010001O09Rik (NM_025909.1,754-772).
gtcagacctggaatatgaa

SEQ ID NO: 555015 - DNA, 19 bp, Mus musculus
  siRNA target sequence for 2010001O09Rik (NM_025909.1,820-838).
ccgctacctgactgtgaaa

SEQ ID NO: 555016 - DNA, 19 bp, Mus musculus
  siRNA target sequence for 2010001O09Rik (NM_025909.1,829-847).
gactgtgaaagaaatggtt

SEQ ID NO: 555017 - DNA, 19 bp, Mus musculus
  siRNA target sequence for 2010001O09Rik (NM_025909.1,894-912).
ccaactgggtggttcatgt

SEQ ID NO: 555018 - DNA, 19 bp, Mus musculus
  siRNA target sequence for 2010001O09Rik (NM_025909.1,937-955).
ctttgtgctcccaaatgga

SEQ ID NO: 555019 - DNA, 19 bp, Mus musculus
  siRNA target sequence for 2010001O09Rik (NM_025909.1,947-965).
ccaaatggacaagtgttta

SEQ ID NO: 555020 - DNA, 19 bp, Mus musculus
  siRNA target sequence for 2010001O09Rik (NM_025909.1,953-971).
ggacaagtgtttattttca

SEQ ID NO: 555021 - DNA, 19 bp, Mus musculus
  siRNA target sequence for 2010001O09Rik (NM_025909.1,970-988).
caccgggcttctgaatagt

SEQ ID NO: 555022 - DNA, 19 bp, Mus musculus
  siRNA target sequence for 2010001O09Rik (NM_025909.1,1158-1176).
gccagtggatacagtcaaa

SEQ ID NO: 555023 - DNA, 19 bp, Mus musculus
  siRNA target sequence for 2010001O09Rik (NM_025909.1,1192-1210).
gtttgatcgaccatacagt

SEQ ID NO: 555024 - DNA, 19 bp, Mus musculus
  siRNA target sequence for 2010001O09Rik (NM_025909.1,1196-1214).
gatcgaccatacagtagaa

SEQ ID NO: 555025 - DNA, 19 bp, Mus musculus
  siRNA target sequence for 2010001O09Rik (NM_025909.1,1199-1217).
cgaccatacagtagaacat

SEQ ID NO: 555026 - DNA, 19 bp, Mus musculus
  siRNA target sequence for 2010001O09Rik (NM_025909.1,1200-1218).
gaccatacagtagaacatt

SEQ ID NO: 555027 - DNA, 19 bp, Mus musculus
  siRNA target sequence for 2010001O09Rik (NM_025909.1,1222-1240).
ggccgaagctgacaaagtt

SEQ ID NO: 555028 - DNA, 19 bp, Mus musculus
  siRNA target sequence for 2010001O09Rik (NM_025909.1,1261-1279).
ggcatgtgccgatgtaaga

SEQ ID NO: 555029 - DNA, 19 bp, Mus musculus
  siRNA target sequence for 2010001O09Rik (NM_025909.1,1309-1327).
gttctcagagagtcttcat

SEQ ID NO: 555030 - DNA, 19 bp, Mus musculus
  siRNA target sequence for 2010001O09Rik (NM_025909.1,1383-1401).
ctgagtacttggatagact

SEQ ID NO: 555031 - DNA, 19 bp, Mus musculus
  siRNA target sequence for 2010001O09Rik (NM_025909.1,1457-1475).
ccagaccctcggctattgt

SEQ ID NO: 555032 - DNA, 19 bp, Mus musculus
  siRNA target sequence for 2010001O09Rik (NM_025909.1,1460-1478).
gaccctcggctattgttca

SEQ ID NO: 555033 - DNA, 19 bp, Mus musculus
  siRNA target sequence for 2210011N02Rik (NM_177319.2,398-416).
ctgggcctcaacatcttgt

SEQ ID NO: 555034 - DNA, 19 bp, Mus musculus
  siRNA target sequence for 2210011N02Rik (NM_177319.2,447-465).
ccatgggtgccttgatgat

SEQ ID NO: 555035 - DNA, 19 bp, Mus musculus
  siRNA target sequence for 2210011N02Rik (NM_177319.2,685-703).
gtcagcctaccgtgtactt

SEQ ID NO: 555036 - DNA, 19 bp, Mus musculus
  siRNA target sequence for 2210011N02Rik (NM_177319.2,687-705).
cagcctaccgtgtacttca

SEQ ID NO: 555037 - DNA, 19 bp, Mus musculus
  siRNA target sequence for 2210011N02Rik (NM_177319.2,789-807).
gggtcctcgccctgttaaa

SEQ ID NO: 555038 - DNA, 19 bp, Mus musculus
  siRNA target sequence for 2210011N02Rik (NM_177319.2,790-808).
ggtcctcgccctgttaaat

SEQ ID NO: 555039 - DNA, 19 bp, Mus musculus
  siRNA target sequence for 2210011N02Rik (NM_177319.2,794-812).
ctcgccctgttaaatagca

SEQ ID NO: 555040 - DNA, 19 bp, Mus musculus
  siRNA target sequence for 2210011N02Rik (NM_177319.2,1033-1051).
ggagttcaaagatgcaatt

SEQ ID NO: 555041 - DNA, 19 bp, Mus musculus
  siRNA target sequence for 2210011N02Rik (NM_177319.2,1199-1217).
cgttacccaaccaataact

SEQ ID NO: 555042 - DNA, 19 bp, Mus musculus
  siRNA target sequence for 2210011N02Rik (NM_177319.2,1210-1228).
caataacttcgggaattgt

SEQ ID NO: 555043 - DNA, 19 bp, Mus musculus
  siRNA target sequence for 2210023F24Rik (NM_172570.2,905-923).
gggtgacctgcgtagacaa

SEQ ID NO: 555044 - DNA, 19 bp, Mus musculus
  siRNA target sequence for 2210023F24Rik (NM_172570.2,1300-1318).
gcgacaccgcggacaagtt

SEQ ID NO: 555045 - DNA, 19 bp, Mus musculus
  siRNA target sequence for 2210023F24Rik (NM_172570.2,1325-1343).
gctttttggaactaaaggt

SEQ ID NO: 555046 - DNA, 19 bp, Mus musculus
  siRNA target sequence for 2210023F24Rik (NM_172570.2,1762-1780).
cccccactgacccttttca

SEQ ID NO: 555047 - DNA, 19 bp, Mus musculus
  siRNA target sequence for 2210023F24Rik (NM_172570.2,1764-1782).
cccactgacccttttcaga

SEQ ID NO: 555048 - DNA, 19 bp, Mus musculus
  siRNA target sequence for 2210023F24Rik (NM_172570.2,1872-1890).
ggacctctcaagaaatcgt

SEQ ID NO: 555049 - DNA, 19 bp, Mus musculus
  siRNA target sequence for 2210023F24Rik (NM_172570.2,1878-1896).
ctcaagaaatcgtgcataa

SEQ ID NO: 555050 - DNA, 19 bp, Mus musculus
  siRNA target sequence for 2310035M22Rik (NM_025863.2,190-208).
gtactaccatgctctcata

SEQ ID NO: 555051 - DNA, 19 bp, Mus musculus
  siRNA target sequence for 2310035M22Rik (NM_025863.2,196-214).
ccatgctctcatacatttt

SEQ ID NO: 555052 - DNA, 19 bp, Mus musculus
  siRNA target sequence for 2310035M22Rik (NM_025863.2,201-219).
ctctcatacattttgtaga

SEQ ID NO: 555053 - DNA, 19 bp, Mus musculus
  siRNA target sequence for 2310035M22Rik (NM_025863.2,365-383).
gagcaattattgaaaagta

SEQ ID NO: 555054 - DNA, 19 bp, Mus musculus
  siRNA target sequence for 2310035M22Rik (NM_025863.2,820-838).
caacttgaattaatgacaa

SEQ ID NO: 555055 - DNA, 19 bp, Mus musculus
  siRNA target sequence for 2310035M22Rik (NM_025863.2,823-841).
cttgaattaatgacaataa

SEQ ID NO: 555056 - DNA, 19 bp, Mus musculus
  siRNA target sequence for 2310035M22Rik (NM_025863.2,856-874).
gatgagtctccacttaaat

SEQ ID NO: 555057 - DNA, 19 bp, Mus musculus
  siRNA target sequence for 2310035M22Rik (NM_025863.2,1165-1183).
cttttcaaccatcacataa

SEQ ID NO: 555058 - DNA, 19 bp, Mus musculus
  siRNA target sequence for 2310035M22Rik (NM_025863.2,1170-1188).
caaccatcacataataaca

SEQ ID NO: 555059 - DNA, 19 bp, Mus musculus
  siRNA target sequence for 2310035M22Rik (NM_025863.2,1174-1192).
catcacataataacattct

SEQ ID NO: 555060 - DNA, 19 bp, Mus musculus
  siRNA target sequence for 2310035M22Rik (NM_025863.2,1243-1261).
cagagtttatctaagaact

SEQ ID NO: 555061 - DNA, 19 bp, Mus musculus
  siRNA target sequence for 2310035M22Rik (NM_025863.2,1260-1278).
cttatatgacttaaacaat

SEQ ID NO: 555062 - DNA, 19 bp, Mus musculus
  siRNA target sequence for 2310066B14Rik (NM_181579.1,200-218).
ctcagcattaccactatta

SEQ ID NO: 555063 - DNA, 19 bp, Mus musculus
  siRNA target sequence for 2310066B14Rik (NM_181579.1,361-379).
gcctcctcctaccaaagtt

SEQ ID NO: 555064 - DNA, 19 bp, Mus musculus
  siRNA target sequence for 2310066B14Rik (NM_181579.1,362-380).
cctcctcctaccaaagttt

SEQ ID NO: 555065 - DNA, 19 bp, Mus musculus
  siRNA target sequence for 2310066B14Rik (NM_181579.1,447-465).
cactctccacataacacaa

SEQ ID NO: 555066 - DNA, 19 bp, Mus musculus
  siRNA target sequence for 2310066B14Rik (NM_181579.1,490-508).
ccaacagtgaaagttacta

SEQ ID NO: 555067 - DNA, 19 bp, Mus musculus
  siRNA target sequence for 2310066B14Rik (NM_181579.1,494-512).
cagtgaaagttactacata

SEQ ID NO: 555068 - DNA, 19 bp, Mus musculus
  siRNA target sequence for 2310066B14Rik (NM_181579.1,498-516).
gaaagttactacatatcca

SEQ ID NO: 555069 - DNA, 19 bp, Mus musculus
  siRNA target sequence for 2310066B14Rik (NM_181579.1,521-539).
ccaccattaggagatacat

SEQ ID NO: 555070 - DNA, 19 bp, Mus musculus
  siRNA target sequence for 2310066B14Rik (NM_181579.1,530-548).
ggagatacatagtacaaaa

SEQ ID NO: 555071 - DNA, 19 bp, Mus musculus
  siRNA target sequence for 2310066B14Rik (NM_181579.1,577-595).
ctaagaggaagtcaattct

SEQ ID NO: 555072 - DNA, 19 bp, Mus musculus
  siRNA target sequence for 2310066B14Rik (NM_181579.1,599-617).
caggaaacaatgtaattta

SEQ ID NO: 555073 - DNA, 19 bp, Mus musculus
  siRNA target sequence for 2310066B14Rik (NM_181579.1,648-666).
caacacagatcaagaatgt

SEQ ID NO: 555074 - DNA, 19 bp, Mus musculus
  siRNA target sequence for 2310066B14Rik (NM_181579.1,714-732).
catccactcgccacattgt

SEQ ID NO: 555075 - DNA, 19 bp, Mus musculus
  siRNA target sequence for 2310066B14Rik (NM_181579.1,740-758).
cccattctagccatcaaat

SEQ ID NO: 555076 - DNA, 19 bp, Mus musculus
  siRNA target sequence for 2310066B14Rik (NM_181579.1,759-777).
ccagtgtataacagaaaat

SEQ ID NO: 555077 - DNA, 19 bp, Mus musculus
  siRNA target sequence for 2310066B14Rik (NM_181579.1,782-800).
caaatattgggcatgaact

SEQ ID NO: 555078 - DNA, 19 bp, Mus musculus
  siRNA target sequence for 2310066B14Rik (NM_181579.1,867-885).
ggatcccaaatattttgga

SEQ ID NO: 555079 - DNA, 19 bp, Mus musculus
  siRNA target sequence for 2310066B14Rik (NM_181579.1,888-906).
gttgcttgctgatctaagt

SEQ ID NO: 555080 - DNA, 19 bp, Mus musculus
  siRNA target sequence for 2310066B14Rik (NM_181579.1,898-916).
gatctaagtcgcaagaata

SEQ ID NO: 555081 - DNA, 19 bp, Mus musculus
  siRNA target sequence for 2310066B14Rik (NM_181579.1,908-926).
gcaagaatacagacctata

SEQ ID NO: 555082 - DNA, 19 bp, Mus musculus
  siRNA target sequence for 2310066B14Rik (NM_181579.1,928-946).
cactgcttattagaacatt

SEQ ID NO: 555083 - DNA, 19 bp, Mus musculus
  siRNA target sequence for 2310066B14Rik (NM_181579.1,932-950).
gcttattagaacatttgga

SEQ ID NO: 555084 - DNA, 19 bp, Mus musculus
  siRNA target sequence for 2310066B14Rik (NM_181579.1,951-969).
gcgaattggaggaagcaaa

SEQ ID NO: 555085 - DNA, 19 bp, Mus musculus
  siRNA target sequence for 2310066B14Rik (NM_181579.1,1024-1042).
ggactgtcagagtttacaa

SEQ ID NO: 555086 - DNA, 19 bp, Mus musculus
  siRNA target sequence for 2310066B14Rik (NM_181579.1,1065-1083).
gcagatgaggggtatgtct

SEQ ID NO: 555087 - DNA, 19 bp, Mus musculus
  siRNA target sequence for 2310066B14Rik (NM_181579.1,1099-1117).
ctagtgctgtccacgttta

SEQ ID NO: 555088 - DNA, 19 bp, Mus musculus
  siRNA target sequence for 2310066B14Rik (NM_181579.1,1107-1125).
gtccacgtttagcaacata

SEQ ID NO: 555089 - DNA, 19 bp, Mus musculus
  siRNA target sequence for 2310066B14Rik (NM_181579.1,1174-1192).
gacaagataagacttgaaa

SEQ ID NO: 555090 - DNA, 19 bp, Mus musculus
  siRNA target sequence for 2310066B14Rik (NM_181579.1,1242-1260).
ggcatcagtgagagcaaat

SEQ ID NO: 555091 - DNA, 19 bp, Mus musculus
  siRNA target sequence for 2310066B14Rik (NM_181579.1,1244-1262).
catcagtgagagcaaataa

SEQ ID NO: 555092 - DNA, 19 bp, Mus musculus
  siRNA target sequence for 2310066B14Rik (NM_181579.1,1285-1303).
caagactcaagcgcaaaat

SEQ ID NO: 555093 - DNA, 19 bp, Mus musculus
  siRNA target sequence for 2310066B14Rik (NM_181579.1,1326-1344).
cctttctcttcgacataca

SEQ ID NO: 555094 - DNA, 19 bp, Mus musculus
  siRNA target sequence for 2310066B14Rik (NM_181579.1,1366-1384).
ctgaaagaacttgagtatt

SEQ ID NO: 555095 - DNA, 19 bp, Mus musculus
  siRNA target sequence for 2310066B14Rik (NM_181579.1,1380-1398).
gtattgtaaacgcaattta

SEQ ID NO: 555096 - DNA, 19 bp, Mus musculus
  siRNA target sequence for 2310066B14Rik (NM_181579.1,1401-1419).
gcaagagaataaaaacctt

SEQ ID NO: 555097 - DNA, 19 bp, Mus musculus
  siRNA target sequence for 2310066B14Rik (NM_181579.1,1450-1468).
cctacactacaggctaaaa

SEQ ID NO: 555098 - DNA, 19 bp, Mus musculus
  siRNA target sequence for 2310066B14Rik (NM_181579.1,1451-1469).
ctacactacaggctaaaat

SEQ ID NO: 555099 - DNA, 19 bp, Mus musculus
  siRNA target sequence for 2310066B14Rik (NM_181579.1,1454-1472).
cactacaggctaaaatgga

SEQ ID NO: 555100 - DNA, 19 bp, Mus musculus
  siRNA target sequence for 2310066B14Rik (NM_181579.1,1474-1492).
gagattggcaatcattata

SEQ ID NO: 555101 - DNA, 19 bp, Mus musculus
  siRNA target sequence for 2310066B14Rik (NM_181579.1,1486-1504).
cattatatggagatggtaa

SEQ ID NO: 555102 - DNA, 19 bp, Mus musculus
  siRNA target sequence for 2310066B14Rik (NM_181579.1,1509-1527).
cttgagacttgataaagat

SEQ ID NO: 555103 - DNA, 19 bp, Mus musculus
  siRNA target sequence for 2310066B14Rik (NM_181579.1,1601-1619).
gtgatttccaattcaaact

SEQ ID NO: 555104 - DNA, 19 bp, Mus musculus
  siRNA target sequence for 2310066B14Rik (NM_181579.1,1608-1626).
ccaattcaaacttcatgaa

SEQ ID NO: 555105 - DNA, 19 bp, Mus musculus
  siRNA target sequence for 2310066B14Rik (NM_181579.1,1614-1632).
caaacttcatgaattgaca

SEQ ID NO: 555106 - DNA, 19 bp, Mus musculus
  siRNA target sequence for 2310066B14Rik (NM_181579.1,1618-1636).
cttcatgaattgacaagtt

SEQ ID NO: 555107 - DNA, 19 bp, Mus musculus
  siRNA target sequence for 2310066B14Rik (NM_181579.1,1645-1663).
gagaaggattctctaataa

SEQ ID NO: 555108 - DNA, 19 bp, Mus musculus
  siRNA target sequence for 2310066B14Rik (NM_181579.1,1683-1701).
ctcaaagttgagacaagaa

SEQ ID NO: 555109 - DNA, 19 bp, Mus musculus
  siRNA target sequence for 2310066B14Rik (NM_181579.1,1730-1748).
gtggtggaaggactacaat

SEQ ID NO: 555110 - DNA, 19 bp, Mus musculus
  siRNA target sequence for 2310066B14Rik (NM_181579.1,1732-1750).
ggtggaaggactacaatca

SEQ ID NO: 555111 - DNA, 19 bp, Mus musculus
  siRNA target sequence for 2310066B14Rik (NM_181579.1,1745-1763).
caatcaccacaaaaaagta

SEQ ID NO: 555112 - DNA, 19 bp, Mus musculus
  siRNA target sequence for 2310066B14Rik (NM_181579.1,1787-1805).
gtctcctgtacgatgacta

SEQ ID NO: 555113 - DNA, 19 bp, Mus musculus
  siRNA target sequence for 2310066B14Rik (NM_181579.1,1791-1809).
cctgtacgatgactatgaa

SEQ ID NO: 555114 - DNA, 19 bp, Mus musculus
  siRNA target sequence for 2310066B14Rik (NM_181579.1,1792-1810).
ctgtacgatgactatgaat

SEQ ID NO: 555115 - DNA, 19 bp, Mus musculus
  siRNA target sequence for 2310066B14Rik (NM_181579.1,1819-1837).
ccaggtagtgacacacaaa

SEQ ID NO: 555116 - DNA, 19 bp, Mus musculus
  siRNA target sequence for 2310066B14Rik (NM_181579.1,1823-1841).
gtagtgacacacaaacgat

SEQ ID NO: 555117 - DNA, 19 bp, Mus musculus
  siRNA target sequence for 2600011L02Rik (NM_172297.1,228-246).
ggctcttcgtcggaagaat

SEQ ID NO: 555118 - DNA, 19 bp, Mus musculus
  siRNA target sequence for 2600011L02Rik (NM_172297.1,279-297).
ggaggatcggaaaaaagct

SEQ ID NO: 555119 - DNA, 19 bp, Mus musculus
  siRNA target sequence for 2600011L02Rik (NM_172297.1,599-617).
cctctgatcgaaagtctaa

SEQ ID NO: 555120 - DNA, 19 bp, Mus musculus
  siRNA target sequence for 2600011L02Rik (NM_172297.1,824-842).
ggggaggctcagattttga

SEQ ID NO: 555121 - DNA, 19 bp, Mus musculus
  siRNA target sequence for 2600011L02Rik (NM_172297.1,1224-1242).
ggcccctcgtgcctatagt

SEQ ID NO: 555122 - DNA, 19 bp, Mus musculus
  siRNA target sequence for 2600011L02Rik (NM_172297.1,1226-1244).
cccctcgtgcctatagtga

SEQ ID NO: 555123 - DNA, 19 bp, Mus musculus
  siRNA target sequence for 2600011L02Rik (NM_172297.1,1235-1253).
cctatagtgaccacgataa

SEQ ID NO: 555124 - DNA, 19 bp, Mus musculus
  siRNA target sequence for 2600011L02Rik (NM_172297.1,1236-1254).
ctatagtgaccacgataat

SEQ ID NO: 555125 - DNA, 19 bp, Mus musculus
  siRNA target sequence for 2600011L02Rik (NM_172297.1,1452-1470).
ggacgtgagtgaagatgtt

SEQ ID NO: 555126 - DNA, 19 bp, Mus musculus
  siRNA target sequence for 2600011L02Rik (NM_172297.1,1453-1471).
gacgtgagtgaagatgtta

SEQ ID NO: 555127 - DNA, 19 bp, Mus musculus
  siRNA target sequence for 2600011L02Rik (NM_172297.1,1455-1473).
cgtgagtgaagatgttact

SEQ ID NO: 555128 - DNA, 19 bp, Mus musculus
  siRNA target sequence for 4732463G12Rik (NM_178802.2,850-868).
gcggatgactgcatcttct

SEQ ID NO: 555129 - DNA, 19 bp, Mus musculus
  siRNA target sequence for 4732463G12Rik (NM_178802.2,851-869).
cggatgactgcatcttctt

SEQ ID NO: 555130 - DNA, 19 bp, Mus musculus
  siRNA target sequence for 4732463G12Rik (NM_178802.2,1196-1214).
cagaattatcgcaatctga

SEQ ID NO: 555131 - DNA, 19 bp, Mus musculus
  siRNA target sequence for 4732463G12Rik (NM_178802.2,1226-1244).
gagaccgccaaccagtatt

SEQ ID NO: 555132 - DNA, 19 bp, Mus musculus
  siRNA target sequence for 4732463G12Rik (NM_178802.2,1230-1248).
ccgccaaccagtatttgca

SEQ ID NO: 555133 - DNA, 19 bp, Mus musculus
  siRNA target sequence for 4732463G12Rik (NM_178802.2,1269-1287).
gggtgacacaccatttcca

SEQ ID NO: 555134 - DNA, 19 bp, Mus musculus
  siRNA target sequence for 4732463G12Rik (NM_178802.2,1442-1460).
gggacccacacggataaca

SEQ ID NO: 555135 - DNA, 19 bp, Mus musculus
  siRNA target sequence for 4732463G12Rik (NM_178802.2,1443-1461).
ggacccacacggataacat

SEQ ID NO: 555136 - DNA, 19 bp, Mus musculus
  siRNA target sequence for 4732463G12Rik (NM_178802.2,1516-1534).
ctggcacaatggcaaatct

SEQ ID NO: 555137 - DNA, 19 bp, Mus musculus
  siRNA target sequence for 4732463G12Rik (NM_178802.2,1562-1580).
ctcctgggcgtagatttga

SEQ ID NO: 555138 - DNA, 19 bp, Mus musculus
  siRNA target sequence for 4732463G12Rik (NM_178802.2,1626-1644).
cacagccgctgcacacttt

SEQ ID NO: 555139 - DNA, 19 bp, Mus musculus
  siRNA target sequence for 4732463G12Rik (NM_178802.2,1630-1648).
gccgctgcacactttctat

SEQ ID NO: 555140 - DNA, 19 bp, Mus musculus
  siRNA target sequence for 4732490P18Rik (NM_172827.1,81-99).
ggagtcctttaccaatgat

SEQ ID NO: 555141 - DNA, 19 bp, Mus musculus
  siRNA target sequence for 4732490P18Rik (NM_172827.1,102-120).
gcttcagcttccaaggaat

SEQ ID NO: 555142 - DNA, 19 bp, Mus musculus
  siRNA target sequence for 4732490P18Rik (NM_172827.1,112-130).
ccaaggaatatgatcgaaa

SEQ ID NO: 555143 - DNA, 19 bp, Mus musculus
  siRNA target sequence for 4732490P18Rik (NM_172827.1,123-141).
gatcgaaaacagcatgttt

SEQ ID NO: 555144 - DNA, 19 bp, Mus musculus
  siRNA target sequence for 4732490P18Rik (NM_172827.1,126-144).
cgaaaacagcatgtttgaa

SEQ ID NO: 555145 - DNA, 19 bp, Mus musculus
  siRNA target sequence for 4732490P18Rik (NM_172827.1,159-177).
ggtagatttagccaaagaa

SEQ ID NO: 555146 - DNA, 19 bp, Mus musculus
  siRNA target sequence for 4732490P18Rik (NM_172827.1,374-392).
cagatgggacttgttcatt

SEQ ID NO: 555147 - DNA, 19 bp, Mus musculus
  siRNA target sequence for 4732490P18Rik (NM_172827.1,433-451).
gtggttgcggtctctgtaa

SEQ ID NO: 555148 - DNA, 19 bp, Mus musculus
  siRNA target sequence for 4732490P18Rik (NM_172827.1,469-487).
ctgcctagatgtaccttta

SEQ ID NO: 555149 - DNA, 19 bp, Mus musculus
  siRNA target sequence for 4732490P18Rik (NM_172827.1,472-490).
cctagatgtacctttacca

SEQ ID NO: 555150 - DNA, 19 bp, Mus musculus
  siRNA target sequence for 4732490P18Rik (NM_172827.1,590-608).
ccattattcctctatgcta

SEQ ID NO: 555151 - DNA, 19 bp, Mus musculus
  siRNA target sequence for 4732490P18Rik (NM_172827.1,711-729).
cacaggacataatatttca

SEQ ID NO: 555152 - DNA, 19 bp, Mus musculus
  siRNA target sequence for 4732490P18Rik (NM_172827.1,829-847).
cttctaacaggacacaatt

SEQ ID NO: 555153 - DNA, 19 bp, Mus musculus
  siRNA target sequence for 4732490P18Rik (NM_172827.1,852-870).
cctgaagatagagtattca

SEQ ID NO: 555154 - DNA, 19 bp, Mus musculus
  siRNA target sequence for 4732490P18Rik (NM_172827.1,858-876).
gatagagtattcagcaaat

SEQ ID NO: 555155 - DNA, 19 bp, Mus musculus
  siRNA target sequence for 4732490P18Rik (NM_172827.1,862-880).
gagtattcagcaaatatat

SEQ ID NO: 555156 - DNA, 19 bp, Mus musculus
  siRNA target sequence for 4732490P18Rik (NM_172827.1,871-889).
gcaaatatatctaactctt

SEQ ID NO: 555157 - DNA, 19 bp, Mus musculus
  siRNA target sequence for 4732490P18Rik (NM_172827.1,1007-1025).
catttaaggccacatttat

SEQ ID NO: 555158 - DNA, 19 bp, Mus musculus
  siRNA target sequence for 4732490P18Rik (NM_172827.1,1016-1034).
ccacatttatcatcaagat

SEQ ID NO: 555159 - DNA, 19 bp, Mus musculus
  siRNA target sequence for 4732490P18Rik (NM_172827.1,1047-1065).
gcaccatactgcgttatca

SEQ ID NO: 555160 - DNA, 19 bp, Mus musculus
  siRNA target sequence for 4732490P18Rik (NM_172827.1,1048-1066).
caccatactgcgttatcaa

SEQ ID NO: 555161 - DNA, 19 bp, Mus musculus
  siRNA target sequence for 4732490P18Rik (NM_172827.1,1050-1068).
ccatactgcgttatcaaat

SEQ ID NO: 555162 - DNA, 19 bp, Mus musculus
  siRNA target sequence for 4732490P18Rik (NM_172827.1,1051-1069).
catactgcgttatcaaata

SEQ ID NO: 555163 - DNA, 19 bp, Mus musculus
  siRNA target sequence for 4732490P18Rik (NM_172827.1,1105-1123).
cttattcaagatgagtttt

SEQ ID NO: 555164 - DNA, 19 bp, Mus musculus
  siRNA target sequence for 4732490P18Rik (NM_172827.1,1145-1163).
catacctggttgctttcat

SEQ ID NO: 555165 - DNA, 19 bp, Mus musculus
  siRNA target sequence for 4732490P18Rik (NM_172827.1,1185-1203).
gagtcaggatgtaaatgga

SEQ ID NO: 555166 - DNA, 19 bp, Mus musculus
  siRNA target sequence for 4732490P18Rik (NM_172827.1,1252-1270).
catgccttggacacaacta

SEQ ID NO: 555167 - DNA, 19 bp, Mus musculus
  siRNA target sequence for 4732490P18Rik (NM_172827.1,1265-1283).
caactataaagcttcttga

SEQ ID NO: 555168 - DNA, 19 bp, Mus musculus
  siRNA target sequence for 4732490P18Rik (NM_172827.1,1268-1286).
ctataaagcttcttgagtt

SEQ ID NO: 555169 - DNA, 19 bp, Mus musculus
  siRNA target sequence for 4732490P18Rik (NM_172827.1,1276-1294).
cttcttgagttttatcaaa

SEQ ID NO: 555170 - DNA, 19 bp, Mus musculus
  siRNA target sequence for 4732490P18Rik (NM_172827.1,1282-1300).
gagttttatcaaacttact

SEQ ID NO: 555171 - DNA, 19 bp, Mus musculus
  siRNA target sequence for 4732490P18Rik (NM_172827.1,1314-1332).
cccacttaagaaattggat

SEQ ID NO: 555172 - DNA, 19 bp, Mus musculus
  siRNA target sequence for 4732490P18Rik (NM_172827.1,1394-1412).
gagaagagactcttctgta

SEQ ID NO: 555173 - DNA, 19 bp, Mus musculus
  siRNA target sequence for 4732490P18Rik (NM_172827.1,1399-1417).
gagactcttctgtatgaca

SEQ ID NO: 555174 - DNA, 19 bp, Mus musculus
  siRNA target sequence for 4732490P18Rik (NM_172827.1,1401-1419).
gactcttctgtatgacaat

SEQ ID NO: 555175 - DNA, 19 bp, Mus musculus
  siRNA target sequence for 4732490P18Rik (NM_172827.1,1405-1423).
cttctgtatgacaatgcaa

SEQ ID NO: 555176 - DNA, 19 bp, Mus musculus
  siRNA target sequence for 4732490P18Rik (NM_172827.1,1410-1428).
gtatgacaatgcaacttct

SEQ ID NO: 555177 - DNA, 19 bp, Mus musculus
  siRNA target sequence for 4732490P18Rik (NM_172827.1,1440-1458).
cagaaaactggtcactaaa

SEQ ID NO: 555178 - DNA, 19 bp, Mus musculus
  siRNA target sequence for 4732490P18Rik (NM_172827.1,1596-1614).
cagttatgaagacttctta

SEQ ID NO: 555179 - DNA, 19 bp, Mus musculus
  siRNA target sequence for 4732490P18Rik (NM_172827.1,1608-1626).
cttcttagatgctcgattt

SEQ ID NO: 555180 - DNA, 19 bp, Mus musculus
  siRNA target sequence for 4732490P18Rik (NM_172827.1,1615-1633).
gatgctcgatttaaaacca

SEQ ID NO: 555181 - DNA, 19 bp, Mus musculus
  siRNA target sequence for 4732490P18Rik (NM_172827.1,1650-1668).
gaattcgtctcatccaata

SEQ ID NO: 555182 - DNA, 19 bp, Mus musculus
  siRNA target sequence for 4732490P18Rik (NM_172827.1,1683-1701).
gtcttcggaacaaatagaa

SEQ ID NO: 555183 - DNA, 19 bp, Mus musculus
  siRNA target sequence for 4732490P18Rik (NM_172827.1,1685-1703).
cttcggaacaaatagaaga

SEQ ID NO: 555184 - DNA, 19 bp, Mus musculus
  siRNA target sequence for 4732490P18Rik (NM_172827.1,1764-1782).
ccttagtgaagatgtattt

SEQ ID NO: 555185 - DNA, 19 bp, Mus musculus
  siRNA target sequence for 4732490P18Rik (NM_172827.1,1953-1971).
gactgagcttcttctacaa

SEQ ID NO: 555186 - DNA, 19 bp, Mus musculus
  siRNA target sequence for 4732490P18Rik (NM_172827.1,2002-2020).
gaaagtcagccttcagata

SEQ ID NO: 555187 - DNA, 19 bp, Mus musculus
  siRNA target sequence for 4732490P18Rik (NM_172827.1,2025-2043).
ccacctttggcatattcca

SEQ ID NO: 555188 - DNA, 19 bp, Mus musculus
  siRNA target sequence for 4732490P18Rik (NM_172827.1,2053-2071).
gtcactgatggaagaaact

SEQ ID NO: 555189 - DNA, 19 bp, Mus musculus
  siRNA target sequence for 4732490P18Rik (NM_172827.1,2137-2155).
gtgcagtgggtcaaagtca

SEQ ID NO: 555190 - DNA, 19 bp, Mus musculus
  siRNA target sequence for 4732490P18Rik (NM_172827.1,2139-2157).
gcagtgggtcaaagtcaat

SEQ ID NO: 555191 - DNA, 19 bp, Mus musculus
  siRNA target sequence for 4732490P18Rik (NM_172827.1,2172-2190).
ctattacattgttcactat

SEQ ID NO: 555192 - DNA, 19 bp, Mus musculus
  siRNA target sequence for 4732490P18Rik (NM_172827.1,2202-2220).
ctggacagctctaatcaat

SEQ ID NO: 555193 - DNA, 19 bp, Mus musculus
  siRNA target sequence for 4732490P18Rik (NM_172827.1,2204-2222).
ggacagctctaatcaatca

SEQ ID NO: 555194 - DNA, 19 bp, Mus musculus
  siRNA target sequence for 4732490P18Rik (NM_172827.1,2207-2225).
cagctctaatcaatcagtt

SEQ ID NO: 555195 - DNA, 19 bp, Mus musculus
  siRNA target sequence for 4732490P18Rik (NM_172827.1,2212-2230).
ctaatcaatcagttaaaaa

SEQ ID NO: 555196 - DNA, 19 bp, Mus musculus
  siRNA target sequence for 4732490P18Rik (NM_172827.1,2260-2278).
cgagccaacctgatcaata

SEQ ID NO: 555197 - DNA, 19 bp, Mus musculus
  siRNA target sequence for 4732490P18Rik (NM_172827.1,2274-2292).
caataacatctttgaactt

SEQ ID NO: 555198 - DNA, 19 bp, Mus musculus
  siRNA target sequence for 4732490P18Rik (NM_172827.1,2314-2332).
cttcggatggcatttgatt

SEQ ID NO: 555199 - DNA, 19 bp, Mus musculus
  siRNA target sequence for 4732490P18Rik (NM_172827.1,2329-2347).
gatttgattgactatctta

SEQ ID NO: 555200 - DNA, 19 bp, Mus musculus
  siRNA target sequence for 4732490P18Rik (NM_172827.1,2383-2401).
ctgttccagacaaacctta

SEQ ID NO: 555201 - DNA, 19 bp, Mus musculus
  siRNA target sequence for 4732490P18Rik (NM_172827.1,2391-2409).
gacaaaccttatctataat

SEQ ID NO: 555202 - DNA, 19 bp, Mus musculus
  siRNA target sequence for 4732490P18Rik (NM_172827.1,2403-2421).
ctataatctcctagaaaaa

SEQ ID NO: 555203 - DNA, 19 bp, Mus musculus
  siRNA target sequence for 4732490P18Rik (NM_172827.1,2452-2470).
gtggccagagtacataaat

SEQ ID NO: 555204 - DNA, 19 bp, Mus musculus
  siRNA target sequence for 4732490P18Rik (NM_172827.1,2537-2555).
ggtcagccttgctggaatt

SEQ ID NO: 555205 - DNA, 19 bp, Mus musculus
  siRNA target sequence for 4732490P18Rik (NM_172827.1,2585-2603).
ccactatggccacaaatct

SEQ ID NO: 555206 - DNA, 19 bp, Mus musculus
  siRNA target sequence for 4732490P18Rik (NM_172827.1,2593-2611).
gccacaaatctgtttgaca

SEQ ID NO: 555207 - DNA, 19 bp, Mus musculus
  siRNA target sequence for 4732490P18Rik (NM_172827.1,2639-2657).
gcctgcctactgatgtcat

SEQ ID NO: 555208 - DNA, 19 bp, Mus musculus
  siRNA target sequence for 4732490P18Rik (NM_172827.1,2695-2713).
ggctggttgttcctcttta

SEQ ID NO: 555209 - DNA, 19 bp, Mus musculus
  siRNA target sequence for 4732490P18Rik (NM_172827.1,2779-2797).
gaggatgtacataaacttt

SEQ ID NO: 555210 - DNA, 19 bp, Mus musculus
  siRNA target sequence for 4732490P18Rik (NM_172827.1,2782-2800).
gatgtacataaactttact

SEQ ID NO: 555211 - DNA, 19 bp, Mus musculus
  siRNA target sequence for 4732490P18Rik (NM_172827.1,2844-2862).
gaagttgtcacttatcatt

SEQ ID NO: 555212 - DNA, 19 bp, Mus musculus
  siRNA target sequence for 4732490P18Rik (NM_172827.1,2847-2865).
gttgtcacttatcattaga

SEQ ID NO: 555213 - DNA, 19 bp, Mus musculus
  siRNA target sequence for 4732490P18Rik (NM_172827.1,2896-2914).
ctggcttgggattttgtta

SEQ ID NO: 555214 - DNA, 19 bp, Mus musculus
  siRNA target sequence for 4732490P18Rik (NM_172827.1,2900-2918).
cttgggattttgttaaaga

SEQ ID NO: 555215 - DNA, 19 bp, Mus musculus
  siRNA target sequence for 4732490P18Rik (NM_172827.1,2947-2965).
catctgggctcctatacca

SEQ ID NO: 555216 - DNA, 19 bp, Mus musculus
  siRNA target sequence for 4732490P18Rik (NM_172827.1,2953-2971).
ggctcctataccatacaaa

SEQ ID NO: 555217 - DNA, 19 bp, Mus musculus
  siRNA target sequence for 4732490P18Rik (NM_172827.1,2955-2973).
ctcctataccatacaaagt

SEQ ID NO: 555218 - DNA, 19 bp, Mus musculus
  siRNA target sequence for 4732490P18Rik (NM_172827.1,2980-2998).
gctggatctactcacttat

SEQ ID NO: 555219 - DNA, 19 bp, Mus musculus
  siRNA target sequence for 4732490P18Rik (NM_172827.1,2981-2999).
ctggatctactcacttatt

SEQ ID NO: 555220 - DNA, 19 bp, Mus musculus
  siRNA target sequence for 4732490P18Rik (NM_172827.1,2983-3001).
ggatctactcacttatttt

SEQ ID NO: 555221 - DNA, 19 bp, Mus musculus
  siRNA target sequence for 4732490P18Rik (NM_172827.1,2992-3010).
cacttattttcaacaaaga

SEQ ID NO: 555222 - DNA, 19 bp, Mus musculus
  siRNA target sequence for 4732490P18Rik (NM_172827.1,3091-3109).
gaagtgattcagctgaata

SEQ ID NO: 555223 - DNA, 19 bp, Mus musculus
  siRNA target sequence for 4921530N01Rik (NM_194343.1,375-393).
gactcattgtcctacatgt

SEQ ID NO: 555224 - DNA, 19 bp, Mus musculus
  siRNA target sequence for 4921530N01Rik (NM_194343.1,389-407).
catgtctgaggcttttcaa

SEQ ID NO: 555225 - DNA, 19 bp, Mus musculus
  siRNA target sequence for 4921530N01Rik (NM_194343.1,515-533).
ctgaggggtcagtattcca

SEQ ID NO: 555226 - DNA, 19 bp, Mus musculus
  siRNA target sequence for 4921530N01Rik (NM_194343.1,531-549).
ccaggaccccgagttatgt

SEQ ID NO: 555227 - DNA, 19 bp, Mus musculus
  siRNA target sequence for 4921530N01Rik (NM_194343.1,532-550).
caggaccccgagttatgta

SEQ ID NO: 555228 - DNA, 19 bp, Mus musculus
  siRNA target sequence for 4921530N01Rik (NM_194343.1,573-591).
cctctgtccggtatgtgat

SEQ ID NO: 555229 - DNA, 19 bp, Mus musculus
  siRNA target sequence for 4921530N01Rik (NM_194343.1,779-797).
ctcataggcgacagaagaa

SEQ ID NO: 555230 - DNA, 19 bp, Mus musculus
  siRNA target sequence for 4921530N01Rik (NM_194343.1,812-830).
ccatggtggacctaaaaga

SEQ ID NO: 555231 - DNA, 19 bp, Mus musculus
  siRNA target sequence for 4921530N01Rik (NM_194343.1,839-857).
gctacagccaggttggaaa

SEQ ID NO: 555232 - DNA, 19 bp, Mus musculus
  siRNA target sequence for 4921530N01Rik (NM_194343.1,850-868).
gttggaaagcccatcctat

SEQ ID NO: 555233 - DNA, 19 bp, Mus musculus
  siRNA target sequence for 4921530N01Rik (NM_194343.1,927-945).
gtgtcgggactgtgtagtt

SEQ ID NO: 555234 - DNA, 19 bp, Mus musculus
  siRNA target sequence for 4921530N01Rik (NM_194343.1,955-973).
cgagagcacccctatgact

SEQ ID NO: 555235 - DNA, 19 bp, Mus musculus
  siRNA target sequence for 4921530N01Rik (NM_194343.1,956-974).
gagagcacccctatgactt

SEQ ID NO: 555236 - DNA, 19 bp, Mus musculus
  siRNA target sequence for 4921530N01Rik (NM_194343.1,990-1008).
ccacaagcatggagattct

SEQ ID NO: 555237 - DNA, 19 bp, Mus musculus
  siRNA target sequence for 4921530N01Rik (NM_194343.1,1120-1138).
gctgacgtccggacattct

SEQ ID NO: 555238 - DNA, 19 bp, Mus musculus
  siRNA target sequence for 4921530N01Rik (NM_194343.1,1304-1322).
ccagcggctcggacttaga

SEQ ID NO: 555239 - DNA, 19 bp, Mus musculus
  siRNA target sequence for 4921530N01Rik (NM_194343.1,1310-1328).
gctcggacttagagattct

SEQ ID NO: 555240 - DNA, 19 bp, Mus musculus
  siRNA target sequence for 4921530N01Rik (NM_194343.1,1313-1331).
cggacttagagattctcat

SEQ ID NO: 555241 - DNA, 19 bp, Mus musculus
  siRNA target sequence for 4921530N01Rik (NM_194343.1,1354-1372).
cggctcaggaagctgaata

SEQ ID NO: 555242 - DNA, 19 bp, Mus musculus
  siRNA target sequence for 4921530N01Rik (NM_194343.1,1391-1409).
gcccaggagtgaaccataa

SEQ ID NO: 555243 - DNA, 19 bp, Mus musculus
  siRNA target sequence for 4921530N01Rik (NM_194343.1,1393-1411).
ccaggagtgaaccataaga

SEQ ID NO: 555244 - DNA, 19 bp, Mus musculus
  siRNA target sequence for 4921530N01Rik (NM_194343.1,1553-1571).
cttttaccttgttctgtaa

SEQ ID NO: 555245 - DNA, 19 bp, Mus musculus
  siRNA target sequence for 4921530N01Rik (NM_194343.1,1593-1611).
gggcaggggaggagataat

SEQ ID NO: 555246 - DNA, 19 bp, Mus musculus
  siRNA target sequence for 4921530N01Rik (NM_194343.1,1621-1639).
gaagttgtccccaaagata

SEQ ID NO: 555247 - DNA, 19 bp, Mus musculus
  siRNA target sequence for 4921530N01Rik (NM_194343.1,1624-1642).
gttgtccccaaagataaga

SEQ ID NO: 555248 - DNA, 19 bp, Mus musculus
  siRNA target sequence for 4921530N01Rik (NM_194343.1,1685-1703).
ggtcgtaccgcgtttccta

SEQ ID NO: 555249 - DNA, 19 bp, Mus musculus
  siRNA target sequence for 4921530N01Rik (NM_194343.1,1805-1823).
cacatccgggtgtgtttca

SEQ ID NO: 555250 - DNA, 19 bp, Mus musculus
  siRNA target sequence for 4921530N01Rik (NM_194343.1,1884-1902).
catgccgggtggatacctt

SEQ ID NO: 555251 - DNA, 19 bp, Mus musculus
  siRNA target sequence for 4921530N01Rik (NM_194343.1,1905-1923).
ctgtggccacggacacaaa

SEQ ID NO: 555252 - DNA, 19 bp, Mus musculus
  siRNA target sequence for 4930472G13Rik (NM_029447.1,184-202).
ccaggattcggctcagaat

SEQ ID NO: 555253 - DNA, 19 bp, Mus musculus
  siRNA target sequence for 4930472G13Rik (NM_029447.1,228-246).
cctcttcaggccatgtctt

SEQ ID NO: 555254 - DNA, 19 bp, Mus musculus
  siRNA target sequence for 4930472G13Rik (NM_029447.1,256-274).
ccgcaggcaggaatgttct

SEQ ID NO: 555255 - DNA, 19 bp, Mus musculus
  siRNA target sequence for 4930472G13Rik (NM_029447.1,332-350).
gaccaagcaggtgtatgat

SEQ ID NO: 555256 - DNA, 19 bp, Mus musculus
  siRNA target sequence for 4930472G13Rik (NM_029447.1,348-366).
gataccgtggggacaatca

SEQ ID NO: 555257 - DNA, 19 bp, Mus musculus
  siRNA target sequence for 4930472G13Rik (NM_029447.1,365-383).
caacctggaggatgtaact

SEQ ID NO: 555258 - DNA, 19 bp, Mus musculus
  siRNA target sequence for 4930472G13Rik (NM_029447.1,413-431).
catagaagtgaagtacata

SEQ ID NO: 555259 - DNA, 19 bp, Mus musculus
  siRNA target sequence for 4930472G13Rik (NM_029447.1,509-527).
caaaaggctttctcgtttt

SEQ ID NO: 555260 - DNA, 19 bp, Mus musculus
  siRNA target sequence for 4930472G13Rik (NM_029447.1,615-633).
gccaggcgatacttggaaa

SEQ ID NO: 555261 - DNA, 19 bp, Mus musculus
  siRNA target sequence for 4930472G13Rik (NM_029447.1,616-634).
ccaggcgatacttggaaaa

SEQ ID NO: 555262 - DNA, 19 bp, Mus musculus
  siRNA target sequence for 4930472G13Rik (NM_029447.1,617-635).
caggcgatacttggaaaaa

SEQ ID NO: 555263 - DNA, 19 bp, Mus musculus
  siRNA target sequence for 4930472G13Rik (NM_029447.1,620-638).
gcgatacttggaaaaatca

SEQ ID NO: 555264 - DNA, 19 bp, Mus musculus
  siRNA target sequence for 4930472G13Rik (NM_029447.1,621-639).
cgatacttggaaaaatcaa

SEQ ID NO: 555265 - DNA, 19 bp, Mus musculus
  siRNA target sequence for 4930472G13Rik (NM_029447.1,673-691).
cagaacacgtaaaaaatga

SEQ ID NO: 555266 - DNA, 19 bp, Mus musculus
  siRNA target sequence for 4930472G13Rik (NM_029447.1,675-693).
gaacacgtaaaaaatgaaa

SEQ ID NO: 555267 - DNA, 19 bp, Mus musculus
  siRNA target sequence for 4930472G13Rik (NM_029447.1,712-730).
gaatgagtgagctatgcat

SEQ ID NO: 555268 - DNA, 19 bp, Mus musculus
  siRNA target sequence for 4930472G13Rik (NM_029447.1,718-736).
gtgagctatgcattgactt

SEQ ID NO: 555269 - DNA, 19 bp, Mus musculus
  siRNA target sequence for 4930472G13Rik (NM_029447.1,756-774).
gatgacacgtcccttgtat

SEQ ID NO: 555270 - DNA, 19 bp, Mus musculus
  siRNA target sequence for 4930472G13Rik (NM_029447.1,759-777).
gacacgtcccttgtatttt

SEQ ID NO: 555271 - DNA, 19 bp, Mus musculus
  siRNA target sequence for 4930472G13Rik (NM_029447.1,796-814).
ctcttcccgacgacttcat

SEQ ID NO: 555272 - DNA, 19 bp, Mus musculus
  siRNA target sequence for 4930472G13Rik (NM_029447.1,806-824).
cgacttcattgacagttta

SEQ ID NO: 555273 - DNA, 19 bp, Mus musculus
  siRNA target sequence for 4930472G13Rik (NM_029447.1,842-860).
caagtacaaagttacctta

SEQ ID NO: 555274 - DNA, 19 bp, Mus musculus
  siRNA target sequence for 4930472G13Rik (NM_029447.1,863-881).
gtatccccactattttcct

SEQ ID NO: 555275 - DNA, 19 bp, Mus musculus
  siRNA target sequence for 4930472G13Rik (NM_029447.1,1077-1095).
gcaacctttctagatgatt

SEQ ID NO: 555276 - DNA, 19 bp, Mus musculus
  siRNA target sequence for 4930472G13Rik (NM_029447.1,1124-1142).
ggctgaacgggagtttatt

SEQ ID NO: 555277 - DNA, 19 bp, Mus musculus
  siRNA target sequence for 4930472G13Rik (NM_029447.1,1126-1144).
ctgaacgggagtttatttt

SEQ ID NO: 555278 - DNA, 19 bp, Mus musculus
  siRNA target sequence for 4930472G13Rik (NM_029447.1,1128-1146).
gaacgggagtttattttga

SEQ ID NO: 555279 - DNA, 19 bp, Mus musculus
  siRNA target sequence for 4930472G13Rik (NM_029447.1,1166-1184).
cgaagagcgaggttttgca

SEQ ID NO: 555280 - DNA, 19 bp, Mus musculus
  siRNA target sequence for 4930472G13Rik (NM_029447.1,1167-1185).
gaagagcgaggttttgcat

SEQ ID NO: 555281 - DNA, 19 bp, Mus musculus
  siRNA target sequence for 4930472G13Rik (NM_029447.1,1182-1200).
gcatacgacgggaagatca

SEQ ID NO: 555282 - DNA, 19 bp, Mus musculus
  siRNA target sequence for 4930472G13Rik (NM_029447.1,1183-1201).
catacgacgggaagatcaa

SEQ ID NO: 555283 - DNA, 19 bp, Mus musculus
  siRNA target sequence for 4930472G13Rik (NM_029447.1,1203-1221).
gcatgggacctccattact

SEQ ID NO: 555284 - DNA, 19 bp, Mus musculus
  siRNA target sequence for 4930472G13Rik (NM_029447.1,1207-1225).
gggacctccattactacat

SEQ ID NO: 555285 - DNA, 19 bp, Mus musculus
  siRNA target sequence for 4930472G13Rik (NM_029447.1,1209-1227).
gacctccattactacatga

SEQ ID NO: 555286 - DNA, 19 bp, Mus musculus
  siRNA target sequence for 4930472G13Rik (NM_029447.1,1331-1349).
gttgggactttcatttgaa

SEQ ID NO: 555287 - DNA, 19 bp, Mus musculus
  siRNA target sequence for 4930472G13Rik (NM_029447.1,1334-1352).
gggactttcatttgaacaa

SEQ ID NO: 555288 - DNA, 19 bp, Mus musculus
  siRNA target sequence for 4930472G13Rik (NM_029447.1,1353-1371).
gtggctgatgcccatgttt

SEQ ID NO: 555289 - DNA, 19 bp, Mus musculus
  siRNA target sequence for 4930472G13Rik (NM_029447.1,1364-1382).
ccatgtttggaataagagt

SEQ ID NO: 555290 - DNA, 19 bp, Mus musculus
  siRNA target sequence for 4930472G13Rik (NM_029447.1,1394-1412).
caccgtgaaggataaagct

SEQ ID NO: 555291 - DNA, 19 bp, Mus musculus
  siRNA target sequence for 4930472G13Rik (NM_029447.1,1448-1466).
ctatccaagggaaggaaaa

SEQ ID NO: 555292 - DNA, 19 bp, Mus musculus
  siRNA target sequence for 4930472G13Rik (NM_029447.1,1515-1533).
gatggcagtcggatgatgt

SEQ ID NO: 555293 - DNA, 19 bp, Mus musculus
  siRNA target sequence for 4930472G13Rik (NM_029447.1,1599-1617).
gacgaagtgcgaacttact

SEQ ID NO: 555294 - DNA, 19 bp, Mus musculus
  siRNA target sequence for 4930472G13Rik (NM_029447.1,1609-1627).
gaacttacttccatgagtt

SEQ ID NO: 555295 - DNA, 19 bp, Mus musculus
  siRNA target sequence for 4930472G13Rik (NM_029447.1,1630-1648).
gtcacgtcatgcatcagat

SEQ ID NO: 555296 - DNA, 19 bp, Mus musculus
  siRNA target sequence for 4930472G13Rik (NM_029447.1,1669-1687).
cacgatttagtggaacaaa

SEQ ID NO: 555297 - DNA, 19 bp, Mus musculus
  siRNA target sequence for 4930472G13Rik (NM_029447.1,1704-1722).
gtagaggtgccatcacaaa

SEQ ID NO: 555298 - DNA, 19 bp, Mus musculus
  siRNA target sequence for 4930472G13Rik (NM_029447.1,1709-1727).
ggtgccatcacaaatgctt

SEQ ID NO: 555299 - DNA, 19 bp, Mus musculus
  siRNA target sequence for 4930472G13Rik (NM_029447.1,1714-1732).
catcacaaatgcttgaaaa

SEQ ID NO: 555300 - DNA, 19 bp, Mus musculus
  siRNA target sequence for 4930472G13Rik (NM_029447.1,1749-1767).
gactccctgcgaaaactgt

SEQ ID NO: 555301 - DNA, 19 bp, Mus musculus
  siRNA target sequence for 4930472G13Rik (NM_029447.1,1753-1771).
ccctgcgaaaactgtcaaa

SEQ ID NO: 555302 - DNA, 19 bp, Mus musculus
  siRNA target sequence for 4930472G13Rik (NM_029447.1,1754-1772).
cctgcgaaaactgtcaaaa

SEQ ID NO: 555303 - DNA, 19 bp, Mus musculus
  siRNA target sequence for 4930472G13Rik (NM_029447.1,1758-1776).
cgaaaactgtcaaaacatt

SEQ ID NO: 555304 - DNA, 19 bp, Mus musculus
  siRNA target sequence for 4930472G13Rik (NM_029447.1,1853-1871).
gacgcttcgccaaattgtt

SEQ ID NO: 555305 - DNA, 19 bp, Mus musculus
  siRNA target sequence for 4930472G13Rik (NM_029447.1,1855-1873).
cgcttcgccaaattgtttt

SEQ ID NO: 555306 - DNA, 19 bp, Mus musculus
  siRNA target sequence for 4930472G13Rik (NM_029447.1,1857-1875).
cttcgccaaattgttttga

SEQ ID NO: 555307 - DNA, 19 bp, Mus musculus
  siRNA target sequence for 4930472G13Rik (NM_029447.1,1886-1904).
ccagtccctccataccaat

SEQ ID NO: 555308 - DNA, 19 bp, Mus musculus
  siRNA target sequence for 4930472G13Rik (NM_029447.1,1920-1938).
gcgagcgaatacgctaaat

SEQ ID NO: 555309 - DNA, 19 bp, Mus musculus
  siRNA target sequence for 4930472G13Rik (NM_029447.1,1921-1939).
cgagcgaatacgctaaata

SEQ ID NO: 555310 - DNA, 19 bp, Mus musculus
  siRNA target sequence for 4930472G13Rik (NM_029447.1,1965-1983).
gctacgccaggcacaaata

SEQ ID NO: 555311 - DNA, 19 bp, Mus musculus
  siRNA target sequence for 4930472G13Rik (NM_029447.1,1966-1984).
ctacgccaggcacaaatat

SEQ ID NO: 555312 - DNA, 19 bp, Mus musculus
  siRNA target sequence for 4930472G13Rik (NM_029447.1,2013-2031).
gggtatgacggccagtatt

SEQ ID NO: 555313 - DNA, 19 bp, Mus musculus
  siRNA target sequence for 4930472G13Rik (NM_029447.1,2014-2032).
ggtatgacggccagtatta

SEQ ID NO: 555314 - DNA, 19 bp, Mus musculus
  siRNA target sequence for 4930472G13Rik (NM_029447.1,2015-2033).
gtatgacggccagtattat

SEQ ID NO: 555315 - DNA, 19 bp, Mus musculus
  siRNA target sequence for 4930472G13Rik (NM_029447.1,2069-2087).
gtttcacagctgtttcaga

SEQ ID NO: 555316 - DNA, 19 bp, Mus musculus
  siRNA target sequence for 4930486B16Rik (NM_030219.1,357-375).
cggccagcaccaatctgaa

SEQ ID NO: 555317 - DNA, 19 bp, Mus musculus
  siRNA target sequence for 4930486B16Rik (NM_030219.1,404-422).
cgcaatgttaccatcacat

SEQ ID NO: 555318 - DNA, 19 bp, Mus musculus
  siRNA target sequence for 4930486B16Rik (NM_030219.1,644-662).
gccgaggtcacggagaatt

SEQ ID NO: 555319 - DNA, 19 bp, Mus musculus
  siRNA target sequence for 4930486B16Rik (NM_030219.1,647-665).
gaggtcacggagaatttct

SEQ ID NO: 555320 - DNA, 19 bp, Mus musculus
  siRNA target sequence for 4930486B16Rik (NM_030219.1,1152-1170).
cagtccgatatgaaattga

SEQ ID NO: 555321 - DNA, 19 bp, Mus musculus
  siRNA target sequence for 4930486B16Rik (NM_030219.1,1154-1172).
gtccgatatgaaattgata

SEQ ID NO: 555322 - DNA, 19 bp, Mus musculus
  siRNA target sequence for 4930486B16Rik (NM_030219.1,1156-1174).
ccgatatgaaattgataat

SEQ ID NO: 555323 - DNA, 19 bp, Mus musculus
  siRNA target sequence for 4930486B16Rik (NM_030219.1,1365-1383).
ccatgaaagtgaacgaaat

SEQ ID NO: 555324 - DNA, 19 bp, Mus musculus
  siRNA target sequence for 4930486B16Rik (NM_030219.1,1369-1387).
gaaagtgaacgaaatggat

SEQ ID NO: 555325 - DNA, 19 bp, Mus musculus
  siRNA target sequence for 4930486B16Rik (NM_030219.1,1393-1411).
gattgcttactccaaagaa

SEQ ID NO: 555326 - DNA, 19 bp, Mus musculus
  siRNA target sequence for 4930486B16Rik (NM_030219.1,1534-1552).
ctgtatccccttggatttt

SEQ ID NO: 555327 - DNA, 19 bp, Mus musculus
  siRNA target sequence for 4930486B16Rik (NM_030219.1,1640-1658).
cctatccactcagaaatga

SEQ ID NO: 555328 - DNA, 19 bp, Mus musculus
  siRNA target sequence for 4930486B16Rik (NM_030219.1,1717-1735).
gcggagctcttccttgata

SEQ ID NO: 555329 - DNA, 19 bp, Mus musculus
  siRNA target sequence for 4930486B16Rik (NM_030219.1,1718-1736).
cggagctcttccttgatat

SEQ ID NO: 555330 - DNA, 19 bp, Mus musculus
  siRNA target sequence for 4930486B16Rik (NM_030219.1,1981-1999).
ctggacgtgcccaacagaa

SEQ ID NO: 555331 - DNA, 19 bp, Mus musculus
  siRNA target sequence for 5330415H22Rik (NM_172823.1,205-223).
cggacactgaggtcataaa

SEQ ID NO: 555332 - DNA, 19 bp, Mus musculus
  siRNA target sequence for 5330415H22Rik (NM_172823.1,206-224).
ggacactgaggtcataaat

SEQ ID NO: 555333 - DNA, 19 bp, Mus musculus
  siRNA target sequence for 5330415H22Rik (NM_172823.1,264-282).
gctgacgggcatttacgaa

SEQ ID NO: 555334 - DNA, 19 bp, Mus musculus
  siRNA target sequence for 5330415H22Rik (NM_172823.1,265-283).
ctgacgggcatttacgaat

SEQ ID NO: 555335 - DNA, 19 bp, Mus musculus
  siRNA target sequence for 5330415H22Rik (NM_172823.1,270-288).
gggcatttacgaatcaaga

SEQ ID NO: 555336 - DNA, 19 bp, Mus musculus
  siRNA target sequence for 5330415H22Rik (NM_172823.1,293-311).
ctacgaccagagcattgaa

SEQ ID NO: 555337 - DNA, 19 bp, Mus musculus
  siRNA target sequence for 5330415H22Rik (NM_172823.1,320-338).
ccctgagaaaagatatctt

SEQ ID NO: 555338 - DNA, 19 bp, Mus musculus
  siRNA target sequence for 5330415H22Rik (NM_172823.1,322-340).
ctgagaaaagatatcttgt

SEQ ID NO: 555339 - DNA, 19 bp, Mus musculus
  siRNA target sequence for 5330415H22Rik (NM_172823.1,331-349).
gatatcttgtaaagaacaa

SEQ ID NO: 555340 - DNA, 19 bp, Mus musculus
  siRNA target sequence for 5330415H22Rik (NM_172823.1,356-374).
ccctcaagctatttcttat

SEQ ID NO: 555341 - DNA, 19 bp, Mus musculus
  siRNA target sequence for 5330415H22Rik (NM_172823.1,357-375).
cctcaagctatttcttatt

SEQ ID NO: 555342 - DNA, 19 bp, Mus musculus
  siRNA target sequence for 5330415H22Rik (NM_172823.1,370-388).
cttatttagagaaaacatt

SEQ ID NO: 555343 - DNA, 19 bp, Mus musculus
  siRNA target sequence for 5330415H22Rik (NM_172823.1,405-423).
gctggcaggatcttactta

SEQ ID NO: 555344 - DNA, 19 bp, Mus musculus
  siRNA target sequence for 5330415H22Rik (NM_172823.1,464-482).
cgatccacacagatactgt

SEQ ID NO: 555345 - DNA, 19 bp, Mus musculus
  siRNA target sequence for 5330415H22Rik (NM_172823.1,618-636).
gacgcagacttcgttcttt

SEQ ID NO: 555346 - DNA, 19 bp, Mus musculus
  siRNA target sequence for 5330415H22Rik (NM_172823.1,661-679).
ggtgcagccacgaaaacat

SEQ ID NO: 555347 - DNA, 19 bp, Mus musculus
  siRNA target sequence for 5330415H22Rik (NM_172823.1,683-701).
ctcctacgcagcctattgt

SEQ ID NO: 555348 - DNA, 19 bp, Mus musculus
  siRNA target sequence for 5330415H22Rik (NM_172823.1,685-703).
cctacgcagcctattgtca

SEQ ID NO: 555349 - DNA, 19 bp, Mus musculus
  siRNA target sequence for 5330415H22Rik (NM_172823.1,725-743).
gcccatagcaggatatgct

SEQ ID NO: 555350 - DNA, 19 bp, Mus musculus
  siRNA target sequence for 5330415H22Rik (NM_172823.1,726-744).
cccatagcaggatatgcta

SEQ ID NO: 555351 - DNA, 19 bp, Mus musculus
  siRNA target sequence for 5330415H22Rik (NM_172823.1,727-745).
ccatagcaggatatgctaa

SEQ ID NO: 555352 - DNA, 19 bp, Mus musculus
  siRNA target sequence for 5330415H22Rik (NM_172823.1,742-760).
ctaacctgtgtccaaatat

SEQ ID NO: 555353 - DNA, 19 bp, Mus musculus
  siRNA target sequence for 5330415H22Rik (NM_172823.1,747-765).
ctgtgtccaaatatgatct

SEQ ID NO: 555354 - DNA, 19 bp, Mus musculus
  siRNA target sequence for 5330415H22Rik (NM_172823.1,873-891).
ggaaaccccctgacttcaa

SEQ ID NO: 555355 - DNA, 19 bp, Mus musculus
  siRNA target sequence for 5330415H22Rik (NM_172823.1,911-929).
gcccttcaactatagtctt

SEQ ID NO: 555356 - DNA, 19 bp, Mus musculus
  siRNA target sequence for 5330415H22Rik (NM_172823.1,960-978).
cggaaagtggagagattgt

SEQ ID NO: 555357 - DNA, 19 bp, Mus musculus
  siRNA target sequence for 5330415H22Rik (NM_172823.1,979-997).
ggaatgttcgagataacaa

SEQ ID NO: 555358 - DNA, 19 bp, Mus musculus
  siRNA target sequence for 5330415H22Rik (NM_172823.1,1030-1048).
caccgcgtgttgttgaaga

SEQ ID NO: 555359 - DNA, 19 bp, Mus musculus
  siRNA target sequence for 5330415H22Rik (NM_172823.1,1044-1062).
gaagaagctcggaagcatt

SEQ ID NO: 555360 - DNA, 19 bp, Mus musculus
  siRNA target sequence for 5330415H22Rik (NM_172823.1,1050-1068).
gctcggaagcattttaact

SEQ ID NO: 555361 - DNA, 19 bp, Mus musculus
  siRNA target sequence for 5330415H22Rik (NM_172823.1,1198-1216).
ggatcactctggcgttaat

SEQ ID NO: 555362 - DNA, 19 bp, Mus musculus
  siRNA target sequence for 5330415H22Rik (NM_172823.1,1220-1238).
ggacactggctggtacaaa

SEQ ID NO: 555363 - DNA, 19 bp, Mus musculus
  siRNA target sequence for 5330415H22Rik (NM_172823.1,1275-1293).
cgaggactgggctgtgaat

SEQ ID NO: 555364 - DNA, 19 bp, Mus musculus
  siRNA target sequence for 5330415H22Rik (NM_172823.1,1281-1299).
ctgggctgtgaatttgtca

SEQ ID NO: 555365 - DNA, 19 bp, Mus musculus
  siRNA target sequence for 5330415H22Rik (NM_172823.1,1309-1327).
gtaaattctggattgatca

SEQ ID NO: 555366 - DNA, 19 bp, Mus musculus
  siRNA target sequence for 5330415H22Rik (NM_172823.1,1414-1432).
gagccgtcgctgtgtgtaa

SEQ ID NO: 555367 - DNA, 19 bp, Mus musculus
  siRNA target sequence for 5330415H22Rik (NM_172823.1,1459-1477).
cacccgagtaccagtactt

SEQ ID NO: 555368 - DNA, 19 bp, Mus musculus
  siRNA target sequence for 5330415H22Rik (NM_172823.1,1530-1548).
gtggaaatcgctgactatt

SEQ ID NO: 555369 - DNA, 19 bp, Mus musculus
  siRNA target sequence for 5330415H22Rik (NM_172823.1,1549-1567).
gtcctttcagtcaggaatt

SEQ ID NO: 555370 - DNA, 19 bp, Mus musculus
  siRNA target sequence for 5330415H22Rik (NM_172823.1,1562-1580).
ggaattcagctggcattta

SEQ ID NO: 555371 - DNA, 19 bp, Mus musculus
  siRNA target sequence for 5330415H22Rik (NM_172823.1,1563-1581).
gaattcagctggcatttaa

SEQ ID NO: 555372 - DNA, 19 bp, Mus musculus
  siRNA target sequence for 5330415H22Rik (NM_172823.1,1596-1614).
cgcagctccgactgtagaa

SEQ ID NO: 555373 - DNA, 19 bp, Mus musculus
  siRNA target sequence for 5330415H22Rik (NM_172823.1,1629-1647).
ccagagctgtttaagaact

SEQ ID NO: 555374 - DNA, 19 bp, Mus musculus
  siRNA target sequence for 5330415H22Rik (NM_172823.1,1675-1693).
cggtctgtctgcttcagaa

SEQ ID NO: 555375 - DNA, 19 bp, Mus musculus
  siRNA target sequence for 5330415H22Rik (NM_172823.1,1754-1772).
ctgctaccaggtttcttgt

SEQ ID NO: 555376 - DNA, 19 bp, Mus musculus
  siRNA target sequence for 5330415H22Rik (NM_172823.1,1757-1775).
ctaccaggtttcttgttct

SEQ ID NO: 555377 - DNA, 19 bp, Mus musculus
  siRNA target sequence for 5330415H22Rik (NM_172823.1,1776-1794).
cctcaaggtctaaaggttt

SEQ ID NO: 555378 - DNA, 19 bp, Mus musculus
  siRNA target sequence for 5330415H22Rik (NM_172823.1,1839-1857).
ctcccagtccgaattcaga

SEQ ID NO: 555379 - DNA, 19 bp, Mus musculus
  siRNA target sequence for 5330415H22Rik (NM_172823.1,1843-1861).
cagtccgaattcagatgaa

SEQ ID NO: 555380 - DNA, 19 bp, Mus musculus
  siRNA target sequence for 5330415H22Rik (NM_172823.1,1859-1877).
gaacggctggattcacaat

SEQ ID NO: 555381 - DNA, 19 bp, Mus musculus
  siRNA target sequence for 5330415H22Rik (NM_172823.1,1863-1881).
ggctggattcacaatggaa

SEQ ID NO: 555382 - DNA, 19 bp, Mus musculus
  siRNA target sequence for 5330426D11Rik (NM_030081.2,362-380).
cacattatgaggaagaaca

SEQ ID NO: 555383 - DNA, 19 bp, Mus musculus
  siRNA target sequence for 5330426D11Rik (NM_030081.2,384-402).
ggaagatcgtgatgtcaaa

SEQ ID NO: 555384 - DNA, 19 bp, Mus musculus
  siRNA target sequence for 5330426D11Rik (NM_030081.2,394-412).
gatgtcaaagggcaaatta

SEQ ID NO: 555385 - DNA, 19 bp, Mus musculus
  siRNA target sequence for 5330426D11Rik (NM_030081.2,491-509).
cccaaggatatgaatcatt

SEQ ID NO: 555386 - DNA, 19 bp, Mus musculus
  siRNA target sequence for 5330426D11Rik (NM_030081.2,497-515).
gatatgaatcattcagtta

SEQ ID NO: 555387 - DNA, 19 bp, Mus musculus
  siRNA target sequence for 5330426D11Rik (NM_030081.2,520-538).
ggggttgatccttacatgt

SEQ ID NO: 555388 - DNA, 19 bp, Mus musculus
  siRNA target sequence for 5330426D11Rik (NM_030081.2,605-623).
gaattgaccactatgttgt

SEQ ID NO: 555389 - DNA, 19 bp, Mus musculus
  siRNA target sequence for 5330426D11Rik (NM_030081.2,615-633).
ctatgttgttgaagtcaat

SEQ ID NO: 555390 - DNA, 19 bp, Mus musculus
  siRNA target sequence for 5330426D11Rik (NM_030081.2,619-637).
gttgttgaagtcaataaat

SEQ ID NO: 555391 - DNA, 19 bp, Mus musculus
  siRNA target sequence for 5330426D11Rik (NM_030081.2,755-773).
gtccagactgtgggaataa

SEQ ID NO: 555392 - DNA, 19 bp, Mus musculus
  siRNA target sequence for 5330426D11Rik (NM_030081.2,760-778).
gactgtgggaataaattca

SEQ ID NO: 555393 - DNA, 19 bp, Mus musculus
  siRNA target sequence for 5330426D11Rik (NM_030081.2,805-823).
cgcctctgtgggtctatca

SEQ ID NO: 555394 - DNA, 19 bp, Mus musculus
  siRNA target sequence for 5330426D11Rik (NM_030081.2,808-826).
ctctgtgggtctatcatgt

SEQ ID NO: 555395 - DNA, 19 bp, Mus musculus
  siRNA target sequence for 5330426D11Rik (NM_030081.2,1115-1133).
ggctttgcatggagaaagt

SEQ ID NO: 555396 - DNA, 19 bp, Mus musculus
  siRNA target sequence for 5330426D11Rik (NM_030081.2,1116-1134).
gctttgcatggagaaagtt

SEQ ID NO: 555397 - DNA, 19 bp, Mus musculus
  siRNA target sequence for 5330426D11Rik (NM_030081.2,1160-1178).
ggatggcagcatctttaaa

SEQ ID NO: 555398 - DNA, 19 bp, Mus musculus
  siRNA target sequence for 5330426D11Rik (NM_030081.2,1184-1202).
gggagacgacctacaatct

SEQ ID NO: 555399 - DNA, 19 bp, Mus musculus
  siRNA target sequence for 5330426D11Rik (NM_030081.2,1236-1254).
gaaagtatatgagctaata

SEQ ID NO: 555400 - DNA, 19 bp, Mus musculus
  siRNA target sequence for 5330426D11Rik (NM_030081.2,1246-1264).
gagctaatagacgctttaa

SEQ ID NO: 555401 - DNA, 19 bp, Mus musculus
  siRNA target sequence for 5330426D11Rik (NM_030081.2,1249-1267).
ctaatagacgctttaagta

SEQ ID NO: 555402 - DNA, 19 bp, Mus musculus
  siRNA target sequence for 5330426D11Rik (NM_030081.2,1265-1283).
gtaagaagatcttaacctt

SEQ ID NO: 555403 - DNA, 19 bp, Mus musculus
  siRNA target sequence for 5330426D11Rik (NM_030081.2,1319-1337).
ctttgcggctacagagaat

SEQ ID NO: 555404 - DNA, 19 bp, Mus musculus
  siRNA target sequence for 5330426D11Rik (NM_030081.2,1343-1361).
gatactcagctacattatt

SEQ ID NO: 555405 - DNA, 19 bp, Mus musculus
  siRNA target sequence for 5330426D11Rik (NM_030081.2,1512-1530).
gagtggtttggcatctcat

SEQ ID NO: 555406 - DNA, 19 bp, Mus musculus
  siRNA target sequence for 5330426D11Rik (NM_030081.2,1647-1665).
ccagcagatctataacatt

SEQ ID NO: 555407 - DNA, 19 bp, Mus musculus
  siRNA target sequence for 5330426D11Rik (NM_030081.2,1898-1916).
cacggactcgtgttctaga

SEQ ID NO: 555408 - DNA, 19 bp, Mus musculus
  siRNA target sequence for 5330426D11Rik (NM_030081.2,1924-1942).
gaagttatacccttccaat

SEQ ID NO: 555409 - DNA, 19 bp, Mus musculus
  siRNA target sequence for 5330426D11Rik (NM_030081.2,2015-2033).
gcacagctcctgatatcct

SEQ ID NO: 555410 - DNA, 19 bp, Mus musculus
  siRNA target sequence for 5330426D11Rik (NM_030081.2,2330-2348).
cagcacccaacccttttga

SEQ ID NO: 555411 - DNA, 19 bp, Mus musculus
  siRNA target sequence for 5330426D11Rik (NM_030081.2,2384-2402).
cccctggaaacccttttga

SEQ ID NO: 555412 - DNA, 19 bp, Mus musculus
  siRNA target sequence for 5330426D11Rik (NM_030081.2,2427-2445).
cgaggtggacagtgatagt

SEQ ID NO: 555413 - DNA, 19 bp, Mus musculus
  siRNA target sequence for 5330426D11Rik (NM_030081.2,2505-2523).
caaggcttacatctttgat

SEQ ID NO: 555414 - DNA, 19 bp, Mus musculus
  siRNA target sequence for 5330426D11Rik (NM_030081.2,2545-2563).
gacgaggttgaggttctaa

SEQ ID NO: 555415 - DNA, 19 bp, Mus musculus
  siRNA target sequence for 5830400N10Rik (NM_029077.1,262-280).
gtgcgtgtgcagaagctaa

SEQ ID NO: 555416 - DNA, 19 bp, Mus musculus
  siRNA target sequence for 5830400N10Rik (NM_029077.1,266-284).
gtgtgcagaagctaatcca

SEQ ID NO: 555417 - DNA, 19 bp, Mus musculus
  siRNA target sequence for 5830400N10Rik (NM_029077.1,317-335).
ggcaacatgcggacaacat

SEQ ID NO: 555418 - DNA, 19 bp, Mus musculus
  siRNA target sequence for 5830400N10Rik (NM_029077.1,318-336).
gcaacatgcggacaacata

SEQ ID NO: 555419 - DNA, 19 bp, Mus musculus
  siRNA target sequence for 5830400N10Rik (NM_029077.1,355-373).
ggggaaaggctcaaggttt

SEQ ID NO: 555420 - DNA, 19 bp, Mus musculus
  siRNA target sequence for 5830400N10Rik (NM_029077.1,370-388).
gtttacgcagactcaagta

SEQ ID NO: 555421 - DNA, 19 bp, Mus musculus
  siRNA target sequence for 5830400N10Rik (NM_029077.1,442-460).
gaagtactggccaaaaaat

SEQ ID NO: 555422 - DNA, 19 bp, Mus musculus
  siRNA target sequence for 5830400N10Rik (NM_029077.1,452-470).
ccaaaaaattcattgacaa

SEQ ID NO: 555423 - DNA, 19 bp, Mus musculus
  siRNA target sequence for 5830400N10Rik (NM_029077.1,677-695).
ccttcgagcctgtcaagaa

SEQ ID NO: 555424 - DNA, 19 bp, Mus musculus
  siRNA target sequence for 5830400N10Rik (NM_029077.1,682-700).
gagcctgtcaagaacttct

SEQ ID NO: 555425 - DNA, 19 bp, Mus musculus
  siRNA target sequence for 5830400N10Rik (NM_029077.1,752-770).
ctcgcctgaaggaaaacat

SEQ ID NO: 555426 - DNA, 19 bp, Mus musculus
  siRNA target sequence for 5830400N10Rik (NM_029077.1,754-772).
cgcctgaaggaaaacataa

SEQ ID NO: 555427 - DNA, 19 bp, Mus musculus
  siRNA target sequence for 5830400N10Rik (NM_029077.1,804-822).
gccaggcgccttgttgaaa

SEQ ID NO: 555428 - DNA, 19 bp, Mus musculus
  siRNA target sequence for 5830400N10Rik (NM_029077.1,805-823).
ccaggcgccttgttgaaaa

SEQ ID NO: 555429 - DNA, 19 bp, Mus musculus
  siRNA target sequence for 5830400N10Rik (NM_029077.1,808-826).
ggcgccttgttgaaaacca

SEQ ID NO: 555430 - DNA, 19 bp, Mus musculus
  siRNA target sequence for 6330414G21Rik (NM_178110.2,103-121).
ggctgcgagcactacttct

SEQ ID NO: 555431 - DNA, 19 bp, Mus musculus
  siRNA target sequence for 6330414G21Rik (NM_178110.2,789-807).
gaggctcaaggggaagatt

SEQ ID NO: 555432 - DNA, 19 bp, Mus musculus
  siRNA target sequence for 6330414G21Rik (NM_178110.2,865-883).
cagtacaccatctggaaat

SEQ ID NO: 555433 - DNA, 19 bp, Mus musculus
  siRNA target sequence for 6330414G21Rik (NM_178110.2,1183-1201).
ggcttctactgcatcgtta

SEQ ID NO: 555434 - DNA, 19 bp, Mus musculus
  siRNA target sequence for 6330414G21Rik (NM_178110.2,1184-1202).
gcttctactgcatcgttat

SEQ ID NO: 555435 - DNA, 19 bp, Mus musculus
  siRNA target sequence for 6330414G21Rik (NM_178110.2,1426-1444).
caaccactgcggatcaaca

SEQ ID NO: 555436 - DNA, 19 bp, Mus musculus
  siRNA target sequence for 6530401C20Rik (NM_173405.1,441-459).
ctgaagcagatgtatacct

SEQ ID NO: 555437 - DNA, 19 bp, Mus musculus
  siRNA target sequence for 6530401C20Rik (NM_173405.1,712-730).
gctgcgccgaggctttctt

SEQ ID NO: 555438 - DNA, 19 bp, Mus musculus
  siRNA target sequence for 6530401C20Rik (NM_173405.1,732-750).
ctgggccttcgcgtcaaat

SEQ ID NO: 555439 - DNA, 19 bp, Mus musculus
  siRNA target sequence for 6530401C20Rik (NM_173405.1,793-811).
gacccagtcgggatactga

SEQ ID NO: 555440 - DNA, 19 bp, Mus musculus
  siRNA target sequence for 6530401C20Rik (NM_173405.1,834-852).
ggcatcttgtccttcttga

SEQ ID NO: 555441 - DNA, 19 bp, Mus musculus
  siRNA target sequence for 6530401C20Rik (NM_173405.1,929-947).
cttcaccttcggcagattt

SEQ ID NO: 555442 - DNA, 19 bp, Mus musculus
  siRNA target sequence for 6530401C20Rik (NM_173405.1,932-950).
caccttcggcagatttctt

SEQ ID NO: 555443 - DNA, 19 bp, Mus musculus
  siRNA target sequence for 6530401C20Rik (NM_173405.1,1332-1350).
gtgatggtggagatatggt

SEQ ID NO: 555444 - DNA, 19 bp, Mus musculus
  siRNA target sequence for 6530401C20Rik (NM_173405.1,1738-1756).
cctgtggcaaggataatgt

SEQ ID NO: 555445 - DNA, 19 bp, Mus musculus
  siRNA target sequence for 7420700F21 (NM_172539.1,354-372).
catccccgcaattaaccaa

SEQ ID NO: 555446 - DNA, 19 bp, Mus musculus
  siRNA target sequence for 7420700F21 (NM_172539.1,450-468).
gttgtcagtgaccaataat

SEQ ID NO: 555447 - DNA, 19 bp, Mus musculus
  siRNA target sequence for 7420700F21 (NM_172539.1,453-471).
gtcagtgaccaataataaa

SEQ ID NO: 555448 - DNA, 19 bp, Mus musculus
  siRNA target sequence for 7420700F21 (NM_172539.1,513-531).
gctttccagaaagtatgat

SEQ ID NO: 555449 - DNA, 19 bp, Mus musculus
  siRNA target sequence for 7420700F21 (NM_172539.1,582-600).
cacatgcatccggtttgtt

SEQ ID NO: 555450 - DNA, 19 bp, Mus musculus
  siRNA target sequence for 7420700F21 (NM_172539.1,722-740).
gaggcattgtcctacatga

SEQ ID NO: 555451 - DNA, 19 bp, Mus musculus
  siRNA target sequence for 7420700F21 (NM_172539.1,830-848).
gctttgaaatcaacttcat

SEQ ID NO: 555452 - DNA, 19 bp, Mus musculus
  siRNA target sequence for 7420700F21 (NM_172539.1,849-867).
caagtcacggagtaccaat

SEQ ID NO: 555453 - DNA, 19 bp, Mus musculus
  siRNA target sequence for 7420700F21 (NM_172539.1,854-872).
cacggagtaccaatatgtt

SEQ ID NO: 555454 - DNA, 19 bp, Mus musculus
  siRNA target sequence for 7420700F21 (NM_172539.1,857-875).
ggagtaccaatatgttagt

SEQ ID NO: 555455 - DNA, 19 bp, Mus musculus
  siRNA target sequence for 7420700F21 (NM_172539.1,858-876).
gagtaccaatatgttagtt

SEQ ID NO: 555456 - DNA, 19 bp, Mus musculus
  siRNA target sequence for 7420700F21 (NM_172539.1,874-892).
gttccctatgactactcat

SEQ ID NO: 555457 - DNA, 19 bp, Mus musculus
  siRNA target sequence for 7420700F21 (NM_172539.1,897-915).
gatgcattatgggagattt

SEQ ID NO: 555458 - DNA, 19 bp, Mus musculus
  siRNA target sequence for 7420700F21 (NM_172539.1,956-974).
ggacctccagtgttcacat

SEQ ID NO: 555459 - DNA, 19 bp, Mus musculus
  siRNA target sequence for 7420700F21 (NM_172539.1,957-975).
gacctccagtgttcacatt

SEQ ID NO: 555460 - DNA, 19 bp, Mus musculus
  siRNA target sequence for 7420700F21 (NM_172539.1,1098-1116).
cacccctgcctctatatca

SEQ ID NO: 555461 - DNA, 19 bp, Mus musculus
  siRNA target sequence for 7420700F21 (NM_172539.1,1107-1125).
ctctatatcacgtctacaa

SEQ ID NO: 555462 - DNA, 19 bp, Mus musculus
  siRNA target sequence for 7420700F21 (NM_172539.1,1181-1199).
ggactggaggccagagtat

SEQ ID NO: 555463 - DNA, 19 bp, Mus musculus
  siRNA target sequence for 7420700F21 (NM_172539.1,1182-1200).
gactggaggccagagtatt

SEQ ID NO: 555464 - DNA, 19 bp, Mus musculus
  siRNA target sequence for 7420700F21 (NM_172539.1,1287-1305).
gctagccgatgcttcaaaa

SEQ ID NO: 555465 - DNA, 19 bp, Mus musculus
  siRNA target sequence for 7420700F21 (NM_172539.1,1288-1306).
ctagccgatgcttcaaaat

SEQ ID NO: 555466 - DNA, 19 bp, Mus musculus
  siRNA target sequence for 7420700F21 (NM_172539.1,1370-1388).
ctgtacctcttgctctatt

SEQ ID NO: 555467 - DNA, 19 bp, Mus musculus
  siRNA target sequence for 7420700F21 (NM_172539.1,1462-1480).
gcacctggaagtcacatta

SEQ ID NO: 555468 - DNA, 19 bp, Mus musculus
  siRNA target sequence for 9230105E10Rik (NM_175677.3,1224-1242).
cttcaatccaatatttcgt

SEQ ID NO: 555469 - DNA, 19 bp, Mus musculus
  siRNA target sequence for 9330155P21Rik (NM_146241.1,517-535).
ccgctgcactacaatttga

SEQ ID NO: 555470 - DNA, 19 bp, Mus musculus
  siRNA target sequence for 9330155P21Rik (NM_146241.1,518-536).
cgctgcactacaatttgat

SEQ ID NO: 555471 - DNA, 19 bp, Mus musculus
  siRNA target sequence for 9330155P21Rik (NM_146241.1,689-707).
cggttgcaggctttttcct

SEQ ID NO: 555472 - DNA, 19 bp, Mus musculus
  siRNA target sequence for 9330155P21Rik (NM_146241.1,754-772).
gacgcgcagaggcattaca

SEQ ID NO: 555473 - DNA, 19 bp, Mus musculus
  siRNA target sequence for 9330155P21Rik (NM_146241.1,756-774).
cgcgcagaggcattacaat

SEQ ID NO: 555474 - DNA, 19 bp, Mus musculus
  siRNA target sequence for 9330155P21Rik (NM_146241.1,758-776).
cgcagaggcattacaatct

SEQ ID NO: 555475 - DNA, 19 bp, Mus musculus
  siRNA target sequence for 9330155P21Rik (NM_146241.1,900-918).
ggcgtttccgtgtttcgat

SEQ ID NO: 555476 - DNA, 19 bp, Mus musculus
  siRNA target sequence for 9330155P21Rik (NM_146241.1,908-926).
cgtgtttcgatgaaccaat

SEQ ID NO: 555477 - DNA, 19 bp, Mus musculus
  siRNA target sequence for 9330155P21Rik (NM_146241.1,911-929).
gtttcgatgaaccaatcta

SEQ ID NO: 555478 - DNA, 19 bp, Mus musculus
  siRNA target sequence for 9330155P21Rik (NM_146241.1,942-960).
caaaatcagcatcaaacat

SEQ ID NO: 555479 - DNA, 19 bp, Mus musculus
  siRNA target sequence for 9330155P21Rik (NM_146241.1,954-972).
caaacatcaagcaacctat

SEQ ID NO: 555480 - DNA, 19 bp, Mus musculus
  siRNA target sequence for 9330155P21Rik (NM_146241.1,968-986).
cctatttgtctctatccaa

SEQ ID NO: 555481 - DNA, 19 bp, Mus musculus
  siRNA target sequence for 9330155P21Rik (NM_146241.1,1049-1067).
cccctctcatgtctacata

SEQ ID NO: 555482 - DNA, 19 bp, Mus musculus
  siRNA target sequence for 9330155P21Rik (NM_146241.1,1082-1100).
cgatttgcaacttcacata

SEQ ID NO: 555483 - DNA, 19 bp, Mus musculus
  siRNA target sequence for 9330155P21Rik (NM_146241.1,1123-1141).
ggggttgtagtccgattat

SEQ ID NO: 555484 - DNA, 19 bp, Mus musculus
  siRNA target sequence for 9330155P21Rik (NM_146241.1,1124-1142).
gggttgtagtccgattata

SEQ ID NO: 555485 - DNA, 19 bp, Mus musculus
  siRNA target sequence for 9330155P21Rik (NM_146241.1,1125-1143).
ggttgtagtccgattatat

SEQ ID NO: 555486 - DNA, 19 bp, Mus musculus
  siRNA target sequence for 9330155P21Rik (NM_146241.1,1146-1164).
gagacccgacgctatcaga

SEQ ID NO: 555487 - DNA, 19 bp, Mus musculus
  siRNA target sequence for 9330155P21Rik (NM_146241.1,1177-1195).
gactatgctctccacatta

SEQ ID NO: 555488 - DNA, 19 bp, Mus musculus
  siRNA target sequence for 9330155P21Rik (NM_146241.1,1179-1197).
ctatgctctccacattaca

SEQ ID NO: 555489 - DNA, 19 bp, Mus musculus
  siRNA target sequence for 9330155P21Rik (NM_146241.1,1183-1201).
gctctccacattacaaaga

SEQ ID NO: 555490 - DNA, 19 bp, Mus musculus
  siRNA target sequence for 9330155P21Rik (NM_146241.1,1186-1204).
ctccacattacaaagagat

SEQ ID NO: 555491 - DNA, 19 bp, Mus musculus
  siRNA target sequence for 9330155P21Rik (NM_146241.1,1189-1207).
cacattacaaagagattaa

SEQ ID NO: 555492 - DNA, 19 bp, Mus musculus
  siRNA target sequence for 9330155P21Rik (NM_146241.1,1191-1209).
cattacaaagagattaata

SEQ ID NO: 555493 - DNA, 19 bp, Mus musculus
  siRNA target sequence for 9330155P21Rik (NM_146241.1,1238-1256).
cctattctttgccaaaact

SEQ ID NO: 555494 - DNA, 19 bp, Mus musculus
  siRNA target sequence for 9330155P21Rik (NM_146241.1,1239-1257).
ctattctttgccaaaacta

SEQ ID NO: 555495 - DNA, 19 bp, Mus musculus
  siRNA target sequence for 9330155P21Rik (NM_146241.1,1248-1266).
gccaaaactagatctttta

SEQ ID NO: 555496 - DNA, 19 bp, Mus musculus
  siRNA target sequence for 9330155P21Rik (NM_146241.1,1297-1315).
gagaactggggactaagta

SEQ ID NO: 555497 - DNA, 19 bp, Mus musculus
  siRNA target sequence for 9330155P21Rik (NM_146241.1,1382-1400).
ccatggtcattgttcatga

SEQ ID NO: 555498 - DNA, 19 bp, Mus musculus
  siRNA target sequence for 9330155P21Rik (NM_146241.1,1386-1404).
ggtcattgttcatgaaata

SEQ ID NO: 555499 - DNA, 19 bp, Mus musculus
  siRNA target sequence for 9330155P21Rik (NM_146241.1,1469-1487).
gctttgctcactactttga

SEQ ID NO: 555500 - DNA, 19 bp, Mus musculus
  siRNA target sequence for 9330155P21Rik (NM_146241.1,1475-1493).
ctcactactttgaatttgt

SEQ ID NO: 555501 - DNA, 19 bp, Mus musculus
  siRNA target sequence for 9330155P21Rik (NM_146241.1,1587-1605).
cagttcccatccagtatca

SEQ ID NO: 555502 - DNA, 19 bp, Mus musculus
  siRNA target sequence for 9330155P21Rik (NM_146241.1,1612-1630).
gtgctacgggcaacagata

SEQ ID NO: 555503 - DNA, 19 bp, Mus musculus
  siRNA target sequence for 9330155P21Rik (NM_146241.1,1614-1632).
gctacgggcaacagatatt

SEQ ID NO: 555504 - DNA, 19 bp, Mus musculus
  siRNA target sequence for 9330155P21Rik (NM_146241.1,1618-1636).
cgggcaacagatattgaca

SEQ ID NO: 555505 - DNA, 19 bp, Mus musculus
  siRNA target sequence for 9330155P21Rik (NM_146241.1,1644-1662).
cgactggatcgcatacaaa

SEQ ID NO: 555506 - DNA, 19 bp, Mus musculus
  siRNA target sequence for 9330155P21Rik (NM_146241.1,1645-1663).
gactggatcgcatacaaaa

SEQ ID NO: 555507 - DNA, 19 bp, Mus musculus
  siRNA target sequence for 9330155P21Rik (NM_146241.1,1721-1739).
ggggattgcaagattattt

SEQ ID NO: 555508 - DNA, 19 bp, Mus musculus
  siRNA target sequence for 9330155P21Rik (NM_146241.1,1722-1740).
gggattgcaagattattta

SEQ ID NO: 555509 - DNA, 19 bp, Mus musculus
  siRNA target sequence for 9330155P21Rik (NM_146241.1,1723-1741).
ggattgcaagattatttaa

SEQ ID NO: 555510 - DNA, 19 bp, Mus musculus
  siRNA target sequence for 9330155P21Rik (NM_146241.1,1732-1750).
gattatttaaccattcaca

SEQ ID NO: 555511 - DNA, 19 bp, Mus musculus
  siRNA target sequence for 9330155P21Rik (NM_146241.1,1774-1792).
gatctctggaatacattat

SEQ ID NO: 555512 - DNA, 19 bp, Mus musculus
  siRNA target sequence for 9330155P21Rik (NM_146241.1,1864-1882).
ggatatcctgttatcacta

SEQ ID NO: 555513 - DNA, 19 bp, Mus musculus
  siRNA target sequence for 9330155P21Rik (NM_146241.1,1893-1911).
cacgacggcagaaaataga

SEQ ID NO: 555514 - DNA, 19 bp, Mus musculus
  siRNA target sequence for 9330155P21Rik (NM_146241.1,1898-1916).
cggcagaaaatagaatact

SEQ ID NO: 555515 - DNA, 19 bp, Mus musculus
  siRNA target sequence for 9330155P21Rik (NM_146241.1,1899-1917).
ggcagaaaatagaatactt

SEQ ID NO: 555516 - DNA, 19 bp, Mus musculus
  siRNA target sequence for 9330155P21Rik (NM_146241.1,1927-1945).
cagcatttcatttatgaca

SEQ ID NO: 555517 - DNA, 19 bp, Mus musculus
  siRNA target sequence for 9330155P21Rik (NM_146241.1,1942-1960).
gacattggtgctaaaacta

SEQ ID NO: 555518 - DNA, 19 bp, Mus musculus
  siRNA target sequence for 9330155P21Rik (NM_146241.1,1944-1962).
cattggtgctaaaactaaa

SEQ ID NO: 555519 - DNA, 19 bp, Mus musculus
  siRNA target sequence for 9330155P21Rik (NM_146241.1,1989-2007).
cctgtggcagattccatta

SEQ ID NO: 555520 - DNA, 19 bp, Mus musculus
  siRNA target sequence for 9330155P21Rik (NM_146241.1,1995-2013).
gcagattccattaaccatt

SEQ ID NO: 555521 - DNA, 19 bp, Mus musculus
  siRNA target sequence for 9330155P21Rik (NM_146241.1,2048-2066).
caattatttgggtgtctaa

SEQ ID NO: 555522 - DNA, 19 bp, Mus musculus
  siRNA target sequence for 9330155P21Rik (NM_146241.1,2058-2076).
ggtgtctaacaaatcagaa

SEQ ID NO: 555523 - DNA, 19 bp, Mus musculus
  siRNA target sequence for 9330155P21Rik (NM_146241.1,2061-2079).
gtctaacaaatcagaacat

SEQ ID NO: 555524 - DNA, 19 bp, Mus musculus
  siRNA target sequence for 9330155P21Rik (NM_146241.1,2112-2130).
gatccttgggaacatcaat

SEQ ID NO: 555525 - DNA, 19 bp, Mus musculus
  siRNA target sequence for 9330155P21Rik (NM_146241.1,2127-2145).
caatcaaaccggctacttt

SEQ ID NO: 555526 - DNA, 19 bp, Mus musculus
  siRNA target sequence for 9330155P21Rik (NM_146241.1,2138-2156).
gctactttagagtcaacta

SEQ ID NO: 555527 - DNA, 19 bp, Mus musculus
  siRNA target sequence for 9330155P21Rik (NM_146241.1,2139-2157).
ctactttagagtcaactat

SEQ ID NO: 555528 - DNA, 19 bp, Mus musculus
  siRNA target sequence for 9330155P21Rik (NM_146241.1,2169-2187).
ctggagattactaatcgat

SEQ ID NO: 555529 - DNA, 19 bp, Mus musculus
  siRNA target sequence for 9330155P21Rik (NM_146241.1,2174-2192).
gattactaatcgatcagtt

SEQ ID NO: 555530 - DNA, 19 bp, Mus musculus
  siRNA target sequence for 9330155P21Rik (NM_146241.1,2290-2308).
cccctagagatcatcagat

SEQ ID NO: 555531 - DNA, 19 bp, Mus musculus
  siRNA target sequence for 9330155P21Rik (NM_146241.1,2345-2363).
ctgccagccgagctcttta

SEQ ID NO: 555532 - DNA, 19 bp, Mus musculus
  siRNA target sequence for 9330155P21Rik (NM_146241.1,2349-2367).
cagccgagctctttatcct

SEQ ID NO: 555533 - DNA, 19 bp, Mus musculus
  siRNA target sequence for 9330155P21Rik (NM_146241.1,2359-2377).
ctttatcctctggataaat

SEQ ID NO: 555534 - DNA, 19 bp, Mus musculus
  siRNA target sequence for 9330155P21Rik (NM_146241.1,2385-2403).
ccgcatggagaactacaat

SEQ ID NO: 555535 - DNA, 19 bp, Mus musculus
  siRNA target sequence for 9330155P21Rik (NM_146241.1,2386-2404).
cgcatggagaactacaata

SEQ ID NO: 555536 - DNA, 19 bp, Mus musculus
  siRNA target sequence for 9330155P21Rik (NM_146241.1,2387-2405).
gcatggagaactacaatat

SEQ ID NO: 555537 - DNA, 19 bp, Mus musculus
  siRNA target sequence for 9330155P21Rik (NM_146241.1,2431-2449).
gttgcaacaacatacatca

SEQ ID NO: 555538 - DNA, 19 bp, Mus musculus
  siRNA target sequence for 9330155P21Rik (NM_146241.1,2515-2533).
ctacggagggaagtgataa

SEQ ID NO: 555539 - DNA, 19 bp, Mus musculus
  siRNA target sequence for 9330155P21Rik (NM_146241.1,2518-2536).
cggagggaagtgataatgt

SEQ ID NO: 555540 - DNA, 19 bp, Mus musculus
  siRNA target sequence for 9330155P21Rik (NM_146241.1,2519-2537).
ggagggaagtgataatgtt

SEQ ID NO: 555541 - DNA, 19 bp, Mus musculus
  siRNA target sequence for 9330155P21Rik (NM_146241.1,2576-2594).
catcaacacttatttcaga

SEQ ID NO: 555542 - DNA, 19 bp, Mus musculus
  siRNA target sequence for 9330155P21Rik (NM_146241.1,2677-2695).
gatgtctgggagtttatct

SEQ ID NO: 555543 - DNA, 19 bp, Mus musculus
  siRNA target sequence for 9330155P21Rik (NM_146241.1,2685-2703).
ggagtttatctggatgaaa

SEQ ID NO: 555544 - DNA, 19 bp, Mus musculus
  siRNA target sequence for 9330155P21Rik (NM_146241.1,2686-2704).
gagtttatctggatgaaat

SEQ ID NO: 555545 - DNA, 19 bp, Mus musculus
  siRNA target sequence for 9330155P21Rik (NM_146241.1,2720-2738).
cagtttctgagaaaaagat

SEQ ID NO: 555546 - DNA, 19 bp, Mus musculus
  siRNA target sequence for 9330155P21Rik (NM_146241.1,2762-2780).
gcgatgacaggaatttatt

SEQ ID NO: 555547 - DNA, 19 bp, Mus musculus
  siRNA target sequence for 9330155P21Rik (NM_146241.1,2763-2781).
cgatgacaggaatttatta

SEQ ID NO: 555548 - DNA, 19 bp, Mus musculus
  siRNA target sequence for 9330155P21Rik (NM_146241.1,2764-2782).
gatgacaggaatttattaa

SEQ ID NO: 555549 - DNA, 19 bp, Mus musculus
  siRNA target sequence for 9330155P21Rik (NM_146241.1,2767-2785).
gacaggaatttattaagta

SEQ ID NO: 555550 - DNA, 19 bp, Mus musculus
  siRNA target sequence for 9330155P21Rik (NM_146241.1,2814-2832).
ggtggtgttggatcaagat

SEQ ID NO: 555551 - DNA, 19 bp, Mus musculus
  siRNA target sequence for 9330155P21Rik (NM_146241.1,2823-2841).
ggatcaagatgcaattgat

SEQ ID NO: 555552 - DNA, 19 bp, Mus musculus
  siRNA target sequence for 9330155P21Rik (NM_146241.1,2928-2946).
gtatggagaagcactgttt

SEQ ID NO: 555553 - DNA, 19 bp, Mus musculus
  siRNA target sequence for 9330155P21Rik (NM_146241.1,2932-2950).
ggagaagcactgtttatga

SEQ ID NO: 555554 - DNA, 19 bp, Mus musculus
  siRNA target sequence for 9330155P21Rik (NM_146241.1,2933-2951).
gagaagcactgtttatgaa

SEQ ID NO: 555555 - DNA, 19 bp, Mus musculus
  siRNA target sequence for 9330155P21Rik (NM_146241.1,2966-2984).
gtggagttacagaatttct

SEQ ID NO: 555556 - DNA, 19 bp, Mus musculus
  siRNA target sequence for 9330155P21Rik (NM_146241.1,2996-3014).
gtgaacttaaagagctaaa

SEQ ID NO: 555557 - DNA, 19 bp, Mus musculus
  siRNA target sequence for 9330155P21Rik (NM_146241.1,3001-3019).
cttaaagagctaaagaatt

SEQ ID NO: 555558 - DNA, 19 bp, Mus musculus
  siRNA target sequence for 9330155P21Rik (NM_146241.1,3059-3077).
cacgagctgtggaaactgt

SEQ ID NO: 555559 - DNA, 19 bp, Mus musculus
  siRNA target sequence for 9330155P21Rik (NM_146241.1,3082-3100).
gccaatgtgcgctggaaaa

SEQ ID NO: 555560 - DNA, 19 bp, Mus musculus
  siRNA target sequence for 9330155P21Rik (NM_146241.1,3088-3106).
gtgcgctggaaaaggtttt

SEQ ID NO: 555561 - DNA, 19 bp, Mus musculus
  siRNA target sequence for 9330155P21Rik (NM_146241.1,3092-3110).
gctggaaaaggttttacca

SEQ ID NO: 555562 - DNA, 19 bp, Mus musculus
  siRNA target sequence for Ace (NM_009598.1,109-127).
gccaaccaggggataacaa

SEQ ID NO: 555563 - DNA, 19 bp, Mus musculus
  siRNA target sequence for Ace (NM_009598.1,110-128).
ccaaccaggggataacaaa

SEQ ID NO: 555564 - DNA, 19 bp, Mus musculus
  siRNA target sequence for Ace (NM_009598.1,227-245).
ggttcgtggaagagtatga

SEQ ID NO: 555565 - DNA, 19 bp, Mus musculus
  siRNA target sequence for Ace (NM_009598.1,280-298).
gaggccaactggcaatata

SEQ ID NO: 555566 - DNA, 19 bp, Mus musculus
  siRNA target sequence for Ace (NM_009598.1,283-301).
gccaactggcaatataaca

SEQ ID NO: 555567 - DNA, 19 bp, Mus musculus
  siRNA target sequence for Ace (NM_009598.1,397-415).
gatgtgagcaactttcaaa

SEQ ID NO: 555568 - DNA, 19 bp, Mus musculus
  siRNA target sequence for Ace (NM_009598.1,468-486).
gctgcctcccaaggaatta

SEQ ID NO: 555569 - DNA, 19 bp, Mus musculus
  siRNA target sequence for Ace (NM_009598.1,508-526).
ctagacatggagacaactt

SEQ ID NO: 555570 - DNA, 19 bp, Mus musculus
  siRNA target sequence for Ace (NM_009598.1,530-548).
gcttatccaacatttgcta

SEQ ID NO: 555571 - DNA, 19 bp, Mus musculus
  siRNA target sequence for Ace (NM_009598.1,568-586).
cccctggaacctgatctaa

SEQ ID NO: 555572 - DNA, 19 bp, Mus musculus
  siRNA target sequence for Ace (NM_009598.1,597-615).
ggccacatcccggaaatat

SEQ ID NO: 555573 - DNA, 19 bp, Mus musculus
  siRNA target sequence for Ace (NM_009598.1,599-617).
ccacatcccggaaatatga

SEQ ID NO: 555574 - DNA, 19 bp, Mus musculus
  siRNA target sequence for Ace (NM_009598.1,600-618).
cacatcccggaaatatgaa

SEQ ID NO: 555575 - DNA, 19 bp, Mus musculus
  siRNA target sequence for Ace (NM_009598.1,674-692).
cttttttcccaaagtatgt

SEQ ID NO: 555576 - DNA, 19 bp, Mus musculus
  siRNA target sequence for Ace (NM_009598.1,746-764).
catggagatccttatacga

SEQ ID NO: 555577 - DNA, 19 bp, Mus musculus
  siRNA target sequence for Ace (NM_009598.1,933-951).
gacctggtccaacatctat

SEQ ID NO: 555578 - DNA, 19 bp, Mus musculus
  siRNA target sequence for Ace (NM_009598.1,941-959).
ccaacatctatgatttggt

SEQ ID NO: 555579 - DNA, 19 bp, Mus musculus
  siRNA target sequence for Ace (NM_009598.1,992-1010).
ccacggaagccatgataaa

SEQ ID NO: 555580 - DNA, 19 bp, Mus musculus
  siRNA target sequence for Ace (NM_009598.1,1020-1038).
gacacccagaaggatattt

SEQ ID NO: 555581 - DNA, 19 bp, Mus musculus
  siRNA target sequence for Ace (NM_009598.1,1095-1113).
ctggaacaagtcgatgtta

SEQ ID NO: 555582 - DNA, 19 bp, Mus musculus
  siRNA target sequence for Ace (NM_009598.1,1097-1115).
ggaacaagtcgatgttaga

SEQ ID NO: 555583 - DNA, 19 bp, Mus musculus
  siRNA target sequence for Ace (NM_009598.1,1246-1264).
ggccacatccagtatttca

SEQ ID NO: 555584 - DNA, 19 bp, Mus musculus
  siRNA target sequence for Ace (NM_009598.1,1247-1265).
gccacatccagtatttcat

SEQ ID NO: 555585 - DNA, 19 bp, Mus musculus
  siRNA target sequence for Ace (NM_009598.1,1321-1339).
gaagctattggagatataa

SEQ ID NO: 555586 - DNA, 19 bp, Mus musculus
  siRNA target sequence for Ace (NM_009598.1,1359-1377).
ccccaagcatctatacagt

SEQ ID NO: 555587 - DNA, 19 bp, Mus musculus
  siRNA target sequence for Ace (NM_009598.1,1400-1418).
gcagtggctacgagtatga

SEQ ID NO: 555588 - DNA, 19 bp, Mus musculus
  siRNA target sequence for Ace (NM_009598.1,1410-1428).
cgagtatgacatcaacttt

SEQ ID NO: 555589 - DNA, 19 bp, Mus musculus
  siRNA target sequence for Ace (NM_009598.1,1413-1431).
gtatgacatcaactttcta

SEQ ID NO: 555590 - DNA, 19 bp, Mus musculus
  siRNA target sequence for Ace (NM_009598.1,1490-1508).
ggcgctggagggtctttga

SEQ ID NO: 555591 - DNA, 19 bp, Mus musculus
  siRNA target sequence for Ace (NM_009598.1,1491-1509).
gcgctggagggtctttgat

SEQ ID NO: 555592 - DNA, 19 bp, Mus musculus
  siRNA target sequence for Ace (NM_009598.1,1644-1662).
gccatacgtcaggtacttt

SEQ ID NO: 555593 - DNA, 19 bp, Mus musculus
  siRNA target sequence for Ace (NM_009598.1,1646-1664).
catacgtcaggtactttgt

SEQ ID NO: 555594 - DNA, 19 bp, Mus musculus
  siRNA target sequence for Ace (NM_009598.1,1739-1757).
gtgacatctaccaatccaa

SEQ ID NO: 555595 - DNA, 19 bp, Mus musculus
  siRNA target sequence for Ace (NM_009598.1,1859-1877).
ccgccatgatgaattactt

SEQ ID NO: 555596 - DNA, 19 bp, Mus musculus
  siRNA target sequence for Ace (NM_009598.1,1861-1879).
gccatgatgaattacttca

SEQ ID NO: 555597 - DNA, 19 bp, Mus musculus
  siRNA target sequence for Ace (NM_009598.1,1862-1880).
ccatgatgaattacttcaa

SEQ ID NO: 555598 - DNA, 19 bp, Mus musculus
  siRNA target sequence for Ace (NM_009598.1,1933-1951).
ggctggccggagtacaact

SEQ ID NO: 555599 - DNA, 19 bp, Mus musculus
  siRNA target sequence for Ace (NM_009598.1,1990-2008).
gagtccaaccgcgtcaatt

SEQ ID NO: 555600 - DNA, 19 bp, Mus musculus
  siRNA target sequence for Ace (NM_009598.1,2104-2122).
gcccatcggctctacaaca

SEQ ID NO: 555601 - DNA, 19 bp, Mus musculus
  siRNA target sequence for Ace (NM_009598.1,2105-2123).
cccatcggctctacaacat

SEQ ID NO: 555602 - DNA, 19 bp, Mus musculus
  siRNA target sequence for Ace (NM_009598.1,2115-2133).
ctacaacatccgtaaccat

SEQ ID NO: 555603 - DNA, 19 bp, Mus musculus
  siRNA target sequence for Ace2 (NM_027286.1,298-316).
gacctgtcttatcaaagtt

SEQ ID NO: 555604 - DNA, 19 bp, Mus musculus
  siRNA target sequence for Ace2 (NM_027286.1,300-318).
cctgtcttatcaaagttca

SEQ ID NO: 555605 - DNA, 19 bp, Mus musculus
  siRNA target sequence for Ace2 (NM_027286.1,330-348).
gaattataatactaacatt

SEQ ID NO: 555606 - DNA, 19 bp, Mus musculus
  siRNA target sequence for Ace2 (NM_027286.1,376-394).
gaggctgcagccaaatggt

SEQ ID NO: 555607 - DNA, 19 bp, Mus musculus
  siRNA target sequence for Ace2 (NM_027286.1,392-410).
ggtctgccttttatgaaga

SEQ ID NO: 555608 - DNA, 19 bp, Mus musculus
  siRNA target sequence for Ace2 (NM_027286.1,416-434).
ctaagactgcccaaagttt

SEQ ID NO: 555609 - DNA, 19 bp, Mus musculus
  siRNA target sequence for Ace2 (NM_027286.1,420-438).
gactgcccaaagtttctca

SEQ ID NO: 555610 - DNA, 19 bp, Mus musculus
  siRNA target sequence for Ace2 (NM_027286.1,459-477).
gatcatcaagcgtcaacta

SEQ ID NO: 555611 - DNA, 19 bp, Mus musculus
  siRNA target sequence for Ace2 (NM_027286.1,552-570).
catgagcaccatttacagt

SEQ ID NO: 555612 - DNA, 19 bp, Mus musculus
  siRNA target sequence for Ace2 (NM_027286.1,594-612).
gaacccacaagaatgctta

SEQ ID NO: 555613 - DNA, 19 bp, Mus musculus
  siRNA target sequence for Ace2 (NM_027286.1,597-615).
cccacaagaatgcttatta

SEQ ID NO: 555614 - DNA, 19 bp, Mus musculus
  siRNA target sequence for Ace2 (NM_027286.1,622-640).
ccaggattggatgaaataa

SEQ ID NO: 555615 - DNA, 19 bp, Mus musculus
  siRNA target sequence for Ace2 (NM_027286.1,711-729).
gctgaggccgttgtatgaa

SEQ ID NO: 555616 - DNA, 19 bp, Mus musculus
  siRNA target sequence for Ace2 (NM_027286.1,716-734).
ggccgttgtatgaagagta

SEQ ID NO: 555617 - DNA, 19 bp, Mus musculus
  siRNA target sequence for Ace2 (NM_027286.1,730-748).
gagtatgtggtcctgaaaa

SEQ ID NO: 555618 - DNA, 19 bp, Mus musculus
  siRNA target sequence for Ace2 (NM_027286.1,753-771).
gatggcaagagcaaacaat

SEQ ID NO: 555619 - DNA, 19 bp, Mus musculus
  siRNA target sequence for Ace2 (NM_027286.1,761-779).
gagcaaacaattataacga

SEQ ID NO: 555620 - DNA, 19 bp, Mus musculus
  siRNA target sequence for Ace2 (NM_027286.1,869-887).
gtaccttcgcagagatcaa

SEQ ID NO: 555621 - DNA, 19 bp, Mus musculus
  siRNA target sequence for Ace2 (NM_027286.1,878-896).
cagagatcaagccattgta

SEQ ID NO: 555622 - DNA, 19 bp, Mus musculus
  siRNA target sequence for Ace2 (NM_027286.1,901-919).
catcttcatgcctatgtga

SEQ ID NO: 555623 - DNA, 19 bp, Mus musculus
  siRNA target sequence for Ace2 (NM_027286.1,991-1009).
gatatgtggggtagatttt

SEQ ID NO: 555624 - DNA, 19 bp, Mus musculus
  siRNA target sequence for Ace2 (NM_027286.1,999-1017).
gggtagattttggacaaat

SEQ ID NO: 555625 - DNA, 19 bp, Mus musculus
  siRNA target sequence for Ace2 (NM_027286.1,1001-1019).
gtagattttggacaaatct

SEQ ID NO: 555626 - DNA, 19 bp, Mus musculus
  siRNA target sequence for Ace2 (NM_027286.1,1047-1065).
gaaaccaaacatagatgtt

SEQ ID NO: 555627 - DNA, 19 bp, Mus musculus
  siRNA target sequence for Ace2 (NM_027286.1,1088-1106).
gctgggatgcagaaaggat

SEQ ID NO: 555628 - DNA, 19 bp, Mus musculus
  siRNA target sequence for Ace2 (NM_027286.1,1091-1109).
gggatgcagaaaggatatt

SEQ ID NO: 555629 - DNA, 19 bp, Mus musculus
  siRNA target sequence for Ace2 (NM_027286.1,1136-1154).
ctgttggccttcctcatat

SEQ ID NO: 555630 - DNA, 19 bp, Mus musculus
  siRNA target sequence for Ace2 (NM_027286.1,1138-1156).
gttggccttcctcatatga

SEQ ID NO: 555631 - DNA, 19 bp, Mus musculus
  siRNA target sequence for Ace2 (NM_027286.1,1162-1180).
ggattctgggcaaactcta

SEQ ID NO: 555632 - DNA, 19 bp, Mus musculus
  siRNA target sequence for Ace2 (NM_027286.1,1163-1181).
gattctgggcaaactctat

SEQ ID NO: 555633 - DNA, 19 bp, Mus musculus
  siRNA target sequence for Ace2 (NM_027286.1,1196-1214).
cagatggccggaaagttgt

SEQ ID NO: 555634 - DNA, 19 bp, Mus musculus
  siRNA target sequence for Ace2 (NM_027286.1,1243-1261).
cacggagacttcagaatca

SEQ ID NO: 555635 - DNA, 19 bp, Mus musculus
  siRNA target sequence for Ace2 (NM_027286.1,1348-1366).
caacctttcctgctaagaa

SEQ ID NO: 555636 - DNA, 19 bp, Mus musculus
  siRNA target sequence for Ace2 (NM_027286.1,1431-1449).
caagcatctgaaatccatt

SEQ ID NO: 555637 - DNA, 19 bp, Mus musculus
  siRNA target sequence for Ace2 (NM_027286.1,1458-1476).
gccatccgattttcaagaa

SEQ ID NO: 555638 - DNA, 19 bp, Mus musculus
  siRNA target sequence for Ace2 (NM_027286.1,1460-1478).
catccgattttcaagaaga

SEQ ID NO: 555639 - DNA, 19 bp, Mus musculus
  siRNA target sequence for Ace2 (NM_027286.1,1481-1499).
gcgaaacagagataaactt

SEQ ID NO: 555640 - DNA, 19 bp, Mus musculus
  siRNA target sequence for Ace2 (NM_027286.1,1491-1509).
gataaacttcctactgaaa

SEQ ID NO: 555641 - DNA, 19 bp, Mus musculus
  siRNA target sequence for Ace2 (NM_027286.1,1506-1524).
gaaacaggcattgacaatt

SEQ ID NO: 555642 - DNA, 19 bp, Mus musculus
  siRNA target sequence for Ace2 (NM_027286.1,1518-1536).
gacaattgttggaacacta

SEQ ID NO: 555643 - DNA, 19 bp, Mus musculus
  siRNA target sequence for Ace2 (NM_027286.1,1529-1547).
gaacactaccgtttactta

SEQ ID NO: 555644 - DNA, 19 bp, Mus musculus
  siRNA target sequence for Ace2 (NM_027286.1,1538-1556).
cgtttacttacatgttaga

SEQ ID NO: 555645 - DNA, 19 bp, Mus musculus
  siRNA target sequence for Ace2 (NM_027286.1,1572-1590).
ggtctttcggggtgaaatt

SEQ ID NO: 555646 - DNA, 19 bp, Mus musculus
  siRNA target sequence for Ace2 (NM_027286.1,1653-1671).
gcctctgcctcatgatgaa

SEQ ID NO: 555647 - DNA, 19 bp, Mus musculus
  siRNA target sequence for Ace2 (NM_027286.1,1687-1705).
gcatctctgttccatgttt

SEQ ID NO: 555648 - DNA, 19 bp, Mus musculus
  siRNA target sequence for Ace2 (NM_027286.1,1706-1724).
ctaatgattactcattcat

SEQ ID NO: 555649 - DNA, 19 bp, Mus musculus
  siRNA target sequence for Ace2 (NM_027286.1,1736-1754).
caaggaccatttaccaatt

SEQ ID NO: 555650 - DNA, 19 bp, Mus musculus
  siRNA target sequence for Ace2 (NM_027286.1,1739-1757).
ggaccatttaccaattcca

SEQ ID NO: 555651 - DNA, 19 bp, Mus musculus
  siRNA target sequence for Ace2 (NM_027286.1,1780-1798).
gcagctaagtataatggtt

SEQ ID NO: 555652 - DNA, 19 bp, Mus musculus
  siRNA target sequence for Ace2 (NM_027286.1,1912-1930).
gcaaggaatatggatgtaa

SEQ ID NO: 555653 - DNA, 19 bp, Mus musculus
  siRNA target sequence for Ace2 (NM_027286.1,2021-2039).
catatgccgaccaaagcat

SEQ ID NO: 555654 - DNA, 19 bp, Mus musculus
  siRNA target sequence for Ace2 (NM_027286.1,2044-2062).
gtgaggataagcctaaaat

SEQ ID NO: 555655 - DNA, 19 bp, Mus musculus
  siRNA target sequence for Ace2 (NM_027286.1,2046-2064).
gaggataagcctaaaatca

SEQ ID NO: 555656 - DNA, 19 bp, Mus musculus
  siRNA target sequence for Ace2 (NM_027286.1,2071-2089).
ggagctaatgcatatgaat

SEQ ID NO: 555657 - DNA, 19 bp, Mus musculus
  siRNA target sequence for Ace2 (NM_027286.1,2106-2124).
gttcctgttccgatcatct

SEQ ID NO: 555658 - DNA, 19 bp, Mus musculus
  siRNA target sequence for Ace2 (NM_027286.1,2115-2133).
ccgatcatctgttgcatat

SEQ ID NO: 555659 - DNA, 19 bp, Mus musculus
  siRNA target sequence for Ace2 (NM_027286.1,2191-2209).
gatgtacgagtgagtgatt

SEQ ID NO: 555660 - DNA, 19 bp, Mus musculus
  siRNA target sequence for Ace2 (NM_027286.1,2194-2212).
gtacgagtgagtgatttga

SEQ ID NO: 555661 - DNA, 19 bp, Mus musculus
  siRNA target sequence for Ace2 (NM_027286.1,2200-2218).
gtgagtgatttgaaaccaa

SEQ ID NO: 555662 - DNA, 19 bp, Mus musculus
  siRNA target sequence for Ace2 (NM_027286.1,2257-2275).
gtgtctgatgtcattccta

SEQ ID NO: 555663 - DNA, 19 bp, Mus musculus
  siRNA target sequence for Ace2 (NM_027286.1,2273-2291).
ctagaagtgaagttgaaga

SEQ ID NO: 555664 - DNA, 19 bp, Mus musculus
  siRNA target sequence for Ace2 (NM_027286.1,2313-2331).
ccgcatcaatgatgtcttt

SEQ ID NO: 555665 - DNA, 19 bp, Mus musculus
  siRNA target sequence for Ace2 (NM_027286.1,2326-2344).
gtctttggcctgaatgata

SEQ ID NO: 555666 - DNA, 19 bp, Mus musculus
  siRNA target sequence for Ace2 (NM_027286.1,2361-2379).
ggggattcacccaacactt

SEQ ID NO: 555667 - DNA, 19 bp, Mus musculus
  siRNA target sequence for Ace2 (NM_027286.1,2403-2421).
caccatatggctgattatt

SEQ ID NO: 555668 - DNA, 19 bp, Mus musculus
  siRNA target sequence for Ace2 (NM_027286.1,2405-2423).
ccatatggctgattatttt

SEQ ID NO: 555669 - DNA, 19 bp, Mus musculus
  siRNA target sequence for Ace2 (NM_027286.1,2477-2495).
ggatcaaaggtcgaaagaa

SEQ ID NO: 555670 - DNA, 19 bp, Mus musculus
  siRNA target sequence for Adam10 (NM_007399.1,31-49).
gttgccgacagtgttaatt

SEQ ID NO: 555671 - DNA, 19 bp, Mus musculus
  siRNA target sequence for Adam10 (NM_007399.1,132-150).
cttacaatgtggattcatt

SEQ ID NO: 555672 - DNA, 19 bp, Mus musculus
  siRNA target sequence for Adam10 (NM_007399.1,142-160).
ggattcattacaccaaaaa

SEQ ID NO: 555673 - DNA, 19 bp, Mus musculus
  siRNA target sequence for Adam10 (NM_007399.1,193-211).
ggaccagtttttacttcta

SEQ ID NO: 555674 - DNA, 19 bp, Mus musculus
  siRNA target sequence for Adam10 (NM_007399.1,197-215).
cagtttttacttctagatt

SEQ ID NO: 555675 - DNA, 19 bp, Mus musculus
  siRNA target sequence for Adam10 (NM_007399.1,231-249).
gacagttcaacctacgaat

SEQ ID NO: 555676 - DNA, 19 bp, Mus musculus
  siRNA target sequence for Adam10 (NM_007399.1,311-329).
gattatgatacctctcata

SEQ ID NO: 555677 - DNA, 19 bp, Mus musculus
  siRNA target sequence for Adam10 (NM_007399.1,317-335).
gatacctctcatatttaca

SEQ ID NO: 555678 - DNA, 19 bp, Mus musculus
  siRNA target sequence for Adam10 (NM_007399.1,334-352).
cactggacatatttatggt

SEQ ID NO: 555679 - DNA, 19 bp, Mus musculus
  siRNA target sequence for Adam10 (NM_007399.1,369-387).
gtcatgggtctgtcattga

SEQ ID NO: 555680 - DNA, 19 bp, Mus musculus
  siRNA target sequence for Adam10 (NM_007399.1,414-432).
ctcgtggtggcacgtttta

SEQ ID NO: 555681 - DNA, 19 bp, Mus musculus
  siRNA target sequence for Adam10 (NM_007399.1,439-457).
gccagcagagagatacatt

SEQ ID NO: 555682 - DNA, 19 bp, Mus musculus
  siRNA target sequence for Adam10 (NM_007399.1,441-459).
cagcagagagatacattaa

SEQ ID NO: 555683 - DNA, 19 bp, Mus musculus
  siRNA target sequence for Adam10 (NM_007399.1,450-468).
gatacattaaagatcgaat

SEQ ID NO: 555684 - DNA, 19 bp, Mus musculus
  siRNA target sequence for Adam10 (NM_007399.1,464-482).
cgaatcctgccatttcact

SEQ ID NO: 555685 - DNA, 19 bp, Mus musculus
  siRNA target sequence for Adam10 (NM_007399.1,474-492).
catttcactctgtcattta

SEQ ID NO: 555686 - DNA, 19 bp, Mus musculus
  siRNA target sequence for Adam10 (NM_007399.1,571-589).
gaggaagtaccaaatgact

SEQ ID NO: 555687 - DNA, 19 bp, Mus musculus
  siRNA target sequence for Adam10 (NM_007399.1,690-708).
cttgtcagctctatatcca

SEQ ID NO: 555688 - DNA, 19 bp, Mus musculus
  siRNA target sequence for Adam10 (NM_007399.1,749-767).
gctgtgattgctcagatat

SEQ ID NO: 555689 - DNA, 19 bp, Mus musculus
  siRNA target sequence for Adam10 (NM_007399.1,752-770).
gtgattgctcagatatcca

SEQ ID NO: 555690 - DNA, 19 bp, Mus musculus
  siRNA target sequence for Adam10 (NM_007399.1,761-779).
cagatatccagtcatgtta

SEQ ID NO: 555691 - DNA, 19 bp, Mus musculus
  siRNA target sequence for Adam10 (NM_007399.1,783-801).
caattgatacaatttacca

SEQ ID NO: 555692 - DNA, 19 bp, Mus musculus
  siRNA target sequence for Adam10 (NM_007399.1,842-860).
gtgaaacgcataagaatca

SEQ ID NO: 555693 - DNA, 19 bp, Mus musculus
  siRNA target sequence for Adam10 (NM_007399.1,844-862).
gaaacgcataagaatcaat

SEQ ID NO: 555694 - DNA, 19 bp, Mus musculus
  siRNA target sequence for Adam10 (NM_007399.1,848-866).
cgcataagaatcaatacaa

SEQ ID NO: 555695 - DNA, 19 bp, Mus musculus
  siRNA target sequence for Adam10 (NM_007399.1,979-997).
cttcacagaccgggatttt

SEQ ID NO: 555696 - DNA, 19 bp, Mus musculus
  siRNA target sequence for Adam10 (NM_007399.1,1044-1062).
gctctgggggaatatgtga

SEQ ID NO: 555697 - DNA, 19 bp, Mus musculus
  siRNA target sequence for Adam10 (NM_007399.1,1146-1164).
ctcccaaagtctctcatat

SEQ ID NO: 555698 - DNA, 19 bp, Mus musculus
  siRNA target sequence for Adam10 (NM_007399.1,1148-1166).
cccaaagtctctcatatta

SEQ ID NO: 555699 - DNA, 19 bp, Mus musculus
  siRNA target sequence for Adam10 (NM_007399.1,1224-1242).
gtactccaggagagtctaa

SEQ ID NO: 555700 - DNA, 19 bp, Mus musculus
  siRNA target sequence for Adam10 (NM_007399.1,1243-1261).
gaacttaggacaaaaagaa

SEQ ID NO: 555701 - DNA, 19 bp, Mus musculus
  siRNA target sequence for Adam10 (NM_007399.1,1279-1297).
gtatgcaagagcaacatct

SEQ ID NO: 555702 - DNA, 19 bp, Mus musculus
  siRNA target sequence for Adam10 (NM_007399.1,1293-1311).
catctggggacaaacttaa

SEQ ID NO: 555703 - DNA, 19 bp, Mus musculus
  siRNA target sequence for Adam10 (NM_007399.1,1296-1314).
ctggggacaaacttaacaa

SEQ ID NO: 555704 - DNA, 19 bp, Mus musculus
  siRNA target sequence for Adam10 (NM_007399.1,1298-1316).
ggggacaaacttaacaaca

SEQ ID NO: 555705 - DNA, 19 bp, Mus musculus
  siRNA target sequence for Adam10 (NM_007399.1,1299-1317).
gggacaaacttaacaacaa

SEQ ID NO: 555706 - DNA, 19 bp, Mus musculus
  siRNA target sequence for Adam10 (NM_007399.1,1350-1368).
gccaagtgcttgagaagaa

SEQ ID NO: 555707 - DNA, 19 bp, Mus musculus
  siRNA target sequence for Adam10 (NM_007399.1,1371-1389).
ggaacaactgttttgttga

SEQ ID NO: 555708 - DNA, 19 bp, Mus musculus
  siRNA target sequence for Adam10 (NM_007399.1,1372-1390).
gaacaactgttttgttgaa

SEQ ID NO: 555709 - DNA, 19 bp, Mus musculus
  siRNA target sequence for Adam10 (NM_007399.1,1671-1689).
ccaagcccaactttacaga

SEQ ID NO: 555710 - DNA, 19 bp, Mus musculus
  siRNA target sequence for Adam10 (NM_007399.1,1700-1718).
cacacacaagtgtgcatta

SEQ ID NO: 555711 - DNA, 19 bp, Mus musculus
  siRNA target sequence for Adam10 (NM_007399.1,1723-1741).
gcaatgtgcaggttctatt

SEQ ID NO: 555712 - DNA, 19 bp, Mus musculus
  siRNA target sequence for Adam10 (NM_007399.1,1731-1749).
caggttctatttgtgaaaa

SEQ ID NO: 555713 - DNA, 19 bp, Mus musculus
  siRNA target sequence for Adam10 (NM_007399.1,1885-1903).
cagtggtcggactatcact

SEQ ID NO: 555714 - DNA, 19 bp, Mus musculus
  siRNA target sequence for Adam10 (NM_007399.1,1913-1931).
ggctctccatgtaatgact

SEQ ID NO: 555715 - DNA, 19 bp, Mus musculus
  siRNA target sequence for Adam10 (NM_007399.1,1914-1932).
gctctccatgtaatgactt

SEQ ID NO: 555716 - DNA, 19 bp, Mus musculus
  siRNA target sequence for Adam10 (NM_007399.1,1954-1972).
catgcggtgcagattagta

SEQ ID NO: 555717 - DNA, 19 bp, Mus musculus
  siRNA target sequence for Adam10 (NM_007399.1,1957-1975).
gcggtgcagattagtagat

SEQ ID NO: 555718 - DNA, 19 bp, Mus musculus
  siRNA target sequence for Adam10 (NM_007399.1,1985-2003).
cctctagctaggctgaaaa

SEQ ID NO: 555719 - DNA, 19 bp, Mus musculus
  siRNA target sequence for Adam10 (NM_007399.1,1986-2004).
ctctagctaggctgaaaaa

SEQ ID NO: 555720 - DNA, 19 bp, Mus musculus
  siRNA target sequence for Adam10 (NM_007399.1,2238-2256).
cccgagagagttatcaaat

SEQ ID NO: 555721 - DNA, 19 bp, Mus musculus
  siRNA target sequence for Adam12 (NM_007400.1,551-569).
cgaaatcacacggatcatt

SEQ ID NO: 555722 - DNA, 19 bp, Mus musculus
  siRNA target sequence for Adam12 (NM_007400.1,557-575).
cacacggatcattgttact

SEQ ID NO: 555723 - DNA, 19 bp, Mus musculus
  siRNA target sequence for Adam12 (NM_007400.1,608-626).
gtggtcagcctcagtactt

SEQ ID NO: 555724 - DNA, 19 bp, Mus musculus
  siRNA target sequence for Adam12 (NM_007400.1,635-653).
ctccggggacttatcatgt

SEQ ID NO: 555725 - DNA, 19 bp, Mus musculus
  siRNA target sequence for Adam12 (NM_007400.1,640-658).
gggacttatcatgtttgaa

SEQ ID NO: 555726 - DNA, 19 bp, Mus musculus
  siRNA target sequence for Adam12 (NM_007400.1,641-659).
ggacttatcatgtttgaaa

SEQ ID NO: 555727 - DNA, 19 bp, Mus musculus
  siRNA target sequence for Adam12 (NM_007400.1,670-688).
cagcttagagccaatgaaa

SEQ ID NO: 555728 - DNA, 19 bp, Mus musculus
  siRNA target sequence for Adam12 (NM_007400.1,856-874).
gtacgtagagctggttatt

SEQ ID NO: 555729 - DNA, 19 bp, Mus musculus
  siRNA target sequence for Adam12 (NM_007400.1,953-971).
cacgttgacaagttttaca

SEQ ID NO: 555730 - DNA, 19 bp, Mus musculus
  siRNA target sequence for Adam12 (NM_007400.1,1021-1039).
catcgacaaatgctctata

SEQ ID NO: 555731 - DNA, 19 bp, Mus musculus
  siRNA target sequence for Adam12 (NM_007400.1,1163-1181).
ggcatggcacccatcatga

SEQ ID NO: 555732 - DNA, 19 bp, Mus musculus
  siRNA target sequence for Adam12 (NM_007400.1,1321-1339).
cagaatggccgcagagaaa

SEQ ID NO: 555733 - DNA, 19 bp, Mus musculus
  siRNA target sequence for Adam12 (NM_007400.1,1677-1695).
cctgtgacctcccagaatt

SEQ ID NO: 555734 - DNA, 19 bp, Mus musculus
  siRNA target sequence for Adam12 (NM_007400.1,1725-1743).
ccaatgtgtacctacatga

SEQ ID NO: 555735 - DNA, 19 bp, Mus musculus
  siRNA target sequence for Adam12 (NM_007400.1,1755-1773).
gtcagggcgtggatggtta

SEQ ID NO: 555736 - DNA, 19 bp, Mus musculus
  siRNA target sequence for Adam12 (NM_007400.1,1878-1896).
caggagatccttatggtaa

SEQ ID NO: 555737 - DNA, 19 bp, Mus musculus
  siRNA target sequence for Adam12 (NM_007400.1,1915-1933).
gagcgccttcgccaaatgt

SEQ ID NO: 555738 - DNA, 19 bp, Mus musculus
  siRNA target sequence for Adam12 (NM_007400.1,1917-1935).
gcgccttcgccaaatgtga

SEQ ID NO: 555739 - DNA, 19 bp, Mus musculus
  siRNA target sequence for Adam12 (NM_007400.1,2039-2057).
gaaggaggtcggattctgt

SEQ ID NO: 555740 - DNA, 19 bp, Mus musculus
  siRNA target sequence for Adam12 (NM_007400.1,2110-2128).
gcttgcaggaacaaagtgt

SEQ ID NO: 555741 - DNA, 19 bp, Mus musculus
  siRNA target sequence for Adam12 (NM_007400.1,2149-2167).
caatcgtcgatgtcagaat

SEQ ID NO: 555742 - DNA, 19 bp, Mus musculus
  siRNA target sequence for Adam12 (NM_007400.1,2153-2171).
cgtcgatgtcagaatatca

SEQ ID NO: 555743 - DNA, 19 bp, Mus musculus
  siRNA target sequence for Adam12 (NM_007400.1,2172-2190).
gtgtcttcggcgttcacaa

SEQ ID NO: 555744 - DNA, 19 bp, Mus musculus
  siRNA target sequence for Adam12 (NM_007400.1,2207-2225).
cacggccgaggggtatgta

SEQ ID NO: 555745 - DNA, 19 bp, Mus musculus
  siRNA target sequence for Adam12 (NM_007400.1,2211-2229).
gccgaggggtatgtaacaa

SEQ ID NO: 555746 - DNA, 19 bp, Mus musculus
  siRNA target sequence for Adam12 (NM_007400.1,2213-2231).
cgaggggtatgtaacaaca

SEQ ID NO: 555747 - DNA, 19 bp, Mus musculus
  siRNA target sequence for Adam12 (NM_007400.1,2384-2402).
ggatttgtggtgtatctca

SEQ ID NO: 555748 - DNA, 19 bp, Mus musculus
  siRNA target sequence for Adam12 (NM_007400.1,2385-2403).
gatttgtggtgtatctcaa

SEQ ID NO: 555749 - DNA, 19 bp, Mus musculus
  siRNA target sequence for Adam12 (NM_007400.1,2390-2408).
gtggtgtatctcaaaagga

SEQ ID NO: 555750 - DNA, 19 bp, Mus musculus
  siRNA target sequence for Adam12 (NM_007400.1,2545-2563).
ccgggcaccacatttcaat

SEQ ID NO: 555751 - DNA, 19 bp, Mus musculus
  siRNA target sequence for Adam15 (NM_009614.1,264-282).
cgtgcttcagactggttta

SEQ ID NO: 555752 - DNA, 19 bp, Mus musculus
  siRNA target sequence for Adam15 (NM_009614.1,267-285).
gcttcagactggtttacct

SEQ ID NO: 555753 - DNA, 19 bp, Mus musculus
  siRNA target sequence for Adam15 (NM_009614.1,283-301).
cctgaggccctgaggattt

SEQ ID NO: 555754 - DNA, 19 bp, Mus musculus
  siRNA target sequence for Adam15 (NM_009614.1,500-518).
ggatcagggggctcattgt

SEQ ID NO: 555755 - DNA, 19 bp, Mus musculus
  siRNA target sequence for Adam15 (NM_009614.1,527-545).
cagagagaggctatacact

SEQ ID NO: 555756 - DNA, 19 bp, Mus musculus
  siRNA target sequence for Adam15 (NM_009614.1,564-582).
ccttcagcgtcctgtcatt

SEQ ID NO: 555757 - DNA, 19 bp, Mus musculus
  siRNA target sequence for Adam15 (NM_009614.1,565-583).
cttcagcgtcctgtcattt

SEQ ID NO: 555758 - DNA, 19 bp, Mus musculus
  siRNA target sequence for Adam15 (NM_009614.1,696-714).
gcttaagcgagatgtagta

SEQ ID NO: 555759 - DNA, 19 bp, Mus musculus
  siRNA target sequence for Adam15 (NM_009614.1,738-756).
ggtgattgtggctgataat

SEQ ID NO: 555760 - DNA, 19 bp, Mus musculus
  siRNA target sequence for Adam15 (NM_009614.1,885-903).
ccagcacaacctgatagaa

SEQ ID NO: 555761 - DNA, 19 bp, Mus musculus
  siRNA target sequence for Adam15 (NM_009614.1,886-904).
cagcacaacctgatagaaa

SEQ ID NO: 555762 - DNA, 19 bp, Mus musculus
  siRNA target sequence for Adam15 (NM_009614.1,889-907).
cacaacctgatagaaatga

SEQ ID NO: 555763 - DNA, 19 bp, Mus musculus
  siRNA target sequence for Adam15 (NM_009614.1,1070-1088).
ccggaggtgtgaatatgga

SEQ ID NO: 555764 - DNA, 19 bp, Mus musculus
  siRNA target sequence for Adam15 (NM_009614.1,1149-1167).
gggtttggaccatgattct

SEQ ID NO: 555765 - DNA, 19 bp, Mus musculus
  siRNA target sequence for Adam15 (NM_009614.1,1240-1258).
ctaccaggtttgaacttca

SEQ ID NO: 555766 - DNA, 19 bp, Mus musculus
  siRNA target sequence for Adam15 (NM_009614.1,1532-1550).
ctcccacagacgattgtga

SEQ ID NO: 555767 - DNA, 19 bp, Mus musculus
  siRNA target sequence for Adam15 (NM_009614.1,1799-1817).
gtgcccctagagatgtcat

SEQ ID NO: 555768 - DNA, 19 bp, Mus musculus
  siRNA target sequence for Adam15 (NM_009614.1,1900-1918).
gccaacgggacacagttaa

SEQ ID NO: 555769 - DNA, 19 bp, Mus musculus
  siRNA target sequence for Adam15 (NM_009614.1,1901-1919).
ccaacgggacacagttaaa

SEQ ID NO: 555770 - DNA, 19 bp, Mus musculus
  siRNA target sequence for Adam15 (NM_009614.1,2275-2293).
ggatccagctgccaatata

SEQ ID NO: 555771 - DNA, 19 bp, Mus musculus
  siRNA target sequence for Adam15 (NM_009614.1,2349-2367).
gatgacaggcactaagtct

SEQ ID NO: 555772 - DNA, 19 bp, Mus musculus
  siRNA target sequence for Adam15 (NM_009614.1,2364-2382).
gtctcaggggcctaccaaa

SEQ ID NO: 555773 - DNA, 19 bp, Mus musculus
  siRNA target sequence for Adam17 (NM_009615.4,252-270).
cgacttgagaagcttgatt

SEQ ID NO: 555774 - DNA, 19 bp, Mus musculus
  siRNA target sequence for Adam19 (NM_009616.2,181-199).
ctccgctacagcatgaact

SEQ ID NO: 555775 - DNA, 19 bp, Mus musculus
  siRNA target sequence for Adam19 (NM_009616.2,184-202).
cgctacagcatgaactcat

SEQ ID NO: 555776 - DNA, 19 bp, Mus musculus
  siRNA target sequence for Adam19 (NM_009616.2,185-203).
gctacagcatgaactcata

SEQ ID NO: 555777 - DNA, 19 bp, Mus musculus
  siRNA target sequence for Adam19 (NM_009616.2,191-209).
gcatgaactcataatacct

SEQ ID NO: 555778 - DNA, 19 bp, Mus musculus
  siRNA target sequence for Adam19 (NM_009616.2,210-228).
cagtggcggacttcagaaa

SEQ ID NO: 555779 - DNA, 19 bp, Mus musculus
  siRNA target sequence for Adam19 (NM_009616.2,327-345).
gctccagcctacacagaaa

SEQ ID NO: 555780 - DNA, 19 bp, Mus musculus
  siRNA target sequence for Adam19 (NM_009616.2,391-409).
ctgaggatcactgctttta

SEQ ID NO: 555781 - DNA, 19 bp, Mus musculus
  siRNA target sequence for Adam19 (NM_009616.2,464-482).
gggaattagaggactgatt

SEQ ID NO: 555782 - DNA, 19 bp, Mus musculus
  siRNA target sequence for Adam19 (NM_009616.2,465-483).
ggaattagaggactgatta

SEQ ID NO: 555783 - DNA, 19 bp, Mus musculus
  siRNA target sequence for Adam19 (NM_009616.2,466-484).
gaattagaggactgattat

SEQ ID NO: 555784 - DNA, 19 bp, Mus musculus
  siRNA target sequence for Adam19 (NM_009616.2,477-495).
ctgattatagtgagaagta

SEQ ID NO: 555785 - DNA, 19 bp, Mus musculus
  siRNA target sequence for Adam19 (NM_009616.2,493-511).
gtaacctcagctacatcat

SEQ ID NO: 555786 - DNA, 19 bp, Mus musculus
  siRNA target sequence for Adam19 (NM_009616.2,531-549).
gacagccaacaccgtattt

SEQ ID NO: 555787 - DNA, 19 bp, Mus musculus
  siRNA target sequence for Adam19 (NM_009616.2,536-554).
ccaacaccgtatttacaga

SEQ ID NO: 555788 - DNA, 19 bp, Mus musculus
  siRNA target sequence for Adam19 (NM_009616.2,537-555).
caacaccgtatttacagat

SEQ ID NO: 555789 - DNA, 19 bp, Mus musculus
  siRNA target sequence for Adam19 (NM_009616.2,622-640).
gggcccttcagtttacaca

SEQ ID NO: 555790 - DNA, 19 bp, Mus musculus
  siRNA target sequence for Adam19 (NM_009616.2,678-696).
gatctacactctatgaagt

SEQ ID NO: 555791 - DNA, 19 bp, Mus musculus
  siRNA target sequence for Adam19 (NM_009616.2,710-728).
cctggtggctgattatgca

SEQ ID NO: 555792 - DNA, 19 bp, Mus musculus
  siRNA target sequence for Adam19 (NM_009616.2,776-794).
catggagattgccaactat

SEQ ID NO: 555793 - DNA, 19 bp, Mus musculus
  siRNA target sequence for Adam19 (NM_009616.2,782-800).
gattgccaactatgttgat

SEQ ID NO: 555794 - DNA, 19 bp, Mus musculus
  siRNA target sequence for Adam19 (NM_009616.2,786-804).
gccaactatgttgataagt

SEQ ID NO: 555795 - DNA, 19 bp, Mus musculus
  siRNA target sequence for Adam19 (NM_009616.2,787-805).
ccaactatgttgataagtt

SEQ ID NO: 555796 - DNA, 19 bp, Mus musculus
  siRNA target sequence for Adam19 (NM_009616.2,788-806).
caactatgttgataagttt

SEQ ID NO: 555797 - DNA, 19 bp, Mus musculus
  siRNA target sequence for Adam19 (NM_009616.2,815-833).
cctgaacatccgaattgca

SEQ ID NO: 555798 - DNA, 19 bp, Mus musculus
  siRNA target sequence for Adam19 (NM_009616.2,854-872).
gacgcatggggataagtgt

SEQ ID NO: 555799 - DNA, 19 bp, Mus musculus
  siRNA target sequence for Adam19 (NM_009616.2,1335-1353).
ctggaagacggtgaagaat

SEQ ID NO: 555800 - DNA, 19 bp, Mus musculus
  siRNA target sequence for Adam19 (NM_009616.2,1337-1355).
ggaagacggtgaagaatgt

SEQ ID NO: 555801 - DNA, 19 bp, Mus musculus
  siRNA target sequence for Adam19 (NM_009616.2,1365-1383).
gaagaggaggaatgtaaga

SEQ ID NO: 555802 - DNA, 19 bp, Mus musculus
  siRNA target sequence for Adam19 (NM_009616.2,1546-1564).
gccccaccaactattatca

SEQ ID NO: 555803 - DNA, 19 bp, Mus musculus
  siRNA target sequence for Adam19 (NM_009616.2,1704-1722).
gctggtgacacctatggaa

SEQ ID NO: 555804 - DNA, 19 bp, Mus musculus
  siRNA target sequence for Adam19 (NM_009616.2,1705-1723).
ctggtgacacctatggaaa

SEQ ID NO: 555805 - DNA, 19 bp, Mus musculus
  siRNA target sequence for Adam19 (NM_009616.2,1734-1752).
ggcttgaatggccaataca

SEQ ID NO: 555806 - DNA, 19 bp, Mus musculus
  siRNA target sequence for Adam19 (NM_009616.2,1820-1838).
ggaatccaacgcagtatct

SEQ ID NO: 555807 - DNA, 19 bp, Mus musculus
  siRNA target sequence for Adam19 (NM_009616.2,1821-1839).
gaatccaacgcagtatcta

SEQ ID NO: 555808 - DNA, 19 bp, Mus musculus
  siRNA target sequence for Adam19 (NM_009616.2,1825-1843).
ccaacgcagtatctattga

SEQ ID NO: 555809 - DNA, 19 bp, Mus musculus
  siRNA target sequence for Adam19 (NM_009616.2,1971-1989).
ggccacaaccatatttgct

SEQ ID NO: 555810 - DNA, 19 bp, Mus musculus
  siRNA target sequence for Adam19 (NM_009616.2,1972-1990).
gccacaaccatatttgctt

SEQ ID NO: 555811 - DNA, 19 bp, Mus musculus
  siRNA target sequence for Adam19 (NM_009616.2,2101-2119).
ggtctccacctttctgtaa

SEQ ID NO: 555812 - DNA, 19 bp, Mus musculus
  siRNA target sequence for Adam19 (NM_009616.2,2181-2199).
gtgatcgctggggtgtttt

SEQ ID NO: 555813 - DNA, 19 bp, Mus musculus
  siRNA target sequence for Adam19 (NM_009616.2,2183-2201).
gatcgctggggtgttttca

SEQ ID NO: 555814 - DNA, 19 bp, Mus musculus
  siRNA target sequence for Adam19 (NM_009616.2,2311-2329).
gtcccttcagggtatctca

SEQ ID NO: 555815 - DNA, 19 bp, Mus musculus
  siRNA target sequence for Adam19 (NM_009616.2,2344-2362).
gccatgccaacccaacttt

SEQ ID NO: 555816 - DNA, 19 bp, Mus musculus
  siRNA target sequence for Adam19 (NM_009616.2,2383-2401).
gcaagcgaaaggtgactaa

SEQ ID NO: 555817 - DNA, 19 bp, Mus musculus
  siRNA target sequence for Adam19 (NM_009616.2,2454-2472).
gactacctgcgcgttgaat

SEQ ID NO: 555818 - DNA, 19 bp, Mus musculus
  siRNA target sequence for Adam19 (NM_009616.2,2529-2547).
gctggggctcgaatagaaa

SEQ ID NO: 555819 - DNA, 19 bp, Mus musculus
  siRNA target sequence for Adam19 (NM_009616.2,2532-2550).
ggggctcgaatagaaagaa

SEQ ID NO: 555820 - DNA, 19 bp, Mus musculus
  siRNA target sequence for Adam1a (NM_172126.2,524-542).
caggcgaatagccttaaaa

SEQ ID NO: 555821 - DNA, 19 bp, Mus musculus
  siRNA target sequence for Adam1a (NM_172126.2,526-544).
ggcgaatagccttaaaaga

SEQ ID NO: 555822 - DNA, 19 bp, Mus musculus
  siRNA target sequence for Adam1a (NM_172126.2,527-545).
gcgaatagccttaaaagaa

SEQ ID NO: 555823 - DNA, 19 bp, Mus musculus
  siRNA target sequence for Adam1a (NM_172126.2,610-628).
ctgtcagagtagggatttt

SEQ ID NO: 555824 - DNA, 19 bp, Mus musculus
  siRNA target sequence for Adam1a (NM_172126.2,622-640).
ggattttggtgctactgat

SEQ ID NO: 555825 - DNA, 19 bp, Mus musculus
  siRNA target sequence for Adam1a (NM_172126.2,1864-1882).
caacatgtacgcttaagga

SEQ ID NO: 555826 - DNA, 19 bp, Mus musculus
  siRNA target sequence for Adam1a (NM_172126.2,1909-1927).
gctgctacaactgtacatt

SEQ ID NO: 555827 - DNA, 19 bp, Mus musculus
  siRNA target sequence for Adam1a (NM_172126.2,2031-2049).
gatggcacacagtgtgata

SEQ ID NO: 555828 - DNA, 19 bp, Mus musculus
  siRNA target sequence for Adam1a (NM_172126.2,2036-2054).
cacacagtgtgataggatt

SEQ ID NO: 555829 - DNA, 19 bp, Mus musculus
  siRNA target sequence for Adam1a (NM_172126.2,2038-2056).
cacagtgtgataggattta

SEQ ID NO: 555830 - DNA, 19 bp, Mus musculus
  siRNA target sequence for Adam1a (NM_172126.2,2074-2092).
ggtgtaagaaccctgataa

SEQ ID NO: 555831 - DNA, 19 bp, Mus musculus
  siRNA target sequence for Adam1a (NM_172126.2,2075-2093).
gtgtaagaaccctgataaa

SEQ ID NO: 555832 - DNA, 19 bp, Mus musculus
  siRNA target sequence for Adam1a (NM_172126.2,2077-2095).
gtaagaaccctgataaaca

SEQ ID NO: 555833 - DNA, 19 bp, Mus musculus
  siRNA target sequence for Adam1a (NM_172126.2,2084-2102).
ccctgataaacaatgttca

SEQ ID NO: 555834 - DNA, 19 bp, Mus musculus
  siRNA target sequence for Adam1a (NM_172126.2,2130-2148).
gcccctgaggaatgttaca

SEQ ID NO: 555835 - DNA, 19 bp, Mus musculus
  siRNA target sequence for Adam1a (NM_172126.2,2131-2149).
cccctgaggaatgttacat

SEQ ID NO: 555836 - DNA, 19 bp, Mus musculus
  siRNA target sequence for Adam1a (NM_172126.2,2132-2150).
ccctgaggaatgttacatt

SEQ ID NO: 555837 - DNA, 19 bp, Mus musculus
  siRNA target sequence for Adam1a (NM_172126.2,2197-2215).
cctccgctaacttcagata

SEQ ID NO: 555838 - DNA, 19 bp, Mus musculus
  siRNA target sequence for Adam1a (NM_172126.2,2200-2218).
ccgctaacttcagatatga

SEQ ID NO: 555839 - DNA, 19 bp, Mus musculus
  siRNA target sequence for Adam1a (NM_172126.2,2201-2219).
cgctaacttcagatatgaa

SEQ ID NO: 555840 - DNA, 19 bp, Mus musculus
  siRNA target sequence for Adam1a (NM_172126.2,2207-2225).
cttcagatatgaaacatgt

SEQ ID NO: 555841 - DNA, 19 bp, Mus musculus
  siRNA target sequence for Adam1a (NM_172126.2,2224-2242).
gttccgatgaggatgtatt

SEQ ID NO: 555842 - DNA, 19 bp, Mus musculus
  siRNA target sequence for Adam1a (NM_172126.2,2228-2246).
cgatgaggatgtattttgt

SEQ ID NO: 555843 - DNA, 19 bp, Mus musculus
  siRNA target sequence for Adam1a (NM_172126.2,2253-2271).
ctggtgtgtacagatgtta

SEQ ID NO: 555844 - DNA, 19 bp, Mus musculus
  siRNA target sequence for Adam1a (NM_172126.2,2255-2273).
ggtgtgtacagatgttaga

SEQ ID NO: 555845 - DNA, 19 bp, Mus musculus
  siRNA target sequence for Adam1a (NM_172126.2,2369-2387).
cccggatgacggagatgta

SEQ ID NO: 555846 - DNA, 19 bp, Mus musculus
  siRNA target sequence for Adam1a (NM_172126.2,2371-2389).
cggatgacggagatgtaca

SEQ ID NO: 555847 - DNA, 19 bp, Mus musculus
  siRNA target sequence for Adam1a (NM_172126.2,2446-2464).
gtggggtgctccagtacaa

SEQ ID NO: 555848 - DNA, 19 bp, Mus musculus
  siRNA target sequence for Adam1a (NM_172126.2,2448-2466).
ggggtgctccagtacaact

SEQ ID NO: 555849 - DNA, 19 bp, Mus musculus
  siRNA target sequence for Adam1a (NM_172126.2,2497-2515).
gagtgtgcaacaatttcaa

SEQ ID NO: 555850 - DNA, 19 bp, Mus musculus
  siRNA target sequence for Adam1a (NM_172126.2,2643-2661).
gagagtccagatgataaaa

SEQ ID NO: 555851 - DNA, 19 bp, Mus musculus
  siRNA target sequence for Adam1a (NM_172126.2,2647-2665).
gtccagatgataaaatgga

SEQ ID NO: 555852 - DNA, 19 bp, Mus musculus
  siRNA target sequence for Adam1a (NM_172126.2,2696-2714).
gcttgtggtccctatattt

SEQ ID NO: 555853 - DNA, 19 bp, Mus musculus
  siRNA target sequence for Adam1a (NM_172126.2,2721-2739).
gttttactgtgctgtctaa

SEQ ID NO: 555854 - DNA, 19 bp, Mus musculus
  siRNA target sequence for Adam1a (NM_172126.2,2750-2768).
ctacctctggtctgaagta

SEQ ID NO: 555855 - DNA, 19 bp, Mus musculus
  siRNA target sequence for Adam1a (NM_172126.2,2753-2771).
cctctggtctgaagtacaa

SEQ ID NO: 555856 - DNA, 19 bp, Mus musculus
  siRNA target sequence for Adam1b (NM_172125.1,63-81).
gctcttggcaataattttt

SEQ ID NO: 555857 - DNA, 19 bp, Mus musculus
  siRNA target sequence for Adam1b (NM_172125.1,1288-1306).
cagtgttgtgatgaaaatt

SEQ ID NO: 555858 - DNA, 19 bp, Mus musculus
  siRNA target sequence for Adam1b (NM_172125.1,1462-1480).
gcccaggacggctctaagt

SEQ ID NO: 555859 - DNA, 19 bp, Mus musculus
  siRNA target sequence for Adam1b (NM_172125.1,1475-1493).
ctaagtgccacgaatcctt

SEQ ID NO: 555860 - DNA, 19 bp, Mus musculus
  siRNA target sequence for Adam1b (NM_172125.1,1512-1530).
gtgcatggaccctaccttt

SEQ ID NO: 555861 - DNA, 19 bp, Mus musculus
  siRNA target sequence for Adam1b (NM_172125.1,1527-1545).
ctttcagtgctctcgtatt

SEQ ID NO: 555862 - DNA, 19 bp, Mus musculus
  siRNA target sequence for Adam1b (NM_172125.1,1565-1583).
ctgcctccgattattgcta

SEQ ID NO: 555863 - DNA, 19 bp, Mus musculus
  siRNA target sequence for Adam1b (NM_172125.1,1622-1640).
gtggctcctcctctcaatt

SEQ ID NO: 555864 - DNA, 19 bp, Mus musculus
  siRNA target sequence for Adam1b (NM_172125.1,1626-1644).
ctcctcctctcaatttcca

SEQ ID NO: 555865 - DNA, 19 bp, Mus musculus
  siRNA target sequence for Adam1b (NM_172125.1,1634-1652).
ctcaatttccaaaaaagta

SEQ ID NO: 555866 - DNA, 19 bp, Mus musculus
  siRNA target sequence for Adam1b (NM_172125.1,1636-1654).
caatttccaaaaaagtata

SEQ ID NO: 555867 - DNA, 19 bp, Mus musculus
  siRNA target sequence for Adam1b (NM_172125.1,1710-1728).
cttcctgccacaaatccaa

SEQ ID NO: 555868 - DNA, 19 bp, Mus musculus
  siRNA target sequence for Adam1b (NM_172125.1,1720-1738).
caaatccaaccgaacaact

SEQ ID NO: 555869 - DNA, 19 bp, Mus musculus
  siRNA target sequence for Adam1b (NM_172125.1,1805-1823).
ccctccatgaggaatacgt

SEQ ID NO: 555870 - DNA, 19 bp, Mus musculus
  siRNA target sequence for Adam1b (NM_172125.1,1822-1840).
gtgaaggacaacacttact

SEQ ID NO: 555871 - DNA, 19 bp, Mus musculus
  siRNA target sequence for Adam1b (NM_172125.1,1824-1842).
gaaggacaacacttactgt

SEQ ID NO: 555872 - DNA, 19 bp, Mus musculus
  siRNA target sequence for Adam1b (NM_172125.1,1833-1851).
cacttactgtggcaaagat

SEQ ID NO: 555873 - DNA, 19 bp, Mus musculus
  siRNA target sequence for Adam1b (NM_172125.1,1855-1873).
gtctgtaaaaattccattt

SEQ ID NO: 555874 - DNA, 19 bp, Mus musculus
  siRNA target sequence for Adam1b (NM_172125.1,2091-2109).
ggagctgatccttaactta

SEQ ID NO: 555875 - DNA, 19 bp, Mus musculus
  siRNA target sequence for Adam1b (NM_172125.1,2092-2110).
gagctgatccttaacttaa

SEQ ID NO: 555876 - DNA, 19 bp, Mus musculus
  siRNA target sequence for Adam1b (NM_172125.1,2115-2133).
gatcgtcctggctgtcatt

SEQ ID NO: 555877 - DNA, 19 bp, Mus musculus
  siRNA target sequence for Adam1b (NM_172125.1,2136-2154).
ggtgctcatgatactctta

SEQ ID NO: 555878 - DNA, 19 bp, Mus musculus
  siRNA target sequence for Adam1b (NM_172125.1,2137-2155).
gtgctcatgatactcttaa

SEQ ID NO: 555879 - DNA, 19 bp, Mus musculus
  siRNA target sequence for Adam1b (NM_172125.1,2139-2157).
gctcatgatactcttaata

SEQ ID NO: 555880 - DNA, 19 bp, Mus musculus
  siRNA target sequence for Adam1b (NM_172125.1,2140-2158).
ctcatgatactcttaataa

SEQ ID NO: 555881 - DNA, 19 bp, Mus musculus
  siRNA target sequence for Adam21 (NM_020330.2,549-567).
ctcatgagagtcactcttt

SEQ ID NO: 555882 - DNA, 19 bp, Mus musculus
  siRNA target sequence for Adam21 (NM_020330.2,584-602).
ggcacttccatcccttatt

SEQ ID NO: 555883 - DNA, 19 bp, Mus musculus
  siRNA target sequence for Adam21 (NM_020330.2,586-604).
cacttccatcccttattga

SEQ ID NO: 555884 - DNA, 19 bp, Mus musculus
  siRNA target sequence for Adam21 (NM_020330.2,637-655).
gttctccagaagtagttat

SEQ ID NO: 555885 - DNA, 19 bp, Mus musculus
  siRNA target sequence for Adam21 (NM_020330.2,707-725).
ctcctatagccttgtattt

SEQ ID NO: 555886 - DNA, 19 bp, Mus musculus
  siRNA target sequence for Adam21 (NM_020330.2,727-745).
gtggccgtagacatgttgt

SEQ ID NO: 555887 - DNA, 19 bp, Mus musculus
  siRNA target sequence for Adam21 (NM_020330.2,756-774).
gtcaagaagctgttggttt

SEQ ID NO: 555888 - DNA, 19 bp, Mus musculus
  siRNA target sequence for Adam21 (NM_020330.2,841-859).
ctagtgactgttactatca

SEQ ID NO: 555889 - DNA, 19 bp, Mus musculus
  siRNA target sequence for Adam21 (NM_020330.2,850-868).
gttactatcatggttatgt

SEQ ID NO: 555890 - DNA, 19 bp, Mus musculus
  siRNA target sequence for Adam21 (NM_020330.2,914-932).
ggggttgcagggagtgtta

SEQ ID NO: 555891 - DNA, 19 bp, Mus musculus
  siRNA target sequence for Adam21 (NM_020330.2,917-935).
gttgcagggagtgttacaa

SEQ ID NO: 555892 - DNA, 19 bp, Mus musculus
  siRNA target sequence for Adam21 (NM_020330.2,943-961).
gcttctcttatgaaattga

SEQ ID NO: 555893 - DNA, 19 bp, Mus musculus
  siRNA target sequence for Adam21 (NM_020330.2,982-1000).
cattcgagcacctagtcta

SEQ ID NO: 555894 - DNA, 19 bp, Mus musculus
  siRNA target sequence for Adam21 (NM_020330.2,986-1004).
cgagcacctagtctataca

SEQ ID NO: 555895 - DNA, 19 bp, Mus musculus
  siRNA target sequence for Adam21 (NM_020330.2,987-1005).
gagcacctagtctatacat

SEQ ID NO: 555896 - DNA, 19 bp, Mus musculus
  siRNA target sequence for Adam21 (NM_020330.2,989-1007).
gcacctagtctatacatta

SEQ ID NO: 555897 - DNA, 19 bp, Mus musculus
  siRNA target sequence for Adam21 (NM_020330.2,990-1008).
cacctagtctatacattaa

SEQ ID NO: 555898 - DNA, 19 bp, Mus musculus
  siRNA target sequence for Adam21 (NM_020330.2,1023-1041).
caatttccacctatgctat

SEQ ID NO: 555899 - DNA, 19 bp, Mus musculus
  siRNA target sequence for Adam21 (NM_020330.2,1029-1047).
ccacctatgctatgtagtt

SEQ ID NO: 555900 - DNA, 19 bp, Mus musculus
  siRNA target sequence for Adam21 (NM_020330.2,1030-1048).
cacctatgctatgtagttt

SEQ ID NO: 555901 - DNA, 19 bp, Mus musculus
  siRNA target sequence for Adam21 (NM_020330.2,1070-1088).
ccaaccctttggagttgaa

SEQ ID NO: 555902 - DNA, 19 bp, Mus musculus
  siRNA target sequence for Adam21 (NM_020330.2,1186-1204).
ctaacgctcaacaaaactt

SEQ ID NO: 555903 - DNA, 19 bp, Mus musculus
  siRNA target sequence for Adam21 (NM_020330.2,1191-1209).
gctcaacaaaacttgtcaa

SEQ ID NO: 555904 - DNA, 19 bp, Mus musculus
  siRNA target sequence for Adam21 (NM_020330.2,1192-1210).
ctcaacaaaacttgtcaaa

SEQ ID NO: 555905 - DNA, 19 bp, Mus musculus
  siRNA target sequence for Adam21 (NM_020330.2,1233-1251).
gttgttaacatggtagatt

SEQ ID NO: 555906 - DNA, 19 bp, Mus musculus
  siRNA target sequence for Adam21 (NM_020330.2,1259-1277).
caagccgctggatacttat

SEQ ID NO: 555907 - DNA, 19 bp, Mus musculus
  siRNA target sequence for Adam21 (NM_020330.2,1263-1281).
ccgctggatacttatgtga

SEQ ID NO: 555908 - DNA, 19 bp, Mus musculus
  siRNA target sequence for Adam21 (NM_020330.2,1287-1305).
gttggcatcgagatttgga

SEQ ID NO: 555909 - DNA, 19 bp, Mus musculus
  siRNA target sequence for Adam21 (NM_020330.2,1338-1356).
catcaggtcttagaagatt

SEQ ID NO: 555910 - DNA, 19 bp, Mus musculus
  siRNA target sequence for Adam21 (NM_020330.2,1404-1422).
gcccatatcttcattagaa

SEQ ID NO: 555911 - DNA, 19 bp, Mus musculus
  siRNA target sequence for Adam21 (NM_020330.2,1420-1438).
gaagctcacttataagtgt

SEQ ID NO: 555912 - DNA, 19 bp, Mus musculus
  siRNA target sequence for Adam21 (NM_020330.2,1449-1467).
gcctacattgcaggaatat

SEQ ID NO: 555913 - DNA, 19 bp, Mus musculus
  siRNA target sequence for Adam21 (NM_020330.2,1451-1469).
ctacattgcaggaatatgt

SEQ ID NO: 555914 - DNA, 19 bp, Mus musculus
  siRNA target sequence for Adam21 (NM_020330.2,1486-1504).
gtggagttgaaaatttcca

SEQ ID NO: 555915 - DNA, 19 bp, Mus musculus
  siRNA target sequence for Adam21 (NM_020330.2,1506-1524).
ggggacgcctggtctcttt

SEQ ID NO: 555916 - DNA, 19 bp, Mus musculus
  siRNA target sequence for Adam21 (NM_020330.2,1508-1526).
ggacgcctggtctcttttt

SEQ ID NO: 555917 - DNA, 19 bp, Mus musculus
  siRNA target sequence for Adam21 (NM_020330.2,1532-1550).
cacggtggcccatgagtta

SEQ ID NO: 555918 - DNA, 19 bp, Mus musculus
  siRNA target sequence for Adam21 (NM_020330.2,1542-1560).
catgagttaggccatactt

SEQ ID NO: 555919 - DNA, 19 bp, Mus musculus
  siRNA target sequence for Adam21 (NM_020330.2,1547-1565).
gttaggccatacttttggt

SEQ ID NO: 555920 - DNA, 19 bp, Mus musculus
  siRNA target sequence for Adam21 (NM_020330.2,1586-1604).
ctgctcttgtgggaaaagt

SEQ ID NO: 555921 - DNA, 19 bp, Mus musculus
  siRNA target sequence for Adam21 (NM_020330.2,1627-1645).
gagtgccagcagagagatt

SEQ ID NO: 555922 - DNA, 19 bp, Mus musculus
  siRNA target sequence for Adam21 (NM_020330.2,1638-1656).
gagagattcaccaattgca

SEQ ID NO: 555923 - DNA, 19 bp, Mus musculus
  siRNA target sequence for Adam21 (NM_020330.2,1912-1930).
gtagaccaaagatcaatga

SEQ ID NO: 555924 - DNA, 19 bp, Mus musculus
  siRNA target sequence for Adam21 (NM_020330.2,2015-2033).
cggtgcctactgctatcaa

SEQ ID NO: 555925 - DNA, 19 bp, Mus musculus
  siRNA target sequence for Adam21 (NM_020330.2,2016-2034).
ggtgcctactgctatcaaa

SEQ ID NO: 555926 - DNA, 19 bp, Mus musculus
  siRNA target sequence for Adam21 (NM_020330.2,2017-2035).
gtgcctactgctatcaaaa

SEQ ID NO: 555927 - DNA, 19 bp, Mus musculus
  siRNA target sequence for Adam21 (NM_020330.2,2055-2073).
caacagtgcagggagattt

SEQ ID NO: 555928 - DNA, 19 bp, Mus musculus
  siRNA target sequence for Adam21 (NM_020330.2,2085-2103).
gcaagaagcgcatctcata

SEQ ID NO: 555929 - DNA, 19 bp, Mus musculus
  siRNA target sequence for Adam21 (NM_020330.2,2086-2104).
caagaagcgcatctcataa

SEQ ID NO: 555930 - DNA, 19 bp, Mus musculus
  siRNA target sequence for Adam21 (NM_020330.2,2094-2112).
gcatctcataattgctata

SEQ ID NO: 555931 - DNA, 19 bp, Mus musculus
  siRNA target sequence for Adam21 (NM_020330.2,2107-2125).
gctataaagaaatcaactt

SEQ ID NO: 555932 - DNA, 19 bp, Mus musculus
  siRNA target sequence for Adam21 (NM_020330.2,2108-2126).
ctataaagaaatcaactta

SEQ ID NO: 555933 - DNA, 19 bp, Mus musculus
  siRNA target sequence for Adam21 (NM_020330.2,2155-2173).
cagatggcacagtattcct

SEQ ID NO: 555934 - DNA, 19 bp, Mus musculus
  siRNA target sequence for Adam21 (NM_020330.2,2157-2175).
gatggcacagtattcctaa

SEQ ID NO: 555935 - DNA, 19 bp, Mus musculus
  siRNA target sequence for Adam21 (NM_020330.2,2160-2178).
ggcacagtattcctaaaat

SEQ ID NO: 555936 - DNA, 19 bp, Mus musculus
  siRNA target sequence for Adam21 (NM_020330.2,2171-2189).
cctaaaatgcagaatgtca

SEQ ID NO: 555937 - DNA, 19 bp, Mus musculus
  siRNA target sequence for Adam21 (NM_020330.2,2427-2445).
cctgagacttgtaatagga

SEQ ID NO: 555938 - DNA, 19 bp, Mus musculus
  siRNA target sequence for Adam21 (NM_020330.2,2428-2446).
ctgagacttgtaataggaa

SEQ ID NO: 555939 - DNA, 19 bp, Mus musculus
  siRNA target sequence for Adam21 (NM_020330.2,2443-2461).
ggaagggggtctgtaataa

SEQ ID NO: 555940 - DNA, 19 bp, Mus musculus
  siRNA target sequence for Adam21 (NM_020330.2,2537-2555).
cagtggtccaacatctcaa

SEQ ID NO: 555941 - DNA, 19 bp, Mus musculus
  siRNA target sequence for Adam21 (NM_020330.2,2539-2557).
gtggtccaacatctcaaaa

SEQ ID NO: 555942 - DNA, 19 bp, Mus musculus
  siRNA target sequence for Adam21 (NM_020330.2,2541-2559).
ggtccaacatctcaaaaaa

SEQ ID NO: 555943 - DNA, 19 bp, Mus musculus
  siRNA target sequence for Adam21 (NM_020330.2,2584-2602).
caataactgtgcctgtttt

SEQ ID NO: 555944 - DNA, 19 bp, Mus musculus
  siRNA target sequence for Adam21 (NM_020330.2,2622-2640).
ctcatagctgggctttata

SEQ ID NO: 555945 - DNA, 19 bp, Mus musculus
  siRNA target sequence for Adam21 (NM_020330.2,2628-2646).
gctgggctttatagaatat

SEQ ID NO: 555946 - DNA, 19 bp, Mus musculus
  siRNA target sequence for Adam21 (NM_020330.2,2631-2649).
gggctttatagaatatatt

SEQ ID NO: 555947 - DNA, 19 bp, Mus musculus
  siRNA target sequence for Adam24 (NM_010086.2,258-276).
cgacttggtgtgctgaata

SEQ ID NO: 555948 - DNA, 19 bp, Mus musculus
  siRNA target sequence for Adam24 (NM_010086.2,302-320).
cccttgagggtaattgtct

SEQ ID NO: 555949 - DNA, 19 bp, Mus musculus
  siRNA target sequence for Adam24 (NM_010086.2,430-448).
ccctgtgttcacatacaat

SEQ ID NO: 555950 - DNA, 19 bp, Mus musculus
  siRNA target sequence for Adam24 (NM_010086.2,587-605).
gacacagcttatgaaatta

SEQ ID NO: 555951 - DNA, 19 bp, Mus musculus
  siRNA target sequence for Adam24 (NM_010086.2,682-700).
gagatgtggattaacagat

SEQ ID NO: 555952 - DNA, 19 bp, Mus musculus
  siRNA target sequence for Adam24 (NM_010086.2,714-732).
ggcaagtgagacttcaaga

SEQ ID NO: 555953 - DNA, 19 bp, Mus musculus
  siRNA target sequence for Adam24 (NM_010086.2,715-733).
gcaagtgagacttcaagaa

SEQ ID NO: 555954 - DNA, 19 bp, Mus musculus
  siRNA target sequence for Adam24 (NM_010086.2,716-734).
caagtgagacttcaagaaa

SEQ ID NO: 555955 - DNA, 19 bp, Mus musculus
  siRNA target sequence for Adam24 (NM_010086.2,780-798).
ctcatggattgtatattaa

SEQ ID NO: 555956 - DNA, 19 bp, Mus musculus
  siRNA target sequence for Adam24 (NM_010086.2,817-835).
ccatgaacaatacctttat

SEQ ID NO: 555957 - DNA, 19 bp, Mus musculus
  siRNA target sequence for Adam24 (NM_010086.2,821-839).
gaacaatacctttatcgaa

SEQ ID NO: 555958 - DNA, 19 bp, Mus musculus
  siRNA target sequence for Adam24 (NM_010086.2,849-867).
cttctcttgtgataagaga

SEQ ID NO: 555959 - DNA, 19 bp, Mus musculus
  siRNA target sequence for Adam24 (NM_010086.2,864-882).
gagatgtattaagcattat

SEQ ID NO: 555960 - DNA, 19 bp, Mus musculus
  siRNA target sequence for Adam24 (NM_010086.2,876-894).
gcattatgcagggaataaa

SEQ ID NO: 555961 - DNA, 19 bp, Mus musculus
  siRNA target sequence for Adam24 (NM_010086.2,877-895).
cattatgcagggaataaat

SEQ ID NO: 555962 - DNA, 19 bp, Mus musculus
  siRNA target sequence for Adam24 (NM_010086.2,901-919).
cttactttcagtggatatt

SEQ ID NO: 555963 - DNA, 19 bp, Mus musculus
  siRNA target sequence for Adam24 (NM_010086.2,925-943).
ggttttacttggacttact

SEQ ID NO: 555964 - DNA, 19 bp, Mus musculus
  siRNA target sequence for Adam24 (NM_010086.2,926-944).
gttttacttggacttacta

SEQ ID NO: 555965 - DNA, 19 bp, Mus musculus
  siRNA target sequence for Adam24 (NM_010086.2,948-966).
ggactaatggaaatcctat

SEQ ID NO: 555966 - DNA, 19 bp, Mus musculus
  siRNA target sequence for Adam24 (NM_010086.2,949-967).
gactaatggaaatcctata

SEQ ID NO: 555967 - DNA, 19 bp, Mus musculus
  siRNA target sequence for Adam24 (NM_010086.2,962-980).
cctataccagtgcaagata

SEQ ID NO: 555968 - DNA, 19 bp, Mus musculus
  siRNA target sequence for Adam24 (NM_010086.2,963-981).
ctataccagtgcaagatat

SEQ ID NO: 555969 - DNA, 19 bp, Mus musculus
  siRNA target sequence for Adam24 (NM_010086.2,986-1004).
gctcttttgccagcatttt

SEQ ID NO: 555970 - DNA, 19 bp, Mus musculus
  siRNA target sequence for Adam24 (NM_010086.2,989-1007).
cttttgccagcattttgta

SEQ ID NO: 555971 - DNA, 19 bp, Mus musculus
  siRNA target sequence for Adam24 (NM_010086.2,1025-1043).
cttgattctcagataccat

SEQ ID NO: 555972 - DNA, 19 bp, Mus musculus
  siRNA target sequence for Adam24 (NM_010086.2,1032-1050).
ctcagataccatatgatat

SEQ ID NO: 555973 - DNA, 19 bp, Mus musculus
  siRNA target sequence for Adam24 (NM_010086.2,1097-1115).
gcctatgtaggaactgtat

SEQ ID NO: 555974 - DNA, 19 bp, Mus musculus
  siRNA target sequence for Adam24 (NM_010086.2,1099-1117).
ctatgtaggaactgtatgt

SEQ ID NO: 555975 - DNA, 19 bp, Mus musculus
  siRNA target sequence for Adam24 (NM_010086.2,1103-1121).
gtaggaactgtatgtgata

SEQ ID NO: 555976 - DNA, 19 bp, Mus musculus
  siRNA target sequence for Adam24 (NM_010086.2,1106-1124).
ggaactgtatgtgataaga

SEQ ID NO: 555977 - DNA, 19 bp, Mus musculus
  siRNA target sequence for Adam24 (NM_010086.2,1150-1168).
cgctgaagatgatttcctt

SEQ ID NO: 555978 - DNA, 19 bp, Mus musculus
  siRNA target sequence for Adam24 (NM_010086.2,1277-1295).
gatagttcccaaaaactca

SEQ ID NO: 555979 - DNA, 19 bp, Mus musculus
  siRNA target sequence for Adam24 (NM_010086.2,1325-1343).
cacatgatcaataaaagct

SEQ ID NO: 555980 - DNA, 19 bp, Mus musculus
  siRNA target sequence for Adam24 (NM_010086.2,1368-1386).
ctgatattttccaattgaa

SEQ ID NO: 555981 - DNA, 19 bp, Mus musculus
  siRNA target sequence for Adam24 (NM_010086.2,1387-1405).
ggtctgtgggaatggtata

SEQ ID NO: 555982 - DNA, 19 bp, Mus musculus
  siRNA target sequence for Adam24 (NM_010086.2,1433-1451).
ggaagctctgaaaactgta

SEQ ID NO: 555983 - DNA, 19 bp, Mus musculus
  siRNA target sequence for Adam24 (NM_010086.2,1452-1470).
gacgtaatcgctgttgtat

SEQ ID NO: 555984 - DNA, 19 bp, Mus musculus
  siRNA target sequence for Adam24 (NM_010086.2,1477-1495).
ctgtactctgaggtctaaa

SEQ ID NO: 555985 - DNA, 19 bp, Mus musculus
  siRNA target sequence for Adam24 (NM_010086.2,1484-1502).
ctgaggtctaaagctaaat

SEQ ID NO: 555986 - DNA, 19 bp, Mus musculus
  siRNA target sequence for Adam24 (NM_010086.2,1486-1504).
gaggtctaaagctaaatgt

SEQ ID NO: 555987 - DNA, 19 bp, Mus musculus
  siRNA target sequence for Adam24 (NM_010086.2,1488-1506).
ggtctaaagctaaatgtga

SEQ ID NO: 555988 - DNA, 19 bp, Mus musculus
  siRNA target sequence for Adam24 (NM_010086.2,1489-1507).
gtctaaagctaaatgtgat

SEQ ID NO: 555989 - DNA, 19 bp, Mus musculus
  siRNA target sequence for Adam24 (NM_010086.2,1621-1639).
ccctgaagacttgtttgta

SEQ ID NO: 555990 - DNA, 19 bp, Mus musculus
  siRNA target sequence for Adam24 (NM_010086.2,1742-1760).
gcatcggatagctgttaca

SEQ ID NO: 555991 - DNA, 19 bp, Mus musculus
  siRNA target sequence for Adam24 (NM_010086.2,1743-1761).
catcggatagctgttacaa

SEQ ID NO: 555992 - DNA, 19 bp, Mus musculus
  siRNA target sequence for Adam24 (NM_010086.2,1775-1793).
cgtggtgatcgttttggta

SEQ ID NO: 555993 - DNA, 19 bp, Mus musculus
  siRNA target sequence for Adam24 (NM_010086.2,1883-1901).
cctatcctgcagaatcatt

SEQ ID NO: 555994 - DNA, 19 bp, Mus musculus
  siRNA target sequence for Adam24 (NM_010086.2,1888-1906).
cctgcagaatcattatact

SEQ ID NO: 555995 - DNA, 19 bp, Mus musculus
  siRNA target sequence for Adam24 (NM_010086.2,1891-1909).
gcagaatcattatactatt

SEQ ID NO: 555996 - DNA, 19 bp, Mus musculus
  siRNA target sequence for Adam24 (NM_010086.2,1912-1930).
ctggactcattttaatagt

SEQ ID NO: 555997 - DNA, 19 bp, Mus musculus
  siRNA target sequence for Adam24 (NM_010086.2,1914-1932).
ggactcattttaatagtgt

SEQ ID NO: 555998 - DNA, 19 bp, Mus musculus
  siRNA target sequence for Adam24 (NM_010086.2,1973-1991).
gctgacctcggtgacataa

SEQ ID NO: 555999 - DNA, 19 bp, Mus musculus
  siRNA target sequence for Adam24 (NM_010086.2,1978-1996).
cctcggtgacataaaagat

SEQ ID NO: 556000 - DNA, 19 bp, Mus musculus
  siRNA target sequence for Adam24 (NM_010086.2,2021-2039).
gtgtgcattgccagaaagt

SEQ ID NO: 556001 - DNA, 19 bp, Mus musculus
  siRNA target sequence for Adam24 (NM_010086.2,2023-2041).
gtgcattgccagaaagtgt

SEQ ID NO: 556002 - DNA, 19 bp, Mus musculus
  siRNA target sequence for Adam24 (NM_010086.2,2050-2068).
gccaagttgggtaaatgat

SEQ ID NO: 556003 - DNA, 19 bp, Mus musculus
  siRNA target sequence for Adam24 (NM_010086.2,2116-2134).
gcactgccattgtgatgtt

SEQ ID NO: 556004 - DNA, 19 bp, Mus musculus
  siRNA target sequence for Adam24 (NM_010086.2,2196-2214).
ctggaaacgaagtttatga

SEQ ID NO: 556005 - DNA, 19 bp, Mus musculus
  siRNA target sequence for Adam24 (NM_010086.2,2246-2264).
gaaaaacctaacgtcataa

SEQ ID NO: 556006 - DNA, 19 bp, Mus musculus
  siRNA target sequence for Adam24 (NM_010086.2,2252-2270).
cctaacgtcataatttggt

SEQ ID NO: 556007 - DNA, 19 bp, Mus musculus
  siRNA target sequence for Adam24 (NM_010086.2,2253-2271).
ctaacgtcataatttggtt

SEQ ID NO: 556008 - DNA, 19 bp, Mus musculus
  siRNA target sequence for Adam24 (NM_010086.2,2257-2275).
cgtcataatttggttatta

SEQ ID NO: 556009 - DNA, 19 bp, Mus musculus
  siRNA target sequence for Adam24 (NM_010086.2,2290-2308).
ggctgtagttttatctgta

SEQ ID NO: 556010 - DNA, 19 bp, Mus musculus
  siRNA target sequence for Adam24 (NM_010086.2,2294-2312).
gtagttttatctgtattgt

SEQ ID NO: 556011 - DNA, 19 bp, Mus musculus
  siRNA target sequence for Adam24 (NM_010086.2,2374-2392).
gagagttaaaccaccatat

SEQ ID NO: 556012 - DNA, 19 bp, Mus musculus
  siRNA target sequence for Adam24 (NM_010086.2,2420-2438).
gttaaaccaccggatgaat

SEQ ID NO: 556013 - DNA, 19 bp, Mus musculus
  siRNA target sequence for Adam25 (NM_011781.1,999-1017).
gaagaactcctagatgaat

SEQ ID NO: 556014 - DNA, 19 bp, Mus musculus
  siRNA target sequence for Adam25 (NM_011781.1,1327-1345).
cttactactgggctacata

SEQ ID NO: 556015 - DNA, 19 bp, Mus musculus
  siRNA target sequence for Adam25 (NM_011781.1,2089-2107).
ctaagacatgcaacatgaa

SEQ ID NO: 556016 - DNA, 19 bp, Mus musculus
  siRNA target sequence for Adam25 (NM_011781.1,2198-2216).
cagtggccctccgaactat

SEQ ID NO: 556017 - DNA, 19 bp, Mus musculus
  siRNA target sequence for Adam25 (NM_011781.1,2205-2223).
cctccgaactatactgaaa

SEQ ID NO: 556018 - DNA, 19 bp, Mus musculus
  siRNA target sequence for Adam25 (NM_011781.1,2206-2224).
ctccgaactatactgaaaa

SEQ ID NO: 556019 - DNA, 19 bp, Mus musculus
  siRNA target sequence for Adam25 (NM_011781.1,2251-2269).
gtattgggctagtaattct

SEQ ID NO: 556020 - DNA, 19 bp, Mus musculus
  siRNA target sequence for Adam25 (NM_011781.1,2286-2304).
gcttgtttttccgtattgt

SEQ ID NO: 556021 - DNA, 19 bp, Mus musculus
  siRNA target sequence for Adam25 (NM_011781.1,2290-2308).
gtttttccgtattgttcat

SEQ ID NO: 556022 - DNA, 19 bp, Mus musculus
  siRNA target sequence for Adam25 (NM_011781.1,2327-2345).
gaggagttacgtagaacta

SEQ ID NO: 556023 - DNA, 19 bp, Mus musculus
  siRNA target sequence for Adam25 (NM_011781.1,2332-2350).
gttacgtagaactacctat

SEQ ID NO: 556024 - DNA, 19 bp, Mus musculus
  siRNA target sequence for Adam25 (NM_011781.1,2336-2354).
cgtagaactacctatgagt

SEQ ID NO: 556025 - DNA, 19 bp, Mus musculus
  siRNA target sequence for Adam25 (NM_011781.1,2391-2409).
gataccaatgaagtaatga

SEQ ID NO: 556026 - DNA, 19 bp, Mus musculus
  siRNA target sequence for Adam26 (NM_010085.1,2293-2311).
gtacatccttattgtttta

SEQ ID NO: 556027 - DNA, 19 bp, Mus musculus
  siRNA target sequence for Adam28 (NM_010082.1,166-184).
gtcttctggtagtctcttt

SEQ ID NO: 556028 - DNA, 19 bp, Mus musculus
  siRNA target sequence for Adam28 (NM_010082.1,248-266).
ggtttatcccataagactt

SEQ ID NO: 556029 - DNA, 19 bp, Mus musculus
  siRNA target sequence for Adam28 (NM_010082.1,264-282).
cttcatccattgcgtaaaa

SEQ ID NO: 556030 - DNA, 19 bp, Mus musculus
  siRNA target sequence for Adam28 (NM_010082.1,399-417).
cctgactactcggaaacat

SEQ ID NO: 556031 - DNA, 19 bp, Mus musculus
  siRNA target sequence for Adam28 (NM_010082.1,400-418).
ctgactactcggaaacata

SEQ ID NO: 556032 - DNA, 19 bp, Mus musculus
  siRNA target sequence for Adam28 (NM_010082.1,402-420).
gactactcggaaacatact

SEQ ID NO: 556033 - DNA, 19 bp, Mus musculus
  siRNA target sequence for Adam28 (NM_010082.1,404-422).
ctactcggaaacatactat

SEQ ID NO: 556034 - DNA, 19 bp, Mus musculus
  siRNA target sequence for Adam28 (NM_010082.1,407-425).
ctcggaaacatactataat

SEQ ID NO: 556035 - DNA, 19 bp, Mus musculus
  siRNA target sequence for Adam28 (NM_010082.1,445-463).
ccacaagcccgcaaatcat

SEQ ID NO: 556036 - DNA, 19 bp, Mus musculus
  siRNA target sequence for Adam28 (NM_010082.1,479-497).
ccaaggacacatcgtaaat

SEQ ID NO: 556037 - DNA, 19 bp, Mus musculus
  siRNA target sequence for Adam28 (NM_010082.1,483-501).
ggacacatcgtaaatgaga

SEQ ID NO: 556038 - DNA, 19 bp, Mus musculus
  siRNA target sequence for Adam28 (NM_010082.1,534-552).
ggactacggggttacatca

SEQ ID NO: 556039 - DNA, 19 bp, Mus musculus
  siRNA target sequence for Adam28 (NM_010082.1,583-601).
ctttgagctcggagaactt

SEQ ID NO: 556040 - DNA, 19 bp, Mus musculus
  siRNA target sequence for Adam28 (NM_010082.1,592-610).
cggagaacttggatgaaca

SEQ ID NO: 556041 - DNA, 19 bp, Mus musculus
  siRNA target sequence for Adam28 (NM_010082.1,717-735).
cctgccaccaggttgatta

SEQ ID NO: 556042 - DNA, 19 bp, Mus musculus
  siRNA target sequence for Adam28 (NM_010082.1,718-736).
ctgccaccaggttgattaa

SEQ ID NO: 556043 - DNA, 19 bp, Mus musculus
  siRNA target sequence for Adam28 (NM_010082.1,724-742).
ccaggttgattaagttgaa

SEQ ID NO: 556044 - DNA, 19 bp, Mus musculus
  siRNA target sequence for Adam28 (NM_010082.1,725-743).
caggttgattaagttgaat

SEQ ID NO: 556045 - DNA, 19 bp, Mus musculus
  siRNA target sequence for Adam28 (NM_010082.1,748-766).
ggatggttcaagaacctaa

SEQ ID NO: 556046 - DNA, 19 bp, Mus musculus
  siRNA target sequence for Adam28 (NM_010082.1,762-780).
cctaagaaatacatagaat

SEQ ID NO: 556047 - DNA, 19 bp, Mus musculus
  siRNA target sequence for Adam28 (NM_010082.1,763-781).
ctaagaaatacatagaata

SEQ ID NO: 556048 - DNA, 19 bp, Mus musculus
  siRNA target sequence for Adam28 (NM_010082.1,832-850).
ctgaaatacgaaagatagt

SEQ ID NO: 556049 - DNA, 19 bp, Mus musculus
  siRNA target sequence for Adam28 (NM_010082.1,841-859).
gaaagatagtgcttgagat

SEQ ID NO: 556050 - DNA, 19 bp, Mus musculus
  siRNA target sequence for Adam28 (NM_010082.1,855-873).
gagatggccaattacatca

SEQ ID NO: 556051 - DNA, 19 bp, Mus musculus
  siRNA target sequence for Adam28 (NM_010082.1,869-887).
catcaacatgctttacaat

SEQ ID NO: 556052 - DNA, 19 bp, Mus musculus
  siRNA target sequence for Adam28 (NM_010082.1,926-944).
ctggaccgatggggataaa

SEQ ID NO: 556053 - DNA, 19 bp, Mus musculus
  siRNA target sequence for Adam28 (NM_010082.1,928-946).
ggaccgatggggataaaat

SEQ ID NO: 556054 - DNA, 19 bp, Mus musculus
  siRNA target sequence for Adam28 (NM_010082.1,929-947).
gaccgatggggataaaata

SEQ ID NO: 556055 - DNA, 19 bp, Mus musculus
  siRNA target sequence for Adam28 (NM_010082.1,931-949).
ccgatggggataaaataaa

SEQ ID NO: 556056 - DNA, 19 bp, Mus musculus
  siRNA target sequence for Adam28 (NM_010082.1,997-1015).
ggggaaatgatctgctaaa

SEQ ID NO: 556057 - DNA, 19 bp, Mus musculus
  siRNA target sequence for Adam28 (NM_010082.1,1029-1047).
gatattgcccagctaatct

SEQ ID NO: 556058 - DNA, 19 bp, Mus musculus
  siRNA target sequence for Adam28 (NM_010082.1,1046-1064).
ctcatcaacagacttttct

SEQ ID NO: 556059 - DNA, 19 bp, Mus musculus
  siRNA target sequence for Adam28 (NM_010082.1,1097-1115).
gatgtgttcaccttaccat

SEQ ID NO: 556060 - DNA, 19 bp, Mus musculus
  siRNA target sequence for Adam28 (NM_010082.1,1164-1182).
ggaacaatggctcatgaaa

SEQ ID NO: 556061 - DNA, 19 bp, Mus musculus
  siRNA target sequence for Adam28 (NM_010082.1,1165-1183).
gaacaatggctcatgaaat

SEQ ID NO: 556062 - DNA, 19 bp, Mus musculus
  siRNA target sequence for Adam28 (NM_010082.1,1190-1208).
caatcttggcatgattcat

SEQ ID NO: 556063 - DNA, 19 bp, Mus musculus
  siRNA target sequence for Adam28 (NM_010082.1,1291-1309).
cctgcagtcgtgtcaatta

SEQ ID NO: 556064 - DNA, 19 bp, Mus musculus
  siRNA target sequence for Adam28 (NM_010082.1,1299-1317).
cgtgtcaattacaaacagt

SEQ ID NO: 556065 - DNA, 19 bp, Mus musculus
  siRNA target sequence for Adam28 (NM_010082.1,1300-1318).
gtgtcaattacaaacagtt

SEQ ID NO: 556066 - DNA, 19 bp, Mus musculus
  siRNA target sequence for Adam28 (NM_010082.1,1354-1372).
gcccattgccatcagatat

SEQ ID NO: 556067 - DNA, 19 bp, Mus musculus
  siRNA target sequence for Adam28 (NM_010082.1,1357-1375).
cattgccatcagatatcat

SEQ ID NO: 556068 - DNA, 19 bp, Mus musculus
  siRNA target sequence for Adam28 (NM_010082.1,1397-1415).
ccagttgttggaaatgaat

SEQ ID NO: 556069 - DNA, 19 bp, Mus musculus
  siRNA target sequence for Adam28 (NM_010082.1,1435-1453).
cacccaaggagtgtactaa

SEQ ID NO: 556070 - DNA, 19 bp, Mus musculus
  siRNA target sequence for Adam28 (NM_010082.1,1437-1455).
cccaaggagtgtactaaca

SEQ ID NO: 556071 - DNA, 19 bp, Mus musculus
  siRNA target sequence for Adam28 (NM_010082.1,1439-1457).
caaggagtgtactaacaaa

SEQ ID NO: 556072 - DNA, 19 bp, Mus musculus
  siRNA target sequence for Adam28 (NM_010082.1,1443-1461).
gagtgtactaacaaatgct

SEQ ID NO: 556073 - DNA, 19 bp, Mus musculus
  siRNA target sequence for Adam28 (NM_010082.1,1464-1482).
gatgcaaggacctgtaaaa

SEQ ID NO: 556074 - DNA, 19 bp, Mus musculus
  siRNA target sequence for Adam28 (NM_010082.1,1467-1485).
gcaaggacctgtaaaatta

SEQ ID NO: 556075 - DNA, 19 bp, Mus musculus
  siRNA target sequence for Adam28 (NM_010082.1,1519-1537).
gtgagaaatgccaacttaa

SEQ ID NO: 556076 - DNA, 19 bp, Mus musculus
  siRNA target sequence for Adam28 (NM_010082.1,1585-1603).
ctgaagtgtgtgatggtaa

SEQ ID NO: 556077 - DNA, 19 bp, Mus musculus
  siRNA target sequence for Adam28 (NM_010082.1,1651-1669).
gccaaaatgggcatggtta

SEQ ID NO: 556078 - DNA, 19 bp, Mus musculus
  siRNA target sequence for Adam28 (NM_010082.1,1750-1768).
catgttacaagcagaatga

SEQ ID NO: 556079 - DNA, 19 bp, Mus musculus
  siRNA target sequence for Adam28 (NM_010082.1,1775-1793).
gacaaagtacggatactgt

SEQ ID NO: 556080 - DNA, 19 bp, Mus musculus
  siRNA target sequence for Adam28 (NM_010082.1,1972-1990).
ccaagtgtggaactaacaa

SEQ ID NO: 556081 - DNA, 19 bp, Mus musculus
  siRNA target sequence for Adam28 (NM_010082.1,2040-2058).
gccaactgctcctcaaagt

SEQ ID NO: 556082 - DNA, 19 bp, Mus musculus
  siRNA target sequence for Adam28 (NM_010082.1,2180-2198).
ccccctagcagtcatattt

SEQ ID NO: 556083 - DNA, 19 bp, Mus musculus
  siRNA target sequence for Adam28 (NM_010082.1,2286-2304).
ctacacaatcagaagtgta

SEQ ID NO: 556084 - DNA, 19 bp, Mus musculus
  siRNA target sequence for Adam28 (NM_010082.1,2395-2413).
ctccacctgatgtcctaat

SEQ ID NO: 556085 - DNA, 19 bp, Mus musculus
  siRNA target sequence for Adam28 (NM_010082.1,2397-2415).
ccacctgatgtcctaatca

SEQ ID NO: 556086 - DNA, 19 bp, Mus musculus
  siRNA target sequence for Adam28 (NM_010082.1,2400-2418).
cctgatgtcctaatcacaa

SEQ ID NO: 556087 - DNA, 19 bp, Mus musculus
  siRNA target sequence for Adam28 (NM_010082.1,2401-2419).
ctgatgtcctaatcacaaa

SEQ ID NO: 556088 - DNA, 19 bp, Mus musculus
  siRNA target sequence for Adam28 (NM_010082.1,2488-2506).
cacctcatccttttagtca

SEQ ID NO: 556089 - DNA, 19 bp, Mus musculus
  siRNA target sequence for Adam33 (NM_033615.1,329-347).
ggtctccggtgctgctatt

SEQ ID NO: 556090 - DNA, 19 bp, Mus musculus
  siRNA target sequence for Adam33 (NM_033615.1,332-350).
ctccggtgctgctattgct

SEQ ID NO: 556091 - DNA, 19 bp, Mus musculus
  siRNA target sequence for Adam33 (NM_033615.1,378-396).
gcggagcgctcggatgttt

SEQ ID NO: 556092 - DNA, 19 bp, Mus musculus
  siRNA target sequence for Adam33 (NM_033615.1,625-643).
cccaaccacacggatcatt

SEQ ID NO: 556093 - DNA, 19 bp, Mus musculus
  siRNA target sequence for Adam33 (NM_033615.1,633-651).
cacggatcattgccaatat

SEQ ID NO: 556094 - DNA, 19 bp, Mus musculus
  siRNA target sequence for Adam33 (NM_033615.1,635-653).
cggatcattgccaatatca

SEQ ID NO: 556095 - DNA, 19 bp, Mus musculus
  siRNA target sequence for Adam33 (NM_033615.1,731-749).
gcagcaaagtcagctatta

SEQ ID NO: 556096 - DNA, 19 bp, Mus musculus
  siRNA target sequence for Adam33 (NM_033615.1,732-750).
cagcaaagtcagctattat

SEQ ID NO: 556097 - DNA, 19 bp, Mus musculus
  siRNA target sequence for Adam33 (NM_033615.1,761-779).
ggactcctggggataccaa

SEQ ID NO: 556098 - DNA, 19 bp, Mus musculus
  siRNA target sequence for Adam33 (NM_033615.1,762-780).
gactcctggggataccaaa

SEQ ID NO: 556099 - DNA, 19 bp, Mus musculus
  siRNA target sequence for Adam33 (NM_033615.1,767-785).
ctggggataccaaagactt

SEQ ID NO: 556100 - DNA, 19 bp, Mus musculus
  siRNA target sequence for Adam33 (NM_033615.1,805-823).
cggatggagcagttgttca

SEQ ID NO: 556101 - DNA, 19 bp, Mus musculus
  siRNA target sequence for Adam33 (NM_033615.1,933-951).
gtacctggaactgtacata

SEQ ID NO: 556102 - DNA, 19 bp, Mus musculus
  siRNA target sequence for Adam33 (NM_033615.1,1049-1067).
ggactctggatatacagtt

SEQ ID NO: 556103 - DNA, 19 bp, Mus musculus
  siRNA target sequence for Adam33 (NM_033615.1,1693-1711).
gcgaggtgcctgttaaagt

SEQ ID NO: 556104 - DNA, 19 bp, Mus musculus
  siRNA target sequence for Adam33 (NM_033615.1,1922-1940).
catgtttccagcagatgaa

SEQ ID NO: 556105 - DNA, 19 bp, Mus musculus
  siRNA target sequence for Adam33 (NM_033615.1,2076-2094).
gactatggactccacaatt

SEQ ID NO: 556106 - DNA, 19 bp, Mus musculus
  siRNA target sequence for Adam33 (NM_033615.1,2189-2207).
ccggctgtggacctagaat

SEQ ID NO: 556107 - DNA, 19 bp, Mus musculus
  siRNA target sequence for Adam33 (NM_033615.1,2281-2299).
ggtggggtttgcaatagca

SEQ ID NO: 556108 - DNA, 19 bp, Mus musculus
  siRNA target sequence for Adam33 (NM_033615.1,2519-2537).
ggagggaccccctatggaa

SEQ ID NO: 556109 - DNA, 19 bp, Mus musculus
  siRNA target sequence for Adam33 (NM_033615.1,2523-2541).
ggaccccctatggaataga

SEQ ID NO: 556110 - DNA, 19 bp, Mus musculus
  siRNA target sequence for Adam8 (NM_007403.1,33-51).
ctgctcagcgtcttatgga

SEQ ID NO: 556111 - DNA, 19 bp, Mus musculus
  siRNA target sequence for Adam8 (NM_007403.1,196-214).
ggaccagcgggcacgtttt

SEQ ID NO: 556112 - DNA, 19 bp, Mus musculus
  siRNA target sequence for Adam8 (NM_007403.1,455-473).
ggggcaacatgcgatgtat

SEQ ID NO: 556113 - DNA, 19 bp, Mus musculus
  siRNA target sequence for Adam8 (NM_007403.1,457-475).
ggcaacatgcgatgtatca

SEQ ID NO: 556114 - DNA, 19 bp, Mus musculus
  siRNA target sequence for Adam8 (NM_007403.1,540-558).
gggcctcgggcattagaaa

SEQ ID NO: 556115 - DNA, 19 bp, Mus musculus
  siRNA target sequence for Adam8 (NM_007403.1,541-559).
ggcctcgggcattagaaat

SEQ ID NO: 556116 - DNA, 19 bp, Mus musculus
  siRNA target sequence for Adam8 (NM_007403.1,542-560).
gcctcgggcattagaaata

SEQ ID NO: 556117 - DNA, 19 bp, Mus musculus
  siRNA target sequence for Adam8 (NM_007403.1,544-562).
ctcgggcattagaaatata

SEQ ID NO: 556118 - DNA, 19 bp, Mus musculus
  siRNA target sequence for Adam8 (NM_007403.1,546-564).
cgggcattagaaatataca

SEQ ID NO: 556119 - DNA, 19 bp, Mus musculus
  siRNA target sequence for Adam8 (NM_007403.1,602-620).
ccgctatgtggagttgtat

SEQ ID NO: 556120 - DNA, 19 bp, Mus musculus
  siRNA target sequence for Adam8 (NM_007403.1,678-696).
cgagtgctggaggttgtaa

SEQ ID NO: 556121 - DNA, 19 bp, Mus musculus
  siRNA target sequence for Adam8 (NM_007403.1,679-697).
gagtgctggaggttgtaaa

SEQ ID NO: 556122 - DNA, 19 bp, Mus musculus
  siRNA target sequence for Adam8 (NM_007403.1,855-873).
catgacaacgtgcaactta

SEQ ID NO: 556123 - DNA, 19 bp, Mus musculus
  siRNA target sequence for Adam8 (NM_007403.1,870-888).
cttatcacgggggttgatt

SEQ ID NO: 556124 - DNA, 19 bp, Mus musculus
  siRNA target sequence for Adam8 (NM_007403.1,875-893).
cacgggggttgatttcatt

SEQ ID NO: 556125 - DNA, 19 bp, Mus musculus
  siRNA target sequence for Adam8 (NM_007403.1,1130-1148).
cagcaggtgtagcaagatt

SEQ ID NO: 556126 - DNA, 19 bp, Mus musculus
  siRNA target sequence for Adam8 (NM_007403.1,1132-1150).
gcaggtgtagcaagattga

SEQ ID NO: 556127 - DNA, 19 bp, Mus musculus
  siRNA target sequence for Adam8 (NM_007403.1,1192-1210).
ccaatgttccagatgtcaa

SEQ ID NO: 556128 - DNA, 19 bp, Mus musculus
  siRNA target sequence for Adam8 (NM_007403.1,1353-1371).
ggtacctgttgtcatgaat

SEQ ID NO: 556129 - DNA, 19 bp, Mus musculus
  siRNA target sequence for Adam8 (NM_007403.1,1357-1375).
cctgttgtcatgaatgcaa

SEQ ID NO: 556130 - DNA, 19 bp, Mus musculus
  siRNA target sequence for Adam8 (NM_007403.1,1401-1419).
cgtctcagtaaggacaaat

SEQ ID NO: 556131 - DNA, 19 bp, Mus musculus
  siRNA target sequence for Adam8 (NM_007403.1,1578-1596).
gcagccgactcctgctata

SEQ ID NO: 556132 - DNA, 19 bp, Mus musculus
  siRNA target sequence for Adam8 (NM_007403.1,1582-1600).
ccgactcctgctatacctt

SEQ ID NO: 556133 - DNA, 19 bp, Mus musculus
  siRNA target sequence for Adam8 (NM_007403.1,1583-1601).
cgactcctgctataccttt

SEQ ID NO: 556134 - DNA, 19 bp, Mus musculus
  siRNA target sequence for Adam8 (NM_007403.1,1584-1602).
gactcctgctataccttta

SEQ ID NO: 556135 - DNA, 19 bp, Mus musculus
  siRNA target sequence for Adam8 (NM_007403.1,1793-1811).
gtgcgaggagggaaaggtt

SEQ ID NO: 556136 - DNA, 19 bp, Mus musculus
  siRNA target sequence for Adam8 (NM_007403.1,1838-1856).
ccgtgtatacagatctgaa

SEQ ID NO: 556137 - DNA, 19 bp, Mus musculus
  siRNA target sequence for Adam8 (NM_007403.1,1949-1967).
gcggctggcagatgtatca

SEQ ID NO: 556138 - DNA, 19 bp, Mus musculus
  siRNA target sequence for Adam8 (NM_007403.1,2067-2085).
cgaaaggctccgagacaaa

SEQ ID NO: 556139 - DNA, 19 bp, Mus musculus
  siRNA target sequence for Adam8 (NM_007403.1,2155-2173).
gcagcctgccagctaagaa

SEQ ID NO: 556140 - DNA, 19 bp, Mus musculus
  siRNA target sequence for Adam8 (NM_007403.1,2214-2232).
cccccaagacccatagtga

SEQ ID NO: 556141 - DNA, 19 bp, Mus musculus
  siRNA target sequence for Adam8 (NM_007403.1,2215-2233).
ccccaagacccatagtgaa

SEQ ID NO: 556142 - DNA, 19 bp, Mus musculus
  siRNA target sequence for Adam8 (NM_007403.1,2221-2239).
gacccatagtgaaaccaaa

SEQ ID NO: 556143 - DNA, 19 bp, Mus musculus
  siRNA target sequence for Adam8 (NM_007403.1,2369-2387).
gcaggtcaagccaaccttt

SEQ ID NO: 556144 - DNA, 19 bp, Mus musculus
  siRNA target sequence for Adam9 (NM_007404.1,116-134).
gaacagactgtccatcttt

SEQ ID NO: 556145 - DNA, 19 bp, Mus musculus
  siRNA target sequence for Adam9 (NM_007404.1,230-248).
caaggaaaacagcatatta

SEQ ID NO: 556146 - DNA, 19 bp, Mus musculus
  siRNA target sequence for Adam9 (NM_007404.1,234-252).
gaaaacagcatattattca

SEQ ID NO: 556147 - DNA, 19 bp, Mus musculus
  siRNA target sequence for Adam9 (NM_007404.1,265-283).
cacagaccttttacctaat

SEQ ID NO: 556148 - DNA, 19 bp, Mus musculus
  siRNA target sequence for Adam9 (NM_007404.1,440-458).
gagaatgccagttttggaa

SEQ ID NO: 556149 - DNA, 19 bp, Mus musculus
  siRNA target sequence for Adam9 (NM_007404.1,442-460).
gaatgccagttttggaatt

SEQ ID NO: 556150 - DNA, 19 bp, Mus musculus
  siRNA target sequence for Adam9 (NM_007404.1,480-498).
cacactttgagcacatatt

SEQ ID NO: 556151 - DNA, 19 bp, Mus musculus
  siRNA target sequence for Adam9 (NM_007404.1,655-673).
ggagctgttcattgttgta

SEQ ID NO: 556152 - DNA, 19 bp, Mus musculus
  siRNA target sequence for Adam9 (NM_007404.1,725-743).
gagatgattcgcttagcaa

SEQ ID NO: 556153 - DNA, 19 bp, Mus musculus
  siRNA target sequence for Adam9 (NM_007404.1,741-759).
caaactacctggatagcat

SEQ ID NO: 556154 - DNA, 19 bp, Mus musculus
  siRNA target sequence for Adam9 (NM_007404.1,749-767).
ctggatagcatgtacatca

SEQ ID NO: 556155 - DNA, 19 bp, Mus musculus
  siRNA target sequence for Adam9 (NM_007404.1,752-770).
gatagcatgtacatcatgt

SEQ ID NO: 556156 - DNA, 19 bp, Mus musculus
  siRNA target sequence for Adam9 (NM_007404.1,791-809).
gttggactagaaatttgga

SEQ ID NO: 556157 - DNA, 19 bp, Mus musculus
  siRNA target sequence for Adam9 (NM_007404.1,810-828).
cagacagaaatcctatcaa

SEQ ID NO: 556158 - DNA, 19 bp, Mus musculus
  siRNA target sequence for Adam9 (NM_007404.1,814-832).
cagaaatcctatcaatata

SEQ ID NO: 556159 - DNA, 19 bp, Mus musculus
  siRNA target sequence for Adam9 (NM_007404.1,873-891).
ggcgggaaaagttccttat

SEQ ID NO: 556160 - DNA, 19 bp, Mus musculus
  siRNA target sequence for Adam9 (NM_007404.1,874-892).
gcgggaaaagttccttata

SEQ ID NO: 556161 - DNA, 19 bp, Mus musculus
  siRNA target sequence for Adam9 (NM_007404.1,988-1006).
ccacgcaggtgggatcaat

SEQ ID NO: 556162 - DNA, 19 bp, Mus musculus
  siRNA target sequence for Adam9 (NM_007404.1,993-1011).
caggtgggatcaatgtgtt

SEQ ID NO: 556163 - DNA, 19 bp, Mus musculus
  siRNA target sequence for Adam9 (NM_007404.1,1021-1039).
cactgtggagacatttgca

SEQ ID NO: 556164 - DNA, 19 bp, Mus musculus
  siRNA target sequence for Adam9 (NM_007404.1,1062-1080).
ggcataaccttggaatgaa

SEQ ID NO: 556165 - DNA, 19 bp, Mus musculus
  siRNA target sequence for Adam9 (NM_007404.1,1063-1081).
gcataaccttggaatgaat

SEQ ID NO: 556166 - DNA, 19 bp, Mus musculus
  siRNA target sequence for Adam9 (NM_007404.1,1110-1128).
gagcaaagagctgtatcat

SEQ ID NO: 556167 - DNA, 19 bp, Mus musculus
  siRNA target sequence for Adam9 (NM_007404.1,1112-1130).
gcaaagagctgtatcatga

SEQ ID NO: 556168 - DNA, 19 bp, Mus musculus
  siRNA target sequence for Adam9 (NM_007404.1,1113-1131).
caaagagctgtatcatgaa

SEQ ID NO: 556169 - DNA, 19 bp, Mus musculus
  siRNA target sequence for Adam9 (NM_007404.1,1167-1185).
gcagtgcggaggactttga

SEQ ID NO: 556170 - DNA, 19 bp, Mus musculus
  siRNA target sequence for Adam9 (NM_007404.1,1209-1227).
gaagctgcctgcttaacat

SEQ ID NO: 556171 - DNA, 19 bp, Mus musculus
  siRNA target sequence for Adam9 (NM_007404.1,1257-1275).
cctcctgtggtaataagct

SEQ ID NO: 556172 - DNA, 19 bp, Mus musculus
  siRNA target sequence for Adam9 (NM_007404.1,1385-1403).
ggcgactgttgtaaagatt

SEQ ID NO: 556173 - DNA, 19 bp, Mus musculus
  siRNA target sequence for Adam9 (NM_007404.1,1494-1512).
cgccagatgtcttcattca

SEQ ID NO: 556174 - DNA, 19 bp, Mus musculus
  siRNA target sequence for Adam9 (NM_007404.1,1502-1520).
gtcttcattcagaatggat

SEQ ID NO: 556175 - DNA, 19 bp, Mus musculus
  siRNA target sequence for Adam9 (NM_007404.1,1552-1570).
caatggcatgtgccaatat

SEQ ID NO: 556176 - DNA, 19 bp, Mus musculus
  siRNA target sequence for Adam9 (NM_007404.1,1578-1596).
cgcagtgtcaggtcatctt

SEQ ID NO: 556177 - DNA, 19 bp, Mus musculus
  siRNA target sequence for Adam9 (NM_007404.1,1623-1641).
gagattgcttcattgaagt

SEQ ID NO: 556178 - DNA, 19 bp, Mus musculus
  siRNA target sequence for Adam9 (NM_007404.1,1680-1698).
ccggcagtgagtacaagaa

SEQ ID NO: 556179 - DNA, 19 bp, Mus musculus
  siRNA target sequence for Adam9 (NM_007404.1,1682-1700).
ggcagtgagtacaagaagt

SEQ ID NO: 556180 - DNA, 19 bp, Mus musculus
  siRNA target sequence for Adam9 (NM_007404.1,1714-1732).
cgcgctgtgtggaaagctt

SEQ ID NO: 556181 - DNA, 19 bp, Mus musculus
  siRNA target sequence for Adam9 (NM_007404.1,1718-1736).
ctgtgtggaaagcttcaat

SEQ ID NO: 556182 - DNA, 19 bp, Mus musculus
  siRNA target sequence for Adam9 (NM_007404.1,1729-1747).
gcttcaatgcgagaatgta

SEQ ID NO: 556183 - DNA, 19 bp, Mus musculus
  siRNA target sequence for Adam9 (NM_007404.1,1751-1769).
gacatgccggtgtttggaa

SEQ ID NO: 556184 - DNA, 19 bp, Mus musculus
  siRNA target sequence for Adam9 (NM_007404.1,1767-1785).
gaatagtaccagctatcat

SEQ ID NO: 556185 - DNA, 19 bp, Mus musculus
  siRNA target sequence for Adam9 (NM_007404.1,1772-1790).
gtaccagctatcattcaga

SEQ ID NO: 556186 - DNA, 19 bp, Mus musculus
  siRNA target sequence for Adam9 (NM_007404.1,1793-1811).
cccagtcgaggcaccaaat

SEQ ID NO: 556187 - DNA, 19 bp, Mus musculus
  siRNA target sequence for Adam9 (NM_007404.1,1864-1882).
gaatgaaggcaccaaatgt

SEQ ID NO: 556188 - DNA, 19 bp, Mus musculus
  siRNA target sequence for Adam9 (NM_007404.1,2151-2169).
ccattttcctctttatcaa

SEQ ID NO: 556189 - DNA, 19 bp, Mus musculus
  siRNA target sequence for Adam9 (NM_007404.1,2252-2270).
ccaggagatcctagtatct

SEQ ID NO: 556190 - DNA, 19 bp, Mus musculus
  siRNA target sequence for Adam9 (NM_007404.1,2391-2409).
ctgggcatggaaacagatt

SEQ ID NO: 556191 - DNA, 19 bp, Mus musculus
  siRNA target sequence for Adam9 (NM_007404.1,2468-2486).
ccacaaccgaaaatatctt

SEQ ID NO: 556192 - DNA, 19 bp, Mus musculus
  siRNA target sequence for Adam9 (NM_007404.1,2515-2533).
cgctcctgcacctccttta

SEQ ID NO: 556193 - DNA, 19 bp, Mus musculus
  siRNA target sequence for Adam9 (NM_007404.1,2519-2537).
cctgcacctcctttatata

SEQ ID NO: 556194 - DNA, 19 bp, Mus musculus
  siRNA target sequence for Adam9 (NM_007404.1,2522-2540).
gcacctcctttatatagct

SEQ ID NO: 556195 - DNA, 19 bp, Mus musculus
  siRNA target sequence for Adamdec1 (NM_021475.1,85-103).
cagtcctgtggcttatcat

SEQ ID NO: 556196 - DNA, 19 bp, Mus musculus
  siRNA target sequence for Adamdec1 (NM_021475.1,114-132).
gtgatagatgcaacgttaa

SEQ ID NO: 556197 - DNA, 19 bp, Mus musculus
  siRNA target sequence for Adamdec1 (NM_021475.1,127-145).
cgttaacccccgagttaaa

SEQ ID NO: 556198 - DNA, 19 bp, Mus musculus
  siRNA target sequence for Adamdec1 (NM_021475.1,140-158).
gttaaagcctcacgaaata

SEQ ID NO: 556199 - DNA, 19 bp, Mus musculus
  siRNA target sequence for Adamdec1 (NM_021475.1,152-170).
cgaaatagttcgtcctaaa

SEQ ID NO: 556200 - DNA, 19 bp, Mus musculus
  siRNA target sequence for Adamdec1 (NM_021475.1,321-339).
gggccagactacactgaaa

SEQ ID NO: 556201 - DNA, 19 bp, Mus musculus
  siRNA target sequence for Adamdec1 (NM_021475.1,324-342).
ccagactacactgaaacat

SEQ ID NO: 556202 - DNA, 19 bp, Mus musculus
  siRNA target sequence for Adamdec1 (NM_021475.1,408-426).
ggccacatccaaaatgcaa

SEQ ID NO: 556203 - DNA, 19 bp, Mus musculus
  siRNA target sequence for Adamdec1 (NM_021475.1,459-477).
gggttgagagggtacttca

SEQ ID NO: 556204 - DNA, 19 bp, Mus musculus
  siRNA target sequence for Adamdec1 (NM_021475.1,478-496).
cacatcgtgatcagagata

SEQ ID NO: 556205 - DNA, 19 bp, Mus musculus
  siRNA target sequence for Adamdec1 (NM_021475.1,597-615).
caagttgtcaggaaacgaa

SEQ ID NO: 556206 - DNA, 19 bp, Mus musculus
  siRNA target sequence for Adamdec1 (NM_021475.1,647-665).
cccaaatgaagacttactt

SEQ ID NO: 556207 - DNA, 19 bp, Mus musculus
  siRNA target sequence for Adamdec1 (NM_021475.1,698-716).
gctggataatgcctattat

SEQ ID NO: 556208 - DNA, 19 bp, Mus musculus
  siRNA target sequence for Adamdec1 (NM_021475.1,699-717).
ctggataatgcctattata

SEQ ID NO: 556209 - DNA, 19 bp, Mus musculus
  siRNA target sequence for Adamdec1 (NM_021475.1,720-738).
ctgtataatgggaatgtga

SEQ ID NO: 556210 - DNA, 19 bp, Mus musculus
  siRNA target sequence for Adamdec1 (NM_021475.1,770-788).
gaatctgctcaatatgatt

SEQ ID NO: 556211 - DNA, 19 bp, Mus musculus
  siRNA target sequence for Adamdec1 (NM_021475.1,774-792).
ctgctcaatatgatttata

SEQ ID NO: 556212 - DNA, 19 bp, Mus musculus
  siRNA target sequence for Adamdec1 (NM_021475.1,986-1004).
ggcagctgggaattccttt

SEQ ID NO: 556213 - DNA, 19 bp, Mus musculus
  siRNA target sequence for Adamdec1 (NM_021475.1,987-1005).
gcagctgggaattcctttt

SEQ ID NO: 556214 - DNA, 19 bp, Mus musculus
  siRNA target sequence for Adamdec1 (NM_021475.1,995-1013).
gaattccttttgtactaca

SEQ ID NO: 556215 - DNA, 19 bp, Mus musculus
  siRNA target sequence for Adamdec1 (NM_021475.1,1012-1030).
catcgtctgtgtctgtaat

SEQ ID NO: 556216 - DNA, 19 bp, Mus musculus
  siRNA target sequence for Adamdec1 (NM_021475.1,1015-1033).
cgtctgtgtctgtaattga

SEQ ID NO: 556217 - DNA, 19 bp, Mus musculus
  siRNA target sequence for Adamdec1 (NM_021475.1,1024-1042).
ctgtaattgaggctaaaaa

SEQ ID NO: 556218 - DNA, 19 bp, Mus musculus
  siRNA target sequence for Adamdec1 (NM_021475.1,1046-1064).
gaataatgtggctcttgtt

SEQ ID NO: 556219 - DNA, 19 bp, Mus musculus
  siRNA target sequence for Adamdec1 (NM_021475.1,1087-1105).
gccacgcccttggtatgaa

SEQ ID NO: 556220 - DNA, 19 bp, Mus musculus
  siRNA target sequence for Adamdec1 (NM_021475.1,1099-1117).
gtatgaaggatgttccata

SEQ ID NO: 556221 - DNA, 19 bp, Mus musculus
  siRNA target sequence for Adamdec1 (NM_021475.1,1103-1121).
gaaggatgttccatattat

SEQ ID NO: 556222 - DNA, 19 bp, Mus musculus
  siRNA target sequence for Adamdec1 (NM_021475.1,1107-1125).
gatgttccatattatacca

SEQ ID NO: 556223 - DNA, 19 bp, Mus musculus
  siRNA target sequence for Adamdec1 (NM_021475.1,1192-1210).
ccgtcagccgttctcattt

SEQ ID NO: 556224 - DNA, 19 bp, Mus musculus
  siRNA target sequence for Adamdec1 (NM_021475.1,1193-1211).
cgtcagccgttctcatttt

SEQ ID NO: 556225 - DNA, 19 bp, Mus musculus
  siRNA target sequence for Adamdec1 (NM_021475.1,1196-1214).
cagccgttctcattttcaa

SEQ ID NO: 556226 - DNA, 19 bp, Mus musculus
  siRNA target sequence for Adamdec1 (NM_021475.1,1215-1233).
gggtttctctcatctagaa

SEQ ID NO: 556227 - DNA, 19 bp, Mus musculus
  siRNA target sequence for Adamdec1 (NM_021475.1,1260-1278).
gaccctaaaaacataataa

SEQ ID NO: 556228 - DNA, 19 bp, Mus musculus
  siRNA target sequence for Adamdec1 (NM_021475.1,1338-1356).
gaggaatgtaccaatcttt

SEQ ID NO: 556229 - DNA, 19 bp, Mus musculus
  siRNA target sequence for Adamdec1 (NM_021475.1,1370-1388).
gacatgtaggctgaaatct

SEQ ID NO: 556230 - DNA, 19 bp, Mus musculus
  siRNA target sequence for Adamts1 (NM_009621.1,60-78).
gctgctcctcgcttccata

SEQ ID NO: 556231 - DNA, 19 bp, Mus musculus
  siRNA target sequence for Adamts1 (NM_009621.1,61-79).
ctgctcctcgcttccataa

SEQ ID NO: 556232 - DNA, 19 bp, Mus musculus
  siRNA target sequence for Adamts1 (NM_009621.1,63-81).
gctcctcgcttccataaca

SEQ ID NO: 556233 - DNA, 19 bp, Mus musculus
  siRNA target sequence for Adamts1 (NM_009621.1,64-82).
ctcctcgcttccataacaa

SEQ ID NO: 556234 - DNA, 19 bp, Mus musculus
  siRNA target sequence for Adamts1 (NM_009621.1,209-227).
gccagcagctacatctgaa

SEQ ID NO: 556235 - DNA, 19 bp, Mus musculus
  siRNA target sequence for Adamts1 (NM_009621.1,291-309).
cgggtccgaggcacaacat

SEQ ID NO: 556236 - DNA, 19 bp, Mus musculus
  siRNA target sequence for Adamts1 (NM_009621.1,293-311).
ggtccgaggcacaacatct

SEQ ID NO: 556237 - DNA, 19 bp, Mus musculus
  siRNA target sequence for Adamts1 (NM_009621.1,428-446).
gagaggagttcttcattca

SEQ ID NO: 556238 - DNA, 19 bp, Mus musculus
  siRNA target sequence for Adamts1 (NM_009621.1,722-740).
cccgttatgtggaaaccat

SEQ ID NO: 556239 - DNA, 19 bp, Mus musculus
  siRNA target sequence for Adamts1 (NM_009621.1,774-792).
cggcagcggtctaaagcat

SEQ ID NO: 556240 - DNA, 19 bp, Mus musculus
  siRNA target sequence for Adamts1 (NM_009621.1,775-793).
ggcagcggtctaaagcatt

SEQ ID NO: 556241 - DNA, 19 bp, Mus musculus
  siRNA target sequence for Adamts1 (NM_009621.1,776-794).
gcagcggtctaaagcatta

SEQ ID NO: 556242 - DNA, 19 bp, Mus musculus
  siRNA target sequence for Adamts1 (NM_009621.1,784-802).
ctaaagcattaccttctaa

SEQ ID NO: 556243 - DNA, 19 bp, Mus musculus
  siRNA target sequence for Adamts1 (NM_009621.1,812-830).
cggtggcagccaggtttta

SEQ ID NO: 556244 - DNA, 19 bp, Mus musculus
  siRNA target sequence for Adamts1 (NM_009621.1,838-856).
cccagcattaggaattcaa

SEQ ID NO: 556245 - DNA, 19 bp, Mus musculus
  siRNA target sequence for Adamts1 (NM_009621.1,839-857).
ccagcattaggaattcaat

SEQ ID NO: 556246 - DNA, 19 bp, Mus musculus
  siRNA target sequence for Adamts1 (NM_009621.1,840-858).
cagcattaggaattcaatt

SEQ ID NO: 556247 - DNA, 19 bp, Mus musculus
  siRNA target sequence for Adamts1 (NM_009621.1,871-889).
gtgaagatcttggtcatat

SEQ ID NO: 556248 - DNA, 19 bp, Mus musculus
  siRNA target sequence for Adamts1 (NM_009621.1,986-1004).
gggatccagagcactatga

SEQ ID NO: 556249 - DNA, 19 bp, Mus musculus
  siRNA target sequence for Adamts1 (NM_009621.1,988-1006).
gatccagagcactatgaca

SEQ ID NO: 556250 - DNA, 19 bp, Mus musculus
  siRNA target sequence for Adamts1 (NM_009621.1,1100-1118).
ggagctgctcagtcataga

SEQ ID NO: 556251 - DNA, 19 bp, Mus musculus
  siRNA target sequence for Adamts1 (NM_009621.1,1197-1215).
gcactgtgccagcttgaat

SEQ ID NO: 556252 - DNA, 19 bp, Mus musculus
  siRNA target sequence for Adamts1 (NM_009621.1,1303-1321).
gtcacgtccttcctagata

SEQ ID NO: 556253 - DNA, 19 bp, Mus musculus
  siRNA target sequence for Adamts1 (NM_009621.1,1324-1342).
ggacacggggaatgtttga

SEQ ID NO: 556254 - DNA, 19 bp, Mus musculus
  siRNA target sequence for Adamts1 (NM_009621.1,1325-1343).
gacacggggaatgtttgat

SEQ ID NO: 556255 - DNA, 19 bp, Mus musculus
  siRNA target sequence for Adamts1 (NM_009621.1,1404-1422).
caaccgccagtgtcagttt

SEQ ID NO: 556256 - DNA, 19 bp, Mus musculus
  siRNA target sequence for Adamts1 (NM_009621.1,1407-1425).
ccgccagtgtcagtttaca

SEQ ID NO: 556257 - DNA, 19 bp, Mus musculus
  siRNA target sequence for Adamts1 (NM_009621.1,1409-1427).
gccagtgtcagtttacatt

SEQ ID NO: 556258 - DNA, 19 bp, Mus musculus
  siRNA target sequence for Adamts1 (NM_009621.1,1424-1442).
cattcggagaggaatccaa

SEQ ID NO: 556259 - DNA, 19 bp, Mus musculus
  siRNA target sequence for Adamts1 (NM_009621.1,1510-1528).
gtgtgccaaacaaaacact

SEQ ID NO: 556260 - DNA, 19 bp, Mus musculus
  siRNA target sequence for Adamts1 (NM_009621.1,1579-1597).
ggcaagtgcgtgaacaaga

SEQ ID NO: 556261 - DNA, 19 bp, Mus musculus
  siRNA target sequence for Adamts1 (NM_009621.1,1600-1618).
gacatgaagcattttgcta

SEQ ID NO: 556262 - DNA, 19 bp, Mus musculus
  siRNA target sequence for Adamts1 (NM_009621.1,1678-1696).
ggtggtggagttcaataca

SEQ ID NO: 556263 - DNA, 19 bp, Mus musculus
  siRNA target sequence for Adamts1 (NM_009621.1,1684-1702).
ggagttcaatacacaatga

SEQ ID NO: 556264 - DNA, 19 bp, Mus musculus
  siRNA target sequence for Adamts1 (NM_009621.1,1690-1708).
caatacacaatgagagaat

SEQ ID NO: 556265 - DNA, 19 bp, Mus musculus
  siRNA target sequence for Adamts1 (NM_009621.1,1762-1780).
cgctacaggtcctgtaaca

SEQ ID NO: 556266 - DNA, 19 bp, Mus musculus
  siRNA target sequence for Adamts1 (NM_009621.1,1763-1781).
gctacaggtcctgtaacat

SEQ ID NO: 556267 - DNA, 19 bp, Mus musculus
  siRNA target sequence for Adamts1 (NM_009621.1,1782-1800).
cgaggactgtccagacaat

SEQ ID NO: 556268 - DNA, 19 bp, Mus musculus
  siRNA target sequence for Adamts1 (NM_009621.1,1792-1810).
ccagacaataacggaaaaa

SEQ ID NO: 556269 - DNA, 19 bp, Mus musculus
  siRNA target sequence for Adamts1 (NM_009621.1,1795-1813).
gacaataacggaaaaacgt

SEQ ID NO: 556270 - DNA, 19 bp, Mus musculus
  siRNA target sequence for Adamts1 (NM_009621.1,1829-1847).
gcgaggcgcacaatgagtt

SEQ ID NO: 556271 - DNA, 19 bp, Mus musculus
  siRNA target sequence for Adamts1 (NM_009621.1,1830-1848).
cgaggcgcacaatgagttt

SEQ ID NO: 556272 - DNA, 19 bp, Mus musculus
  siRNA target sequence for Adamts1 (NM_009621.1,1831-1849).
gaggcgcacaatgagtttt

SEQ ID NO: 556273 - DNA, 19 bp, Mus musculus
  siRNA target sequence for Adamts1 (NM_009621.1,1834-1852).
gcgcacaatgagttttcca

SEQ ID NO: 556274 - DNA, 19 bp, Mus musculus
  siRNA target sequence for Adamts1 (NM_009621.1,1835-1853).
cgcacaatgagttttccaa

SEQ ID NO: 556275 - DNA, 19 bp, Mus musculus
  siRNA target sequence for Adamts1 (NM_009621.1,1949-1967).
gcattggctactttttcgt

SEQ ID NO: 556276 - DNA, 19 bp, Mus musculus
  siRNA target sequence for Adamts1 (NM_009621.1,2028-2046).
gcaagggcagtgtgtgaaa

SEQ ID NO: 556277 - DNA, 19 bp, Mus musculus
  siRNA target sequence for Adamts1 (NM_009621.1,2059-2077).
cgcatcatagactccaaaa

SEQ ID NO: 556278 - DNA, 19 bp, Mus musculus
  siRNA target sequence for Adamts1 (NM_009621.1,2161-2179).
gggtatcatgacattgtca

SEQ ID NO: 556279 - DNA, 19 bp, Mus musculus
  siRNA target sequence for Adamts1 (NM_009621.1,2209-2227).
gtgaaacatcggaatcaaa

SEQ ID NO: 556280 - DNA, 19 bp, Mus musculus
  siRNA target sequence for Adamts1 (NM_009621.1,2247-2265).
cagctttctggctattaga

SEQ ID NO: 556281 - DNA, 19 bp, Mus musculus
  siRNA target sequence for Adamts1 (NM_009621.1,2267-2285).
ccgctgatggtacctatat

SEQ ID NO: 556282 - DNA, 19 bp, Mus musculus
  siRNA target sequence for Adamts1 (NM_009621.1,2268-2286).
cgctgatggtacctatatt

SEQ ID NO: 556283 - DNA, 19 bp, Mus musculus
  siRNA target sequence for Adamts1 (NM_009621.1,2270-2288).
ctgatggtacctatattct

SEQ ID NO: 556284 - DNA, 19 bp, Mus musculus
  siRNA target sequence for Adamts1 (NM_009621.1,2323-2341).
gacctcacctacaaaggta

SEQ ID NO: 556285 - DNA, 19 bp, Mus musculus
  siRNA target sequence for Adamts1 (NM_009621.1,2331-2349).
ctacaaaggtactgtctta

SEQ ID NO: 556286 - DNA, 19 bp, Mus musculus
  siRNA target sequence for Adamts1 (NM_009621.1,2390-2408).
gctttagtccactcaaaga

SEQ ID NO: 556287 - DNA, 19 bp, Mus musculus
  siRNA target sequence for Adamts1 (NM_009621.1,2391-2409).
ctttagtccactcaaagaa

SEQ ID NO: 556288 - DNA, 19 bp, Mus musculus
  siRNA target sequence for Adamts1 (NM_009621.1,2417-2435).
ccatccaggttcttatggt

SEQ ID NO: 556289 - DNA, 19 bp, Mus musculus
  siRNA target sequence for Adamts1 (NM_009621.1,2418-2436).
catccaggttcttatggta

SEQ ID NO: 556290 - DNA, 19 bp, Mus musculus
  siRNA target sequence for Adamts1 (NM_009621.1,2443-2461).
gctctccgacccaaaatta

SEQ ID NO: 556291 - DNA, 19 bp, Mus musculus
  siRNA target sequence for Adamts1 (NM_009621.1,2444-2462).
ctctccgacccaaaattaa

SEQ ID NO: 556292 - DNA, 19 bp, Mus musculus
  siRNA target sequence for Adamts1 (NM_009621.1,2446-2464).
ctccgacccaaaattaaat

SEQ ID NO: 556293 - DNA, 19 bp, Mus musculus
  siRNA target sequence for Adamts1 (NM_009621.1,2449-2467).
cgacccaaaattaaattca

SEQ ID NO: 556294 - DNA, 19 bp, Mus musculus
  siRNA target sequence for Adamts1 (NM_009621.1,2499-2517).
caacgccattcccacattt

SEQ ID NO: 556295 - DNA, 19 bp, Mus musculus
  siRNA target sequence for Adamts1 (NM_009621.1,2703-2721).
gtcaccatgttccaaaact

SEQ ID NO: 556296 - DNA, 19 bp, Mus musculus
  siRNA target sequence for Adamts1 (NM_009621.1,2720-2738).
cttgcgggaagggttacaa

SEQ ID NO: 556297 - DNA, 19 bp, Mus musculus
  siRNA target sequence for Adamts1 (NM_009621.1,2818-2836).
cattacattgacttttgca

SEQ ID NO: 556298 - DNA, 19 bp, Mus musculus
  siRNA target sequence for Adamts12 (NM_175501.1,866-884).
caagcattggcaatctagt

SEQ ID NO: 556299 - DNA, 19 bp, Mus musculus
  siRNA target sequence for Adamts12 (NM_175501.1,876-894).
caatctagtccacattgtt

SEQ ID NO: 556300 - DNA, 19 bp, Mus musculus
  siRNA target sequence for Adamts12 (NM_175501.1,897-915).
ggttcggctcattctactt

SEQ ID NO: 556301 - DNA, 19 bp, Mus musculus
  siRNA target sequence for Adamts12 (NM_175501.1,903-921).
gctcattctacttgaagaa

SEQ ID NO: 556302 - DNA, 19 bp, Mus musculus
  siRNA target sequence for Adamts12 (NM_175501.1,981-999).
gtggcagaagagcatcaat

SEQ ID NO: 556303 - DNA, 19 bp, Mus musculus
  siRNA target sequence for Adamts12 (NM_175501.1,1093-1111).
ctggggctgtcccaattgt

SEQ ID NO: 556304 - DNA, 19 bp, Mus musculus
  siRNA target sequence for Adamts12 (NM_175501.1,1095-1113).
ggggctgtcccaattgtca

SEQ ID NO: 556305 - DNA, 19 bp, Mus musculus
  siRNA target sequence for Adamts12 (NM_175501.1,1126-1144).
cctcacaggagctgtaaca

SEQ ID NO: 556306 - DNA, 19 bp, Mus musculus
  siRNA target sequence for Adamts12 (NM_175501.1,1287-1305).
cgacccaactccactaaca

SEQ ID NO: 556307 - DNA, 19 bp, Mus musculus
  siRNA target sequence for Adamts12 (NM_175501.1,1297-1315).
ccactaacatggtcgaaat

SEQ ID NO: 556308 - DNA, 19 bp, Mus musculus
  siRNA target sequence for Adamts12 (NM_175501.1,1300-1318).
ctaacatggtcgaaatgca

SEQ ID NO: 556309 - DNA, 19 bp, Mus musculus
  siRNA target sequence for Adamts12 (NM_175501.1,1355-1373).
gggggttctgtcttgatga

SEQ ID NO: 556310 - DNA, 19 bp, Mus musculus
  siRNA target sequence for Adamts12 (NM_175501.1,1407-1425).
cattgctcctggagtaatt

SEQ ID NO: 556311 - DNA, 19 bp, Mus musculus
  siRNA target sequence for Adamts12 (NM_175501.1,1412-1430).
ctcctggagtaatttacga

SEQ ID NO: 556312 - DNA, 19 bp, Mus musculus
  siRNA target sequence for Adamts12 (NM_175501.1,1418-1436).
gagtaatttacgatgttca

SEQ ID NO: 556313 - DNA, 19 bp, Mus musculus
  siRNA target sequence for Adamts12 (NM_175501.1,1452-1470).
ccaatatggcccaaatgct

SEQ ID NO: 556314 - DNA, 19 bp, Mus musculus
  siRNA target sequence for Adamts12 (NM_175501.1,1459-1477).
ggcccaaatgctacattct

SEQ ID NO: 556315 - DNA, 19 bp, Mus musculus
  siRNA target sequence for Adamts12 (NM_175501.1,1996-2014).
ggcaacagcagaaatgtct

SEQ ID NO: 556316 - DNA, 19 bp, Mus musculus
  siRNA target sequence for Adamts12 (NM_175501.1,2001-2019).
cagcagaaatgtctgtatt

SEQ ID NO: 556317 - DNA, 19 bp, Mus musculus
  siRNA target sequence for Adamts12 (NM_175501.1,2003-2021).
gcagaaatgtctgtattaa

SEQ ID NO: 556318 - DNA, 19 bp, Mus musculus
  siRNA target sequence for Adamts19 (NM_175506.2,774-792).
gtggcctgatgggctttat

SEQ ID NO: 556319 - DNA, 19 bp, Mus musculus
  siRNA target sequence for Adamts19 (NM_175506.2,851-869).
ggtcacccgcaccgtttat

SEQ ID NO: 556320 - DNA, 19 bp, Mus musculus
  siRNA target sequence for Adamts19 (NM_175506.2,852-870).
gtcacccgcaccgtttata

SEQ ID NO: 556321 - DNA, 19 bp, Mus musculus
  siRNA target sequence for Adamts19 (NM_175506.2,953-971).
ggaagaccaaggtctaaaa

SEQ ID NO: 556322 - DNA, 19 bp, Mus musculus
  siRNA target sequence for Adamts19 (NM_175506.2,954-972).
gaagaccaaggtctaaaaa

SEQ ID NO: 556323 - DNA, 19 bp, Mus musculus
  siRNA target sequence for Adamts19 (NM_175506.2,998-1016).
cggtattcctacaaattat

SEQ ID NO: 556324 - DNA, 19 bp, Mus musculus
  siRNA target sequence for Adamts19 (NM_175506.2,1030-1048).
catcgagaccgtagtagtt

SEQ ID NO: 556325 - DNA, 19 bp, Mus musculus
  siRNA target sequence for Adamts19 (NM_175506.2,1049-1067).
gcagaccctgcaatggttt

SEQ ID NO: 556326 - DNA, 19 bp, Mus musculus
  siRNA target sequence for Adamts19 (NM_175506.2,1107-1125).
caatcctaaatatggtttt

SEQ ID NO: 556327 - DNA, 19 bp, Mus musculus
  siRNA target sequence for Adamts19 (NM_175506.2,1170-1188).
gtgtgctaaagctcattct

SEQ ID NO: 556328 - DNA, 19 bp, Mus musculus
  siRNA target sequence for Adamts19 (NM_175506.2,1181-1199).
ctcattctcctccatgaaa

SEQ ID NO: 556329 - DNA, 19 bp, Mus musculus
  siRNA target sequence for Adamts19 (NM_175506.2,1200-1218).
caccagcagatctgtatat

SEQ ID NO: 556330 - DNA, 19 bp, Mus musculus
  siRNA target sequence for Adamts19 (NM_175506.2,1220-1238).
gggcaccacggagagaaaa

SEQ ID NO: 556331 - DNA, 19 bp, Mus musculus
  siRNA target sequence for Adamts19 (NM_175506.2,1221-1239).
ggcaccacggagagaaaat

SEQ ID NO: 556332 - DNA, 19 bp, Mus musculus
  siRNA target sequence for Adamts19 (NM_175506.2,1241-1259).
ctggagagtttttgtaagt

SEQ ID NO: 556333 - DNA, 19 bp, Mus musculus
  siRNA target sequence for Adamts19 (NM_175506.2,1284-1302).
ggaatgatgtgcatttgga

SEQ ID NO: 556334 - DNA, 19 bp, Mus musculus
  siRNA target sequence for Adamts19 (NM_175506.2,1339-1357).
ggatgcagctattcttata

SEQ ID NO: 556335 - DNA, 19 bp, Mus musculus
  siRNA target sequence for Adamts19 (NM_175506.2,1340-1358).
gatgcagctattcttataa

SEQ ID NO: 556336 - DNA, 19 bp, Mus musculus
  siRNA target sequence for Adamts19 (NM_175506.2,1343-1361).
gcagctattcttataacaa

SEQ ID NO: 556337 - DNA, 19 bp, Mus musculus
  siRNA target sequence for Adamts19 (NM_175506.2,1403-1421).
gtgggtattgcttacttga

SEQ ID NO: 556338 - DNA, 19 bp, Mus musculus
  siRNA target sequence for Adamts19 (NM_175506.2,1405-1423).
gggtattgcttacttgaat

SEQ ID NO: 556339 - DNA, 19 bp, Mus musculus
  siRNA target sequence for Adamts19 (NM_175506.2,1441-1459).
gaggaagtgtattattgct

SEQ ID NO: 556340 - DNA, 19 bp, Mus musculus
  siRNA target sequence for Adamts19 (NM_175506.2,1449-1467).
gtattattgctgaagacaa

SEQ ID NO: 556341 - DNA, 19 bp, Mus musculus
  siRNA target sequence for Adamts19 (NM_175506.2,1471-1489).
cctgaaccttgcgtttaca

SEQ ID NO: 556342 - DNA, 19 bp, Mus musculus
  siRNA target sequence for Adamts19 (NM_175506.2,1472-1490).
ctgaaccttgcgtttacaa

SEQ ID NO: 556343 - DNA, 19 bp, Mus musculus
  siRNA target sequence for Adamts19 (NM_175506.2,1483-1501).
gtttacaatcgctcatgaa

SEQ ID NO: 556344 - DNA, 19 bp, Mus musculus
  siRNA target sequence for Adamts19 (NM_175506.2,1669-1687).
ctgcttgttgcatacagat

SEQ ID NO: 556345 - DNA, 19 bp, Mus musculus
  siRNA target sequence for Adamts19 (NM_175506.2,1793-1811).
caagagatgcagcatgtta

SEQ ID NO: 556346 - DNA, 19 bp, Mus musculus
  siRNA target sequence for Adamts19 (NM_175506.2,1796-1814).
gagatgcagcatgttatct

SEQ ID NO: 556347 - DNA, 19 bp, Mus musculus
  siRNA target sequence for Adamts19 (NM_175506.2,2046-2064).
ctgaagcaagggattgtaa

SEQ ID NO: 556348 - DNA, 19 bp, Mus musculus
  siRNA target sequence for Adamts19 (NM_175506.2,2137-2155).
gcaatgtcaggcctatagt

SEQ ID NO: 556349 - DNA, 19 bp, Mus musculus
  siRNA target sequence for Adamts19 (NM_175506.2,2144-2162).
caggcctatagtgttagaa

SEQ ID NO: 556350 - DNA, 19 bp, Mus musculus
  siRNA target sequence for Adamts19 (NM_175506.2,2276-2294).
gtgatggatggaacttctt

SEQ ID NO: 556351 - DNA, 19 bp, Mus musculus
  siRNA target sequence for Adamts19 (NM_175506.2,2297-2315).
ggatatcagggactagata

SEQ ID NO: 556352 - DNA, 19 bp, Mus musculus
  siRNA target sequence for Adamts19 (NM_175506.2,2298-2316).
gatatcagggactagatat

SEQ ID NO: 556353 - DNA, 19 bp, Mus musculus
  siRNA target sequence for Adamts19 (NM_175506.2,3369-3387).
gcatgcagtctcgtgttat

SEQ ID NO: 556354 - DNA, 19 bp, Mus musculus
  siRNA target sequence for Adamts19 (NM_175506.2,3383-3401).
gttatccagtgcatgcata

SEQ ID NO: 556355 - DNA, 19 bp, Mus musculus
  siRNA target sequence for Adamts19 (NM_175506.2,3475-3493).
gccctgtaatgagaaaatt

SEQ ID NO: 556356 - DNA, 19 bp, Mus musculus
  siRNA target sequence for Adamts19 (NM_175506.2,3643-3661).
cttctatgcccaaaagcta

SEQ ID NO: 556357 - DNA, 19 bp, Mus musculus
  siRNA target sequence for Adamts4 (NM_172845.1,681-699).
gggagatgttgctactaga

SEQ ID NO: 556358 - DNA, 19 bp, Mus musculus
  siRNA target sequence for Adamts4 (NM_172845.1,721-739).
gcaggtagagggtttgact

SEQ ID NO: 556359 - DNA, 19 bp, Mus musculus
  siRNA target sequence for Adamts4 (NM_172845.1,847-865).
ggacgggggagccctatta

SEQ ID NO: 556360 - DNA, 19 bp, Mus musculus
  siRNA target sequence for Adamts4 (NM_172845.1,1158-1176).
ctgccgctaaagcctttaa

SEQ ID NO: 556361 - DNA, 19 bp, Mus musculus
  siRNA target sequence for Adamts4 (NM_172845.1,1161-1179).
ccgctaaagcctttaaaca

SEQ ID NO: 556362 - DNA, 19 bp, Mus musculus
  siRNA target sequence for Adamts4 (NM_172845.1,1329-1347).
cagatcctgaccactttga

SEQ ID NO: 556363 - DNA, 19 bp, Mus musculus
  siRNA target sequence for Adamts4 (NM_172845.1,1440-1458).
ctaggagctgtgctattgt

SEQ ID NO: 556364 - DNA, 19 bp, Mus musculus
  siRNA target sequence for Adamts4 (NM_172845.1,1540-1558).
gccatgcactaacttgaat

SEQ ID NO: 556365 - DNA, 19 bp, Mus musculus
  siRNA target sequence for Adamts4 (NM_172845.1,1632-1650).
cctgcagtgcccgattcat

SEQ ID NO: 556366 - DNA, 19 bp, Mus musculus
  siRNA target sequence for Adamts4 (NM_172845.1,1657-1675).
cttcctggacaatggttat

SEQ ID NO: 556367 - DNA, 19 bp, Mus musculus
  siRNA target sequence for Adamts4 (NM_172845.1,1677-1695).
ggcactgcctcttagacaa

SEQ ID NO: 556368 - DNA, 19 bp, Mus musculus
  siRNA target sequence for Adamts4 (NM_172845.1,1678-1696).
gcactgcctcttagacaaa

SEQ ID NO: 556369 - DNA, 19 bp, Mus musculus
  siRNA target sequence for Adamts4 (NM_172845.1,1711-1729).
ccatctaccagcgactttt

SEQ ID NO: 556370 - DNA, 19 bp, Mus musculus
  siRNA target sequence for Adamts4 (NM_172845.1,2071-2089).
ccggaacggtggcaagtat

SEQ ID NO: 556371 - DNA, 19 bp, Mus musculus
  siRNA target sequence for Adamts4 (NM_172845.1,2072-2090).
cggaacggtggcaagtatt

SEQ ID NO: 556372 - DNA, 19 bp, Mus musculus
  siRNA target sequence for Adamts4 (NM_172845.1,2074-2092).
gaacggtggcaagtattgt

SEQ ID NO: 556373 - DNA, 19 bp, Mus musculus
  siRNA target sequence for Adamts4 (NM_172845.1,2192-2210).
cgaaccgacctcttcaaga

SEQ ID NO: 556374 - DNA, 19 bp, Mus musculus
  siRNA target sequence for Adamts4 (NM_172845.1,2261-2279).
cgagaccaatgcaaactca

SEQ ID NO: 556375 - DNA, 19 bp, Mus musculus
  siRNA target sequence for Adamts4 (NM_172845.1,2297-2315).
ctgggctactactacgtat

SEQ ID NO: 556376 - DNA, 19 bp, Mus musculus
  siRNA target sequence for Adamts4 (NM_172845.1,2301-2319).
gctactactacgtattgga

SEQ ID NO: 556377 - DNA, 19 bp, Mus musculus
  siRNA target sequence for Adamts4 (NM_172845.1,2476-2494).
gcagtcgggctccttcaaa

SEQ ID NO: 556378 - DNA, 19 bp, Mus musculus
  siRNA target sequence for Adamts4 (NM_172845.1,2479-2497).
gtcgggctccttcaaaaaa

SEQ ID NO: 556379 - DNA, 19 bp, Mus musculus
  siRNA target sequence for Adamts4 (NM_172845.1,2481-2499).
cgggctccttcaaaaaatt

SEQ ID NO: 556380 - DNA, 19 bp, Mus musculus
  siRNA target sequence for Adamts4 (NM_172845.1,2624-2642).
gccctcaatggtgaataca

SEQ ID NO: 556381 - DNA, 19 bp, Mus musculus
  siRNA target sequence for Adamts4 (NM_172845.1,2776-2794).
ggctggcaacccacagaat

SEQ ID NO: 556382 - DNA, 19 bp, Mus musculus
  siRNA target sequence for Adamts4 (NM_172845.1,2795-2813).
gcacgtctgcggtacagtt

SEQ ID NO: 556383 - DNA, 19 bp, Mus musculus
  siRNA target sequence for Adamts4 (NM_172845.1,2796-2814).
cacgtctgcggtacagttt

SEQ ID NO: 556384 - DNA, 19 bp, Mus musculus
  siRNA target sequence for Adamts5 (NM_011782.1,103-121).
cggcacctgcccaggataa

SEQ ID NO: 556385 - DNA, 19 bp, Mus musculus
  siRNA target sequence for Adamts5 (NM_011782.1,108-126).
cctgcccaggataaaacca

SEQ ID NO: 556386 - DNA, 19 bp, Mus musculus
  siRNA target sequence for Adamts5 (NM_011782.1,188-206).
ggagcgaggccatttacaa

SEQ ID NO: 556387 - DNA, 19 bp, Mus musculus
  siRNA target sequence for Adamts5 (NM_011782.1,397-415).
gccaccggggtcactgttt

SEQ ID NO: 556388 - DNA, 19 bp, Mus musculus
  siRNA target sequence for Adamts5 (NM_011782.1,473-491).
gggtctcgatggcttcttt

SEQ ID NO: 556389 - DNA, 19 bp, Mus musculus
  siRNA target sequence for Adamts5 (NM_011782.1,501-519).
catgcgcgctacactctaa

SEQ ID NO: 556390 - DNA, 19 bp, Mus musculus
  siRNA target sequence for Adamts5 (NM_011782.1,535-553).
ggtcctgggcagagtatga

SEQ ID NO: 556391 - DNA, 19 bp, Mus musculus
  siRNA target sequence for Adamts5 (NM_011782.1,541-559).
gggcagagtatgaacgaat

SEQ ID NO: 556392 - DNA, 19 bp, Mus musculus
  siRNA target sequence for Adamts5 (NM_011782.1,542-560).
ggcagagtatgaacgaatt

SEQ ID NO: 556393 - DNA, 19 bp, Mus musculus
  siRNA target sequence for Adamts5 (NM_011782.1,543-561).
gcagagtatgaacgaattt

SEQ ID NO: 556394 - DNA, 19 bp, Mus musculus
  siRNA target sequence for Adamts5 (NM_011782.1,544-562).
cagagtatgaacgaattta

SEQ ID NO: 556395 - DNA, 19 bp, Mus musculus
  siRNA target sequence for Adamts5 (NM_011782.1,577-595).
cccgcatcctgcatgtcta

SEQ ID NO: 556396 - DNA, 19 bp, Mus musculus
  siRNA target sequence for Adamts5 (NM_011782.1,681-699).
ccctcggtgcacagtagat

SEQ ID NO: 556397 - DNA, 19 bp, Mus musculus
  siRNA target sequence for Adamts5 (NM_011782.1,683-701).
ctcggtgcacagtagatct

SEQ ID NO: 556398 - DNA, 19 bp, Mus musculus
  siRNA target sequence for Adamts5 (NM_011782.1,848-866).
gtccatggccaggatgtat

SEQ ID NO: 556399 - DNA, 19 bp, Mus musculus
  siRNA target sequence for Adamts5 (NM_011782.1,1018-1036).
cggccacgaccctcaagaa

SEQ ID NO: 556400 - DNA, 19 bp, Mus musculus
  siRNA target sequence for Adamts5 (NM_011782.1,1020-1038).
gccacgaccctcaagaact

SEQ ID NO: 556401 - DNA, 19 bp, Mus musculus
  siRNA target sequence for Adamts5 (NM_011782.1,1022-1040).
cacgaccctcaagaacttt

SEQ ID NO: 556402 - DNA, 19 bp, Mus musculus
  siRNA target sequence for Adamts5 (NM_011782.1,1027-1045).
ccctcaagaacttttgcaa

SEQ ID NO: 556403 - DNA, 19 bp, Mus musculus
  siRNA target sequence for Adamts5 (NM_011782.1,1028-1046).
cctcaagaacttttgcaaa

SEQ ID NO: 556404 - DNA, 19 bp, Mus musculus
  siRNA target sequence for Adamts5 (NM_011782.1,1122-1140).
gatttatgtgggcatcatt

SEQ ID NO: 556405 - DNA, 19 bp, Mus musculus
  siRNA target sequence for Adamts5 (NM_011782.1,1164-1182).
gacgttgggaccatatgtt

SEQ ID NO: 556406 - DNA, 19 bp, Mus musculus
  siRNA target sequence for Adamts5 (NM_011782.1,1166-1184).
cgttgggaccatatgttct

SEQ ID NO: 556407 - DNA, 19 bp, Mus musculus
  siRNA target sequence for Adamts5 (NM_011782.1,1190-1208).
gcgcagctgtgcagtgatt
